United States Patent Application Publication US 2022/0090207 A1 - sequence listing, part 9

SEQ ID NO: 113004 - DNA, 30 bp, Homo sapiens
  chr6:26157212-26157242
  hyper
gctaaaccaaagaccgccaagcccaaggca

SEQ ID NO: 113005 - DNA, 284 bp, Homo sapiens
  chr6:26171885-26172169
  hyper
ctgatgctgctggtccggagaccactttggagagttttactttaaaggaaatgaaactgccctaaaatgctaatactaaatagccacacaaagccggaaaaaagcaaagaatttcaaaccgaagatgagaggtcctgaaaaataacagcggtcatcctactcccggtgcggctatgcggccatgaaaaggagtcttggggccggtcgtgcccctccacgcaggctccctcatagggtcatcccatcaaccctcgccaaaaacgccggccccctcatagggccgt

SEQ ID NO: 113006 - DNA, 139 bp, Homo sapiens; identical to SEQ ID NO: 4670
  chr6:26172268-26172407
  hyper

SEQ ID NO: 113007 - DNA, 402 bp, Homo sapiens
  chr6:26172706-26173108
  hyper
cgtctcaaaacaaaaaaaacggaggatcgaaaattttgaagactgagagcaaggcaacaatcttcccttgacctttttgctcctctcacaagggtttttcagacggctgaaaccaacgaaaagagtgaggaagcaggcagaaaatttcagctttagtctctcagcatcctcctgctttcttctcggggagctggcacttcccccttctctagtagctgtaaatacgcctcccaactccaaggagacctttcttgcatctcccttactgttctcacgcctgtagggctcttcgtgtgaggattcagtgtatgtatgtatgtatatgaatgtgtgcgaataattatttcctaattgagtttttttttaaaaaaatcatcttccggtacacgcagtgccgtactc

SEQ ID NO: 113008 - DNA, 198 bp, Homo sapiens
  chr6:26183883-26184081
  hyper
tgcatgcagacttcacgacaaaataacgaatcagagttggagaaactaaatcttcatttacataacattgtctacaaattccgaggatcaggagatgtagatttcattttctttcctaactgcagaacagcaaagatagcatgcctgagccagcgaaatccgctcccgccccgaagaagggctccaagaaggccgtga

SEQ ID NO: 113009 - DNA, 18 bp, Homo sapiens
  chr6:26184380-26184398
  hyper
accaagtacaccagctcc

SEQ ID NO: 113010 - DNA, 30 bp, Homo sapiens
  chr6:26184932-26184962
  hyper
gtgcaaccacactcgcgctcgcacacaaac

SEQ ID NO: 113011 - DNA, 753 bp, Homo sapiens; identical to SEQ ID NO: 4672
  chr6:26188698-26189451
  hyper

SEQ ID NO: 113012 - DNA, 543 bp, Homo sapiens
  chr6:26197325-26197868
  hyper
ctcgcgcagagccaccgtgccgggccggtaacggtggggcttcttcacgccgccggtggctggagcgctctttcgagcagccttggtggccagctgcttgcgtggcgctttcccacccgtggacttgcgagcagtctgcttggtacgagccattgcgaacttctaaaccctgctaaatgacgaaaaaacgaaagtctagcctttcgtacccgtatatataaagacacccctgttctgattggacaaggcagcctttcccctgcagctcgattggtggagacgcccactccctgacagaacatctcctgcatgtagaccaaatattaaaactttcctccgtccatctttaactgctggtgttttcaaccctttcccctctgtgccatgtttctagcttttatttaaaacgtactttggttttccttggcaaaattgtgtctagctactaggatgacgtgtcttaatttttttttaaatgttggcgctgaaactggctttgatcaacgttttaaaaagacgcgcgctagttgtgattggccaagt

SEQ ID NO: 113013 - DNA, 145 bp, Homo sapiens; identical to SEQ ID NO: 42712
  chr6:26198467-26198612
  hyper

SEQ ID NO: 113014 - DNA, 1046 bp, Homo sapiens; identical to SEQ ID NO: 42713
  chr6:26198851-26199897
  hyper

SEQ ID NO: 113015 - DNA, 24 bp, Homo sapiens
  chr6:26200171-26200195
  hyper
aacgtcttcatacccaatcccaaa

SEQ ID NO: 113016 - DNA, 1471 bp, Homo sapiens; identical to SEQ ID NO: 42715
  chr6:26204317-26205788
  hyper

SEQ ID NO: 113017 - DNA, 71 bp, Homo sapiens
  chr6:26205991-26206062
  hyper
catccatcatgattgcgtccttatccctccctgatttcctgttttctcgcccttctcgctacataagcccc

SEQ ID NO: 113018 - DNA, 30 bp, Homo sapiens; identical to SEQ ID NO: 4681
  chr6:26206496-26206526
  hyper

SEQ ID NO: 113019 - DNA, 276 bp, Homo sapiens; identical to SEQ ID NO: 42718
  chr6:26215855-26216131
  hyper

SEQ ID NO: 113020 - DNA, 301 bp, Homo sapiens; identical to SEQ ID NO: 4682
  chr6:26216370-26216671
  hyper

SEQ ID NO: 113021 - DNA, 1115 bp, Homo sapiens; identical to SEQ ID NO: 42720
  chr6:26216790-26217905
  hyper

SEQ ID NO: 113022 - DNA, 507 bp, Homo sapiens
  chr6:26223779-26224286
  hyper
tgagattgaaacgcacgacaatgtgtaatttcagtcaagacttgcccacgagtcctaagataattcaaatttgcaaaatagacactaacttgaaaggtgcaattgtatcaatcctgtggttagcagaattttgatgaatgccctaaaatagggcaggtttaacagaattcagggaatgagcaggaatgcacaaagcatcctttgtctcctctccactccagcttgcagacatccgcgggcatttgcgggcagtgataaatttggtttagccgtttcccctccctggaggacgggggctccagcatattcatgatgtcaatcgccttggactacatgccagcgtcattgcgaacctgctacactttacaaaatagctttccaatgagaaagaaaacctactgggaaagaaaaacaaaaagaaactagaccttgcaacgggcacgcacgcgcactatccctctctgaaatatttatagtacgcttacacaaacgcgaacttgtaaatca

SEQ ID NO: 113023 - DNA, 164 bp, Homo sapiens
  chr6:26224587-26224751
  hyper
acctcagctctctcccgcagggatccggagaaactgcgccattgttgtcttacagagaaacaaccttctaacactctcttcgccgccatctttttcaagattttaaattgaaaatactttttttgacggctcttgccattatgtctggacgttttaatttcaac

SEQ ID NO: 113024 - DNA, 1629 bp, Homo sapiens; identical to SEQ ID NO: 42721
  chr6:26233854-26235483
  hyper

SEQ ID NO: 113025 - DNA, 761 bp, Homo sapiens
  chr6:26240633-26241394
  hyper
gttgttgtttgtcttcgatcatgtctggtagaggcaaaggtggtaaaggtttaggaaagggaggcgccaagcgccatcgcaaagtgctgcgtgacaacatacagggcatcacgaagcccgccatccgtcgcttggcccgacgcggcggcgtgaaacgcatttcgggcctcatttatgaggagacccgcggtgttcttaaggtgttcctggagaatgtgatacgggacgccgtaacctacacggagcacgccaagcgtaagacagtcactgcaatggatgttgtctacgcgctcaagcgccagggacgcactctgtacggctttggtggctgagcctcaccccggctttttatttaacagctcacccataaaaggcccttttcagggccacctccttcgtcacacgaagggctgtaactgatgacgacttgggtttcgttttgtaaatttgggattctaactgagttaaaccgagccgtttttagcgatcttcctaagatggcggatgtgctaaggagaaagggaaggcgaaacattagaaacttgttcaggtatttcgatcgcaaacattcacaggaaaagatggtggaaatggtttgggaataccagcagccttttatgacgtatgtgatgtgttttattcccacgtttctgaaatttactcctatgttaggtggctgggacttaactacactagcattacatgtttagtttttgagatggagttgctcttgtccaggctgtagtgcaatgacgcaatct

SEQ ID NO: 113026 - DNA, 212 bp, Homo sapiens; identical to SEQ ID NO: 4688
  chr6:26249926-26250138
  hyper

SEQ ID NO: 113027 - DNA, 992 bp, Homo sapiens; identical to SEQ ID NO: 4689
  chr6:26250197-26251189
  hyper

SEQ ID NO: 113028 - DNA, 454 bp, Homo sapiens; identical to SEQ ID NO: 42725
  chr6:26251500-26251954
  hyper

SEQ ID NO: 113029 - DNA, 25 bp, Homo sapiens
  chr6:26252073-26252098
  hyper
tttgtcaacgatatcttcgagcgca

SEQ ID NO: 113030 - DNA, 54 bp, Homo sapiens; identical to SEQ ID NO: 4692
  chr6:26252140-26252194
  hyper

SEQ ID NO: 113031 - DNA, 33 bp, Homo sapiens; identical to SEQ ID NO: 4693
  chr6:26252253-26252286
  hyper

SEQ ID NO: 113032 - DNA, 2062 bp, Homo sapiens
  chr6:26271211-26273273
  hyper
tccccacgaatgcggcgagcgagctgaatgtccttgggcatgatagtcactcgcttagcatggatggcacacaggttggtatcctcaaagagccccaccaagtaggcctcgcaggcctcctgcagggccatcaccgcggaactctgaaagcgcagatctgtcttgaagtcctgagcgatttctcgcaccaggcgttggaaaggcaacttgcggatcagcagctcagtcgacttctgatagcggcgaatctcgcgcagagccacggtgccgggacggtagcgatgaggtttcttcacgccgccggtggccggcgcgcttttccgagccgccttagtggccagctgcttgcgcggcgctttgccaccggtggacttgcgtgcagtctgcttggtgcgggccatctcagactacctgaaagaaaaactcagccacttggcagagtggaaactgcccttatatatactcagaaacattctaattggccttgttgattttcaaaagacccgcgcaacaaaaccattggctgaagagtccaacgatgtgattggtgaattactggaaaatctgattggatgaatcacttcatttttgaatcctctcttctcggttagtctgcgatccaagaacgttaacttcttaaagttctaattctgcgcttctcaagctgtagtccgtaaacgactactttaagacttggaagacgctaattctcattcagtagatgtgttgtggggccagattcggaggaccacgttttgagaagtttatcttgtgccgttttcttgagtcacctggactgctgctagctggaaacctttgaccattataaggcaggattcctgggtgatgtacctgggaaatcacgagccaagaagtcaccgacatacaacagtgagcaacaaatgttaactgaattctattttgtcccaaatggtgttttgcttcggttgagaatttttaaggcacaggctaattttaggttttccaacgactcttatcatttacttttcgttgggtcctattgatgatattccaggataccacccccactagcctcttctgcaggataacttgaacactgcagtggccctgtccatctaaactttacaaggttttgtaaacgttactgaacttgcttcttcccgactacattaaagcacttacttgagatattaaacattttctcattagtcctgtttgcctagtcagtcacttgtatagacagggcaacagcacggcctgaatattgggcaggacaccgccctgcgcgatagtaactttgcccaacagcttgttgagcttctcgtcgtggatggcgagctgcaggcgtcggggggtgacgcgggtcttcttgtctcgggccgcgttgcccgccaactccaggatcttggcggtcaggtactccagcaccgcctccaggtacaccggcgcaccggcccggacccgcttggcgtagttgcccttgcggaggaggcggtgcactcggcccacagaaaactggagaccagccctggaagagtgcgttttagccttggcgcgagctttgctgccctgcattccacatccagacgcagtgaagtatttaaatacttgtttagaagaaggaaagtgattgattctagtaaaacgcaagagctaaactcttataatctatattcggcaaagtagactgtgctatctcctgaacacagatttcagccaatcgaaaagcaggtgtttaaaaaaatttaaaaaaaaaaaaaaaaaaaaaaccacttctgacttacatacttatagttgaaaggtcaaattatgcaaggttgagcttctgggagagccgatgagatttaggagttcagaaatggcctatcatatattcagacactaaaagaaccaatgagaaaccgaaactcagccagcctcatttgcatatacacgaggtaaataatgagggcgtttgggctcaccagcattttcctgtggtcatttgacggtatcacttcggctgcgaacatgcctgaaccagctaagtcagctcccgccccgaagaagggctccaagaaggcggtgaccaaggcacaga

SEQ ID NO: 113033 - DNA, 239 bp, Homo sapiens; identical to SEQ ID NO: 4697
  chr6:26273514-26273753
  hyper

SEQ ID NO: 113034 - DNA, 30 bp, Homo sapiens; identical to SEQ ID NO: 42733
  chr6:26284923-26284953
  hyper

SEQ ID NO: 113035 - DNA, 30 bp, Homo sapiens
  chr6:26285217-26285247
  hyper
aaatcctaaacatgcgagattaagcacgag

SEQ ID NO: 113036 - DNA, 30 bp, Homo sapiens; identical to SEQ ID NO: 42734
  chr6:26286075-26286105
  hyper

SEQ ID NO: 113037 - DNA, 226 bp, Homo sapiens; identical to SEQ ID NO: 42735
  chr6:26286644-26286870
  hyper

SEQ ID NO: 113038 - DNA, 30 bp, Homo sapiens
  chr6:26312832-26312862
  hyper
caggattcgaacctgcgcggggagacccca

SEQ ID NO: 113039 - DNA, 754 bp, Homo sapiens
  chr6:26313148-26313902
  hyper
tggtctccaaacctacgaaactggctgaaagctctccacacctaattagtaggattacagatattgaagcctacaaatgcgcatttccaccaggataccttgtggattcttacacgggtcaggtccgctgacgtttagcacgcctactttaaaacctcttttctgtagggtcctagtcttcaagtaaaatatatgcggccatatagcagaggatggtttcgatccatcgacctctgggttatgggcccagcacgcttccgctgcgccactctgctgtctcgacagtccgctccgccactctgctgtttcaacattactcttgtcaagtatgtattagaggctacaattttcggcatcttcctaattttaaatgatttgttgtcgtttgccaaattatcctggagaatgagaagtgcacactggccatccatatggggctgcacgccacttccaaacaccagcggtttagaattcttcctcgataaattcgaatcagctgaggttgaagttctctaaaacggaagcatgtttcgagttatgggaaaacaaagtgcaggctaattggcataatttataaaggtgaaattataaatgcttgggcaaatttcagccattcctggataccggagggagtcgttattacttccaaacattttttacttgagattttcatcgaaaatgttcacaggaaaaaaaaaattacagttgcagcgaggaggcaacagaacctagaactccgcgcggcaggtgagaa

SEQ ID NO: 113040 - DNA, 19 bp, Homo sapiens
  chr6:26322104-26322123
  hyper
taagcacgttctccacgta

SEQ ID NO: 113041 - DNA, 121 bp, Homo sapiens
  chr6:26322182-26322303
  hyper
cacaggttgttgtcttcaaaaaggccaaccagataggcctcacttgcaaagcaactatagctgctctctggaagcgcagatctgttttaaaagtcctgagcaatttctcgcaccagacgct

SEQ ID NO: 113042 - DNA, 301 bp, Homo sapiens; identical to SEQ ID NO: 42737
  chr6:26322362-26322663
  hyper

SEQ ID NO: 113043 - DNA, 79 bp, Homo sapiens; identical to SEQ ID NO: 4699
  chr6:26322842-26322921
  hyper

SEQ ID NO: 113044 - DNA, 189 bp, Homo sapiens; identical to SEQ ID NO: 4700
  chr6:26327800-26327989
  hyper

SEQ ID NO: 113045 - DNA, 176 bp, Homo sapiens; identical to SEQ ID NO: 4701
  chr6:26328288-26328464
  hyper

SEQ ID NO: 113046 - DNA, 166 bp, Homo sapiens; identical to SEQ ID NO: 42741
  chr6:26330500-26330666
  hyper

SEQ ID NO: 113047 - DNA, 935 bp, Homo sapiens; identical to SEQ ID NO: 42742
  chr6:26331612-26332547
  hyper

SEQ ID NO: 113048 - DNA, 119 bp, Homo sapiens; identical to SEQ ID NO: 4704
  chr6:26383467-26383586
  hyper

SEQ ID NO: 113049 - DNA, 30 bp, Homo sapiens
  chr6:26421583-26421613
  hyper
ggttcactcacacccggccaatcctggact

SEQ ID NO: 113050 - DNA, 142 bp, Homo sapiens
  chr6:26458198-26458340
  hyper
atctccaaacatggcgacctaggagaaggggaagaacaattttttctcctcttttgggaaggtttgtgtctagtagtgcctgtgcccctgggcagattggagagaagagggacgactggagaatcgtcgagaaccagcggag

SEQ ID NO: 113051 - DNA, 51 bp, Homo sapiens
  chr6:26501789-26501840
  hyper
ccgtctgatcccgctcgtttttcggcagctccctttgacgtgattggaccc

SEQ ID NO: 113052 - DNA, 291 bp, Homo sapiens; identical to SEQ ID NO: 4707
  chr6:26501949-26502240
  hyper

SEQ ID NO: 113053 - DNA, 143 bp, Homo sapiens; identical to SEQ ID NO: 42747
  chr6:26521257-26521400
  hyper

SEQ ID NO: 113054 - DNA, 81 bp, Homo sapiens; identical to SEQ ID NO: 42748
  chr6:26521681-26521762
  hyper

SEQ ID NO: 113055 - DNA, 285 bp, Homo sapiens
  chr6:26522004-26522289
  hyper
caggccctccggccccgggtcggcgggtgagctagggggcgccccgggacaggccgcgccctctgccctgcagataccggaggcctctgctgtggctgcccactggctgggcccaggccttgaagcggtggcgaacgtctcttccctaccctacctcggtgactgatggcggcggcggcctctcccagtccggaccctgccggccgtcgggtctcccggcccaagcctgccgggcctggacgaaacccccgccgagcagcctggacgcagcgcctttgggtggcg

SEQ ID NO: 113056 - DNA, 30 bp, Homo sapiens
  chr6:26522551-26522581
  hyper
ttagcggcgatcgggcggttggtctccgta

SEQ ID NO: 113057 - DNA, 30 bp, Homo sapiens
  chr6:26522901-26522931
  hyper
gacggcctctagaagcgatacgttcacgtt

SEQ ID NO: 113058 - DNA, 30 bp, Homo sapiens
  chr6:26533452-26533482
  hyper
cccccgccccggggcgaacaggagagtcct

SEQ ID NO: 113059 - DNA, 30 bp, Homo sapiens
  chr6:26537937-26537967
  hyper
tctgccactgaccacgtggtaacgccaact

SEQ ID NO: 113060 - DNA, 30 bp, Homo sapiens
  chr6:26538999-26539029
  hyper
cggcgttctaggggcgttctaaaagaagga

SEQ ID NO: 113061 - DNA, 297 bp, Homo sapiens; identical to SEQ ID NO: 42750
  chr6:26550761-26551058
  hyper

SEQ ID NO: 113062 - DNA, 53 bp, Homo sapiens; identical to SEQ ID NO: 4710
  chr6:26551083-26551136
  hyper

SEQ ID NO: 113063 - DNA, 47 bp, Homo sapiens
  chr6:26555171-26555218
  hyper
agcgcttgtcaaaaacgaaacttactgggcctcgcctccagagactt

SEQ ID NO: 113064 - DNA, 79 bp, Homo sapiens
  chr6:26555481-26555560
  hyper
taataaatgctcaggcggctcgttggtctaggggtatgattctcgcttagggtgcgagaggtcccgggttcaaatcccg

SEQ ID NO: 113065 - DNA, 30 bp, Homo sapiens
  chr6:26572302-26572332
  hyper
ctcagcatgacttccgcccctcagcgccat

SEQ ID NO: 113066 - DNA, 653 bp, Homo sapiens; identical to SEQ ID NO: 42753
  chr6:26577244-26577897
  hyper

SEQ ID NO: 113067 - DNA, 385 bp, Homo sapiens
  chr6:26987781-26988166
  hyper
gaaccagcgcagcagcgggacgctagcccgcccacacggcggccacttgaaggtcctccagggaacacctgaggcagtgggagcgtctgccctttcctaagtctccttggaaagaagtattcgctttcgtttccgcaaacaaagcatgctccgcgctttcaggaccggtggctcccgtggagaccgcagcggaacccagtccgccttcgcacgcgtccgggggagaagcggccccaggactaagggcgcgcgcccgaggaaccggtgctgtgacgaccagagcaaacacgccggatgttcctgtgtaggctgtgtaaggagtgaccggaagtagaaactgggtgctccagtggcgcaatcggttagcgcgcggtacttatatggc

SEQ ID NO: 113068 - DNA, 424 bp, Homo sapiens; identical to SEQ ID NO: 42755
  chr6:27059532-27059956
  hyper

SEQ ID NO: 113069 - DNA, 619 bp, Homo sapiens; identical to SEQ ID NO: 4715
  chr6:27064586-27065205
  hyper

SEQ ID NO: 113070 - DNA, 168 bp, Homo sapiens; identical to SEQ ID NO: 4716
  chr6:27094881-27095049
  hyper

SEQ ID NO: 113071 - DNA, 35 bp, Homo sapiens; identical to SEQ ID NO: 4717
  chr6:27095107-27095142
  hyper

SEQ ID NO: 113072 - DNA, 397 bp, Homo sapiens
  chr6:27099524-27099921
  hyper
tccttctcaaaaaaaaaaaaactgattatgttgccataaagggtccctttaaaaaaaaaaacgctctatccaacgaaaactaattagaaataaatctccttcccgaaagcgataaaatactaaagaatgagaaactgacagtttactgagtttgtaaggaaggccaaataaaggcggggtttggattcctttggcgcacccaagccgaccgtggacttcctggatacaacaaccaatcaggatgcagaggaagggcgggcgttgcccgggcaaattcaaactgacaaccgctgcaacttggcactgttccaaatcactaaccgacgggggaccgacgagtattttaattggtttctaacgtattttaattggtttcgaacttataatagaaaatttc

SEQ ID NO: 113073 - DNA, 44 bp, Homo sapiens; identical to SEQ ID NO: 4719
  chr6:27100141-27100185
  hyper

SEQ ID NO: 113074 - DNA, 1003 bp, Homo sapiens; identical to SEQ ID NO: 42761
  chr6:27100304-27101307
  hyper

SEQ ID NO: 113075 - DNA, 119 bp, Homo sapiens
  chr6:27101538-27101657
  hyper
tccacagagcaccagtggcttcgtgagttcttgaagcactttggcccaaaagagttatcgcccgggctagaatttagcagacagctgttccacgcgggccagggcggcatgaagaagtc

SEQ ID NO: 113076 - DNA, 30 bp, Homo sapiens; identical to SEQ ID NO: 42763
  chr6:27107238-27107268
  hyper

SEQ ID NO: 113077 - DNA, 30 bp, Homo sapiens
  chr6:27114117-27114147
  hyper
tacagctctaatatcgataatttaagtggc

SEQ ID NO: 113078 - DNA, 246 bp, Homo sapiens; identical to SEQ ID NO: 42764
  chr6:27125325-27125571
  hyper

SEQ ID NO: 113079 - DNA, 246 bp, Homo sapiens; identical to SEQ ID NO: 42765
  chr6:27125797-27126043
  hyper

SEQ ID NO: 113080 - DNA, 30 bp, Homo sapiens
  chr6:27145352-27145382
  hyper
cagctccaagcttgcgatcgcggccagttc

SEQ ID NO: 113081 - DNA, 419 bp, Homo sapiens
  chr6:27173632-27174051
  hyper
cgtggcccggttcctttctcttacactcttccaaggaccccttttagacctagaggaaaccccgcagaagtgacagggagagggggaaagctcttttacagtggcgaaaccacgtggctgcgagagcttctcagggagagctcctgttttcaaagtctggcaaatttatcagtttgatttttcttaaacatttatatttttatggagtagaaaatctaccaaacgagtaaagaatgtttccgcctggtttcaaaccggggacctttcgcgtgtgaggcgaacgtgataaccactccactacggaaacaactgtgggaaagggttacccacatcccccccgcccccatccccaccccgccgcttaactaagagggctttgcctgaagggcctggactgccttatacgtctgtttagaaaa

SEQ ID NO: 113082 - DNA, 44 bp, Homo sapiens
  chr6:27205310-27205354
  hyper
gactgcggcaaaatcggagagagaaggtgagaaccctcgtggcc

SEQ ID NO: 113083 - DNA, 35 bp, Homo sapiens; identical to SEQ ID NO: 42768
  chr6:27205801-27205836
  hyper

SEQ ID NO: 113084 - DNA, 219 bp, Homo sapiens
  chr6:27205913-27206132
  hyper
cggcatgaggaatccgctccataatggaaggaagaaaatctccggcagctatgcctcgcgggttcataaggactggagagttactccttctctctggccccctcaaaacgcccggtggtatgtctgttgctccactacgcgttattataattaactgcttgtgttactctttgtgctgtcttgctcttcattctcctggtacctcgggtgcccgcacag

SEQ ID NO: 113085 - DNA, 32 bp, Homo sapiens
  chr6:27206485-27206517
  hyper
ctcttcctgtccgggcgcggctacggttcctg

SEQ ID NO: 113086 - DNA, 1242 bp, Homo sapiens
  chr6:27218585-27219827
  hyper
gtcctgcgactcctccgggtgggctggggggagggaactcggactccagggccccagtctcagataataggaataccctcccaccacgcccctaccttcctcccgcgcccaaagaattttgcacaagctgtcctcacaagagcccgagattacacagcgagtaagtgacacagaggcagaaagatatgcgattccaacccctcagcccgcaggctgacggcgtctcctcccttagttcccccatctcattttcgcgtcggtcgcctcctccgccccggtgcgggccgtgctggatttctccgagtataatgacgtaaggatggcgggcagcaggtgcgggacggggaggggtcccagcgggcggagtcccttgacacttccggataccttcctctgcggtccgcccacaggtggtatcccgaagcctaatgagcaccgcgatcggcgggtccctggaggtaggaggtggggcctagtccgagggggactgggagggaaaagaggcctcggatgccagggaagaggaggccagagaagggcgaaacctgcaacgtggcggggtctaaggaaggtcggagctcgggggaatacgcaggttttggaagaaggcgggagctgacgaagaggaggggcaccaggaaaagaggcgctccccagagagggcggggtttgggcagggacaatcctatccggaggtgaggctcaaggtggggcggggccacaatggaggacggggcctgcagggaagacccgagaaggagggctgcgaggcaggggattgggggcgggggcctgggggcgggggcctgggccaagagctaggtctgcaccctctgagtcccgctaggggaaagtggggaacccaaggaggacgcaggtcctgggtagggaaagccgaggcccagcctaagtcttggcggacatcgcctcttgcttcccacagtgccgggcggcggtgtccgtcgccttcgctgaagtggagcggcggctgcgctcgggtggggcggctcaagcagcattgcggacggagctgagcgcttgcgggcccctgggccgcgctgaaaaccaggcggagctgttgggggcgctgcaggcactggtgggaggtgtagtgcagtatgatgggcagacgggagcgccgctaagcgtgcgacagctctgcggacttctcctcgggggcgggggcaaccgcagccactccacgccctactgcgggcttcgtcgggcggtgcaggtgagcac

SEQ ID NO: 113087 - DNA, 6 bp, Homo sapiens
  chr6:27228180-27228186
  hyper
cacctg

SEQ ID NO: 113088 - DNA, 88 bp, Homo sapiens
  chr6:27228289-27228377
  hyper
cgctgcagtctcagagttggagcagcttggcgtttactcccgggcctttcccggatgggagaaggaacctgcgcgggaacttgaattt

SEQ ID NO: 113089 - DNA, 39 bp, Homo sapiens
  chr6:27228697-27228736
  hyper
tctcgtcccgccggccggttagctcggttgcttagagtg

SEQ ID NO: 113090 - DNA, 189 bp, Homo sapiens; identical to SEQ ID NO: 42774
  chr6:27242891-27243080
  hyper

SEQ ID NO: 113091 - DNA, 459 bp, Homo sapiens
  chr6:27247647-27248106
  hyper
ctttcggcaaagtctcggcctcgccttgaccctccaggaaaaatgttcctgagcggaaagatcgttcaagttgcctgcgaaccaagtccttgaggtctttgtggggatcaggcgatgagagcatcaattataataataataatttgttcggcaaaaaattgctcgggtctgttcatgtccacccgagtagccacggacacttggctttgaagagggctttttccttgtcgaaaacaggaagggctctggtgggagaaaggcggcaggtgtacttcggtttatatgcacaccacaggtgacaaggagaaccttctctcctaaacggctaaagatggtgcgggggtgcaattctaaaaacgtgcactgagaaattcagctaaggattcctcaaaaatacaggttgcttctgcccggtttcgaaccggggacctttcgcgtgtgaggcgaacgtgataacca

SEQ ID NO: 113092 - DNA, 30 bp, Homo sapiens; identical to SEQ ID NO: 42776
  chr6:27248493-27248523
  hyper

SEQ ID NO: 113093 - DNA, 559 bp, Homo sapiens
  chr6:27255942-27256501
  hyper
tgctttccttcgccgcggttgcggccgcgaccctgttcttaccaccagcaattcctccagggacttggtcagcagcccaacttgatctgcgtctctctgctaaggtgtttccgcaacagggtcaactccaagtctcacctttctaggaatcccgggcgcagcgcgggggtcgggactccgacctgtatttccaggcggaggtttccctgggtcaggcggccactctctgccagagattgtcagttatccaactgtcaatagagccgccgctccagcgagtttaatttaggcacagaaaagtcctgcctgggttgaggtgggcttaggatgagtttacttgagtgtgtgatttagaaatagatctatgggacagacagacacgaaatcgggcattggggccctcgcaggcagggtatctagactggcagctgccggtgcaggatattgccaaggactcggcatccggctcagctcaaggtggggacgaagacgtcctggttgcaaggaggagccctactccccccggaatcagaactgtgcatagcgggctctggatttg

SEQ ID NO: 113094 - DNA, 327 bp, Homo sapiens
  chr6:27263991-27264318
  hyper
gagctcattgctgggcgctcagcaactcggctttcttggcatttccgtctgggcatggacaagctcctgaagaaggggtttcagagctcggaccctcttagacagattgtagaagttcagtcacccggaaattgctggggcggtttggttttggagagaggcggggacgaaagaagaaagctgtgagcgaggagagaaggcagggaatgtgaacaggaaaaagctcttgcgctaaggaatgtcagagaagccagcgcccggtgcagccgagaagcttagcgacagggttgctgggccggagaccacgagatcctagaggctacaaag

SEQ ID NO: 113095 - DNA, 991 bp, Homo sapiens
  chr6:27279795-27280786
  hyper
gtggggcagggtgggcgcggtggacgaactgaacccgatgaacttggtgaaggggctgaggtggccggcgtttcgtgggcctctcgggcaagtcggtgcgcacctgggctggggacgagggcgaaagttccagtttgctcaggaaactgcccatgaggagagatgaggcgcgggcagtgagttcaagcacggttttggcttccgaggtttcggacgtctgcagaatcggacagagtcgaagagcgcagtgttcggttgacggttgggattcacgcgctaggaaagcgcgagtctcagggtgcttagcactctccaggcccggcacccgcgggaacgggggacacgcgggacttcggcagtcccagtaacttgctttgctgttctgagacctcagcggggcggtcagacctctgctgtctccgcagcgagttgcagtacttggcgcggggagaggaactcgagaggaagctcactgcgcctcgcccctggcgtcggcagcggctgtctgggaccctgtggtccggattcaccaagtggcgcagagctggaatcgagtgggtgcacagtttccaggctccgactattactggcctcgaaggtacaggctcaggcggctcagggccccggcgcagatctgtcggcccgcgggatccccggagtctgagtggggagcactatccgcaccccgtagagtgagtgcgggcggctttcgcaggtgctcaggactggagatctggaccggtggctgtgccgcccggatggcatttgtggcactagcagtcgggaaagcagctgattgaggatttccgcgtttctctttttttgcagatcgtgacgccgccagtaggtgtcagtcatttgccgcacagccacctttgagatccacctgtgtctcccagcggccgaatccaggtttccttcctattcgcacttggagaactcatgcagattgccgtcaggagtggcctcagagatccggagtgggcgaatg

SEQ ID NO: 113096 - DNA, 401 bp, Homo sapiens
  chr6:27300803-27301204
  hyper
ggcccagcacgcttccgctgcgccactctgctaagcggtttctgaagaccactgatcttaatttcaatcatcaaaatcacctttcagtaccgacaaaattttcattgtctaattatttcattttgtatctgatcgtttacactgtccctatctctgccaagcaagtcgaagattcgctacccgataatcagatggcctcaggtcataacctccagatctgtgcttttccaacctgccaaagatcgtctgagcctcttagcaagcactcgtttatcatagcgagcctaggaggagggcgccaagcaaaacactaggtgtagtcttctcgagtagaatccaggcagtcgtggagcgaacgcagctgccaccggagaggaatcgtgttaacagtcttatttgtt

SEQ ID NO: 113097 - DNA, 286 bp, Homo sapiens; identical to SEQ ID NO: 42780
  chr6:27342361-27342647
  hyper

SEQ ID NO: 113098 - DNA, 270 bp, Homo sapiens; identical to SEQ ID NO: 42781
  chr6:27342926-27343196
  hyper

SEQ ID NO: 113099 - DNA, 777 bp, Homo sapiens
  chr6:27356278-27357055
  hyper
tgatttatttgtgtacgctatttaaaactctgtgaaccaccggtctaggctatactttgcagtgtattaaggtggtcttcggcacctctcgcagacccccttcctcttgcctctagcgccaacctctcagcctctcgcataccaggggaggggctttgcaaaaccttccacgaaagtgaatcccagcacagccctgctgtagctggctctcaggcgcaagcgcagagctgcgaccgctgctgatacgttgctcagtctcagtgtggtctctgttttgcaactggtcgtccgcgtcaggagacttaggtccaggcgactgcccagacaatgactggtcccgcataccgagcagagcatgatcagcagcagtctgagtggaagagtgcctgtgatcttagggaacctgatgggcgttggagcagcggttcgacgcatgggtttctctttaatccttccgacttccccaagcccagcgcactcaggttccgctccaagtgcgggacccgcccggggtgtgtcgggggtactcggccggaggcggccggtgagtgaggcttacagggccccgggaccaaggtgggtgctcttagaggttctggaaagcggaaacacgggttcttcgaaggaaacgggcgaaagggtcgcgtgtggtttggctgcaggtcgggtcaggaggcacctccacggttgggacgccgcgtggcgtggggtcatgaagcccccagcgctcgtctcactggcgggccagcctagtccctctgcggcagtgacagccag

SEQ ID NO: 113100 - DNA, 534 bp, Homo sapiens
  chr6:27440465-27440999
  hyper
gtgactcacacccctgcgagctcggataacacgaagacacacctgttgcagagcgttaaagctggaaggtggacaaacagggcggggcccggcacccgacttccccttaggccagaacaaaagaacaaagccctccaagggatcagggcgggaccgccccgcacagaaggaggcgaggtgcgcccccttcgaggactccccagctttctcctgcagaggcctctaagcgcgaaatcagaagggtgacgtcacgagtccggagggctggctgttgccatggtgatacctgagctcccctccccctatagcgatccacacactctgatcccgggtccggaagcgcattgaccgccaccagacctaacgcagggagccgaagcaactggacttccagcgcgccaacctctttccacgcctacaaccggcttcaacggtcacttccggtcgttacgagcgagccccgccccgcacgccggcgccgggcgggcacactggaccagcgttcccagaacactccgcgaaggtgttcctgaa

SEQ ID NO: 113101 - DNA, 30 bp, Homo sapiens
  chr6:27446650-27446680
  hyper
ggttcgaatcctgccgactacgggatgttt

SEQ ID NO: 113102 - DNA, 217 bp, Homo sapiens
  chr6:27447356-27447573
  hyper
tttggtaggggaaacgtgtgactacagagcaaagaaagatggacaatagcgagtaacttcacagggatttcctaagagctccattttcacgtcaattcctcgttagtatagtggtgagtatccccgcctgtcacgcgggagaccggggttcgattccccgacggggaggaggcttaaacttttttttagaaaagcacacttccggtaaacacagtct

SEQ ID NO: 113103 - DNA, 278 bp, Homo sapiens
  chr6:27463096-27463374
  hyper
gacttaatgtcacaacgaagggacacagaggagacttttccacataatttttcgctccctccacctaagacacaaatcagcggaagcgattccgtgcctggaatcccctacgaacaccgtcgttcaccgaggagctttgggctcctggaagtccgaacaccccggatcagaggagagttggccatgactccccgtcggtaccggctgggtttggtgccagctatggcgagtacagaagcctggccggtcccggggcaggcaggcgctcgctggatgtt

SEQ ID NO: 113104 - DNA, 51 bp, Homo sapiens
  chr6:27463631-27463682
  hyper
ccattggggtctccccgcgcaggttcgaatcctgccgactacggggtggtt

SEQ ID NO: 113105 - DNA, 1065 bp, Homo sapiens
  chr6:27470526-27471591
  hyper
cttccgggcgccgacgggagctcgctcactgtttactaacgtgaagtttgtattctttgtttggaacgctgatgatgctcatcctcacgcgggagtactctcattccagtgctcttgtccaggtggcacaggaggttggctttttttgcttttttttttttaaccaaactctcgttgtacctgaaagtttgcgttcaactcacaaagcccattttcttgtacctagatagtaattatcctgatttgcattttctcatgtctataccgtgaaaaaaaacgttgtgattctgtgtagtcgtggccgagtggttaaggcgatggactagaaatccattggggtctccccgcgcaggttcgaatcctgccgactacgagttcgaggttttagataattaacaacagaaaatttagaagaaagaaatttaagccaactcacgtgttgcgaactgaatttgtttggtacttccccgatcctgaaaccccacaacaatggagggtggaagttactgaatacctactattttcataagattatgggtaccttaattagcagatacctagtcattttcccgttagcggtacctttgtacggttcttggggacgcctctcgtttccctgccttccaaaccctcctgaagcctatacctgttacaagtcttgatagtgctttcctcttcatggaaatttagtcctagtcagaggtccaagtctttggtcaattatcagtttctgtggaatcaatggttcaactgctttggtcacccggtctcgctggttgcaaatgactagaaacactgtcagagatctcgacaccaccacaatcgaaagaccaggctgtcctgacagaccccgtcgttttggcttaggcggcagattaaagtgtaaattcgccaagtataatcaatttagtagaatacaaacttacagacttaaaaaagtgggcaagaatacttaagtttattagaggtagtcaaaactcgctgacgcagagttcttcctcgttagtatagtggtgagtatccccgcctgtcacgcgggagaccggggttcgattccccgacggg

SEQ ID NO: 113106 - DNA, 135 bp, Homo sapiens
  chr6:27486948-27487083
  hyper
ggcggcgagcctcgcggttcttccaacaacgcaatctgtcagcgcggctaggttggtgccctctccccctgtatcggggcagcccggcttagggccgcagaaccgaggctggggagccccgcaggctgttgctaa

SEQ ID NO: 113107 - DNA, 36 bp, Homo sapiens
  chr6:27512538-27512574
  hyper
tatcagagacattgccggcctcggtcatggaggtca

SEQ ID NO: 113108 - DNA, 50 bp, Homo sapiens; identical to SEQ ID NO: 42790
  chr6:27512833-27512883
  hyper

SEQ ID NO: 113109 - DNA, 568 bp, Homo sapiens
  chr6:27512994-27513562
  hyper
cgcccgctccagtccggttttagccgttccttcggaagagtaagtcagttgaatgtcatcgaagaagctcctgatttagattttaactgtacgtaaacgcagatgaccccccactctcgtgccttcatttaattcccgttgcttctcccatgggtattcagaggcttgaggttgcttggactctcaattcaatactccctttctgcgggttcgtgagaattaggtgtgaacgtggtgtccgcggatttcagcagctagcgggcaagctccagcgcccagaaactttgagtcgcttgtctaggagtcctgtgttgaattgcaacactatgcactatgttctggttattgatgtgctctgaatgagctctttcgttcgtgagcagaggccctgacgagactgaagaccaactatttccgagcgctccactcaaccattataagttcaccccagccgtcagcgatggcgtaggtaggtagtcgtggccgagtggttaaggcgatggacttgaaatccattggggtttccccgcgcaggttcgaatcctgccgactacggttttaccaggtg

SEQ ID NO: 113110 - DNA, 30 bp, Homo sapiens
  chr6:27515165-27515195
  hyper
tcctgggcataacagcgaaaaccctgtctc

SEQ ID NO: 113111 - DNA, 543 bp, Homo sapiens
  chr6:27533822-27534365
  hyper
ggcgctgtgaggcaacggtctcaagagtcctcgagagaaagagaggtgttgcccctccctggggacaacctgacactaggtgtggagccagtcgcggggatgggcgaccgccatggggccaggggcggaagtggggatagagcacagggtataaaagactcctgctacagctccccctctgctgtcgggtgcagacacgaggtagcctccaggtgacaacacgggtggtgagagccgccgcatgaatccacactgcggctgaaggtcaagaattggcggtagcccatcggtagcccagagacccaaactgtgtccgatgtgagtgaaggtcaccccagatcagtgcgtcagttccgttttggcggccaaatttctgacgatcccatgtaagaaatgccacacctgtcaataggagcgactcacgcgctgggtctctttctcggatcgggtcgccaccccagtgccgggactatgctaaagactagagtctcagacttggaatttcgaggaaggtgttccaaaacgctgcgctccctccggcga

SEQ ID NO: 113112 - DNA, 143 bp, Homo sapiens
  chr6:27559865-27560008
  hyper
aatgacgaagaaaatcgggctcagaatagagtgggaccccttcggtagtgaataatcccgcagctcattattgcgaacagcagcccttagagatcgtagctggctggtaaaggcggctttagagcggacgcccaggcttcttc

SEQ ID NO: 113113 - DNA, 393 bp, Homo sapiens
  chr6:27560492-27560885
  hyper
agagtttactccctcggtcactgtaggtcttcagtcattcatgagaggtgttaaagcacctctaacaagtgcaagatgcagtgttttggaggaaaaaaacaggcacctagcagaggatggtttcgatccatcgacctctgggttatgggcccagcacgcttccgctgcgccactctgctgtccccttcagctgttgtgccttatctccaagtaacttaaacatctcctaacaccgctgtccagctgcgtcaatatttttttcttccttatccatttatcttctctagtctctgtctttcatcctcgagttgtctcacgtttccttctcaacatagtcacctacaacttgttgtttgctcctttgcaacttaagaaaaccgattgaaatccttt

SEQ ID NO: 113114 - DNA, 32 bp, Homo sapiens; identical to SEQ ID NO: 42795
  chr6:27561176-27561208
  hyper

SEQ ID NO: 113115 - DNA, 651 bp, Homo sapiens
  chr6:27572937-27573588
  hyper
agcggtgtgagtttacgacagttgctggtcagatcaatgtccgactcccctttcagagagacagacgatatacaggaatctggaacattcctacagggctctctgagaacggagacctttttctcgtgccttttttcttttcttttctttttttgtttgtttaatttttatgttagcggattcacagaccaatagatggaaatccgctgcttactttctcgcaggagaaaatgatctccaacagtgctgcgggactgcgtccaaatggcactgaaaatatcccaggattctgtaaatgtggggttttcctttgtcgattggtttgatgtaagagagatgcctctctctttgcgagaccctgtttggcgaacatcggttggggagggaaatcttggaggtagaaacggctgaactattgtggcattccttggcgaaactttcggtacaaatctggtagggaaaaacaaaagatcaggctgtgtcagaagtgggattcgaacccacgcctccatacggagaccagaagacccgaacacaggaagcagtaagcttgagtctggcgccttagaccactcggccatcctgacactgtgacaaaaatccttgaaactatacatgatgagtaatcacggcttacggctcgccttctgg

SEQ ID NO: 113116 - DNA, 221 bp, Homo sapiens
  chr6:27585093-27585314
  hyper
ttttcctattgtttgcgtttataccacttccggtcacacgggcattgttttgccggtatgactttgggggatgaaggtggggatgcggaatatgtgattgttttaccctttaagacctttgggacagctggctggattgctcttaaacagcagatttcacagcctgtcttctggaagggagagctgcgtcctcgggataagacaggcgcatagagcctgga

SEQ ID NO: 113117 - DNA, 710 bp, Homo sapiens; identical to SEQ ID NO: 42797
  chr6:27598638-27599348
  hyper

SEQ ID NO: 113118 - DNA, 83 bp, Homo sapiens
  chr6:27635351-27635434
  hyper
tagaatcaacaaaatcgttacttgctgattcatttaactgctaatatattcgttaaaagtttattaggcgtcagtgatcttga

SEQ ID NO: 113119 - DNA, 282 bp, Homo sapiens
  chr6:27635787-27636069
  hyper
ctgaatatcttcgccgattacatcagtgcttatgtttgtgacttcagagacactgagaaggcgcggctctttccctcaaccccattcgccttcctttcggcggcgttgtcttgaaccaacctgaaaataataagtccttaagttacaagtcactaaagggaagtttgcaacttgcgatccagtacactgacatgactctaaaaagagaaggctgccgactctgggcgtactgcctttgaattagccatactccgcaaggagcagtgccgttcaaaaaaaaaa

SEQ ID NO: 113120 - DNA, 325 bp, Homo sapiens; identical to SEQ ID NO: 42800
  chr6:27636296-27636621
  hyper

SEQ ID NO: 113121 - DNA, 377 bp, Homo sapiens; identical to SEQ ID NO: 4736
  chr6:27640043-27640420
  hyper

SEQ ID NO: 113122 - DNA, 211 bp, Homo sapiens
  chr6:27647890-27648101
  hyper
cgaaccgagctgaacgctcattgctgagtcctgggagaaggtcgcgtttgtacagaaggctcctggcagcgagcaaggccgggagtgggcccagtgcgcacgaagtcgcgccccgaattcccactgggaggaacgcactggaattgaaatgtctgagatcaagccccgctgagaatcaagtcccagaggatcttctcggctggtggaaacg

SEQ ID NO: 113123 - DNA, 80 bp, Homo sapiens
  chr6:27648345-27648425
  hyper
cggaatttcgaattgcgggaaacccgcagacttagtaaggtaaaagcgcagtaacacgaggtttccgtagtgtagtggtt

SEQ ID NO: 113124 - DNA, 22 bp, Homo sapiens
  chr6:27648890-27648912
  hyper
cgcccggtttcgaaccgcggac

SEQ ID NO: 113125 - DNA, 1108 bp, Homo sapiens
  chr6:27655155-27656263
  hyper
ttcctctgagttgtcgaatccgggcctcgcctcctcctcccttttcagatcataggatttctctcccccgcaaataatggcccttacttcgtaaacacgctggctccgtaatccctattattgttttgggggtttggttctgtccagggaggaggtgagggcagatgctcaagagaggctgtccccaccgtccttttgtctcagcgaaccgcagtccgcgcccgagcgccactagctgtcctgggacgggaactgcagcggcaagtgtgtgactttcttgagcccggagccacaggcctgggaagcgccgctgagacttcagggtcgtagtgacagaggaaccacccgaggctaggcggggagagggtgcagtttccggatcccgaaggcttcgagaagagccgacctgtctggaagggtctccaagaacagagaggactctgcaaccatcactcgggagccgcgtcctttcatccttgagacagctccgtggtccaacggttccccgatccgctggccgagatctcaagcttggatgcaacttcggattcgccccaggcaggaggaaggaagccccgattggaaacgttgacttgaatcttctcggatcagaattagcaggttaagaaaaactgtttccccgtaagaagcagggttctttggtgttcaatgtggagctccgccactcccagcccgggtgaaggaaaactgggaaacagaatgaatgtgattatctattcgaagataaatttccacaaagcatgccgtttgatagtagcttataatgtggaagtaaggcatcctgtcatccggccggttagctcagttggttagagcgtggtgctaataacgccaaggtcgcgggttcgatccccgtactggccaagtattctctgtggcttttatcaccagaatggatagtaacccagacatcgatctaaacgtgtacctgtgtgtttctccaggcttaactttgccccgagaaaacggatctgtgaatttggtgcgccctcgcttactcgacagcggttaatttgaacggggacgtttctttccgctgcctccaaggcatacccacatcctacccgtaaaacaaaggggctatagg

SEQ ID NO: 113126 - DNA, 702 bp, Homo sapiens
  chr6:27661580-27662282
  hyper
gtaattcttgaaggtgtgtcaggtacattggatgcactgtactattctgtctacctttgtatatatactttaaaggtttttccccacaatttctctgggaaacctgaacctttcttccccgtgtgtttagaagggaaggtgaggagagtcaaaggcacatggagcattaacagttggaataaacgacagagacacggaaacctccgaggtttccagagcggacccggaaatgacgccaggggatgcaaacccttctgcccctttttgctacccctgaagcttactgttagtggtcgagtttttctggaagtgggcttccgcgatcgcggggaccaacgccctgagctcttgtgcccaaaggggatcgccaggttttttgatgcggatcgaaagggactggccccggagcctacaacctgacgcaggtgggacttggggaaatgtcgagaaacctaggtctgggacttgagttggcttccagggcacacattcttgttcagaagaaacacattgcaaaaatcgggaggtgacgggcagatgaagtgtcggcgcttcgcctcgggactccagtgcaacctatggggcttttggaaatgaggaagtcgatgactctgcagggactcctctgacccaggagcagatggcgctcgtctgggcactccccaggagaaaaggtgcatcgggaagcagcctggcttgtgg

SEQ ID NO: 113127 - DNA, 30 bp, Homo sapiens
  chr6:27720890-27720920
  hyper
gcctgtctcacctgcgaggtgcaggcgggt

SEQ ID NO: 113128 - DNA, 30 bp, Homo sapiens
  chr6:27759384-27759414
  hyper
tcgtcgaacaaaaccgagcccttatcgtgt

SEQ ID NO: 113129 - DNA, 30 bp, Homo sapiens
  chr6:27759802-27759832
  hyper
gggcttcctactgccggctcaccaacggga

SEQ ID NO: 113130 - DNA, 508 bp, Homo sapiens
  chr6:27774850-27775358
  hyper
ttgggtaaagggggcgccaccgcaagttgctgtgcaacatccagacatcaccagacccaccacctggagcctggcctggcggtgtcaaacgcattctggtctcatctttttagaaacccgtggatgctcaaggaatttccggataacgtgatcccggatgcgcttgactgacttacacggaacgagcaaagcgcaaagcagtccctgctaaggacttagtttatgccctcaagcgcaaaggtcggaccctctatggtgttggtagctatatgcacgtacctcatgtacatttcaccttaaatggctttcaaagagctagattaatttagtggatagatcaaaatgatttatgacccctcgccccccagtgataggaagagcgaaccagctcttctttagataatagtgagtggctctgaaaagagcctttgggttggacaagagcttgagaatttacttggagctggtgtacttggtgacggccttggtgccctccgacaccgcgtgc

SEQ ID NO: 113131 - DNA, 447 bp, Homo sapiens; identical to SEQ ID NO: 4741
  chr6:27775597-27776044
  hyper

SEQ ID NO: 113132 - DNA, 114 bp, Homo sapiens; identical to SEQ ID NO: 42809
  chr6:27776274-27776388
  hyper

SEQ ID NO: 113133 - DNA, 945 bp, Homo sapiens
  chr6:27777634-27778579
  hyper
gaacaactgtatagcgaaaatagaaaataaaatatggagaccatgaactgctaagtctgtcagaggaataggtgaacaacaaaaatttgagtccttcgccaatccggttactgttgggtaggccttcagcatacttttgtccaatcagcttcagactctcactataaataagcggctagctttctctttctcctgaagtgaatctagctctgaaggcatggcgcgtacgaagcagactgctcgcaagtccaccggcggcaaggctccgcgcaagcagctggccaccaaggcggctcggaagagcgctccggccaccggcggtgtcaagaagccccatcgctatcggcctggtacagtggctctccgcgagattcgccgctaccagaagtccaccgagctgctgatcagaaagctgccttttcagcgtctggtgcgtgagatcgcgcaggacttcaagaccgacttgcgcttccagagctccgcggtgatggcgctgcaagaggcatgcgaggcctacctggtggggctctttgaggacaccaacctgtgcgccatccacgccaagcgggtgactatcatgcccaaggacatccagctcgcacgtcgtatccgcggcgagagggcttgagtctcaaggactcactgattacatacccaaaggctcttttcagagccacccacatgcgcgctgaaaagatctgtttctctcaggaattcttcctggtacttgttttgcctgtagtagatagggcccatttccagacgttatacaatctgtttcgtaagactcagcctatccctttttgaatgctaattttgggagtcttaacatctaataatgtccggcatttttccgtaagcattgagtgtagccaaaagttccttcgtgtattgctctcccatctccgcagcccggttttgaccggatggtgcttctaattttct

SEQ ID NO: 113134 - DNA, 125 bp, Homo sapiens
  chr6:27782098-27782223
  hyper
gcctttgtttttatgcgcttttcaactcggtctttacttagtcttgtggtggctctcagttttctttggcagcagcacggcctggatgttgggcaggacgccaccctgtgcgatggtgactttgc

SEQ ID NO: 113135 - DNA, 297 bp, Homo sapiens; identical to SEQ ID NO: 4744
  chr6:27782430-27782727
  hyper

SEQ ID NO: 113136 - DNA, 2 bp, Homo sapiens
  chr6:27783050-27783052
  hyper
aa

SEQ ID NO: 113137 - DNA, 439 bp, Homo sapiens; identical to SEQ ID NO: 42813
  chr6:27792189-27792628
  hyper

SEQ ID NO: 113138 - DNA, 354 bp, Homo sapiens; identical to SEQ ID NO: 42814
  chr6:27798705-27799059
  hyper

SEQ ID NO: 113139 - DNA, 52 bp, Homo sapiens; identical to SEQ ID NO: 42815
  chr6:27799498-27799550
  hyper

SEQ ID NO: 113140 - DNA, 268 bp, Homo sapiens; identical to SEQ ID NO: 4749
  chr6:27804767-27805035
  hyper

SEQ ID NO: 113141 - DNA, 272 bp, Homo sapiens; identical to SEQ ID NO: 42817
  chr6:27805257-27805529
  hyper

SEQ ID NO: 113142 - DNA, 153 bp, Homo sapiens; identical to SEQ ID NO: 4750
  chr6:27805753-27805906
  hyper

SEQ ID NO: 113143 - DNA, 575 bp, Homo sapiens; identical to SEQ ID NO: 42819
  chr6:27805936-27806511
  hyper

SEQ ID NO: 113144 - DNA, 241 bp, Homo sapiens; identical to SEQ ID NO: 4753
  chr6:27806810-27807051
  hyper

SEQ ID NO: 113145 - DNA, 440 bp, Homo sapiens; identical to SEQ ID NO: 42821
  chr6:27832930-27833370
  hyper

SEQ ID NO: 113146 - DNA, 80 bp, Homo sapiens
  chr6:27833429-27833509
  hyper
aaagtaaccatcgctcagggtggtgtcctgcccaacatccaggctgtgctactgcccaagaagaccgagagtcaccacaa

SEQ ID NO: 113147 - DNA, 26 bp, Homo sapiens
  chr6:27833809-27833835
  hyper
agagccaggctcagtggctcacgcct

SEQ ID NO: 113148 - DNA, 326 bp, Homo sapiens; identical to SEQ ID NO: 42824
  chr6:27834074-27834400
  hyper

SEQ ID NO: 113149 - DNA, 192 bp, Homo sapiens; identical to SEQ ID NO: 42825
  chr6:27834670-27834862
  hyper

SEQ ID NO: 113150 - DNA, 192 bp, Homo sapiens; identical to SEQ ID NO: 42826
  chr6:27834904-27835096
  hyper

SEQ ID NO: 113151 - DNA, 104 bp, Homo sapiens; identical to SEQ ID NO: 4755
  chr6:27835377-27835481
  hyper

SEQ ID NO: 113152 - DNA, 1678 bp, Homo sapiens
  chr6:27839728-27841406
  hyper
ggcataatagtgacgcgtttggcgtgaatggcgcacaggttggtatcctcaaatagccccaccaggtaggcctcgcaagcctcctgcagcgccatcaccgccgagctctggaagcgcagatcggtcttaaagtcctgtgcgatctcccgtaccaagcgctgaaaaggtagcttccggattagcagctcggtcgacttctggtagcggcggatctcgcgcagggccacggtgccggggcggtagcggtggggcttcttgacgccaccggtggccggagcgctcttgcgagccgccttggtggccagctgcttgcgcggcgctttgccgccggtggacttgcgagctgtttgctttgttcgtgccatggctaagtagacgtacctactcaacacaaatgagagaaaaaaactgatcatcccggtatttatagctgccctcgcgttctgattggacagtagactgtgccatgccacgtctcacacacggaattggctcccagtttaatctgctagtgaaagggagacattccgcctctgttttgggtcaagaaacgtaaaatggttttgctagctaaagaaaaacaaaaacggaaacaaaaaaaaatcccccaaaagtctaggatttttcatgcatcaaaatcctgtttaaatataagcttgataaatctaaacttgccttgcactattttaattacgaggtgtcattactgatttgacaaaaagttaaagaacgtaaaggaaaagtgaaactagagtaaatttgtaaatggaggcattgaaggggatatgaaattcgagcgttgtggtatgccagtatttctcaaatttaaacgtacttaatgttttagaagttggccgactttttctgtaaagggcgatattaaaacattttgggcgttgcggaccacagtgtcatagttacacagccctcgcattggtagcggtaaagtaatcgatacaagataaatgagaccggctgtttcattatgacttttgcaaaaaccagagaggcgttatagatttggccgtgtatcagagaagccggcacttttaaccactaagtaatgctgaaaggggcaccgaacctcaaacttcagcgactgcttatgtggaatcgctaatttgccaaaactgccatacgtttaagtgttcttaagaaattaactatctttagtctacagctctttcacagacttcatgggtggccctgagaagggcctttgaggaaccgtgtaagtaagtaaaacactcagccgccaaagccatacagggtgcggccctggcgcttgagcgcgtaaaccacgtccatggctgtgactgtcttgcgtttggcgtgctccgtgtaggtaactgcatcgcggattacattctccaaaaacactttaagaactccgcgtgtctcctcgtatataaggcctgagatgcgcttaacgcctccacgccgtgccaggcgtcggatggcgggcttggtgatgccctgaatgttgtcgcgcagaactttgcggtggcgcttagcgcctcctttgcccagacccttcccgcctttgccgcgcccagacatgtcttgtactaaacaaaatgcaacacggcaagcctcgcagcagtactttatatagtaataaatcggacctgattgggaactctccacaccagctgcatccggtcggccgattcacaga

SEQ ID NO: 113153 - DNA, 500 bp, Homo sapiens; identical to SEQ ID NO: 42829
  chr6:27858288-27858788
  hyper

SEQ ID NO: 113154 - DNA, 72 bp, Homo sapiens
  chr6:27860878-27860950
  hyper
ttttggccttggcgcgagccttgccgccctgcttgccacgtccagacatggtaaaacgacctgtggcctaag

SEQ ID NO: 113155 - DNA, 30 bp, Homo sapiens
  chr6:27861785-27861815
  hyper
cgtgtgagtatagacgctccatcagacaaa

SEQ ID NO: 113156 - DNA, 30 bp, Homo sapiens; identical to SEQ ID NO: 42830
  chr6:27863231-27863261
  hyper

SEQ ID NO: 113157 - DNA, 30 bp, Homo sapiens
  chr6:28104447-28104477
  hyper
aatcccaaaccggacggtcgagcctatcca

SEQ ID NO: 113158 - DNA, 30 bp, Homo sapiens
  chr6:28109224-28109254
  hyper
atatgtttatgaatcgagaacagtaaagta

SEQ ID NO: 113159 - DNA, 30 bp, Homo sapiens; identical to SEQ ID NO: 42831
  chr6:28109678-28109708
  hyper

SEQ ID NO: 113160 - DNA, 66 bp, Homo sapiens
  chr6:28109923-28109989
  hyper
cggaccgattctgacgccttagttgctgttgcaggcagagtacgtccccacgaattgcccttgaac

SEQ ID NO: 113161 - DNA, 987 bp, Homo sapiens
  chr6:28175217-28176204
  hyper
acaaatgggaggactcgggcagctttcctgggatatcacaccatatagactgagaatttcagaaacgcaaagtgcgcgtcccagcagggcgagaatggcgttaactatgtcaccaccgcccaaattccctataatttaccacttatcgttcctggctttattctccgtgcgtgcagggacatgtaattctctaggagacggtggtccggacttggttcccgactccctcgtggctgcaaacaggggcagctgatttgggtggatgcagaggttgtggccaggggaagggccgcggggcagcgcgtagaactgattgtaaacccaacttcccgcctcggagcgagccgcggctcggagtagcgtcattcgaaagccaccggagatatcgagagagctccttaactgctcactgagcaaacttcgttttacagctttggggttgatatttgggaaactgggtcctaaaagtggcttctggtcttcagaaggctttgttctccgcttttgattttttgacaccacgggtttcacaccccaccccaccccccagtctcacacaaaccactcaaactcgattgcgtctccattgcgctttggggaaaaataatttaagattctcgcttctgaaatacagcgtgatggttaagagcatgggccgtggaaacagacccggggaaagcctcagctcggccactctttgccgcgtgaccctgggtggcaccttctaagggtgattctgggattctatgaattaatgcatggaaagcgcttgcgagagcgctagccggagtccgcgctatttaggtgtttgccaatattattgttgttgttaaggtgtgagggatcttggaagacagaagccaggaataaagtaaacctacagagacgtccctccccaaaccccggccgctacccctgcaagaccttgtggagcatgttaggtttcgtggcgtcgccaagttgtacctcctgcgcttcgccgcagat

SEQ ID NO: 113162 - DNA, 35 bp, Homo sapiens
  chr6:28186863-28186898
  hyper
accttcccgcgccccggcccgaagtctatacattt

SEQ ID NO: 113163 - DNA, 30 bp, Homo sapiens
  chr6:28193268-28193298
  hyper
cgggcggcttcgggcgtcccctagaccaga

SEQ ID NO: 113164 - DNA, 30 bp, Homo sapiens
  chr6:28193337-28193367
  hyper
gttgtaggaggactgcgaggctgaagggtc

SEQ ID NO: 113165 - DNA, 94 bp, Homo sapiens
  chr6:28219717-28219811
  hyper
tgggcgtccagggctgcgttttttctcggttctctagccattctgacccaaggcagtactcgggtctcactctagttgcgacctgtatatcttc

SEQ ID NO: 113166 - DNA, 192 bp, Homo sapiens
  chr6:28220076-28220268
  hyper
ggccacttcctgggcgctctaggaagcttctctcggtggttgtctccgaattaacccattagctaccctgtccttacctccacgcaagggaaggcagttaagggatagagaaggaaaggatgacagaccttggatcataagaaataggactgagcctttaaatcctggaaggatgccgctgcggctcatatt

SEQ ID NO: 113167 - DNA, 30 bp, Homo sapiens
  chr6:28234839-28234869
  hyper
ctgcgatgcctaagcggcagcaccatcgag

SEQ ID NO: 113168 - DNA, 641 bp, Homo sapiens; identical to SEQ ID NO: 42838
  chr6:28249084-28249725
  hyper

SEQ ID NO: 113169 - DNA, 1220 bp, Homo sapiens; identical to SEQ ID NO: 42839
  chr6:28303246-28304466
  hyper

SEQ ID NO: 113170 - DNA, 234 bp, Homo sapiens; identical to SEQ ID NO: 4766
  chr6:28367112-28367346
  hyper

SEQ ID NO: 113171 - DNA, 325 bp, Homo sapiens; identical to SEQ ID NO: 4767
  chr6:28367490-28367815
  hyper

SEQ ID NO: 113172 - DNA, 117 bp, Homo sapiens; identical to SEQ ID NO: 4768
  chr6:28410970-28411087
  hyper

SEQ ID NO: 113173 - DNA, 288 bp, Homo sapiens; identical to SEQ ID NO: 4769
  chr6:28411151-28411439
  hyper

SEQ ID NO: 113174 - DNA, 238 bp, Homo sapiens
  chr6:28414753-28414991
  hyper
gagggctctggcatccgggatggaggcgcgtcgctttctgtggctggcgctggatccaccctgggtctccagccacggctgcagagagggtagcgcggtttcttaggccagagtggagtgggacaggaggtgcccagagacgactgtggtggcttgagacatggaagcgctgcagcctttgagcccagtatccagcattgcagccgccgcggcggtctaagagctcaaaccctttcag

SEQ ID NO: 113175 - DNA, 15 bp, Homo sapiens
  chr6:28415091-28415106
  hyper
cgttcccctttatcg

SEQ ID NO: 113176 - DNA, 1371 bp, Homo sapiens
  chr6:28456971-28458342
  hyper
agacatacgaatacacggggaaacgtattcggcagtctacagtgtcaaaggatttttctattaatccaagaaagagcattacagaaagctatacaatacgtgaagacgattaaaaggaatatatctatacataattttaaaaaacctttgaatcttgaaagtcactcacttagggtacgtgaagctgccaaatttatcagagaaggaacaggcatctctcgcatggagccgtgggcctcggcgttaaggcactcttcagctacaggtggcagcccgtttagctcttcttaaggtcttgtgatgtcattttcaagaggccagtaaagttctgtgtcacgtggggcctctcaggaggggtgcggaggtgggggaggggcggggagcaggactccactgctttggcctcaaggagtttggtcgacacttgaagactgaccaagaaaaagtaatttgtcccagttttctcccaccctttgttttcttctgctcctcttgggcttgttttttttttgggggggggggttctttcttttttcttttcttttttttttttttttcccgcagtaagttctgaaaatcgcctcccagaggagataacgcgttctcctctgtaacccgtccttccacgtcccggtggtgggggggggggtcccggttctcattctttcggggacctgcaaggagccccgcccgcaggctttgaaccgatttcggctccgcgtccaggagcaggccctacgtagggccgggggaattcaggtgcgtctgcggggcccagggcacccagggcaggcggggactgagacgactgagggttgagggacaaggaggttgggactggggaggggagacccgggacccgcccagaacgctttcgtggggttggagagggcaggacacagcctctctgggcccggtagtatgcgaagacacgcataacgcaaaaggattcccgtcctggactttgggaattaaggccctgaacacattgagcaaaaagtagatctgtctgtacagacgtttctttccacgtctttcatagtaaggactttattaaaaagcaggcactcgaatcctaggtgggtagatgggaggctggggctggggatggggacgtcctctgttttctggttgtgcacattaaaaataactctctgctgcctactcctaaacgcagccggcaaaaatgagacgtcaactaagcgccgtttcagtcccagagccaggtcgtccatgggggttttcaagcgttttctcgatgactgatttttctagaagcgaatggattttattctcccaggtgtaaaggctacctcctgcttcacacccgggtaacataaaagacagcgctgggaccgaaactcgggtctc

SEQ ID NO: 113177 - DNA, 30 bp, Homo sapiens; identical to SEQ ID NO: 42847
  chr6:28458582-28458612
  hyper

SEQ ID NO: 113178 - DNA, 30 bp, Homo sapiens; identical to SEQ ID NO: 42848
  chr6:31390394-31390424
  hyper

SEQ ID NO: 113179 - DNA, 30 bp, Homo sapiens; identical to SEQ ID NO: 42849
  chr6:31540125-31540155
  hyper

SEQ ID NO: 113180 - DNA, 30 bp, Homo sapiens; identical to SEQ ID NO: 42850
  chr6:32600787-32600817
  hyper

SEQ ID NO: 113181 - DNA, 30 bp, Homo sapiens; identical to SEQ ID NO: 4772
  chr6:32612963-32612993
  hyper

SEQ ID NO: 113182 - DNA, 30 bp, Homo sapiens; identical to SEQ ID NO: 42852
  chr6:32636104-32636134
  hyper

SEQ ID NO: 113183 - DNA, 30 bp, Homo sapiens; identical to SEQ ID NO: 42853
  chr6:33072156-33072186
  hyper

SEQ ID NO: 113184 - DNA, 30 bp, Homo sapiens; identical to SEQ ID NO: 42854
  chr6:33204258-33204288
  hyper

SEQ ID NO: 113185 - DNA, 252 bp, Homo sapiens
  chr6:33538964-33539216
  hyper
agggcgttggggggcggtgcaggccaaaactttttgggctgccccacccatgcctttccggttagcgttgcagctccttagacgagtaggctaaccacagcccacccgcctttcttccagcgatgcaacgatctgttcgccgctcaatgccgcatgctgttcaaagcccagaggctggagtgggtgcgccccaaaggccccgcccaaggaagggcacgcttgcgtgctcgcggcggcggccatcttggactc

SEQ ID NO: 113186 - DNA, 177 bp, Homo sapiens
  chr6:33547965-33548142
  hyper
gcccgagggacccgcgagactccagtgatcatagaggtgccagcggcacccggctccaatcagctccctctagaggaagttgctctgtggccaccggatgcagacgcacaggccgacagcctgtagggtgatctgggtgggccaggcccaggagcatgtcccgcccactttccccac

SEQ ID NO: 113187 - DNA, 30 bp, Homo sapiens
  chr6:33589046-33589076
  hyper
gggtgtggcctccccgcctcccgggcggga

SEQ ID NO: 113188 - DNA, 30 bp, Homo sapiens; identical to SEQ ID NO: 42856
  chr6:33589403-33589433
  hyper

SEQ ID NO: 113189 - DNA, 30 bp, Homo sapiens; identical to SEQ ID NO: 4773
  chr6:33589676-33589706
  hyper

SEQ ID NO: 113190 - DNA, 30 bp, Homo sapiens; identical to SEQ ID NO: 42858
  chr6:33601848-33601878
  hyper

SEQ ID NO: 113191 - DNA, 30 bp, Homo sapiens
  chr6:33679564-33679594
  hyper
ccggagtgggcatgcgcgactttgtaggcg

SEQ ID NO: 113192 - DNA, 30 bp, Homo sapiens
  chr6:33756067-33756097
  hyper
agtgcgcggcctggcgccgacaggaacggg

SEQ ID NO: 113193 - DNA, 31 bp, Homo sapiens; identical to SEQ ID NO: 4774
  chr6:34100344-34100375
  hyper

SEQ ID NO: 113194 - DNA, 1866 bp, Homo sapiens
  chr6:34111734-34113600
  hyper
ccgctctgagagacacgtggcttcgggcacccagctaggcaagcccagctcagtcggtgtccggaaaggccgcgttctcccgcgccaggggccggcaatggtgcggagaggggagaaagaagcaaggcgcctcctccgacagggactgaaagtctgagggcgggatgtcactcaaggcctaggggcagggggcgctcgtacgttcgggcctcaggactccctgccgccgccgatgctgctgccccatctcagcacaaacagcctcagaccgccctggtgcgggggcgcctctcgcagtcgaggcctccacctcccggccccgcccccgcgcggggaggagacgcctcccacctgcgagcgccggggaagaccgaccccggagcggggacccccagcacacacgcgcgtacacacatgcacacacagagaccactgccggtccgctcgcccggcggccgcgtagacgcgcaggttcatcacggtcccggggagggacggtcccgagtgtccggagagagcctgaccctgaagtcctggggctgcagggagaccccagaccctagagacccccacaacctgccgaggccacgggcaagcggttgccgggctccggccgctggcgaaggcggcgctggggcgggcacgggagctggacgcggtgcctgggaaaggagccgaggcgcgcgaggctgggtgccctcccgccgggagactgccgggaagaggtgcaaataatgccccgcgcccccgcctgtcccgcctctccgcagaccgggatgcgctaatgccgccgcccccacctgaaagctggcacgaccctccatccggtggaagcccctgtatacagagacagtactttccaccgggcccgcaaaaaagcctctgccccattccctccctcaggggcacccggaaagcctgccttagccccgaggggagaccctctagttcagatcccgcgccctccggcccctagggctccgggggcgccagctctcctcggagcactccaagcgcgggagctcgccggaggccacctccccgagccccgatgtccccgccgcagccctcgccccaggaggccggagggcacggtcccctctgtcggtccccctcgggccacaactcaccgcgcgccagcaaggtttaagccgcggcgaggggtcggctgcgtgccggcctgccccgggggcgcaggcagtcgacggccggaggcacggttctcgcggtgcccagagcccgggccgcggcgggcagcgctgacgctgcggacccagcgcgccgcggagccgcccggagtccgggacgcagcagggatgagctggcggccgcccggccggagccgccgccaagcgcgcggcgttcggctgctgctccggcaagcgagcaagcgagagggagatcggcggcaacccctgctcctgctgcggcggagcccggcgtccgagccggaaggagcgggagaggcggcaagaggagctgggtctggccgagagctccgggctgggaagggagcggagcgggagcgaccagcgagcgcagccggccgaggtacgggcgcctggcggcgccgcaacagcggcaacagcagcaggaaaaaaaatgagagcgagctagagagcgcgctggagagcgagcgagagagggagcgagagacgagagagcgaggaaggcgctgagaggggaggctgcgggagagggcgggagagccgggaagcgcaagggggcgagggggccgcagccgcttgccccggcgcccacagccgctgctgcacccgaggaggcacgagaccaatccggcaagtttgcgctgaaagtgcgggccaagctcacggcgcttctgccggccttttaaagagagagcac

SEQ ID NO: 113195 - DNA, 158 bp, Homo sapiens
  chr6:34119200-34119358
  hyper
ccgggggctgtcagccgtgagccaaatgtcattagcatggatgtcacaagccgggatgtcaaaatacaattaacatttaaaagccccttccgcccaagacctcgtggccgcctgctccttcggcagagtggcagggctccgggcgccagggggagcag

SEQ ID NO: 113196 - DNA, 345 bp, Homo sapiens
  chr6:34191990-34192335
  hyper
gaaagtgttcgaaacgctgctttgacacagtgaccttgtgtgagccctagctgcacacaccccccccacccacgccctccccgcagacagcagcacgcacacccccggccggctcacggtacgcggccgctgcccgcactcccgggtcgggcctgcgcgtccctgtggggttgggcgagcggggtatcgagggtccagcagcctggacccggcccctccacagggcagtcccttttccagcttccaaaagctagcgttgctcacctactgccagaccccagacccacttctcccacgaggtgtaaagaaggacccctgagggtcttccacgtcaccttgtggagc

SEQ ID NO: 113197 - DNA, 30 bp, Homo sapiens; identical to SEQ ID NO: 42863
  chr6:34204896-34204926
  hyper

SEQ ID NO: 113198 - DNA, 30 bp, Homo sapiens
  chr6:34216466-34216496
  hyper
gtgtccgtagggcacggggcatcgagcttg

SEQ ID NO: 113199 - DNA, 30 bp, Homo sapiens; identical to SEQ ID NO: 4777
  chr6:34217083-34217113
  hyper

SEQ ID NO: 113200 - DNA, 250 bp, Homo sapiens; identical to SEQ ID NO: 42865
  chr6:34359486-34359736
  hyper

SEQ ID NO: 113201 - DNA, 30 bp, Homo sapiens; identical to SEQ ID NO: 42866
  chr6:34360901-34360931
  hyper

SEQ ID NO: 113202 - DNA, 30 bp, Homo sapiens
  chr6:34393383-34393413
  hyper
gaggggtaaagccccggcttcttgaaggcg

SEQ ID NO: 113203 - DNA, 30 bp, Homo sapiens
  chr6:34393764-34393794
  hyper
gcccggatgggagccgatggaactcgaacg

SEQ ID NO: 113204 - DNA, 121 bp, Homo sapiens; identical to SEQ ID NO: 42867
  chr6:34405015-34405136
  hyper

SEQ ID NO: 113205 - DNA, 40 bp, Homo sapiens; identical to SEQ ID NO: 42868
  chr6:34405255-34405295
  hyper

SEQ ID NO: 113206 - DNA, 559 bp, Homo sapiens
  chr6:34433449-34434008
  hyper
cgcaccaagggacgccgaggctcgggagaggaggaaaggccaaggcgatggggagatggggagagaggcagggagcaacatcccgggctccgagcgcgccagctgggagggctggggaggagggcgcaccggagggctcccggcacgcgcggggccgcgggcagcccccagaagagggagccaggcaagactgctggggcaggggtcggctgaagcagcggggagccggaccccacccgccacccgccacccgccacccccggcgcctgccaaactggttgctgcctccccggcagccgcggcgcgtccacctgcgcagccaccgcgccgccctgcccgcgctaccattggctcgctaaaaatgcctctctaatctgctctgctcggtgcacgcctcctcctcatccttcccccctctccgcctcagctctgaccttcctccttcccgcagccccggcgagatcccagagcgacgcggtggcggcggcagcgccagccccctcctcccccgggaagtcggccgggcttgaggccgggccccagacgtcccgcttcgccc

SEQ ID NO: 113207 - DNA, 30 bp, Homo sapiens
  chr6:34664200-34664230
  hyper
tggcactgcggggccggctcaccagttggt

SEQ ID NO: 113208 - DNA, 30 bp, Homo sapiens; identical to SEQ ID NO: 42870
  chr6:34664473-34664503
  hyper

SEQ ID NO: 113209 - DNA, 30 bp, Homo sapiens
  chr6:34664797-34664827
  hyper
ccagccgtggggggcgggggaggcttctgg

SEQ ID NO: 113210 - DNA, 30 bp, Homo sapiens; identical to SEQ ID NO: 42871
  chr6:34855393-34855423
  hyper

SEQ ID NO: 113211 - DNA, 60 bp, Homo sapiens; identical to SEQ ID NO: 42872
  chr6:34856882-34856942
  hyper

SEQ ID NO: 113212 - DNA, 30 bp, Homo sapiens
  chr6:34857648-34857678
  hyper
ggttcactctcgctcgctacagggtgccag

SEQ ID NO: 113213 - DNA, 830 bp, Homo sapiens
  chr6:35181394-35182224
  hyper
attgcgcgcggtctgcgcctgacctccctgctcccggggaagccgtctccatggagaccaggcccgctcccccatcgccggattgtaaattcctgcaggcagcggcccggcagcctggggagggggccaccgcgcccgggcgcgcagggggagcggccaccgcgccgaggccccatttgaaagaaaaaagggcacgaaaaaggaggtggtggagaaggaggaggaggaggaggaggaggagggggaggaggaagaaaacgaaaaggagcgaggagaggaggagaaagaggaggaggaggagaaaggcgaagaaaaagagcctgagagacggagaaagagcgagagaggaagaaagagaggcagaaagggcgtgtttctggcgctgcgtttcccctcccctttctcaggtccttcgctcgggctctgcgcgctctccggctgcagctctctcccggcgaagctgggaattgggtgggattacacggagcagccccgccgccgccgctggcagaggccggcttggagagggcgggggttcccctccgtcagtcgcccctggcgcccctcgcctcgtcgcactctccgcctcgctctccccgacgtccggccaggaggagccggtagcatcgggagcctcgcgccgagggcgccgcggtccgcgccccgcgactgcagcccccggcctggccccggcggggcgccccctcccctccccctcctgcgagctgggatccggccggcttccgccctcccctggccgcgagaccggccccggcggctgggccgccagtagctccagccatgggctcggggcgcgtacccgggctctg

SEQ ID NO: 113214 - DNA, 30 bp, Homo sapiens
  chr6:35226902-35226932
  hyper
tgcgcaccttaaagcgcttcgggaccgtaa

SEQ ID NO: 113215 - DNA, 308 bp, Homo sapiens
  chr6:35227366-35227674
  hyper
agttggatggctgccgcggcgaagcggggggcggggtggaccgtgcccggtattttctatacgggttccggggcccggtagaggcgcgccaagaggaaaggaaagtgcggcggccctggaacctggatatcgcgcgaggcaagctgcgcgcgggcgggcgggctatggcgcaggcgggttgtggggccggcgctggtggcggggcccggtgcatggcggtctgtcggcggagtcgccctcgggggctgtcaggttggtggctgcgggaggagtgggccaaccatgcccagggcgggaggccgggcggg

SEQ ID NO: 113216 - DNA, 30 bp, Homo sapiens; identical to SEQ ID NO: 42874
  chr6:35310242-35310272
  hyper

SEQ ID NO: 113217 - DNA, 30 bp, Homo sapiens; identical to SEQ ID NO: 42875
  chr6:35310670-35310700
  hyper

SEQ ID NO: 113218 - DNA, 30 bp, Homo sapiens
  chr6:35419964-35419994
  hyper
acttgttttgtccacgccccctcccatggg

SEQ ID NO: 113219 - DNA, 30 bp, Homo sapiens
  chr6:35420288-35420318
  hyper
agagtagggggcggcgcggcacccgtgccc

SEQ ID NO: 113220 - DNA, 1085 bp, Homo sapiens; identical to SEQ ID NO: 42876
  chr6:35435671-35436756
  hyper

SEQ ID NO: 113221 - DNA, 379 bp, Homo sapiens
  chr6:35464207-35464586
  hyper
ccgggcccgaggcctgcgtggagctgaggccgggcgggctccgggagcgcgcgggccgggagtccaaagggcggcggggcccgggactgggcgccccggatatgagctccagggtggcaggcaggccctccacactgtgcggcccccggatccccgccccgaccccccaagcacggacggcgggacaggcgacggcacaggggacacggtctccccggcttccccaccttcccggaccaactcgtccccgtcgcgggggggtggggagggcggggggcggggcttcccggagagattttcccccttccctctaaacttcccggcaccccgatccggggctccagctccggctggacaatagctcggggacccagtcccc

SEQ ID NO: 113222 - DNA, 31 bp, Homo sapiens; identical to SEQ ID NO: 4783
  chr6:35465519-35465550
  hyper

SEQ ID NO: 113223 - DNA, 30 bp, Homo sapiens; identical to SEQ ID NO: 4784
  chr6:35465830-35465860
  hyper

SEQ ID NO: 113224 - DNA, 30 bp, Homo sapiens; identical to SEQ ID NO: 42880
  chr6:35479895-35479925
  hyper

SEQ ID NO: 113225 - DNA, 31 bp, Homo sapiens; identical to SEQ ID NO: 42881
  chr6:35523457-35523488
  hyper

SEQ ID NO: 113226 - DNA, 1266 bp, Homo sapiens
  chr6:35655507-35656773
  hyper
gaatttactgaacggcggccaaacgctgaacacactgtcctgaaccacactgaagggtatctacaattctgcatctccgcttacaacttgaaacttactacgctttcgccaccactgcagaacccgattttagagactacgatggtcctgccggttcgttaatcgaagaaagccactctgcaccctgacgctcgtagtgtctttttggtaatactggtttttgactcttatactgtgaccggtgcacctttttggacgaccaataaggcggaagacgttttcacgtcccagaacagaagagcataaggagccctggcacagcgttcagccgcttcggtatggcctgggagtgacgcggatcacctgttagacggcgctgcgcggactcctccacaagcggccgacagcggcgatgcggttccccaacgcttgtcccgaggcggcaggtgaaggcggggaccgcccgtccacacccggagcgcggccaccccgccaccatccccttcacagccccgccaggtgggcgaatccgccccgcgcccgcggcgtcccggcgctcggctcgccctggggtccggttgtcccggcgcccggacccgaaagcgaagtttggctcccgcccgcagcggtgccggctgagggtccggccgcctgtccggggagagccgggggccagagaccggaggcggagcgggacctgtcatcccgggcgggaaacaaaagcccagtgaggacgggcgggcgcgacccgcctcgcctctgccgggagaggccggcgggggcggagagcggcgcccgcggtcactagtctccgcgcctcccgcggggagcaccggccccgcggcccctggggcgcggcgaggggcgccgcagtggggccgaggcctcccgcgcgctcccctcgaggcttccggaccccgctcccccgcgacacgcggctcctgggctgcgaagccgcgtgggggtgggagctgaggcagcgagtgcgaccgcggcgggacctggaaggagggcgttcggctcccggggcgccgcggccggccgccccatctccgtggccatggcgccggtacctgtcgccgcgggggctcgccgactccgtcactctccgccttgcccgtgctccgctaacccttcagcccgcccagcaggccgcccgcgcgccggacaccgccgcccgagactggcagcgcccgcgagccggcccgaatccccggggcagcgcccggcgccgtcccgccccagccggccgcaggacccgccttc

SEQ ID NO: 113227 - DNA, 30 bp, Homo sapiens; identical to SEQ ID NO: 4785
  chr6:35696285-35696315
  hyper

SEQ ID NO: 113228 - DNA, 584 bp, Homo sapiens
  chr6:35744080-35744664
  hyper
tgcgagactccgtctgtaaaataaataaatacaataaaatagagttttatcttacaataaaaatagagttttatcttacagtttcaagcttctacttggaagtaacacgtatggaggctcccagggcccctacagtctggaatcccgcccgtgcgagcctgagcgcctttcctccctccttcccttccgcaggcgtcctcgccctccacgtccctcctccgccggggtggcctggggcgccgggtcacgtggccggggaagaggttttatcccgcggcccctcggaaccccgccgctgctctgccgcccaggcccatggccgcagccctggcgctcgtggcgggggtcctgtcgggggcggtgctgcccctctggagcgcgcttccgcaatataaaaaggtgagccggggagcgcgcccagccggccgcgaccgcaggagagggtggccccgccgccggggcactggagcccgaaggcgccgggcagcctgaaagggagaggtgggtccggaaccacacccaggcgggtagcctggggcatcctcagacggacttcaaaagccgcttcactttcccctggtggc

SEQ ID NO: 113229 - DNA, 30 bp, Homo sapiens
  chr6:35772963-35772993
  hyper
ttcaggaaggtgaacggtgttccgattccc

SEQ ID NO: 113230 - DNA, 30 bp, Homo sapiens; identical to SEQ ID NO: 4786
  chr6:35887695-35887725
  hyper

SEQ ID NO: 113231 - DNA, 30 bp, Homo sapiens
  chr6:35888283-35888313
  hyper
tttcgggcctggagcgcaagcactgcagga

SEQ ID NO: 113232 - DNA, 13 bp, Homo sapiens
  chr6:35888694-35888707
  hyper
cctcagtggaggg

SEQ ID NO: 113233 - DNA, 30 bp, Homo sapiens; identical to SEQ ID NO: 42885
  chr6:35889032-35889062
  hyper

SEQ ID NO: 113234 - DNA, 91 bp, Homo sapiens
  chr6:35995283-35995374
  hyper
ccaggtatttgccccgccggccacggtgaggcgcgcgaggcgtgtgctgccagcttctctcttccttccccggtccgccttcgcgccctta

SEQ ID NO: 113235 - DNA, 30 bp, Homo sapiens; identical to SEQ ID NO: 42887
  chr6:35996044-35996074
  hyper

SEQ ID NO: 113236 - DNA, 469 bp, Homo sapiens
  chr6:36098063-36098532
  hyper
gaggcaccggggtcccgctgggcagccccgaccccgtgcctgggccgcacctgccgcagtggctccgtcgggccgggcggaagcgcgggagcgcagggctggacaggcccgggcgtggcggccccggcgcacctgggcgagccggcaggtgggagcgtagcagcccggggcccccgccctcgcgcgggggaggagcgggcggcgcggggcgggcgcagcgggggtcggggcgctgggagcccgttgggccgcgaacgcagccgccacgctggggccgccgagatcgggtgcccgggatgagcctcatccggaaaaagggcttctacaagcaggacgtcaacaagacagcctgggagctgcccaagacctacgtgtccccgacgcacgtcggcagcggggcctatggctccgtgtggtgagacccctgggccgctggggggcggggggcgggcgccaggctctccccttt

SEQ ID NO: 113237 - DNA, 30 bp, Homo sapiens; identical to SEQ ID NO: 42889
  chr6:36165189-36165219
  hyper

SEQ ID NO: 113238 - DNA, 184 bp, Homo sapiens
  chr6:36252987-36253171
  hyper
attctgagcattcgtcggcgcctccccaggggctgctgcgccccctgcttcccgcgcgcccaccacgcacgctgctctgggagcagggccggcggcgccgccgcctcgcagcgattggttgaaccggaggttgttgctaggctaccagtgcgccctgagcctggggccccgcagtcccatcctc

SEQ ID NO: 113239 - DNA, 114 bp, Homo sapiens
  chr6:36354417-36354531
  hyper
aggagagatatctgccgagagagaatttggatcggagccagcaaagcaaactccagaagccttggctgctgcgaaaggggattcaacacctttccgggtcgttctcacttcatt

SEQ ID NO: 113240 - DNA, 1050 bp, Homo sapiens
  chr6:36354735-36355785
  hyper
taactgcctgggaaacgccagccacggagctgctgaggatcagactcctgggtttcagcatggaggccagggaagggtctgataatgggtatgggtcctggcgagaggggagtggagaaaggccttggagtgggacggggcgccagctctgggggcagtctcgaggcacctagaaaaccggcgagtggggagaggctgctaaagaggggctccctgcgagaatgcgttcaccagctgtgaggacctggctggcgcacgaacttccaaagacctcacatctggttggtgtaggggcgaccagtggtaagggggctgcggaaagggcccgcaggggctgtgcgtgatgccttcagagctgtgtatgacaccgagagagtcaggggcggtgacccgcgtctggaggtggaaggggaagtgagtgagggatggatgtgaggtttaggaatgtgttggaaagagagattcccgccaggtaaaaggtctgataaaataggtttggaaatctaggtggtgaggaaaggatgcgggagcaggtggctctgcgtgcgcgctgcgtgttcagccgccaggctcttacctgcattacaggtggaggtgaggaagccaccggctttctgtcttgagcgctcccctggctgtggctgctggggccctaggcccgcgccccgcagtcctcctccgccaaacccctaacctggctccgagaactggaaggtcgcgtgggaggaaatctctttcgagaagcgccaaggcgtgtgcgcccgggtcctccgcaggcgggcaggcgcgcgaggcgctccggtaatcgctatccttccgggaaacgaaaacgaaagagcgggatgcggttccacttgcgccgctgcgggctaggagcagggcagggcagggcaggggccggccccgtgggagcgcagcaccggggcgctgcccgctcgctagcctgggaggcgtgggtcctgcacacagcctccagccggcggacagtccctctggcgacctggccttggctcccactggggcagagccgggattctgcaggatctgagg

SEQ ID NO: 113241 - DNA, 270 bp, Homo sapiens
  chr6:36391056-36391326
  hyper
tttctcaggctccccgccagagagcgccgccaggtcctcggaaccacctcgcgcactttagctgggcgcgcgacccgcgcaaccagtgagaaccccgctcccgccctaggctttctgtggtggaaaaagcgcgcgcgcggacgagcaggttaggcgatagaggtcacgtgggccagctgtggccaatggggagcgcacatggcgacgcggccggcggcggcgcgcgcgtagctcgcctcgggctcctggcgggagcgggagttagggagg

SEQ ID NO: 113242 - DNA, 25 bp, Homo sapiens
  chr6:36391390-36391415
  hyper
cgttctcgacgccgtaataacaagt

SEQ ID NO: 113243 - DNA, 98 bp, Homo sapiens
  chr6:36410470-36410568
  hyper
gggttccacattttcgggtaagcattagccgtcctggcgctgcacgagcgtattctacaattccgaaaactactaacttttccgtctgcaacctttaa

SEQ ID NO: 113244 - DNA, 30 bp, Homo sapiens; identical to SEQ ID NO: 4790
  chr6:36515365-36515395
  hyper

SEQ ID NO: 113245 - DNA, 30 bp, Homo sapiens; identical to SEQ ID NO: 4791
  chr6:36561543-36561573
  hyper

SEQ ID NO: 113246 - DNA, 30 bp, Homo sapiens
  chr6:36561819-36561849
  hyper
gtgtttgagcgtgacggcgacggtgctgtt

SEQ ID NO: 113247 - DNA, 30 bp, Homo sapiens
  chr6:36562197-36562227
  hyper
gcgggaagactcatcggagcgtgtggattt

SEQ ID NO: 113248 - DNA, 24 bp, Homo sapiens
  chr6:36563699-36563723
  hyper
ttatttgtggtttttttttggcga

SEQ ID NO: 113249 - DNA, 143 bp, Homo sapiens
  chr6:36563962-36564105
  hyper
gttctgggattgcaggtgtgagccgccgcgcccggtccatgggcatttttttaaaagtgaaaatcgttggccttatttttattaaagctggtaagttttggcttatgtaggtactttgaatcgcttgcctggtagtataacct

SEQ ID NO: 113250 - DNA, 30 bp, Homo sapiens; identical to SEQ ID NO: 42898
  chr6:36622884-36622914
  hyper

SEQ ID NO: 113251 - DNA, 344 bp, Homo sapiens
  chr6:36646211-36646555
  hyper
tttgtggctcacttcgtggggaaatgtgtccagcgcaccaacgcaggcgagggactgggggaggagggaagtgccctcctgcagcacgcgaggttccgggaccggctggcctgctggaactcggccaggctcagctggctcggcgctgggcagccaggagcctgggccccggggagggcggtcccgggcggcgcggtgggccgagcgcgggtcccgcctccttgaggcgggcccgggcggggcggttgtatatcagggccgcgctgagctgcgccagctgaggtgtgagcagctgccgaagtcagttccttgtggagccggagctgggcgcggattcgccgagg

SEQ ID NO: 113252 - DNA, 30 bp, Homo sapiens; identical to SEQ ID NO: 42900
  chr6:36647649-36647679
  hyper

SEQ ID NO: 113253 - DNA, 130 bp, Homo sapiens; identical to SEQ ID NO: 42901
  chr6:36703002-36703132
  hyper

SEQ ID NO: 113254 - DNA, 248 bp, Homo sapiens
  chr6:36806977-36807225
  hyper
ggtttaggatcgaagcggcaggggccgcggggctctgcgtccagggccggggcaaggggacccggccagcgggaggctcacctgcaggacacggtgatctccaccttggtggccgggatgctgcccgccaaggagtcgaactcgctcagcgacgccatgtcctcaggctgctccatcgcccaccgcaccccccaccccaaattagtcaatccctgcgcgattcacgcctcctccggagcgactggagc

SEQ ID NO: 113255 - DNA, 546 bp, Homo sapiens
  chr6:36807967-36808513
  hyper
ggtggtcctggtcgcgcgcatcttcatttgcgcccgccccctctcaccacccctatctcccatcaggggtctccatcctgggggagggggagggttatgggaaccaacgggcgcctttttgagaaaggtctatgcagggttgagagggggcataagtgggagggaggtgtgcaaaaaagatcccctcccaggggcttgggtgtggagggtctctgctgagtgtgcgccctactcgggggcgggtctcagttcagaaacagaccctacatctccttctggggaggtgtgtgggggcgaccccagtgccaggagggactacctcggtttcccagtggcccaggtggggtcggtgcatgggcgcctcccccatccgtggttcccgccagccgcggcctcgccaagtcggctgccgaaaccacgcgccagcgcccttccactcccccgcccgtcgtgaccacacgactgagccagcctccaggtctagaagctcctgccacccagtctggtggcaaccagactgggagatcggcccgagctccctgggct

SEQ ID NO: 113256 - DNA, 30 bp, Homo sapiens
  chr6:36842461-36842491
  hyper
ctgccagccccagacgcccgaaccccctca

SEQ ID NO: 113257 - DNA, 30 bp, Homo sapiens
  chr6:36842829-36842859
  hyper
ttaggcatggaaggcgggaacaaccagaaa

SEQ ID NO: 113258 - DNA, 126 bp, Homo sapiens
  chr6:36954118-36954244
  hyper
aggacactgggctgcgggccgggggtcaatggtggcgggcagccggggccccgggctcgggagctgtggcggcagccgcaggccggggcgctcccccgggatgcccagagcacgcgggggcggggt

SEQ ID NO: 113259 - DNA, 30 bp, Homo sapiens
  chr6:36973542-36973572
  hyper
cctctctctctgcttcgagggtagctgaga

SEQ ID NO: 113260 - DNA, 30 bp, Homo sapiens
  chr6:37018249-37018279
  hyper
tccatctaagcccatcggcagaactgggga

SEQ ID NO: 113261 - DNA, 30 bp, Homo sapiens
  chr6:37018494-37018524
  hyper
tcctgggggacctcacgggcacgtggagct

SEQ ID NO: 113262 - DNA, 30 bp, Homo sapiens
  chr6:37137056-37137086
  hyper
gctgagcttttagccggccggaacgactga

SEQ ID NO: 113263 - DNA, 988 bp, Homo sapiens; identical to SEQ ID NO: 42905
  chr6:37138569-37139557
  hyper

SEQ ID NO: 113264 - DNA, 30 bp, Homo sapiens
  chr6:37139966-37139996
  hyper
cttaacctaacaaacgacagcctttcaaaa

SEQ ID NO: 113265 - DNA, 168 bp, Homo sapiens
  chr6:37225491-37225659
  hyper
ccgtccacggcttgcgcagctcaccaatggcagcggtgctgggtggaggggtgcccacatccaagatggcgtccccaggagctgggagcgggtgaccggcggcggggaagcggcctgggttggccctcagattgcggggtctgggggcatctcgccgggcaaaccctt

SEQ ID NO: 113266 - DNA, 46 bp, Homo sapiens
  chr6:37226109-37226155
  hyper
aggggtctccaccacgcacaggtggttggtcgctcgaggatggccc

SEQ ID NO: 113267 - DNA, 30 bp, Homo sapiens; identical to SEQ ID NO: 42908
  chr6:37321665-37321695
  hyper

SEQ ID NO: 113268 - DNA, 30 bp, Homo sapiens; identical to SEQ ID NO: 42909
  chr6:37321904-37321934
  hyper

SEQ ID NO: 113269 - DNA, 30 bp, Homo sapiens; identical to SEQ ID NO: 42910
  chr6:37322609-37322639
  hyper

SEQ ID NO: 113270 - DNA, 31 bp, Homo sapiens; identical to SEQ ID NO: 4795
  chr6:37446156-37446187
  hyper

SEQ ID NO: 113271 - DNA, 139 bp, Homo sapiens
  chr6:37483956-37484095
  hyper
atgcagcttcgcggccgctgcgattgggtggcatttgtgagcacaaaagagaagactcgggcattcagaaggccctttcagcaaagggcgccacaggcctgctggctggaaattctcctgagatcggttggagtctatt

SEQ ID NO: 113272 - DNA, 427 bp, Homo sapiens
  chr6:37664031-37664458
  hyper
tagaagaagcgaagccgcagcaacagcggggaaggcgagcccgccgcccggccttggtgctgacagccggctcgcccgcaagccgcgcggcaactccggctcatgcatcgcttggcttccactccggaggccgagccaggacgaggtttcggtgcaagtcgctgcaccagtcctagactgggtctgtccgggtctcccgagccgaccgggtgctctcaagggttcctaatcattcccacctctagcagggtgtgggaaagtgggtgcctcctcctgacatcccggcttcccaccagaccctacgaccggcccctgtgttccgaagcagctagctcggtctccacgcgccctggagagggcggggacgcgggcatccactccagagtccgagtcgaggtctccaccaaaccccggcagcgcgcacttt

SEQ ID NO: 113273 - DNA, 1226 bp, Homo sapiens; identical to SEQ ID NO: 42913
  chr6:37664481-37665707
  hyper

SEQ ID NO: 113274 - DNA, 30 bp, Homo sapiens; identical to SEQ ID NO: 42914
  chr6:37666140-37666170
  hyper

SEQ ID NO: 113275 - DNA, 381 bp, Homo sapiens; identical to SEQ ID NO: 42915
  chr6:37666462-37666843
  hyper

SEQ ID NO: 113276 - DNA, 221 bp, Homo sapiens; identical to SEQ ID NO: 42916
  chr6:37666866-37667087
  hyper

SEQ ID NO: 113277 - DNA, 405 bp, Homo sapiens
  chr6:37673049-37673454
  hyper
ttctaactttctccccggcagctccgcgggaagcaggatcaaatgttctccagcctgaaaagcccggctggggtgtgaggagaaaggagaaggggaggaggggcggccaatctgcggtattggaaggggaggggccggggccgggccccagggacaggcctcgtgactctccttgctccctttctgtttaaccctcccagccaattctttttcctttagccattagctctttttgatccacgtaaaagggggtggggggcgggaaatctggcgtggacttggaggcgttcagcacacccgcgaccgctgcgtggcataaactacagggggcgccattcacataggatacgacagacatggcgcccgccccctccgcccccccagtacaacgtgggggccctgctg

SEQ ID NO: 113278 - DNA, 30 bp, Homo sapiens; identical to SEQ ID NO: 42919
  chr6:37787030-37787060
  hyper

SEQ ID NO: 113279 - DNA, 114 bp, Homo sapiens
  chr6:38607280-38607394
  hyper
ggctgcccctgattcgaactcctctctttgggaggctggtagagccaccccgaatccccgaaacgtctacttcccactacaccttcgtggactgcgaacgggacggctaccgct

SEQ ID NO: 113280 - DNA, 77 bp, Homo sapiens
  chr6:38670957-38671034
  hyper
ccagccaatcgctgcgcggagagcaagttgactctctgctgattgggtcccagtgagtcagcgcctccacccacagg

SEQ ID NO: 113281 - DNA, 239 bp, Homo sapiens
  chr6:39016390-39016629
  hyper
cggagagcagtgcccgctatctcctggcccgggaccggcagaggggtgcggcggggcgggcccaggggtctctggcggccggaagaaccgggaccctgccaggcccctcccgcgggcagggcggcccctcgccggctcctcccccaccgcccgccaccagcccgggatcagtctccgcacgcggttccgcaggtggcagcgatggcccagtcctgaactccccgccatggccggcgccc

SEQ ID NO: 113282 - DNA, 273 bp, Homo sapiens
  chr6:39016678-39016951
  hyper
cggcccccgcccccaggtgagatccagggaccccgacgacaccgggggaggcgggtggctctgcgggctgcaggcgcagtgtcctggtggagggccccgggacttgaacgaaactccgagaccgctggcgggggcatccgaaagcctcggggggagtagggactggagacttggtgcccctgggctggaaggcccaggtgagggcttggactacagaggattccccccaaccccagcgaggcgccctcttcctcgccacccgggtccctctgc

SEQ ID NO: 113283 - DNA, 225 bp, Homo sapiens
  chr6:39082797-39083022
  hyper
gcagggggttgggccgccagacccgcccgtttccgcgccgcccgaaactcagctaaccgctgttccatggcgcgcgcctcgcgtccgttggccgataagggagcgcgcgcccgcaggccgcacagcagttgcctccgctcggcccgcgccggccgccgtgcgcctgcgtggcagaagcccctgctgagcatgcgcactggtgtgacccgcgtctcctccgtttgt

SEQ ID NO: 113284 - DNA, 674 bp, Homo sapiens
  chr6:39196878-39197552
  hyper
gtccaccatggctcccgagcggccgcctcctagagaaagcctctcctagccccagctgctaccagtccgcccgccctccagcctctgaaaacagctgtttgaatttggagctccgcatgcgcagtgcccggtactcaccccccgcaagcaccgctccccggacagagttgcttggccaagttggcccacggagtgcggggagctgcgtggggccccactcacgcggcccggggtgggcgaacaccagcggggctgaaagggcgccctggaccgcggatgcgtaaggagcgggaagaacacaggacttgactctgggcagacacgtgggccgcttctccacgcgtcgctcctccgcgcgccactagcagtatgcgccgcgcccgcctccgcacgcctctttaaccagcgcccggcgcgctctgcccccttgctccgggctccgaccggggaggagcccaggcgggccccgccccttccccgcacaagcagcccggcgagcgcaggagtgagcgcgaggtgagcgctagaagaggcttggcgctccccgcgctcccagggtcagccgccaggggaggctgcgccgcccgcccagacctgcacgccctgcggtgcccgaggggttgcggtctcagggactcgtgtttgttattaggactggcgtgttaactaaaatg

SEQ ID NO: 113285 - DNA, 47 bp, Homo sapiens; identical to SEQ ID NO: 4799
  chr6:39271081-39271128
  hyper

SEQ ID NO: 113286 - DNA, 30 bp, Homo sapiens
  chr6:39280770-39280800
  hyper
ttccctgccaccttccggggattggctttg

SEQ ID NO: 113287 - DNA, 1041 bp, Homo sapiens
  chr6:39281095-39282136
  hyper
tgggcagccgcgcggcggcggcgcgcccagtccttgtgtccgaagactcggagtaaagcgggttcagccagagagcggccctgcgtccgccctcctctcgaacccgggtctgcgcacgtcgagccccctctctgcgttgagggtggccccgaccagcacgcctcgggcccaatccacccaccctccgggacaaacgcgccttcccccaggctcctacggccgcgccctcgctcctgcgcatccttagacccggcgcccctgccgtcccagctcccagttcgcaaacgtgcgcccgggttccccctctggaagcggccaggtgtggcgtttagctctttgccacgggtgcgggtgcgaccaacccccaagcaggctcaaacgcgccctttcccgggtcaggccgggcggggccggttacgcgcgcgccccctgccgtagtcgtcctcgcccccaaatttggatgtgtccccaggcatctgcctcctcaccgggccagcatgccctctcgcccccaagtaggactcagcccggcttctcgcagtcctctcgctagggcgagggtcttttcctccgaggtcccccaaccctctggtccccgcgcaggaacgcccacccccgttgtgcccgcgtctgcgttcccgacgtttccctgaacaggaaacacctgaccagggcctgaataggccccctcgccctcggcccgtacaccccgcggcccgctaccccatcccgccgcgcccaggccgacgccgctcgcccctgacccggatcagcgagtccagcgccgggcggtccagacacgtgaagttctgcaacagctcccacttgtcgcgctggaagctgcggctggagtcctgcgccgcgcggccctccagcgtccagaacacgccggtgcccagcgccaggtaagccaggtaggcgagcagcaggagcacggtgctgggcaccgcgcagccccggaccctgccctcgggagccgcccgggctcgcggtcggtacatagcgggagaggcggggagccggcgccgggagcggtggact

SEQ ID NO: 113288 - DNA, 668 bp, Homo sapiens
  chr6:39692722-39693390
  hyper
gaacatgcactagtctgcccccgcgtgaacacgtgtgcctgggtgcaaaaaaaatggctctctgccgggtctgcgctgtgccaggtaggagtggcctggctgtcggtcgcgtagctgacagcagtgcgcgggggtcttcgcggctgcagggctcctcggtcagtgtgtgcgggattccgggcggcctcggcgcccaccagcaagcccctcacctccgcccagccccttcgcgtgccgccgcccgaccccagcccaagaggccccgccgcgccggcgccccggaggctccagcccgtaccccttgttggtgcttccggacagggggcttcaccctcgcgaatatctggatagtctgcttcaccatctcctccctggctctgcaatgacccttgacctctctcaggcccgggctgccaaaactaactcccaccacctccggcgacccacagtcttagcaacagtagctagggacactacccagtgagcaccttggcagccaggatcccgcctcctccctctaattggtcgcgaccggaaggaggccactacggggcggggctagggaggggagggcgggggtggagaggagagcgctgcgcatgcgcatgagcgagtgtctgggctctgggtttagcgccggacccggcctggaccgtgtggttaaaggg

SEQ ID NO: 113289 - DNA, 181 bp, Homo sapiens; identical to SEQ ID NO: 42926
  chr6:39759926-39760107
  hyper

SEQ ID NO: 113290 - DNA, 30 bp, Homo sapiens; identical to SEQ ID NO: 42927
  chr6:39760401-39760431
  hyper

SEQ ID NO: 113291 - DNA, 476 bp, Homo sapiens
  chr6:39901936-39902412
  hyper
gtcaagcagataggccgggagctactgggggaaaagggcagtgtgccggggccactcctgccccgggaagctgtggacgcaggcggggtgggctcacctccgaggcagctcgcgcggactccccggggcagggctgggtcaccggagcccctgagctgcagctccgggcgctggacctcagaagccgccgcagcatccgggacagtggccgcgccgccatgaagcctgatacgagcggaaccgcagcccgcttcgggagcacactggccgggcactcgcccccggggtcatcccagcaagggcggggaggggcagggggagggcgggacccgcgcagccaataggcgaggacgcagtcccgcgtggccttgtgggagctgtagtacgctccctgtgcccactttcctgggccggggtagcgctctagggcagaagggtaaactcaggtaaggaacggggttcttttccttccagtt

SEQ ID NO: 113292 - DNA, 921 bp, Homo sapiens
  chr6:40554349-40555270
  hyper
tcctgctgttttcaacggttccatccacccgtggctccccgtctctccatccggctctccagtctcacatggacccggctctccccgctccccgccagagtttcacccccactgtaggaaataaagactaaagaaaggaaaggaaatctctcgcgataaggatgggcgaaaagagaagggggtgtccgcatgagcacctaggatgcggggagtcttcaagagaaaaagaaagggatgcaaagttcccggttccctcgggtgcgttcagccccgcgccgagctcccgcggacacccgggatcgcaaagacgcagcgccggcgaccactcacctgggcgaggcagcatctacccccggctgggtggcaccgaggccggctccgcggggcgcccgggctccccggctcggccacgcatccttccccgcccgagacagactcgagctaaaccctccggcggctccggcgaatgcaggcagatggtggcctcggacgtccacgcggggaaagccctgagccgcttattcagttatatccatggcatttagcaagaagaaggggggaaaagcacaacttgttctcttctcttccagattaaagaaaaataataataataatccctccctaggaggatgccggtaggattttccggatcgaagaaccccaggcattcccaggaacctcgggcatcttggaatgtggggtgtcttcaagttcagacgagcctgccgggttgtgtatgtgtgagtgtatgtgtgtctcagcgagagggagccaggcactcacacccacacgcacacacaaacacactcccccgtactccccgcatgcacactgccccccacgcgcgcgcgcatacgcgcgtacccggtttctctctccgctccacacacacacacacacacacacgcacacacacacaca

SEQ ID NO: 113293 - DNA, 634 bp, Homo sapiens
  chr6:40555282-40555916
  hyper
gctccaatctgggagggagtcgggcgggctgcggagacagcgcagggccagcagtggagaaaacccagcggccagaggcgcccaggaacccggcggccgtgcgcaccgtccccgccgagctctccggcgcggcagcccccagtggcgaaccgcggagctgcaggagccgaaggcagcctctgcgcccgctgccctgcccgctgccgagcgcacccgcttccgagacgaccaacaccgccgcggaaaccagagggattcacggtcctggcaggggtggcgcggggacgcacggtggggcgggagtgggctggggccgcagtcgcggagggaggtgggcaggccgcgagccccggaaccgggagggcggtctccgcggtccagcggcacgggcagcccctgcggaaggcgagccgggcggccagggctgcacctctgcagctggcgacggcgctgccacctcacgtgcctagcgcgccctgcagccgtcagcccgccgcctgctggaggaaaacccgaccgcgccggccctaggctgggagtgggggctggggcgatcgcgcccacccagtcctggggcccagttcagattctcgaatcctggtaagggacctatgaataacgagcgccccgtgca

SEQ ID NO: 113294 - DNA, 30 bp, Homo sapiens
  chr6:40722442-40722472
  hyper
ttcattaagccttcacgtttatacctgaat

SEQ ID NO: 113295 - DNA, 30 bp, Homo sapiens
  chr6:40722690-40722720
  hyper
ccagccgaggacctgcggaggaaggcgtag

SEQ ID NO: 113296 - DNA, 31 bp, Homo sapiens; identical to SEQ ID NO: 4803
  chr6:40763876-40763907
  hyper

SEQ ID NO: 113297 - DNA, 30 bp, Homo sapiens; identical to SEQ ID NO: 42933
  chr6:40802245-40802275
  hyper

SEQ ID NO: 113298 - DNA, 30 bp, Homo sapiens
  chr6:41039736-41039766
  hyper
ttttctctgcacgacgcaaaagtatttccc

SEQ ID NO: 113299 - DNA, 232 bp, Homo sapiens; identical to SEQ ID NO: 42934
  chr6:41039967-41040199
  hyper

SEQ ID NO: 113300 - DNA, 171 bp, Homo sapiens; identical to SEQ ID NO: 42935
  chr6:41040503-41040674
  hyper

SEQ ID NO: 113301 - DNA, 30 bp, Homo sapiens
  chr6:41286642-41286672
  hyper
cagggtgctgcgtacgtggctcttcagagg

SEQ ID NO: 113302 - DNA, 145 bp, Homo sapiens; identical to SEQ ID NO: 42936
  chr6:41337023-41337168
  hyper

SEQ ID NO: 113303 - DNA, 489 bp, Homo sapiens; identical to SEQ ID NO: 4806
  chr6:41339069-41339558
  hyper

SEQ ID NO: 113304 - DNA, 1586 bp, Homo sapiens
  chr6:41339601-41341187
  hyper
cgtgggcacttacacgttcccggggaggctgggggcaggagcttcactgttcacacaaagagcgcttagaggaggaacatttaagtttgggggcaaagaaagaaaaaagagttaaaggtttaggagatgggggaggaggatggggcttaaggacgcggtgttgccgcggctcagccatcggggcgggaagctcggggagggagagcgcctgggcccgcttctcgcctattctacgcagaacttttctctcctccttcttccctcgctctgcctctctcggggcggtctccggggactgtctctcacatccattctcctctcctccttgatttatgctgcagagtggaacgaccttccctgacctcattttcatgtcggcgcgagcacacccggagccggctacgcacattccggaggaggcgcgcgctgacacgcacacacacacacacacacactcgagacactgcagggccctgcccatcctcgagttcacaccagccccgccactattatgggcactgccggggctgtggacgctcaaagaatagatcctcattagcatcttgctttgaatatcatttgcattttattcatttcatgtcaaaacgctcagaactctccccagcccgcaccttccccagagcttgggagtcatgggtttccagctcaagccccttctctgtgggccccacgcttgctggctacccccaccccacctaccctgcgccacagcccccacaaaatgaattgacgtctcctaagcacttggcaagttccatctcctgcgctagggtgcattgtctcatctaatcctgacagcaactcaaggagcaaagcactatactatacccatttgagagtcgaggaaactgagtcacaaaggtgacttgaccaaggtcgtggagctaaaaaccgaggaggagaaactgaaacccaaggcgaccaaacaccaaacccaaagagcttaaccgcttcgctgccccggctcaggcaaggtcaaagctaaggtatgataactctggcaggagaaagtctgttttcctacgtggtagaaagtccttgggcccgccacgacccttcccccatcccggccgctggggcaccggggcacattcccagtgcgggcgctcgcagcaccacctcgcctggccgcccccagtcctgacccctttctagcgctggatcggccgggtccggcctccgtgctcgcggggtcgtccgtcggcgctggctagttaagaaaaataaacaacgttccaaatgaaggcgattcctttcaacccaagctccgccgcctgccagagaaatgcaaacagcggggtacggccggagtccgccccagcccccgcgccggagctgcgggtggcagggtcgggccgcggtaacccgagccgccgcgccggctccccgcgcgctgccctccgcctgccccttcgcccctgaccccgcagtcggcgcgctgggcctgcgcccgccatccccagcgccccccaccgggccgggacctccgccagcggtcctcggcgcccttcctgccccctccccccagcggtctcggccccatcccgaaccgccaccctgggatc

SEQ ID NO: 113305 - DNA, 700 bp, Homo sapiens
  chr6:41342773-41343473
  hyper
cctcttgggtccttcaaaaagcgccactttggagacggtgataaatctgcgctgcctgagtcgttcccctactcccaacccctcgctcctcatcactgcccctcctagaccctgctgtgtagacgggacctcaaggagttcccgagggaacagatttgaaagcccagctccgggttccatggacagtgtttgacaggtcagcccctcgctgtcctcctatccccctcctccaagtccggtccccctctttcaccccaacccccactctcgcgtgggactcagacactgatcccggagcgagaatgcggctgacagttaaattgcagtgtaggccgagggggggaaaagggaccatgtctctttaacgggccctgcagacaaagcgtctccccttggagcgagcggagccaggcgcagccgcgcgcagacctgtcagcgcgtctcacgcgcttgggagagagtttgcaaagtcataattatatctcttaacctgtcttgctctctgcagaagaaggtcccattatattgaaatgagattattagccatcaaatactttctttctcgggagttttttttttttttaattcaaataccttaacgacttggcaattgcattttgatcagatttagttggcgccccagcccggagcgggagccggggcgggaaggcagctggttggggagcgacgagggggaggt

SEQ ID NO: 113306 - DNA, 134 bp, Homo sapiens
  chr6:41343672-41343806
  hyper
ttcagacaaggcgaacgtggacgccgaggcggaggccaggctgcggaaatctgagggctacagaatagggttgggtctggggtactaggtaaggaccgaggctggagctgggagtggctcgggattaacttctt

SEQ ID NO: 113307 - DNA, 16 bp, Homo sapiens
  chr6:41437902-41437918
  hyper
gcgcacgtttctgggg

SEQ ID NO: 113308 - DNA, 243 bp, Homo sapiens
  chr6:41438185-41438428
  hyper
agggacggccagggccgggccgcgcgtcctaggcacccggagcgagctgctaagccggactggacggcgggagccatctgggccagcgcgggggccggggaagttcaaggcccgggcactgcgcagcgccgagggggatgacccgccgtctccggggcgccagcgccggctagttgctcaacctgctggattagtcactcggcgggacccgcgggaccgtcggaaaaacgcgaagggagcgct

SEQ ID NO: 113309 - DNA, 114 bp, Homo sapiens; identical to SEQ ID NO: 42943
  chr6:41472017-41472131
  hyper

SEQ ID NO: 113310 - DNA, 69 bp, Homo sapiens
  chr6:41513948-41514017
  hyper
gcacctgctttaggcgaattatggtagcactagaagttggtctcccctccctccgccgcttgctctctc

SEQ ID NO: 113311 - DNA, 30 bp, Homo sapiens
  chr6:41514417-41514447
  hyper
cggcggggttgaggcgcgcggcggtcggcc

SEQ ID NO: 113312 - DNA, 276 bp, Homo sapiens
  chr6:41605675-41605951
  hyper
ctctggcgctgtgggcgggtggcctgggagcccagatccctgtccctggcttaggaccccgggaggagaccgagggggtgggtaaaacgtgactgagaaacttgatcgcgcccatctttggggcaaagagatttggaggccgcaattattcagacagttccacgaagtggttgaggtttctctctttctcctgattttccagaaacttttgcagagtttggacaggcaaaggaaaacgtgcagcccgcggatctccgggcctcagagagcagggag

SEQ ID NO: 113313 - DNA, 319 bp, Homo sapiens; identical to SEQ ID NO: 42946
  chr6:41606037-41606356
  hyper

SEQ ID NO: 113314 - DNA, 67 bp, Homo sapiens
  chr6:41606527-41606594
  hyper
cgccctatggagcccccagcgcagccccgggcccaggtaggaccgggagtggcgagcgaagctggac

SEQ ID NO: 113315 - DNA, 30 bp, Homo sapiens
  chr6:41649899-41649929
  hyper
gcttattgaaataccggaagtagttcctgg

SEQ ID NO: 113316 - DNA, 113 bp, Homo sapiens
  chr6:41651427-41651540
  hyper
tctcgccacatcaactagtctcgctccggccgccgctggaggtgtggaaccggcgtggccgcagcgccacctcgtggccgtgaggagggaccgtgcccccctcagcacccaaa

SEQ ID NO: 113317 - DNA, 30 bp, Homo sapiens; identical to SEQ ID NO: 42948
  chr6:41692796-41692826
  hyper

SEQ ID NO: 113318 - DNA, 36 bp, Homo sapiens; identical to SEQ ID NO: 42949
  chr6:41747770-41747806
  hyper

SEQ ID NO: 113319 - DNA, 30 bp, Homo sapiens
  chr6:41748227-41748257
  hyper
tgccgggcgcagtccgagccagagagccct

SEQ ID NO: 113320 - DNA, 124 bp, Homo sapiens
  chr6:41754977-41755101
  hyper
cccgcaagaggcggcgaggtgacaagtttggagtgcgcccccttcagtactgcgcgttctaagacttttggcggagactttcttggcaaaacccattccccaaagctacgcttcccctgctgag

SEQ ID NO: 113321 - DNA, 257 bp, Homo sapiens
  chr6:41755384-41755641
  hyper
cggcgacgccgatacggttcctccaccgaggcccatgcgaagctttccactatggcttccagcactgtcccggtgagcgctgctggctcggctaatgaaactcccgaaataccggacaacgtgggagattggcttcggggcgtctaccgctttgccactgataggaatgacttccggaggtaaccgagcccgaggaacttggtccttttctggcccttaaatccgtatttcccctttcttgcgaggctggcgcctca

SEQ ID NO: 113322 - DNA, 171 bp, Homo sapiens; identical to SEQ ID NO: 42952
  chr6:41862276-41862447
  hyper

SEQ ID NO: 113323 - DNA, 30 bp, Homo sapiens
  chr6:41863426-41863456
  hyper
taaagggccagagacgctcccgagcccatc

SEQ ID NO: 113324 - DNA, 30 bp, Homo sapiens; identical to SEQ ID NO: 4814
  chr6:41863682-41863712
  hyper

SEQ ID NO: 113325 - DNA, 157 bp, Homo sapiens
  chr6:41888907-41889064
  hyper
cccaaggaatggggcgtgtctcggcacccctcggtgacgcctccactgacatcatctgcggattcccgccccgaggtttctaaatccagacattcccgtttggctgagcactctaggcctacatccatgaagctaggagagcgacactcaaagactg

SEQ ID NO: 113326 - DNA, 30 bp, Homo sapiens
  chr6:41889522-41889552
  hyper
actggggacaagcccgcggcgccgcgggaa

SEQ ID NO: 113327 - DNA, 30 bp, Homo sapiens
  chr6:42016371-42016401
  hyper
ccccggccggcatccgaacagagccagtct

SEQ ID NO: 113328 - DNA, 30 bp, Homo sapiens; identical to SEQ ID NO: 4816
  chr6:42016698-42016728
  hyper

SEQ ID NO: 113329 - DNA, 30 bp, Homo sapiens; identical to SEQ ID NO: 42956
  chr6:42018213-42018243
  hyper

SEQ ID NO: 113330 - DNA, 50 bp, Homo sapiens
  chr6:42072647-42072697
  hyper
ggggccgggggctcagggtcattgctgaactctggcggcggtgggatgac

SEQ ID NO: 113331 - DNA, 717 bp, Homo sapiens; identical to SEQ ID NO: 42957
  chr6:42109901-42110618
  hyper

SEQ ID NO: 113332 - DNA, 37 bp, Homo sapiens
  chr6:42145867-42145904
  hyper
ccctcgctgcatctccgagggtccgggtctcccctca

SEQ ID NO: 113333 - DNA, 43 bp, Homo sapiens
  chr6:42145975-42146018
  hyper
cggggcccggatgggctcacggcggccgcgcccctcgcccagg

SEQ ID NO: 113334 - DNA, 30 bp, Homo sapiens
  chr6:42185453-42185483
  hyper
cctgatgggcagagcggctggtggcaggga

SEQ ID NO: 113335 - DNA, 30 bp, Homo sapiens
  chr6:42185715-42185745
  hyper
gtgctttttgggggcgggacagttggctgg

SEQ ID NO: 113336 - DNA, 177 bp, Homo sapiens
  chr6:42418933-42419110
  hyper
agtgcatgggcaatccgacgagaagaccagtatccgcttggggggtgagatggggggcgagcagagctgatggagtaatttcaatattaatttatgtcagccgccttctctcagcgctactcacttactgtactgccctcagcctgtaaacaaatatcgctccgccaggaaacatac

SEQ ID NO: 113337 - DNA, 30 bp, Homo sapiens; identical to SEQ ID NO: 4818
  chr6:42419451-42419481
  hyper

SEQ ID NO: 113338 - DNA, 30 bp, Homo sapiens
  chr6:42420283-42420313
  hyper
ggcgagtctctggacgaggatgggacgggg

SEQ ID NO: 113339 - DNA, 30 bp, Homo sapiens; identical to SEQ ID NO: 42960
  chr6:42420756-42420786
  hyper

SEQ ID NO: 113340 - DNA, 30 bp, Homo sapiens; identical to SEQ ID NO: 42961
  chr6:42421228-42421258
  hyper

SEQ ID NO: 113341 - DNA, 30 bp, Homo sapiens; identical to SEQ ID NO: 4819
  chr6:42531622-42531652
  hyper

SEQ ID NO: 113342 - DNA, 3 bp, Homo sapiens
  chr6:42531864-42531867
  hyper
gga

SEQ ID NO: 113343 - DNA, 105 bp, Homo sapiens; identical to SEQ ID NO: 42964
  chr6:42531901-42532006
  hyper

SEQ ID NO: 113344 - DNA, 30 bp, Homo sapiens
  chr6:42532991-42533021
  hyper
ttagaagagattgccgagaatgattatgaa

SEQ ID NO: 113345 - DNA, 30 bp, Homo sapiens; identical to SEQ ID NO: 42965
  chr6:42713390-42713420
  hyper

SEQ ID NO: 113346 - DNA, 30 bp, Homo sapiens; identical to SEQ ID NO: 42966
  chr6:42714364-42714394
  hyper

SEQ ID NO: 113347 - DNA, 30 bp, Homo sapiens
  chr6:42714891-42714921
  hyper
agtcgggaccaacccgaggtgtgggtgggc

SEQ ID NO: 113348 - DNA, 30 bp, Homo sapiens; identical to SEQ ID NO: 42967
  chr6:42715329-42715359
  hyper

SEQ ID NO: 113349 - DNA, 35 bp, Homo sapiens
  chr6:42738992-42739027
  hyper
ggacccctccccctgcgggccgccgctgcgcccgt

SEQ ID NO: 113350 - DNA, 30 bp, Homo sapiens
  chr6:42847529-42847559
  hyper
tcaagggctcactgcggctaagtgaacgct

SEQ ID NO: 113351 - DNA, 30 bp, Homo sapiens
  chr6:42858632-42858662
  hyper
agaccgtaccaagccggcccagaactgggg

SEQ ID NO: 113352 - DNA, 50 bp, Homo sapiens
  chr6:42896708-42896758
  hyper
gggacagtttgagtcgtcctgcttgcaccttaagcgcctacaagagtgcc

SEQ ID NO: 113353 - DNA, 30 bp, Homo sapiens; identical to SEQ ID NO: 4820
  chr6:42897235-42897265
  hyper

SEQ ID NO: 113354 - DNA, 273 bp, Homo sapiens; identical to SEQ ID NO: 42970
  chr6:42928259-42928532
  hyper

SEQ ID NO: 113355 - DNA, 173 bp, Homo sapiens
  chr6:42947094-42947267
  hyper
catcgctgcggttgcgtagcgtttacccatgcgccatttgaacttgtgcttaagggatttatctttgccttctacggaagtaatgttctcttaactatttttccccgtggcatgaacgtaacagtttattgactgataaatgaacagtcagcatgctcgggatgactgggccc

SEQ ID NO: 113356 - DNA, 322 bp, Homo sapiens
  chr6:42952279-42952601
  hyper
ggaggcgcaggcaccgctcgacccgggcgcagcgcgcaggcggtggcgaagagacgccgagcgggccgagtgcggccgagcaaagccggagccggagcggggccgcaggagacgggccgggtccggacgggccgagatgccctataaactgaaaaaggagaaggtgagcgtggccctttttcccccaccgccgccttggagcctgcgcggagctctgggaggggccggagccaggcccgggacagccccagactgaccctcccgtccagcccccgcaggactcctggggccagccctccgcccccgcggctggcagcacccc

SEQ ID NO: 113357 - DNA, 274 bp, Homo sapiens
  chr6:42981635-42981909
  hyper
ccgctcagagcccgcggcctccacttccggcggggcaggacgtgcagaggtgcctagtcctccagccccgccccatatccatgattgacgctggcgaggacgaggagtccgccccttgccccgcctccgtcattcccagcccaaaaaacaaaggactgcattacccagtggcctcctcggtctcgacacatatttgcacatgcgcagaatctctcctacgcccctgcccactcctcagccctctcgtccctcaggaaacgtatggactacaagt

SEQ ID NO: 113358 - DNA, 30 bp, Homo sapiens; identical to SEQ ID NO: 42975
  chr6:42989081-42989111
  hyper

SEQ ID NO: 113359 - DNA, 36 bp, Homo sapiens; identical to SEQ ID NO: 42976
  chr6:42989813-42989849
  hyper

SEQ ID NO: 113360 - DNA, 30 bp, Homo sapiens; identical to SEQ ID NO: 42977
  chr6:43021166-43021196
  hyper

SEQ ID NO: 113361 - DNA, 30 bp, Homo sapiens; identical to SEQ ID NO: 42978
  chr6:43021399-43021429
  hyper

SEQ ID NO: 113362 - DNA, 304 bp, Homo sapiens
  chr6:43027110-43027414
  hyper
cagggccatcagcacgacacccttacttttagccaagctgctcggtgctcctagatgacgttgactgtccggcgccgtcgctccgcaataacgtaaaaggaggcgggcagaaaactggagcccaagctggatacacacctcctttcctacctgaacgccgtgagagccaatccgcgggcagctctaatgtcgcgtgactaggaaacaggccccgcccccccagacccgtcaaaacaattgcctcgagcggcagccatcatggatttaaaggggcagtaccggcaagagcggcagccacaccggc

SEQ ID NO: 113363 - DNA, 30 bp, Homo sapiens; identical to SEQ ID NO: 42980
  chr6:43027915-43027945
  hyper

SEQ ID NO: 113364 - DNA, 126 bp, Homo sapiens; identical to SEQ ID NO: 42981
  chr6:43081635-43081761
  hyper

SEQ ID NO: 113365 - DNA, 169 bp, Homo sapiens; identical to SEQ ID NO: 42982
  chr6:43138367-43138536
  hyper

SEQ ID NO: 113366 - DNA, 573 bp, Homo sapiens
  chr6:43138812-43139385
  hyper
gttcctttaagaggcgtcggctccacccctctcagagtcgcggtctgacgcgagatgacagcaacgagttcggtatgtctatgcaaataagcgccctcttgtgggccaatggggagcggaggtgccggaaccacggaccaatggggcgggggcgctggggctcaccatataaggagcggcctcgccataaaaggaaacattgtatctctttatatggggggaagggtcgggggatccctccgccgccagcgcgtggtcccggccccctccacccgccgtctcggccgcggccagcagcccctgccccccgggggacgctgacggccgcccggcgcgccgccctagcagacggacagggggcgctgcgcgcggcctggggcaacccgggccacaggggcaggaaagtgagggcccaggtcggcccgggcgtgcaggggccccgggttcgcagcggcggccgcggcagcgatagcggcactagcagcagcgggagtgccgggttgagccgggaagccgatggcggcggctgcggcggctccgattcctcgctgactgcccgtccgccctcctgca

SEQ ID NO: 113367 - DNA, 30 bp, Homo sapiens; identical to SEQ ID NO: 42984
  chr6:43139665-43139695
  hyper

SEQ ID NO: 113368 - DNA, 30 bp, Homo sapiens
  chr6:43149935-43149965
  hyper
acggcgggaccggccgctgggtcccagcga

SEQ ID NO: 113369 - DNA, 174 bp, Homo sapiens; identical to SEQ ID NO: 42985
  chr6:43196992-43197166
  hyper

SEQ ID NO: 113370 - DNA, 57 bp, Homo sapiens; identical to SEQ ID NO: 42986
  chr6:43211193-43211250
  hyper

SEQ ID NO: 113371 - DNA, 30 bp, Homo sapiens; identical to SEQ ID NO: 42987
  chr6:43214835-43214865
  hyper

SEQ ID NO: 113372 - DNA, 30 bp, Homo sapiens
  chr6:43214880-43214910
  hyper
gtgtccctccgcttccgcagaggacggaaa

SEQ ID NO: 113373 - DNA, 394 bp, Homo sapiens
  chr6:43237209-43237603
  hyper
ggcaggaccttggggcgggtggtttgcaccctcctccaccctgcctgaccccgcccacttgcccgggacgccggcgccgcaggggctgtgagcggtgggtggccccggagacggagctgtcgagtctgtgcctgacacctcttttccctccactttcttggtctctttcagttggaggaggacagactctcggggcactccctcccgcggtacagccccctgcgacgactggcgtcctccgtgttctcctcctccacgctggagacggagcattaccctcaccccggcggcggcggctcctcgggctcctccggttccctcattcagcgcagccgctcggctgagagcagccctgtgcgggcgccccaccggcgccacgcgcccctcgctgctg

SEQ ID NO: 113374 - DNA, 159 bp, Homo sapiens
  chr6:43242825-43242984
  hyper
ctccctccgtagctgcgcgcacttcgcccactctccggaccctgcactagcggccccggccgggagggcacgaggactgcgcagccggacccccgcaggtccccaagccaggggtcccgtccatccgcccgcccccgcggccagcgccacgaatgtacg

SEQ ID NO: 113375 - DNA, 774 bp, Homo sapiens
  chr6:43243257-43244031
  hyper
ctaagcctccaggctcggagggccctgtcgccccacccctgactcccgttacctcactgcccgtcgggctgccccccaccccgccccaataattggccttgcaattggatgccaaagagcccagagttgagggggagcagagctttgagcccaggtctctcagagcaacccaacagccccctttttgcccacgccccaatccgcgtcccctgccccaccccaccactgagggccctgggggtcaccaaacatgcccccccatttccagctcttcccacacccccacccccgaaaataaaactcagggaccaacatctgcttcctttgcacttgctccgtcgaccccgctccccgctcggaggggcttccgtgggggagggggcggggctccgggccctcagagttctcagtgtcgagcgaggagaggggctggcccctgcccccggagaagcgggactggtaggagagagaaactcagcaccggggcccagctgagccccttcctgcgtaaggagacgccttctaattgcggggtgggggcggagtaggggagggataggaaggggattagcgagaggaccctcgcggaggtcctgagtcccagtcggtttattcctgagccttcccctcccatcgtaagtccttccctcgaccccccattttgtactgcaataatactgtattatacgcttgcactatttcccgaccctggccagcggaagcatgcacgaaaaactcaaaaccacacacacgctcacacgcacacacacgcac

SEQ ID NO: 113376 - DNA, 164 bp, Homo sapiens
  chr6:43244096-43244260
  hyper
cggcgtcggggggtggccccaggcccgggtagaaaagcatgcactgagccccctgcccctagactgcgagtactgtacaaatccaacacttgaaaccgacacgcacacgcgcggcgccgccacgggggtgggacacggacacgcacccacgcgcacacggccgc

SEQ ID NO: 113377 - DNA, 281 bp, Homo sapiens
  chr6:43276398-43276679
  hyper
actacactgtggctagccctccgcgtcctcagggaatccagcggctcccattcgccccatcttctccccctccgcagcccgggcctcaccgaagaaaacaggttgctggcaacgcggacaggtccagctcatagctccgctccaggcagcgcacgcggcacacagtaggtacgccgctgcggctcagttccgccccctccgcaggctccacccacggctcagctttgagcctccctgggcggaatccgcggttcctcggcgctcattggttatcagaaatt

SEQ ID NO: 113378 - DNA, 30 bp, Homo sapiens
  chr6:43336719-43336749
  hyper
gcctggatggtctccgcggccgtcccgggc

SEQ ID NO: 113379 - DNA, 76 bp, Homo sapiens
  chr6:43337693-43337769
  hyper
tttagggatggacacgaaatggttgaaaaccattcgtgataatataaacgggcctgtaaacgttagctgtgtggga

SEQ ID NO: 113380 - DNA, 30 bp, Homo sapiens
  chr6:43395394-43395424
  hyper
agttctcaggatatcggaatccggtgcaca

SEQ ID NO: 113381 - DNA, 30 bp, Homo sapiens; identical to SEQ ID NO: 42992
  chr6:43395754-43395784
  hyper

SEQ ID NO: 113382 - DNA, 30 bp, Homo sapiens; identical to SEQ ID NO: 42993
  chr6:43422680-43422710
  hyper

SEQ ID NO: 113383 - DNA, 57 bp, Homo sapiens
  chr6:43423047-43423104
  hyper
gtcccctttctatctccgccgcgctgggttcggcggcggcgcggggcctggaatccc

SEQ ID NO: 113384 - DNA, 30 bp, Homo sapiens; identical to SEQ ID NO: 4829
  chr6:43423742-43423772
  hyper

SEQ ID NO: 113385 - DNA, 93 bp, Homo sapiens
  chr6:43477368-43477461
  hyper
agggcccggcagatgcggccaaagtcgcggtcgcagaggcggcagccgcgcagtgagagcaggcgcacggcgttgtcgcgaaggccgcggcag

SEQ ID NO: 113386 - DNA, 39 bp, Homo sapiens; identical to SEQ ID NO: 4830
  chr6:43478198-43478237
  hyper

SEQ ID NO: 113387 - DNA, 30 bp, Homo sapiens; identical to SEQ ID NO: 42997
  chr6:43484797-43484827
  hyper

SEQ ID NO: 113388 - DNA, 253 bp, Homo sapiens
  chr6:43543533-43543786
  hyper
gggtccatcatgaccgtcaccgctttcaccagctgctcgcacagcgcgtttacttgatccatcgccatgcctagcgccacgcgccgagagcgcacaccactgcagtcccgggaccacgaggcacgacagctccctcggcgagaccacccgttggtaccgggccgcggcgggcggcgggggtgggaagctggaggaggagcgttagcagcaactcgcgctgggaagaagccggcgctgcgcacgcgcccggccc

SEQ ID NO: 113389 - DNA, 30 bp, Homo sapiens
  chr6:43544184-43544214
  hyper
aatttagaaccgttcgctgtcactgtgttc

SEQ ID NO: 113390 - DNA, 99 bp, Homo sapiens; identical to SEQ ID NO: 4831
  chr6:43596712-43596811
  hyper

SEQ ID NO: 113391 - DNA, 127 bp, Homo sapiens
  chr6:43597010-43597137
  hyper
ctctgcacaagctacgccccccacctccctggcctccgggtcgcgtcagaaacagccgcggggcaccacgggatatagagtccccaggcctgggaattcacttaaatgacacgtcgccgccctacaa

SEQ ID NO: 113392 - DNA, 142 bp, Homo sapiens; identical to SEQ ID NO: 43001
  chr6:43597645-43597787
  hyper

SEQ ID NO: 113393 - DNA, 134 bp, Homo sapiens; identical to SEQ ID NO: 43002
  chr6:43598078-43598212
  hyper

SEQ ID NO: 113394 - DNA, 153 bp, Homo sapiens
  chr6:43603408-43603561
  hyper
gggcaagggttaggcgtacatttgccagggtgttaaaggaggaacgcagggttcaaatcccagctccacttaacctcccccacactgcggcgacgccgcgccttttttccgacccaactgagccggaagtggaggcgcgggcttcccatgatg

SEQ ID NO: 113395 - DNA, 41 bp, Homo sapiens
  chr6:43612857-43612898
  hyper
tgtctctggagctggcgtccggcagtgggcagggcctcagc

SEQ ID NO: 113396 - DNA, 78 bp, Homo sapiens
  chr6:43613052-43613130
  hyper
cgctctataggtgaggaggcccccgggacgggctccccagagggtggctacctggaggcagggcggggtgggcgggtc

SEQ ID NO: 113397 - DNA, 30 bp, Homo sapiens
  chr6:43655331-43655361
  hyper
cgcaccggggctggcggaagcagtctctgc

SEQ ID NO: 113398 - DNA, 30 bp, Homo sapiens
  chr6:43655584-43655614
  hyper
tggggcaggaacggcggggcggggttgtag

SEQ ID NO: 113399 - DNA, 30 bp, Homo sapiens
  chr6:43737755-43737785
  hyper
ccccttcattgcggcgggctgcgggccagg

SEQ ID NO: 113400 - DNA, 492 bp, Homo sapiens; identical to SEQ ID NO: 43003
  chr6:43969982-43970474
  hyper

SEQ ID NO: 113401 - DNA, 14 bp, Homo sapiens
  chr6:43970721-43970735
  hyper
ggcatcgcttcgcc

SEQ ID NO: 113402 - DNA, 388 bp, Homo sapiens; identical to SEQ ID NO: 43004
  chr6:44044180-44044568
  hyper

SEQ ID NO: 113403 - DNA, 67 bp, Homo sapiens; identical to SEQ ID NO: 4832
  chr6:44094339-44094406
  hyper

SEQ ID NO: 113404 - DNA, 271 bp, Homo sapiens; identical to SEQ ID NO: 43006
  chr6:44095870-44096141
  hyper

SEQ ID NO: 113405 - DNA, 58 bp, Homo sapiens; identical to SEQ ID NO: 4834
  chr6:44187016-44187074
  hyper

SEQ ID NO: 113406 - DNA, 482 bp, Homo sapiens
  chr6:44187131-44187613
  hyper
cgacccagggggaggggcagagagaagggggtccgagcccttgggcccctaaccccgtccctttccggagcctcgggtgcccaaaggcgccggccgccagtcccaggcccgaagggcccctcccactgagtcggctctggtctccccgcccctgagccgcgaggactggacgcagctggctgcggagctctgggcgggcgctggggtcgcctgttgcagcctctcttccgcccggcggcccacaccggtcaggcccggcgcgggctgcgctctccagctgtggctatggccccagccccgagatgaggagggagagaactaggggcccgcaggcctgggaatttccgtcccccaccaagtccggatgctcactccaaagtctcagcaggtgcgcggggcggggccggggggcctggcggggcggggtggggtgggggcgaggtctgcgccgttctcacgctgccgggcgggacagggggcca

SEQ ID NO: 113407 - DNA, 30 bp, Homo sapiens
  chr6:44205501-44205531
  hyper
ccagagctacgtggcgctatcagttaccag

SEQ ID NO: 113408 - DNA, 30 bp, Homo sapiens
  chr6:44213705-44213735
  hyper
ccggcatcgtcacgcggcctccaagagctc

SEQ ID NO: 113409 - DNA, 30 bp, Homo sapiens; identical to SEQ ID NO: 4836
  chr6:44214200-44214230
  hyper

SEQ ID NO: 113410 - DNA, 30 bp, Homo sapiens; identical to SEQ ID NO: 43010
  chr6:44214644-44214674
  hyper

SEQ ID NO: 113411 - DNA, 30 bp, Homo sapiens; identical to SEQ ID NO: 43011
  chr6:44215347-44215377
  hyper

SEQ ID NO: 113412 - DNA, 3 bp, Homo sapiens
  chr6:44224919-44224922
  hyper
tcc

SEQ ID NO: 113413 - DNA, 43 bp, Homo sapiens
  chr6:44225457-44225500
  hyper
ctgtgcttcgtcatcgcccttcataagcgtcccagaggtcatg

SEQ ID NO: 113414 - DNA, 30 bp, Homo sapiens; identical to SEQ ID NO: 43013
  chr6:44233431-44233461
  hyper

SEQ ID NO: 113415 - DNA, 30 bp, Homo sapiens; identical to SEQ ID NO: 43014
  chr6:44238977-44239007
  hyper

SEQ ID NO: 113416 - DNA, 736 bp, Homo sapiens
  chr6:44264995-44265731
  hyper
ctcgggtgatgggaacggacggcctttcggagaagcctagggccccagggcttgggaccgctctcctccacgccctacggatgccccactttccccctcttcttcccagtccctcccctcgcctcactcggatccccagccccgggccagacggtttgcagacagtgactgtggtggggaggaggcgcggggcgtcctcgcgtggagggcgtggggtctcccgtgggtacggaccggcgcttccccgccacggaaaacgcaacccaggcaatggccgcccgtgggcttcgggccggtgtgggcagaggacgctagaggggctcccgggcccagccggccagagggggccccgataagggagaccggggctgggtgtccccactcccggaggtcgcctcacccgctccgggagccccggcgctcgcctcacgcagagtcccgcgcgccggcgcaggtctttgtcgttggggacgccccgcgttgctaggagcgggccgggccgggaggacgagcgcgccgctgcttcctccgctgccgctgccgctgcgcgccaggcacgcggcttactcgcgcgcagggtggccaggcccggcctcgggacggttccgtggaagcggccgctttgcgggtagtgggactgtggccttgcgctatgccctgtgcttccgtgggacgtgtctaggaacgggtgggctttctgcgggaggcgggggtcgggcagggctgctggtctgga

SEQ ID NO: 113417 - DNA, 30 bp, Homo sapiens; identical to SEQ ID NO: 43016
  chr6:44281017-44281047
  hyper

SEQ ID NO: 113418 - DNA, 35 bp, Homo sapiens
  chr6:44355179-44355214
  hyper
ctgccactcggtgacgtcacgatcaatcccaccac

SEQ ID NO: 113419 - DNA, 30 bp, Homo sapiens
  chr6:44443585-44443615
  hyper
caaggtgcatccggcggccagcaggtgtca

SEQ ID NO: 113420 - DNA, 30 bp, Homo sapiens
  chr6:44623287-44623317
  hyper
cgtgcctgctcagccgctgtaattgagaca

SEQ ID NO: 113421 - DNA, 128 bp, Homo sapiens
  chr6:45345431-45345559
  hyper
ctctgcgtccctcccggctctctgacgtctcccccgcccgaatccccgcaccgccccccgcaagccctacaacctctgctttaagaacccttggaggcactgctgcgcttcccgcgaggagaatgtgg

SEQ ID NO: 113422 - DNA, 1562 bp, Homo sapiens
  chr6:45387304-45388866
  hyper
ctctctctctcttttttgaggcgaaagcctggcttcccttcccggatcggccgcctgtgggactcgagagacctgtgcacgcaggggacgcggcggtgcccggggttagagctctcccctgtgaccgaaaagataattaaaaatcgcacgcgcaggagccagctcagctcctggctgcgcttccagttggtccggtctggctaaatgggttctcgcaccctggcggcgcccgggctgggaggccagtaggccgggcgcgaagagtaggttggggaccaggtgtcatagccggtggcgcagaatcgcttctcggagtcaccgagggtggcagtggcaggcggcggctgtggggcgggaggggcgcggcttggggctagtgtctgtggagggatttggggaagaggcaggaacgtggagagaaacgtgggaaagggaaagaccgacgagggaggcgtggagcagtgcatggaggaagggcaggtaaaaataaagccccaattaggaaggacagagtagtatcccctgaactccatccttacccctcgagagcgcacacctggctaccccgcacccccacctctgctcccgcggtctggcagaccctcagtcccccgcgcatctcttcagcggggcgatcccgagtcacgcaaccacagccccccaagctcatcttgtactcgaaagggctccagagtccgcgactggcaccaggcccccatcttccgtgcccctcatgctctcagagcccttccaggccccttctagggcgcagacccgggcgtgggctcagcgagtgggagcaaagctctaaaaccagacagggagggtcgtggcaggtcgctacgagggtgagggaggcgtttgcactgagcaataaaaacacccagtaatgggtatgtgaattgctttaaataagatgggagggcgtgagagatgacccaaccatctttcttccttgatgcttcgagggggaggcattctaattcttcatttattttataaaatcacttgttactgtgtcagctactccactaggaatctttgaaactttggcaactgatgatttttttcgcaaacacgttttcaagctttggaaggctttaaagagtttggtaataagcaagaaacgtagtagtacacaacgccgagggtaaaacggccctgtgcccccttcttggggtgtaatagcctcaagcggatttcccggcttctgcgggcgcagcacattgttttatttgttttgaaggctcagagtttgaggctggtcgtagacacccacgtgctctgactctcatcagcgtaatgatcgacttagccagagtcgtgtctatataaaccacaaaaacctaatcattagaaatcccagcctccaaaaaccacattttaggtaaaaagtgccgctttttttccgcgctccttcatcctctcgaccacaactttttgggggatccaaagtcgctttttaaacccacactaggaaataaatacataaataaacagccacggaagcattttgaattttttagttcgtatttttaatttttccccgtgagcgctgggga

SEQ ID NO: 113423 - DNA, 44 bp, Homo sapiens
  chr6:45390375-45390419
  hyper
gcccggcaaaatgagcgacgtgagcccggtggtggctgcgcaac

SEQ ID NO: 113424 - DNA, 1003 bp, Homo sapiens
  chr6:45390538-45391541
  hyper
gtgccccggttgcggccgccccacgacaaccgcaccatggtggagatcatcgccgaccacccggccgaactcgtccgcaccgacagccccaacttcctgtgctcggtgctgccctcgcactggcgctgcaacaagaccctgcccgtggccttcaaggtaagaggctacaccgccccccgcccccggccgggagcggcggaacctgcccgccggtgtcttcctgcccacggggctgggccccggacgtcctccaagacctcctgccttggcggctctaaccccagaaacccccggccgggcctccctccggatgccctggcgggctcggggctcagtccctccgcgcaaatccctccctctcccacctgtgcccgctgccaccccgacttcagccctagtccccctgacccgttcagcactcctcatgcctcctgcctggccttgattctcactcactccttcgcgccgtctccctttcccccaggatccccaaagtacccactcttgcactgcgagcggacttgctccaccccgcccctttcccgggggcgaggatccccggcattgtcccctggggctcccgcgtccttccgggacatcccggcctggccgcattgcgggctgcccgcgcagcctctctttggggctccgcgcgctctcacccgcttccctcacagccaaacgcctctcctcaggtctcggcgtccccttccccgacccgcagagttcagcggtcctggtccctcccgggctcccgtgccgggattcgtggggtgccggtgccgggcattagtgcccggggctgggcgtggggtgctgactgaggcgcgcgggctgcgctaccagtgcccgggagggtcctggacaaacctagggtctccagaggagggggtgtcagggcgggggcgtttgctctgttcgctgacccgcgccagatcccgttaccgggaggaaggcggggccgctggggcgtccgcaagccccgaagcgggggcgttcaggg

SEQ ID NO: 113425 - DNA, 37 bp, Homo sapiens; identical to SEQ ID NO: 43021
  chr6:45631098-45631135
  hyper

SEQ ID NO: 113426 - DNA, 23 bp, Homo sapiens
  chr6:45631602-45631625
  hyper
cgtttcagcgtgaaacagacccg

SEQ ID NO: 113427 - DNA, 963 bp, Homo sapiens; identical to SEQ ID NO: 4841
  chr6:45982720-45983683
  hyper

SEQ ID NO: 113428 - DNA, 373 bp, Homo sapiens
  chr6:46097248-46097621
  hyper
cccggtaaaggtgctcgcttatccagtaagacggacagacgtctatggtagatccacgtttcatttatcccaactcactggaactggctgaagcttctccagacttgtgccggaccttggtgcagccaaagttgctttctccgcggccacctaagctgccaggtgcacattaactaagtggcagaaggccatcggcttggcaattgcctgaggcctttccgggactcgctggtttttaggttccatgaagggcatccagatctaggatgatacgaaaagtgcgtggtgggagagtggaatcaacctctactcttaggtccgatacaacccctccaagcacctgtctaaccaatcggaaagaaagttacattca

SEQ ID NO: 113429 - DNA, 535 bp, Homo sapiens
  chr6:46097694-46098229
  hyper
cgccttagacgctcgcctggcagctgcgcacactcggagcgccccgagcggcgcagatagggacgttggggctgtgccccgcggcgcggcgcctgccactgcgcaggcgcctcaggaagagctcggcatcgcccctcttcctccaggtcccccttccccgcaacttcccacgagtgccaggtgccgcgagcgccgagttccgcgcattggaaagaagcgaccgcggcggctggtgagtacgcgcctcgcgcgctcggcgttctggggggcaatgtcaccccctctccagtcccctaggggctttgaaaatagagatggtgagaccagaccctatgacccactctcccccactacacgcacatcccctggggcgcggcggggacgtccacgaagggactcaaagagccagggaggtggcgggccgaggcggaggccaggaagggaagaggaaagaaaaattagcaggtgctggggaaggcaacctgtggtgttaagtgtgaagggagggaagtcagccgaacggtagtggaggaac

SEQ ID NO: 113430 - DNA, 706 bp, Homo sapiens; identical to SEQ ID NO: 43026
  chr6:46138266-46138972
  hyper

SEQ ID NO: 113431 - DNA, 539 bp, Homo sapiens
  chr6:46459376-46459915
  hyper
ccctgccctcagccccgcaccccctcctttccacttcaggtgcccgggagggcgcaggagcctccgggcacctggcgtgggagcctggctgcaggagtcccggcctcagcgggaagaggctcctcggggtcccatactaagctgagggtgagggggcagcgacagcccagaagaaatggtcagagaagcaaactgtggtgggggagtactgggagaaagactcttcttaccagatgtctgagccccccgactctggctaactgaggaaatgtcggggagcccctggatggtcctcccgggcttctgcgcttggtgggcgctggcgccctctggctggagccctgcgcccggcccagcccaggccgctgagggtgccctgcgcgggcttcacagctttgccaggatttgcagccatcagacctgaggacagaagggttcgggctgcaaggaatcctattgtgtgagagccatgacacagtgagtgggaggttggtatcctacagcaaacgggactgaaggtgaatcgcaatctagggtag

SEQ ID NO: 113432 - DNA, 30 bp, Homo sapiens
  chr6:46620391-46620421
  hyper
gctacggaacctgtcgggactcccaacctt

SEQ ID NO: 113433 - DNA, 30 bp, Homo sapiens; identical to SEQ ID NO: 43027
  chr6:46620646-46620676
  hyper

SEQ ID NO: 113434 - DNA, 877 bp, Homo sapiens; identical to SEQ ID NO: 43028
  chr6:46702584-46703461
  hyper

SEQ ID NO: 113435 - DNA, 88 bp, Homo sapiens
  chr6:46816764-46816852
  hyper
tagaccgttgggcgcgtcatccgcgggactgactgcctcccgccggcttcctgaggccggaccgcagcggggacgcctcctctcaggc

SEQ ID NO: 113436 - DNA, 997 bp, Homo sapiens
  chr6:47276364-47277361
  hyper
cctagccacaggtaaacgagggatcggaaagactgtagaaaattcatcttccttcacacacatctccttccccctccccccattccagtgccggcgcgctggctggctggaagccggcgctttggaggcgccggagagtgggtctaagggtgatatttcggcatacagaacctgagaccccacccgagccaagagggaagagagagggtaaagggattgaggagggggcggcttgcgccctgctcgggaatgcaccgcgcgacagcacccggaggtctccggtgtccggcgcgcaccggtaccactgtcttccactgcggtagcatcccgacatgacattgcagctgcaacaaagcgccggcctcggccggccgtgggagccccacaccgcggcgaggccccacaccacgcagaggggcagtggccgatgggtggggggctgtggctgcgggcgtggggagcgcgaggtaggccgagtagggggaaaagccctcaaatgcgcagaagctgggcggctacctctagcgtctcctccagcaaagccagactgcaaggaaaacaattcgtcttcattccccagccccggctgagccctgagattcccccaaataacctagtcgaggccctctggtgtgttgccttcccttggaaacccctcagtgcccgtaacccagtcggccgggccccgcgcctccctaagccccggcccggtgacccgcccggctcccggagagcggttccttctgctccggcgccgccgccacccccggtccacgcaagcgctcaccaggagaagggagcccgcgatcatcgtggctgtggctcggcgggcgatgcggctgcaggaggcgagggcggtgctgctgctcggagaggtccccatggctgaaccggggactcgcaggggcgcccggggcgcgcggggcagctggaatcggcggctgcttctgcccagcgccgcatccaccgccgcctcccgggccgggagcccatctac

SEQ ID NO: 113437 - DNA, 30 bp, Homo sapiens
  chr6:47277807-47277837
  hyper
gaggaaattgcacgcgcctgttgacccagg

SEQ ID NO: 113438 - DNA, 128 bp, Homo sapiens
  chr6:47382531-47382659
  hyper
tttcatcttctccagcgcccgaggcatcagaagaatttatgtgaccccaagatcaccttgaaaccatattaccggtttatggtttcctaaaagctttttgtgtgattaggtttcgttttactgttaat

SEQ ID NO: 113439 - DNA, 30 bp, Homo sapiens; identical to SEQ ID NO: 4848
  chr6:47413210-47413240
  hyper

SEQ ID NO: 113440 - DNA, 30 bp, Homo sapiens
  chr6:47446183-47446213
  hyper
cgggtgctttccctcgctctcccttctccg

SEQ ID NO: 113441 - DNA, 30 bp, Homo sapiens; identical to SEQ ID NO: 4849
  chr6:47655314-47655344
  hyper

SEQ ID NO: 113442 - DNA, 79 bp, Homo sapiens
  chr6:47755946-47756025
  hyper
tacctgttgccacgcgatggcgctgtcgcaacaggaacggtagctttcctggccagctcgcctcgcgggcccctaaggt

SEQ ID NO: 113443 - DNA, 30 bp, Homo sapiens
  chr6:49430773-49430803
  hyper
ccagaagaatggagcgatctgaaaggtgta

SEQ ID NO: 113444 - DNA, 30 bp, Homo sapiens; identical to SEQ ID NO: 43034
  chr6:49431022-49431052
  hyper

SEQ ID NO: 113445 - DNA, 1137 bp, Homo sapiens
  chr6:49518139-49519276
  hyper
tttgcgcctcagctccggagaaaaacgaaaggtgggtgggaaactaggatagaggtgaaaagtaagaggggactgaatcagcgaatgacaaagggagcagggctccggacaggggtaggaggaagaagaggagtgactggggcttgtgtcaagcttcttctgaatggctagacagccgccaggtgggagaggcggagggtgaagaggcgggttccgcacgcggttagcctggggctgatctagtcttcagctttcaccggctgggagtccggagctgcagcagaggccacacccagggcttggtggtcccgcgctttccggagctcagcaggcgcttgctgcttgaaccggtcaaagaaggaacgaatgaatgacccttttgccaggatggagacccgggggcctcagggagctgcgaatcccatggactcctcccgcagcctgggggacctcgggccttttccgcgggaggtagggcgcggggctccgctagctccgggcgcccggaatcccgcgacggcaggggcgagccgaagccagggcggcggccacgaggacagaacggcagatcgggccctcggacctcgggccggggaggaattggaccgtgagtcctgggtcagagagaaagtgctctttctcctgcacccagagaggtggttagggactcgaggggaccctgcacgggaagaggtggccggtgcagaggaccttcctcatgcgggtggagaggaccacggcgaggagcccaactacccttctgtctttcaacgacaaaagcgaatttctggcaggcgtgtagccccgccgcgggacgcagcagacccacccaaatacgtgcttgtgcgggtggaggattatcaggtaacacaagaagtgttgcagacctcctgggccaagggtcgcatgaccacgaggactgaggagcacttcgtgaccgcgctcacttttcgcagcagtagagagggacagcctggggaacgctggggccctgctgaatcccgggctctccaggcacgaacaggggcatcccgcgtccacgccgcggggaggagggtttcaccgtctccagggacttggctcgaggaaattaaactctaatgagtagctcgagaaatgttccgggatggtggatga

SEQ ID NO: 113446 - DNA, 492 bp, Homo sapiens; identical to SEQ ID NO: 43036
  chr6:50674320-50674812
  hyper

SEQ ID NO: 113447 - DNA, 309 bp, Homo sapiens
  chr6:50681729-50682038
  hyper
agggggaaattgcatcgtaagctttcggagaaacccaacatgtcaactacctttccgggactagtccacgatgccgaggtattattacttttttttttttttttttttgagcgcgcgtgtgtgtggcggcggcggcggtggcggcggtggcggcggcggtggcagcctcccctgtctctaatctatattggaccgttacgtttaattataatctgtctttcgggggaagttaaggaaggaaaggggagaaagttcgttatgacatctgtcgccagggagggcaactctctgccacgttaagaaacattt

SEQ ID NO: 113448 - DNA, 73 bp, Homo sapiens; identical to SEQ ID NO: 43038
  chr6:50682265-50682338
  hyper

SEQ ID NO: 113449 - DNA, 235 bp, Homo sapiens; identical to SEQ ID NO: 43039
  chr6:50682448-50682683
  hyper

SEQ ID NO: 113450 - DNA, 229 bp, Homo sapiens; identical to SEQ ID NO: 43040
  chr6:50682711-50682940
  hyper

SEQ ID NO: 113451 - DNA, 392 bp, Homo sapiens
  chr6:50682991-50683383
  hyper
cgctccaccaccagtccttccattacgagtttcagcacagccacccggccgtcacccccgacgcctactctctgaactctctccaccactcgcaacagtactaccagcagatccaccacggggagcccaccgactttattaacctgcacaatgcgcgggcgctcaagtcgtcctgcctggacgagcagaggcgggagctgggctgcctcgatgcctaccgccgccatgacctgtccctcatgagccatggctctcagtatggaatgcacccagatcaaagactcctgccagggcccagcctggggctggccgccgcgggagcagacgacttgcaggtaaataagcatgcagcgaatttgtctgctccctcccctcttcgccctccccctgcc

SEQ ID NO: 113452 - DNA, 189 bp, Homo sapiens
  chr6:50683583-50683772
  hyper
gagtccgggcggctgcggccctccatctttggtttgtcctcacagaagtcttttgtgaatcaacatttgtgaccctgaggggatgaggtggaggagatcgaggagtctggggttgggccaaccggactcagagtaagatccaataaattgatgaccaatcgtaccctcaatctccgcactttacagggt

SEQ ID NO: 113453 - DNA, 238 bp, Homo sapiens
  chr6:50684819-50685057
  hyper
ctatttactccttttaatagccgcgtctgctgctgatttttttgtatctgtacaaattttttttctgtgctaggcacaaagccgagcatttttcaaaagagcggattagaacatttgcaagcactagacaaagagcgaatcccgtgcaaaaggacaccgtagtttatccaattttcgacttagtgccattcaactggtcatttatgcaatgtcatccgaccaaacaacatgttttact

SEQ ID NO: 113454 - DNA, 177 bp, Homo sapiens
  chr6:50689869-50690046
  hyper
tatttgccactgcctcggaggcgcagctccctgcgtgctgactctcggttaatggtgtacgcgattttgcccgcagctccggctctccaaccatcagaaccaataatctttactttaccctgtgctcgcgtatcgatagcttctttcgcctcgggcgtaggctttgatatgttaata

SEQ ID NO: 113455 - DNA, 532 bp, Homo sapiens
  chr6:50690661-50691193
  hyper
cacgcgaagagggagcggacccggccatgggcaggcaggagcgctttcctgattgcccgtggctacacaaaatacaaactactttgaatcaaaacattttggaggaattaatatgatctgaactctgcacgttttaagagagtttgagtttgtcagagcgcttagaggtgactggcacgccaaggcaaaggcatttacgccgcggtacaaacattgtcagatctgatttaatttctttaaaaaaaaaattccttgaaatggaaccttagcttcaattgctcagtctgcccataacagagtagaaggacctgatcgcttttccctttagccggcctcaaggccggcagcaggctgcttggcaggaggaagcgatttcctctgcttctctgggtttcaggaaggcccagagccttggaatccgggatggagaaagccgtggattctttcagcagctcctgaaggagtacaattggaggagcgtgggaagccttgctcttcttcctttgtcagtactcttcggattccagatgga

SEQ ID NO: 113456 - DNA, 289 bp, Homo sapiens; identical to SEQ ID NO: 43045
  chr6:50691923-50692212
  hyper

SEQ ID NO: 113457 - DNA, 331 bp, Homo sapiens; identical to SEQ ID NO: 43046
  chr6:50692299-50692630
  hyper

SEQ ID NO: 113458 - DNA, 196 bp, Homo sapiens
  chr6:50785152-50785348
  hyper
gtccatccctgttcgcgcagagctgcacacagcagtcctggatttaaagacaatcaccctttgcagattcactctcaccaggcttaataacttccaccccaaattgccccatccctcctcggtccctcctggcatttcttttctgtcccaggcgcagagatcctcttctgggcgtctgttccggctatgagaagct

SEQ ID NO: 113459 - DNA, 611 bp, Homo sapiens; identical to SEQ ID NO: 43047
  chr6:50787265-50787876
  hyper

SEQ ID NO: 113460 - DNA, 480 bp, Homo sapiens; identical to SEQ ID NO: 43048
  chr6:50787949-50788429
  hyper

SEQ ID NO: 113461 - DNA, 277 bp, Homo sapiens
  chr6:50789338-50789615
  hyper
ctttgccagccccctcgtctgattacatctagtaattctccactgaatgaacgtcatttacaatagtaggggagctctgcgctcgctgctgcttcacgctccatttgtcctctattctccctttaaagtactcgtgtaatattaatagtcatgaatatcaattattatgaggcggtgtaggcaagcggagggaggaaggggcggccgagcagtctgagcccagcttcgggtgaaagaggactgcatctggagccccgaagaacggcagaagaaaaga

SEQ ID NO: 113462 - DNA, 371 bp, Homo sapiens
  chr6:50791123-50791494
  hyper
ggcacgatggtgtcccgagccacagctcgcggctctcccagctgggctcggtgtcccaaggaccctactcgagcgccccgccgctgtcccacaccccgtcgtcggacttccagccgccctacttcccacccccctaccagccgctcccctaccaccagagccaggacccctactcccacgtcaacgacccctactccctgaacccactgcaccagccccagcaacatccctgggggcaacggcagcggcaagaagtgggttcggaagccggctctctcctgccccagcctcgggccgccttgccccagctctcgggccttgacccccggagggactaccactcggtccgccggccggacgtgctgctgcat

SEQ ID NO: 113463 - DNA, 15 bp, Homo sapiens
  chr6:50791550-50791565
  hyper
cggccatcccggaat

SEQ ID NO: 113464 - DNA, 613 bp, Homo sapiens
  chr6:50793374-50793987
  hyper
gtgaacggagcacctcggggccaagttgttgctgtcgggaatacagaccacagaggtagagagctgaaaggagaaaagcagcaggcagcacaccggagccacttgcaggctctccactcacccaacccccaccctgttcctcccctgctttatctcatttcgtcacctgccgggaggcccacgggaccttcttgggacgacccctatagtgcaagggacacaccctgctcctgtccctagagggaaacagcaaagacagggacggtctctgcctccgcggtgatgacagacctcccaaggccagggtgaagttgactgatgcagggcaggtgacaaagaccaggggttatgtttccaggaccacagcctcgaatccgaaggcttccaatcatctgctcaacacagaaggatccacttccgagttaggaagctggggtgcgggggctaaagttacacaagcaggttgggatttcaacgctctccctacagctatcgaatgggtggcctgcactggtccagtctttaaaagggcctgcactggtccagtctttaaaaggaccagagagtgcctaggcctggaccttaaagtcacttgttccgatctcaaggacct

SEQ ID NO: 113465 - DNA, 34 bp, Homo sapiens
  chr6:50794269-50794303
  hyper
ttgtgcatgagcgcgcgcgcgcgcgcgcgcgtgt

SEQ ID NO: 113466 - DNA, 230 bp, Homo sapiens
  chr6:50794581-50794811
  hyper
actaaagaagtctagtaattacgagtctgagttgtttttctgcgcttccgcatgcagtcctaattaaatctttacgatcctccctgtgacgattaagcgccagcatgctgcgtgaatatcctgtacaaaaacccagcaggcggccgtaattagatagaaaatcagacaagagccttctcattaactaccacaactaccccacgtcgctgatgaggcgtttatacatattt

SEQ ID NO: 113467 - DNA, 498 bp, Homo sapiens
  chr6:50803770-50804268
  hyper
tagttccagttcctcccaaatcggtgacttctctaatgatgaataaagacggcttcctgggaggcatgtctgtcaacaccggcgaggtgttttgctccgtcccaggccgtttgtctctgctcagttcaacttcgaagtacaaagtaactgtgggagaagttcagagacggctgtcgccccctgaatgcctcaatgcatctctcctcggcggagtcctcagaaggtaaccccaccacgaaaaacaaaaacaaaaacaaaaaaacaaacaaaaacccaccagtttttatttattggacagtgaggagaaggttccagcaaaacccaatctgcagtctgacgcagttgcctagcaaccgggtggccggagcattgctttcgcgcagcgcttgggaggatccgcggccgccacctgctcgcccacaaactctagtgtccttgcatccaggcctgcccgcgccgcgcaagtcctaccgcagattttgccgccctgggaacctt

SEQ ID NO: 113468 - DNA, 201 bp, Homo sapiens; identical to SEQ ID NO: 4859
  chr6:50805674-50805875
  hyper

SEQ ID NO: 113469 - DNA, 396 bp, Homo sapiens
  chr6:50808432-50808828
  hyper
ttactccgtttccaacgttgctgtttgtcatcttccacagacttgtaaaatttactacaactccagaggggaaaatagtaaatctctggctaaatttaggtctagagctcatttgaacttttacagtgggttttctatttatttgatttactcctgtctttggcttcggtgtcatattgttggtgttttatggccggctcaggcctgcagtgggcggcgctgcgtgcgcccgcacgtttctcttgcaggcgcggcccaaacagccgcgctcatttatttagtgttggaggacgcggtttgtcccgttgacagcgtaatttaaagaaatatatggaaggctgaaaaatcatttgctcaaatttgtccagatgtttttgagacgtgattggaatttga

SEQ ID NO: 113470 - DNA, 205 bp, Homo sapiens
  chr6:50810508-50810713
  hyper
gcgaatgtcccaaagcgagtccaggcggtcctggaatggaggggagaaaggctgaagtcgggggaaggcaaggctttggggtggaaggggtgcattacctccccacccccgctttcctttcagtcccagctgctcgagaagggagggcgctgggaaaggaaacagagcggaatcgcccacattagcctcgctcttcggtgacccg

SEQ ID NO: 113471 - DNA, 66 bp, Homo sapiens
  chr6:50810936-50811002
  hyper
cggcgccccggccatttgcgccgcgctcacggccctgcagaactatctcaccgaggcgctcaaagg

SEQ ID NO: 113472 - DNA, 527 bp, Homo sapiens
  chr6:50811324-50811851
  hyper
acatttggagacaaccgtccggattttccacttcggttctttcgagtttagtaatactgataataaaagaaaaccatgatttccccttccctttggaaaataaacataagactaaacatgagaaaaacgctaacttattggaagaaaatcggagaaacgttggtgtcaatgctttgagagctggttgactgagacgcacgaactttttaattttaaatatatttttaggaaactctcgcagtccccgccctccatctcacctcacccgtctcccaaccacccttttccatgttaccctcccttcctcacattgttacgggaatcttctgggatgaaaatgagtgtggttggcccttttgcgttgtttcagtcctctcggtacctccccgcccagccctgcgatcttaactcaccgggcccggctccccggccgcttgcataattagggagggcgagggcggggcgggaggcctgtggagaccaggcggaggctgcaatttttggtgccggccggcagagcaggttct

SEQ ID NO: 113473 - DNA, 949 bp, Homo sapiens
  chr6:50813317-50814266
  hyper
cttcgtccgagagctcggccgatcgcattagatgtgttctgattgcacaaggccaggagagaccacactgaaaacgatcgtctcctttccttgcagggcaacgcgccccacgcgtgtgacgtgcgagagacgcgatggacgcgccttgctcttactgtgcaggtcctgagagcgtgtgggccacaggcgcccagtcgtgttgaggacatagaatcagccgctggaggggctgccgactgcgcgggcccttcccgctctcggtctcaccctaagggctaaggcgaccgagaaagccccattctccagtaggtaatggggcggcgcccggtgggctgcaggtggggagggctcccagcgccgccagcggccacccggggcgccggctcctggagggagagtggcctagaaatatccaaggaatccgaagcttcccctcctccacctctgccagtacggaaacaccccaccgtcacaatcctaaagcggggagatgggatgggaattgtcttacttggcaaggcagggtaccttcattgccagacgccctcatttgtgtgttcctccttgctccagcgagatagaaccttttgcgcccccaaccccgtttcgtggagtgagcccactaccccttctccctccctcacttctcctttcatgtaggacccccgcccccttgctttccttagccaggcccgctacatttatctgataattgagttattaaaagatttggtttccttgggcctataaatcaataaacagtaggattaacgcaatagtttgccttttaagtcaagggagacgtttaaggcaagcccctttgagctttgttttcaaaccaaacaggtgagttgcagctctccccccggcccctgcactcttcagacatttggtccctgcccactcctaaacgctcagtcccaaaacaaaatagcgaaagacaggagga

SEQ ID NO: 113474 - DNA, 160 bp, Homo sapiens; identical to SEQ ID NO: 43060
  chr6:50814563-50814723
  hyper

SEQ ID NO: 113475 - DNA, 356 bp, Homo sapiens; identical to SEQ ID NO: 43061
  chr6:50817109-50817465
  hyper

SEQ ID NO: 113476 - DNA, 150 bp, Homo sapiens
  chr6:50817668-50817818
  hyper
agacccgacccacgacggggtggggtgtggggcgggggggcgcgctctcctcccgttcctctccgccgggatcgcggtatcctaggggagggaggaactgcgcgcggtcggagggagtggataaaaaagacagggcgaaaactcattttt

SEQ ID NO: 113477 - DNA, 655 bp, Homo sapiens
  chr6:50818360-50819015
  hyper
gggcgtaaccccagctgctgtgacgggccagggctcgcagctcgcctgctagagtttgtggcgcgccctcgggatcagggcactggggtttgaaggggctgcagcgtgggaagccttcaattttttttttttgtaagctgcgtgtgctcagattgaggaagcagttttgtcacacatgttcaacacgttccacgctggtcacaagctagcaaggtcaggtagtttttcgcccacttgttcgaaaacctattagttcctgcccaccctgctcttcgcttttcctcctctctcctaagggctgcagccttctggagctgactcaggcgagaggcgtccagagcccaaataggggtcacacctgctgtcgagagagtcctctgcataaaaatgctctttaaaatttttaaaatcagcataatggccaatggacttaacaaagcgtgacttgcccaggctgcacggagggcaactctggcagtcatctgtaactcgaccagttaacgtcccgaacgtgcctgttcgcggagatattagcaaacgtttcaaggatgtggctgtcagatgtcattagccaacgcttgctcacccaaccatttgcctaactgggaggagggcatggccacggcgtataggcgtagaatttggggggagggag

SEQ ID NO: 113478 - DNA, 105 bp, Homo sapiens
  chr6:50819299-50819404
  hyper
cagcgtccggactctcgatcagatgccctagagctcagaagcacctgattgcgcggaaggctggtggtggttacttgggcaaagagagtgcgactcgaaactcga

SEQ ID NO: 113479 - DNA, 274 bp, Homo sapiens; identical to SEQ ID NO: 43065
  chr6:52149492-52149766
  hyper

SEQ ID NO: 113480 - DNA, 46 bp, Homo sapiens
  chr6:52156895-52156941
  hyper
gtttcaaaactttggcgccgggcgcggtggctgacgcctgtaatcc

SEQ ID NO: 113481 - DNA, 1353 bp, Homo sapiens
  chr6:52226691-52228044
  hyper
tgagggcggttaaggcgtctctgtctcaaactctccggattttttgcagctaccagggactgcgagggtctgcgtcctgggtggaaggaagcggcgtcagtcaacttcctcgcagcggcggcagcggcgcgggctgcagcggagcgcgcgggtctgcgcatcccgcccccgggtcgggaaggggcggagctgggcgtcacccgcccccggcggtctcctcctcccggccgctcccccgagccgagcccgccgcggtcacagccacccgcgggaagctcgtggccgggaccccgaggcgggagcgcgggctgggccgggctgggctacgcgcacgggctcggccgccgcccctgccggtgagtcccgccgcgggaggcgcggaacgggtcgagttgggtattgggaccgcgaggtcggggagccccggggcccgagctcgggaggcggggacgtcaggatcgcggcgttggggagtcctcgcaccccgagctcagaggggaggtccagagtcgcagcgttgggaacctgaggccaggggccggagtttagggccccgatgttgagtctccgaatccaagcccggaaggggggacgacgggttaggatgctggggagccctggagctctgaacggctgtagtggggtggccaggactgcgatgctggggagtcatggagcctgagcctggagagctggcgggggtgtggggaccgcgatgttgggaaggctgagcccggagggcgggagattcaggaccaagacgtgggggagtccgacagggcagaacgaggggcgtcctgtccgcatttgtggggcgccctccgcagggcggaggggaacggaacctgggaggggagtgcggaggagaggaagcccggggcggtagggagagcccgaggaagggcagcccgaggtaggggaaccccggaaagagtagggtgggtctaggcatgtgctttcgccggggaaagatggagggggcttctctgagagggtgggcgcgaggagcggagttgtgatgggaaccgccggcagctggctaatgggcggatgctggggcttggctggatgggaacgccgcggtggggtgtcggaggtggctggtggggctggaacgctgggaacgtctgtctaggctatgagaacgcagcgccctcggtggaacagggtcgtagataactcgagagggaatctagtctagggagcaagaccgggcatccccagacggaggcgggtggggacctcgcactcagcgcgcttggggaatattcggagcctgggtttgggggctgctgcaccttgccgacccggtgcggggacctggaggtagccgggcacagcagcttcctgtgc

SEQ ID NO: 113482 - DNA, 406 bp, Homo sapiens; identical to SEQ ID NO: 43068
  chr6:52284758-52285164
  hyper

SEQ ID NO: 113483 - DNA, 200 bp, Homo sapiens
  chr6:52441277-52441477
  hyper
gccatggtggcagcgcggcggttggttcgaggccaggctggggtttcagggctgcagacagagctgcaggatacgatgagtgcccaagggggcggcagagcatggcatggctggcacggcgcggagctgggggtgctgtctgggctggccggggtacaggccggaggggtacagtgcacaaagccggggtgcagataacg

SEQ ID NO: 113484 - DNA, 30 bp, Homo sapiens
  chr6:52441524-52441554
  hyper
caggggtgtgccgggcggtgcacgacaggg

SEQ ID NO: 113485 - DNA, 30 bp, Homo sapiens
  chr6:52441708-52441738
  hyper
gccatggcagcgggcgcgcagcggccggcg

SEQ ID NO: 113486 - DNA, 30 bp, Homo sapiens; identical to SEQ ID NO: 4868
  chr6:52442134-52442164
  hyper

SEQ ID NO: 113487 - DNA, 30 bp, Homo sapiens
  chr6:52528787-52528817
  hyper
ttgtcttgcctttgcgaacattcatttttg

SEQ ID NO: 113488 - DNA, 283 bp, Homo sapiens
  chr6:52535660-52535943
  hyper
cctgctccgtcaggcgggaggcagcaaaccccagccctggctccaggacagggccgaaggcaggatagacggagcaacgggtccggctgccgccgggatgttgcagcacagggcctcctggctgcctggcctacaggccgcccggattcagccggagggcatggaccgggtggagtcctgcaaggcgagaagggacacagcgcatgcgcgcggcagggagggcgtttccaggagggagcggcctttgctcagcgcgagacggctgggcgccgagtgggacagc

SEQ ID NO: 113489 - DNA, 212 bp, Homo sapiens
  chr6:52859557-52859769
  hyper
aaaatgtgcgtccaccgtcacgcatgcggtggctgcgccccccgggtcccgcgtgtccaccacccctacagggagatgagcccccggccttgtaaaacgagccgggggccagggcttggccatctgagatcgcactctcccatgctcgtcttccccgctcagcccatgcaggggcgtagcggcagcccagccaggcccggggacgatccgag

SEQ ID NO: 113490 - DNA, 30 bp, Homo sapiens
  chr6:52860067-52860097
  hyper
ggagccgcacaaagcgccaggtcagcggtc

SEQ ID NO: 113491 - DNA, 30 bp, Homo sapiens
  chr6:52860326-52860356
  hyper
ctgaagctctagtacgataagcaacttgac

SEQ ID NO: 113492 - DNA, 30 bp, Homo sapiens; identical to SEQ ID NO: 4870
  chr6:52926578-52926608
  hyper

SEQ ID NO: 113493 - DNA, 35 bp, Homo sapiens
  chr6:52926827-52926862
  hyper
cgactccgaacgaacgcctcgttgcagatcggctc

SEQ ID NO: 113494 - DNA, 421 bp, Homo sapiens
  chr6:52929645-52930066
  hyper
tgcctcgcgggcgccgtctccacggcacttgggtttcagggccatggaatcgcaagcccttttcgcactgcattatgggatctgtagtgagacatgccttgcgttggctctttcctcctgctgggcgccaaagcgcgtcttttcctcaatctccagtctgtctgtgctctcaaaaactttagtcgttataacaactgtgactgttgagaaatttcactgttttcctgcattcctggcgcgggactctagccagaggctccgaggactttgtagcgactgtcccaagcgtccagttcgatgcttctcagggcggcttgctttaagggcccacccctaaatttgggttgtaaaaatttttgaggtaatgcttgttcaagttcgcttaagtgttcactcagcccaacacgcgggttgggcttga

SEQ ID NO: 113495 - DNA, 30 bp, Homo sapiens
  chr6:52930732-52930762
  hyper
cctgagaaggagtgcgtcggggggcggggg

SEQ ID NO: 113496 - DNA, 1865 bp, Homo sapiens; identical to SEQ ID NO: 4871
  chr6:53212357-53214222
  hyper

SEQ ID NO: 113497 - DNA, 28 bp, Homo sapiens
  chr6:53223619-53223647
  hyper
tttcttcctgtttttcgagatagggtct

SEQ ID NO: 113498 - DNA, 187 bp, Homo sapiens
  chr6:53224376-53224563
  hyper
ggccgggtaattcccgggcaatgaccagacctcgtccccgcgctgacccttcctggggacatcgggtgggggtggaggaggcgctgagctagggagaggagggttgtgcggcccggaccacgcaaccttgggatcggagggtggttgaggccttgagggaagaatggaaggcggccttgacttctgg

SEQ ID NO: 113499 - DNA, 623 bp, Homo sapiens; identical to SEQ ID NO: 43076
  chr6:53408896-53409519
  hyper

SEQ ID NO: 113500 - DNA, 539 bp, Homo sapiens; identical to SEQ ID NO: 43077
  chr6:53409552-53410091
  hyper

SEQ ID NO: 113501 - DNA, 30 bp, Homo sapiens; identical to SEQ ID NO: 43078
  chr6:53517060-53517090
  hyper

SEQ ID NO: 113502 - DNA, 292 bp, Homo sapiens; identical to SEQ ID NO: 4874
  chr6:53659860-53660152
  hyper

SEQ ID NO: 113503 - DNA, 470 bp, Homo sapiens
  chr6:53660403-53660873
  hyper
ttattcaaagtgaccggatattttgcgcgtagtcactggggctcgtgctattggagaagcgttctggactgttaagtaacttagatccatgctaggtactgacacctggcacttgtgcccggtcaggtgagaagccgggtgattcgggctgtttccatctggaagctacagagcactgcatcctccccccctccactccccggggtcgttcccccaccaagggccgggcgcgcctctcctttagtcaaggcatgtcccggaggaccttgtgacctgggcagcgctcaagcgggccgcactatctcggcatcttgggaggaatgaggaatgtgctccgtgctttatcgcgggtgggcttggccggctggcctgcggtggctgcgggggtggacgcgagatgggcgcaggggagagctgggcctggagcgctaggggcaggtgcccagatgccggccgcccgggccttgcct

SEQ ID NO: 113504 - DNA, 62 bp, Homo sapiens
  chr6:53660908-53660970
  hyper
cgtcagcggaggctctgcccgcgggccagccttgcagccgcctttcccggagcgggcacagt

SEQ ID NO: 113505 - DNA, 15 bp, Homo sapiens
  chr6:54711372-54711387
  hyper
ctgttcggggtttgg

SEQ ID NO: 113506 - DNA, 336 bp, Homo sapiens
  chr6:54711661-54711997
  hyper
cggacgggaccccagcgggtgcagggttgaggtgcttggggtactgggggggcccggggcttcacccgcccctggccggcgcggcggacgggagggataggggactctcccttgggagcgcaggcgggattggaaattccacagggtgtaaagctcagttgcttcagtcttttctacgtttctttcattgtcgtgggggttcgagtgagttgagaagtttgaaaagttgtctcgggcggagtcggtttgggtccccagaggactggcgccgcccctcgtggaggctgcatttgtttcctcttttccagtgtaggagtgcgccgaggaccccgggag

SEQ ID NO: 113507 - DNA, 30 bp, Homo sapiens; identical to SEQ ID NO: 4875
  chr6:54835453-54835483
  hyper

SEQ ID NO: 113508 - DNA, 231 bp, Homo sapiens
  chr6:55443862-55444093
  hyper
tggggcggcagtcggcgaggggagggagactggaggaggatgaggggcgggcaccgcgctgggaaactgcgccagctcgggagcgcgcccctccggtgcactggctgtgaggaccagagctgttctgcgcactgcggcggcgccgagagggcggggagtggggcgtggcaggtggccgcgcctggggcagcgggtgcacggggcacctgcgggaatcgacagaaatgccga

SEQ ID NO: 113509 - DNA, 406 bp, Homo sapiens
  chr6:56112173-56112579
  hyper
tgtctccttacctggcgcagtgtccaggctcggggttgccgtcgcagccagctgagtgttgcgccagggggacaggtatgttccaggcagtggcaagcccaacccgagcaagacctgcgctgaaacggattggctgccctccgcccggagtccgttctccctgcagcggccagtgcagagctcagaggctcagaaactcgctctcagccccctggaggcggagcccgggagataaggttcgcgctccccacccgccccctttccttggccgaagaccagagggtggattttggatctggatcttgaagggcgaactgctagtgtcgccctggtggaaacactcagttcaaatcctgctagcatcagaaaatgcacgattgaggattgaaaacgagggtgaaggagg

SEQ ID NO: 113510 - DNA, 30 bp, Homo sapiens; identical to SEQ ID NO: 43082
  chr6:56708235-56708265
  hyper

SEQ ID NO: 113511 - DNA, 30 bp, Homo sapiens; identical to SEQ ID NO: 43083
  chr6:56709126-56709156
  hyper

SEQ ID NO: 113512 - DNA, 96 bp, Homo sapiens
  chr6:56716203-56716299
  hyper
gaagcactgccctctcggcagggtccagcactgagcccccttgaatctttcttttcgatctctcatgtttaggcaaattccagggtaaggtgtctc

SEQ ID NO: 113513 - DNA, 510 bp, Homo sapiens; identical to SEQ ID NO: 43085
  chr6:56716389-56716899
  hyper

SEQ ID NO: 113514 - DNA, 2018 bp, Homo sapiens
  chr6:56818397-56820415
  hyper
tttgctaaaaccgttcgctgggcactaatatgaaatcacttaaaaggaaacatgccactttcggctaggggacagcatgttcgtcattcagtgtcctactggtttcttaacacgcatataattaatattggtactcaggaaagagaacttcttctgaccttgagcgtgcgcgctaaataaattacctcagaacgaaagtggtgcgatctcaaaacagcatctggggagaaaagagataaatgagacttcatttaactccttgttcttcacctaccgagtgactcatgacttacctgggagaccagggttgggaaagcacatcgcagactcctggaattcggtgggacatcctgggggagggaggaggagtcctggggccatcggtctctacgtgatttctccgcgagaagtttgcatgaaagttctgggggagttggggagccccgaagtttccatgccttactttcttacccctacgctccagcgaaggatgcgtgaaggcgaggctggcgcagccccggactacgctcaaattacccttaaggctttagcaaactgactaaaaatttgagttctttcctcccctccctgccctcggcatcgccgtggttattcaaacctgggagactggagggcggaggtgacggcaaaaagggcaaggggcgttaaagaaacgcactcagcctggggagtgggcaatgatggggctaggggcagccgaggagaagggagcgagccgcgcttcactctccaaatcggcttaattgttcctggtagcccgcagaaacccgtcgcggcgtgtcttacctcggcttcttgaacgacccgagaagaccgatttcatcggatgcctccctttctggagcttgcggtgccagcagcagaagaagacgatggtggcgatggtgcccagcagaagcaacaagaggaagagggcacattggatgctgtagggtctcagcaagacgaggaaagccgcggcgatcatggtgcgggcgaggcgagggcgactcgacggcggggctggagggcggcggcacaggcacccgcgctgggcgcacgccgggacggcgggcacgggtgagcgcggctcagcgcgtcatgcctggcgctcgcggccccgcgcccagcccaatggctgcgcaccccgcgccagccgcgctacgcgagtgatccagggctgcggggagcgcttgccatgactcagcagacagcgacgaggctgcgactcggcggctgggatcctctcccctccctccccaggcgcccccgcccccgtccgtgcgcagcccccgggcgcagccccgccggggacgcggcgagtggggaggagcagcgccgccgccgcggccgcccgggccccgcgcatcgtcctgcggccgccgccgacctcagcatcccagaagccgggcgcacgtgggtcggggcggggacgcggcgctcaggctgcagccgcggcagcctgcggggggcgggaatggggcgccgcggcgggggctcggctgatgacatcacggccaggctgcggcagcgcgggcgcgcggacatggctgcggcggtttcggcggcgtccgcgggctgcacccgggcctgagagcccagcgccctcccgcggggccgcccgccagtccgcgccgtccgcgggtgcattggccgggtgcctctagcttcccggacacccggagcttccgcctatccagcctccctcggccaaattgctgcggagcccgtcgtcagggggcgccaaggagccagggggaaaaccgagaggcgctgacaggagcctcccggcggtgctaccctccacctcccacctccctgcgccccgccccgaggttggggctttgaagaatgcagccgggtgagctattgcttgtgggggtttcctcgcactctgaagcgcgagcgccgggaagggccttccctgggaattgggatactccaggaacgggaggcccactcctctccaagcctctctaaactaggagcgctccggggtagtacgctctggtcggcag

SEQ ID NO: 113515 - DNA, 237 bp, Homo sapiens; identical to SEQ ID NO: 43087
  chr6:56820670-56820907
  hyper

SEQ ID NO: 113516 - DNA, 30 bp, Homo sapiens; identical to SEQ ID NO: 4882
  chr6:56911387-56911417
  hyper

SEQ ID NO: 113517 - DNA, 19 bp, Homo sapiens
  chr6:56954758-56954777
  hyper
tctccggcgaggggcggtc

SEQ ID NO: 113518 - DNA, 662 bp, Homo sapiens
  chr6:57036933-57037595
  hyper
tgggtgctgggagaaactaaacgaagccgtcactgagcaatacacccacagcccgtcgaccgataggaaccttcgcgtggggggagttggttacttttaggttgcatgaagaggcggggcctcgcggggcggagctgggggtggtctgtgggtccgcgcgggcttcgggtagttcctgggtccggggagcagacgatccgctagccacattaggcgctcggtctctgcgtccgcccctcccgtgcctcagagacttgcgctccccaggcccgagcccctgtcggcccatcctcgagcccgtgtggctcgcgaacctctaactccagccgctgcagccccctcccaggcccggcgtccccgagccccgcgggcgccgcgcctgcccttctttggctacgctgcagccgcggtgtcggcgagtcctcccgggttgcccccgcgggcgtcagagggagggcgggcgcccgcgtggtgacggcgacgcctgcagcccaaggagcgctccactcgctgccgccggaggggccggtgacctcttggctaccccgcgtcggaggcttagatggctcaggcgaagatcaacgctaaagccaacgaggggcgcttctgccgctcctcctccatggctgaccgctccagccgcctgctggagagcctggacc

SEQ ID NO: 113519 - DNA, 169 bp, Homo sapiens
  chr6:57086139-57086308
  hyper
ctcctgggaactgccgatggctcctcggatctccgagtaaagttaattctgtagcaaccagtgtcaatggaacagcacaatttggctcattcatattccagcactctatgaacaagaaactagggaagggtggggtcgcgggtaaagagtggtcgcactgcagggagga

SEQ ID NO: 113520 - DNA, 30 bp, Homo sapiens; identical to SEQ ID NO: 43092
  chr6:57086540-57086570
  hyper

SEQ ID NO: 113521 - DNA, 234 bp, Homo sapiens; identical to SEQ ID NO: 43093
  chr6:57087023-57087257
  hyper

SEQ ID NO: 113522 - DNA, 30 bp, Homo sapiens
  chr6:57181686-57181716
  hyper
cagagcgattcctgcgaatgtgccttcttt

SEQ ID NO: 113523 - DNA, 30 bp, Homo sapiens; identical to SEQ ID NO: 4886
  chr6:57943180-57943210
  hyper

SEQ ID NO: 113524 - DNA, 1 bp, Homo sapiens
  chr6:58147509-58147510
  hyper
c

SEQ ID NO: 113525 - DNA, 59 bp, Homo sapiens
  chr6:58147836-58147895
  hyper
aatctcagacactttcggagcgtgttttttttttcttgtcctttcgctccccttttcgg

SEQ ID NO: 113526 - DNA, 5 bp, Homo sapiens
  chr6:58149241-58149246
  hyper
tcccc

SEQ ID NO: 113527 - DNA, 204 bp, Homo sapiens
  chr6:58149324-58149528
  hyper
ccacaggcttttctaatgtttatttcacagtaacaattatgtttcacagtagcaactgtgggcagtgatacagaaagtcatgagagaacacgaaagtaaatgtaattgtacccagtaatcttgatgggacgtagtccgctgaatcgtacggttgcgtttgcagtttagtgttcctgcaagagcagatgacgaagagagctaaga

SEQ ID NO: 113528 - DNA, 30 bp, Homo sapiens; identical to SEQ ID NO: 43096
  chr6:58180191-58180221
  hyper

SEQ ID NO: 113529 - DNA, 30 bp, Homo sapiens; identical to SEQ ID NO: 4887
  chr6:58287415-58287445
  hyper

SEQ ID NO: 113530 - DNA, 419 bp, Homo sapiens
  chr6:62995455-62995874
  hyper
aatgtccctgtagaccgcgttacatacactttatggtttctctatcaatgatcctaacaggtcacatcgccactgccattagatctccgtagctttggtcttctccaaattaagacgtggagaaggagcactgctgtccgccccaagaacggggtctgtccgcccgagctctaaggcgagcatcttcagggggacagtttctgcgaaggcggggagaggagtccctccccaacttcactcccctaatcaagccgcgggtgagataggcagccggcggtttgtgcccatctgtgggggcaagtcctaccttctgccaaaaggcgcgacgcatgcacaaaagatggatccaggctatctttctctgccatcagctcaggcaaatatttctcctcttccatagcgcggacttcggattgtcc

SEQ ID NO: 113531 - DNA, 453 bp, Homo sapiens; identical to SEQ ID NO: 4889
  chr6:62996077-62996530
  hyper

SEQ ID NO: 113532 - DNA, 30 bp, Homo sapiens; identical to SEQ ID NO: 43100
  chr6:64282619-64282649
  hyper

SEQ ID NO: 113533 - DNA, 53 bp, Homo sapiens; identical to SEQ ID NO: 43101
  chr6:64283087-64283140
  hyper

SEQ ID NO: 113534 - DNA, 72 bp, Homo sapiens
  chr6:64345434-64345506
  hyper
gggttggggagctgcgcatcaatattatattaactgtgaagccttagtgcttactacggtcgagaaaaagcg

SEQ ID NO: 113535 - DNA, 30 bp, Homo sapiens; identical to SEQ ID NO: 43103
  chr6:64346049-64346079
  hyper

SEQ ID NO: 113536 - DNA, 2027 bp, Homo sapiens
  chr6:69344102-69346129
  hyper
tttatcagacacttcgtcagccaactgtccaggaggcaaaatgactatctatgatgatagatagacagacagatagatagttagattaaaaggtggggaaacatcccttttccctttttcctttctatataatctggttttttctcttcaccccttttctcgcttcttcccaccccgtccccaaacctgttactagggaaacttgaaaaagaatcagatacattaagactacaaaacgaaacaaaagtttagaccccgaaaccatgattccattgccaagcacaaagcaatgcaagagcccaacgtcggtcgccgcaccgcgatcctgacaaagcctgtatggagccagaacaaataagatgttaattgcagcctcgcagagaaaaaaatactattgttccagccagagacactcagcagctcggtagctgggatgtgccccctccgctgcggactggatcaattctgaatcccggtactgaaatgacagctctctggctgcgacaggtctgcgctgaaagaaagagaaagacgatcaagtccagcattcacttcccacccttcagagtcgccttcccatcctccgcacccccctgcctcgcctcccagtgagtttctcttacagttggtcgccgccagccccagcggtgggaactgaggatgcaaaaacctcccagacgcagaaaataccgctttcgggacgtgcttgggtttgagtagccgtgacgtgcaggcgaaccgcggccctggctggagctccgtggagcccccctcccgccagcctctcccccgccctcccgccgggactccctcctctcccaccccgcggctcccttcgccttctctctcacacacccgcccgcgcccccggcaggcagaactccaggaagtcgcagcggccgcgccgcgcgagccgagcctctggcgggcggcggggcgcaccgcagctgtgcataagaagggcgcgcggcacccgggacgcgcgcgcacacgagcacgcgggaggccgccgcgcggacgcgctcccgggacacgcgcaccccccgcgcgcgcgcccaagggagagcgagcactgcgcgccggcgcgcacacccgagacagagctttactatctcgctccctctcgcgcctccctcctcgctgggcattcaaacagctttccgacatcaccagccaaggatttttttccccgctctccttagtcgccgtccgtccatcagtacctgcaggggggaggaggaggagggaggaaagcggaaagaggaaaaagcataagcttgagccttccgatccgaccacgaatactcctgtaataaacccaccgccccaacaaatctgccatagcagccgccgccgccgccggtcacttctcgtctcagcgctttctttgcttcttggtttgttgggggtagcttttatgaaacaaatctttgctattaagccacttacattttggggggttccttagagtctcccttgggggggcttctccctccctttagcccccctcggtttggaggttggattcagttggatacggcgcaaggttctgggctcctgctggcttttttttcctctctctcatcgacccccctttggttcccaccccccaccttttgcttttcgtatgtatgcatttttaaaaataaatcctgattttggaagctgagccggggaaaatgggcaacggtgattgggaccgaaggggagtctctccgtcactgttgctgggacgcgtgcctgtgctggtgtcttagagcaagagcctccctgagctttcggagtggaaggtaaggaagggggtccaggggtcaccttttctctgccgggggtcgccaccgtggagctttgggcttaatgtttgagaagggaggaaaatgaaaggaaaggctgttgctggcggatggggaggctgtgagcagatccgactgtctgcatttacttaaacgccgcagttgaaaagttagagaagtctggttttcaagagatgtgctgggtcagaaggaataagcggagagacctagaaa

SEQ ID NO: 113537 - DNA, 30 bp, Homo sapiens; identical to SEQ ID NO: 4894
  chr6:69454973-69455003
  hyper

SEQ ID NO: 113538 - DNA, 448 bp, Homo sapiens
  chr6:69942707-69943155
  hyper
gtcaggcttttcaaagaaatccgcattttaaaagccagcatttatggtccaaaatatgggacgggaatcagagctggtagaaaaatatgaaaagcctctttacaccctgagtatttgaaacaatccgatgagcataggaagtggctgccaacgctctggcggctgctcgtgctgccgccgctgccgctgctgttcctcgcatagggctggacagagctagtcccggtttcagcacctccggcgctggacagctctctgcacgccgcaccgccgcctgcttgctttttcccactctcgctttgcattactggagatgcatctaaattacatcctgttcaacaacaagtagatttttttttcctgtacaggaattacagtagacgactctctcaattaaactgcattttcttctttacggatttggctatcaggcgtatttatcccgatt

SEQ ID NO: 113539 - DNA, 30 bp, Homo sapiens
  chr6:70506013-70506043
  hyper
tgcagaaataagatcgttggaaaagaaagc

SEQ ID NO: 113540 - DNA, 485 bp, Homo sapiens
  chr6:70506528-70507013
  hyper
ccccctgcccccgccgcccgcccaagcccccaacactaaggagccctccacagtccaagctaaaagcggggcggggcgaagagggtctccggggcccggagaggccaactgcagggcctgcccctcccttcctcccccagtccaaacatggggaaaactccaagcgcctcccctaccagtagtaagaggccgaatatgcaccagccgatcaccagctccgccgaggccgcgccagaagtcgccatcttcgcttccggtccagaccaacctgagcgcccggggtggggaaaggggagggggaaaggggagagagcgcgagatatactgcacccgcgcaccctaaaggttaaaggggcggagggggaggagcaagtggttgccaaggagactggacccactagcgtcccctggcggcgagccgagcgggggcggggcagcaaggactgctcaggggcggggcgcgtgcggacgcagtgacatcacca

SEQ ID NO: 113541 - DNA, 1248 bp, Homo sapiens
  chr6:70576372-70577620
  hyper
agtcctctgtcctcgcggagtgggagggtcacactgggagagactaataagggcagagatgcgtcccccttccccactcgcagggagctcactcctcggcggtgccgcagccctgtccggactccactgcgcctctgaggggctcaaatacgaattcaaggtaagctgcgcggctttgcgaccggctctgcacttgccctctcacacatgcccgggctatgtcatctgctcgtgttcctagttatctgtgtgcatctgcttttcaagaaaatgtaaaaactgtgctacacatggaaatatgtttaggtggataaataatgcacacctgcatacgtttccataggggccttaaggatgggaccaaaaacgtttggcaggagacggccactctcatgtggtacataccatgtagttcgtgttcctatgttcacatgatgcaggcttcatgcgttacacctaagttctaggtggtttttctggctatgtgtgtctgtgaagcggaactatggagcactgctgatgcgggtagggacagacatcaaatacattacaaaaaaaatggggggttaaaggagtaaaacaaactcactatcaattcatgccgttagagcgctttttttttttttttttgacggtgttagccctggaagcgaggcagccagttaagcggcgtaagctaagagacgcggggttccggtgcggtgccctccggcccggggttacctactccacatgtgggtgtttttcccaagtgcggcttctggggggcggcgcgggcgcgggcggggattcccggactccagccccaccacgttccggagcgtccggccctgttccttaattaccctgcagcatgcgcagcgcggtcggccacagcgccgccgccgtccccgcagtcctccctgcagccaccgccgccgccgccggaacgtcccagtcgcggcgcgaggaagacgcggccccagcctctgccgcctccgctgtcagagtcccgaggccaccgccgagagcgcgccggcgccgcagccacagcggccgagaaccaggaggcggcgccgggcggcccagctagggcgctgcagggtcgcgaggaagtttgttggcccggaaccaagcacgccgtcgggcacgctagctccccgagagcaggcgggcgcgtaagcgaacccccttagaggttacggagggagcgggaagccggcaagagggtgggcagaggagctgggggacaggcgggtgccacaggag

SEQ ID NO: 113542 - DNA, 30 bp, Homo sapiens
  chr6:70991373-70991403
  hyper
ctagagcaggattgacgcccccaaggttgg

SEQ ID NO: 113543 - DNA, 29 bp, Homo sapiens
  chr6:70992019-70992048
  hyper
caaacctcagctgggcttatgcgcccccg

SEQ ID NO: 113544 - DNA, 924 bp, Homo sapiens
  chr6:70992136-70993060
  hyper
cgtcccggagccgccagcaccgctagctggactcggggttagtgcagctacggcgggctggaggagcgggagagggagcgtgcctggattcccgccttttccagcaaggcctgctgttgacagtgaccaggaggtggggcgggggagggggtgaggtgcgggaagtaagaagcaataacaggctaagaattaaacctcggtctccagtcacctattaccttcagcgccagagcctgcagtagggaggacccagattggggaggagccccccttcctagaccaaggggtcatctacggctctggacttcgataggactcgcggcaggtgctcgaggctggaggaagcgcgggtctgagagccctggggatgctccgcgcctttctcacagctccctcgaccgctgcgccccgacctgtcctcgtgtgcgcttgaaaaatgcaaacactccctgcccccaacttacctcgtcggtggtctggctgggctggagaagaaaagatggggagaaagtgagaaaagcacccctcaaactcgatcgcaacttacttgagccgcgcacaagcagagccccaacagcagcagccccagggccccgcggtcccgcgcagtccaggccatgcccgccgcccgccgctaatcccttggcccggctctgcagcctggttcccctctaggcttccagacccgccactagcataggtggcacttcgtccctgcagaaaaagcacccccgggagtagcggttgccaaagcgtccaggcccgggaggcgcgcgttccccctgtttatgaatggccccggagagggtcctgggattggaggagagctagggggcaggggaggacggatagaatgacaacagtcgcccttaaccccttccctgccgccgcacaggcgaggactgagcacgcagctctgcctcc

SEQ ID NO: 113545 - DNA, 566 bp, Homo sapiens; identical to SEQ ID NO: 43112
  chr6:71123137-71123703
  hyper

SEQ ID NO: 113546 - DNA, 304 bp, Homo sapiens; identical to SEQ ID NO: 43113
  chr6:71123746-71124050
  hyper

SEQ ID NO: 113547 - DNA, 79 bp, Homo sapiens
  chr6:71377330-71377409
  hyper
tgccagctacctttcgggaatcaccttgggcagaaggcctttttgcaaaaagactcggcagcccgggccccgtaggttc

SEQ ID NO: 113548 - DNA, 30 bp, Homo sapiens; identical to SEQ ID NO: 43114
  chr6:71377840-71377870
  hyper

SEQ ID NO: 113549 - DNA, 30 bp, Homo sapiens
  chr6:71378237-71378267
  hyper
tgtgggtggggccgcgcttaggtctggatc

SEQ ID NO: 113550 - DNA, 1229 bp, Homo sapiens
  chr6:71665451-71666680
  hyper
ccggagtgcaaggggcgtgtgactgcagcccggccggcccggaggcccactcccgccctcgcccacccagcggggcaggctggcctttacctcctggaagagctccagactataggtgttgtcgtcgtcagcgaagaagagcacgccgggctgcgcgcgctggtgctggtgcctctggcgcagccaggcgaggcccgcgttgcgctgctcagtggcgcgcggcagcccgggccgcttgtagcgccgcggcgtgggcacgtgcaggtgagtgctgggcagcccggcccgcgccaggaagcggctcaccagctcgctgcgcgccgccgcgtcctccaccaggatccagtgcagctgcgccacctggcggaacgtgttggccaggcgggtcagctccgctttctgcaccgggcggctgtaggtgggcgtgatggcatagatggtgggcagctgcggctccggctgtggctgcggccgagactggttgcgcttttgggtcccgtgagccgggccgcccctgcggagcgggagtcgggcgcccccgcggcccaccgcgtagggagagaagtaggggcgcggggtgagcgggggcactggcctgcgcgtgtccacgtcgagcatgatgatgacaattaggatccagggcaggaggataaagaagcgggtgaaaagcgcggacttcatggtgcacgctccctggcctctcggacaccccagagaggggcgagccgagggaccccagtgcgcagcttggacagcggcggcgccagcacttagggagtggtgatgggtgcgctgtccatggggccgagggcgctgcagagacctggagccgcggggctcactacctgggcgtggaggagcggcaggttcgcgcaagctagagcgacaaggggtgcaggcgggcgggcaggggctgcccccgactccaggtgagctggcgggaagcgggactcggtccagccgcgcgccgccggtcccggagttgtgccgagtgcgggaaaggcgctgatccccaccgcgctctttctgaagagtggaagccgagaagcggcacccggtgcgcctcgccgctccagtccggcggtgctgcgggcacaagggctccagccgcgggcccccaggacgctctctgggacgccttcgagggcgggcggcggcgctgggggctttccttcctcacattcccgccggggtggcgaggagcgggtggagacgctgggggttgtgtc

SEQ ID NO: 113551 - DNA, 447 bp, Homo sapiens
  chr6:71666698-71667145
  hyper
cgcagcggaagcctgctctcagtcccttgctcttgtcttctcagaacctctccggatccagcagcaagatcccaaagcaaggaaagaaagaaaaagcgagggggcgggggcgctgcagaatccagcgtcctcccaagtcctcctgtgggaagacagcagcgctgctactggtggagaggggctgcgagagggaggcgcggagggaccccttggctctccgccgggtctggcgctaacggccccgcgagcaagctcgggaggcggccgctgcaccgcgggtggaggagcgggaggagcgtccccgcggggctgcacgacctcctggagggggtgatgctcgttcacctctcttcagctttgtgaaataccgcaaggtctttggagatgagccaggaaaatccattcacgtgcggaaatttgccgggctacgcgcgttgctgctgatgc

SEQ ID NO: 113552 - DNA, 978 bp, Homo sapiens
  chr6:71998101-71999079
  hyper
ggacccgcctgctgacggtgacacctcttcgacaccacgtccacgccagtcctcagctccaggagctgggcgggatccctcatcccgctcagctgggagatgccccgggagggcgtcccccggctccgggcggcgagggtagtagccgaccccaatccactccgggggccgccgggggccgcgtgaaggcaggtgttccggggagaaacgtggaagggaggcgcggcctggggccggtggcgctcggctgggggccgcagttggctcccctgggggctctgggcggcggcagctcccgcctgtggggaggagaaggagccggatgggcgggttcaggcgcgcgcggcggcggtcccggggccgccggctcctccccgcgagggtgcctgtccgccgctcgccgcgctgaggcagtgcggggcgggcgcgcctaggctgccgcccagcgccctcgccgcggccatgcccgggccctagagcgcctgccgcagcttgcgccccgcagccccgcagccccgcgcccgccgccgcctcttcaatgggcaacctgctcggcggggtcagcttccgcgagcccaccaccgtggaggactgcgactccacctggcagaccgactcggagcccgagcccgaagaaccagggccgggcggcggcagcgagggcccggggcaggagtccgagcagcccgcgcagcccccggagcaagccggcgggcggcccggcgccagccccgcgccggacgaggacgccgaggcggcgggcgccgagcaggtacgcggcccagcggtggcctcgggtcgggctggggcgccccgacaccccagaggggcaagtgccaagccgccctcgcgctcggaggccaggggcgccaggtggctgctcgccgctgcgacccgacccctccgcgccgcggctgacctgtctcccggtggagcccgggggcctgcaggagcccaaagcgccggaccctcccactg

SEQ ID NO: 113553 - DNA, 282 bp, Homo sapiens
  chr6:72129567-72129849
  hyper
ggcccttggtcgcgccggcacccgaagagttcccacggatacggttcccaagtcagtggcatgtcagtgcccttcaagctaccgcaattttatttgttctccccgccagctccataaagtattaaaggctctctccacgacttcttcccaagcccaggtgccctaaaccacttgagcccacggcgcctaaagccgactcacccgcagcccgaggtgcgggagccctcggacggactccggcccgccccgcagtccccaccggccgcgctgcggccccggctg

SEQ ID NO: 113554 - DNA, 118 bp, Homo sapiens; identical to SEQ ID NO: 4905
  chr6:72129926-72130044
  hyper

SEQ ID NO: 113555 - DNA, 308 bp, Homo sapiens; identical to SEQ ID NO: 4906
  chr6:72130190-72130498
  hyper

SEQ ID NO: 113556 - DNA, 75 bp, Homo sapiens
  chr6:72130646-72130721
  hyper
cggaaagcccagccagtccccgggagtgtagccaatagaaggcgactccggcaacacacccgccctgatccacta

SEQ ID NO: 113557 - DNA, 1016 bp, Homo sapiens
  chr6:72596015-72597031
  hyper
gaggggtacctggggatagagcgaggtgctgtgcacgttggcgactgtaggggtagcggccggggcacgcgtggctcggacccggggagtgggcgggtgggtgcccgtgggcggagcggcgccgggactgagtggctggcagctatgtctgcgagagcagcggcatcaccctggatggaagcctctgagactccgcctaactgacacccaaactctccctctccctcccgcagccccaaattggaggcagcagagcctgggagcagcctccacggcggcagcggccgccccagtcccagccccagccccagccccagccccgcccccgccccgcgccccgccggagacgcccggatcggcggagcctggcgcgagccctcgccccctcgcctctcccgccgcgcctccgcctgcccgcccccgccggccgaggctgggctgcgggaggcggccgggcggccccgagcttcgctagggcgaccaaaacaaaggcagcatccggggctgggtggatgcaaacaaccatgaaagactgggttctcgctctccccggctctgctgctgctgctgctgccgccgccgccgctgctcctcctcctgccgccgccgctagggctccgctgtgagggggaagcaggggcgcagctgctgggcgtgcatccgaaaggtgagagccagagagcgagcagagggggcgggcaggccacgaaaatgtcctcggccgtggggccccgcggtcctcgcccacccacggtgcctccccccatgcaagagctgcccgacctgagccacctgaccgaagaggagaggaacattatcatggcagtgatggaccggcagaaggaagaggaggaaaaagaagaagccatgctcaagtaagccagccccagccgcgccatccatgcctccgtgcctccatccgtccattcaccactcactcccctagtcctcgcggctgagtgtggggaaggggctgccagggtgctgggtgcggacggaggcgcccgccttgggcc

SEQ ID NO: 113558 - DNA, 629 bp, Homo sapiens; identical to SEQ ID NO: 43122
  chr6:73329600-73330229
  hyper

SEQ ID NO: 113559 - DNA, 1069 bp, Homo sapiens
  chr6:73330781-73331850
  hyper
ggaaccccgaaaagccggcgtcctggacaccccatcctccaggtgttctttcccagacactgggtcctcgccgccgctgctgaacttctcaatcatatgactttctcggacttaaatggaaatttcttgacggagggaactgggtttgttctcccaggcttcgcgctgcagtcaggcagagccccggggcagctcgctcaccgcggaggagccactttggagttttacgccctttccacaccccacccatggactggaaaggatgttcagttactcgcgagcttgtctgatactgggatggaaagtcacagtccgcaggctggagtgaggcgcgggaagatgcctggtccttgcctcgcggacttggcagccgcgtcctgcgggtctgtccactgaactgctgaggactcgcccgtgtgcggggacccgagtgccacttcccggagcgttaccttgcgctccagcctccaggctagataatacctggaaggcagggcagggctgttcccgctctcaccccttgcggaaggatggcaggatccggcgcagcgacgtagcagcgggagggcacagcgacctgcatctccagtttctcctcaggacacaaggctgacttcaccttccggacagctgcaaagcccctgccagaaccaaaccgaactcgcgcctcggagaggggcttctggggccgtttcgctgcagggcgtggggagtggagagagggaaggggaagcctggggctgggtgtgcgcgcgtgggagcgcgcctcggagcgccccgcactcccccactctatccccgggggcagtttgggaaggagggagtggtagtcgcgggaatgagggagcaagagaaaccctctcaaagtgacgccccaaacaggtccggatttagaattcgaagctaaaggctgttagaaattgggactcctcggcctcctctgcagcccctcctttcccgccccgaagcccgggcggtttgctggctgcctgcttccccgcccccggctcagaggtctctggctggcgggcgccccgtcggccgccggcttcctccttgaaacccgccg

SEQ ID NO: 113560 - DNA, 1246 bp, Homo sapiens; identical to SEQ ID NO: 43124
  chr6:73331875-73333121
  hyper

SEQ ID NO: 113561 - DNA, 502 bp, Homo sapiens
  chr6:73972641-73973143
  hyper
cttcaccggactaaccgagttcgagaccacaggggggtcaggtagccaaggctgggctttgacggtaggaatgaaggaggtgagggtggcgcgccgcaggcctgggccactccctgagtagggcggcggcggcggcggcggcggcggcggcagcggcggcagcggctgcaggcctggccgattgtgaggagacagcggtacctcctgggccgcgcacccgacccttccaggggtcccggctcgcgccgcggccgcgcgaggcgcgctcgagcggaagtggcggcgaccccgccggaagcgcgcggctgcggcgcgggaagcaacccagagccctcctcccgcctgctctgtgtaggagacagcctgcggagcccactgccggcgcgcagagagcccagcagctcttgagtccaggaagcaagggtgggaggagggacgagccagtggcaatgacccagacccggacgacccccattgctgagccagcggagctgcttggtga

SEQ ID NO: 113562 - DNA, 853 bp, Homo sapiens; identical to SEQ ID NO: 43126
  chr6:74019357-74020210
  hyper

SEQ ID NO: 113563 - DNA, 30 bp, Homo sapiens; identical to SEQ ID NO: 43127
  chr6:74098797-74098827
  hyper

SEQ ID NO: 113564 - DNA, 149 bp, Homo sapiens; identical to SEQ ID NO: 43128
  chr6:74161042-74161191
  hyper

SEQ ID NO: 113565 - DNA, 266 bp, Homo sapiens; identical to SEQ ID NO: 43129
  chr6:74161232-74161498
  hyper

SEQ ID NO: 113566 - DNA, 113 bp, Homo sapiens; identical to SEQ ID NO: 4916
  chr6:74161684-74161797
  hyper

SEQ ID NO: 113567 - DNA, 235 bp, Homo sapiens
  chr6:74161830-74162065
  hyper
cgtgcggaagccttgggggcagtggctccggcctcggaagctctctgcatggcctttccgtgccaaggctgcatggctggcgctttctgttccccgaaagaagaatccgtttcaggaaaaggccgcaagaggaagagccagcagcagctgttggaaaccaagcactactggcgggcacacaagagtctgcgacccgaaggggaaccccaggctgggaagtcgctgggagccacgc

SEQ ID NO: 113568 - DNA, 30 bp, Homo sapiens; identical to SEQ ID NO: 43132
  chr6:74230328-74230358
  hyper

SEQ ID NO: 113569 - DNA, 30 bp, Homo sapiens
  chr6:74230903-74230933
  hyper
tcggggactgtgggcgatgtgcgctctgcc

SEQ ID NO: 113570 - DNA, 30 bp, Homo sapiens; identical to SEQ ID NO: 43133
  chr6:74233625-74233655
  hyper

SEQ ID NO: 113571 - DNA, 30 bp, Homo sapiens; identical to SEQ ID NO: 43134
  chr6:74363003-74363033
  hyper

SEQ ID NO: 113572 - DNA, 611 bp, Homo sapiens
  chr6:74405593-74406204
  hyper
aggaacccggtgggccggggaagtgggcgcgctctgttctccgcggccagctgggacgccgggccaggtggggccgcctgcgtttagcaactgctttctcaccccctggatttgcgatgtttgccacagcagcgagaagcgccattgtaatggggatgggaggggtggagcctccaagtcctgtctcaatttagatctctcactctgctgttaggcgcgcccatttcagattactaaactcgaattaagagggaaaaaaaatcagggaggaggtggcaagccacaccccacggtgcccgcgaacttccccggcagcggactgtagcccaggcagacgccgtcgagatgcagggcccaccgctcctgaccgccgcccacctcctctgcgtgtgcaccgccgcgctggccgtggctcccgggtaggaacgtgggcgcgcggggggcgcgcgggcgcgcgggcctgggccgctctgcggctctgggccagggcttcggggaggtggcggctgctgtgcagcagcgggtgggaaatgccctcgcggctgcagtccccagcctggtactggcctggaggtttgaccatatgtagcttcagcgtggctctccatggg

SEQ ID NO: 113573 - DNA, 286 bp, Homo sapiens
  chr6:75911843-75912129
  hyper
ggggtcccggatctccgcttgcctgccatcatcccccaggctgcttggctgctggctcatctgcccgcaccgtccgccccgccgactgagctccccacaaagcacacagaggcgcagagccagcgctgttggagtcttttattgtgttctgtcaccgaggtcgcagccccgagccaggtggttggttaccagccaagcgagcgagtgcgcccgctcttcggggctcctgggtgccacccggaggtgtcctgttggttgcgctgattagagccgtcgccccctctcg

SEQ ID NO: 113574 - DNA, 690 bp, Homo sapiens
  chr6:75914014-75914704
  hyper
gcgagaagttaaaggcgaacaatcgacccaccgaaaagctgtgcgcagatttttttttaacagctgaactcaacgaaaacctgagtggtaacacttttgctgggtctcgatcgccacctgtcgctttcccgacttagctgcaagaatgaatcatctcgcgccgggatatcggaacgccagccagccaagcatcccgtcaatatatgttttaaaaaagaaaatgctttctctcctttttagccaaaacattcatttgaatgcttagcaacacttcattgagcattctcagacataaatatctgaaagcggccgcccctacgtggcagcgaggactccctcacttcaccctcatgaataaaaatgagtccactggggtgggagtgggggctaagtggactcgtccccttctgccaactcgccccctcccaattccctgctggaagaacccaattccttaactcccgcgtccagttaaaaagaaaatcacacacacacacacacaccgcgtgcgcgtcgcctacctcctctcccacccaccacgaccttggcattagccaaaggagagcttagcgtttatttcctttcctgccctatccttccccagcattcactagaagactacagagtccggatcgagagtctccctggcccagagtcccagggagccctgaactggtcactgaagggctc

SEQ ID NO: 113575 - DNA, 382 bp, Homo sapiens; identical to SEQ ID NO: 43138
  chr6:75914738-75915120
  hyper

SEQ ID NO: 113576 - DNA, 213 bp, Homo sapiens; identical to SEQ ID NO: 43139
  chr6:75915170-75915383
  hyper

SEQ ID NO: 113577 - DNA, 944 bp, Homo sapiens
  chr6:75915426-75916370
  hyper
cgccgtttcccgagttgtctctgggaatgatgggggtaggggaaaggggacagaaaccaggctgacctgaggcggcggcaacagggagaggtagcggcggcgacagcggcttcccggcgtcggagaagctggtgctcggtgtggcccccacacgccccggcgataggcgctgcactccaggagcacctggcggccgccgaggcgtgggcagctgcggggaagtccaggaggaggaggagaatcccaggaggagaggcgggcgcggcaggaagactggagatggcctgagcctgcagctgccggcgcgcggacgcgtctggggcggttcgccttagccaagtggaaagagactccgcgccgcgggctacttaatagagggctgttcccagctctcagtttactcggttacgaaacgcctgagaaggtggacggctgccacggggtgatgtatgctcctccggcggtgaaggaggtctacttttgggaacgtgtgcatacttcgagcattccttcggcgtgaggtggcgatcgccgtagtagcagtgccccgctggggggcggggagaagggagggagcgtagagggggacagccgcagccgggttccctgccaagggaagccgcgtactccgccacttggggcggactgggatttctttaatgaagctcgggtttccctatccctgagatttctttaatgaatttttctacattaagaacaatggggaggggaccgactcccattttcggaaatgcaaggatgcgtaacccattcacccccgctcctgcggatctccatccttcatctgatatcaccacctccatcttcctccccctctgtcctgggtgcacttaaaaccgatttacaggatttccattaactaactgtctgtacacgcggcgcgccttctgtctttttcaatctccaagcgcgattggaaaccc

SEQ ID NO: 113578 - DNA, 207 bp, Homo sapiens; identical to SEQ ID NO: 4922
  chr6:75916809-75917016
  hyper

SEQ ID NO: 113579 - DNA, 42 bp, Homo sapiens
  chr6:75918552-75918594
  hyper
ctcctagtgtgataaacggtaaagaacgggtaaccctcttcc

SEQ ID NO: 113580 - DNA, 30 bp, Homo sapiens
  chr6:75953351-75953381
  hyper
tgagggttttctgtcgtggtgcctcagcct

SEQ ID NO: 113581 - DNA, 30 bp, Homo sapiens; identical to SEQ ID NO: 43143
  chr6:75953675-75953705
  hyper

SEQ ID NO: 113582 - DNA, 30 bp, Homo sapiens; identical to SEQ ID NO: 4923
  chr6:75994247-75994277
  hyper

SEQ ID NO: 113583 - DNA, 300 bp, Homo sapiens
  chr6:75994548-75994848
  hyper
aagtcggctggagacgccagagggagggagagagggaggagggagaagaaggagggacatggggaggggaaaggggaggaggatagaagcgggaacgaaaaggcggacgcaccctgatcatctgtcctgtgacgggctcagccattggatcgcgaatctgcgttcgcgcatgcgtggtcctagagctacggtgacacttcgcgtgcggtgtaggcgcatcttcgctctgttggccgtggctttagtaagcacacacctgcctgctactctggttatcgtggcgacggcaggtctggattg

SEQ ID NO: 113584 - DNA, 30 bp, Homo sapiens; identical to SEQ ID NO: 43146
  chr6:76059481-76059511
  hyper

SEQ ID NO: 113585 - DNA, 30 bp, Homo sapiens
  chr6:76311905-76311935
  hyper
gcagcctgggtgggcggtggatggggagtc

SEQ ID NO: 113586 - DNA, 87 bp, Homo sapiens; identical to SEQ ID NO: 4925
  chr6:76458863-76458950
  hyper

SEQ ID NO: 113587 - DNA, 34 bp, Homo sapiens; identical to SEQ ID NO: 43148
  chr6:76459158-76459192
  hyper

SEQ ID NO: 113588 - DNA, 14 bp, Homo sapiens
  chr6:78172261-78172275
  hyper
catacacaggagat

SEQ ID NO: 113589 - DNA, 1403 bp, Homo sapiens
  chr6:78172322-78173725
  hyper
cgaggacgtggacccgggggagtcggttatcagctgggctcgggtcaagcgcttgccggtcctgttgggcgtctgtttcaaaatccgggagcgggcttctacgtagatgcggccatagagggcgatgaggagcagggtggggaagtagaaagcacccaccgtggagtagaccgtgtagaggatgtggtcggtgttcaccacgcattccgacacctcctcttcggccttagcctgacgccagaagaagggcggcagcgagatagagatggagaagacccacaccagcgcgatcatgaccgccgccctcttgggagtccttttagctgagtactccacggcgtccgtgatggcccagtagcggtccagggcgatgacacagaggtgcaggatggaggcagtgcaacaagtgatgtccgacgacagccagaagtcacagaccacctggcccagtgtccagcggccggtgacagtgtacatggtgctgatgggcatcaccaggatggacacaagcaggtcggtgaccgccagagaggcgatcaggtagttagccggggtgtgcagtttccgggtccggtacactgtggcaatcacaaaggcattggagagcgtggtggccaaggtgatgagcgccaatagcataaccagcagtactttccagggtagggagatggagtcctggtaaatgtagtccttggcgctgcagttttgggagggagcagaggataagttggcttgaggaacccaggtctcggagcccgcgggcggcggtggagcgcactgagcacccggttcctccatggctctcctcgccccagctccggagcgcagctcttgggcatggagcggacgaaggagagggcggaaggaccgtggcgatcgcaggtttgtccccagttgatagttccgtgagttcctcaattattcctccgcccaggttcacagctgaaactagaggtcatgggtgcggcagccaaggcaggcgggcgcctcccctgcacttccagagcgcctagctaagccgccgcgtctgtggttgttcctctccacaccgggtcttagacctgggttgctaagagctggcccaccgagccctgctccgctccagctccctggaggcgtctagtgcaggagggtgaagtactgcttgaggagaaggctttgaccaaatgggatctcttaccccagttgcttgaggctgagcgtctcctaacctggacgcttttggatctgcagactttgcccacaggagtttcctaggtgtagagaccaaagcttgcaggccagcgagaggtcccgagatcttgcattcccacccctcgccccaagctggggcacttttggggggctgcagcggccgccagagctgggtggggtgaagtctaggagcagcgctgcgccgcgcc

SEQ ID NO: 113590 - DNA, 417 bp, Homo sapiens; identical to SEQ ID NO: 43151
  chr6:78173771-78174188
  hyper

SEQ ID NO: 113591 - DNA, 906 bp, Homo sapiens
  chr6:78175790-78176696
  hyper
aattatttttgtcaactgcagcgctcacttagaaaccatagaagagggaagcaaagccggcgagtttaaaccgctaggtgggggcattggccaggacggatcaaaagtgtgtgcgattgcgggtgtgtcctgtgggagtgcggggtgccaggaaacaattttcccgttatcctaggagaactggaaacgattagagacaagtgttaaagggatgggaagcgggggaaggccgacaggaatgtaaccagctccatgcgacctttcctcttttaatttctgctcgggagcatgggacggagaaaaaacaaagcaaaatttgttccccacacggtttttggctttagcggtttggggacctgtggctttctccagccatgcctccactgcttcgcagagtcccagactcccagaggaatccgccccttgtaggcagtttgattttaccctctttggtaaagagctgcttaaacacacaccgccatcatattgaccggatgttggcagagttcagtgaagaaccccatttccttaacctgacttccgcatttcaagtattcctttctcactttaaaacacataaaacataggtgtttgcacagaggcgcatgtgtgtgaaacacccaagagagaaagagaccctgtaaagtcgcctgtgcctgggtcaccccttcggagtaggggtcgctgggtaaggtccaagtgccagctctgcagtccccagcggcgctagaaggaacctccaggcaagttttgggggaaattcacctgacaggggaggagcagagagggaatcagtagcggaagggaaagggtggagatggattacctgagcgcagcaaaacttagttgagtagaaataagctcccgtatgaacaccgggcactaaaactgcgaattaatgtggtt

SEQ ID NO: 113592 - DNA, 95 bp, Homo sapiens; identical to SEQ ID NO: 43153
  chr6:79577180-79577275
  hyper

SEQ ID NO: 113593 - DNA, 30 bp, Homo sapiens; identical to SEQ ID NO: 43154
  chr6:79577676-79577706
  hyper

SEQ ID NO: 113594 - DNA, 124 bp, Homo sapiens; identical to SEQ ID NO: 43155
  chr6:79620217-79620341
  hyper

SEQ ID NO: 113595 - DNA, 263 bp, Homo sapiens; identical to SEQ ID NO: 43156
  chr6:79620474-79620737
  hyper

SEQ ID NO: 113596 - DNA, 527 bp, Homo sapiens
  chr6:79788061-79788588
  hyper
gcgcccccgccccccggcgctaaaaaaggagtgcctccgacccctcgtccccagcgctccgcacgcggcacagtgagacccccacccgctcctccccgcagggcgtgcgatttatttatttatttccagtcggagaagatgtcggagcccaagccgccggttggctggaaggcgctttctctgtggaggccgatagtggcagggagggggccggggacggttccgcggagggatctgacgcacacggagccgcagcacaggctctattcagcggcgctggctggagctgagatggaagttagtttctatgtagcagaaatatgaaacaaatgaagcaaaactgcccagagaggggaaatgccccaaggatgggtctcactcacgcgcgtacacagacacacacgcagagagcactctcacgctgggcaagctcgggatcgcgctacccttcccgagttgaatgatagtgtttggtttctgtctcttgccatgtgcatgtgtataaatgctgcggattggcatctgtg

SEQ ID NO: 113597 - DNA, 30 bp, Homo sapiens
  chr6:79943327-79943357
  hyper
ttcccttccctccccgggacaagtcgaagc

SEQ ID NO: 113598 - DNA, 30 bp, Homo sapiens
  chr6:79943781-79943811
  hyper
aggagccaccgcagcgcacccagcccgcga

SEQ ID NO: 113599 - DNA, 30 bp, Homo sapiens
  chr6:79944527-79944557
  hyper
cccacctccgcgcgcggtacgcgctgttgt

SEQ ID NO: 113600 - DNA, 155 bp, Homo sapiens; identical to SEQ ID NO: 43158
  chr6:80246695-80246850
  hyper

SEQ ID NO: 113601 - DNA, 517 bp, Homo sapiens
  chr6:80246889-80247406
  hyper
cgcaggctcttcagcagagccgatgcggcgtcccgcctccttgccttccctcttaggaccaaactcccagctggggcctcggcgtctgaccgccaaagagcgggtgcctggttcctgcggaggctgccgggcgggtgccgaggttgccgagatgcgggaggtttgaacacaaggatgggacagaggcgaggatcggggctcctgggtggcagcggcggtaacctgggctccagggtaacggaggcggaggcctagactgcactacgaagagaccgcagccaatcatgatgactctacccgagctcccattggcttctgtctccagacggccctttttattggcttcagtggaactggaaggcgggacggcgagtgcgggagaaggtctccattggccgaccgctctagctgtagcggagacccccaagtagggaaattggggcaaaacgcggagcgctccaggctcctacgggctgtgcggtgccagggctcgactgctgagcgtcgtgggctccga

SEQ ID NO: 113602 - DNA, 389 bp, Homo sapiens
  chr6:80340634-80341023
  hyper
tgcccggtacgccagcggccctgagacgatgtgtgcccgcagcacgatcgtgtctgttggcatttctgggtgtggatgctccaaaccaataaaccacaatacagaacccaagcttggactttgaaccgagcccttttgcctagtttgctttttcctcatcaagccaggatccttgccaacccacctcacagcttctgcccgggctgtggctcccctccagccacctgcgcgtgttcgggatagaagcgcggtcaggaggggagctcagtccaccagccactccagggagagacggaaactacaaatcccatcaagccccgcagccggctccctcctcctccctctccttccccttcagcctgcggccgggcggcgctgggcttttatct

SEQ ID NO: 113603 - DNA, 503 bp, Homo sapiens; identical to SEQ ID NO: 4937
  chr6:80341054-80341557
  hyper

SEQ ID NO: 113604 - DNA, 419 bp, Homo sapiens
  chr6:80487602-80488021
  hyper
aggaactggtagaaacgagaaacaaaaaacccaagagagatttcatttttcactaggatgccaggtataaaatagcacatctcttttaatattcagaatagccggagtctccatttcgttattacaataatgtctttatcccttcccaggttctccccttccattctctacctctttgcgatcaaactgagcacccgggggtttcccaaacccagggttaccggatcctgagcatgcgcggaggagggacagggagccgcccacgccgggctccgcggctgcagttgctgttgtggccacaaggtggcactaagtctttggcggccgctggccttcccgaccgtggaaagtcggggccggtggggctaggtaggaagagcacactcctgtgaggttgccgggggcggggctccacctgg

SEQ ID NO: 113605 - DNA, 30 bp, Homo sapiens
  chr6:80579522-80579552
  hyper
gaagccctgctgggcggtgctgccggctcc

SEQ ID NO: 113606 - DNA, 1134 bp, Homo sapiens
  chr6:80656570-80657704
  hyper
gagcacagggtggggcggctcctgcgaggagctcctggctgcacaggctccatctgatatgtcagctcccgcatccgagagctgatgagagatggagggagctcagaagaaaaccctgcgagtgtcgggggaggggaggccttaacattcggatcagattaaccagtgctcaaccgcagtgcccgcgccggcccctccgctgatccgcagcatccgaaagccgcagggcgcgggggcctgtggggccgggcccgggagctgcgagaccaggggccggtgaccccccgcgggggaccgagcgaggatggggaagtcagcggctttacctgcgatggaccaggtccagcggtagaactctaccgtgtcgttgagtgccgtggacactacgtttaggacactacccggctccgagtccaggagccccatcgcggcgatgagcgggcgctggcggcaggagaaagcggagacccagagagagggctgaccccggaggcggtggcggccgacggggcgagcggcggccgggaacccctctaacggcggcggcccggctgcgtcttctcctgctcctcaaggcgccgcggcggcggggatgcggcagaaggcagggccaagcggaaggcgtcgtcaaggttcccgggagaaagacgaggaggtggaggaggcccagccgccagcacagtgcgctgcaccagtctgcagcctcgcgcagccgcccctccaatctcctcagccggcgtcacgtggccgcgcgcgggggcggggggccggccgcccctcctccctccctccctccctagtattgggactcgctggcgtagggatgctgcgctcaagggtgcgacgccaactgggctcgcgcaggcgcgcgccgtcgagcgggagcgggacacctgggctcctccttggcccctccccgcacaagtcgcctcattagccttccccgcccctgtcccgggcatcggcccctgcggaggagttcaccgcctccccacgggtgatttcttatccgccccggatacgtcctgggaaacaggacacgggaagaatgggtgttctgtgggcaaagatgaggtaggcgtggtgctttggtccttacctgacactcacctcgatttcacttgtgttcctgtt

SEQ ID NO: 113607 - DNA, 348 bp, Homo sapiens
  chr6:80714141-80714489
  hyper
ggaaagcccgcccacgggcgtccggggaacgcctgcaaagtgccagcaccctaccaacccaggcgccgcacgggtggggtcgcggccgcaggctcttccggggcgggcctagcctgacgcaggaggaggggcggcccccgtcgcacaagaaccaatcacgactgtcgcttctacgtggctagcattgaccaataggagaccgtagtgatagcgacggggaaattcaaacgtgtttgcggaaaggagtttgggttccatcttttcatttccccagcgcagctttctgtaggtaagttctgtcttaccggtgcaccggcgcactgaggaacagccgcagccggtgtaggg

SEQ ID NO: 113608 - DNA, 108 bp, Homo sapiens
  chr6:80816124-80816232
  hyper
cctcacccgaggaccgcacggccgacctcggggaggctccaccccagaaactatttcattggcgccacctctagcccacacttcccctcttccgcatgcgcacaagga

SEQ ID NO: 113609 - DNA, 166 bp, Homo sapiens
  chr6:80816656-80816822
  hyper
ctcgcaggcgcccgcgaggggcaggggccggcaggctgcaatccttgcatcccagcttattaacttcctgactctctggaacctccttgcctcagggtctaactgtggttcacttcttgctctatttttgtgactgttcagccctcgagacgcagtcccccctccc

SEQ ID NO: 113610 - DNA, 30 bp, Homo sapiens; identical to SEQ ID NO: 4939
  chr6:81814308-81814338
  hyper

SEQ ID NO: 113611 - DNA, 30 bp, Homo sapiens; identical to SEQ ID NO: 43168
  chr6:82128370-82128400
  hyper

SEQ ID NO: 113612 - DNA, 291 bp, Homo sapiens
  chr6:82461397-82461688
  hyper
aactccccttccccgcgcaggtcggcgcagaagatgaggtccaggtccttgtagcccaggccgctgtcctggtgcaggacatggctggctgccgagccgttgaggcgcacgtcgcggacgccaatgcgcttctcggccaggcgccgccgcaccaccttcacgatcaggctcggctgcagctcgagcgtggggaagttgccgcgcccgtgaatcggaatggtctcgctcaggatgccgtccagccgctgcacttgctcccagttcagcacattgcagtgcgccgtagggctt

SEQ ID NO: 113613 - DNA, 2083 bp, Homo sapiens
  chr6:82461728-82463811
  hyper
cgccgaagtcgccgccgccgaagtcgccgccgccgaagtcgccgccgccgaagtcgccgcctagggggatgtaggggctgcaggccagctcgtcctcagacatggcgaagtacccttcaccctccgccatgtagtgcccgccgagcgccacttggccctggtcagtcctaaaaagaaagggaaaggagcgcggtgaggacgcgcggcggcggagagcacgcgcggcggcggagagcagaggcccgccaggaaaagagcgccccctcccccgatagttccctgaccccgggcctcctcggagactccctcccccggcccttacagtccccagccgcgcaccgcgccccgcagagcagccccgcaccaaaagtatctctgatgcatctggaaagcgcaagcgagagtcccgtctgtgtcacctggaggcggccgccccttctaggagcgcagcgagcgagagcgaaaccgagaggcggcaacacttccaggagctgcgagcgcgctcagacagcaaatagcgacttcgtctttcccagacccctgccgcctgcgctcaccactccctccccgcgacccctcctgcgccgctgccaccccagctgcggtggtcccgaactggcggctcttgctgccacacacgctcgtgtctctggagctttagcagttgtgcggggaaaatgtcttcagtactttttttataccgggcttctctgcgcttccggggcccagagcggcacgttcgccacaccctcctcatctgcatagggcgccgccccctctgccctcccccgcccgcagggcacgcagctgactagcccagcagttagtgcgggacgactgccggtgagcgtgaggtcctgggctgtatgtgcggatactgtgtgcgcccgtagatgcgtgtatttatacatacatttaatttatgtacgccccctcccacaaatctcttttcattttccccaggaggagacactttaaatgccccaggaatcataagtggtcatcaaaaccagatcacgactaaaatcctgcaactgcagaaacttcccaaaattctcgcggactcagcccgtctttagatcatcacggttgggctccggaggttcctcacgaccgctcttttaaacctcggtttttaggtagaccatttactccattgataaacccgatccaagtgtggactcatgagtccactcttgcacgcaaatcagtcacggcgcgtgagtgggaagggcttgttgataactgggtttcgattctcgaaacctcgggaagcgcgccggggagctctgggcgagcccgagaaggcgcgggggcggcaccacgggcctcgggcgtgcgcggctcctgcgcacgagtggctccaaggggccagtacttcgcgggggtcagggcgcgtcacggagcagacgcgggcgagcagccaatggccgaggactgggcgggccgagtgggcgcagagagcgcgcccggggagtgcgtgctgccccggagtccagggaaagggccgctaggtgtccggtgcctttgctgcgagttctctgacaaaattggaggcggcgaagcgcgttcctcgcggccccctaaagtttggccattttaagtgcatcatagtgtcagtggaatacgatttggttttccacgagacgtaaaagtaggagtttcaagaataaaatgaattctctcctccagcttcggtgacttcggcagagctaattctacgcacgctcactcgcgccaccaccactctttgctagaaagctgtggccgtctcttcggcagctcgctgcctccatcaactaacccggagcagctttcccagcgcctagacgctgccgggggctgaggtggggcagaggggagaatgccagggtcacagaatactccccaaaccctgctcagccctgcccgcccagactgggaggaaaaacagcccgcacctcctaactgggggagccccggcctagtcactcaagctgcgcggctcgggggtgaggggtagggtgcgggggtgtcacccgtggagcatccagctgcgtgacaacgccgccccctcccggtgccctgccgagctgcgtcccaa

SEQ ID NO: 113614 - DNA, 30 bp, Homo sapiens
  chr6:82957668-82957698
  hyper
gaaaaaggccgcagcggggaactctaggcc

SEQ ID NO: 113615 - DNA, 30 bp, Homo sapiens; identical to SEQ ID NO: 4944
  chr6:82968453-82968483
  hyper

SEQ ID NO: 113616 - DNA, 1870 bp, Homo sapiens
  chr6:83073029-83074899
  hyper
taaatctgaagtttgcggcctcaagtaccactttgatggggagagcttctgaagcttccatacaacctgccgtgcctttgctgctgccgcagtagattttcagctcatttctttctgctgctgcttcgcgctgctctgtcatgcctaaatctatctcgtcactgccaaaggtgcctgaatcagggtgaattccacgagattcaccagcggttttgctccagtccaaggtaaatacagtatgcaaaatgaggaaccacccaaggatgtcggggaggggggagagaaagggattccctcaccttttccggcacattcctcgttaatttccaccaggaggaggcgcgcagcccagctcccctagtctctcttcttaaatccccctacctacggctgccgaggttggccgcgcgtcgggaatctccccgacagtcctggccctcccccgccccccgggttggtttttcccagctgcggaggttgggaggttgggccaggggctggggtgcgaagagagtcggcgcccgcaacgcggagccgggaagtcgtcgctactctggtggaactcagagttggttctggaggcggcggacgcggaggtgagcagtgggagcccgcggcctgggagagacccgggaggcgtcgttggggcccctccccatcctcgggtggagagtagggttggttcgggttgccactgtaccccgagtcccactgctgctttgttcccagactctcccctcctctttggagatgacttgaacccctttgagatccgaggggctggcggggcgcgggctggggggcgacagttgtagctccacttcctgctaatgcgagaaggtacaaaaagagatcaaaaagtcctgtaacctgaaacttccctcgcatcctaaccgggacctggtggagaggtctgggcgggggcggagacacccggaggccgaccttccgccgaggcggtgcaggaaggaacgggagagggagaagtttggtagggaaggaattggggattaagcggtaagttagacgcgggagacgagtctcctcgggaaaggcggagggcgggaggccggtcgggtttatttagtgtgggccagggaagaaggaagactttgcggtctgggtgtcggatgcgcgtccccctccggagtaaaagtgaccggaggggttggggaggcgaggccggggcgggcttttggaaggaggtctctgggacagactggagacgactagactcgaaaaggccggtttttgcactccggaagccgcggcagccaccgctgttcacgcctctctcctgcttgtcccaggtccctcagaggatccagcgaggggcgccaacaagaggcgaagaggtggcaccagggcggcggcaggaagaggagcgggagcaggagcgcggagcggagcgtcccgacccgccgtgcgtactttctggagggaaggggcgggggaatcggcccctgagggaagcgcccggtggcgagggggttagccaagttccggctgcggcgccactccctcggttccacgagaggaaagttttttttttccagacgcttccgccggctcgcgccctccgggcccagcctcccgagccttcggagcgggcgccgtcccagcccagctccggggaaacgcgagccgcgatgcctggggggtgctcccggggccccgccgccggggacgggcgtctgcggctggcgcgactagcgctggtactcctgggctgggtctcctcgtcttctcccacctcctcggcatcctccttctcctcctcggcgccgttcctggcttccgccgtgtccgcccagcccccgctgccggaccagtgccccgcgctgtgcgagtgctccgaggcagcgcgcac

SEQ ID NO: 113617 - DNA, 30 bp, Homo sapiens
  chr6:83775324-83775354
  hyper
cgagctgggcactgcgcctagaatcccagt

SEQ ID NO: 113618 - DNA, 216 bp, Homo sapiens; identical to SEQ ID NO: 4947
  chr6:83775564-83775780
  hyper

SEQ ID NO: 113619 - DNA, 92 bp, Homo sapiens; identical to SEQ ID NO: 43176
  chr6:83902911-83903003
  hyper

SEQ ID NO: 113620 - DNA, 197 bp, Homo sapiens
  chr6:83903544-83903741
  hyper
tatcctgggtccctcggggcagaggccagtgaatcgtaaacgtccggagccctggaatgcggcccaagcgaaaaggccaccgcggtgttgggggggggcggtccgcgagtccaggaccgaggggtggcgactggcgctggggaactcggagcccatcctgctggcactgcggcctctctcgccgcagcgtctggctc

SEQ ID NO: 113621 - DNA, 139 bp, Homo sapiens
  chr6:84221724-84221863
  hyper
agcgcaggatgctcccgggggtccaggcgtcccagcctgaggtccccatcctcgtgtgcagcctgggcgcctggtacaagtcggggtaaccctgaggcttgtgcatccagagaagctaggtccccggtggagactagct

SEQ ID NO: 113622 - DNA, 103 bp, Homo sapiens
  chr6:84417597-84417700
  hyper
cgctgtactgagcggcggcgatccgatccgtgagcgtttggcccgacatcttctgtggtcgcgtctaccgcctcctcttctgcaggaaacaaggggagacggt

SEQ ID NO: 113623 - DNA, 155 bp, Homo sapiens
  chr6:84417908-84418063
  hyper
cgtgacaccgtccccattctcccccggcccccacatagggccagactcaccccctggggacccccctgtcaatcagcactttccccgcaacctgacccgcgggtgctggactagccacaacgtgcgttggggttattccctgggcgccgcaccca

SEQ ID NO: 113624 - DNA, 528 bp, Homo sapiens; identical to SEQ ID NO: 4949
  chr6:84418260-84418788
  hyper

SEQ ID NO: 113625 - DNA, 415 bp, Homo sapiens; identical to SEQ ID NO: 43180
  chr6:84419071-84419486
  hyper

SEQ ID NO: 113626 - DNA, 579 bp, Homo sapiens; identical to SEQ ID NO: 43181
  chr6:84562705-84563284
  hyper

SEQ ID NO: 113627 - DNA, 362 bp, Homo sapiens; identical to SEQ ID NO: 4952
  chr6:84563416-84563778
  hyper

SEQ ID NO: 113628 - DNA, 31 bp, Homo sapiens; identical to SEQ ID NO: 4953
  chr6:84564098-84564129
  hyper

SEQ ID NO: 113629 - DNA, 71 bp, Homo sapiens
  chr6:84569262-84569333
  hyper
ccggtgctgaagttcgggatgcggaactagctgagcatgcgtacttcctccctgccggccctccctccgtc

SEQ ID NO: 113630 - DNA, 158 bp, Homo sapiens
  chr6:84743221-84743379
  hyper
acccaaagttgacccgagggacccactgcagagcccgggatggcaaagaattctctgactcaggctctgacccggactcggaggggcaaagtgagcaggaaagggatctgcaaagctcacctcctcttggccaaggcggcctcgcgctggggaggcgg

SEQ ID NO: 113631 - DNA, 652 bp, Homo sapiens
  chr6:84743594-84744246
  hyper
gccagccggtaaccacgggcgggacagggcgcccagggcggagcaaagcccgggcgctgggtgcggggcgcgtgcagctttggtcaaggcagggcttgcttgggtttgggggcagtctttagtttagaggggctagagaatggggtgggaggaggagaattggggtgtgaggacgcccacgggaagagtgtggaccccgtggagagcaccaagtttaaaaccttcccggcagcccgctgatgtgcgtgtggacgccgctgggcgtccgaaaagcctggaagcggcggcgctcggggcttgggtgggcttcctcccctccgctgggccccagcggccgaggcacaccctttcccgctggtgagaaaactttccttgctgcggccctcctgccgccttggtgccctgcaactgagagagcccccctgggctggggaaatgtgctggctcctggccccgggcgcgcctccatgcactgggcagggttctcagatgatgcctggcttgacagttgctcattcattttgtttggactggggagcctgctcgcaggtcgtgttactgattagagggaaataggggttttacactttccccgccgccccaccccgcaacccgcccccgctccccccgcccgccccgcgccccgtgcccc

SEQ ID NO: 113632 - DNA, 103 bp, Homo sapiens
  chr6:84937360-84937463
  hyper
cagacttcagctgccgggttctggagtcacatgacccgggctggtcacgtgggccgtgggtttcccaatgcctttacaagcgaaggtcggaataaccacggct

SEQ ID NO: 113633 - DNA, 30 bp, Homo sapiens; identical to SEQ ID NO: 43187
  chr6:84937676-84937706
  hyper

SEQ ID NO: 113634 - DNA, 2318 bp, Homo sapiens
  chr6:85472292-85474610
  hyper
ctatctcatgaaagcgcttccagagctcggctccctgcagatccacccgcggggcctgcggcgagggcagaggggtcccgggccgggccagggagcgcgccggagaccccttgggggagcctcccggtgacgccagaggggaagctccctgctggaagccgtcctcacagccgcctggacagcaaaggacagagaaagggaactggtgagggaaacagaggggaagccagccgcggagacgggcccacctggtggctgagaagaggaaaatgaccgggagaaaaggggaagctttggtgccatcaggtcctcctaaagaacaagccagtcgatagacacccacattctgcctgtcgaaggggcgcattcagagctccagtgtggcctgcttggtccccaagtcccaagcccgggagaggcgcgcgggcagcgtccaccccacccgctgggcctccgcagggccaaggccccagcagaaaaggcttcacgccgccgccggggtctgggacgcttgcccgacggagtcagaggagctcccgggtccagagtccccagtgcaaactccgacgcaacctgcgcctcgaagcgcaagcagcaaaagcgcccggactctggtcccaagagcctgggcctccttaagccataagcgtctgcggcgcctcgctttgggccttcttttgggccgggccggaggcatcttctagaaggctcttcagaccccgctttcgccaaactcccggcgccctgcgcttccagcccagcagagaaaagtgtgaaaagcaagcccgcggtcgccgtcggccttggcagagaaatcaagaggagaagggaagggaaccgctcaactacccttcgggaaaccaagtttccaaatatgccgccctcttcctggtttgcacaaacggtttagggcattcgttccggtttcagggtggggtatgccgtcgctcccctcctccccgccctgtgcttttaaaagttaggaaacaaaaaagagcacccattggctggaaccccaagggaggcagatgcaggaagcacagagctgcaccgctaggcgcagcaaacagccgcggccgaaggcgcgggtcgccgagtgggcggcggccgcccgcgaggcgagcctggaagcagtatctgaaccgtctggagggtgaccaggttgcgcggcgagctttgcgactgacacggccaatgcgctagtggctgagtggccttggccatgtagggacgcggcgcgcacgcacacccacagactcgcagaagttcaggttcgcgccggagagaagttataggcaggaaggggcccactcacccgcggctccgcgctccaggtctgcgccactccgagccggcccagacgtcgccccagccggcggcgggagcgcagcgccttcgtctccctcagaagaacccttttcgcccgcgccgccgccgcggctgcagcctccgtcgtccacggcccccgccgcctcttcggcgcccagttttcgccgcttcttctgaagctgttgctgcttctcggcgccgatcagcgcctccaccgagaaagcgtgcgccttgaggcttagcatgctgcacggcgagccccttcgcttctcggccatcccccccgccccgcgcccgcccgcccctctctcatatacactcacgcgggcacacgcgcgctctcgctcttcccccaccaaaaactaaaaggctctcggggcctcccgagatctgcccccttccccaccgcgggcaaaaaacagatttggcgtttccgctttctcgcttgtgttgggatccaggaaccggcgacgcgccggccaagtctcctttcctgggtctctctcgcgcgctctctcactgatgcactcctttgctcccaccccttccacctcctcctgctgctccgaggtctgcctcaactgatgcgccagagaggactaacatgggtaaaaaacactctgtggacacaaattagggattgtaattgaaatttgttgccttgatctgtcagcacttccaggcaggagagcggtgggaagaacttgctcattagtgtcaataaagcggcgggggcggagcccgggtccctgtccatcacccagacggccggccaatcaggaggcgccgactccgcgcagcccgcgcccacttccttacaaggtagcgaaaaaccaggagtgaaaagcgccgctgtctggcttggatgtgccagccacacggacgctgaactctgtctctctgacgtccgtagctgagtccagccccgtagtctccagctttcctcaccaggacctggaaaggcggaagttcccggctttaaactagac

SEQ ID NO: 113635 - DNA, 225 bp, Homo sapiens
  chr6:85475697-85475922
  hyper
tgtatatatatatatatatatatgacaaaggaattttttcctctccctcgtccctcgtttaattcaatctccgcaaccgttggctgcccttttatctctgacttctctgtaaactttcagtagagtagcatttgggggtagatccgccactgagactgatccttttattgtagaagagaacgcgcggttcctggaggccggacaccacagcgggagtaggaacct

SEQ ID NO: 113636 - DNA, 267 bp, Homo sapiens
  chr6:85476131-85476398
  hyper
cggggtaccctaggccggtattacatcattaaaaagaagcgcaaatcccatttctgaagcttagccgaaggcaggcgccggcagggagagctaagaggccgcctagagagtttgggccgggagtgggagtgggacaaggcgggagctaacttagctggagtagacgccagaagaagttccgttcagctgaggtgccccgccccaatcccaggctctcggggaccccaagaagggagctacccggtgcttctccgagcggtccttaca

SEQ ID NO: 113637 - DNA, 554 bp, Homo sapiens; identical to SEQ ID NO: 4962
  chr6:85476713-85477267
  hyper

SEQ ID NO: 113638 - DNA, 485 bp, Homo sapiens
  chr6:85478296-85478781
  hyper
gtgaacatcagcctacgctgagtcaccaggcagcgccgcacaaatgggctagggcttcccctttccgcgattcctgtccctactctttcccactctctttcttctctttgcacatacttttcttctcgcctctccttcggatctgcgttaatgaaaatattttatcttgtacaagtttataaagcctacggtagtaaattcaggcgtcccagggctcaaggactgcactcttgcggatttctctgccgggtctggtgctgcagatgcaaacccaggccccgtgaacaaagcgatccggagctgcaattcctccctgctcactcctgtggctgacttgcacgcacagacatcgcctccccacttgttggcgactgttttccattcttcccccaacaattcgtccttctcaattccgattagctgagactgaagccctctacaaaggacctgtgcagcccacggaacaactccgcagttctcaggta

SEQ ID NO: 113639 - DNA, 30 bp, Homo sapiens; identical to SEQ ID NO: 43195
  chr6:85481458-85481488
  hyper

SEQ ID NO: 113640 - DNA, 71 bp, Homo sapiens; identical to SEQ ID NO: 43196
  chr6:85481723-85481794
  hyper

SEQ ID NO: 113641 - DNA, 254 bp, Homo sapiens
  chr6:85482157-85482411
  hyper
aggaattcgtatttccgatgaagttccaaagctgaaattaaaatccagtctgggtttctgaagctcatattgttttggacaatatctgcgttttctttcatttagttttcgttctttctggttttggtgctttttcttttcttttcttcttttttttttttttttacattgccgaagacaatctgatttacagtttgactgagagttgcatttctgtttagaaggtgaaacgtctaaatcgcttagccaaatta

SEQ ID NO: 113642 - DNA, 127 bp, Homo sapiens
  chr6:85483039-85483166
  hyper
agggaagctctacaacgcggcttcttggagttctgaggccgcctgcgcattcactttccagtgtaagcccccgctccggaatcccggctccagcccagcccgcgcccccttccctggaaagacctgg

SEQ ID NO: 113643 - DNA, 313 bp, Homo sapiens
  chr6:85483210-85483523
  hyper
cggggctggtccgaccggtcgcttccagctctctccacctgttggaaagcccaggcccaagaaccgcgccagcggcggcagcacgtcactcggcggccacggggagtcagggagcgcggaacgcgggtttctgttgataagtgcaaagtacggccctctcggtgctaagtgcacagtaagtgcgaagaataaatacatcatctcccggggcggctgtctcgaaaacgcctctcagctgcctgcgtttcagagcccgtcaagggttatagcttagtgtgggcgtccgcgccgcgcctgcgcctccgagcgccgg

SEQ ID NO: 113644 - DNA, 172 bp, Homo sapiens; identical to SEQ ID NO: 43198
  chr6:85483759-85483931
  hyper

SEQ ID NO: 113645 - DNA, 68 bp, Homo sapiens; identical to SEQ ID NO: 4964
  chr6:85484557-85484625
  hyper

SEQ ID NO: 113646 - DNA, 166 bp, Homo sapiens
  chr6:85484716-85484882
  hyper
cgctgacccctccacctggctgaaggcagcagccctgggagactctggcactctgggccggagcaggagctgtgccccatggcaacccagactgaaagggaagccctgtctgttgctctttgctgcggattcgagggaggccgtctcgagtcgctcagaagcgacc

SEQ ID NO: 113647 - DNA, 1328 bp, Homo sapiens; identical to SEQ ID NO: 43201
  chr6:86159087-86160415
  hyper

SEQ ID NO: 113648 - DNA, 1517 bp, Homo sapiens
  chr6:86302911-86304428
  hyper
taaaattgcggctacgaactggaccttgaacactcctccgtcagctgacttgactgcctgtgtacagtctcaatttgagccgacacacggatttcacttttgaaaagcaacgaagatgaagaactcgttttgagaaatggatgagaaaaaggtagctcaggagacgaagcctcgggaaaggaggcaatcaaccccaccccaccggcctgtgcttccggcctcgacgctccgccgtgctccccgaggccgctcctctgcggagctcgctctccccactggtccccagtcccgcagctacgcggcctccgcacggttaagcagcacgggccgggcgtctgcaccttcggagaaaagccgccgcccaggctccgcgctgcggcgttacctgttaagaagcagggaggcggcgctgagacagagcagcaggaagcagaacagcgggtactggcggcagatctcgcgtcccacgtccagtcgcagccgctgcttcagcttctgccccatcgtccgcacccagggcaccatctccgtaacggcgaggccgagactgcgctactggctgaggcagaggtcaaggcgaccccccatccacacctcgcgtccccgccccaccgacttggcggcgcacacagacgcctaccggcagttagccgccgcaggctgaggtcgcgtccggctgggcccagccccacgccccccgccgcgcgtgcgcggccgcggtccccagccgaccagaggaacggccgtagaacgtgcccgaagtcgtcacccagcgcaaagcctctagcgtctcgccgctccgccctcctggccggagtagcgcgcagtcttccgtggaaactctgacaacactggcgaccggccatttccggaaatcaaaggacagccccagcacccagtaactgcctgtattgcggaggagagggaagaaggttgtagggagcccggaagaaactacagcacccccgtagccgccgggcgctgcctgaggggcaaccggagctcgtggagcccgctgggaactgtagtcttcgtgacacgaacccgcagagggatggagcgggtggtagcgcttccccgaccccgcaacgctccgcgcctcaccgtacactcggctccgggtgggagcaggtccgagctttgcgtgacgcctaagggagagggggataggaggacgcctttgagtcggtattttaaaaggggtgtgttgggggctgggggggtggcgagtaaaacagccctagaataaagactacaactcatcaggccgccaccccaccaacaaaatctcttttgcgcgctcacgggcaagggtagagctcaattcacgccggctccgggagcccaaccaaaatccgagtgcttggaagaggcaggttggcagattaggtaaaatccctcttatagagtctcatggggttttccctttactaattcatcacatttctaaatttttttttctgtattgtccgctacagtgagagatgcaggaagactattatcgcgaaaatttactt

SEQ ID NO: 113649 - DNA, 30 bp, Homo sapiens
  chr6:86353869-86353899
  hyper
gccttgggatgacacgaaggccagatttgg

SEQ ID NO: 113650 - DNA, 30 bp, Homo sapiens
  chr6:86388345-86388375
  hyper
taaagctcttaactcggcctgcgccaccat

SEQ ID NO: 113651 - DNA, 104 bp, Homo sapiens; identical to SEQ ID NO: 43203
  chr6:86388825-86388929
  hyper

SEQ ID NO: 113652 - DNA, 592 bp, Homo sapiens; identical to SEQ ID NO: 43204
  chr6:87646716-87647308
  hyper

SEQ ID NO: 113653 - DNA, 264 bp, Homo sapiens
  chr6:87647316-87647580
  hyper
cgctcccaggttctgtctcgccgcaccccggcgggcactggcgcgggcaaggacgctggcggggagaacgccctgggctcaacgtactccagaatcgaatgttgagagaagcagtgctctgatccagctcaggagaaaaaggagcgggttccgagtgagacttctggagccagctggacgtgccggtttgcccagtgcggcgcggctgcacgcaccgtccacaaggtgaggggcgcacaccttccgggacgaccttggcttccc

SEQ ID NO: 113654 - DNA, 30 bp, Homo sapiens
  chr6:87832006-87832036
  hyper
tccctatcgtaatcccgccagactttggcg

SEQ ID NO: 113655 - DNA, 146 bp, Homo sapiens
  chr6:87832385-87832531
  hyper
gctgcggccaccgcgcgccatcgtccagaggagagggcgtccgggagggaggcgccgagtgagcgacaacagcggtagctcgggaatggggtctcgcagcgcggcggcggcggcggcgggcctggggccggcgcggaggaagggac

SEQ ID NO: 113656 - DNA, 815 bp, Homo sapiens
  chr6:87861485-87862300
  hyper
agtaggttgatggagcctcttcgaaatcaggcagcagtgcccgcgccacggcctctgcaggacagactccagcatccccggggtgggtttccggaggccccgctccccgccgcgccctggaaaggctccagaatctctcggcctggaggcccctggcggcctctgctcccaagcggggagtcgcagccaggctacagcgggcttgatcctcagtgctgggtggaaaaaccgcggcggcaaacgccgggcctgcaactgctgggtgtcggcgttgctggttcgcgggcggcggcggcggcggctccgcgacaacagaggacgcgagcaaccggcgcagcgcccagcagggccttggcggggtggaggggcgcaggctgggttagcggagcagagcggaccgatctggtgccctccgtggcccgaggcctgcggaccttctccgttctccggcccagggcgagagcggggcaagagacagcgccccgatagtggcgcacgctctccgccatccccgggcctcgcgctttcacctcgcgtgctggggcgagggcggggctgcggggtgtactgggtcgggggtaggaaggacctgccaggccttagccctgagctatccgtcatccgctaacgccgcgctccctgcatccctggcttggcccccaggctctgcgccgcttgtctgtagcagacacaactcagctcccttactgtcctcaggcccggctatttcaagaattccagaaaaagagtgcaccggcgtgtgcgggccggtgctgcccggaaaacccgtgaagcaggcacgcacggcccggatg

SEQ ID NO: 113657 - DNA, 30 bp, Homo sapiens; identical to SEQ ID NO: 43207
  chr6:87864936-87864966
  hyper

SEQ ID NO: 113658 - DNA, 30 bp, Homo sapiens; identical to SEQ ID NO: 43208
  chr6:87865470-87865500
  hyper

SEQ ID NO: 113659 - DNA, 30 bp, Homo sapiens; identical to SEQ ID NO: 43209
  chr6:87866036-87866066
  hyper

SEQ ID NO: 113660 - DNA, 41 bp, Homo sapiens; identical to SEQ ID NO: 4971
  chr6:88032034-88032075
  hyper

SEQ ID NO: 113661 - DNA, 30 bp, Homo sapiens
  chr6:88032371-88032401
  hyper
gttgagtggctgggcgccggcctggagggg

SEQ ID NO: 113662 - DNA, 252 bp, Homo sapiens
  chr6:88117489-88117741
  hyper
cctcatcattcccacgctagcaagttaatatccttatttacgagaacttgtgtttcacagtcttaaccacggaggttaagatgtctctgcctgaaattcctttgtttttaaagtttttccagcccatcttttgggggaaagaccctcaaagtgggaccccgccccacccccacctggccccgccccctctggtccggagccttccatctccatggttacgcggcggtggctgcgagcgcccaactgctccga

SEQ ID NO: 113663 - DNA, 30 bp, Homo sapiens
  chr6:88117981-88118011
  hyper
attcctgccggaggcgccaccccagggctg

SEQ ID NO: 113664 - DNA, 168 bp, Homo sapiens
  chr6:88182441-88182609
  hyper
cggggagacgcagtttacagaactacctccccaaccgaatttcacacacctgtcacctaggacgcggccgggaaggcctcccttcgatccgcgttctccccattttggggtgtagcttggattcctgagcccagttttagtgcgtggccgaccgggaggccggcgagg

SEQ ID NO: 113665 - DNA, 30 bp, Homo sapiens
  chr6:88183074-88183104
  hyper
accgcattacccagcgaggcaggacagttc

SEQ ID NO: 113666 - DNA, 330 bp, Homo sapiens
  chr6:88299608-88299938
  hyper
gggactcctctgcgcgctccgggatccatacctggcaagcaatagcgcggcgaaagccgcacgccatgtccacctctacggaagtgcgccgcagtccgccagttccggcctcgccccacctccttatacgacccgcctccccgcgccggaaacccgccccggagggtgatgccagccaatcaaggagccgtgtggctcgccactaacctctgccctgcagccgcgagggcgcgcgggaaatcccgagtgcatctggaatacgcagagtcagtaagaccatggctacgtcctcgatgtctaaggtatgtggtggccgatgcgcactgtggc

SEQ ID NO: 113667 - DNA, 37 bp, Homo sapiens
  chr6:88410991-88411028
  hyper
tcttattaggtcctcgggctacgaggacctagtgaaa

SEQ ID NO: 113668 - DNA, 30 bp, Homo sapiens
  chr6:88411784-88411814
  hyper
gtcgaaaacagcaccgtggggtgtgaggct

SEQ ID NO: 113669 - DNA, 44 bp, Homo sapiens; identical to SEQ ID NO: 4972
  chr6:88663570-88663614
  hyper

SEQ ID NO: 113670 - DNA, 309 bp, Homo sapiens
  chr6:88678312-88678621
  hyper
tctacttttagaaaacgtgtgcttaacttgtaaatgtagttttcagtgctggtaagaatatttttgttttgaataacaatcgcgttcttttccacagcgcgaggctctctgctgagtagcaaggagcccctcccagccggaaggcttttgcggtgctagcagcgcctgtctcagagcccttctttatcaacactgggctgcagggccggtttctgaagtacgtagtaaacataattgttctcacattaaaaagaagaggaaaacaaacaaggcgcagatatgttccgcagttttcgcagcactgcatgg

SEQ ID NO: 113671 - DNA, 191 bp, Homo sapiens
  chr6:88875376-88875567
  hyper
gccatacagctaagtaaacaccgacgcacgattcgctcacacggaataagaactccacgaaggacacttggggaccacactggtcgtacccgagggggcgggaggcggaaaaagtatttccaaacgcaactctgccaggtcttacccttcgcatcccctggtcctcgggacagaagctcccttggcacctc

SEQ ID NO: 113672 - DNA, 616 bp, Homo sapiens; identical to SEQ ID NO: 4974
  chr6:88875621-88876237
  hyper

SEQ ID NO: 113673 - DNA, 192 bp, Homo sapiens; identical to SEQ ID NO: 4975
  chr6:88876284-88876476
  hyper

SEQ ID NO: 113674 - DNA, 791 bp, Homo sapiens; identical to SEQ ID NO: 4976
  chr6:88876630-88877421
  hyper

SEQ ID NO: 113675 - DNA, 30 bp, Homo sapiens
  chr6:89372520-89372550
  hyper
acagcggttgaacaccgggaaggaatcggc

SEQ ID NO: 113676 - DNA, 30 bp, Homo sapiens
  chr6:89673093-89673123
  hyper
ttcagccaccgcggcgggatcttgttgtga

SEQ ID NO: 113677 - DNA, 30 bp, Homo sapiens
  chr6:89790403-89790433
  hyper
ggaaagtgggcgggcgcggggcggagcttc

SEQ ID NO: 113678 - DNA, 30 bp, Homo sapiens
  chr6:89791438-89791468
  hyper
gttccagggggtttcggcgttccgggcgcg

SEQ ID NO: 113679 - DNA, 814 bp, Homo sapiens
  chr6:89827120-89827934
  hyper
aggagggttggatgcgcgcgattttatcggggcacggcgacaaaggagctgaaacgcgggcactcgctggagcgcaaaccctcccgactcccggcggggagcgacctgagctcgggagaggggcgccccgtgtcccacggcccgccggctgcggtgctgaaccgcggaaagcgacgcgggcccgggacacgatgtgcgcggcgccggggctgaaagctggccgggagggcggaggcgcgagttccgccctgggccgcggagtagtccgagggctcacacctccccaagtggcgcagcctgggcccgcggggaggctccgcgcagctcccccgagcctccgccgggcctcggccgtgctccgcggcgcggctgttaccccgcccctcctccgcgcccccaacctgcagccgcggccgttcacctggtggcgtccgcgacgttcctgatgaacagggaggtgttggggggcctcgtgtagcgagacatgaccgcttcctccgttccctccgggtctgcccgcggccgctggactcgctccgtctcccgctaccgctgctaccaccacaggagctccgccggcccccggcgcgacccccacccctcggcctcagccccgccagcgcgcagccgcagaggccggcgcagagggggcgcagcgcggcgccagcctggacgcacgggccgggggcgggggcggcgccggcgcggcccaggggccgcgggaattccgaagacaggagcgcggccgttcccaggccctatgggatccgggtatggggggtcctggagtgcgacgggatttggggagggggcg

SEQ ID NO: 113680 - DNA, 15 bp, Homo sapiens
  chr6:89827990-89828005
  hyper
cggggacgccggggg

SEQ ID NO: 113681 - DNA, 811 bp, Homo sapiens; identical to SEQ ID NO: 43222
  chr6:89855490-89856301
  hyper

SEQ ID NO: 113682 - DNA, 338 bp, Homo sapiens
  chr6:90062613-90062951
  hyper
ggccgcccggcttgcgtcacccgccctcgtccgggatttgtgaagttgccctgacgtggcagtagcttcgtggcggtcggtcactacccagccgccgcccgcccggcgaagccggcttggggaggtgcaggagcgagcggcgtcctcgtcctctcgtcccggccctgcccgctgtaggcgaggtccgggacccccgggccctcgagagctcggagggggcgccgggctccggctgcaaagctgtccgcagccggctgcccgcgcgcggtcccgcagggtctgggaaaggctttgtttttagattcagttgctgttgcgaggggcgggggttaagtgag

SEQ ID NO: 113683 - DNA, 30 bp, Homo sapiens; identical to SEQ ID NO: 4979
  chr6:90120690-90120720
  hyper

SEQ ID NO: 113684 - DNA, 1577 bp, Homo sapiens
  chr6:90120935-90122512
  hyper
aaggtgtcctgacaacggtgtttgcgtggatcccgggaaatctgcggcctctcggagactcccacaacagcttggcgagcatccccccgccgccccgcgggtctccccagccactacctgggtgggcccctcccgcggcgacgcggggcgagactgacacccgcagctgccgacgaccctgccagtcacgccgccgccggctgcctttttttagccacgacatctgaccctggcttcaacagcaccgttctgggagagaggtcccagggcgcgcccgcggtcccctcccctccccaaccgccagacgctgcggagagcttggggtgaggggcgcgggaggcaccggctctgaaaggggcagaagcgcgcgctcctccagcccagacgcttactccctccttccccttttccaccgatcctggttgcccctccgccaccagcaccgcgctccctcatttggcagctcgaggtcgggcttttggcgtccctccccaccccaaaccctcaactggacccgctcccctggaccccctccaagtcggtggctcgcgcacggccgggctgggggcgggaaggcgccaaggggaggaaaggggcgcgagccgaggacgcgggggccgggcgctcacctccctcctctgtgccgctgtccggatcggcgtcggaggagtcgggcccgtctccgtagtccgctagccccaccagctcatcctcctcctcctcctcctccgcgtcgtcctcgtcctgcggctgcggcttccccagcacctggctcatcgtgcccaccggccggccggcccggggacggcgggggtcccggggtgggggccaagcctcctagccggccgcccgcagcctatttctgaagcggaggtttgtctagagctcagcggggcccggcggaagcgggggccgcgcgtcccccggcgggcggcgcccaggtccgggtcccgcggttcccagcgcgcccgaagccccctcccccgccccgcccgccggcggaggagtcagccggagcgcggcagttcctcccggaggagggagagagagagagactgcgtgacccgagtcacctgacacacactgtcacatactcacatacacaccccgcacgggcgcgcgcgcgctcgcccggccgcgggcaccactcggcggggcgctgggccgaggacacacatgcacacgcacacgcacacgcacgaggagaccggggaggcgcggggcccctgcaccctcccagactcacaccgacacacgccccgtacacggggcccccgggacgccggccgtcacccaccgcggctgcgcgccaggggcccccacgcgcctctccttcacgtggtccccgcacaggcaggggagggggcgccgcacaccctcaatgtcccccccgccgtcccactcccacacgcccgcagagcgtctaccgtgggcggatgcctcctgcttacagtcctgagctagggtcccaagcgggtggcctcccaacactgtggcgcccagatcccccaccccagagcagcgtgcccaggacaccctgtggacgctcaagagccccaggcggagaactcagataa

SEQ ID NO: 113685 - DNA, 1094 bp, Homo sapiens
  chr6:90142634-90143728
  hyper
ctggcaacccccacgcggaaaacctcaccctactataggcccccttcctcccactcttcagaaggcggtggccccacccaggagagggctgcagatcggggccagccccagggcctccgcggtgccacctctctctcgcgagggtccctgccgtgccccggctcgccgctgggaggcgctgcggcaccggcgtaggagccgccggcaggggtggggcggggccggcgggacggggcagagggccctgcggcggcggacgcggcgggctcggccacaggtaacccgcaggagccgagagcgctgcctggcgcgcgggcggctggaggcacggcgctgggcggcgccgaggccctggggccgccggagccagcgggagccagtccccgtcttcgcccctcgccccccaccgtgtcgccggccttggtccctgcggcgcggacgtccggcgcgggagagaaaggtaccaggcgacctcgccggctccctgggacccccgcttacaccggggtgggcgcctcaggtcggggaggacgctgtcgggggaagggggcgctgctccctcggcaccccaggatcgccgactgcccgcggaggagacccggacaccgcgcctcgccccctggcctgcggcctccgaaaacgcccggcgcgagggggtccccccggggcgcctccctcttcgcctggcatcagttgcctccctggaatatggaacttcgggcgagggaggtggagaactttcttctggggctcgtccctcgttctcctgctcgcttgcagtttgaaggaagggcggtgggggcgggggtccgagtaccccgcggtctgcggcgcgtaggagggtaggtccctggcctgcggccgcctccgaatgaccccgtccctccccgccctggacgacagcactagggtgcagtcgcaggagaggggccgatacccctcaggagccccatcggcgaagcctcagcaagtggcatctcccggggtccagagagtcggcgtgctgtctggtttgggtccagacatcagctcacccaagcttatcttgggcttttaagtgtgttgcttccggtagatctcggggactggagggg

SEQ ID NO: 113686 - DNA, 98 bp, Homo sapiens
  chr6:90348367-90348465
  hyper
ggaaggcagagaaccgccggtacctgctttaacgttagcgtcgctgggggtaagcgggaagcagccatgtccaccagaggtccgccggagcctcagcg

SEQ ID NO: 113687 - DNA, 30 bp, Homo sapiens
  chr6:90529123-90529153
  hyper
ctccccacttaaagcggcgagtatcggcgg

SEQ ID NO: 113688 - DNA, 150 bp, Homo sapiens; identical to SEQ ID NO: 43227
  chr6:90529580-90529730
  hyper

SEQ ID NO: 113689 - DNA, 246 bp, Homo sapiens
  chr6:90539224-90539470
  hyper
ccagcactttgtctcgcacgcagctgacagcagaattttaagataaagtattaaataaatgacagacctctcaaggcttcctgtctttcactaaaaagcttctctcaggccacgcccctacctccactcaggtcagccccttcctattgaagccccgccccatcgccttccccgccaccttacaccccgcccctctctcttaaagccctaggaagattactggagtttggcgccaaccgtgttttt

SEQ ID NO: 113690 - DNA, 423 bp, Homo sapiens; identical to SEQ ID NO: 43229
  chr6:91004755-91005178
  hyper

SEQ ID NO: 113691 - DNA, 422 bp, Homo sapiens; identical to SEQ ID NO: 4985
  chr6:91005208-91005630
  hyper

SEQ ID NO: 113692 - DNA, 1092 bp, Homo sapiens
  chr6:91005660-91006752
  hyper
cgcggccaaggtcctcgcggagcagcccgggatgcgcacgccgagggttaaggaggaggccgcccggcctggagctgggatcgcaggctgggggccgggacacccgggcctcgccgggccgggggcagggccgcgggtctgacagctgctgcggctcgcgcggacgcgcgcctcctgcagcccgccctccccatgcctgacttattactctctgctcctcctccctctgctgttccaaaacacccttcgacgccagcaaaatacaatgcgcctcggccgccgtaaacagccgggagggagagcacacattcggcgcggcgcggccgccggctcggctcccacccccttcccgttcctagaaaatgccataaaagcgggcagggcgcggggagggcggctgcgcgcccggcggccggggctcccttcccgcgccgtttccccacgcctccccgcccgccccgcgcgcccgctccccccgcaaacttgccccgccaccccgcccagcggcggggcccggggcccggggcccgggactcacctcgccggagaactttgcgtccttttccgcctcctcttccccgcgtcttcccggctcgcagccccctcccggcagccggcgaggtgggcagttcgtgggtcaccgaaagctcgcggaggggacgcgcatcacatggcagctcgttcccagccccccgagtgcgccgggaagggggaggggaaggggcgaggggaggccggggggaaagcgagagcggggcggcggcgggagtgggcaggcggggtggcgagggcggcggccgctcacgttagcgctgtgcgaccgcagcccgggcgtgcacggccgctgctgccgctgctgctgctgctgctgctgctgaggcggcggcggctcggcgctgtttgctccgcgccgcgcggcttgcgctctccccggaacgcccacactctcaatcgctacattgttgacattcggcgctgacgtcacccgctccccattcacaataactttacgggagccgggcagcgcacctccccggccgctggggcgcggtacgcccggcgactagcgtaagccgctccgcgaatggcgct

SEQ ID NO: 113693 - DNA, 104 bp, Homo sapiens
  chr6:91006779-91006883
  hyper
cgggggcgggcgcgcgcgctccgctggctcgcgggagggggcgcgcctcatgccgccgcagcagcagatctccccgctttgtgcggccgcgcggcccggagagc

SEQ ID NO: 113694 - DNA, 192 bp, Homo sapiens
  chr6:91297175-91297367
  hyper
tgcctgcagccgggcgaggtggtgttgaactgtgttttttgtgacgaagcttacttttaagtttcatccctaaactaagttgacctgtttctttaagacggcttgcaaaatgtgttttcctcaatgtgggatatggaaagaagcagttgctcctgttattttgagctagtacctgacgctatgagaaattct

SEQ ID NO: 113695 - DNA, 1055 bp, Homo sapiens
  chr6:91320247-91321302
  hyper
gtttgtgtagtaagccgagttctttcttgactgtctgtttatttgggatagcccggcgagggggcgctggagattatgggggtgggggcggtttcttggggaggcctgggtctatggagtggaaaccaatctttgatgaatttggtcacaataacgaacacgggagaaaaaggagaattgaaaggaaatggattctgcgagagactggggagacaaaaccaagaggaaaaacacagaatcaaaaacgacaggaaacactagagaagagtaggcagaaaatagagaagaggaagaaacgagtcggacggagacggggccgggcactgggagcttgaggctgggtctccatccttcctttcatcctctcgggagcccgcagagacggcggcttcagtctcgctttacgggtgggaaagcagcgaccttgagaggttaggtgactgctcaaggtcaccgagctaagtgccagagccaggattctcaccgctcctcaccccagatcggggctccggccagaccacgctggccgccgggggagaggacgcgcggggcgggcagagcgcggccgggggccgggaaggagccggcgccaggcgcgcgcggaggaggcggccgggcggggagccatttcctccccaagcaacggcgcttttcaggggcgcgaccgggaagcctctcttggcgtcccttccccagccgcagtttgggcaggggagcgagggccgggaggcgtctaggctgtggcgaggggagaagcatcccccatccctccgctccccgtctcgctcaagctcttcctgcgccacgggcaggtctcccagcctcgccatcgcggggcgtccccgtcccggcccacacctctttcctctccagccacaccggcgcgccccgagggttgcaggcgggggctgcaccgggttgaagcccagtcaaccacacgtcccagggcttaggcgccgggcggggacaacgtgtctgcctgggctcagacgctgctagggggcatccctgtcggtgagaccagactcagacacgagggggcctgggctattaca

SEQ ID NO: 113696 - DNA, 30 bp, Homo sapiens; identical to SEQ ID NO: 43234
  chr6:92818996-92819026
  hyper

SEQ ID NO: 113697 - DNA, 164 bp, Homo sapiens
  chr6:94126126-94126290
  hyper
tgaaataaacattgcgagattactgtttattgccattctgctacccctcagctcagcctgggggtggaagcaagggacctaagcagacagcagtgatggccaagttaagagagaaacaaactaacaaattaaaacaaaacagaacccggcccgagaacgtttaa

SEQ ID NO: 113698 - DNA, 246 bp, Homo sapiens; identical to SEQ ID NO: 4988
  chr6:94126366-94126612
  hyper

SEQ ID NO: 113699 - DNA, 423 bp, Homo sapiens; identical to SEQ ID NO: 4989
  chr6:94126642-94127065
  hyper

SEQ ID NO: 113700 - DNA, 2727 bp, Homo sapiens
  chr6:94127085-94129812
  hyper
cgccgcctagaagccgggcgcactcgccgcccgccagccacagatcaccaccctccctcccatcacccccgcgccttttatacatcacacttctgcatctaaagaattcaggctcttagaatcagaatcctcttcacgtagcttgcacccagaagagcaaagagaactagacattctggctgcaggaacctctccccctagtgatgcagttatttatagcccaaactccagcccgagtctgcgtgtgttcgcgcgcggggtttcgccgcggcggtgcaaacttttcctctggtccgctattccagaggaatcacagtatgccagggctgaaggtttctgatcgctaacgtcaggggagtagaaatgtggttttggaggggatgagcgtgcgtttctagcagatgtccgtccttctgcaaacgcgtaaccgccagcttggaggcacggggttctctgaatgggttcagcatctatacaggttgcagatgtggaaagtggggtcagaaggtcaggctgaaagaaggactagaatttggcgccgggtttgaggggggcttgagcgaactaagaggagtgcacgatgagaataaagaaaaggtgcactaagttttcagaaatagatgaatcaaggacctatatgtaagtcccctcaacaccccgcccgataaccaccatgacctaaatttcataacagattcctctccctctacacatcaggaataagtaattatttctcttctgcttttaacagatcgaaaaatgaaacttagatacacagcctgaaagaccaggggggcgacgggatgaggggggttggggatgggattgtgacactgctcaaaagcaagagacttccattgacagggtttatttttccccagctccaactacaggcaccgaaaggtattttaccttctgtcaaaggttcaaagaaggaaaacataaccatatacaggcgtatctgtaacagcttgccaaataaaacctgccttctcctaccagaaccaaccctcagggttcaggtctttggcaaggattgggcactcggattcctcaattgctgcactatggggcaaataattggggactttgagtcgcccaggcggcatccttacaaattgcacagctccagcccgccccctgcctccacggcccgaccaagcccgctgggctgccgctgcccccatgaccgctgggcccgacgcgcagcgcgcgctgaatggagacatccccggccctcgggtcgcgcgccgcacgccgcgcttcacctccgcggcgttattgttccgtgctggcggccgagcgccaaccgcaggaccgcgccgccgcctccgacgcagtgagcacttcattagtaacccgagctttccgagctcatcgaagtctcggtccctctgggaaggctccgggctcccgccactcgccggcgggctggcggagacggtaggggctgcatttcccagtctccaacccaactctggccgcagctcccacagaaggcgaataaggagacaaggaagaccgagctagagagagatgtgacccgcctgaggtactaagaaataagctcgccggcagttcctccaaccccaccccacccccgttgctgctcacgccctccagactgcccgcgccagaaatcccgcacccgtcggatggacggctccgggcacagggctgtaggcggctcggaacagccctggttcgcgctcgctggtccgccaggagcggcctcagcggtgagggggcggggagccggcgggggagggtcgcccggcgccggaggcgcggccggcagcgccgcggacgagctggcttgtgcaggtagacatctaaataaataagtcagaacaaactttgctttcccatcaccttaccttccttcgcagcctgcgcctcccctgtgtgtgcaaagcggagcagccagatgtagcataaaataatccatgaagggtaccgagtttgaaaaaccatggtgcatgagcaggttttattttaggtttcagttatcttgagtcgtggatttttaaatgctgtttgttccgaagtagcttttgttttattgtgctccttgcatcgattccccttctcggtccccgatcggctgctccacgtttagctttttttaatttcccccccactcctgttcgctcgcaccgtgtttgctgcctgcaagtctccgactgcagaccggccgcttgctccacactccaataatatcaattagggggggagggggcggggctccgagctgagagcctccgccactcgggctgagtggcaggcacagccggcctgccaggaggcgattcccagggccaaggggcgggtcccggcgaaatggccgccccggccacgggggcggggtccgaggcaggagccaatcggtgccgagcggagtcaggttgctggtccaggattccctccaggttctgagctcgcgctggatgttcagaggagaacgaggatggtagccgaggtgtgtgctgctttggacgctctgcttttagcaaccgcagctttcgcgtagcagaataaatccgagaataacgctcccaacttacactcttttctatagctgtactccgcgcgatcttttagaaaccagaggcgaagcaagccttctctcagctaccaagcacggagcccggacagtgaaatgagctgtgcctttaagtaaagtgtgttttacttttttgttgttagaacctccgcgggctgggtaac

SEQ ID NO: 113701 - DNA, 32 bp, Homo sapiens; identical to SEQ ID NO: 43240
  chr6:94130100-94130132
  hyper

SEQ ID NO: 113702 - DNA, 30 bp, Homo sapiens; identical to SEQ ID NO: 43241
  chr6:94309719-94309749
  hyper

SEQ ID NO: 113703 - DNA, 30 bp, Homo sapiens; identical to SEQ ID NO: 4993
  chr6:94807929-94807959
  hyper

SEQ ID NO: 113704 - DNA, 30 bp, Homo sapiens
  chr6:96025302-96025332
  hyper
gcgaccggaggctccggaagaccccgagcc

SEQ ID NO: 113705 - DNA, 1413 bp, Homo sapiens; identical to SEQ ID NO: 43243
  chr6:96463089-96464502
  hyper

SEQ ID NO: 113706 - DNA, 150 bp, Homo sapiens; identical to SEQ ID NO: 43244
  chr6:96839752-96839902
  hyper

SEQ ID NO: 113707 - DNA, 119 bp, Homo sapiens; identical to SEQ ID NO: 43245
  chr6:96969408-96969527
  hyper

SEQ ID NO: 113708 - DNA, 30 bp, Homo sapiens
  chr6:96969797-96969827
  hyper
cgggcgcagttcgccgaggccacgcagagg

SEQ ID NO: 113709 - DNA, 30 bp, Homo sapiens
  chr6:96970069-96970099
  hyper
cgccccaccatggacggggccggtgatttc

SEQ ID NO: 113710 - DNA, 114 bp, Homo sapiens; identical to SEQ ID NO: 4996
  chr6:97284790-97284904
  hyper

SEQ ID NO: 113711 - DNA, 30 bp, Homo sapiens; identical to SEQ ID NO: 43247
  chr6:97285728-97285758
  hyper

SEQ ID NO: 113712 - DNA, 30 bp, Homo sapiens
  chr6:97345327-97345357
  hyper
gaagtaggcggggccgccgacctcaccgcg

SEQ ID NO: 113713 - DNA, 127 bp, Homo sapiens
  chr6:97345803-97345930
  hyper
ccgtcgccccctagcgctcgggaggccacacaccgcttctctgcccagggcatttaaaagggagcccctcccttcggggcgagtgacggctcccacgagggccgcttccggcgggaggtggcggggc

SEQ ID NO: 113714 - DNA, 30 bp, Homo sapiens
  chr6:97372557-97372587
  hyper
cggagtcagcgggacgtgccacctgcagtg

SEQ ID NO: 113715 - DNA, 144 bp, Homo sapiens
  chr6:97372841-97372985
  hyper
gaggccggtgcctgcgctgccgtctctggcacctaacccagcagaccgctcaccccatcgggtaagccagtctctctccttgtaacctgttctgcagacctgaggaagagggtgggaggctgctggtgcgccaagtgggggcag

SEQ ID NO: 113716 - DNA, 30 bp, Homo sapiens
  chr6:97730705-97730735
  hyper
cttgcctagaactgcgccctccgcaacgtt

SEQ ID NO: 113717 - DNA, 30 bp, Homo sapiens
  chr6:97730942-97730972
  hyper
gcgtcggttacccgcggtgcctgtcgtacc

SEQ ID NO: 113718 - DNA, 152 bp, Homo sapiens
  chr6:97731281-97731433
  hyper
aactgctgctgaggcggaggagaggacttaaggactatgggtttatcctctggccggaccaaagagaagatatttactccagtgagtgcgaagtgagtgcctcgttcacacccacagtcgcgccgtcccctcttcccgctctggggccagca

SEQ ID NO: 113719 - DNA, 30 bp, Homo sapiens; identical to SEQ ID NO: 4998
  chr6:98405135-98405165
  hyper

SEQ ID NO: 113720 - DNA, 54 bp, Homo sapiens
  chr6:99272074-99272128
  hyper
agggggcaggtctgcgaaaaagagaaacacttcaaacagcgctgcggagagtgg

SEQ ID NO: 113721 - DNA, 158 bp, Homo sapiens
  chr6:99272416-99272574
  hyper
ccaagtttcaaatgtcgccagtctttccagaagcccctggctctcgcaggactgggtgcaggcgcctctccgggcctcggagccccgccccgcctccccatccccacaatcccaaggctccaggctctgcagggaaccgcggcgggaattttccagcc

SEQ ID NO: 113722 - DNA, 1247 bp, Homo sapiens
  chr6:99272780-99274027
  hyper
cggacagtgtctccccgtcccgaaccccttcccgccacctcctccaccccccgccccgcattccccccggggcgaccctccctccacctgcggactgccccaaggaatggaaaacctgcactcagaagccaccccccaccccgcctctgccgtatctgctaactttgctaacactccccttcccctgccttgtaagtcactatttacgaccgcgtcgactcgcgctcacgcacgcctgcccttttctccagaagcctgaaagtggctgaattcaaacactgacacgtgaaaactctattctgagtgacttagaatctcccgctttgaggttttaatcttgatccgccggtcctgcccaaagttcagagcagctgtccgaaaggtccccgcatttgctgtccctaggaaaggtgaggctaggaggaagggggaggcaacgcagggaatgtgagaggactggggccacactgtgtatctaggaggaaactctgaatcctaatctcaagaatgtaagtctttgcgcagtttccaaatcgagtccatttagcagctttcttcggagcccgggtaccccaagtggcaacttaggaactgggagaaggaacgtgccaccaccgaccacctatcctggtgggaggaggtactgctcccccctactcctcccttttccctgctccctctccatcagcaacaggttgtcaagttgaggagacatcccctccaaactctctcactccccacttgtggccgaggcctgccctgtgttcatcccagacagtcaggcagacgctgagctgtccgcgtcggcgtgggcgcctgtggccagcgtattgtgagatttctaaatgtcagggcactgttaaggaaatgtctgacaaacctgtagtaaacctcttcacgaaggaaaggagggctgttgtcttggcttttggttgtgtgtccctcatggcccccaagaaaacaatttttctgttccaaacactctttggatcaagtttcgtccttgcatttctagtttaggcgtttctactagaaacgaatgtgtggtgcgttttggttgggcattacttgcaggtgtcttgccgcttaagtttcctggactgagacgttgactggtgacctaggcttgtttggggcagctgtaaaaggtccctgtaacgctccaggtctacctggggaccgcccaccaactccctggtctccaattatcattgttagtgcaaggtggagaacgagcttaattcttt

SEQ ID NO: 113723 - DNA, 68 bp, Homo sapiens
  chr6:99275313-99275381
  hyper
gtacactgtccgcgccgcgtgcgggtccctctgctaggaccgcgccttcaacgcggaatcgctgacat

SEQ ID NO: 113724 - DNA, 478 bp, Homo sapiens
  chr6:99275580-99276058
  hyper
agtgcccaggtcctccgggcccttctcctcgagcccgcagtcggctctcagggaaagggtgccaggccccaggcggcacttttattttggttaagaggagggagggctgctcccaggcccgagggaggcgaactgagcctttctgtttggatttccctcctcgctatagcaaccagcagcatccggacaaaaatgcgccctccctggacaatggcccggcctcctgcttctcgccctcgtcttcctcccccggatcccagccaggacctgcctaggcgctcttcgaccacggaacatccctccccgccacccccacctccatcctttccatagcagtctctccccgggtcagtccagggcgctgggaagccttagctctcgctttctacccccactgatccccccacgcgggccgaggctaggacacaggacctcactaccgagttcgggggctcccgcaggggagttccctgcaggg

SEQ ID NO: 113725 - DNA, 1079 bp, Homo sapiens; identical to SEQ ID NO: 43255
  chr6:99276258-99277337
  hyper

SEQ ID NO: 113726 - DNA, 2163 bp, Homo sapiens
  chr6:99278873-99281036
  hyper
tgtagttctgttattcgaggatgtttcccctccactcagcgcaccccggcaagagggagtcggctccgtttcttcagacaagtccagctcagggtattgactgagtagaggttcctccggacctgggagaagctggggtggcgccagcatctccttacaggtgcctccatcctgtccttgcggaaggggcttaggacaccccgcagtccgcgccccgaggtggcgaggcccgcacgaatcgcctgctcagccattgtcctagcgagtgatctcgaggagctgtgctggatggagtgagggagatatcaagacaccttgtcagttcaaagcattttagcgttgtttgaaatcctctccacgtcaacgtaagcagcctgtgtatttgaacagctgctttgaacagtgaaagggaataaactgattcaaaacctggaggtgtctgcccgagacaccttcaacgtgcttttatgcgggcggagaatggcaggcagacgcgcggactctgccctgacagggtcagcccaaagaatgggccccagagcccggggcgggggaggaaccggtggagaggccccagtctggacctaaaaccagcgagagctcaggtttcgggagccccgaagaggtgccgcgctgggaggcagacaaggaagcccagggtgctcggaacccggcgttcgcgccaaccgggcccctggcgcctggaggggaggcggcggtagctcgtggggaggtgttgctcagagccgcggtgcgagcccagcctggcccgcccggtgattggccgcgcttgggggtgggggtggggtgcagagactgaggccccgggtaggctatttctttgtgtactcccggggatttattgggtatattaaaccctgttgggaacgtttcggctccttggccgccagcgaaatgagacggggatggaagttggagttgagacctgggaagtcaacgtgggaaggatctcagcattaatcgccggtgatgtcctatcgcagacaggaagttttgatgtacacgtgcagcctattcttgtcccctcacactagcgccctatgccgggaggagggcgggggtgtggggtggggtgtggagagaaagataagaggaggaggaacttttaaattgattcagagccaggccgcctcagttccttcgaagatgtgtttgaaaacttcattcttctttcgagtgtatcatcctatgggctgcagaaggccttgtgcctcgagaaatgtgaaattaaatccagagaaaagcagacacctgccccagaaaggtgggggagaagtatgagctgcttagcacttggacgcggcccttccccagggctggattcttctgtccgtgggagctctgagctccaggtccgcgaaaagaaaggcacgacatgtcaggagaagatgcggctggcgggctgtctgtgcgctccccaaggcccagggaaagtcacgcgcctagcacaggggacgcagggccgaagccgggagaaggcggttctgcccgccacccagccccttggctcgcggttgcggagccgcgggcaccagtcgctgagtctgcgcgctgaggctcggacttgttcattttttcctagctagacaaagttatgggattcctagcagcccccaggcgcgcggccagagtggccccgcgcttgcgctgggacggagcgacacgctgtgtgtgtcctcgcctcgcctcgccgcgcgggtgcgcgcgtggtgggggtgcaggtccgtcctgctggcggcctgtgggctcgcccctcccctatccatttctctcccccacacacgctcataaacacaggacacgtggaaattctcagccaaagcgtcttgcccgggcgggtgctcaacgtggtgatttataaacagctcagccactctccaaagagcatgactccttgttagtcatgatgaattttctggcccgctccagtctgctgtctggattcagatgctcagaggccccaaaatgctccctctgagcgttgatttggctgccctctcaagcctacgaccgccggcaaaaccagcgatagagcgaggggtgagaggtggggacgcgatccaggttccctggggtctgtcattcccttcccggcagtaactgttgattcgctttacagcgcccatgtacacacccggccct

SEQ ID NO: 113727 - DNA, 2051 bp, Homo sapiens
  chr6:99281067-99283118
  hyper
cgcgcccaagttctagctaccgggcttgcaggctcggaaactcgcaggcggcacctgctctgggcggctaaagaactgatggcgcgacgcgcccgcgctccgtagagcggcgctgcgggtgcatggtcccatagtcttgctctggagttcactgctgaaagctgagctgggagcttggccagggagcgccaaagacatagactaaccccacccgctagcgcccaccgaagttactgattaggaaggttcccctggcatcagcccatttgcttcacacactcttcctccttcccaaggggctaacggaaaagttgcacctaccagcggtaggagcacggggaatcgcgcacgcaggccctccgcgcggcttcccggagcggcctttggcgactgcgccgcccctacaaggccgcacacccctcgccagcactccggcagcctcgcacaagacggagcccacgcaggcttctagttttctaaaccaaaaactgcacgcgccggcgtgtgaatctgacggagagacttttagagttttgtttggttttcagttcagaccgctacgctgtcagagcaagcaactccgagccttgatgggaatgacttacaagccgcggtgcgggctgagcctgcctctctcggggttctttccccaagggagtgggagacaattgggcctggaacctaaaaggaagagagcctgtgctagccgcggggtagaggggaaggagaagagctttgggccgaagtgtccgcacaccctggagcaagagacacttgtgcactgaaattctaaccgtgggatgcaaggagagttgaacaggggaacaggtctggctcttggctctaggtttaagagatacacactgtgtgtgtgtccctaggtgaataaaaatccgactcccgctggctcggtgcgacccagcttttcccttaccccctccgtttccccatcttaaagccctattgggaaacgaaagtggacaccactgcctcccgccccccaccccaatccaagtcttccaagtgtctgtggccgataagagcaccgggaccgcccccctgccggtcttctctgcctgggagacagatggggggcggggcccatccgagagagggcggaggaggccccgggtgaggaagaagcgggggggtgagaactgagagaatctgaatcgggaggcgaaggggacggggaggagggctaggaggactccgagcccgggggagggggagggagtagctctgcgccaatcagtggcgccggcctgggaggttgctagcggtatccacgtaaatcaaagggcgcggagccaatgggagggggcggagggggcggggcccaggcgcgtgccgctgcgagccggcgctgccaagagagcgggagagagctggagagagcagggagaggggggagcgccgagctagtcagagagtgagcgagagcgagaaggagggagaggaggagaaagagagcgagggcgggcgggaggcggcggcggcggcagcagcagcagtaatagcaggagcagcaacagaaggcgtcggagcgggcgtcggagctgcccgctgtgggagagagaggagacagaaagagcgagcgaggagagggagcccgaggcgaaaaagtaactgtcaaatgcgcggctcctttaaccggagcgctcagtccggctccgagagtcatggcgaccgcagcgtctaaccactacagcctgctcacctccagcgcctccatcgtgcacgccgagccgcccggcggcatgcagcagggcgcggggggctaccgcgaagcgcagagcctggtgcagggcgactacggcgctctgcagagcaacggacacccgctcagccacgctcaccagtggatcaccgcgctgtcccacggcggcggcggcgggggcggtggcggcggcggggggggcgggggcggcggcgggggcggcggcgacggctccccgtggtccaccagccccctgggccagccggacatcaagccctcggtggtggtgcagcagggcggccgcggagacgagctgcacgggccaggcgcc

SEQ ID NO: 113728 - DNA, 405 bp, Homo sapiens; identical to SEQ ID NO: 5007
  chr6:99283177-99283582
  hyper

SEQ ID NO: 113729 - DNA, 275 bp, Homo sapiens
  chr6:99283796-99284071
  hyper
gcgcaagggcgcaagcggaaaaagcggacctccatcgaggtgagcgtcaagggggctctggagagccatttcctcaaatgccccaagccctcggcccaggagatcacctccctcgcggacagcttacagctggagaaggaggtggtgagagtttggttttgtaacaggagacagaaagagaaaaggatgacccctcccggagggactctgccgggcgccgaggatgtgtacggggggagtagggacactccaccacaccacggggtgcagacgcc

SEQ ID NO: 113730 - DNA, 214 bp, Homo sapiens; identical to SEQ ID NO: 5008
  chr6:99290258-99290472
  hyper

SEQ ID NO: 113731 - DNA, 82 bp, Homo sapiens; identical to SEQ ID NO: 5009
  chr6:99290709-99290791
  hyper

SEQ ID NO: 113732 - DNA, 83 bp, Homo sapiens; identical to SEQ ID NO: 5010
  chr6:99291258-99291341
  hyper

SEQ ID NO: 113733 - DNA, 110 bp, Homo sapiens; identical to SEQ ID NO: 5011
  chr6:99291586-99291696
  hyper

SEQ ID NO: 113734 - DNA, 97 bp, Homo sapiens; identical to SEQ ID NO: 5012
  chr6:99291729-99291826
  hyper

SEQ ID NO: 113735 - DNA, 1510 bp, Homo sapiens
  chr6:99292122-99293632
  hyper
ttatttgcccctggaatataacgctgacccaaatgcagtgaactgcacggcccttgtggggccccaactttgatgtgggcctcggcttggaagaggcgtctgttatttattatttccctcccaccagcgtagcctggtctcccagcgccgtgcccgccgcccccgccccatcctgcgccccagatgcgcgccccgcttggaccagtccgagcagaggggggttccgaaatctgctcggacgcagcatcgctggccgcctgccccgctagttccccgagtgcgattactttttaaaggctcctttaagcatatttccgtgaatctgtttcttgtgctttaatgttactattaattgataagatcagctcatcaaacatactatttcgatagggaattgtaattaaaaccttaatcctgtttgagactttcttctctctctaaattcctttttcttatgaaaggggtgcaaagttcactacaaaaagtactataacagggagattaattcgttatctaaataacaatctttgctattgatccaacgtactttccgccaccttttgtgttggtccgggaggcccttaaaaaagagaatatacaaagcagaagatctggaccaagccccaccgactccgatagacttgggagagcgaggggatccgcggtccgccccccttaaccacagtctgaggaagcttcagaagtgggtcctggccgtcccaggcgatgccactggggaagcgcagcgctagagccgcgggcctgggagccgggctcctccacagtcctctcccctcgcaaagggagatctgatctgctcagtctctaggtaaatattcgaccgattctgcttttacttttaatatttaaacttggattatcccgtctccaaatgcgcgttcctaacctttgccagtggctgggatgtaataaatcctggcggggccggggcgctcagcctccccaggtcgcggccgctgcctccctcccccgtcccgccccgccccgcgggccccggcctgtccgcccctcgccgcccgcagcgaaagccgcgccggaatgaaatcagcgcctccccgcagctgacggctgagcatcctgggcgctggcaggcgggggaggccgccctttatcccggctgaggagtcctcgggggctgcagatggagccgcggctacccggaggagaaagagcccggcttcgtggaggcagcagcccccaggcataggagggggtagcaagtggggccaggggccgggaggttgggcggggtctatggtttgtatgtgttgggtggcgggtcggggaaggtaccctttccaaacctatctcccctcctcgctagcccttttaaaaaggtggtggccccagtttgagaataagccccagcgtctctgaagccacgaggaccgtttgtgctcccaagtcaactcagtattccgagattttcttcttttctaagagcttcaccccctccccacaccctccttctttccgtctaacaaagtct

SEQ ID NO: 113736 - DNA, 214 bp, Homo sapiens
  chr6:99295649-99295863
  hyper
tccacacacgcctcccgtctagagagccccagtggcccagggccacctccagtccctggacttggaaatcaggacgctgtggatcccacaggcgccccgcgacatcctggagtcgccgggagtggcgctgcggtgaaagccggtgcctagagtgggcttaggggtcccattccactcggaaagtcctctcacctccccaagggccattctgccg

SEQ ID NO: 113737 - DNA, 303 bp, Homo sapiens; identical to SEQ ID NO: 43271
  chr6:99296061-99296364
  hyper

SEQ ID NO: 113738 - DNA, 15 bp, Homo sapiens
  chr6:99296407-99296422
  hyper
cgcctggagggccct

SEQ ID NO: 113739 - DNA, 30 bp, Homo sapiens
  chr6:99395303-99395333
  hyper
gggcatgtggccgacgcgtggctgccggcg

SEQ ID NO: 113740 - DNA, 30 bp, Homo sapiens; identical to SEQ ID NO: 5017
  chr6:99395953-99395983
  hyper

SEQ ID NO: 113741 - DNA, 30 bp, Homo sapiens
  chr6:99797930-99797960
  hyper
gcgggggctgggagcgtgggccaggattaa

SEQ ID NO: 113742 - DNA, 184 bp, Homo sapiens; identical to SEQ ID NO: 43274
  chr6:99872771-99872955
  hyper

SEQ ID NO: 113743 - DNA, 356 bp, Homo sapiens
  chr6:99873213-99873569
  hyper
agaataataacatccgtttgtcatctgaagccataccatctctcatccaggtttgtgaacacgtgattgtgcggattgacatgtttcggcgccattttttttgtgggcaaaaccatctctactctggtcaacaccgggcaactgaaccattcctgcacgttactttttaacgtagctggcgccattcccgacccatctttatagtggccagaaagccaagaacgtaagtgttctacacatagggcgccttcaaattttttactttagcaacgtgatcttcctttaaggggaagtatgttccctcctagaaacactcccgccttggagaaggggttgagttcgcaactccacttaca

SEQ ID NO: 113744 - DNA, 30 bp, Homo sapiens
  chr6:99873928-99873958
  hyper
gacttttagggaaccgtgggggggaagtct

SEQ ID NO: 113745 - DNA, 67 bp, Homo sapiens; identical to SEQ ID NO: 5019
  chr6:99962858-99962925
  hyper

SEQ ID NO: 113746 - DNA, 30 bp, Homo sapiens; identical to SEQ ID NO: 43277
  chr6:99963155-99963185
  hyper

SEQ ID NO: 113747 - DNA, 220 bp, Homo sapiens; identical to SEQ ID NO: 43278
  chr6:99963447-99963667
  hyper

SEQ ID NO: 113748 - DNA, 248 bp, Homo sapiens
  chr6:100016524-100016772
  hyper
cgcggcggcgacggcgaaaggaagaggatggccccctagtctccttcacgccggccgacaacactcaactgtgcaaacccgttcctatcgacaaaagttccggcccgcggtagcggagggagccggaggggaggtgctgacccttggaggtgctgagattgaagagaactagtgttcacgagagctcgcggcggttggaaggctctcgcgagagcgtcttgagaattctggccgggggcccaagccgc

SEQ ID NO: 113749 - DNA, 665 bp, Homo sapiens
  chr6:100036479-100037144
  hyper
agagtagagaagtaacgactacactgcgcttcctttggagagagacactggagaactaaaaccgacccaagcgctaagcgatctgcctaatagagggaacgccagctgagaccagcgcaaggcgggcgctgggtggcgtgcgcgactgcaaagtctggcatgcccaggttctgctccttgggctcctgctgcgtgagccgatctgcagatccagcaaaagacccgagagcggcttgaacgccagatgattcctccctgaggatgcgccccaggcgttctgccctggctcccagccgcctcccggtgctccggggttcggcctcacacacctgtcgaccgcgtcggcccagctgcggcccaagcctgtgggactccggggagcgaggcgccccctgctccaggctgggaaccagaaatgcagcagggcctcaaaaagaaacaaaattctttccctcggggttgctgctgccgcacaaccttacccagcccgctctgcggatgggtcgtagattccggctggaagccggaggaagtgcatagagggcagcttcaaaagccaaggctgcgctgctttgcgcggggcttcttccctcgcgtgcccgcgccgggtgccggagcagcctccgcaagctgctttcatctcggtctgccggggcagggtcgaa

SEQ ID NO: 113750 - DNA, 30 bp, Homo sapiens; identical to SEQ ID NO: 5021
  chr6:100038978-100039008
  hyper

SEQ ID NO: 113751 - DNA, 305 bp, Homo sapiens
  chr6:100039287-100039592
  hyper
gagtcttctggctcccgggaaagcagcgtggcgccgccccagcccccagtccccagactagggattgggacgtcagtcattggctgcaggttactggtctgggctgggcccgcagagatcccaagcgctcctctgtcggtgcttcctcagcgtctgcgtttccgcagatgcccgaggtcagacagtttcgcaagggggctgaagagccaaatggggaaactgatggagcctcacaagtttattcctttcccacgtctgtgtttgtctaagggtgctttctgtgcggctttctgaacttgagcatc

SEQ ID NO: 113752 - DNA, 14 bp, Homo sapiens
  chr6:100050447-100050461
  hyper
tgtcaccaccactt

SEQ ID NO: 113753 - DNA, 305 bp, Homo sapiens
  chr6:100050505-100050810
  hyper
cgtttcgcttttctttcctcagtttctccatgcaatctttataaatctcccctggaggagaagtgtccgagcgggtggaagtctgaacacaatgcaacctgagaatttctgtcactctctgcatatgctcctaagtgctttaatcccaattaggggcggctgacacacggtcctattcattcccatcagctcttgaatacatttgcctagaaatgaacttcacaaatagaggagctcctaaatgtgcccaacagcaaggaaaatcgaattgagtgcgggctcattcggcagcggccggcagagaa

SEQ ID NO: 113754 - DNA, 250 bp, Homo sapiens
  chr6:100050858-100051108
  hyper
cgctgacttttctttgcaccatgtcaaccgaaagaaccaagaaataagttggagaactccggttaaaaggcaacttgagagggattctgaatacttttattgagccgtttccaacggaggacttaaaaaacaacaaaaaaggcaccacaaaacccaccagcggcgtccgggctgcgtcctggctgccactttggagcctcccggccgccgcgcatccaccggccatgcaattaaggggaaaatggcctca

SEQ ID NO: 113755 - DNA, 148 bp, Homo sapiens; identical to SEQ ID NO: 43284
  chr6:100051359-100051507
  hyper

SEQ ID NO: 113756 - DNA, 242 bp, Homo sapiens; identical to SEQ ID NO: 5022
  chr6:100051771-100052013
  hyper

SEQ ID NO: 113757 - DNA, 354 bp, Homo sapiens
  chr6:100052346-100052700
  hyper
cagtctctttcttctcgcggggctgggaaccagccacaattggctatattaataaataactttcctcacagtcggcctttacatggtcctattgataaaattgttcgcgtgtcgttcacgctttttcactcattaaggagggccagggaggcgccccgaacccaggcccagcgctcgccccttcccgcttgcagtgctggtaatttaaactgggtgtcatcccagagtcgccaggccagaggttagagggacatgttcatggcttaaatttattgccctgactcttcggagcggcttcctctcctcctccccaccccccggcttttgccattcatgggccgctggatcaaagcc

SEQ ID NO: 113758 - DNA, 560 bp, Homo sapiens
  chr6:100054671-100055231
  hyper
actctgcagctgcttcgcagcgcaactctctcaccaaactccgcgcccttgcgctagcggtgccaaaaggctcccgccccgattgaaaaggcgcagtgcatgcccgcccgcgtcactccgcgggcggaggacgcacgtcggggcgcggctctctggctagcgcgcagctccagctctgtcactcgcgcccttccaaggacctggagcacccgagcgcctgcctggtggcggcggcaacaatgcacggagccgccagagcgccagccaccagcgtgagtgccgactgctgcatcccggccggcttgcgcctcggaccggtgcctggtaccttcaagctgggcaagtacctgtcagaccgcagggagcccgggcctaagaaaaaggtattgaccattcagacctctgcccactgccattcgcctctcagtgccctgacccgggaaaggggtacgagagaaagtggaggaagggagtgattgagtcgttacctgctaattctgccgggtggaaggggactcctattattctgagcaagtagcctctttaactgtgagagctgg

SEQ ID NO: 113759 - DNA, 54 bp, Homo sapiens
  chr6:100055269-100055323
  hyper
cgacagccctgggtggggtgcactgagcgctgtaggtgccgggaccattcgcag

SEQ ID NO: 113760 - DNA, 336 bp, Homo sapiens
  chr6:100055722-100056058
  hyper
ggcccaaccgggaggcgccagggccaaaccactagctttgactcccacactccacacaccgtcgcgacccctgaccagagagacttatagcactcgcccgctttgggggcgtcccaggagccaaaggtcggcaaacagcgaccgggaaatgaaggcagaagtctggggtagaagaaaggactttggcttccttggctttagcttgccttgcttggagctttctagtaaaaagctccggtgtccagccagcgggacttgcacctcgctcctcctgcaatcacgccccccactacagtctaaagcggggtttggtgcccaccgcgcattcctctttaa

SEQ ID NO: 113761 - DNA, 30 bp, Homo sapiens
  chr6:100057184-100057214
  hyper
tacccattccaaaagcgtggatgggcaaaa

SEQ ID NO: 113762 - DNA, 531 bp, Homo sapiens
  chr6:100061165-100061696
  hyper
caggcctgcggtgcgcgggagggcatcaagcgcgaggcctcttccgcgccctcggccacctcgccgaccccaggcaagtgggggcagcccaagaagggcaaggagcagctggaccgtgccctggacatgagcggagccgcccgaggacaagggcacttcctcggcatcgtgggcggctcctcggcgggggtcggcagcctggctttctaccccggcgtgcgctcagctttcaagcccgccggcctagcgagggcggcggcggccgctcacggcgacccctaccgggaggagagcagcagcaagcaaggagccggcctcgctttgggcaggctgctgggcgggggccgggcgtgcgggcgccccgggagcggggagaactcggcggcgggcggcgcgggtcaccaccatcaccaccacgcgcaccaccaccaccatcccaagtgcctgctcgctggggacccgccgccgccgccgccgcctggcctgccctgctctggggccctgcgcggcttccctctgctctccgtcccc

SEQ ID NO: 113763 - DNA, 1010 bp, Homo sapiens
  chr6:100061988-100062998
  hyper
cggagtccatctcctacttcagcgggcctgcagcggccgccctaagccccgccgagctggggtcgctggccagcatcgaccgagagatcgccatgcacaatcagcagctgtccgagatggctgccgggaagggtcgcggacgcctggactcggggacgttgccaccggccgtcgcggcggcgggaggcaccgggggcggcggcagcggaggcagcggcgcaggtaagcccaagaccggccacctgtgcctctactgtggcaagctgtactcgcgcaagtatgggctcaagatccacatgcggacgcacacgggctacaagccactcaagtgcaaagtctgtctgcggcccttcggcgaccccagcaatctcaacaagcacatccggctgcacgccgagggcaatacgccctaccgctgcgagttctgcggcaaggtacttgtgcgccgccgggacctggagcgacatgtcaagtcccgccaccctggccagagtctgctcgccaaagcgggcgacggcccgggtgccgagcccggctatcccccggagcctggggatcccaagagcgacgacagtgacgtggacgtctgcttcacagacgaccagagcgaccccgaggttgggggcggcggggagcgcgacttgtaacgagtcttcccgggaaggggcggggtgaggacagagaggagtcgagggtttattctcgcagtagaggaactcctggtggtgggaagagggacccaatggacaaaaccgtttttgtttttgagagggcgccagatttgaaacagtgagaggtcccacatctggtgctgaaactcagagcaacagttcagaggtggcgtaaatctggccacctggagagctcgagtgccaccagtacctccgcaccccgggcctctggacttcttggatgagctcaccctgaaccgcccaggcggtctgctcttggtgttcagaatcacatcaatgcgaacgtcacagcgccttcgagggcgcagattttaactg

SEQ ID NO: 113764 - DNA, 336 bp, Homo sapiens
  chr6:100066682-100067018
  hyper
gcggcgaaagaaccccggccgcttgggctagtgcggcggcggccaggcggagccggaggtgagagtgcgagcagcgtcctgtggcgtggcgacccctgggctcacagcctcgcgctccctgggctcacagcctcgggctccctggactcacagcctcgccctccctgggctcacagcctcgcgctccctgggctcacagcctcgcgctccctgggaataggggtttctggggtcttgttggggcagaggtgcgggagtctcgccgcgtttaggtggacagtccaggagtcctgctggagaggaggacctgggaagacccgcgatgccggcaggagg

SEQ ID NO: 113765 - DNA, 40 bp, Homo sapiens; identical to SEQ ID NO: 43289
  chr6:100067144-100067184
  hyper

SEQ ID NO: 113766 - DNA, 240 bp, Homo sapiens
  chr6:100441497-100441737
  hyper
cggggccgctgcttcccggaaagccactccctttttcttttcccacctgtgtttccattttctttgccgagtgtgaaaccagccggccacccacccgccccgctccgtctcgtaggtgcctccacagagccaaactttgtaccttctggggatggagggggatcccccagcaatcagacactaccggcgagccagccccggggaggggcgactggtggaccaggcgccagaccttcccgg

SEQ ID NO: 113767 - DNA, 287 bp, Homo sapiens
  chr6:100441761-100442048
  hyper
cgcgcccacgccagagcccggccctcgcgcggcagcccgcgggacgtcacctgggtgctcgcgtcctccccgcgcggcggacagcccgggcgcccttcctctctgcgggactgcaggtctatccgctaagcgcgcgtgaccaaaaacggctctcagcgggtcccagctgacggaaggtgggggaggagtgcgagggtctctgagacaggttgggagccagccccacctccatttccaaagcgggggtccaggcacaggaacagccaaacgcccgaaccagcggggtt

SEQ ID NO: 113768 - DNA, 401 bp, Homo sapiens
  chr6:100676759-100677160
  hyper
ggaaaatctgcctgcgcccctagtgcccaaaacacttaaccctgaagtaccaggtgtccccaaccgcgggcaaacccaatcttggttcactttggcgtctcggaactgacagggctccgtcagatcttccgtttccctcctgcgcgtccgtgatattgattgacagcctctcccctcccaccctccctggcggcccagccaggcaggctgttttgtcagctgctccgcccaggccggacgaggccgcagcctgccagccggctccggcctccacaccgcgggagcacgccccgcctcggcctcgccgccgctcgggctgacactctgcctccgggcccggggagacctttccatctgcaaataacactggagaattcagactaatcggttcagcttccctg

SEQ ID NO: 113769 - DNA, 227 bp, Homo sapiens
  chr6:100729531-100729758
  hyper
gccatcatgaaccggcgtgcggagaccgcctcgccactgctgcattacaaatgctctttattaacagcgatctgtaatcaatgggctcaggctttttgccagagcccccaaatcagacaggcgggcccctgcgtcagggtgggcggagccacggggcccagctatcgagctgggaagagaaagctgtgttgtccctgcctgactcttgggtgcgatggtaaatcaga

SEQ ID NO: 113770 - DNA, 68 bp, Homo sapiens
  chr6:100902141-100902209
  hyper
actgccagcccgcagcgacctgagacgaccggccaggtccaaccggtccttggcgggctttctgattg

SEQ ID NO: 113771 - DNA, 186 bp, Homo sapiens
  chr6:100902455-100902641
  hyper
ttttgtaatattttcgttctcatctctaattgagactcattcaacttttctactttccaggtactgtattctattaacaaagaccctctctttctctccttggtgtttccccgttaagatctttggaggctttgccgcaaactttctctggtgatgcccaaaaaaataaaacgctccggactcttg

SEQ ID NO: 113772 - DNA, 30 bp, Homo sapiens; identical to SEQ ID NO: 43295
  chr6:100903212-100903242
  hyper

SEQ ID NO: 113773 - DNA, 105 bp, Homo sapiens
  chr6:100903675-100903780
  hyper
gaaggcctcccaaagcggctggaagacaccccgaagcggcctcccaaccagaatgatctgaaaatcccccaggctgggctcgggataaatactagttctgaactc

SEQ ID NO: 113774 - DNA, 550 bp, Homo sapiens
  chr6:100903832-100904382
  hyper
cgcctacgagggaaaatgagacttccccacaggttaataaacaacctgtccggcacaggttaacaggagcctctctcgccctctcctgccccacccccgccaccttttaaggaagcttttgccttcccggaggtttgccttctctttctgttccccgtagaaatcttacgattgtgtctgggttaatgttttataagggactggctactctcgtctacctgccgggctttcccgatctaatatcgaaggaacctccccaagtcctagtaaggggtcccccctccctaaagtctcgaagtggggtagagaccttctccctggagcccctcgcctcctgccttcggtgacgcgctctagcacacccaatttcagttggcgagggggtaagctgagatttcgtttctgcacttgacctaccgcagaaaattcgcaaatcctttgattgtctgtttaaaatgaggaggaaaccagctccctttgcggcgggattacagtgggaacaagatctaaagattctcttgcaattcggcgaggccgagggaacggggtt

SEQ ID NO: 113775 - DNA, 159 bp, Homo sapiens
  chr6:100905735-100905894
  hyper
gtgtgtgcctgcactcggcagtgccctgatctctcctgcctgctgatcccgggccagagacaccgcggccgcacccagggaatccactaatgttactgtaaatgtggggtggaggccgaaggtcacaccgctgtctgtctctctctttctctctctctc

SEQ ID NO: 113776 - DNA, 213 bp, Homo sapiens
  chr6:100905953-100906166
  hyper
gcggagctccagccctcgagtttgggcttcccgtagggatagagcctgcgggccaacctggctgcccgagttggagccagccgcgaaaagacggcagaaacccaaggagggcggggttcggccagactaaaactgggggcgaaattcatgcagcgttcatgagacagtcctgcgtgacggccgaaaaacgtcaatcgatgtcgccctgggact

SEQ ID NO: 113777 - DNA, 391 bp, Homo sapiens
  chr6:100911728-100912119
  hyper
tttgctcttcagtctcgcggcatttaaggtatctccgagcccctttgggaagagcaggaaccccagacaactctttcaaggccctgtgaagacaacagcatcagagcataagagatcagcggctccacaagtactcacacactcgtcccaattccaaaaacacggccggaaagggcctcagtgcgcctagccaggcgttttgggtttgtttttaaagaaacgggtaaatcggcagcgagacagccccctgcaaataatgctggcattccctcacccatgccagccgcatcctccagacccctgggaagttgcccaaacaacaaaatacatatttctgaagacccgcaagggatcttccgccgcggatccccgagtccgcgcccaggccggg

SEQ ID NO: 113778 - DNA, 89 bp, Homo sapiens
  chr6:100912356-100912445
  hyper
ggttaacaggtggcgcgctcgcgacagcccctcgcaggctcccccgggggtgggaggcgccgcggcctctcccacaccaccgcggagct

SEQ ID NO: 113779 - DNA, 585 bp, Homo sapiens; identical to SEQ ID NO: 43298
  chr6:100912465-100913050
  hyper

SEQ ID NO: 113780 - DNA, 41 bp, Homo sapiens
  chr6:100913285-100913326
  hyper
ggtttggggagttattttctctttctcgtttctctgaaacc

SEQ ID NO: 113781 - DNA, 30 bp, Homo sapiens; identical to SEQ ID NO: 43300
  chr6:100913879-100913909
  hyper

SEQ ID NO: 113782 - DNA, 39 bp, Homo sapiens; identical to SEQ ID NO: 43301
  chr6:100914901-100914940
  hyper

SEQ ID NO: 113783 - DNA, 30 bp, Homo sapiens
  chr6:100915826-100915856
  hyper
cacatactggaattccggtgcaaaccgccg

SEQ ID NO: 113784 - DNA, 30 bp, Homo sapiens
  chr6:100917006-100917036
  hyper
ggcactcaactgaggcgttctaactctgga

SEQ ID NO: 113785 - DNA, 30 bp, Homo sapiens; identical to SEQ ID NO: 5030
  chr6:100933169-100933199
  hyper

SEQ ID NO: 113786 - DNA, 30 bp, Homo sapiens
  chr6:101328491-101328521
  hyper
cccacaatccatcacggtcagctacctatt

SEQ ID NO: 113787 - DNA, 30 bp, Homo sapiens; identical to SEQ ID NO: 43303
  chr6:101329104-101329134
  hyper

SEQ ID NO: 113788 - DNA, 126 bp, Homo sapiens; identical to SEQ ID NO: 43304
  chr6:101329393-101329519
  hyper

SEQ ID NO: 113789 - DNA, 302 bp, Homo sapiens
  chr6:101840314-101840616
  hyper
tcttgagcccagtgcgcctggcctgttcccgcttagcctcacttaaatctcctcgcgaatctgagctggccaacttcctctgggggaaactgctaaactcagctccagttaatattgtagggctgaggataaaatagcaacggttttgaatagatgttgacttttccgacccagaggagcggaactcagggattgtttgcaaaagctaatcgtttccacagtgaagcagggagagcctggtgcgctcaccgccgccagcccctccctggaagccaagctgcgggaagactctgggactcagt

SEQ ID NO: 113790 - DNA, 1174 bp, Homo sapiens
  chr6:101840992-101842166
  hyper
cgcatttgctctatgcgctggaggtcggggtgggagggtgcgcagatcaagatctttttttgcgaacctcagggaaatgaccgtagttggactaagaggtccactttggagactaccagcagccctccaagccctggcagtggagaagtttcgttgctatggtttcggagaggcataaaagccatcacccagaagcaaatgtgtttgggctccttatatgtgttgtcaccacccaaggctaggcaaattcctcggcgctttgcatgcatcactcactccctgacagagcatcttggccttagtctccccatcccaggaggcgggtgtgcgctaagggagcgaagtccagccggaggcttcgtaacatccaagtctagggacaccaggaattctctcgctctagctcctgtggtccaggggtgggagatgcccccgagtggccgcggcggccaggagcgtgcaggggccacggggaaaggagcgcggcgcctttaaagcaagaggcgaggaacccccgccaggaggcgtgtctgtctctgccgccgccgccgccgctgctgctcctcggtcaccgtcttcgccgctgccgtcactcgcgctcggcgccggcggctgcgctggtcggtctggtagctggggacttttccgcccgacctcctccggctgctcctccccgaggaccaccccaccccctccccgcccacctcacccctagctccaggtaaggactccccggctgtgggctgcactccgggctccttcacgaggtgtttgttttcaagaggacgggagggactgcgggtgggcgaggggcattttccacctggagagaaggaagaaggcgaacagtagcgctgcggacgtccgtgcgctcggggcgcccgctggacggattcactgcgagtctttgtcgggcttatctcagccaattcccgtcaagcatgcaagtggctctgttggctgcagtcgcctatgttctccacataaaatgatttaagaagtggacgtgtcaggaagtggcctcagctacggggactcacgcgaggcgaagagaatgagacagatggcaagaagctgtgtggctgccggcgggtctgacgaactccccatccctccttctgcccacccatccttccattaaccctactccttagttctgcgctgaggaagtata

SEQ ID NO: 113791 - DNA, 98 bp, Homo sapiens
  chr6:101846691-101846789
  hyper
ttaatcttggcttcacgtcagaagctgtgcagcagtgcagtagaatagggcctggcaaaacctttgctagcaaagcgccttttgtgccgggctgtggc

SEQ ID NO: 113792 - DNA, 272 bp, Homo sapiens
  chr6:101846865-101847137
  hyper
cgcggccggacattgtgggtgtgcgtgctggatttctcccggatgctctccgactaacatggatgtcccaccattccttgcagtggaaggttgttccttggcgcagtgagtgaagaacatgcagcgattgctaatgggtttgggaagcggagactccttcctctctctatgaccatgccgtgatcgtgtctgcggtcaccactcgacgcatcctcatttctacccgaacccaggagccgaacgctagatcggggaagtgggtgccgtgcgtg

SEQ ID NO: 113793 - DNA, 239 bp, Homo sapiens
  chr6:101847638-101847877
  hyper
gcacgcctctcagcttgcggggctggtgagttaacacctggtaactctttggcgagttgcgcctgtccgcttccgccagtgaccagggcagttctcacgtgcaaatgaaaggtactaacccttttgatttctttttccagagagccttttcgattgttttcaccgcttttccagtccctggtgcccttactgggatgcagagctttaaaaaatgttctaagattcgaggttctacttaa

SEQ ID NO: 113794 - DNA, 834 bp, Homo sapiens
  chr6:101849704-101850538
  hyper
gagcttggagttgcacgtggcgcagctgccccagtggtggagagacccgccgcctctgctggggaggcagcatccagtgtcccttccatcccccacccttggcgtggctaggcgccggcagccgccaggcgcctccgccgcggcgctatggcaacggcggagcccgcccaggcggccaccccagccccccttccccgctagttaaggctctgtgttatccttccccttgctcccgctaggactgtgattcgacccagcgtcctcctgtcacctcctgcgaggtgaggggcagcccccgcttagagtgctgaacccttgccacgtccctcgcctcccccgcccgtcttcagcgtgcgcaaccctcttccccgcgcttccctctccctctctgtatggcacacacaataacacacacatacacacacacacattctctcacacacactcaaacatagacacgcgctcgcgcgcactaagacacatgcgccctccgggtgcatttggcacagtgacgtctctctagtgctcaagaaaactttgcagttacacccaggagcgtctctgtcctgtttcccccttaacctccagcctcagccgactcccacttggctgcacaggctggcctgctcctctgcagccgctcagcaaacatctctgagaaaaggtatccggagcaccgaccctagggtgctgccccgaggctctatggcagcgacctgagggtcaaccaagggtcacctccaggcaggcgggcgagcccctgacattgagtcttggttgtcaccccgcctttgatcctgtgttgggacaacttgggttttcctgggtgcccac

SEQ ID NO: 113795 - DNA, 56 bp, Homo sapiens; identical to SEQ ID NO: 43308
  chr6:101850938-101850994
  hyper

SEQ ID NO: 113796 - DNA, 60 bp, Homo sapiens
  chr6:105307081-105307141
  hyper
actgttaaatgacccgcaattatgatgttttctgactccgggtctcgggcctccggctgg

SEQ ID NO: 113797 - DNA, 101 bp, Homo sapiens
  chr6:105307821-105307922
  hyper
cggagcgccctgggcggagtcacgttgggggcgcccaggccacgccaacgcgggcgcagggctgagtatgcgggaagccacgcagcgactgggcgtactcc

SEQ ID NO: 113798 - DNA, 177 bp, Homo sapiens
  chr6:105388539-105388716
  hyper
ctggtgccgccgccgcgccccgcgctcccccacccggctcagccccctcctccccgcgccccgccactcgccgggctgcggcggcggagtggtggcgacagcggattccgtgcccggtggccgcgcgccgcccggctgttccgcgtccccttgccggctcacaatgtgctgaccctc

SEQ ID NO: 113799 - DNA, 274 bp, Homo sapiens
  chr6:105389509-105389783
  hyper
gggcaggcgtcggggatcgtttttgctttggtatcggtgatgtaaattcatgaattaaaattaaggattttgaaaagaacggggaagaacgcacttggatttaggttgtttttgaaaaggaaaaaccaaagaggaaatgatacgtttgcaggagcattaactgactactgactggaacattggatgcgggtgctttgtgaagatttgtactccaaaaactttttttaaaaattgcacgttggtaaatattgagtgttttcgagtaaaatctaac

SEQ ID NO: 113800 - DNA, 118 bp, Homo sapiens
  chr6:105401022-105401140
  hyper
ggcagagagagatcccgaaaatcgcccccagccttgcgtccagccctttctcgccgacgttttttcttgatcctccgaaggcccagggcgacgtttgccatcgcggcttcccgaaagg

SEQ ID NO: 113801 - DNA, 171 bp, Homo sapiens
  chr6:105401586-105401757
  hyper
tctcaggtctcggccgcctggggagcgacctgcctggagaggcgggttgcgatggcagcgctgggctacagaccccgccttatttgcggggaggagaggacgggtggagtcacttgccgcattgccacagcccctcctcctagttttaagaagaaccgaagcattgtttct

SEQ ID NO: 113802 - DNA, 30 bp, Homo sapiens
  chr6:105404007-105404037
  hyper
cccaccccctgcccgcgccggctttttttc

SEQ ID NO: 113803 - DNA, 569 bp, Homo sapiens; identical to SEQ ID NO: 43312
  chr6:105404583-105405152
  hyper

SEQ ID NO: 113804 - DNA, 220 bp, Homo sapiens; identical to SEQ ID NO: 43313
  chr6:105405552-105405772
  hyper

SEQ ID NO: 113805 - DNA, 45 bp, Homo sapiens
  chr6:105406224-105406269
  hyper
atgccaatagacgtacgataagatgtccttcggtatattgaaaga

SEQ ID NO: 113806 - DNA, 192 bp, Homo sapiens; identical to SEQ ID NO: 43314
  chr6:105584127-105584319
  hyper

SEQ ID NO: 113807 - DNA, 1175 bp, Homo sapiens; identical to SEQ ID NO: 43315
  chr6:105584366-105585541
  hyper

SEQ ID NO: 113808 - DNA, 1011 bp, Homo sapiens
  chr6:105627227-105628238
  hyper
ggggaaggaaactcccggcgctggcatgacttccccaggactgacaagggcccctaggaacggcttttctcccttgcaaaactggcctgtttatttcggctccagggtgcctggggccagagtaggacctgcaggaaaagatctgggaggaatattcgcccagaagcctctagggcatacgactcgcgttcttcaggggtcggcgcggataggaaccgcagcaaaggatcccctagacctccgagctgtgagcggcgacacagccgggaccccagaccccggaccccagggcgcggagttgaccggagccgggaagggagcggcgcgggcagcgcggggcagcgagacgcaagcgctcgcaggggtcggcggcccagcagaagccgcgcccgctaagttgcccgaagcggccgcgaggtgcgagggtgcggacagcaccggaaggcggcggacgcagcgcccccgggctcaccttcttacctttccttcccagccctgcccggagcttcagcccggcgcccgcagaagtttcccggcggagcgcgcttgacccgggtggcccgcgcggaagccctcagcgtccccctcgtgagtgcctcgccgcccaccctgcggcgccgggcgcagcgtgaccgcagcgggctccggagcggcgcggcggcgcgggcgggtgccgggcacgggcgcgcgccccggggcgcagccgggtgggcgggcgcggcggctgcgtctgggccggggcaggcggttcggccaccggggtgcggggctgcggagaatcctagcggccgctacggaccgaagtttccaaagatgcggttccccgagtgtacaccgctcccggttgtaacatacacctagtattcacagtcacactaggcaggagcgatgggctggctgctgaaccaaggcaactgcacgcctgctctctcacccccgctccacacacaccgtaaacaaaatgaagaggtaaatcaccatagtggggacgggaatattagggtgtattgg

SEQ ID NO: 113809 - DNA, 30 bp, Homo sapiens; identical to SEQ ID NO: 43317
  chr6:105850393-105850423
  hyper

SEQ ID NO: 113810 - DNA, 379 bp, Homo sapiens
  chr6:106429096-106429475
  hyper
ggatgtattcccagacggatgcgggcggtccccgggcagggaccccgaatccggggtcgcagggtggtagagccggaagattggattccatctccgcaaggattgagaaaaacggactcaccgactgaactattccatctccaagttgtttttattttccactttaagcataagaacgatgagaaccaggagccaggcggccccgcgtagcggtgggagcgcaggtacccgagagtaccctctgggggccggcccggcgcgctcgctcctcctcgcctttccgggaaccgtgcgcaggagctcacacggcacgcctgcggccaggggcaatcgggttctcggttcccggagtcccagttcccggtttccagtttcctta

SEQ ID NO: 113811 - DNA, 30 bp, Homo sapiens
  chr6:106439947-106439977
  hyper
ttttcagcgagtgccgtttcctaggttgga

SEQ ID NO: 113812 - DNA, 30 bp, Homo sapiens; identical to SEQ ID NO: 43319
  chr6:106440648-106440678
  hyper

SEQ ID NO: 113813 - DNA, 1389 bp, Homo sapiens
  chr6:106441813-106443202
  hyper
aatgaattgcagagtcggatacagctaatttgggggaatgtaagctggatgtcttttcctaatttatgaaacgtgaacgggggtaaggtatttatttgtacgctagttgaagtggggcaggagcactgattcctggacagtcactcaaaagctgcgcccaaagttttaaaaagcgcggggacggtggagagggaggcgaagagcccgcgctgctgggctgggctcgggtgccgcgctggggacgccgcatctactgagcggtcgccgaagacgccgggaggcgaggggcgaggtaagacgccgcctaaagaggcccgggctctcccccggggtcgttgttggaaaagcaaattccacggtgaactctaccaagctcagcgcgtacacagctagcggctctggattggactgcattcgcctaaattgcgtaattaaaaaaaaaaaatacaccactgccaccctacagcgacgcttccgctggaagacgagcggggacgcgtgacagcgcggggatagcttttctattacgtttcttgttctccgagctcgagcccccttttaaaaagtcgctcaccaaaaacggggtgggggatggaggtggggacgagaagtttccgaatgctgagttcatttggacgaggtgaggagaactagggtcctaacagcaggtccagaggactctcgagataggtttagagcccgtccttttgtctggagtgtcgcgggactccagaagtgggttgtgcaagacaaacttccagataaatctttgcccggatcctcctgcggtcaaagcatcagtcctgcccgtaacttcctaacgacatcttcttggagcagattccgcggcggggatggctgggtgtgcaaaccgaaaacagtttgtcagccctccagtcccgccgcgtcgggaatgcgagcccggccacgcggtccgaccgggtccggggacggcgcgcttgtcgcgggagcctcccggcttgcggagggcttgagttttttggcggagacagaggaaagcctctggtcgagaggattagagcgcgcgttttctccgccgagcacgctgcccgacgccgtcgcagccgcgcacttcccggttttgaaagccagagagatgagtcaagcgcaaaagctccggagtgacaatgcgagcttttggccagcctcatcctcctccccattcccttgccttcttttaggtcttcggttcgtgacaagtgcataggttaggcttgcacggaagagggtcggggcaggtgccagctcagggcacctacccggcgttgtcacgttccctttgggatcaatgatctttcataactaggctgggcatgttcgtgcagccctctgggcactctgggggacgttctcataaggctttttttc

SEQ ID NO: 113814 - DNA, 791 bp, Homo sapiens
  chr6:106533693-106534484
  hyper
cgttagcaggagaaacggaatgttacaacttttggggcggggggcggggaaacgtgcgttacatacacaacagcttgaggaccagacagctccactgtattacactagctgcaaaaacaatttaacttgctcttttgaagtaagatttgtgtcttttgtacctggggatttgagctgagaaatcagaaactgtgtaggtaaattttaagtttccttaatttaaggaacgtgcgccccctaattctgccgcgccaggaaggagggcgatctggagtgtttagaatacaatagagcccaagtaagcgttgaggttaagtgccttcaaagggaagtaagaagattccaagtcaatgttgaaatacacatgcgaagagaggaagctctcggcggctgtgctagcaatctgggggaaagccctgggctcggccaggtggtgttggccacgttggccacgcccccacttcgcgcagccgagtggctaaggaaatcttaagcagggaggggaagccagacggttaacacagacaaagtgctgccgtgacactcggccctccagtgttgcggagaggcaagagcagcgaccgcggcacctgtccgcccggagctgggacgcgggcgcccgggcggccggacgaagcgaggagggaccgccgaggtgcgcgtctgtgcggctcagcctggcgggggacgcggggagaatgtggactgggtagagatgaacgagacttttctcagatgttggatatttgcttggaaaaacgtgtgggtacgaccttggtaaggaacttgaa

SEQ ID NO: 113815 - DNA, 30 bp, Homo sapiens
  chr6:106545550-106545580
  hyper
gtgacttcatggcaccgacattgctgtttt

SEQ ID NO: 113816 - DNA, 30 bp, Homo sapiens
  chr6:106545963-106545993
  hyper
gtagactagcatagtcggtacgtgagtaag

SEQ ID NO: 113817 - DNA, 30 bp, Homo sapiens
  chr6:106602353-106602383
  hyper
agtggacccggctgccgtgtctccgcccct

SEQ ID NO: 113818 - DNA, 30 bp, Homo sapiens
  chr6:106773125-106773155
  hyper
tgcgactagactctcgctttcctaccttag

SEQ ID NO: 113819 - DNA, 30 bp, Homo sapiens
  chr6:106773503-106773533
  hyper
ctgtcctgcggggacgcggtagcaggactc

SEQ ID NO: 113820 - DNA, 709 bp, Homo sapiens; identical to SEQ ID NO: 43322
  chr6:106808609-106809318
  hyper

SEQ ID NO: 113821 - DNA, 638 bp, Homo sapiens; identical to SEQ ID NO: 5044
  chr6:106958124-106958762
  hyper

SEQ ID NO: 113822 - DNA, 1660 bp, Homo sapiens; identical to SEQ ID NO: 5045
  chr6:106959519-106961179
  hyper

SEQ ID NO: 113823 - DNA, 30 bp, Homo sapiens; identical to SEQ ID NO: 43325
  chr6:107077172-107077202
  hyper

SEQ ID NO: 113824 - DNA, 67 bp, Homo sapiens
  chr6:107077422-107077489
  hyper
ccaatccaagtactcggtgttgaagggctcagtgacaattaaagatggctgcgcccatgtaacatca

SEQ ID NO: 113825 - DNA, 30 bp, Homo sapiens
  chr6:107077725-107077755
  hyper
tcttcgggtgtactcgccgtacccattcag

SEQ ID NO: 113826 - DNA, 75 bp, Homo sapiens; identical to SEQ ID NO: 43327
  chr6:107780252-107780327
  hyper

SEQ ID NO: 113827 - DNA, 30 bp, Homo sapiens
  chr6:107780825-107780855
  hyper
ggcgtacccgagaacgcccccgcaggggcg

SEQ ID NO: 113828 - DNA, 1084 bp, Homo sapiens; identical to SEQ ID NO: 43328
  chr6:107810017-107811101
  hyper

SEQ ID NO: 113829 - DNA, 113 bp, Homo sapiens; identical to SEQ ID NO: 43329
  chr6:108169774-108169887
  hyper

SEQ ID NO: 113830 - DNA, 30 bp, Homo sapiens
  chr6:108279120-108279150
  hyper
tgtcgccgggatcacgatgagccccacgaa

SEQ ID NO: 113831 - DNA, 30 bp, Homo sapiens
  chr6:108395530-108395560
  hyper
cgggccgggcgctgcgcaccagacaccctg

SEQ ID NO: 113832 - DNA, 59 bp, Homo sapiens
  chr6:108396124-108396183
  hyper
tgcattggggtatccgtagccgaggctcgccagccggtgaccacgagcacccaccgctt

SEQ ID NO: 113833 - DNA, 536 bp, Homo sapiens
  chr6:108434831-108435367
  hyper
tcttccaccaggggtcggctttgtttcttttttccgagactgatgcggctcccctactgccagagatcttagtccagaaacagccttttttgggaggtgtgggagatgccgtggtcagcccaagggcgagatgcgcctcggggtcggagtcgcccgagtggagactggacactccatgggggaggctggaaccccctgtgccacagataaatgctcgttctccaccacatgtgaggcatttgaataggagcaagtctcccgggttgggaatactaggaagtgctgggggacaggcaaggtcacggcatccaggctgcaatgcaaatgcctaggtagtgcgcacggcagcggtaatccagaatcctgcccaaagagggtcccgcaatcaccgcccacttccaggcgggcttggggagccgagggacttcgcctgcttgggtcagagcccaggaggtggcgtggtggtggtggtggacgggcctgagcgtctcagccctgacggtctaggccaggtttgtccgcggggccaagactca

SEQ ID NO: 113834 - DNA, 1230 bp, Homo sapiens
  chr6:108435948-108437178
  hyper
tccagaataatcctggcggtttagtcatcattcctaataacaaggatgttgctaagaacagaaattttacatgattttcatacattcagcccttccccccacgtgtcattaaaaaaaaaaaaaaggcttagcctgcctgcgatttccaacttctctttccacggatcgaccgcggccttggcaaggacttgagtctgcgttccagccccttccgctcccagcgcgcacgcagcctctcgcctttgcgtcggcgggttgctggttgccggtacccgctcagcagctaggagccttggggaaccctagctcttagcttccccgtctggcgaggccagagggccaagttgctcactgggctgtgctgagggataaggggagaaaagaacggaaatcgcagctacgagggctagagggacggcgcggctgcttgaggacgggtcgcctagcggtgggcgagtagggctgtgcgtaaaaggatctagacagacagtcgtgcgcccgcagggttgcaggacaggggcaggccgagttgtggcgcgtgtgtgtttgtgtgtgctcgcctccgggttgcgcgctttcagggctttggatgccggggattttgaggacccattcaaagctccgagggggcggaggctcaagcaagccagggaaaaggtcccctaagcctcagagcctgggctgcgccccagacaaagtgcctaatgcagagtaggctcttaataggtttgcattggatctaaacgaaagctagtgaaattcgtacatgattctaatgagagatgacggccaggtgttctcagcagcccctggccctcacggggcgacctgaaagttcccactctacccgagacgaaactcagagccgaggtgggggcgaaggccgggtaatgcactgatcgagggtgaggagggatgtttcatagccttttccgacatacctcacgacaaaacacctttcactctctatgagcaaaggaaagaagaaatgtcccacaccctctattttgacttcttgggaaacacaatgcctctcaaattgggcctgcgagaaaggtgtgacccgggagggttgtggggtcccgggaccttggccgggtgtcggtgacgggactgcctgaggccagaagataggttctaggtctcagtccacctggtgctggacgtcgaggaacccaaaactgtccactggaggcgccctgacgctttggtcaacgagggctgcttctg

SEQ ID NO: 113835 - DNA, 49 bp, Homo sapiens
  chr6:108438107-108438156
  hyper
cactcccgccctctacgacgtcctccctggcccgggcagcccaactggg

SEQ ID NO: 113836 - DNA, 496 bp, Homo sapiens
  chr6:108438260-108438756
  hyper
cgtgggcgaatgtctggtggccgggtgagtggaacccgccgcccagtccttgcagcgggctctggtctagtgggtgaggatccctggggaggtcccaactccggtgcagcgtccgcggggtgaagggcgcgagtgcattcaggccccaagggaaactcggggacatctgcacagacaagaatccccaaggaggcccaggtcccacggccaaagtcctcgacccccaccaggctgtctccctctagtcctccccactcctgacctgccattcgggacggagccagtccgcgggcacccaagggcgcaagctggtacaaaaagcacgcgcaggggtgtgcctgggtgcgcaggagtatgtgtgtgtgtgtgtgtgtttgtgtatgcgtgtgcaggtgagtccagctgtcgtgtaaatgtgactctacataagcttgttgctgtgtaaatgtgttttttcttggtataggcacaaacgtgtgaacgttggtctaaatgg

SEQ ID NO: 113837 - DNA, 77 bp, Homo sapiens
  chr6:108439496-108439573
  hyper
tagcagaaaggaatcgaggcccccgtccataatcgcaggtgtcggcgtggaaaggagccacgcgtgcacactcatgg

SEQ ID NO: 113838 - DNA, 849 bp, Homo sapiens
  chr6:108439795-108440644
  hyper
ctgcggggcccggagcgggaggtaccggctaggggcgcgtttctttcgcatccacaccccgcccccacccctctctccagggattttttttttttttttttttgtatccaggcacagctgggggctccctcaccacccacccctggcctccccatacagaataaagtcagtctgtatttaatggttatggcggatgtgagggggatttggcagaggcagaagagaggcctttcgctctcaaatatcgtcccttacgtcgtgtgagtctaccaacccaccacgacctcatattcttgtgcgggtgtctgactcgaatgacaagcgagctgattttttcagtacatagctgggaaatgtagtgagtgataatagagatttctctttcattttttacgcttgacttggttattgttgcttttcttttcccgtgattccttctgaggattagctctgacttccccactattggcggtcaaagtggccccgactcgggatgacaattgacggggatcaagggattgcccattctgtgcctgtaagaaccgattcgtgccagagaaactcatcaagtggaggcggagaataaagaccgttcgggggtaaatgtattcattgagaagggttctcccaaattgcttctaagtttttttaatgaaaagtaacgattgcggcaatcagcggctttttggcggattacaaatctggagggagctgcggcgctgcattgaaaagtgcccccgccttcgcaccgggcagccggttcacaggagcagcgcgaggggcgggggtccgatagcgggacaaaggcggggagggggcgagcggaggagggcggctcggggcgcccgg

SEQ ID NO: 113839 - DNA, 210 bp, Homo sapiens
  chr6:108440744-108440954
  hyper
cgagggaggtctaccgcagcaccaccagcactggggagattccgggcatctggagcgaggaaggtgtgctataggggttgagtccatcaccgtggaagtccggggaatgggaggtgcgactcggtcccccacctctaccccgggcacggtggtgtcttcttttaaagacgtctcacttcgcaattggaatcgaagcgtgggccggtgtcg

SEQ ID NO: 113840 - DNA, 225 bp, Homo sapiens
  chr6:108455136-108455361
  hyper
ggccgagtcgcctcccggcagctgagtggcagcctcggctgcggacccaggcgcagcttcccccagaggccggcgctattaactcccggggcctcctgcggcggcgaggcggtggcacggctcctcccgctccctcggcctccaggttcaataaggattacatcatggagcaagtatgcggggcagcctgagaatcaaagccgtcagcaccggcggctggttaac

SEQ ID NO: 113841 - DNA, 1233 bp, Homo sapiens
  chr6:108478325-108479558
  hyper
gccccatactgaccgcggtccctcacctgctgactgattgacttataaatctgccccccacccacttgtctgtccattgaaggcaaattcgccatcgggaacacagtagtttctcaataactatctaatgcatggccacccttcccaggatttagaatatcaaagggacgtgttctttcctcccaaatcacctgcctgcgcttcccccagccgggtgccccagccttcacctcggtccggccaccacctcatcccgcttcttcgcggcttccaggcctcgggctgggatctcagcccctgcctgtaggtgcggcccagagggtgcgacacgcgtcggagcggggcagcggaggaggggacagggacgcggcagccacacccgcatctctttcccctctcgggcatccccgagggcccttctgcctccagttccttgagcccccgaagccccccatgcggcaagagcgagtcgcaggaacaagtggggaatcttggccgcggccccctcccccgccttataaaaaagaaattgacttttgtttggagtttgtgaaaagtggggctcggggcccagtcaatggggcgccccgcggcgcgggctgagtggagctagcgcgaaccgctcagccgcggccccaattaatccgccctttgtgcggcccgcccggccgcccccgccgcagccgcaccagcggcccattgttcggcctcgccgggccgcgggatttacccttttcaaacagccggttttgtccagggcagttcgagcggaagtttctcactgacaatttgccccaaatagatagatttgtcagaagcgaccttcgggaaggaagcaaaaagccaccggcccgaaggttgggcccaaaacagggactctgcgtcccacccgcggccgcgccgcccccccgcgcccccggccctgcagtcccgaagccccgcgggggtccagaccactgcacctgctgagccagacactccgcggacctgacctccgttttacccatctgtaaaatggagcagctgggcgctggcaagccgtaagtccaagagctttggctccaccagcgtgtacgacgctcatttcctttctctctccccacaccctttccaaaaactgtaagccagaaaacctggccaggcctccgcgacggcgagaaacggtcttgaaggtcggtcggtcgccgtaatgcggtccggatcgtgcacgtgctgtttcgccactgccctccg

SEQ ID NO: 113842 - DNA, 396 bp, Homo sapiens; identical to SEQ ID NO: 5051
  chr6:108484807-108485203
  hyper

SEQ ID NO: 113843 - DNA, 1490 bp, Homo sapiens
  chr6:108485515-108487005
  hyper
agaaccccataatcgcgtccgcgttatgggggtggtggtggtaggtggctgaagcaagtggatttctggcgtgaaccagaacctgaggattccaaacggagcctggcatcttattgtgtttctcaaatcctgcccgaaattcctcccctctctgggcgccgagttcgagaaagcgctacgccgccggtcgggctagctccacaagcggctgtacaagttggctgtcaaaaaacgctgatttctcctcctgtcacctaataaacccctacgcgcttatggcctcgtcccacaatcccccaatctcgtcccaattcgaaaaaccgaggaggagggaataaactgagagataaagatccccccatcttgctctttccccgggaccccagccttggtcgcggcgccccactaaggaggacacaggctctggtgtgtgtggtgtgcgagaccccgagctcgaggccgagccaaggctgggcagaaagttgcaatcacgtgctgtcggagcccactggagcgcacagcccgctccccctgggacgcccaggcggaggacctgctgcgccctcccagggctcgggggactccagcattcacttgcacgcacaggcgaactctgattgaaagcccgggatgacaccgagtctggagaaagagggaccggggggtgggctggcggaattgcagagcgccggccacagctcccctccccgcgaacgtcgagcggagggcgggaggtgtaacctctgacctctggccgggtccacgccctgaggagggactggcaagctcttgttcgacaagttcaagctgccgagagagcttaaatagaattaatctcttagagatcggggatcatcgctccctcggcatgcgctctcccagcgccgcgcacagagcaaggcgcgagagagctcaggaatcgcgggaaggcaagcggaatggggagggggtaggggatgagggcctctcttcactattcctccgcccggagagcgggagcccgcaacgcccgccgaggacgagcggcgggagggaacgctctgccctccagccgccccggtgcagataatggaggcgacaagagattcgctcagcgtcggatgggccagctctgcttggggaagctggcggcatcctcccctcggctggtgcccaaacccactgcgcgaaggccgaaggaacgcggaacctccagaagaccccatcctcagccctgactttccgtagatatgtgcaaaatgagtaaattactcacctcgggccagatccaagttttacccaacagaaggggcaccggaccaagaatgaaccaactcacatggccatgtccggcgcgcacaatcacacgccagcacacagccacccaatttcttccgcgaatctatctggcactctggagagagggggaaaagcgttttgagaaagccccgtcacccctccccttccttcttgccgtgaaatatacgaattcatttttattacgagccgca

SEQ ID NO: 113844 - DNA, 444 bp, Homo sapiens; identical to SEQ ID NO: 43339
  chr6:108487077-108487521
  hyper

SEQ ID NO: 113845 - DNA, 807 bp, Homo sapiens
  chr6:108487790-108488597
  hyper
tggacgaattctgagcgcccagggagcagcgcagcgcgcgactgacacccacctgtcccgcccaggagccttgcaggctggagggcagctggagagcggcggcgcccggcggcgaggcgggcgctgccggccgggactcgggcagcgcccaccaaccgctccgccccgggacagccagcatgagcaagccagccggatcaacaagtgggtacctctcgggccgccgtggggcctaggcgcgcagcctggggcgagcgagcggggaggctgggggaggtcctgcctggagcgctgcgaatctgagcccctgagagggattccagcgggcgtgtgcgttcggcccagacctgtagaccgtgagttggagcatttcgtggagaggggagagccgtttcgttgcctctggattgcttgatcccccctgtctggtgcggtgagaaggttacgacccgcgcagcccaccagtcggatgagttgtctccatttagccgccaggtgctggatgggggggccatgggggcgggaactgggccgcagctccaggcggtagcacaataacacactcgctcaaaactccgagctccagcgcgcaaaagcaactctgtgcaaagcggattttgaatggaatgctttgcaccccgtttctagctatttcaaataatcctgcaaactgggaagcagaaacaatttaaaagtcacattttccttaatcctaaatccgcgtaggtcataactggggaatttaaagtatggcgaaccactctagcaaagagaggaccaaatccctaatcccaaggacttttcgag

SEQ ID NO: 113846 - DNA, 108 bp, Homo sapiens
  chr6:108488821-108488929
  hyper
cggtcacggtgctcagatctcccgggggcatttcagttcccgccatccagtggcccacggctgcgggctccagggtctgaggctggggactaccgttgccgccgcagt

SEQ ID NO: 113847 - DNA, 147 bp, Homo sapiens; identical to SEQ ID NO: 5055
  chr6:108489661-108489808
  hyper

SEQ ID NO: 113848 - DNA, 179 bp, Homo sapiens; identical to SEQ ID NO: 5056
  chr6:108490066-108490245
  hyper

SEQ ID NO: 113849 - DNA, 218 bp, Homo sapiens; identical to SEQ ID NO: 5057
  chr6:108490296-108490514
  hyper

SEQ ID NO: 113850 - DNA, 15 bp, Homo sapiens
  chr6:108490537-108490552
  hyper
cgaggaggggccccc

SEQ ID NO: 113851 - DNA, 180 bp, Homo sapiens
  chr6:108490820-108491000
  hyper
gtgagtgcagtgcagcggagctccagacccggttcctgagcgaccaggaactcccttgggcgcagtgacaggcccgaaggagtggaggacaagacccgctgtgcccttgcctggccctctccagcccctccctcccacagcacaatctcccctcccgccctgtgggaggggggcgccgag

SEQ ID NO: 113852 - DNA, 255 bp, Homo sapiens
  chr6:108491107-108491362
  hyper
cgcggggttgtaattacccggccgagcctggtcgttaccgaacaccccctcacccccaagcacggtcccccgcgctctccttcccccaccccctccacctgagacgagtctgggacccacggtgcaagctcgcccggacgcctcgggttccaggagcaagtttacacctgcggtgcctcgaggccctccccgcgccacgccctcacctcccctactcccctcgcccagacgttccactgccgccccttcccacct

SEQ ID NO: 113853 - DNA, 398 bp, Homo sapiens
  chr6:108491986-108492384
  hyper
tcccgaaccactttgcggagaaaataattttttcctaaaagaaataatttctctaaagcgactcaccaagcattttttaaataggtaaagcgaaagttggccaattaccactacccttattatcattaataatccaagtattagcattacaataataatcctaataataacaccgcccggcggagctcagagaaaactcgattgccttccagctgccatccctggttccagccgtgtttgtttttcttcttttcccttttacatttcaagtttgtctcctcgcgcgctcactaacaactttctctgttaaatgcaaaagcgaaggagggaggcggccaaactttccgcggagcagaaaggcagtggagggccgcactgccgcccgggcctgctgtcat

SEQ ID NO: 113854 - DNA, 84 bp, Homo sapiens
  chr6:108492637-108492721
  hyper
tccccgtctttcctgcgatttcaggccgcattttagatatcccctgcaaagtgtgtggcgaccgcagctcggggaagcactacg

SEQ ID NO: 113855 - DNA, 93 bp, Homo sapiens
  chr6:108495724-108495817
  hyper
agccccgcaggcctgcggggtctgccaaacccggctctctaagcttcacctgcttggagaaggacgtttcccccttgtccgctttcttggggt

SEQ ID NO: 113856 - DNA, 84 bp, Homo sapiens
  chr6:108495915-108495999
  hyper
cggggctccagggcctgcggccgggcaaggtcgcgcctccacaccgtttccccgcccgggtgccggctccgggtctccagccta

SEQ ID NO: 113857 - DNA, 176 bp, Homo sapiens
  chr6:108496289-108496465
  hyper
agcaggagccgctggcgacccctagaattccccagggcaagacccatgcccacatcaggaacttgcgccccacagtcatctccacacaggcagcgcttggggggaccccactctccaggggaccggcgcgcattttctgcctccggtcctaatccctctttgcagcccttcgtggc

SEQ ID NO: 113858 - DNA, 500 bp, Homo sapiens
  chr6:108496966-108497466
  hyper
gagagagagccccttcctctgcggcgcaggaagccggagggagcgtccaacctgttgaacttgtgtattgacaagttgtcaagctcggcaggccgaagattgccctgaattaatttgtttgtttaaactgttggtggtaattgtcacatctcccctgcctttctccagcatactcggagacgggttctccctcgttccattccctagcaatcccggggctcgggtcctttcctcctgcggccctcggaggccaaaagctatttctgtgggggcggggcctgcgggtagggaggcttgttcttggacggagctggaaaagtctgcgcagaaacgaggtgtctggcgtgcgcgacgctccctctcttttggatgggggcgaggatacctggctactccagcccagagggtctctggtttccctgcgaacccccttccctggtggggaggagccctggaccgaaggagaacacacctggtcttacttgaggctctgccattat

SEQ ID NO: 113859 - DNA, 107 bp, Homo sapiens
  chr6:108582546-108582653
  hyper
ttcctgtctctctgcgccagcctcggcctgcggcggggtagagcgccggaaacggctttagcggctttgggaattgcgggcgaaagttaaacggagagatcttagag

SEQ ID NO: 113860 - DNA, 13 bp, Homo sapiens
  chr6:108880344-108880357
  hyper
ttttggtgcctga

SEQ ID NO: 113861 - DNA, 30 bp, Homo sapiens; identical to SEQ ID NO: 5063
  chr6:108881003-108881033
  hyper

SEQ ID NO: 113862 - DNA, 30 bp, Homo sapiens; identical to SEQ ID NO: 43351
  chr6:108881440-108881470
  hyper

SEQ ID NO: 113863 - DNA, 36 bp, Homo sapiens
  chr6:108881855-108881891
  hyper
gggaggcactagagcgggcccgagcgaaacataaac

SEQ ID NO: 113864 - DNA, 184 bp, Homo sapiens; identical to SEQ ID NO: 43353
  chr6:108882163-108882347
  hyper

SEQ ID NO: 113865 - DNA, 30 bp, Homo sapiens; identical to SEQ ID NO: 43354
  chr6:108882665-108882695
  hyper

SEQ ID NO: 113866 - DNA, 6 bp, Homo sapiens
  chr6:108882924-108882930
  hyper
agctcc

SEQ ID NO: 113867 - DNA, 75 bp, Homo sapiens; identical to SEQ ID NO: 43356
  chr6:108882975-108883050
  hyper

SEQ ID NO: 113868 - DNA, 30 bp, Homo sapiens
  chr6:108883365-108883395
  hyper
tggagtagagtttaccgtagtgggggtctg

SEQ ID NO: 113869 - DNA, 30 bp, Homo sapiens
  chr6:108883804-108883834
  hyper
ctctggtgtgggggacgcggggcctgcgct

SEQ ID NO: 113870 - DNA, 30 bp, Homo sapiens
  chr6:109103573-109103603
  hyper
aatattaggaaacccgaagaaaaagcaaaa

SEQ ID NO: 113871 - DNA, 60 bp, Homo sapiens
  chr6:109169454-109169514
  hyper
caacaaatgtggttcggcaaattgctaaacgaaaagcggacacccgcccacgacgcctgc

SEQ ID NO: 113872 - DNA, 30 bp, Homo sapiens
  chr6:109170149-109170179
  hyper
tatttatgtactgtcgcacttagccaagtg

SEQ ID NO: 113873 - DNA, 30 bp, Homo sapiens
  chr6:109330326-109330356
  hyper
gacgactcacggtgcgcaggtctcccaccc

SEQ ID NO: 113874 - DNA, 170 bp, Homo sapiens
  chr6:109330987-109331157
  hyper
gggccgcgaggtgagcgtgcactgtcaggaaggtgcagcacgagtcttcgggcttcagggacaggggaatctgccccctacacccctgctcggccatttacctagaaccaaacagcagccaacctcgagactgattctgacagcaccaggagtaatgaagttctctaaat

SEQ ID NO: 113875 - DNA, 241 bp, Homo sapiens
  chr6:109331216-109331457
  hyper
cggcagcagaatgcaggactttggcctataatcaatgcaaaattcattttgctaagctacgtaaaagctataaatatcactcccctacacagataataaaccttggtagcctatctctgaatcgtcttttttcctctcaagtatattcgaaggctttacaatttctaatattccttcataagcgccctccctgggttataaagacagaatttcaatctctgaaatcggatgaggaacttgg

SEQ ID NO: 113876 - DNA, 30 bp, Homo sapiens; identical to SEQ ID NO: 43359
  chr6:109415592-109415622
  hyper

SEQ ID NO: 113877 - DNA, 35 bp, Homo sapiens; identical to SEQ ID NO: 43360
  chr6:109416222-109416257
  hyper

SEQ ID NO: 113878 - DNA, 30 bp, Homo sapiens
  chr6:109702714-109702744
  hyper
ttagccttaggatacgtacgcaaaacaccc

SEQ ID NO: 113879 - DNA, 30 bp, Homo sapiens
  chr6:109703002-109703032
  hyper
cagctcggccccaccgccaacctcagaggc

SEQ ID NO: 113880 - DNA, 30 bp, Homo sapiens
  chr6:109703498-109703528
  hyper
gtcgtgttcttgtccgcggacagcacgcag

SEQ ID NO: 113881 - DNA, 242 bp, Homo sapiens
  chr6:109703794-109704036
  hyper
agtcgggaggaagccgaaggaacctggccctcaaagcgactgtgccacagccaagaaaactgggagcttctgcaaatcgttcttcttgccctcagattaccagacacgacgcagctggacttgtctcatgcctgcgatagggacggcccccaccctgacttgcatggaacagtcgacataatgtggcctactgcttccacctgagcgccccgccaggctgtaattccgcgggcccacgtgac

SEQ ID NO: 113882 - DNA, 30 bp, Homo sapiens
  chr6:109704276-109704306
  hyper
gtgggcagctgaggcgccgcccggatcaga

SEQ ID NO: 113883 - DNA, 30 bp, Homo sapiens
  chr6:109761652-109761682
  hyper
ggttacctcagcggcgctcttcgcaatctg

SEQ ID NO: 113884 - DNA, 30 bp, Homo sapiens
  chr6:109761923-109761953
  hyper
tttcctcaactttgcgcctgttgctgggcc

SEQ ID NO: 113885 - DNA, 30 bp, Homo sapiens
  chr6:109762367-109762397
  hyper
actgctggtgagtgcgtctgcggagtgcgg

SEQ ID NO: 113886 - DNA, 30 bp, Homo sapiens; identical to SEQ ID NO: 43362
  chr6:109776225-109776255
  hyper

SEQ ID NO: 113887 - DNA, 54 bp, Homo sapiens; identical to SEQ ID NO: 5066
  chr6:109776897-109776951
  hyper

SEQ ID NO: 113888 - DNA, 430 bp, Homo sapiens; identical to SEQ ID NO: 5067
  chr6:109777176-109777606
  hyper

SEQ ID NO: 113889 - DNA, 30 bp, Homo sapiens; identical to SEQ ID NO: 43365
  chr6:109804088-109804118
  hyper

SEQ ID NO: 113890 - DNA, 30 bp, Homo sapiens; identical to SEQ ID NO: 5068
  chr6:109805059-109805089
  hyper

SEQ ID NO: 113891 - DNA, 321 bp, Homo sapiens
  chr6:110012080-110012401
  hyper
cttgggccacacagcgtaggtacaacatggattagaggtgaggggaaaactgacactcagtgaaggaccgtcagagggccggcttccaggaaaatgggccgcagcaggcagggaaaacacaaggatctatcctgcaactcggagaacccttttcaaaagaagctacccaatcccaaaccttccgcttttttccaaagagagggaggagataaatagactcaattaatccgtcgactttttctccgcccatgttttcctccaatccttaccaaagatggtgcccttcgcttcctctctcggcagcacgcaggtcccgggagc

SEQ ID NO: 113892 - DNA, 30 bp, Homo sapiens; identical to SEQ ID NO: 43368
  chr6:110012708-110012738
  hyper

SEQ ID NO: 113893 - DNA, 30 bp, Homo sapiens; identical to SEQ ID NO: 43369
  chr6:110299603-110299633
  hyper

SEQ ID NO: 113894 - DNA, 61 bp, Homo sapiens
  chr6:110500676-110500737
  hyper
tcatgcttcggcagcggtcgccggtccccctcggctcgcgggactccgcctagagccccca

SEQ ID NO: 113895 - DNA, 96 bp, Homo sapiens; identical to SEQ ID NO: 43371
  chr6:110501272-110501368
  hyper

SEQ ID NO: 113896 - DNA, 126 bp, Homo sapiens
  chr6:110501595-110501721
  hyper
gcctcttcttcttccgccctggcagggtctccgcagaagatttgttgccgtcatgtcggctgcgattgcagctctggccgcttcctatggttcgggttcagggtccgaatcggactcggacagtga

SEQ ID NO: 113897 - DNA, 763 bp, Homo sapiens
  chr6:110678980-110679743
  hyper
gggcactgaaagatgcgacccgtggagccgcctaagagagcacagggggaagagaagaagcggaagcctccggaggtcccatcgaggcggcctgcgggacctgagcgccgggctccgtagcgcggtcgggagggggcttctggtcccaggcccaagaccgaccgctttgcaactgaccttccggcgggggcgcccgcgcggggcacagcagccaggctccggcgtcccgctcccgccgccccccggcggcgcccggcgaccgctgcgcacgtaggtcacctgcctcctgctggcgccgcgcggctggcccggcgcgggcggcaggtgcggcccaggtggccgccaggccgggcccggcggggcgctgcgggtgggggacccgggcccggcgcgccgcagctctgcgcagagccgcaggccgaacaacagcacagccccgagtagacaccggcgcaggacgccgcagcccctcccgggcggcctctcccgggccatggcgctacactcggggtcccgcgggccgcgcctggccggcagcagggatgtagccccacaggccggagcggccaactgtgggaactcccccgcgggccggggtgcgggctcggacccgcctccctccctcccgaccgaggaagccccggcgtaaccttatcctgccctgccgagcgcgccccgccgctggaacggtggtgggccgaacgcggtcacagggggccctctccgcccctccggaggtgccagggcccggctgtacagggtc

SEQ ID NO: 113898 - DNA, 30 bp, Homo sapiens
  chr6:111135839-111135869
  hyper
cggcaactccgcagcggagctctgcctgcc

SEQ ID NO: 113899 - DNA, 126 bp, Homo sapiens
  chr6:111136353-111136479
  hyper
atagaggcacgggacgcgggggccgccgccgctcagtccctcctcctcctccccccgcgaccgccgctccacttctccaacagccgcctctcgcgcgcgcgcgcgcgccgcccgccgcccgccgct

SEQ ID NO: 113900 - DNA, 30 bp, Homo sapiens
  chr6:111195539-111195569
  hyper
tacctcagcagtcgcggtgaactgcacaag

SEQ ID NO: 113901 - DNA, 41 bp, Homo sapiens
  chr6:111195961-111196002
  hyper
aagggcggtgctcacgcagcgctctcgcttacacagtatgg

SEQ ID NO: 113902 - DNA, 30 bp, Homo sapiens
  chr6:111197230-111197260
  hyper
ggtggagggaggcccgcctgccccaggaca

SEQ ID NO: 113903 - DNA, 30 bp, Homo sapiens; identical to SEQ ID NO: 43375
  chr6:111279597-111279627
  hyper

SEQ ID NO: 113904 - DNA, 30 bp, Homo sapiens; identical to SEQ ID NO: 43376
  chr6:111279875-111279905
  hyper

SEQ ID NO: 113905 - DNA, 30 bp, Homo sapiens; identical to SEQ ID NO: 5072
  chr6:111303113-111303143
  hyper

SEQ ID NO: 113906 - DNA, 1142 bp, Homo sapiens
  chr6:111408730-111409872
  hyper
agaggcttcagtgtcgatccccgaggtgttcgcgcgcgccagctgtcctcgcggccgcctgcgcgctggccgcctgcgcgctgccagcccgcccgcccgccaggggctccgccgccctcgcctcggcctcgttagcccgccaggagccccgcagctcctccgggagcccgctggtaactcgcgtccctcgcgcttctccggcgcctgaggggcccgcctcgggccatggtgctctcccaggaggagccggactccgcgcggggcacgagcgaggcgcagccgctcggccccgcgcccacgggggccgctccgccgcccggcccgggaccctcggacagccccgaggcggctgtcgagaaggtggaggtggagctggcggggccggcgaccgcggagccccatgagccccccgaaccccccgagggcggctggggctggctggtgatgctggcggccatgtggtgcaacgggtcggtgttcggcatccagaacgcttgcggggtgctcttcgtgtccatgctggaaaccttcggctccaaagacgatgacaagatggtctttaagacaggtgaggcgcggcgcccgccgaggccagcctgggcgacccgcgtggggcccccgagcgcatcccgcgtgtgggctgtgtctgcctccgagtgtgcatgtcggtgggtccctgtgccagagggtgcgagcaggggggtctttcgagttgcagacagagcctgccgcttctggggcctcggggtgcccgtctttatatggaatccagctgcagagctgtgtgtttgcaagcaggtcgcagaacttacttgccgagatcgtcctcctttcccctcagcagagcagacgctaacagtccacaggagcccttccttttattgtttgaaaacaaacagaaccccagaaccttcaaccccagtcatcgccctgtcatttttgtggtctctttcgtgactatgccagttatgtagttcttcacctgcctccctgggccgcagaggggtgtgcgtatgttggcggggcggggggtggagtttggaggaatgaaagagatttgtacgaaggtcactggagttccaaagggggccctgcaagagtcacggttccgtgcgttcccgtccccccgcctttttttgccc

SEQ ID NO: 113907 - DNA, 49 bp, Homo sapiens
  chr6:111580349-111580398
  hyper
ctgcaacttcagctcgctccgccatggggcgcacgtccgccagcctctg

SEQ ID NO: 113908 - DNA, 212 bp, Homo sapiens
  chr6:111580689-111580901
  hyper
gttctgctgagaagcgcggcggcagcaagacgacttctccggagccgccgagctggagttagaggtggagctccgtggggccgggcccccggctgcggggcagcggctcctgcaggcggaggccccggcggagaatgagccggagccggaggtggtggtggtctcctggcagagcggtgggaccgggagcaagctgcggtggttcaccacct

SEQ ID NO: 113909 - DNA, 30 bp, Homo sapiens; identical to SEQ ID NO: 43379
  chr6:111803665-111803695
  hyper

SEQ ID NO: 113910 - DNA, 90 bp, Homo sapiens
  chr6:111804029-111804119
  hyper
tccagcccctgcagcgggctggccatgtagtagtctgcagtcactatccttactgaaaacatgttcgccgccgccgccactgcctccctt

SEQ ID NO: 113911 - DNA, 30 bp, Homo sapiens; identical to SEQ ID NO: 5075
  chr6:111804789-111804819
  hyper

SEQ ID NO: 113912 - DNA, 30 bp, Homo sapiens
  chr6:111805171-111805201
  hyper
atgagatttattcacgcacggctcttctca

SEQ ID NO: 113913 - DNA, 30 bp, Homo sapiens
  chr6:111805515-111805545
  hyper
aaggttttactacccgaaggcataaaagca

SEQ ID NO: 113914 - DNA, 41 bp, Homo sapiens
  chr6:111927297-111927338
  hyper
aacctcagtgtagtcgcagtgccctcgcctgggagggtgtc

SEQ ID NO: 113915 - DNA, 952 bp, Homo sapiens
  chr6:112193849-112194801
  hyper
aaaggagggcgggggcggagtctgggccagcctcgcccccaagccaattcccattttcacccggcgcccgcttgcgggcgaggaaatggggtccccatccccgcgctgcctcggggccgcaccccgcaggggtgtcctccggtgcaaccgcgggaagaccccaagcaccgactccccggcagccccgcggagcgccctggcggccaagggaccgcagcaccgggccctgcggcgggggcggcgtgcgcgggggcgccggcggccgggcttctccgcagcatccccgaggcctcccgcgacgcatccccgccgcctgcttacctgcgcggcgctgaggctccggagcccactcacatggtcctctccccgccctcctccggcgcggccgaggcggctccggggggtccccggcgggcccgggagccggtgggccttccgagagcaccgagggggcggcgccggggtgtccccggcccggcggccgaatccctccctggcgcgggcggcggccgccgggcggtgcggcgcgggcggcggctttgtgtgcgcccgggcggtcctcggtgcgctgggagaagcgcggcgcgcccgggcgggagaggacgcgccgctcgcacaacaacctcgcctctactctcgccgccgggcggcgggcgggtctcgaaggccttcggctcgcggcgacccctcctcctcgcccgcggcagccccctcctcgccggctccgctcctgacagatggcgcaactgcaacgacgcgccgccgccaccagcgcggctgctcgctgctactcttgctgatgctctgcccctccagctccggaggggagcgaggagggggcggggcgcgcctcgagagtgacaggcccggctgccctatcaaagagccccttgggagctgcgagccgcaaccattggcgcctggggcgtgggcgggacggcagtaggtgggg

SEQ ID NO: 113916 - DNA, 30 bp, Homo sapiens; identical to SEQ ID NO: 43384
  chr6:112195148-112195178
  hyper

SEQ ID NO: 113917 - DNA, 30 bp, Homo sapiens
  chr6:114175982-114176012
  hyper
tggacgacgctagtcgctgggggaggttgg

SEQ ID NO: 113918 - DNA, 766 bp, Homo sapiens
  chr6:114176476-114177242
  hyper
gccagggagaccagccgataccaggcaaataggcgtaccagaaagaaaaggggggaaagctacacggcagcctggtaacaaaggagcaataaaagcagcccccaaatggagggctaaggacgcgtctgggagaaaatctgaaagcgagctagcagtcaccccaatttaaaataggagggggatgcggaggaaggggcatgattcacgttgggggtggggggaaatcaagagccttaaatgggcttttgggaatcgcctggatggtggtgtcggatcagcccagttggcttttcaagttggaactgctaatacaagggatttgcgtccatcctggcggctggggtcgtgggccaggccagcgggctctcttaagggtaataacacgtttgctggcaagatgcatttctacggaaacgtctttacatcagctctggggaatatgaccatggtcgaataatgcatctgaaggaactggacagtgagaagacgaagcttcacgtaacaatgttcagcttggtgatttttaaagcaacgcttgaacaaagagttactggcttgaaccaaccgtctttttcactcagagtgtgacctatttccctacaatgagcagaaaataaaactgtttgagaattcagagccagcaccaggagaaatgaaccattccctcgactgcttctcaccttcataagcgaaagattattccttgcaagatcaccaaatgtaaacgagaaaaggtggtctgattttgccacgagtgaaaactttg

SEQ ID NO: 113919 - DNA, 266 bp, Homo sapiens
  chr6:114177461-114177727
  hyper
tttctccttagaactgcaatccggtttagaatgtcatcgttgctgctgcctcccttcctttcaggagcacattcgcctgcgtgcgcactcacacacacgttcaaaaagagtccattcgattctggcagtaggctgaaaacgatccatattgacgcgaataacatcccaactgtaaatatggattcgtctactcgaggctgtgtctcatttcaccatagaggaaaattatgtcatttaaaacagtgataaaacgcgaagagtttcga

SEQ ID NO: 113920 - DNA, 30 bp, Homo sapiens
  chr6:114178177-114178207
  hyper
acacggatatagaccgacgagagtcaatgc

SEQ ID NO: 113921 - DNA, 32 bp, Homo sapiens
  chr6:114178490-114178522
  hyper
gccgcgtcagcgcccgcgagcccattcatctg

SEQ ID NO: 113922 - DNA, 31 bp, Homo sapiens; identical to SEQ ID NO: 5077
  chr6:114180217-114180248
  hyper

SEQ ID NO: 113923 - DNA, 53 bp, Homo sapiens; identical to SEQ ID NO: 5078
  chr6:114194489-114194542
  hyper

SEQ ID NO: 113924 - DNA, 40 bp, Homo sapiens
  chr6:114292434-114292474
  hyper
gggtgaacaacctgcgcaaggcggcgccatacacagtgtt

SEQ ID NO: 113925 - DNA, 30 bp, Homo sapiens
  chr6:114292736-114292766
  hyper
gcccactaccccgccgggctgtggcccatc

SEQ ID NO: 113926 - DNA, 200 bp, Homo sapiens; identical to SEQ ID NO: 5079
  chr6:114662112-114662312
  hyper

SEQ ID NO: 113927 - DNA, 691 bp, Homo sapiens
  chr6:114662598-114663289
  hyper
ccaccttaagctggacgctccttgcaggttgccctaaaccaaggtggtcgcccaagtaacaggagcaggagtctcagcgctccagtgagtagcgacagcgacctctcagacttgtttgtagtaacagtatgaccacccttcgactgcatccatcccgcgcgcgcgcgcgcgtgtgtgttgggtgggaagagatgcataaagtggggctgtgaggggtgtggggggggccagctgggaagagaaaaccccacccacatgttaacttagcctttgcctgttctttgcctgccctctgcctgtcctctgctggggcctcgcaggcccccactgtcccaaagctgccctcgcgctccaaacagctccacagccaccccagaagtgaccgaacgcgaacccctaaactctggcgagcgcagtaaacgcgtgttccctttctccctcaaagagagcgctacccagcgctctgggagagactgagagagaaacagacaggcaggctgactgacaccttctgtctaattttaccccaggaattgcccccgccgtttctcatctcgcactagtttaacctctggtcctaagcaaacctctcaaaagtcttccccaggcagcgcccaggagaaccgaaccccacaaagtgcttttttgctggcatcacccggatgcttccctttggcgatttgccccttct

SEQ ID NO: 113928 - DNA, 51 bp, Homo sapiens; identical to SEQ ID NO: 43393
  chr6:114663528-114663579
  hyper

SEQ ID NO: 113929 - DNA, 30 bp, Homo sapiens; identical to SEQ ID NO: 43394
  chr6:114664828-114664858
  hyper

SEQ ID NO: 113930 - DNA, 122 bp, Homo sapiens
  chr6:116421721-116421843
  hyper
ctcgggaaaggctacgtgcctacaggtctcagctgtgcagcagcggcaccgctcctggacccctactgccttctgggctcctaggcttgcggaacagatcaggagtcgccggcattggggta

SEQ ID NO: 113931 - DNA, 30 bp, Homo sapiens; identical to SEQ ID NO: 43395
  chr6:116422366-116422396
  hyper

SEQ ID NO: 113932 - DNA, 58 bp, Homo sapiens; identical to SEQ ID NO: 43396
  chr6:116575296-116575354
  hyper

SEQ ID NO: 113933 - DNA, 30 bp, Homo sapiens; identical to SEQ ID NO: 43397
  chr6:116601338-116601368
  hyper

SEQ ID NO: 113934 - DNA, 95 bp, Homo sapiens
  chr6:116691811-116691906
  hyper
agccaaagaggcctggcgggcgggggtgcgggtggagtccgggccgggtggcgtggaaggccgagcacagctgcgagcggcgagtcccgggagag

SEQ ID NO: 113935 - DNA, 204 bp, Homo sapiens
  chr6:116692733-116692937
  hyper
aggggaggtggcggcggcttgtgtgcagatcctggcgctggcaaccctactttgcggctgcagaagccgaggaagagctccccaagcctctcccagacgctggattccagcgctcctgggctccgccggcactcggagaaattgttagtaaacctcatccccgaggcagtcccggggaggggaggaggcgggggcttgactcac

SEQ ID NO: 113936 - DNA, 30 bp, Homo sapiens
  chr6:116892449-116892479
  hyper
aatgccagaccgcgcgcaccgtcccagcaa

SEQ ID NO: 113937 - DNA, 30 bp, Homo sapiens
  chr6:116937441-116937471
  hyper
ggatctggagttctcggtttccaagcaaga

SEQ ID NO: 113938 - DNA, 210 bp, Homo sapiens
  chr6:116937905-116938115
  hyper
tgagcccttggaggcgaagcaggggccagaaactggacgccagtcccgaagcagccgtccttggagcccgcagtctagagccaagacgcctctgggtggccccgcgggaccagaaacatcatcacctgctcctgtctctccgcgggagccctcttcctctccttctcccctggctccggccagacaagacctcgcggcaccacctcagtc

SEQ ID NO: 113939 - DNA, 30 bp, Homo sapiens; identical to SEQ ID NO: 43401
  chr6:116989642-116989672
  hyper

SEQ ID NO: 113940 - DNA, 115 bp, Homo sapiens
  chr6:117002084-117002199
  hyper
aatgaatgaggggtcgtccctttgcacacacggaggtctacgggccgcagagtacctacagcatggccaccgcaagcgcaactaaaatccagggcttgtcgcaggcacaggctcc

SEQ ID NO: 113941 - DNA, 484 bp, Homo sapiens
  chr6:117086155-117086639
  hyper
tgtgtgggtaaactccgtgtgtggtgggtgatattgcgaagtgttggcactgcggccgctttcgctcctaggtggccgcggtcggaaggtgggtcaccccgcacccttgcggccggggaccgactctccttcgcgcggcggtcgccacacttacgggatccgaggcgggatctcctccatcgatttgaaacgccctgtccacagcaggattttcttgtcgaactgcgaaggcctgcgctgcgtggggactcggtgaatctcccctgcagcgaaagcaacccagatggacgcgggaactgacgcaccggcacagaggatcagcgcgccctcaagccgactcccgggccggcccctcgctgccctcccgcaacctcctccctcccaggacctccccgtcggagccctggctcaccgtgaccttggggcccagaattgctgggggccccgccgctggagtagcaggggagaccccggggcggaagag

SEQ ID NO: 113942 - DNA, 44 bp, Homo sapiens
  chr6:117086902-117086946
  hyper
gcccccggccagcgacccgggatcagggcgtcaagccccgaggg

SEQ ID NO: 113943 - DNA, 435 bp, Homo sapiens
  chr6:117197785-117198220
  hyper
gccactgtgcaccctcgagcaaagcagtgtgtgacgagatgggatcttccctcaaatgctgagaagagccctcgccaatccctcggaaggttcccagaataaaaagcccggtccctgctgtgcaaagactgagcggtactccggtgtactttttccctgtcccaggcgtgcagagtccacgccgcgcggccaggtgccccaatagtgtacctgaaagtagggatggggccagttacagctgcactttccctgcagaagacagtgagccttcccgggatctttctgggagctctgagtgtgaaaacggtcctccggccagcgcaggttgagagaacgggaaggagggggaagctgtgggcgcccagggcgtgacaggcgcaggtgagaaagtgagtttcgcgggagcatctgccgggaccgcagacaggtggagaa

SEQ ID NO: 113944 - DNA, 419 bp, Homo sapiens
  chr6:117198339-117198758
  hyper
cggccccgggtcccagccccgccccgccccgccccgggctggggctccgctggggaaccggccgagcggcgcgcgcggaggtgtccggcggccaggaggatggccaaggtcccggagctggaagacaccttcctgcaggcgcagcctgcgccccaactgtccccggggatccaggaagactgctgtgtgcagctcctgggcaagggcttgctagtctatccggaagaaacagtgtacctggcggccgaagggcagcccgggggcgagcagggcggcggggagaaaggcgaagacccggagctgccgggggcagtgaaatcaggtgagtgctctgccgcatccggagctgggaaggggacggggacgtattctaagaagggcacccaataataataatgcatcccgaacaaacataaggc

SEQ ID NO: 113945 - DNA, 924 bp, Homo sapiens; identical to SEQ ID NO: 43407
  chr6:117585719-117586643
  hyper

SEQ ID NO: 113946 - DNA, 384 bp, Homo sapiens; identical to SEQ ID NO: 43408
  chr6:117586846-117587230
  hyper

SEQ ID NO: 113947 - DNA, 116 bp, Homo sapiens; identical to SEQ ID NO: 43409
  chr6:117587539-117587655
  hyper

SEQ ID NO: 113948 - DNA, 466 bp, Homo sapiens
  chr6:117591130-117591596
  hyper
tagcaagacttcaaaatatgtcgatggactttcagtctgtcagagacgttaggtggtggggggcacattttctggagcaagaaggctgaaacgcgagagggggtagtgagatcactaggcggccgaccaagagtgggaagaggtatcgttagcttggggagaggttaaggctaggaaagggaggccgtgctgcgctgagtcgcgggaagctccttgagcttcaaggacttgagtcggggagggagtctctccgctcttgctactctacccgccacttggtttccgcactgaggactcggctgcgaaatgggaggaagcaggcctccttttcgtgggttcccagaagcccccattttgcagttcccccacctcgctttcacaggttgcagcccccttagaaaaacgccgctgcagaggcgggggctgcccatcagccccggccatggctagccagccctgtgcccgc

SEQ ID NO: 113949 - DNA, 690 bp, Homo sapiens; identical to SEQ ID NO: 43411
  chr6:117591683-117592373
  hyper

SEQ ID NO: 113950 - DNA, 821 bp, Homo sapiens; identical to SEQ ID NO: 43412
  chr6:117803612-117804433
  hyper

SEQ ID NO: 113951 - DNA, 298 bp, Homo sapiens; identical to SEQ ID NO: 43413
  chr6:117804487-117804785
  hyper

SEQ ID NO: 113952 - DNA, 30 bp, Homo sapiens; identical to SEQ ID NO: 43414
  chr6:117996630-117996660
  hyper

SEQ ID NO: 113953 - DNA, 30 bp, Homo sapiens
  chr6:117997359-117997389
  hyper
agcgctagcgctttcgaggaagggagatca

SEQ ID NO: 113954 - DNA, 242 bp, Homo sapiens
  chr6:118227989-118228231
  hyper
tttccaccaggccaattatggcgaatgtagtaggagcaacatctaggattctccgtttgggtttctaatccggggccggcacctgtctcggcgtcctgccgctgtcccaggccggtggtgctggattccgcggcgcttgggcagaaacgaggaatccccgccaactccacagggaggatctattcccagcccccttatccccctaaaaaacacccaaaccaaaacaatcaccacaacctaga

SEQ ID NO: 113955 - DNA, 1066 bp, Homo sapiens; identical to SEQ ID NO: 43416
  chr6:118228323-118229389
  hyper

SEQ ID NO: 113956 - DNA, 156 bp, Homo sapiens; identical to SEQ ID NO: 43417
  chr6:118229416-118229572
  hyper

SEQ ID NO: 113957 - DNA, 165 bp, Homo sapiens
  chr6:118229616-118229781
  hyper
cggactcttcctggctgggagcagcgaagagagggctagaggcctggaacagacccagcaaagtgcaaaacattgcgggcagggtgtgagccggcggcgcccagttattccgaagcgcccatgccggagggggcgggtgccgatcgccggcgcctccagtgctgg

SEQ ID NO: 113958 - DNA, 184 bp, Homo sapiens
  chr6:118241124-118241308
  hyper
cacagaggcaggcagcgggatggatagagcggctcagagggaagggacagagccgctttaatgtgctaatgaggggaagcccagatgccagcgggctcagtggagctctttgtgacgccgggttcccggggctggctggagtctctgtacctatctggatcctgctgcaggccggggaaacact

SEQ ID NO: 113959 - DNA, 280 bp, Homo sapiens; identical to SEQ ID NO: 43420
  chr6:118241394-118241674
  hyper

SEQ ID NO: 113960 - DNA, 56 bp, Homo sapiens
  chr6:118971583-118971639
  hyper
catgaaatggctgtccgatacaaacagaccccttcagatacggaatgcagcaaacc

SEQ ID NO: 113961 - DNA, 86 bp, Homo sapiens
  chr6:118973006-118973092
  hyper
tattttgcgatactcgcccctcccttgggtaatccctcacgccctccctccgggcacctctgtgaagacacgtggaagacctgccc

SEQ ID NO: 113962 - DNA, 197 bp, Homo sapiens
  chr6:119030564-119030761
  hyper
gctggcatttctcagcgcatgcggctccccactcggctttctggagctctgccttttggcgacagagcagctagagctcctctcccctcccccatttcctctcataaagataaccagtaacaacaattggcgtgtgtgtgtgtgtgtgtgtgtgtgagagagagagagagagagagagagagcgctcccagttggcc

SEQ ID NO: 113963 - DNA, 30 bp, Homo sapiens; identical to SEQ ID NO: 43423
  chr6:119255786-119255816
  hyper

SEQ ID NO: 113964 - DNA, 30 bp, Homo sapiens
  chr6:119256077-119256107
  hyper
gaacgcgttgctcccgaggccgaagggccc

SEQ ID NO: 113965 - DNA, 1302 bp, Homo sapiens
  chr6:119399174-119400476
  hyper
cggctgttgcttcggcggaggagtagagttcccctcgctgcgggcgcagggcgcactgcctcccggggagacaggtgagtccggcgcggcccgcacggggtcgccacctgccccgtcgctgccccccttaccttggtgagctgggcgattttcttgctcattttcaggtgcatctcctggctgtagtccatgctgtgcccagccagctgtgcggtggccggcgagggcgcgaatttggccgccgagccgccgtaatagtgctgctgccagctcatgcccggggtcgccatcttcccaacagaccccagccggggcacctgtccccgcgggtggaggcaggcccgtggagcaacgacgcccgggaggcaagagtcgcggcggccgcttcccgacccgacacccggcgccccccagactcggccgcaggcgccgtcccacccgcgacccccgggtcacccctggaagggacggggcggtcccgccggcccgaagccgcggggacaacggcgcggggcagatgcccggggttgggcggcggcggccgggggccgggccagctcttggaggctcctcggcccgcgcctggcggaggcgtcgaggacagcgcagctccgcgggtcccgctcgcagcccgcaccgaggactcggcgaggctgcggagggaggaggagacggggcgggctgcggcggggataggcggggacatggaggaggacgcgggagccgccgttaccagggcgcgcgcggggacggcgacgtcatttccccgcagccaagccccgcccagccccgcgcagccgccgccgccgccgccagtcccgcagccccgcggccagtgcgggcgcctcgcgaggtcgatccgggatcgtgccgccagtgcttcccccgtgtggcggggatccagcagcccagccctggcggcgatccccgtgcagcgagcgtgaggcctgacgtaaaaaaaaaaagtatccccaagaagacggtgctgtaatcaccttcggttagcagaacgggtgtcgatttacagaccctttccacatgcgtcctcgtgtgtgcagggccccaagaagtggctcttccccaagaagagaggcaagcccaatccagagacatgagtagtgaagtagcgaggattccctgccctgaccttccttccaatggcacacaagtgaccgtgacactgtcttagccgccccctcccaccccgagtgcccggccactgcccccagttcagtgctgagtgtatgtgtggagggaacgctccttttcagtcagctggtggagcaccgcatagctactttc

SEQ ID NO: 113966 - DNA, 247 bp, Homo sapiens
  chr6:119670867-119671114
  hyper
cgggcgaatggcagcgagtagagcagcacggtacactccgccgcggccccgcgagcactaatctcactgccggtcttggggcggtggaaagcgagggaggcgacgcggccggagagtgacggcgcggccgggccaatcacgcgccgcccagggtcccgcgggggcggggccgaggcgaggagggggatgcgcggggcggggagtttacgggaagcgcagcctcggcggggcccggccggcggcgggg

SEQ ID NO: 113967 - DNA, 576 bp, Homo sapiens
  chr6:119671586-119672162
  hyper
tgcttaggacttttttcgtatgcgccctttcttcccccaaaaaacaaaaaaccgaaaaaacttgtatgtctctcccgcccacccgtactttcactattcatttacctcatagaagttggtcaaattttccattcgaagacgagttttatgctgcggtagcttcaagcaataagtcgaacactgtgttgaaattaagtcttggatccgactacttccagcgaagtgaggagttggtccaatagaaattattttccaaaatgtgttgtaattctcctgttgctccacaaataaggggttatcagagaggaaaacgttgactgacttcgcatttctgaaagctggtttgtagtcgccttatttcatccttacccttctctggaaatgtgacattagttctgtttgtgcttaagacaaaggaaacagctggcacctttcgggaaggtggctccagtacagttgtttccaggtgttaagctgtatgagaaagtagaaaagtaatcagaaatccttactagttttcatttaatcatttaattattaattttaaccatcattatttgtcgtctacttgttttg

SEQ ID NO: 113968 - DNA, 41 bp, Homo sapiens
  chr6:119762015-119762056
  hyper
gcccttgctcgctctcggcgcctcctcggccttggcgccca

SEQ ID NO: 113969 - DNA, 30 bp, Homo sapiens; identical to SEQ ID NO: 5096
  chr6:121506912-121506942
  hyper

SEQ ID NO: 113970 - DNA, 30 bp, Homo sapiens
  chr6:121655767-121655797
  hyper
gggaagcaggggtccgcgaggtctcgcctc

SEQ ID NO: 113971 - DNA, 215 bp, Homo sapiens
  chr6:121757803-121758018
  hyper
gtacttttccaaaaccgtctcctaaaacgggagctcctagaaagagcaggaaaaaaactttcttaaacagcgctttgggagctccccccgccaacacccgccgccccgcaccttccctctgctcgaacctgtaacagaattcagaactctggggcagttctttggagttggagctcctagggcaaagataacgctaatgcgttgtttaaaagggt

SEQ ID NO: 113972 - DNA, 151 bp, Homo sapiens
  chr6:121758224-121758375
  hyper
cgtgggccggacgggcgcggggcgcctcctgccatcttagcgtctgccgggatccttcccgcgccttcgctgcccgaaccagctcggtcttgggacgtttcccccaaatcctcacaagtcaaatcgaactcaggtccgagttcgtcactgc

SEQ ID NO: 113973 - DNA, 507 bp, Homo sapiens; identical to SEQ ID NO: 43429
  chr6:121758638-121759145
  hyper

SEQ ID NO: 113974 - DNA, 156 bp, Homo sapiens
  chr6:122720533-122720689
  hyper
aaatgaggaggcagcgcccccttctgctcccacccccttctgctcccacccccttcatgtcagcagcagccaatcgcttttctctgtcgtgcagtcggctcctgggattggccagggacgggacaggcgcggaaccactgcgcgcacaggcggagc

SEQ ID NO: 113975 - DNA, 30 bp, Homo sapiens
  chr6:122720914-122720944
  hyper
cagcaagctgtggacgcttgtggaggaaac

SEQ ID NO: 113976 - DNA, 144 bp, Homo sapiens
  chr6:122792744-122792888
  hyper
gggcaccacattcccgccgggctcacccagccccggctcggatcgccttctctttggtctctcacactagcaccccagaggccgcaaaaagcaccttacccagctcgccatggagcacagccccaggacgctccccatctccac

SEQ ID NO: 113977 - DNA, 183 bp, Homo sapiens
  chr6:122793170-122793353
  hyper
ccaaattaagaaaacggtgtgagcaaaacccacctttacctaccatgcacttgcatttgggcattagtagagaacagagctgaggtggtggttgacgttttgccctccttcatctgaggaacctctctgctttttaggggattgcttcctctttctcagtctttgtccgtcctaactccactt

SEQ ID NO: 113978 - DNA, 628 bp, Homo sapiens
  chr6:122931139-122931767
  hyper
aaccctgctcagggcgcgtacaaccggagggacagaaaacacgatgcgacgtcggaaagcaggaagggaattgaaattcccgcagtcacgtcacagaaatcttagcagaacctcatcatcgcccaagggaactgggagtggcgggcggggaggacgcgggttgtgtgacgatcaccgataattagttggtggttaacgcacaagtaggataaaagagctcgccccaggctgccagcagaaaaaagctaccgtggcacgtgccccggggagtgatgcggtggcccggtttgcacggagagcgggacaccgcctggggagccgcgctcgtagcctgggggcgggacgcggcggccgctccctccgcccccgagtagctgccaccgcctggctgcgccccagcccagtagctcagacgcggccgcatcccggtggactgtagaggcggcagcgagctagagcccgagtcgcagctccgggccgcagagcgctgggcgagcgcgagcgccagggcaccggcagggcaggcagctgcgcgcggctggtacgtacctggtggagcgggcgcgtgagtgggtgtccctatgcgaggagggaggagtgggacttgggaagtcgggggagactgacc

SEQ ID NO: 113979 - DNA, 492 bp, Homo sapiens
  chr6:122932013-122932505
  hyper
gtccttcggctctcgcgccagcaatgccaagtctttcccctgggcggtgcttaccaagccccgggtagtcacgagcggccgcggggttagcagagacccgagtactaacccgctcggccagcgtccggctgtgtggctttagccaagtcacctcacctcactggcctccgtccattctttggataaaatatggaggtgggtagaccgagtaaactcaagggtcgcccgtagctattggattttccctgctcctaggaccccggcaggccgcagggagggacacgagtgccaggtggtcgcgggctgagggagcggagggcctgtgttccggttggtgctgatgctagccccttggggaaattcctgaaggtgcatttcggagccaaatgaccctgccttgcagcaggtcccttccaagggagctgagagggccaggtcagaccggtcttcgtagagctccccggggaacgcagccaacggaactcgggtcct

SEQ ID NO: 113980 - DNA, 601 bp, Homo sapiens
  chr6:123110274-123110875
  hyper
aggccaaacactgacgctaagaaatacgagaacagatcatcgctaaacagcagctgaaggtcaggcgaactgactcgctgcggaatctgcctttgcacgtgatcagtcggacgtctacacccgcagccgtcttctgtctccgcctcaccctcaggcctgacggtccgagtggagctgcgggacagcccgaacctccaggtcagccccgcggccctccatggcgctggtgcgcgcactcgtctgctgcctgctgactgcctggcactgccgctccggcctcgggctgcccgtggcgcccgcaggcggcaggaatcctcctccggcgataggtgagttgtccgcgacccttctcttcccagccggcaaagagcgcggagcggcggcgcctgcgcacagcaggagaaagtgcgtgggggcagctgcccccggcagaggctcgggctagcggggcccctgacgcgtccggcgttgaccacggctggtgggcgcggggagggcgaccaagggactacagcgttagggcgtccagccgggaggccggggctgggcgggggaaatgccctcgccggtgggggcgctccaagggcgcgtcggccggatt

SEQ ID NO: 113981 - DNA, 818 bp, Homo sapiens
  chr6:123317072-123317890
  hyper
cgtctacaacagctactctccaggctgatctggggtcttgcacacaaagggcgaagagaggggcgtggggaggctggaaagcatggttgccccgcctggcccggcgacgcccgctcagcagcctgctgaggagtggggacgaagagcagcctaaacttagggctcgggatatttcgatgccacccaaattgccgtcctaccccaacgaggcagggaaaggagcggagcgcgcgcgcgagctgagtgagtgcttacgtcgcagcgagatctgtgctgggataattagagaggagttgggctgagccgagtcctctttcagcagcagcagccggagccgccgccgcagcccggtggggcaaccctgactcggaccgctcgggagagccccaggagaggccagcgccgcgcagcagccgccccgctgcgcccacctccccggctgctcccggagggctcacaaaggcggtggccgcccgagtggccttctccatccaggcgttcgcgtcctcctccccaccttctctcccgaaggcgaaaatggcagggccaggcgagaacctgggacagcggtggccctagccctgcgatcctcacccctcctgctaggagaggctgcgggctgcccgcggacgatgtggccgcggctgctcccgagcgcatcttcggcccgggtccccgccgccacccctcttctctgctccttccatcccgcccagaggagttgatgccgctgtcgccgccgccgccgctgctgaagccgcggctgatggatgccagggagtgccgcattgcttagcgaccccgcctctgggtttgct

SEQ ID NO: 113982 - DNA, 30 bp, Homo sapiens; identical to SEQ ID NO: 5103
  chr6:123366433-123366463
  hyper

SEQ ID NO: 113983 - DNA, 1403 bp, Homo sapiens
  chr6:124123916-124125319
  hyper
ctgcaggtagcagccgcttcacagctttcaggccggtgctcagcggaggctggtgcatctccactaggaatccacacccagctgggactgctgtgaagctgaagtaactgagtattaaactagtctccgactctttagtattttaagtgaaaacaaacaacagtttgaagcagcaacagcaactcattgcatccctattccctccggttgctaatttttcccaactccagcagcaactcggtccccttccccaagcagggtcggctccgtagctctccgcgctccgacccttcagatcctcgggagcccaggggagccaggtgctgggcggtgcgtccggtgccgccgcgccccttctcgccacctctggcctctccgccactcgggctttccggccgctctggatgcctcggttgcacccctgttccatgaccccagcttccttccctaaccctcctcttggtcccttctcccccgagcgcgcgcgcacacacacactcggttcgctcccgcggagtggctctgggagcacgaccgacttcagctcagcaaaccgcggtcatgccgcccagactcctcgccccgaggccccggtccccgccgccgccgctttcgcgccgctcctttccgcctagacaccgccgcctgcggccgcctgggcggcagcccctgcggtcctcaaagttggccccctgggagggggcggcagggagcaggatgaaggatttgttgtaggaggaggattcacacatctgggcgaagggaggggcagcgccgctgctgggacgcggcgcggacccgcatcattgcgcgcagcagccgctgcagcagccgccggggaccgcggagccgggacgcccccgctcggcccgcgccccgctccccgccccacccccgcccgccgggcccagcaacgcagggtgcctaggagccgcgggctgcgcagggaggcgggcagcggccctcgcgcgcttctgccgcccccggagccggcgcgcggcgagcgcagggcgagcgcgcgtcgggcggcggccgcgctggggggcgtgaggcgagcggcgcggagagcggcaggggcgaaacttcgcgggccagatgcccgagggcgcggcggcgctgccaggctgccgctgctgcccctgcgggccccgagcgcgcctccgcaggcggcactgcccgcggcgcggcgtgtgcaccgagcgagtgaaggtatgtgtggcgggcgcggctggagctgccgccgccgccgccgccgcgccagcaggtcctaatgcctgtcacttcccaggacgctggcagcagcagcagcccggagcccccgagccctcggcaggtttgcgtgtccttccccgcgatctgattggataaagtgggggctcgacggtggccgacgtgggacagtc

SEQ ID NO: 113984 - DNA, 635 bp, Homo sapiens
  chr6:125282854-125283489
  hyper
ttatttctctgaactcgacatcctaaatagccagcgtttactaattccagagctgagtgtagttttgtaggaagttctactgaatgcggagaccaaaggggagcctgcctgctctgagggttttgttgaggctgagtgtgaactccgggcgagaaagcgcatctcagctcttagatcacacccactcagggtgtgcgtgtgtgtgtgcgcgggtgcctgcgcgcgtgtgtacgtgtggggaggtgtgcgccaaaggggtggggtgaggggcggcgaggagggctgtaggtgaagcgcggggagagggaggtcgcccgctccggcctctcccccaggggccctgcggctggccagcgctccggctgcacctcctggtgcgcgccgcggcggcgccacaggcccctcgaccctttgaccaccgccctcgggccgcgcgtccggcagccgggaccggtgatggcgcgggactgacggccgtctcctcccagacccctctgtcccgcctggggctcgctggggctgcggcgccgccccgagctgcatgtggggcgggcgcgcccgagcccagagcgagcggccctcggcgcccccgaggcggtgccccgccgcgccagagtacgaggaggagcggcggg

SEQ ID NO: 113985 - DNA, 774 bp, Homo sapiens; identical to SEQ ID NO: 5105
  chr6:125283600-125284374
  hyper

SEQ ID NO: 113986 - DNA, 419 bp, Homo sapiens; identical to SEQ ID NO: 43442
  chr6:125420730-125421149
  hyper

SEQ ID NO: 113987 - DNA, 816 bp, Homo sapiens
  chr6:125474773-125475589
  hyper
cctgcaatatctctgcgttatgcccttatagcgccgggagtgggtgccttccgccggctgtacagagcgccggcaggtggcgcccagcggcgagcttgttccagcttggtttgggccaggtggactggaaggggcggaggtaaccagaagcggctagtggcggctgcctgcgtccccaaccccctccgcgcagcgctcgcgacacgcgtgccaggagtgggagcgagcggcggggccagctgcgttctgagcctgggcgcagctgccatctgctctgggaagcaccagggtgtccccgccgccctcagctcgaagtcagccaccatggaggcgcaggcacaaggtgagtggtcgccgatcgccccgagagtcaggtcctggggcgcgcataaaggctcttttcctgcaccacctaacttcgctctcggacagaacagattggtgccgtgttgcacatccagaactccactcccacccgcgcctttggtataatgcctgctgcccaaactcaggatttgctgtgggtctggggatcaataaagtgacaggggatccgtaagtggagaggcccctcctcaggaaatgcgcccgtggaatgctctaccctcttccgcagccagtcgcccctggccttcccaacctcgcggctgcccgaaggacctgttgtgccgggtccggaaagcgtgtttcgctccctttcccttgagggagtggggagggaatgtgactcttttcgcccagcgccgtggactcgcggcttgtggctcccaagttagggagtgagaggatcgcccgccgagggggtggctccgcagc

SEQ ID NO: 113988 - DNA, 134 bp, Homo sapiens
  chr6:125475739-125475873
  hyper
ggccgcccagctccctgctcccggggctgcctgctggaggagcctgcggtggcttcaggaagggcggcctcatatcttggggtcacacttggaacagggttggggaattccgatggaatcgttcaagaatgggg

SEQ ID NO: 113989 - DNA, 280 bp, Homo sapiens
  chr6:125622711-125622991
  hyper
tctccgggaactggcgcggctgcagtgcggacctcgcggcgccaggctctaggctcagactccgggccgccccagctggccagcctgtcccgccggctgcttcctccgtccaccgtcggcaacgcgcggccgcatccgcaggactggggcctttccggaattcggcgtggcggacgcggcgcaggaagggcaaagaccgccggccgagcggggaggccggaagctccgccgccccacagtcccgcccgctcggccgcggcctcccggcctggtgcccgct

SEQ ID NO: 113990 - DNA, 300 bp, Homo sapiens
  chr6:125684495-125684795
  hyper
tctgcggctgcactcgcttctccctcctgcagacattcttgctgctttccggtcccacgggacggctcccaggctcccgcctcacggcaagaaaaataaaggcctccccgcacagccagccagcttcgttcattcacgtcaccgacaaacactcctagcaggcgttgttaaacgttcagggagcgcccgggacctagccgaggccccctcctggctgtgccgcggggggatgcgcagcccctcgcaccgactgcgggaaggagagtgtgggtggccggcgcgcccggtccagctgccggc

SEQ ID NO: 113991 - DNA, 30 bp, Homo sapiens; identical to SEQ ID NO: 43445
  chr6:126010100-126010130
  hyper

SEQ ID NO: 113992 - DNA, 170 bp, Homo sapiens; identical to SEQ ID NO: 43446
  chr6:126067851-126068021
  hyper

SEQ ID NO: 113993 - DNA, 361 bp, Homo sapiens
  chr6:126068068-126068429
  hyper
cgttccctcattctttctcttttctttctctccacataacgcctcccctacacctccccacctccaatccactaccgtatttaagtcggcgggggcgctttaaagggtttcctgtgtctgtttctgtctctctgacccgaaacgcactttcggttatagacagacaaggcgctcaaccaagggacaggcaaatggaataaacagctgaggagaataaacgacctaatggggaaatctcgtgctgcctaattgctattgtgttttgcagataaataagcatattattttgatagcgttcaaaaccctgagctctcttgccctatgcattcttaacagacttctatggcgcttactatatacc

SEQ ID NO: 113994 - DNA, 1399 bp, Homo sapiens
  chr6:126068707-126070106
  hyper
aggttttgcctcaggcgtttggacgcgcccgctaattgcccgtgtggcaaacatgagttgcacctgcaggcatttgaattcagaaaaacgtgcagccctcacggaaagttgtgacggtcgagcttgagcctggcgggccgcggagcgttcacctgcggccgggaggtactggcccagggcgctcggggcgggaggtggcaggcgaccggcgcgcgtcaggctcgtcacccgctggattgcggggccggagcggggacggggtctgggtcctggcccgccctcgtgcagccgatcggaggccccgaaccccgcgccgacccagccatccgccctgaggccgacaggggagctggggttcaccgacccccgcggccccgccgtcgggcgcggaccccatccagccccacctggccccgccgagtgtgtgctttgcctggggttaagtttcagaagccaagatggaacgattcgggtttctattcacaaggttattgaaggcatggcggtggggaccgcgcaaaagagatgagagtgtggggggaaaggggtttctgttctaataagggcttagcacgctggccgcaggtcctccgcgccgaccgggctccttcccgctctcccccgggccaaaccccgccagggtcccgtctttcccagtcgcgtcctttcctcttctccccgccccgcgccgggcttgtgtggacagagaacggagtgtcaaagggacgccctgggccgatccccaggaagctatgaatccctccgtgacggaggggtctggggatcgatagacggccctttctcagaggctctctccactactgaccaagcggccctgccaacgtgtggtttccggctggaccccaacccagccgccgccagtctcccggcgcccctggctgggtctcgctcagtccctgccctcgcagacgcacagcggggtggccagttcaaaagtcctacataacttggagagaaccagcagctagaaaacctgttttaaacacacagcttgagttttatacaacccacgttgtccaaggcacgaactgttggacacgaattcatactttagaaaccaaatctaatttccaagcgccaatcttcacctcccggactctaactctgcggctgcgagtgcatacaccagggggactggaggagactggaggcaattatctggataatccaagcccgaaaaactcgaacttgaaaatatacgattatgtcctgaaatgcccgcgtcattgatctagtctttcctaccatcagagctgacacagctccagtccacgggcttctccgcggggtctaggatccacagtccctgggggctgaagacccaatggaagtaactgatggatcgcaaattggaaatcgtaacgtggccgacagacct

SEQ ID NO: 113995 - DNA, 351 bp, Homo sapiens; identical to SEQ ID NO: 43450
  chr6:126071131-126071482
  hyper

SEQ ID NO: 113996 - DNA, 30 bp, Homo sapiens
  chr6:126102057-126102087
  hyper
atttatttggcacacgcaggctaacgaggc

SEQ ID NO: 113997 - DNA, 30 bp, Homo sapiens
  chr6:126112110-126112140
  hyper
gatgcgctccccggcgcccagcagcagagg

SEQ ID NO: 113998 - DNA, 30 bp, Homo sapiens
  chr6:126112391-126112421
  hyper
tgagctcgggaggccgagcgggggcgaagg

SEQ ID NO: 113999 - DNA, 30 bp, Homo sapiens; identical to SEQ ID NO: 43451
  chr6:126240224-126240254
  hyper

SEQ ID NO: 114000 - DNA, 30 bp, Homo sapiens
  chr6:126277689-126277719
  hyper
tttttttaaaaaaacggcagcgtaatacaa

SEQ ID NO: 114001 - DNA, 30 bp, Homo sapiens
  chr6:126278138-126278168
  hyper
gtgaaccgcagcgccggcctggcccccgac

SEQ ID NO: 114002 - DNA, 276 bp, Homo sapiens
  chr6:126307440-126307716
  hyper
tcctgaaagccacgcgtccccgctcaccagctaccagcgctgggagacccctaaccaccaggcattcacaggtgaggaagcccctcccacagcggccggagtttcggactcggagcgcgagaaacgtcgggatagcgcctgcctcgcagagcttccgcttccggcccttcaggctctgtctctgtggagactgggctttgggagggagaaagagggacctagcgcgggccgcgcaggcgcacggtgggcagctgcaatggcgctgtcgtgtaccct

SEQ ID NO: 114003 - DNA, 263 bp, Homo sapiens
  chr6:126661121-126661384
  hyper
tgatgaaaggaggacgcaggctctcaatgacgtcaggtattcccgggacccgcccaccgtgggcgttttccacctacaggcaggcgtctccgggggcggggcttgctcagggttaacgtcactactgagcgccgggcgcgttccgttggcggcggattcgaacgttcggactgaggtttttctgcctgaagaagcgtcatacggaccggattgttttcgctggcccagtgtccccggagcttgtgtgcgatacagagagcacc

SEQ ID NO: 114004 - DNA, 17 bp, Homo sapiens
  chr6:127439255-127439272
  hyper
agggtagttgcgcgccg

SEQ ID NO: 114005 - DNA, 257 bp, Homo sapiens
  chr6:127439321-127439578
  hyper
cggccaccgacagccgggtgcgcctagcttgaggccgcggagaggagccgaactgggatgggtggggggtcttcggcctcaacactgcctgccagccccagtgcgcccaagtctccccgccagagctgcccttctggaggggctcttcgcacgcactgctttccccattcttctggctggaattctccggccgtcactgcagtgtccagagatgctgcgctgtagacccgggaccccttaggcgcctcttcccgtcc

SEQ ID NO: 114006 - DNA, 1138 bp, Homo sapiens
  chr6:127439824-127440962
  hyper
tctcctgctcgcgcacgccagaagcagctcggggtctctccgccgccccttggccatggccgctgtgccgacggcgcccgctcccctgcgctccaggggcccccgccgctgcagccgcagccgccgcagcttctgagcccaaggggccgccgctgcagccgccgccgccgccgctcgcccgcccggatcccgcctgcggcagttgccgcacaacatgctacctgcggccgccccggcggctcctggaaccccggttcgcggcgatgccagccaccccagcgaagccgccgcagttcagtgcttggataatttgaaagtacaatagttggtttccctgtccacccgccccacttcgcttgccatcacagcacgcctatcggatgtgagaggagaagtcccgctgctcgggcactgtctatatacgcctaacacctacatatattttaaaaacattaaatataattaacaatcaaaagaaagaggagaaaggaagggaagcattactgggttactatgcacttgcgactgatttcttggctttttatcattttgaactttatggaatacatcggcagccaaaacgcctcccggggaaggcgccagcgaagaagtaagtgcagggttttttacgcgtttgctccctcccgccgcgttcacctgtcgggtcgctttgcctgtccggagccggctcccaactgcagcggtcctcccgccctgcgcctcgcagaggagatgcaggttcgggctttgggggtatggacggcgtctttcacccttgcctctcggcgcccctgccttccgcagcatcctagccggtgcgaggggcgggcggacgcggcgctaaggtggctcccgccccatggtaacttcaggttcgcgggaaagttcggtcctgggttagactcgcacccgggatttgtgctttccttttgaggatcggacaggggcacccagccgaaggcacttgggactcccagacgcaggatgcctctgaccgctgagtaaatgacaagggaggcgcggccgcggtacccgctcacctagcgcaaccgcctcgcgcggggagacctcggctgggcccttaggctggactccggtagccgaacgcccgctacccggccaggaagccagggagcga

SEQ ID NO: 114007 - DNA, 689 bp, Homo sapiens; identical to SEQ ID NO: 5109
  chr6:127441030-127441719
  hyper

SEQ ID NO: 114008 - DNA, 92 bp, Homo sapiens
  chr6:127441978-127442070
  hyper
ttattcttggcctccgaatggtgtgtactctggtaactccccacccactctttcattccggcccggacgcggaaggggaggcctggggttca

SEQ ID NO: 114009 - DNA, 661 bp, Homo sapiens
  chr6:127442089-127442750
  hyper
cggtccccgcctcctctcctcccagggtctggcctggggaattgagtctcagggtcagtgggcatagggagcccgggctggagcgcaacccactctgctttccatccgctcttccagcccgtgcccattgggcgtcccagagcacgctctctcctttacccccaccgaggacccccgggctgggagccacacacttgtcaaggagggacagggtactgagtgtcagaggcgtctcgctttgcagttttggggcccctgattctgaaggaagacacaggaaagaaagcttgtagtccttttgtgcccacctcccccagcgaggaccacggcgcaggaagctttccccgggcgctgcctcagggagctgtgggatgatgcacctctaggttgggccgagaggagtcaaaaggcaaactgcttttcgacctgccttaatcatctcaaggccaagtcaaaggagacctctgtttgtgttgaggggatgaaagaaggaatagtggaactgggttgcaattccaatttttctgtgggagtgggactgggagacagcacccacagcgatgctcttgctccttcgcacttgagtctgcgtttgcggcttggtttgctggtgcaatcctggtagaggggcgaccccttgcgtcctcggaggagacagact

SEQ ID NO: 114010 - DNA, 54 bp, Homo sapiens
  chr6:127468329-127468383
  hyper
aggatgctggtcaaccgaatgacctctctgtaactaacccgtgcacccctgtgg

SEQ ID NO: 114011 - DNA, 210 bp, Homo sapiens
  chr6:127587639-127587849
  hyper
gaaactcagctaggcgccccagagcttcctcaggatagcaaagctggatttttgagcagcaccacctgctggtcctacacacgttttacttcctccaccccaaatctctttctgttggaactgcactctttcagagcctctgggccctaatacaaagcaagcacactctaaagaagccagaagaatgcaagcagcgaagtcgccgctccc

SEQ ID NO: 114012 - DNA, 724 bp, Homo sapiens; identical to SEQ ID NO: 5110
  chr6:127664171-127664895
  hyper

SEQ ID NO: 114013 - DNA, 1772 bp, Homo sapiens
  chr6:127836029-127837801
  hyper
ggagccttttgcgctcggctttgcggaggcggtactgcaggatccggcagtttttgttggctctctccaactcgtggcgcatttcctgcagttgacaggcatcctcctcgaagaaagtgtccctcatctcgtccatctcggttctcagctcatcgatctcgttctgaggcggtgacaggccgcgtgtcaaaatcaaactcgcttccagcccttccgacacacaccgtacacaccccattccaattccaaattctcagctttaattgccctctctctccacgagacaggagtgacaaggagctgagtacagaagaggaaactgggggaaaaaggcccactttaggccctctctcgttctcttactctacctctctccaggaagaagtgtgacaaaccattataattagagaaacggaggcccagatttgaatttaaatgaaaacctcgcgttactgagagcagattcaaattccggcaaggcctaggaaaccccctccctcctttcttgttctcctccctcttcaaggctccctaacaggttagcagcctctgatccctgccggtacacgccctaatcctcccaggcccactcttcccatcccccagccgggtccccccaccctcctcaccttgagagtctcgttttcctctcgcagcttctccatctcctcttgcatttcttcctgctcttggagctgctgcgggtgcggctgcgacgaagggggcgctgccgcctgcatgcccccgccgctcgcgctgccctctgcgctctgctgggggccctccgccgccgccgccattggggaggcggaggcgacggccagggtctcgcaaacggcaggggggccagacaccggggagctgcggctactgctgccgccgccgttcttagcgtgcatctgagccgcggccgccgccgctgccgcccgctccttcttgagatggaactggatgagctcagactgcagacatccttctttccagtagctccctccaccaccgctgccgccccccgcaacgccgcttccggagtttctgctgccggttcctggggttttgcccgcagaagaggaggatggagaaggggaggccccctccccgccgctgccgcccctctgctgagcgcgtacgcctttccctcgccagcccctgggcggcggcggctgcggagcgcccccctccctttccccggagccgccgccggctcctcctccttccccgccccctcctcccccttctccgagcggagggggttccccgagtttcgagggcacggactctagctcccgaggcggctcctcgggcggtccgggcctcctgccgcccaaagcggccagggtcgcggcgggggccgcttcagcaccagccacaggctggacagctcccggagcggcccctttgggcgccaggggcgtcgccttctcggccccacctccgcctcctcggatgctggcgggcggccccgtgcggctcccggtcttgttaccctgctgttgctgctgctgcagctgctgctgccgaacagaattgagtttagtgccggcccccactggggaccgggtggccgcgattgtctgtcgcagcgaactgtccctcggtctagcgggtgactgagctcgctgctgctttctgctgctgccctccgggtgcagacgagcctcagtggctgcagcggcgggagaagctgctgctgtggcaggggcagcgcccccgattggtggctgactcatggctatgaacctaccagatgcgatttggaagagcccattact

SEQ ID NO: 114014 - DNA, 105 bp, Homo sapiens
  chr6:127839715-127839820
  hyper
ttgctcacttctcagcagaggcgaggtttccaagtagctgaacaaatcaacagcactttccttctgatattccggggatctcagggtttattattgtgcctttct

SEQ ID NO: 114015 - DNA, 66 bp, Homo sapiens
  chr6:127839929-127839995
  hyper
cggtaacgtcaagattcagctgcccccagagcgggtgacttcccggcggtccgcggctgggctgga

SEQ ID NO: 114016 - DNA, 462 bp, Homo sapiens
  chr6:127840308-127840770
  hyper
agaggatcccaaaaccgctcgaacacggatgcactggtttcctgcaaagctttgtcctgggttcggtcattctccatcaattatttacttgagcttcttttccaaggaggcggactagaacagccttccgggcgtgactaacatctcctgatgcagctggctggcggctgctgggagttctctttgttcactcactttaattctcagtcgagctctacacgcggtgctccctccccacccccagcccgggcggagtcatcagatgtcgtttccacgaatagataatggttgccatgatgggacccaccgtcccacagacaaagggttcttgcgaagccacgactaatttagtgcaaaccgaaataaatatcggcccacagagatcctttacagaacggtttgccttcagtacgttttcctgttttctactgagtgccggtttctaccgtgaaaatgagtaat

SEQ ID NO: 114017 - DNA, 2313 bp, Homo sapiens; identical to SEQ ID NO: 43463
  chr6:128840107-128842420
  hyper

SEQ ID NO: 114018 - DNA, 70 bp, Homo sapiens
  chr6:129204233-129204303
  hyper
cccaccctcaggcggcggcccggccaaagccagagggggctgtctcctcctcttccccagcagctgctgc

SEQ ID NO: 114019 - DNA, 251 bp, Homo sapiens
  chr6:129204360-129204611
  hyper
cgagaagtggatccggtcgcggccactacgatgccgggagccgccggggtcctcctccttctgctgctctccggaggcctcgggggcgtacaggcgcagcggccgcagcagcagcggcagtcacaggcacatcagcaaagaggtacagtcgaggcatgggcttgggttgcatcctttgccgggaccgagattcctcacttcttccactcttccgagagttgctgtctgtggactgccgtcttgcttcgcct

SEQ ID NO: 114020 - DNA, 30 bp, Homo sapiens; identical to SEQ ID NO: 43465
  chr6:130031489-130031519
  hyper

SEQ ID NO: 114021 - DNA, 467 bp, Homo sapiens
  chr6:130088305-130088772
  hyper
actataaccatcttccgcaagtggagagcagggaacgccagggtcccaagaagtgacgaaaagcgataattagatctcctgcaagaatcttccctaagcactttcttccgtgacacacctactttgtggcatctacgcgctcttcacggctaaccacaatcctgtcatttcggcttattcatccagcagctgccggaaggaccgggctgaagcgtggccacgaggagggggatacccgtgcgagcgctgagccggcagagcggctgcagcccacgggctcctcggacccccgctgctgcgccgctgcagctgaccgtgcgaaagccgcatgttattgggtagagatcagctttccaggaacaggcatcagctgtgcacgagcccggcagcatctcgagacaagtgctagccggtgttggtgcaaaccaaagcttgctatgtgctcagaaagcggccccagctactga

SEQ ID NO: 114022 - DNA, 561 bp, Homo sapiens
  chr6:130339513-130340074
  hyper
ctctgaggcggtgaccgggctattgaaaagatgcacctgaaacaggatctgcgggcagctgcatttgccacccggctttattgctgctttccagcggcgaaggcgcagcagcagtaacagggaagccagagcgagcctccccggcagcggcggcggcggcggcggcaccggcaccagcgcagtttcccctctccccagccctgactctacgcgcacatgcgcattgcgcccgcagccctggaccatttgtcaggactactcgtgagacggagaaaaaaaaaagagaaaatttgggggtaagaagcggttgatcggatctaatctctaattaatctgaagatttgtccgtgcaaaagccattcatttatttttctgggtgaggatgaaagttaagagccctatagagggaaggaagcgcaccctcgtcttgtgaaacagatcaggggaggggagggacagaaggggtttctcccccacttctctgcgcctctgggaaagaggagaaaacttaatcccggggaaaaaagtgggcaagtgactcggaaacggctggagggggag

SEQ ID NO: 114023 - DNA, 30 bp, Homo sapiens
  chr6:130341180-130341210
  hyper
gggtgggggcggcgcggggctgcttttcct

SEQ ID NO: 114024 - DNA, 56 bp, Homo sapiens
  chr6:130342005-130342061
  hyper
ccgcttctccacctcggggccaccgccagaaaaatgcattcgagatcattcagagt

SEQ ID NO: 114025 - DNA, 31 bp, Homo sapiens; identical to SEQ ID NO: 5118
  chr6:130342613-130342644
  hyper

SEQ ID NO: 114026 - DNA, 30 bp, Homo sapiens; identical to SEQ ID NO: 43469
  chr6:130349103-130349133
  hyper

SEQ ID NO: 114027 - DNA, 821 bp, Homo sapiens; identical to SEQ ID NO: 5119
  chr6:130686371-130687192
  hyper

SEQ ID NO: 114028 - DNA, 525 bp, Homo sapiens; identical to SEQ ID NO: 43471
  chr6:130687224-130687749
  hyper

SEQ ID NO: 114029 - DNA, 381 bp, Homo sapiens
  chr6:131383360-131383741
  hyper
ctcaggggaggtgagcgatctagagaagcataactgatgtcccaccacagacctcaggctgctgggggcagcgtctgcgcctggggatggcgtccccagacgccgacttcaaccctgtcgcgctcctttaggttctcctcgcccttccccgctgctcacctaaaaatgctcccaaccctcggcccccaggcgcaggaggagaaaaaacaagccatctgtggtgagatggcctgggtgtgggaattgtaaggatcggagcacgaaacacgcgtccctctccgcagctcccagacggcgcaggcggcagctgggggcgcggacgcgagcctacagcgggcccgacccgcaccgcgcgtggggctggcgcgccgccctcgcccg

SEQ ID NO: 114030 - DNA, 30 bp, Homo sapiens; identical to SEQ ID NO: 5122
  chr6:131456350-131456380
  hyper

SEQ ID NO: 114031 - DNA, 30 bp, Homo sapiens
  chr6:131457131-131457161
  hyper
acgcattgtgggtccgacaggaggcggggg

SEQ ID NO: 114032 - DNA, 237 bp, Homo sapiens
  chr6:131602721-131602958
  hyper
gaggctggtggagaacgcggtgctcaaggctgtccagcagtatctggaggaaacacagaataaaaacaagccgggggaggggagctctgtgaaaaccgaagcagctgatcagaatggcaatgacaatgagaacaacaggaaatgagcccggaacgcaggcccccatgtctctgtgcaaagcctccctgcttccctctgctgagtctagggactgacttgcagcgtgctgtttaagtt

SEQ ID NO: 114033 - DNA, 30 bp, Homo sapiens
  chr6:131949190-131949220
  hyper
tgtactatcacccccgcctttccagggtgc

SEQ ID NO: 114034 - DNA, 499 bp, Homo sapiens
  chr6:132128560-132129059
  hyper
gtacatgtgaacccacgtattttaagtggacgatttctctctcagagtaccgtaggtagtgggggacggggcgcagagggggagaaacagaaagtcgccttcctccatggttcatttgcatttccatccagaaactcacaggtcgaccccaagactccactctctcccgcctttgagaagccggaccggcatcggcggctgcatccttctcctcctccccgctctattttggggccccatgatctcatgccctctgcagaccacacgctgcaattccagcccagcccgcgccgcgaggccacgcagggcgattcctgcaagtgtcgggagggtggccggggcgcggggaggggacggcttggggggaagtttaagacacgcccacgtaagggacccaaaataaccgacacacagagtgcccgaaatcagacaggaagccaaataatccggggcgttgagtcgctttgccctgactgcgagagccgggtgtagggcgggg

SEQ ID NO: 114035 - DNA, 197 bp, Homo sapiens
  chr6:132129408-132129605
  hyper
ctcgctggtaggtccgcggccaggccccggcgcccgggagggctgggagtacggggagggcggcgccgagctcctgcgctctcagcgcagtcagcaccgggcaccggagagaggcatggtccgggagtgcttcttcgcccgcgcgctctcctccgcagcctttgcaagtgccctacacagccgcccctgccaggtac

SEQ ID NO: 114036 - DNA, 210 bp, Homo sapiens; identical to SEQ ID NO: 5123
  chr6:132271776-132271986
  hyper

SEQ ID NO: 114037 - DNA, 94 bp, Homo sapiens; identical to SEQ ID NO: 43477
  chr6:132272530-132272624
  hyper

SEQ ID NO: 114038 - DNA, 307 bp, Homo sapiens
  chr6:132721834-132722141
  hyper
gctcccaaatagccacgatttgggaagttctgagatttccactcctagacagcaagtccgcgacgtactaaagcgctctgtcccttccctcctctgagagctgtcccattaggtccccaaagccaaagcctaggtccttctcccttcccatcagggatgaagcggggtgtattgcaggtgtgtaggcgggggggcgtctattaagtggggcgctggggacaggaaagtgttcaaagaaggaaacctgcctggggtcatccgtgctcggcttccctaccgcgcgccttctggggctccgggagagcag

SEQ ID NO: 114039 - DNA, 757 bp, Homo sapiens
  chr6:132722157-132722914
  hyper
cgagagtgagcgtggccgggggcgcggggctgcgccaggtgagagagagctgcgggccccggggacgacccgcacctgcgccctctctggggtccggacgggaccgggctcggccgggcgggctccgggaggagacgcgcttacctggaggtagggccgcccgtgggccaccccgcccacgacgatgtcggcggacgccatggccccggtgggcgagaagccgaagcccacgtagcctgcagtgcgcacctggaggcggaaggcgatctggctgccccgctggctccagcccagccagtacttgccctccgagtccaggagggtccggtgcggataggttcggcccgagccccccgccgccgtcccggggagcagcccccacagcaggagcagcggccagcagcacatcctcgggcgcctcctgcccgccggtaccggcctccagccgctggggagtgaggagcagaacgaggagcggcagcggcggcgagcgggagcccagggaccgcccctcgggccggccgcgcgcccgcccgggaggggcaggacccgctctccccgccccgggccgcctgcagggcgcgccgcgtcccgtccggtcccgtcccgttccgtcccgtcgggtcccagccccgccaactctcaccctgcccggcccttccagcggatccacttgcagcccccgacccctgacttggtccccgaggtcggggctcggtgggaaggaaagcgaggggcttcccggaaagaaagggag

SEQ ID NO: 114040 - DNA, 263 bp, Homo sapiens
  chr6:132834325-132834588
  hyper
acagcggccctcaccgcccctccggttccaagctaaggaatgggggtatcagcaaaattgcaagggagctgttctttgaagcctgacgtagagatggtgaacgcctcttagcctgcgtgcaaaaaaggacagaatggaggacagttgtcttctttatctggtgaagccagccttcttgcacgcgggtcttcaccccgccccattagctcttgcctgtcttgtttgctaacctttaactgcagtagatcgcgttgacagctcta

SEQ ID NO: 114041 - DNA, 30 bp, Homo sapiens
  chr6:133119438-133119468
  hyper
cttttccaatctctcggaaacagatcaagc

SEQ ID NO: 114042 - DNA, 31 bp, Homo sapiens; identical to SEQ ID NO: 5125
  chr6:133134687-133134718
  hyper

SEQ ID NO: 114043 - DNA, 30 bp, Homo sapiens; identical to SEQ ID NO: 5126
  chr6:133135672-133135702
  hyper

SEQ ID NO: 114044 - DNA, 30 bp, Homo sapiens; identical to SEQ ID NO: 43482
  chr6:133136324-133136354
  hyper

SEQ ID NO: 114045 - DNA, 194 bp, Homo sapiens; identical to SEQ ID NO: 43483
  chr6:133146627-133146821
  hyper

SEQ ID NO: 114046 - DNA, 301 bp, Homo sapiens; identical to SEQ ID NO: 5127
  chr6:133561966-133562267
  hyper

SEQ ID NO: 114047 - DNA, 88 bp, Homo sapiens; identical to SEQ ID NO: 5128
  chr6:133562348-133562436
  hyper

SEQ ID NO: 114048 - DNA, 420 bp, Homo sapiens; identical to SEQ ID NO: 5129
  chr6:133562674-133563094
  hyper

SEQ ID NO: 114049 - DNA, 1039 bp, Homo sapiens
  chr6:133563157-133564196
  hyper
cgagcctgcctgtcccttccggggtcggcgcggagcctgcgcgtaacggagttcatccagcagtccagcgcgcggcttctacctgcaccccgcctccacctggcagaggcgcgagcatcggggtctcccccacatctttcttatgacgtgtattactttctgatgaccccctagatggtccaggcgcgaggatgctgacccagagtccttcggagggtcacaggcgcctgggctttcccggtgccgggtgcgtgtgtactttaaaggctcgcgttctaatctccaggcactgatcgggcttttcaactgcggcgatcccactttaatagtttttatgtggcgtggactgaatgtctcctgcagtttgccagggtcggtgaaattagaggcgccttgtcagagcagtcgcgttcattggctcgagtagcgggtgccatggaaggcttataacttctccaaaggaagggacctggctgggtagagcaggtttttctctccttccaagcctgctgggtctggggaggcagtggaacttgaaatggctcggatttttagcgtggtgaagcgaggtttggaagtagacgtgtgtgtgcttgttttattctgcgccgcacagcaacccgaactttcgtttggtagcacttgaaagagttttctccctttgtttgcgagattctgaacagctcggagcgattagggaatttgcggaccgagtccggtggcagagctggggcgaaagcagagagcgcaatttaatttttgtcatctcttccctgcttgggaggatagtgtttcccttcaccaccacccctctttctccttcctatgaagacaacggatttgcgcctggggtgagagtgtgtgcgggagagtggtgtggagactgtcctctctcaccgcgtctcctgcgcctctccccgccatcccgagcgggcctagagagtcattcatgaatcttaacctgagggcaggggaggaaggtgcaggtccctctgccctttctgccaaggtgcagaatagcgcccgggcgtgtgttttg

SEQ ID NO: 114050 - DNA, 59 bp, Homo sapiens
  chr6:133890488-133890547
  hyper
tttgttactgtggccggttcctggctgggaacaggctccttttcggcactacctacttg

SEQ ID NO: 114051 - DNA, 160 bp, Homo sapiens
  chr6:134175361-134175521
  hyper
tcggctctattaaaacggttccatatcttccagccccgcactcatgattcacagtaatgcctagtgttagcactcactaatcgacaatttgatggggaaggtgaggaggaaaacgaccctggaagcagagtgctggtttcacacccgctgggtatctgtt

SEQ ID NO: 114052 - DNA, 427 bp, Homo sapiens; identical to SEQ ID NO: 43489
  chr6:134175885-134176312
  hyper

SEQ ID NO: 114053 - DNA, 139 bp, Homo sapiens; identical to SEQ ID NO: 43490
  chr6:134176376-134176515
  hyper

SEQ ID NO: 114054 - DNA, 461 bp, Homo sapiens
  chr6:134210557-134211018
  hyper
atgtggaggaccttcaagaggtggagatgttggaatgtgacgggttgaaaatggattcgaacaaggaatttgtgacttccaacgagagcaccgaggagagctccaactgcgagaatgggtctccccagaagggccgcggcggcctgggcaagaggaggaaggcgcccaccaagaagagccccctgagcggggtcagccaggaggggaagcaggtccagcgcaacgccgccaacgcgcgagagcgggcccgcatgcgagtgctgagcaaggccttctccagactcaagaccaccctgccctgggtgccccccgacaccaagctctccaagctggacacgctcaggctggcgtccagctacatcgcccacttgaggcagatcctggctaacgacaaatacgagaacgggtacattcacccggtcaacctggtgagtgctcccggggctgcagctgcagtccag

SEQ ID NO: 114055 - DNA, 263 bp, Homo sapiens; identical to SEQ ID NO: 43492
  chr6:134211111-134211374
  hyper

SEQ ID NO: 114056 - DNA, 825 bp, Homo sapiens
  chr6:134212293-134213118
  hyper
tctagaagctgtagtcaaagccggtgtttgcgatggaagaaacgaaagtcggactagggaaatagatggtgatgaaaggcgatgaaagcgacagggccctgaaacccgaccaccgcctcagaaggaggccaggagggcgcttcgccccgaactcggtgcccagtaggcacaaggtcgttctgggcttcccggctcagactgccaaagcgtctgcctccaggcagtgccacagcaccacccactctcccactctcggcttgcccggggcttcctgcattgagtctcacaaggaacccagtataagcccttttggctctcattctaaaagaccaccaccagcaccaccaccacctcgagctgtgacttggcgccaaagcagctatttgctttatgcagccgcagggtgcgctaggaccgggagtaaattgcagagataaccggtctctccagagcaccgcctgcccccaccgccccccttcctttcatctcaggccccgagtccaccccaccccctccgccacggccacttacctcctccaccctcttctttcccgcagacgtggccctttatggtggccgggaaacccgagagtgacctgaaagaagtggtgaccgcgagccgcttatgtggaaccaccgcgtcctgaccttggaggtgcgagtctgggaaaggcgcgctcccggggggagcgggccccgggaaggcgacccctgccctcagtgctctctgtctctgcttccccctcgcaatgctcctctctctgtcccaccccgcgagaacactttacaacgacgaggagattcgtttccaaaccagaggagatc

SEQ ID NO: 114057 - DNA, 26 bp, Homo sapiens
  chr6:134213961-134213987
  hyper
ggtgcgtttagctcccgccacgactt

SEQ ID NO: 114058 - DNA, 347 bp, Homo sapiens; identical to SEQ ID NO: 43495
  chr6:134214076-134214423
  hyper

SEQ ID NO: 114059 - DNA, 30 bp, Homo sapiens
  chr6:134214778-134214808
  hyper
ccaatctcccactcacgtttttacaaaacg

SEQ ID NO: 114060 - DNA, 777 bp, Homo sapiens
  chr6:134216761-134217538
  hyper
aagccagacttctgttggctccgttgcgacctctaagggagagagaaatctgggctccctggaatcacgtcccctgcaagagagtcccttggtccattctcgggccagaaaaaaatctccccatcactccagtgcgagtggttggccttgctctggtccggcactgtgtgcgtcgggaagtcggcctggagttggggttgcagggacgccacggctggtggcgagcgcagcaggagtgcctggagagctcgcggccagcggggagctgagcgcaaaggcggaggagggaagcagcctctgaggcttccccgcctgggagaagagtttttggaagtaggcgagacggggaaggagttctgagcctcagtccgcacagcctcctttccgtccctttccgggtgcaatctccgggccagcgggtgcgtgtcccgctgcagatccgctggctcagggatgaggcgcagggcaggttctgggttacgtccccacaccgcggggaacccaggtgcgagcggggcgcagctggcctgccaacatcctttcttagctttgcatccttcgctccaaatgctggctctgcccttggaaactcgctggttgccagcagcattcttcagagtccgccgggcttccttcaggcgtttggaggaacacgcctttgatctttgggtctgggcaggctgcgcgggcccaccctccttccagttcaccgaaagattaaccacctccaaggactatttaagagcccctctcagggccgaacggggagaaagggtg

SEQ ID NO: 114061 - DNA, 30 bp, Homo sapiens
  chr6:134273549-134273579
  hyper
ctggatccgcctctcggttcccgagggaca

SEQ ID NO: 114062 - DNA, 30 bp, Homo sapiens
  chr6:134373624-134373654
  hyper
gtagaagttacagccgcttccccgccacca

SEQ ID NO: 114063 - DNA, 150 bp, Homo sapiens
  chr6:134496206-134496356
  hyper
cggggacggcctggcgcagggccgttatcagtctccatcggctcctggggcaggagagagagaacgcgccggcggagggcgcggggagggccggagagcccggggtagttttccacctctctcatttattccgccgccggagaaagccgg

SEQ ID NO: 114064 - DNA, 411 bp, Homo sapiens; identical to SEQ ID NO: 43497
  chr6:134499448-134499859
  hyper

SEQ ID NO: 114065 - DNA, 451 bp, Homo sapiens
  chr6:134638726-134639177
  hyper
gctcagttcttcactcgcgcattctgcagcaccagctactgcagcaacctctccccactttcagttgccaccgacagcggcttttctccttccatcattgctccgaaacatatgcatcaccgctgcaggaccctgggggccggacggtgggatacggccaatctccggggagatgctgtggctcttaccgagcgggagaagggtacgcctccccgcccccagctacctggctgctcttccgcggccggcgcggggagcgagtcgctcttctccaggtgatgcgctcctggaggcggcttgagagaggagagttgtttttgattgtgcaagttccagtgggagctgtagttaagcagctgagagaaggagtaagaaagagcagaagccagagggagggagggagaacagcgccagaaaggcagagggagcgagaaggcgaggctggaagaag

SEQ ID NO: 114066 - DNA, 30 bp, Homo sapiens; identical to SEQ ID NO: 43499
  chr6:135375885-135375915
  hyper

SEQ ID NO: 114067 - DNA, 30 bp, Homo sapiens
  chr6:135376122-135376152
  hyper
gggatggggaaatccgccgcctagaattga

SEQ ID NO: 114068 - DNA, 167 bp, Homo sapiens
  chr6:135501659-135501826
  hyper
gggtgggtggggcccgggtgtgtgctggggtgagagtgaaggacatgtgacaatacgacggtggcggctgcaggatccgggaggggagtgaaagctccgctggggcgctccattagtgagcggtgatggttgccgcccacttgtattgaagcgtcctttgtcactaa

SEQ ID NO: 114069 - DNA, 446 bp, Homo sapiens
  chr6:135502363-135502809
  hyper
gcgcactgcaggggcgccagatttggcgggagggggagtgtccaaagctctttgtttgatggcatctctgtttacagagtttacactttaatatcaacctgtttcctcctcctccttctcctcctcctccgtgacctcctcctcctctttctcctgagaaacttcgccccagcggtgcggagcgccgctgcgcagccggggagggacgcaggcaggcggcgggcagcgggaggcggcagcccggtgcggtccccgcggctctcggcggagccccgcgcccgccgcgccatggcccgaagaccccggcacaggtaacggggagccgggcgggcggccgagggcgggggcgcgcgggggcgcgcggggcgccaggctcccgggagcaggtgggaattcgttccgggatcatctgaggggctgtcagaccctccgaggacctggagccc

SEQ ID NO: 114070 - DNA, 30 bp, Homo sapiens
  chr6:135503188-135503218
  hyper
tgtcagctgacaggcggctgaaaagcagat

SEQ ID NO: 114071 - DNA, 45 bp, Homo sapiens; identical to SEQ ID NO: 5139
  chr6:135503607-135503652
  hyper

SEQ ID NO: 114072 - DNA, 215 bp, Homo sapiens
  chr6:135503874-135504089
  hyper
tgttgttgagcctgcgggcgctggtccccgcgcggcgctgggaagttgcaaagagcgtgggtggagaccctgcagcagcacccgcgggctgggctgggcggggagcagcgccggggcttggttgggctctggggacgagagggcgacttgggggagctccgggctccctatgcctactccggagcctggccgcgcaggacggtgtgctgcccctc

SEQ ID NO: 114073 - DNA, 57 bp, Homo sapiens
  chr6:135504368-135504425
  hyper
tgcgggctcggagccgtttcttgcaagggcgagcgtcaactcggcagggattatatt

SEQ ID NO: 114074 - DNA, 112 bp, Homo sapiens
  chr6:135504752-135504864
  hyper
ttagagcaagcaaatcgcatgcaaagttcaaaggcgagcctgggtggccagcctggcagggaaactcaggagctgggcgcgtgagcagccccggactcgccctgctgcgtcc

SEQ ID NO: 114075 - DNA, 30 bp, Homo sapiens
  chr6:135505166-135505196
  hyper
gctgccccctgcgggcggctgaataggttg

SEQ ID NO: 114076 - DNA, 30 bp, Homo sapiens
  chr6:135818737-135818767
  hyper
accgcccgtcccgccggagccgacacccgg

SEQ ID NO: 114077 - DNA, 30 bp, Homo sapiens
  chr6:135819122-135819152
  hyper
tcctccactcggagcggtaagggacccgga

SEQ ID NO: 114078 - DNA, 70 bp, Homo sapiens
  chr6:136571550-136571620
  hyper
gatgtcaggcaattcgggaagcgactgcttttccttctcaagaggcgggtcttccgagagtcagccaata

SEQ ID NO: 114079 - DNA, 30 bp, Homo sapiens
  chr6:136571984-136572014
  hyper
tctcctggcttagccgaggatggcaagtga

SEQ ID NO: 114080 - DNA, 30 bp, Homo sapiens
  chr6:136610373-136610403
  hyper
aaccccacaggccacgaagaaaggtggcag

SEQ ID NO: 114081 - DNA, 211 bp, Homo sapiens
  chr6:136610842-136611053
  hyper
aggcctacctgacacgccgaatcgcggttccgggaatttatctccgttgcaaccacacagcggccatttcccgactcaagaacgcgaggaaaaccatagagctaccttcgacgcgctagcacgtctccgtcacttccgatctggggcgtggcctcgggtgccgctaaatatgcgggcaagccccgcccacccttccgctccggtccggctt

SEQ ID NO: 114082 - DNA, 113 bp, Homo sapiens
  chr6:136611538-136611651
  hyper
aatccctttcgtggcgtctgatcaaatcggagctcaagccgcagcagccggaaacctcttaggctgctcgtgccaaagaaggccgcccttctggcggcgtgatgacagcttta

SEQ ID NO: 114083 - DNA, 564 bp, Homo sapiens; identical to SEQ ID NO: 43506
  chr6:136870741-136871305
  hyper

SEQ ID NO: 114084 - DNA, 552 bp, Homo sapiens
  chr6:136871694-136872246
  hyper
cggcctgggcctggcgcgccccctcgcgggcaggtgcggcgtggcagccgctccgaccgccgctgccgagtctcggctggaagagcggcgggcggaaccagtacctcagtccggagcttccggtcgccgcggccgaccagctgagggctcccggagatatggagcggggtcagcgaggcctggtggcgcctcctggagtctgggacgagcggcggtccgaggagcagcccaggtggggcgagggtacggagacgctatttccctccgaactctgaagtagccaggtcagtgtcggctccgcgagggctggagttcacggtgacagccggcagagcatctgatgccacgtggagaggcgaagtacatgggtcggattccacgctgggagccggcctggatctgcgctttaggaagccactgcgggcgaccctatcttgtcgccaggacttcgcatctgatgagcctcagggcacacaagttagagaggcttgtgccggctgatgtggcttttctttttcttagtttccgtttagtaaacgaccttgtgacttc

SEQ ID NO: 114085 - DNA, 409 bp, Homo sapiens; identical to SEQ ID NO: 5143
  chr6:137112601-137113010
  hyper

SEQ ID NO: 114086 - DNA, 30 bp, Homo sapiens
  chr6:137113761-137113791
  hyper
gcggagctacctggcgcgcaccttacgagc

SEQ ID NO: 114087 - DNA, 195 bp, Homo sapiens
  chr6:137143482-137143677
  hyper
aaaccagatagcaccgcagaggaggctgagatgcaacgacaaaagctgtcgtaattattaataatacctaaccctggatcactcccctgatagatctgtatctttgcagcaggcgcaattcagtttggattcacccaaaacaaaaatggtctccgtcggagtcaacgccctttcctgtgcggaccaatcagaatc

SEQ ID NO: 114088 - DNA, 2356 bp, Homo sapiens
  chr6:137241792-137244148
  hyper
tgttgcggtaaatcacgacttcagcactttggctgaagtgtcgcgttcagcacagaggtggaagtaagaggcagaaaacagaagaaccacgagagaaatggatcctgtctattaaggcaacgtgatgcagcgctaaaaggttaggaggttacgattcccggggctaagagaaataaactgctggtggtgaacgaaaggggtgctggagcgcagcgatctcgaacctttcccttatagccaaaccctggccaaggccacaaatttcaaatcgcctgaaaaccaaactgtctggcgcttaacggttacctcggctgagcgaaacccttggctgctgctgatttaactacaggtccgcgcgagttactttccagggaactgaattcagaacaaagagttaccgaagccttactccctctccaaaattagaattccctttttctcttagtcatataggaaacacacagttcacaagtcctgtggtgcaaaggtgtgaaccctggcccagggaggtggtgactctccccgccctccgcctgccggttgtcctgcttccgaaagcaacccacgacggtcccgcagggtgagggttccctgggatcagttccctgggatccggagaacgccacgcggagtctccctgcagggtgaggggccccgggttcccgccccctccccctctactctcccattctgcgagcgcagccagcctcccctcccacgcttcgggaagcgtcgcccccgagctcctcggttcctggtggtggctactcgtgttagtgacttcgtttctgcgcgtttgcttattttcatctttgcctcagttcgaatgtgtccccgccaccaggccccgctgctgggcgagaccactgaaccccctgaaagcttccccggagccgcgcgcataatcccgggaccctctctggaaggcgtgcggagagcggtgcgcgtggcctggcaccggaaggagccagcttccgggctccgaggcaccccctggacagcgccccgggccgcgggttcctcctccgatgcccgggcgtcgtcgccgggatcgggagcttcgggggcccgccggcaccgacggttttcgcttccctggcgggcagctggacgaggtcccgccgctgcaccgggagggacagtgggtggaaaaagccgctgcagcgccggggcgagggggctgggggcgccgtcacttgttgcgaccaataaacggcgctcgatcctgatgcgctgtttctaaaatctttagctgtgtcccgatccctccaacccaagcccctcggccaggaggaaggggcaagcgagagccgctggctctgtggggggagaggggcgccgcgccccaagagcccccgtcccgccctgcggcagccgccccggggcgcccagccgcccgcttccctccgcagagcgtcttccctgacggtgaaaccgcgcgggacacaacccaccgcggctcatcacccacttacaaatagctgtcgctaggattcccgccactcctctcagaccggcccccccgccacctctgccacttttcggagtcccccgccctcgtcactgcctccccggagctgcggggcagtcggacgcagagctgcctaaccgcaagaacgcctggccggagctgccctctgcagccgagccggcgccccctgcccttcgccgccgcgctgggcgggcgcccccgccgccctcactccgctgctcccggctcctcgcgcgcaggtcgcggagctccgccaccgctgggtgcggcgaggccggcgcgatgcggcagctgtgccggggccgcgtgctgggcatctcggtggccatcgcgcacggggtcttctcgggctccctcaacatcttgctcaagttcctcatcagccgctaccagttctccttcctgaccctggtgcagtgcctgaccagctccaccgcggcgctgagcctggagctgctgcggcgcctcgggctcatcgccgtgccccccttcggtctgagcctggcgcgctccttcgcgggggtcgcggtgctctccacgctgcagtccagcctcacgctctggtccctgcgcggcctcagcctgcccatgtacgtggtcttcaagcgctgcctgcccctggtcaccatgctcatcggcgtcctggtgctcaagaacggcgcgccctcgccaggggtgctggcggcggtgctcatcaccacctgcggcgccgccctggcaggtgagcgggcccccgcgccgacccccagccgaccccacccaccccgctccgtcgggcagagaccgcggggatcactgagttcaacgacctcacttccagatggggagactgaggcagagagagccggagagctttgagagtgg

SEQ ID NO: 114089 - DNA, 230 bp, Homo sapiens; identical to SEQ ID NO: 43510
  chr6:137244235-137244465
  hyper

SEQ ID NO: 114090 - DNA, 533 bp, Homo sapiens
  chr6:137310847-137311380
  hyper
gccatggtgactatgaagggacgcagtcagtccaaagccaccccgggaaagatgtggcccgcagcctggcaggctgaggacgtgtagggggctgcaccaggcgcagcgagtaaccctactccgtttctgaacgcacgcgggggcgctgccaatgtaaggctccctgttaggaacgggtcctagccctcagcggagggtcacaaagaaatgagactttcctggcaagactgtggaatcagatcgagccatttttaactgtaaatgtctggctttgcctgcagcatttcaaggaagacttgactgctgtgcgttgccgccctccgccccgctcccctgcacttacccacccacctcgcctgcgctgatccgcagacgcgcgcggggaaaggcacgcgcgatgctttcccactcgctcagcgggcgccgctcactggaaactcgctccggattccgaacccgagagcagagcagagggaagcccctttgctgagcagctccttagtggagggcaatgaacgcgctgaaatcccaga

SEQ ID NO: 114091 - DNA, 45 bp, Homo sapiens
  chr6:137365285-137365330
  hyper
tttggcttttaaagcgcggatctcgcgacgcgcggcttgcaggac

SEQ ID NO: 114092 - DNA, 281 bp, Homo sapiens
  chr6:137365623-137365904
  hyper
ggaagctccggcctccgcgcacctcgtcctctgcccgcccgaaagcgaaacctggccggcgggcaggaggggagagctcggcctcgagctctgcctggcggggccccggcctggaggcatccccgacccgcacctggcggcgcgacccacctacctgcccgtccccaaggcgccgccaggagcaacagcagcagcggcggcagcggcagcggccgcagggccgggcggccgggagcccgcatgggcggcggggctgggtcacatgtcggggggcagcagac

SEQ ID NO: 114093 - DNA, 30 bp, Homo sapiens; identical to SEQ ID NO: 5147
  chr6:137421484-137421514
  hyper

SEQ ID NO: 114094 - DNA, 30 bp, Homo sapiens
  chr6:137540142-137540172
  hyper
gtgatttgttgtggcggcaaccagggaaga

SEQ ID NO: 114095 - DNA, 30 bp, Homo sapiens; identical to SEQ ID NO: 43513
  chr6:137540386-137540416
  hyper

SEQ ID NO: 114096 - DNA, 202 bp, Homo sapiens
  chr6:137808691-137808893
  hyper
ttccttgtcctttcccggagtagacggaagggaggcgagatggtgggaggctgaataaccaggaggagaaaggagtcgccataaaatgcacccgcgccaccctccatgtcccccagtggaattgaggatcttgcttgtggcaaaagtgcgttcttggcaccacagccccgcagctggggaggggggcctcagtacccggctt

SEQ ID NO: 114097 - DNA, 365 bp, Homo sapiens; identical to SEQ ID NO: 5148
  chr6:137809000-137809365
  hyper

SEQ ID NO: 114098 - DNA, 471 bp, Homo sapiens; identical to SEQ ID NO: 5149
  chr6:137809445-137809916
  hyper

SEQ ID NO: 114099 - DNA, 1296 bp, Homo sapiens
  chr6:137810032-137811328
  hyper
cggggatcgctcacaggggctccggggccaccgcgagcgcggactgcggctgctggcgggctccttcgtcgtccaacgcaccccatcctctcccgccccgcagtgtcccagggaaggcttcactgaaaacagacgctcgacggaaaactgactctgcaggcccgagctttcggagtttgatttctgtgggccccttaaacgggcactgggtacaggagaggccccaactctctgcagggacggggagggaagggcactcactctcccgcaagttttcctagaggcgagctgaagatgcaggccacctccctcccgcacggcccctcccttggcctagttctgtccaaagacacttcccagccctcgagcggcggctcctccactcgattcctgcctacacgtgaagagcttggacccagcggggctgcactcgggaggacaggcccagatcctgcacggccgggaggacacctggccccgctgtcttctcttcacagctcccctttctcggcttcggcctggagcggtgcagggaggggtggacctggggtggccttaagatatctagcctgggtgcggagacttgggagcccacccttagcagtcactcctcctccccagtggagggtgagaaaaggggaacagagggccccggagtctctggaagggacgtggaacgcgaagttaaatgttggtgtctgagcgatgtgctggtggggcagagggggttccagcgtcctcccagagtgaggaggcttttgcaatttctgctgaatgcgtcagtggaggcacaaaaccttgcttgacctagcagctgggaaaaaaagaagttcgaggggacacaaggccccctgctgctggagcgaggaaaccctgggcttggccagctcgggccgcttctccctgcccgtttgcgggctgtcggcctcagcggtcccagaaacaaagatctagtgagcccagccgacgccggcctcattttccctttctaagggtcactttcttccgccctctaaattaggtcatcgcctgggaaagcgccgagaggtttctagtgtgggcttctcaaggtgtctccgcccaggaggatttcgccatccatttaaacgtaaggcggggtttaatctggaatgaaaggatcgtcgtggtgtttccagattgaatgaaaaactaaacttgcaaaatttcgagaaagtgacaagtttacaacgaaaaaaaatcccggccgaaacccattttcacctttgcggtcatgaaatcttttttctggcgtcgataattcgagtatttaaaggg

SEQ ID NO: 114100 - DNA, 369 bp, Homo sapiens
  chr6:137814249-137814618
  hyper
acacgacatctggttcgagtccccctttgctaccacctagaaattgcggtttgattttggtcctttccctccgggggtcaagtggagtctgagatctctcagacagcgtgggaggctgcgggccccggagcctgccctcccgtgggccgagcgtgcagcctccctcttccctcccggcccggcaccgcggcccctcccgccgctctccctcctccttggcagccgggcccgcccgctgctcacttgagcaagtccttggactcggccgacagccgggccatgttggctgtggagagagcggacaggtgcggcggcggcggcatctggcagatggtgcaggggcagggcagaccagcccagtgctggaag

SEQ ID NO: 114101 - DNA, 517 bp, Homo sapiens
  chr6:137814653-137815170
  hyper
cgccttgagtagcgagtggggaggccggatggtgccgatggcgggaagtgaggcggcggacagcggtgacgaggcgttgccagatgagagcgcgccgcccaagatggggtgcaccgggtgcacggagttggccgcgtgcgcggggtggccggccgagtggcccacggtcccgcagtgaaaggccgagtggtggcccccatagatctcgccaaccagcctcttcatctcctccagggagctggtgagcatgaggatgtagtttctggcgagcaggagtgtggcgatcttggagagcttgcgcaccgacggcccatgcgcgtagggcatgacttcgcgcagcccgtccatggctaggttcaggtcgtgcatccgcttgcgttcgcgtccgttgatcttcagcctcaactgctgtaggtcctgctccgacagctgcttcttgattttgtacttgctgctctctcccgcggccttggcgccagcccgcgagaggctttccccgggcatcttctgcatcata

SEQ ID NO: 114102 - DNA, 395 bp, Homo sapiens
  chr6:137815401-137815796
  hyper
gaacccacttctccgcggcaagacgtgagaagaaaagcggagacgctgcttttccccgcctctctccctcccacgcccctctctctggttaggctgcttcctggacagctagttggtgtgtgcttgaactaacctcacgctgaaaaagaggggcttttatagagctgcggcggagaaaagagacaaaaggagccctcctatctatcctgggctggttaggatgacgtgccatcattcagggcggtgcgctttgctgtcccatttagcaaggattcctattcatattcattgtggggccgccctgggacacctctgctccgaaccgctaggagcccccaggcacaaaaccctctgattgacacactcaccgctccagcttacgccttcctgatttt

SEQ ID NO: 114103 - DNA, 784 bp, Homo sapiens
  chr6:137816491-137817275
  hyper
gggacggtccgcgcccgaagctccgccgggcctcctctggccgctgtgctgacgtgccccgagctccgggaactcagcggcaccccggcctgcgcgggtgggtccaccaggctggggccgccgtacggcgtcggacagggaaatcagaagctcataataaactatctgatgtcggggtggtggggcgggggggtggggtgcgtgggcaaagaagcacgggggaagggaaacaacgaaaggacctagaaagccccttgtgcgtgcccgggcactgcggttcagcgcagagtcgtttctgggaataaagaggaggtcggagtttggagccttcggtgcgagtgcggaggtgggcgtagatctttcttcccccttgctgtgtttttgtgatcaagactttagctcagcagcacgaggggcgggaaggcagaaatcccgggaagggagagagccccaggagtggtctctagaagaacccggacaccgcccctctcccggcttggtggaacgggaaacaaacgctagctagtgactgagagtctcggtggaagtgtgaaatcgaatcaatcgcggaacctcgggcacttggggcctcttgcgccgctgagtcacttcgaagaacaggatgcccccctttcccttgactcaaaccgagcggtcagtgggagagggatgcgcgcccaggtccggagtttgcacgctctgaggctgtgccccactgacagtcacgctgcgaaggcagctctggccaataccagaaggatgggcaaacgcaacattggcatgg

SEQ ID NO: 114104 - DNA, 125 bp, Homo sapiens; identical to SEQ ID NO: 43521
  chr6:137817736-137817861
  hyper

SEQ ID NO: 114105 - DNA, 507 bp, Homo sapiens
  chr6:137818091-137818598
  hyper
gcggggctggaagtccggggccagggttctgggagtccaaaccagaagccactctccttcagcacagcctttcagccgagagggggctgacgcctgccgcagccggttccgagggggctgcgatgggccgggaaggggcgactgggcctttgcccgaacagaccaggacattcccttccttcttccctaagggttttcagctccagtaacagaggtgcctgaaatgggagatctgcggggaccaggccgggactccctggctccgaggccgggacgtggcgcgccctccgctcctcggtcaccctctgctttttcgaaggtccgtaatgcgtgagtgtgggtggtccaaggttcagggcctccttccagtaagtacttttagaagctagttcccccacttcccatccgttgcggggcttgacaactagacgaggggagtgagtaaaggtgccacaactttgcttaccgtaaaatgggttaatactcgccggggcccaaaaggctgag

SEQ ID NO: 114106 - DNA, 216 bp, Homo sapiens
  chr6:137818618-137818834
  hyper
cgtggagtctcttttcgacccccgccaccgcagctcagttcctcggattgagccctgaacccgagaaggagcaggcccggagctcaggagggcaggcacacggatttctttctgagggctgactaccaacgcccaccccagacttgtacggaaggagagagtaaaggagtcgccgcctggccaaggctgcagcagcctacagaggctcagccggag

SEQ ID NO: 114107 - DNA, 528 bp, Homo sapiens
  chr6:137818915-137819443
  hyper
cggtggctcgggctgcgctctctcgggccacaccccgcgccctcgcggctggggcgggctgcgccgcggaggcggggatcgttctccggcaacaggtgcgtcccaaggcaggcaggctacttccctccaagcctgtcttggctctgagaagagcctggagtttctcagccttcctacaacatatgaaaacagcgggtcggcgcgtggaccggggcagaagagccgtcctgctgtacccgcgcgcccagggcgctccgcggggaccgcgcactcgggaagctgtgctgtgctcaacacccccctgtgcctcccagatcaccagggatcgtctcttacctgacacccagtgcgcgccgctcggtgcccgacgcccactgctccgcagccttagccaccgagttcctctccagcagctgccggctctgcctgaggccgcggcgattttggctcaggagcgaacccccacccccacccccgcaagagtccagtagcaaatgtcgctagctgacctgccgaagagctactgtg

SEQ ID NO: 114108 - DNA, 162 bp, Homo sapiens; identical to SEQ ID NO: 5153
  chr6:138132642-138132804
  hyper

SEQ ID NO: 114109 - DNA, 194 bp, Homo sapiens
  chr6:138188396-138188590
  hyper
cagtctgcagtcttcgtggcgggccaagcgagcttggagcccgcgggggcggagcggtgagagcggccgccaagagagatcacacccccagccgaccctgccagcgagcgagcccgaccccaggcgtccatggagcgtcgcctccgcccggtccctgccccgacccccgcctgcggcgcgctcctgccttgacc

SEQ ID NO: 114110 - DNA, 30 bp, Homo sapiens
  chr6:138189289-138189319
  hyper
cagcccctaccccacggttagactgtcttt

SEQ ID NO: 114111 - DNA, 30 bp, Homo sapiens; identical to SEQ ID NO: 43526
  chr6:138428116-138428146
  hyper

SEQ ID NO: 114112 - DNA, 228 bp, Homo sapiens; identical to SEQ ID NO: 43527
  chr6:138428362-138428590
  hyper

SEQ ID NO: 114113 - DNA, 528 bp, Homo sapiens
  chr6:138428797-138429325
  hyper
cctggcctctccaggcgcgtgttttgtcttcctggcgcaccaacatatacacttgtttatctgcacagcgccagcctaatatctgacccctgatgtcgcatcgtggggcggtggtcagcagtgccatatctgagttttcagcagtgtgagatgggtgttctaattgcacctgtggataaaggctgcactcctttggacgcgtgcacccaaacccagaagcccgtccctgacccctgctgacacaggtgatcccttcctcctaggctccgcctttgcaccttggaccgtggctccccgggtactcttatctctttgcatgctgttctttcctgctgggttgccagattttggaaagcggaggcgatgctgaatttatctgtgtatccttagtgtccggcaccgtgtttggatctcaaggggagctcagtgaatttgatgaatgaacatgtaatttaacaaatgctcgcttcctttcggaaaggcttcatctggcttccccagataatttcatgtcgcctctgctgcagt

SEQ ID NO: 114114 - DNA, 30 bp, Homo sapiens
  chr6:138437245-138437275
  hyper
cgtggccatgtctgcgggctacaagagcag

SEQ ID NO: 114115 - DNA, 444 bp, Homo sapiens; identical to SEQ ID NO: 5156
  chr6:138482424-138482868
  hyper

SEQ ID NO: 114116 - DNA, 822 bp, Homo sapiens
  chr6:138482902-138483724
  hyper
cgctaagcgcggcgcccgcggggcctgcctcggcggtcaggtcagcggcctccagcctcactctccggccccagcccgcagccgccgccgagcggagcgcacctgacccaggcgggcggggcggggcggcgggcggggcgcggggctgacgtggcccgcggcatggagcgggcgtgattcatcagcatccgcgccggggcggcatgggggcgcgcgcggcggccgcctaggcgcccagggccaggcagcggcggcttccccggcccggctcgcccgcgcttctctccctgtgggcggcggcccggcgcctggaaggtcaagatggaagaaatcctgaggaagctgcagaaggaggcgtccgggagcaagtacaaagccatcaaggagagctgcacctgggccctgggtaagcgtccggcacctgctcgccgcggcgggagggccgcgcggccggggctgaacccgcgcctccgcgcgtggggctttcgcggagcgtcggtcatgggtgccgttctggcgattgcgagagtcgcctcgggaaattgatgtgggatttgagagtcttggctcgggcgtggacatcagccgcctcccctccggtctctttcactctccgaaaccttcctcgggaaccgctgtcctccctgcctggcggcccccttctcctggtcccggcgctggggacgatgcttccccatcgccgagttaggcaggacccggagccggtgcgaatcctggggcctgacagcgaagcgcctctggggaaaagggaagttaaaccaacaaccccgatgtcgaatccttggcgagtggaaccaggaa

SEQ ID NO: 114117 - DNA, 267 bp, Homo sapiens; identical to SEQ ID NO: 5159
  chr6:138724515-138724782
  hyper

SEQ ID NO: 114118 - DNA, 30 bp, Homo sapiens
  chr6:138725196-138725226
  hyper
agcgcgggcggggccgcggcagaggttccc

SEQ ID NO: 114119 - DNA, 358 bp, Homo sapiens
  chr6:138725856-138726214
  hyper
actatgctacgcaaacgagaaaccccggtcatttagctctaccctccccgctacccccagtgcaggtcccatctcaatttcttgtctttgcggggtggtggggcggggaggaactggttacgtcccagaacgcgcggtggaaccctccgaaccgagggggtgtaatagatgcttgtctgaaagtgtgaatcgagtccccagcgtgtggggttggggccgctgcggtccctaatcgcaaggaggggaacctcgtggaggggaacctcccagacctaaggagcggggacctcaggccggaccccggggcggtgcagcccctagacaggacggctccaggtcgacccgagatcatggcacc

SEQ ID NO: 114120 - DNA, 30 bp, Homo sapiens; identical to SEQ ID NO: 5160
  chr6:138846140-138846170
  hyper

SEQ ID NO: 114121 - DNA, 325 bp, Homo sapiens
  chr6:138914347-138914672
  hyper
attccagcactgacacggaggcagtcaggagcactgctaggactagaatcccgttgtccttgccccagtccaggctctgcccactctcccatgcttcaggtctggctctgaagttcgtgattccccgttcatagtcttcaagtacatcagtgagtcacgtttccgtttcctctcactgttccaaatgctgggctttggtagcacagagttcattcattcacaatcatgctaattcactcatacagagagagagtgctgacgcacttaggaattatgacttaacatgcaattctcaaatcagtgaggccaacggctaactaaactt

SEQ ID NO: 114122 - DNA, 484 bp, Homo sapiens; identical to SEQ ID NO: 43534
  chr6:139013360-139013844
  hyper

SEQ ID NO: 114123 - DNA, 30 bp, Homo sapiens
  chr6:139014806-139014836
  hyper
gacctcaaatagaacgtctttaaatgtccg

SEQ ID NO: 114124 - DNA, 205 bp, Homo sapiens
  chr6:139094532-139094737
  hyper
cgggcaaccaatcggaaacaaccaaggaacagttgcatggcgacactctggttccgccttcgggcatgctcgaacagcattctgggaattgtagttcggggggggaatctaacactcaccgaggggcggagtagcttccggaaagggtactgcatttcccgtttctacctccactgcacccgcttattgcgtcttgctcctgggt

SEQ ID NO: 114125 - DNA, 30 bp, Homo sapiens; identical to SEQ ID NO: 43536
  chr6:139308708-139308738
  hyper

SEQ ID NO: 114126 - DNA, 30 bp, Homo sapiens
  chr6:139309303-139309333
  hyper
gggctgagcgtggccgccgctccgcctccc

SEQ ID NO: 114127 - DNA, 82 bp, Homo sapiens
  chr6:139309543-139309625
  hyper
agccgccctctgcgcggagatctcagcagcaagacccccggaaaggggggtgcagtgggaaacagccggcagctcattaaga

SEQ ID NO: 114128 - DNA, 237 bp, Homo sapiens
  chr6:139349616-139349853
  hyper
atccatcaggaaatcgacgcccaggatcagatgcagatcctgggatccttggctctgagtagcacggtggaaaagtgaggtaatccaggctctgggcccgttttcctaggagcccagggcgcttcacctgtctgcagtcagcccctttcttggacgtctcctcccctgagtttcctcctcataggcttgtccctgggagtgtgggcggcccctttcttgagcgcagaaacacttact

SEQ ID NO: 114129 - DNA, 30 bp, Homo sapiens
  chr6:139350298-139350328
  hyper
tttttaccgcggtgcgacgtgtcggctttg

SEQ ID NO: 114130 - DNA, 31 bp, Homo sapiens; identical to SEQ ID NO: 5162
  chr6:139350568-139350599
  hyper

SEQ ID NO: 114131 - DNA, 295 bp, Homo sapiens
  chr6:139350904-139351199
  hyper
gaagggctgggaaaacgtgcccagcccgagtgtgtaaagttggttcctgattccggacatacctattccagtaggctttatttccttggatattagaaaatctccatgcattgcctccaaacttttgaaaaataacaatgccctgagggtccttaaatacattctaaagtgtgtattggtggtgagtttcgggttctgcccagtcctccgactttccgcttcctttgtgtttcccacgcacaaagccgaaatcgattctgcgacaattagagtgcctggccgtcatctacctcgc

SEQ ID NO: 114132 - DNA, 30 bp, Homo sapiens
  chr6:139456088-139456118
  hyper
aggtgggcaggccccgcgcggggcgtgacg

SEQ ID NO: 114133 - DNA, 30 bp, Homo sapiens
  chr6:139457134-139457164
  hyper
agggaggaaagagccgcccaagttgagaag

SEQ ID NO: 114134 - DNA, 252 bp, Homo sapiens
  chr6:139694250-139694502
  hyper
gccggggtttcgatcgagtcaacagctcactctgctgggctgctgtttgcacacgaagtccgtcataaaatcaaactcgttttgccccagccagagttcgggcagctccttgatgcggtccaaacccatttctatcaccaaggacataagaacttcctcgtcgatgaaatcagtgtctatgacattgggcggcagcattgcagcggggacgtgggccacggaggcgggcatgttgccgctgccgctgccgcc

SEQ ID NO: 114135 - DNA, 408 bp, Homo sapiens
  chr6:139694963-139695371
  hyper
ggtggtgatgggggctcgggaactgccccatgcccatgcggtgggcagggtgatggtgcagcccattggtgccgtcggggaagcgcccgtggttcatggccatcatatggtctgccatttccagtcctggaagtgaaaagggcagataatgagacccgcgccacacgtgtcgcccaccacagcgcaccccacttttgctcgcctctgccccccaggattcccgggcgcacgtcggctgcgaaccaccacccccaagatcccactaacagcctgtgcacccgggctagccaccacggaagagctaccactcataacacagccggacgctgcacaaacagccccttcccctgcgatcgggcggggggacccgagcccacaccccctttgctccccgaagtggcctaataa

SEQ ID NO: 114136 - DNA, 448 bp, Homo sapiens
  chr6:139695583-139696031
  hyper
gggcgggctcgtcgcgtccaggaccggctcagcagcacatagaggggaccttcctggcgtgcaaagcgcttcgctgtcgcgatgtcggcgccgaggtctcgcagcggccgctggggcagattcggagccgttcccttttatttcccctccgttgccctcacagctcggcaggaccgcccggcagctgccaacaatgagctgtgtttcttagggctttggccacagttaatataggcatttcggaaaggcggagcgagagcctccagggcgggcggcgccaagacgcggattccggaacaccgcgaacaccctggaccgggtcccggagccgcgtccccgccgcccgcggcacgtgctgcagaggctgcggggcccgggggccgcccagtcgccccgtcgccccccgactctggtttcttcccggcccagaaacgcgaggttggctcag

SEQ ID NO: 114137 - DNA, 30 bp, Homo sapiens
  chr6:139696363-139696393
  hyper
tttgtgttttcatacgggcagtgggtagac

SEQ ID NO: 114138 - DNA, 30 bp, Homo sapiens; identical to SEQ ID NO: 5164
  chr6:141490782-141490812
  hyper

SEQ ID NO: 114139 - DNA, 184 bp, Homo sapiens
  chr6:142410083-142410267
  hyper
cagtggtttgttctcgcggttatctagcggaaaacagcctttcaggaacaaggagctgtcccttggggatcagtagaagcacctgccggactcttcgcccagagaagcagaagtcatcctggcgctgtccagcgggccgcagctgaaatcccgggaactaggcggggccacctgcaacctgctt

SEQ ID NO: 114140 - DNA, 265 bp, Homo sapiens
  chr6:142468182-142468447
  hyper
gcagagagcgctagcgccatgcgcggcataagcgccaaaatgctcgggtcttctgtgggttctaaccgccgagagccaagcaccctgaggttgtcccagctggggatccgtagttgacttgacgtcgctgagcaacggaagagtgggcagcatttgctctgaacgctcgtgcgcgctaccgcccagacggaagcggaagtgccggtggagcgcgagtaggaagtggtgagttcggagtagagatggccgcgcttgcaccgctgcc

SEQ ID NO: 114141 - DNA, 949 bp, Homo sapiens
  chr6:142622499-142623448
  hyper
attttttcgagcaagcgaactagtcagagaagacagaaaagttaagtaaagaaagtggcagaaaagtgaagcaaagcaacagcccgggagcgtggcggggggacccgcgcggggactcgggtaggctgcaaacgctggggagatgccacaggagcgcctgccttcccagcttctcctttctctcgccgagggtctctggggttcagcgctcccggcgtttcggcgacctccgggtccgccctgtcccctcccagctggggagctgagcccggctctgcgcccatcgccgaccccggccactctcccttcgctgctcgctccaaaagcgcctgtcccgccccgcggggcgacttctccctttcggccctggggttgaagatcctgtgtggggcagctgcgccttcgggacagccccagccgcggagcgcccagaccagggcagccggagtcgggtcatacgccgcacgccgccggggccgccgcacctgagcccagctccagtcacgccggaagcgcgggcggagcgcacgggtccggggagagtcgcctgcgcccgcgagggggacccaagtacctagggtggtggccgagtcccgcctcccgccagcgggggcgaggacctgcgacgcgcacccctgcctggcccggtctcctcagcaccagccccacgcacaccctacttcctcagcttctcgccctcaccctgccaacttccctgcgaggagggacctgccgccagcctgcttcctcgtccgcaggccctgcgctgaacgctgccgcgcccagggttcaccttgcgccgtcgggaaagcccatgaactctccagaaacggcgtaaaggagggtcccgccgcggcgcagggctggggcgcctgggttccccctgggtggagcagcggcagcagagcgggaaagtggtggaggatgatcttgcggccaaaggggacct

SEQ ID NO: 114142 - DNA, 1038 bp, Homo sapiens
  chr6:143247635-143248673
  hyper
gggctttgtgaaaagaaagagcgtatattctatccgggcaatgacaaacggactcaggcctcctgaggtcagcgctcctgggcaccatcaggccccacttcgggagcccccggtgctccgggcccacctgactgggcgtcctctgagtcagggaggtgccagtgctgtggtccccgcgagcccaactgtcccctgacccccgggcttttccgcaccgtggagtcccccgacacgctggggccagtgaacccgggccggggcgcgcgttctccctcccggaccagctcccggcgctgggcccgcggccgagaaactaggtctgggccggccctgcggcggccgccgggcgcggcgagccccactttctcccggcaggaaggggggaggccgagagcatttcctgttgtgcagctgagccctgcggagacgtcattgcattcatgctccctcgggtgtcagcggacggggggccaaagttcaagccgcgtccagggcaggcagcgcgcggcggcgcggcggcgcggggcgggcggccagggctcccctctcccgctggcgctcccggcgcctccgtccccggccggcccagcgctgctaccggaggccagccctggggctccgcggggaagagctgctcttcctcccggaggaaaccgagctcgcaagcccagcgctcccagccgcagactgcaggctgccctcctccaccgcctggatttcccacggggaggaaaaggcgtgcgtttccaggtgtttggaggacgcactggccgggcgcactttcctcagcgtaattttgaacgcagtttccctaaagatgactcttttttccactaggattatttccaagtcatcaaaagtgaaaaatcacgtaagtgttgttgcagttgttttcccctcgttttctatctcctttccaattgtgaattccgtaaataactgtcagacataaaacaggaaaaggaacatttcttcactgcagagctccagtaaggtgaaagtaggcaagaaggccccctgagacgtttctaaaagcat

SEQ ID NO: 114143 - DNA, 30 bp, Homo sapiens
  chr6:143265791-143265821
  hyper
ccggaacgggccaacgttccacccacttca

SEQ ID NO: 114144 - DNA, 199 bp, Homo sapiens
  chr6:143266116-143266315
  hyper
aaatgcccagagccagcgccttcgctgcgctcgctcggccgcaggccggcggcccgggcctcgcgccgccagcccgcccggccgcctgcgccgcgcgccgcggccccctcccccgctacctgacaacgggccgccgccggccgccgcagccgcagcggtggccgggccgtgcgcgccggtgcacgtcgctcattagtaa

SEQ ID NO: 114145 - DNA, 30 bp, Homo sapiens; identical to SEQ ID NO: 5168
  chr6:143266539-143266569
  hyper

SEQ ID NO: 114146 - DNA, 30 bp, Homo sapiens
  chr6:143266773-143266803
  hyper
tgggctccgtggagcgtcaaggtccaagac

SEQ ID NO: 114147 - DNA, 174 bp, Homo sapiens
  chr6:143267434-143267608
  hyper
tcccgggctgtggacgcaccgggttattcctggcagcgcctccccgaacagaagttactaggaggagtgcgcggcgagggcggacggggggagaggcggagggagggagggaggaagagggagagactcagccaacgacgtcatcggatcccccagcgcgtcccagggagggag

SEQ ID NO: 114148 - DNA, 36 bp, Homo sapiens
  chr6:143268448-143268484
  hyper
acaccggggctctctcgggccgttaccctgcctatg

SEQ ID NO: 114149 - DNA, 397 bp, Homo sapiens; identical to SEQ ID NO: 43551
  chr6:143268757-143269154
  hyper

SEQ ID NO: 114150 - DNA, 30 bp, Homo sapiens
  chr6:143382052-143382082
  hyper
tctggcgaacatggcgcttgtcccctgcca

SEQ ID NO: 114151 - DNA, 459 bp, Homo sapiens
  chr6:143771537-143771996
  hyper
gctacagaaagtttcgaggcagtaaagccagttgttcacccagaacatctgactgccataaaaattatggtgacgagaaagaacgtttgctcaaatgccggggtcgggttgagggctggagaaaggtcccaccccgcagcatctacctcccgggctcctcaccatgtgcatcgcctcctccatccacttttcggtctcctctgccgacaccgagcacgcgccgcttgcagctggcttgggtgccgccttcgcctccatacccagccaccactcagctacagagcccgcggcagaggaggagcgcgggcagcggaacgcggcgggcccgggaccccgtttccgggggtagtctaatgaaaaggcactcgggagctatttctgaacggacctgggcttgtcggaccagtgagcggcggcggctgcgcggcggcagcggcagaaagcgtagctgctttgctg

SEQ ID NO: 114152 - DNA, 30 bp, Homo sapiens
  chr6:143772195-143772225
  hyper
ggaattttctgaaacgccacaaaaagaaat

SEQ ID NO: 114153 - DNA, 30 bp, Homo sapiens; identical to SEQ ID NO: 43553
  chr6:143832927-143832957
  hyper

SEQ ID NO: 114154 - DNA, 30 bp, Homo sapiens; identical to SEQ ID NO: 43554
  chr6:143857957-143857987
  hyper

SEQ ID NO: 114155 - DNA, 714 bp, Homo sapiens
  chr6:143998942-143999656
  hyper
gagggggtgcgggtgcggcggggccggctgggggcttcccccaccccctgctcctgcgccctccccccgcttccccctcctcccctccctatcgccctcaccccccttcttcccccgtgacccctgaccccagctaatctgcatagaggaatgacaggcatccgctgggcaggatccgccgcgccggctgcggccggccgggctgggagacccgcgcggggtagaaggtgaggggacccggcgggccgctcggcacaggccgggacatgaacgcctggaagtctggctgggagcggacccatgatcgaaggaccaaaggagccgcttgatcgctggacctggccctgcgaccccagtcatgggccagacctcggtgtccacgctgtccccgcagcccggcagcggtgagtccggggcgcacgcgatgcgctcccgccgcgcgggcgcagggctggcggcggggccccggggcaggcagggttagtcgtctggtcgggttccgctcggacccgccaagtccctcggagaaaccccagaggtagcgctcgccaaactctttgtcgtgaaagaggaatgccttttgggatccagccgattttaccttaaaggcacaggctccatttttctgtgcgcgatgcctcgctgtggttttttatccaaattatttcggagccagaaacttacgggaaacgccatttgcgtattacagtgttt

SEQ ID NO: 114156 - DNA, 30 bp, Homo sapiens
  chr6:144000048-144000078
  hyper
cgtctggcatttccccgacagtgtagggat

SEQ ID NO: 114157 - DNA, 315 bp, Homo sapiens
  chr6:144164205-144164520
  hyper
tcccctctggtctccgtagagggagctataaaaggttcgtccacaagcagaaacccctctgtggcgcctcaacgttaaggacccccacgattccctttgcccggcgggagactaaaggccggaaaagtacagcccgcccaggggtgggagccgagctagccccacctcccggtggcttctcgcgatcgtggagacgcagcgagcctatgtaacttccggtcgcgacccatcagctcctcggcgattggtccgtttccacggccggctgggtgacgttatcgccgggtcctggggctgcacgtgtggtgaggccta

SEQ ID NO: 114158 - DNA, 359 bp, Homo sapiens
  chr6:144384551-144384910
  hyper
ggctttatcccctcacgtgattcaggacatctggggtgggcccaataggtgtgttctgaaaagctctcctggtgcttctgggaggcgcctcgggttaggcagcgacgcacaaaacataaaccctgtcatatcattatttattccgtgaatacatcggagttctgttctttcggtggccacacagatgctcaatgccacgacccttgaataactgccatagttgtcacttcacttggctttttcaataaaatgaacaggtcccgcgctcctagacccatgaacactcgggaagccccaggggtatctctgtcctcgacacagcaggggccctacaaacccaacacggctgtgcacccgcc

SEQ ID NO: 114159 - DNA, 30 bp, Homo sapiens
  chr6:144416874-144416904
  hyper
tccatggagatccccgccccatcagagaat

SEQ ID NO: 114160 - DNA, 30 bp, Homo sapiens; identical to SEQ ID NO: 43558
  chr6:144471628-144471658
  hyper

SEQ ID NO: 114161 - DNA, 30 bp, Homo sapiens; identical to SEQ ID NO: 43559
  chr6:144537591-144537621
  hyper

SEQ ID NO: 114162 - DNA, 30 bp, Homo sapiens
  chr6:144537897-144537927
  hyper
cccaccaagagaccgcgcaggcggcggccc

SEQ ID NO: 114163 - DNA, 47 bp, Homo sapiens; identical to SEQ ID NO: 5173
  chr6:144537938-144537985
  hyper

SEQ ID NO: 114164 - DNA, 156 bp, Homo sapiens
  chr6:144605316-144605472
  hyper
tttaatctttactgccgcgtaaattaactcaaatattaagccagcaataaaccggcgctccagtatcaaccatccttttctctgttaatacgaactaggaactcaggttgctgttttctttcccctcccacgtgtgctgatcgtgtaaaagaatca

SEQ ID NO: 114165 - DNA, 97 bp, Homo sapiens
  chr6:144605681-144605778
  hyper
tttcaatattaacaacgacactagagaaataatgtaaaataaatatacggttggaactaggggtaaaaaaaaaatcagcaacgtcagcaaactgaga

SEQ ID NO: 114166 - DNA, 488 bp, Homo sapiens; identical to SEQ ID NO: 43561
  chr6:144606892-144607380
  hyper

SEQ ID NO: 114167 - DNA, 30 bp, Homo sapiens; identical to SEQ ID NO: 43562
  chr6:145166138-145166168
  hyper

SEQ ID NO: 114168 - DNA, 30 bp, Homo sapiens
  chr6:146056778-146056808
  hyper
tgggatgcatcacgcggctcccgagcccag

SEQ ID NO: 114169 - DNA, 30 bp, Homo sapiens
  chr6:146135379-146135409
  hyper
tttaactcctccttcgtcccttcccaatac

SEQ ID NO: 114170 - DNA, 783 bp, Homo sapiens
  chr6:146136027-146136810
  hyper
tctgaccccgcagcgtcgtggctagagtagggtctggagagagctcccactgtggcgagtcctgtcgttggattcccgcggcgccccgtaaggctccgccccggcggtgctaccaaaccctgttcgattttagaatcgtacattcccagagggaatcctagacccctcattttacagttgaggaaacaggcccaagtagcatgacttgttcgcgccgctagtcgaaggagcagcagccccgatcccttgactctggggcactgctttccctttagctcatttttggaggaaatgggtgcgcccttgctcgacctttggtgattgccgccacaggccttcccgccggctaactcagcgtgcccaagtcccgtgacttagtgccaggacggtgctgtgacccgttatcccctgtcgggttttacctccccccgggagagctcagccctggatcccggcgggcggcggagcctctctggagcccggacgggacagcccaccagggtctgcttctgtgaggggccgaggcgtcattccgcgaaggtaattagctggggaggggacttgaagccgcttttgcagtgtaccttacatatgactggggagtaaagaaatcccacagggctgtatcaaagaatggatggatgtccacgcccccgctaccaccaccaagccttggtctacggccgagggacagtgattccgagctctgggtgttgggagccgctcacccgcccccacccctctgtcggggactcctgcccaccccgtcgcaagagaattaca

SEQ ID NO: 114171 - DNA, 305 bp, Homo sapiens; identical to SEQ ID NO: 43564
  chr6:146285324-146285629
  hyper

SEQ ID NO: 114172 - DNA, 684 bp, Homo sapiens
  chr6:146348675-146349359
  hyper
ctccctctatcaaacgactgatttttatacatgagataatagacaagccttgggtgacctgtttttttttttcttccctccccctctttttcccttgcggtaaaatagtgctgaagaaagagggcactagtgtacagcccagatcgcatccttgcaccgtctggattagagctgaggcgtctgcaagccgagcgtggccacggtcctctggccccgggaccatagcgctgtctaccccgactcaggtactcaggtatgtctcaagtccatgtcctccaaacagactcaggtgagcggacacttcctccggtgaaacccacccacaacggcagacaaagtcccagtctatcagattttcctccgggtcccaggcgcattctcgcttatgtatttcttttcgtcctgtatcctcaggaagagtcgggaccaatgggtgcctgggttttctttctcctttttctgcctcacctcctgtgctctcctcgcccgctcccatagcccccttttcgtcgactctcaccttgagaaaaggagcaggggaggaacgggagagggagccaacttcagccccgcaggcggctgagatttggcgcctctgtccccaagcgggtgggtttggatatatacctgcacaagcggtgcaaggtgatgagaatgagggcggaggggcggtggggactcgag

SEQ ID NO: 114173 - DNA, 264 bp, Homo sapiens
  chr6:146349418-146349682
  hyper
gtaaagaactcagaggagggaggttgaaagagcaaagcgggtcagggaattgcaactcactggtcaaagcgtcccttgcaggccctgccagggaatgtctggctggaccgagcactgtccagggtcctgaaggcggcagggctcaggctgccgcggcgagagcaacccggaagctcccctccgttccctttctagcaactatgcaaaccccaaagcaagcgcaggaccccccctaacccgtccacccaccgcgggaaacaagtt

SEQ ID NO: 114174 - DNA, 467 bp, Homo sapiens; identical to SEQ ID NO: 43566
  chr6:146755454-146755921
  hyper

SEQ ID NO: 114175 - DNA, 801 bp, Homo sapiens
  chr6:146864476-146865277
  hyper
gggcccggaccccacgccgaccccggccccggggggggctcagcgacctcggcgcctcctcaggcccccagtgaacctccggggcccataaaggctccaggccggctccccggaggcccaccagcgggcgtctgggcctccctccgcgccgcgaccgccaggaggcgccgcccgggagaggaagtccagctgggcccggccgggcttcggaggcgccgcccgggagaggaagtccagttgggcccggccgggcttcagaggcgcagggcgggagccgcctcgcgcagggtcctccccaagccggcgccaggccctgccctcgtccggccctgccctcgtctggccccgcccgggccgcgagcactggcgggttctgggtcctgtgaccggtcaggcggcgtcagcgggcgcggcggagggctggccggcctcgggggagtttccgcggccgccgggggcgcggcggcagagcgcgaggccgggcagggggccagactcggagtcgaggcgcgcccgacagccgcagcgctcatggcgggcggaggagccggggaccccggcctgggggcggccgccgccccagcgcccgagacccgcgagcacctcttcaaggtgctggtgatcggcgagcttggcgtgggcaagaccagcatcatcaagcgctacgtccaccagctcttctcccagcactaccgggccaccatcggggtggacttcgccctcaaggtcctcaactgggacagcaggactctggtgcgcctgcagctgtgggacatcgcgggtaagcgcggccgcgagttt

SEQ ID NO: 114176 - DNA, 30 bp, Homo sapiens
  chr6:147525447-147525477
  hyper
ggaagaggggtcgccgcccaggtttcttgc

SEQ ID NO: 114177 - DNA, 1892 bp, Homo sapiens
  chr6:147828684-147830576
  hyper
catgatggggaaactcgattgattttgttacctcctagagggaaaatgccgtgggcggagatgtctgagcgtcccttccaacacgagctgggtggtgctctattgattttcacgcgatccccgggcgggagcgagaggataggctcggattcccgggctccaggaccgaacgcctggcagtgtccccgggggcaaagccaccccgggagcccgtgcagtatactaggtggggggcccggagagaaagcatagcgccgacgagggggaggggccgggcagaaaggagggtggggtaccgggtgggacacactgacctaggagaaagtacaacccaccccaaactttcgcagacccgggagcttaggaagggagagccaggaagacagcagcctctcctgccgcccaacgtgcccagctgcagcgaggaggggcggcgcgcaagccggctggacccgggcggtccccacgttgcgcccaccctccgggccaaaacgccgccgctcgggtcactgagtggccgcccacggaagaagtcagatcgccgggctctgggctgcgtacgggatccgaggaagggggattcaaacgcggatccggaaggaagggacactgaaccccgcagcgtccccagcgccgtggggcggcgggacgtgtccttgggctgccagcgggcgcggaagctggagtccggcagggtcgggaagaagtgagcacagacttccacgggtagaagagtcagattaaacagaaatgtgaaaagcaacccagggcagccaacggagcccagcagcgtagaagccaccggcttcccgccgggaggactacagtgactgacactcgcgaagactaggcgctcccagcggccgcgggtctgcgtggagaagtcgcctcgcggcgcggagcgcgccagcggcggcggcggctgccagagcgcgagatgcggcgcgcagccgccggaccgtcccggctgggaaaactcgcgggcggcactgcgcagcgctgacccggcgcaggtccgaggggtgtgccccggcccctcccgtctccgccccctcccgcgccagtcgcgcgcccctccccgcggcggcagcgtcggcggcgcatccaggggcggcgcggagccttgctcagcccagcagccagtgcctgcgagctccgctgctgcttggggaattcactttgctgcttgttcgcttctcccttcctcaggcttcttctgatggttttccgtctcctgcccgagcctttcctttaaaaggaaaactttactgcgatacccttttccccttggaggagaggattaaaagttccaagaactggtgccgcccgtgccatttgggcgctgggaaggtgctcggcggcggggttcccggtcccaccatgtgcaccaacatagtttacgagtggctcaaagcgctgcagcttccgcagtacgcggagtccttcgtggataacggctacgatgacctggaggtgtgcaagcagatcggggacccggacctggatgccatcggggtgctggcgcccgcgcaccgccgccgtatcctggaggccgtgcgccggctgcgggagcaggacgccaacgccgccggcctctacttcacgcttgagccgcagccggcgccccccgggccgcccgccgacgccgtccccaccggccgccggggggagccgtgcggcggcccggcccagggcacccgcggggactctcgcggccacacgaccgccccccgcagcagggagctggtgagctaccccaaactgaagctgaagatcatgatcagggataagctcgtccgtgacggcatccacctgagcaagcccccgtactcccgcaaggtaaggaggtgccgtccgggcggcccggggcgcgcggcgggaggggacacagc

SEQ ID NO: 114178 - DNA, 30 bp, Homo sapiens
  chr6:147851526-147851556
  hyper
caaaggcggcaggtgcggatggcttttttc

SEQ ID NO: 114179 - DNA, 30 bp, Homo sapiens
  chr6:148466291-148466321
  hyper
gatgtctaagagcagcgactgggaggaata

SEQ ID NO: 114180 - DNA, 30 bp, Homo sapiens; identical to SEQ ID NO: 43571
  chr6:148540220-148540250
  hyper

SEQ ID NO: 114181 - DNA, 1020 bp, Homo sapiens
  chr6:148663338-148664358
  hyper
tccaaacaatggctcgtgcccaagctttcacacttgttttgcagagaagtcttggctggcagaggcaggatttgtaattccttgggtcgcttgacttcacgaggggcgaggtatgcattgtagcgacacggactacttgtgaagcctttgggcgggagtcgcttaaagattaactttctcgggtttccgttaccaaaagcgtttccgtgaatagcgtgattggaaacttgtgcgggccggagaccgcggcgcggctgctctttcaacaggcgatttgttctcctgtccgaggctcatttccatgcaaagagcctgacatcagagcaccttttgttgctaaacgctttctttagcctcgagggagagagtcatgtggagctggaagagctcattttgaagagaggggtcccggggagctccctccaagatctagaggctccgcggccacccctgccgggtcctgccaagacttgctagaaggaacgagtcgcgtgccttagttagttggttcccgtcacaggaagaaacgcctttgcagtgggtttaattgcttctgggccgagcgaattccccgccgtacaactcagtggtgcggactttgcctcctgctaccctgttgctgcgccgagcggggtgggaaagtttctggagttgtcagtcgcgcagcccgtggccacctagacccgaggtgcgggcgcctgcgaagggcccccgcggggtggccggggccgccggggcatgcagcgcgggggcgcggctcggtgacgccgcgggcggggacccggcatccgggcaggctgcgcgcgggtgcggggcgagggcgccgcggggactgggacgcacggcccgcgcgcgggacacggccatggaggacgcgggagcagctggcccggggccggagcctgagcccgagcccgagccggagcccgagcccgcgccggagccggaaccggagcccaagccgggtgctggcacatccgaggcgttctcccgactctggaccgacgtgatgggtatcct

SEQ ID NO: 114182 - DNA, 30 bp, Homo sapiens; identical to SEQ ID NO: 43573
  chr6:148899474-148899504
  hyper

SEQ ID NO: 114183 - DNA, 278 bp, Homo sapiens
  chr6:149067612-149067890
  hyper
gagttcaggcgctgcgcctggccctctggggcgtgtttgaccataactcgcaccgcttgctcttttcccatttcagcaaagtcttgagcctgtattctagtaccttttatcagccttgggtaagcagctcgcacggggtatataaggagaatcaactttctgaactgaaaaaaatgtaaatagtaaagtcagtcgtgcttcttcctgccggtgactgtttacaagagggaagtcagcggggcccccaagaggtcgctggtggcgcaggaaccgcatcc

SEQ ID NO: 114184 - DNA, 353 bp, Homo sapiens
  chr6:149068101-149068454
  hyper
acccctgtcaaggaggtggagcgaggggatggtgtccgcctcctgttcctccctgccgttttttagagaagcctgaaccgggacaaaacacgccgagacctacagacacaaagccggggggtccacgctggcgctggaggcgagccccggcggccgcaagcgagcccgaggcgcggcggggcgcggggcgtggggacgctagcgggcgccggacgggcgcggcgccccgtcacgggcagcgccccgaaccggggccggacacctcggccgctcgggccgcggcggcggggaccatgccgaagaaagtctcctgagcccggcaacttcggcccctccccgcccccacccggctg

SEQ ID NO: 114185 - DNA, 1090 bp, Homo sapiens
  chr6:149068748-149069838
  hyper
ctccctcctctatcagctcagcgggggaccccctcgcttcctgctcgacctgcggcagtacttgggtaaggaagctgggcaggcgctagggcggcgccgacagcgcaaagttgtgcggcggggagagggtcgcggcggggacttctcgcgctgccaccgcgcgccgccgccgccccgggtctctccaggtgctaagcccgtgagcatctgtgccgcggtcgggagcgccttcttcctcccgcgcgtccgactgtcctcaccgaggcgggggcgccgctgggttgcgctgccggcaggtaccccggggcgaggcaccgctcaccttccccccgccccacctccgccacccggatccggactggggcggagtggatgggtgtgtggggtgtgccggagtgtgtgtatcttcaggcctggcggcgcggggagtggcgaagggaagggaaggtcctcttcgttgcattgttagtgaccgcagttcagtcccgtcccgcgccccggggagtgtgggtgggtttagccctttgccaccgtccgctctgagaattctgtcccgcagatcccccgcctgcccgccggccctagtggctccgcgctgtccccgggctggcttgtcccttggctgccgctgcccaccccgccgcccgcagctagcctggcgcggggaacgggttgcatccaggggtttggggatgcccgagggcgctggtcagcctggccagcagtgtcgcccccagtaacccgaggatcctcggcgctgtgtgcgtctcaagctcaagtcaaaacttgtgtgtgtgtgtgtgtgtgtgtgtgtgtgtgtgtgtgtgtgtgtgtgtgtgtggtttattaggagagaggccgcctgtctttagcagaagtaaggaaggggtttgacgggagggaaagagccgctccagcgagaaggcgtgaccccgcagctccctcgtctcggctgcgggagccaggggtgccagggacaggcgagcgcaagcccaggtcgcaaggacgatgctggcactcgcgttcgagccaagggaggatgcagatccctcccaagtctgtggccagaagaggtcgtgcgggggtgaag

SEQ ID NO: 114186 - DNA, 190 bp, Homo sapiens
  chr6:149637866-149638056
  hyper
aggacttctaggaacgtgcaattaaaataaaatcgaaacaacgaaaccctcgcagcatttagatttcttttttccccctcaactgctcaagaaaagtcagaagccgacactttttccaagtctcgaagttgccagttgtgaggctcccaagacgtctcccgcacaccctagggacgattctgcacgggtc

SEQ ID NO: 114187 - DNA, 30 bp, Homo sapiens
  chr6:149638367-149638397
  hyper
atggggggcccaggcggagaaagggggtcc

SEQ ID NO: 114188 - DNA, 30 bp, Homo sapiens; identical to SEQ ID NO: 43577
  chr6:149639678-149639708
  hyper

SEQ ID NO: 114189 - DNA, 324 bp, Homo sapiens
  chr6:149771948-149772272
  hyper
agcgcgatgcgagcccgggcgcgcgcgtccccctcgtcgtcctcggtcgcgtacactgaaagtcccccagtggcgccgtcgccccaggccggctccgcccagacggagcgcccagggaagcggtcggagcggggtggacgggcccacgggtcgtcgggtggcctgcgcggggaaagcaagtcgccgtgcaggtccctagggcggtgttcgccccgcggctggagctgcaggccgggcggaggcgggaggtcgcccggggagaactggctctccgggctagggaggctgagcgggcctggcacccggccgcccgcggacacccag

SEQ ID NO: 114190 - DNA, 169 bp, Homo sapiens
  chr6:149772292-149772461
  hyper
cgtgaggctgcaggcggggaccgggagaggcggccccaggggccccaggtcgtcgctgaaggccagccgagagaagctccctcgcagggcggccaggtccggggacccccgcgccggcgggaggctgtgcgcaaatggttcccggggggccgcccgggctcctgcggag

SEQ ID NO: 114191 - DNA, 49 bp, Homo sapiens
  chr6:149867344-149867393
  hyper
gcccccggcgcggccgttttgaaaatcctggtccgcccttggcgatttt

SEQ ID NO: 114192 - DNA, 52 bp, Homo sapiens; identical to SEQ ID NO: 43578
  chr6:149887281-149887333
  hyper

SEQ ID NO: 114193 - DNA, 30 bp, Homo sapiens; identical to SEQ ID NO: 5183
  chr6:149888030-149888060
  hyper

SEQ ID NO: 114194 - DNA, 236 bp, Homo sapiens
  chr6:149969553-149969789
  hyper
cggccctggaaaatcgggggtccccagagcaccgccagagtgaaaactcacctgcggcggcccaagctcctcgggaaaccgcccaacgccaggcacaggggattggcggagtggagatcccggcagcgaggaaggagggcctgacccagtccagcccactttgctctccgctcacggccccagtactgcccagttcaatcgtcaacaccacctgccggcgcggctcctgctcgccg

SEQ ID NO: 114195 - DNA, 30 bp, Homo sapiens; identical to SEQ ID NO: 43581
  chr6:150038521-150038551
  hyper

SEQ ID NO: 114196 - DNA, 581 bp, Homo sapiens
  chr6:150039175-150039756
  hyper
gccaccgccgccgccgccgccattttgccttccactcagtgtcgccgccgccgcactccgctgcaggtttcccggatgtgggcatttcccggcgtcgcttgcgcgggggccgaggactgggggcttttgcccgcccggctgctgcgagggagcgcgcagcctgcggcctccgggcttcgttgcgtcgcccgcagctctgatcgttcgtgagcgtcgccccacgtcgctcccgcctgcccctgcccatacgactcgcccgcgcccgtgggttaaggctgtctcccgcccagcctacttggttgattcaatccttttccccattgatctatttctctggaccgagtagggatgtgcatttcacggagctacgttctcagaagggaacaactgagttgctctgggaaacctccctgtggacctcagaattccagatttttggcgctttgaaataaaattttattcttgcttagcgttctttccccgaacaagccggtgagcttccagcatctgtattttctgaatccggcagataagaaatgcttgagccaggaccgattgattagcagcggtttagagatctt

SEQ ID NO: 114197 - DNA, 30 bp, Homo sapiens
  chr6:150067599-150067629
  hyper
tgggacacaaacttcgcataaatttcctcc

SEQ ID NO: 114198 - DNA, 30 bp, Homo sapiens; identical to SEQ ID NO: 43583
  chr6:150071488-150071518
  hyper

SEQ ID NO: 114199 - DNA, 197 bp, Homo sapiens; identical to SEQ ID NO: 5185
  chr6:150071939-150072136
  hyper

SEQ ID NO: 114200 - DNA, 287 bp, Homo sapiens; identical to SEQ ID NO: 43585
  chr6:150185354-150185641
  hyper

SEQ ID NO: 114201 - DNA, 147 bp, Homo sapiens; identical to SEQ ID NO: 43586
  chr6:150243888-150244035
  hyper

SEQ ID NO: 114202 - DNA, 30 bp, Homo sapiens; identical to SEQ ID NO: 43587
  chr6:150244618-150244648
  hyper

SEQ ID NO: 114203 - DNA, 360 bp, Homo sapiens
  chr6:150246805-150247165
  hyper
tgggtgccccgctcccggacgatgcccctgggcttccagatccagagcctcgggacgaaactgtttcaggaagacccggaaggactcgccggtcgcggcaagggacaggcggttcctgagacaggaggagccaggaaatgcggggcctggtggggtgaggagcacggggttcctccttcatcctcgcggggactttgccaccggctcagtgtggaggcctcaccgtcccgcccggatccgtggggctccgacagtgtggcccctgcgaggaccccccccatcctcctcgccctggggctgctgcgggagggcgcccgggcagcactaggtcctgagtgtccagggtccggcaggggcttc

SEQ ID NO: 114204 - DNA, 23 bp, Homo sapiens
  chr6:150247248-150247271
  hyper
cgtgaggcggagaaaaccttggg

SEQ ID NO: 114205 - DNA, 649 bp, Homo sapiens
  chr6:150259500-150260149
  hyper
aaggttttctctgcctcaagacgtccatgctcggggcccccagcccagtggagaaaccaggagccctggaccgcgagcggcggggtcggggaggcgacaacgggaagcccctgttggatcctgggcactcaggacctagtgcgccatgggcgccctcccgcagcagccccagggcaaggaggatgggggtcctcgtgggggccacactgtcggatccccagggatccgagcgggactgtgacgtctccacactgagccggtggcaaagtcgccgcgaggatgaaggaggaacctcgtgctcttcaccccaccaggccccgcatttcctgtctcctgccacggttccttgtcgcgaccggcgagtcctcccaggtcttcgaaaggccgttttgtccggaggctgtggacccggaggcccgggagcatcggcgggcagcgtggcacccactcggcggtctcaaccgggcaggacccgggtccggagctcgggcgaagcgggcgtcctgggaggagcgcgcagaacccggagaggacgcagcagggtgaaaactgaaaccgcatatgcgaactgtctccgaaagtcatctgcggttgaaatcagaaatcacctataatatcccctttgtgacaacaccgttgggtaaatatc

SEQ ID NO: 114206 - DNA, 801 bp, Homo sapiens; identical to SEQ ID NO: 43589
  chr6:150262702-150263503
  hyper

SEQ ID NO: 114207 - DNA, 618 bp, Homo sapiens; identical to SEQ ID NO: 43590
  chr6:150284551-150285169
  hyper

SEQ ID NO: 114208 - DNA, 341 bp, Homo sapiens; identical to SEQ ID NO: 5189
  chr6:150285544-150285885
  hyper

SEQ ID NO: 114209 - DNA, 420 bp, Homo sapiens
  chr6:150286099-150286519
  hyper
cgaacatgcccggctgaaggcactcagttcccctccgcggctcctttcctccgggtccgcttcctgcggctgctgcttgccccataggccaggaggcttctgggtggaccagcgcgatctccccgaatatcgcggtctacccgaacatcgcggcctccccgaacatcgcggtctccccgaacatcgcgatcccccagaacatcgcggcctccccgaacatcgcggtctccccgaacatcgcgatcccccagaacatcgcggtctacccgaacatcgcggcctccccgaacatcgcggtctccccgaacatcgcgatcccccagaacatcgcggtctccccgaacatcgctgtctccccgaacgtgcctggctgaaggcactcagttcccctccggggctcctttccgccgagtccgcttc

SEQ ID NO: 114210 - DNA, 320 bp, Homo sapiens
  chr6:150311247-150311567
  hyper
ttctggtctcgtttccgccactgtgttttctcgggccgggagaagcagtcccagggacgcgacaggggcagaaggagccctgcgtggggaattgagaagggtgcggcgcggtcagaaagatccgtcctccgcgacgccctctcctctttctccgacccattcctggaactcaccggctcgcgccgtccagggacagtcctgcagcagaagcagagccagaatgcaatgaatcaacgtggggccctcagccagcgcctttgggaccgggacctggcgacggaatgccgaggacaccggtgttcgccgcgcaggggaaactg

SEQ ID NO: 114211 - DNA, 601 bp, Homo sapiens
  chr6:150311808-150312409
  hyper
tgtgtctgtgggtgatgaaatcgggtcggagtcgctctaaagtcatttttgtctcttgcgcgcctcagggaggatattaaaggcttttgtggatttcaaccgctaaagcctttcctcaaagttcattgcgaggggtttcagttccgcccggcagcatccctcagggttctgcgcgctcccgtggcaccgtctgcgcccgagctccggtcccgtcccgattgcctgatgccccgcagggagcgcccagcggccgccgatgtcccaccagcaggcaccgggcgcctagcgggacccgcgggcggaactgcctttggaagacgcgtgagaactccaccccatcgcggcaggggacagttattatctccgagcttgaggtgaggggaaatcagaggcggctgatggtttcctcctacagcctggtgctgggcgcggggaggactttacacccagctcctgccgagacgtgaccttacagctggggtccttggggctccaaaagtgcggcttccgcgcggatcccattcctgcttgctttgaggctgctggtgagcggcgcctgcgcaggggaagttgtgtgcccgagttgcttacttgtgtttta

SEQ ID NO: 114212 - DNA, 30 bp, Homo sapiens; identical to SEQ ID NO: 43595
  chr6:150326006-150326036
  hyper

SEQ ID NO: 114213 - DNA, 237 bp, Homo sapiens; identical to SEQ ID NO: 43596
  chr6:150326374-150326611
  hyper

SEQ ID NO: 114214 - DNA, 71 bp, Homo sapiens
  chr6:150336632-150336703
  hyper
gaggtccctaaacgccggttggaccgcgaccccagccggtgcggggctcttggcagcgcttggggaagtga

SEQ ID NO: 114215 - DNA, 507 bp, Homo sapiens; identical to SEQ ID NO: 43597
  chr6:150358685-150359192
  hyper

SEQ ID NO: 114216 - DNA, 599 bp, Homo sapiens
  chr6:150463459-150464058
  hyper
gccttgcctgagcgccgtcacgctttctgccctttggatacgaagatatccgaatgctgtgcccatgattaagcagacgcttagtaaggaaagaaaacattggtctggaaataatttctcaagcgccgtgactgccttattgcacaaacatcgcctcttcgatgtttctcacaatccagagaggaagtggcatccatcgtggcatgaataggaatgtgtgtttggagccgtggggcggggctggaggggaggggacgctacccagccaacagaggagacggtggggctaggaaaacctcctgggggagcctgcggcgcggtcctttcctgtgtccccttcgctgcgggtcctgcccggggccgcgccaggtggaggccccgagaggcggcgcgtttcctgcgctccgggattgcgggagaagcgtgagtccctgtctccgagactagaggccacggacacccgcgcaggagcatcccctggcaccccgccccacgcccgtccttccggagtctacacatcggcgacctcccgtgtctaggcgcacacatttcccgccccgcggagactcccacgccccgggccctctctgccgcaggcg

SEQ ID NO: 114217 - DNA, 30 bp, Homo sapiens; identical to SEQ ID NO: 43599
  chr6:150465034-150465064
  hyper

SEQ ID NO: 114218 - DNA, 333 bp, Homo sapiens; identical to SEQ ID NO: 43600
  chr6:150920421-150920754
  hyper

SEQ ID NO: 114219 - DNA, 83 bp, Homo sapiens; identical to SEQ ID NO: 5193
  chr6:150920981-150921064
  hyper

SEQ ID NO: 114220 - DNA, 767 bp, Homo sapiens; identical to SEQ ID NO: 5194
  chr6:150921276-150922043
  hyper

SEQ ID NO: 114221 - DNA, 71 bp, Homo sapiens
  chr6:150962775-150962846
  hyper
tgtggtgctgtggaacgtgtggatgaataaatcactgtttggtagtaagtgtaaaacgttttattggaagc

SEQ ID NO: 114222 - DNA, 30 bp, Homo sapiens
  chr6:151187322-151187352
  hyper
ggtgtgtcgggaaacgcgggcttgggcact

SEQ ID NO: 114223 - DNA, 119 bp, Homo sapiens; identical to SEQ ID NO: 43603
  chr6:151561221-151561340
  hyper

SEQ ID NO: 114224 - DNA, 623 bp, Homo sapiens; identical to SEQ ID NO: 5196
  chr6:151561368-151561991
  hyper

SEQ ID NO: 114225 - DNA, 610 bp, Homo sapiens; identical to SEQ ID NO: 43605
  chr6:151562056-151562666
  hyper

SEQ ID NO: 114226 - DNA, 30 bp, Homo sapiens
  chr6:151645517-151645547
  hyper
gctcactctgggcccgagtgtggtgcatcg

SEQ ID NO: 114227 - DNA, 30 bp, Homo sapiens; identical to SEQ ID NO: 5198
  chr6:151772931-151772961
  hyper

SEQ ID NO: 114228 - DNA, 30 bp, Homo sapiens; identical to SEQ ID NO: 43607
  chr6:151773674-151773704
  hyper

SEQ ID NO: 114229 - DNA, 30 bp, Homo sapiens
  chr6:151773994-151774024
  hyper
ttcactttaatagacgcgctttgggggcgt

SEQ ID NO: 114230 - DNA, 998 bp, Homo sapiens; identical to SEQ ID NO: 43608
  chr6:151814959-151815957
  hyper

SEQ ID NO: 114231 - DNA, 30 bp, Homo sapiens; identical to SEQ ID NO: 43609
  chr6:151918840-151918870
  hyper

SEQ ID NO: 114232 - DNA, 30 bp, Homo sapiens; identical to SEQ ID NO: 43610
  chr6:151942178-151942208
  hyper

SEQ ID NO: 114233 - DNA, 30 bp, Homo sapiens; identical to SEQ ID NO: 43611
  chr6:151948350-151948380
  hyper

SEQ ID NO: 114234 - DNA, 30 bp, Homo sapiens; identical to SEQ ID NO: 43612
  chr6:151952316-151952346
  hyper

SEQ ID NO: 114235 - DNA, 30 bp, Homo sapiens; identical to SEQ ID NO: 43613
  chr6:152417445-152417475
  hyper

SEQ ID NO: 114236 - DNA, 30 bp, Homo sapiens; identical to SEQ ID NO: 43614
  chr6:152437000-152437030
  hyper

SEQ ID NO: 114237 - DNA, 812 bp, Homo sapiens
  chr6:152622718-152623530
  hyper
ctctcagtattattgcgaaattataaacaaatacagggtagacctctgacatgttaagtaattcagctgtctcgagcacatagtttcattttaactgtcattgtttacagtgtcaaagattggcccggcccaacggtagtcaaagagacttaaggaatctgttcctccctctgaatctgcaagatcgaaggctggtccctgaaatcagccacggagagggaacatggagccactcgccaggctccagtcaaagagcaaagccgcggggacccactggatccttaccatgaccacagaggggtgggccgaaggcgtggggaggagctccccatccaggtcctctgtcccttccgccagcccctcgacctcggtcaccgtcagcagcatggtggcgtgcttggctttcatcgtcagcatcttgcacttggaattcaaagaagcgatctgctcctggtagcccttaattttctgcgccagctcctgaggaaacatttcccccaccggggtgtcagagcagcatcaaaaggaaacagaagtagtagcgttcatcttcctgcagggcgagccaatgagcgcgcagagccgcgcgggcccgggaggcaggatgtgtaggcggcgagtcctcctgcatctcgctaccgagccagaccgcaggctgcgcggcgcggcgcaggcacagccaaagtgcccgagcccgcgtccccgcgtcggtacaaaaggagaaatgaggggatgaggccgaatgagtggtttctaatcgcgagaggccccatatggaatcatgaacttccgcaacattaggaactgacaac

SEQ ID NO: 114238 - DNA, 30 bp, Homo sapiens; identical to SEQ ID NO: 5201
  chr6:152720395-152720425
  hyper

SEQ ID NO: 114239 - DNA, 254 bp, Homo sapiens; identical to SEQ ID NO: 43617
  chr6:152957526-152957780
  hyper

SEQ ID NO: 114240 - DNA, 689 bp, Homo sapiens; identical to SEQ ID NO: 43618
  chr6:152957815-152958504
  hyper

SEQ ID NO: 114241 - DNA, 58 bp, Homo sapiens
  chr6:153022494-153022552
  hyper
ttgtggagaaaagaacgtcttggctagagattctgtgtgtggtcgtttcagggacata

SEQ ID NO: 114242 - DNA, 194 bp, Homo sapiens
  chr6:153304116-153304310
  hyper
tcaggtggaggaaccgctccgggggcagctgagcaacctgcctgcttcacagacctgtatctcttaaaaggcgccagctggtacttttaaaatctttgaatttggtgcctaaatccgcgcggtccaatgagacgcgtcgcttgcatgcgcgcaccaataggagggcagtgggtgggggcgccctcgtccgcgcc

SEQ ID NO: 114243 - DNA, 80 bp, Homo sapiens; identical to SEQ ID NO: 43619
  chr6:153304957-153305037
  hyper

SEQ ID NO: 114244 - DNA, 265 bp, Homo sapiens
  chr6:153323864-153324129
  hyper
gacacagcagccctcgcgacaacacccagaatttggagataagggtgagagcgcaccaagccccgcccagcgcaagcgttgctttttaaaggattttccggaagccttggcgggaacttcctgccaagcgtgagaacgctgcgaacttcccggaggccaaaagttgagggggctgagcggagcgtgattggggaggggcgggcctgggagaccttgggcgcctcctctgaaagcctcttggtaggtatccggttgatgggtgacg

SEQ ID NO: 114245 - DNA, 30 bp, Homo sapiens
  chr6:153422261-153422291
  hyper
ccatgttccaagcaacggaataaaaatttg

SEQ ID NO: 114246 - DNA, 576 bp, Homo sapiens; identical to SEQ ID NO: 43621
  chr6:153450984-153451560
  hyper

SEQ ID NO: 114247 - DNA, 370 bp, Homo sapiens; identical to SEQ ID NO: 5207
  chr6:153451759-153452129
  hyper

SEQ ID NO: 114248 - DNA, 611 bp, Homo sapiens; identical to SEQ ID NO: 5208
  chr6:153452143-153452754
  hyper

SEQ ID NO: 114249 - DNA, 102 bp, Homo sapiens; identical to SEQ ID NO: 43624
  chr6:153452788-153452890
  hyper

SEQ ID NO: 114250 - DNA, 550 bp, Homo sapiens
  chr6:154360329-154360879
  hyper
cctactccttggatcgctttgcgcaaaatccaccccttttccctcctccctcccttccagcctccgaatcccgcatggcccacgctcccctcctgcagcggtgcggggcaggtgatgagcctctgtgaactactaaggtgggagggggctatacgcagaggagaatgtcagatgctcagctcggtcccctccgcctgacgctcctctctgtctcagccaggactggtttctgtaagaaacagcaggagctgtggcagcggcgaaaggaagcggctgaggcgcttggaacccgaaaagtctcggtgctcctggctacctcgcacagcggtgcccgcccggccgtcagtaccatggacagcagcgctgcccccacgaacgccagcaattgcactgatgccttggcgtactcaagttgctccccagcacccagccccggttcctgggtcaacttgtcccacttagatggcaacctgtccgacccatgcggtccgaaccgcaccgacctgggcgggagagacagcctgtgccctccgaccggcagtccctccat

SEQ ID NO: 114251 - DNA, 1654 bp, Homo sapiens
  chr6:154830546-154832200
  hyper
gcctgaaaatgcagcgccaccggggatactggcgcctcccggagcaaaagtcactgcctcccggggagtcctggctcgaggtttctccctggcgcaaatgctatggtgttggcttttgcgcggccctctcgccttctccaacaaaaacagacaggctcggcggacccgccggagtctccctctacctgtccgacagccctgtcacgcctgcggacggctctgggcaggcggcatggacgaggtcccgcgggagtcacccacacaaaggcaccttgtgcctctgcactcgggcccccgggtcgccgggcaccgcaccggggccaggcagggagagcgccccccggcccgagtgccgagtcccgagatcggcatccccagccctcaaccgccacagaaaggccacccctactccctggtttaaagatagggctcccctcggcttgccacaatccgcaccctggaaaggaagagctcggagcaggtacgagagataggagcgcacaggccactcggcagaagtttgcattgtcaccgggctgtgccctcaccgcttctcgccgggaggaagggccaagtaccctcttccccagctcctcgtccgccccatccccgaggctggaggactccggacccccccaaggcccgcgcacctctagtccagtccaccacttgtttggggctccacttggtcacgggttccatggtaaaccgcttcgcctctcgctgggctggagagtcgcagataaagtgctgctgcctgcgctccggtgccccttcccgggagggcgcgcccgcggctgctcccctgcgcccgagcgactccgtcaagactgcatggccgcggtcagccagtcgtcccagcgcggctccgccaggggagcccggccctctccctccagctgccacagtccagctgcagctcctccttcccccgccgccgccgggatcccgggcacagctgctgctcccgagcgacggcagctgcaggcacgccgggctgcgaccccagacccctggcctcggctcggcacgggagcctcccggcccgcgaccacttcctcggatctctcgaggcgcgatcggctctccctcggccggtcttctcgcctgctggctctccggggtccccgctccgcgtgcgctggcgtcccggagccttcccggcgcaggtcccacctcctgcgccgccctcccgtgccgccctggcagggccgagcgcagagcgtgcgcgctcgggttgcaaagtttcagctccggttgctgcaaaccgaataaaagagagggcggggccgagggtctagggaaactcgtgggagggggcgggtccgcccgaagcggcggactcgggttactttccctctctaagccggtccggctcacacccgcagcgtcccgggccccgctttccttttcaaggggcgggttgtagatcgcgcgcgcaccctggagagcccgctggtttgtgtgaggccctggccctgtgggtagcagaacactctgtctcgctgtgagcaacaatacactaaaaaaaaaagaaaagaaaaaaaaaagtaagatctgcatgttctgttcattttaaatgctttatatcgtaatactactctgccattaagccgtcattttaggtttcttaaagtagaacaatttttttttt

SEQ ID NO: 114252 - DNA, 30 bp, Homo sapiens
  chr6:155055064-155055094
  hyper
gttggtatggcagccgggttcccctgctcc

SEQ ID NO: 114253 - DNA, 30 bp, Homo sapiens
  chr6:155055453-155055483
  hyper
tctccagaccttcccgggtcctcactgagg

SEQ ID NO: 114254 - DNA, 93 bp, Homo sapiens
  chr6:155316127-155316220
  hyper
ttgcgtgcctttcctcggtgggacccgggaagagccgtctttaaattccttggggaagggacggggtcgcactggcgcatcgcatccccggta

SEQ ID NO: 114255 - DNA, 1000 bp, Homo sapiens
  chr6:155316256-155317256
  hyper
cgatgtttcttgaattgttttatttgtgttgttccaaagaaagcgcgagggacatggtccgggaccagccgggagctggcgcgggggtcctgggcctgacgctgggcggggctggggcgtgtccggggcggggcggggcgggaggtgcggtcgcggctcgggcctggcaggcgctgcgcgcggggctggggcagcggtaaccgtaactgtggccgcggccgccgcaggcgcacagcgcgcgtccaagtggagaacaaagtgacccccagaacttctccaactcctcccggcgttcccgcgagggccacgcgccgagggtagcggagggcggcgcgcgaccggccccaccgagcccggcgcgcgacccgaggtaaggggcgcccgggtgagggcgcaggagggcgacgacccgcgctggttggcggcggctccaggtcccctgcgggcggggcggcgcgcggccggcggtcccctcccttcccctttgttggccgcccctctctgcccccgctttcctgggagtcccgcggaaggtcgcggctgcggggcgcggcctggcaccctctccccggagggcggcagcgtccgggcacagcctggcacgggggacgaagcactttccagaaggctctgaaactaggtcccctggtcccctcgcgctgcgcgacacgccaggacccactttcagccccggtcccatcccggatgggaggaggcggcgccccggcctcctgataccgaggttctcgcccaaagccgagccgtgggtgcccggaggggagcgcccgctgcgcccacgcccgcccggcgacctcggagcctcagaaaggcgctgcggcgaagcaggatcccaggcggtcggctcagcgagtgtagaccgtgcggtccctgctcagcccctccggcctttccgagcgcgggagccatcccggacgggcgcggctcctgggggggctgaggtgccaagtttctgtgaaagccgacacgttgtgcccctaat

SEQ ID NO: 114256 - DNA, 413 bp, Homo sapiens
  chr6:155635390-155635803
  hyper
actggggagacatccggggagcactgctaagccatccacctgtcagcctcaagtccaggaggaaattctgtgatagctgcttcgctgcttgcagtcttaacaacttaatgatttctcgaatcgtgggcaacggagggagacggcaagtgctgagttttccggaggcagccatgatacgcggcaagcaccatccaaccctacctcacccaggaccttcaccgccgctccgaaagaaacgcgcaggggaggaacctgcgagacctaaggcccgcctcggagtcagccccattggtcagacctatcccaccggaagcgatgaccgcggacaggaaattcccggcgtgctgagagcgcatgcgctaagtcctgccgcgagaagggcaggctgggtggtcggcggcttccgcctgtga

SEQ ID NO: 114257 - DNA, 30 bp, Homo sapiens; identical to SEQ ID NO: 43629
  chr6:157008124-157008154
  hyper

SEQ ID NO: 114258 - DNA, 30 bp, Homo sapiens; identical to SEQ ID NO: 43630
  chr6:157008874-157008904
  hyper

SEQ ID NO: 114259 - DNA, 30 bp, Homo sapiens; identical to SEQ ID NO: 43631
  chr6:157097785-157097815
  hyper

SEQ ID NO: 114260 - DNA, 342 bp, Homo sapiens
  chr6:157098323-157098665
  hyper
agcggccgccgagccgccccggccccggccccggccccagccttagcccaagcccggctgggtcccgcgaggctgcgccggggcgggcggcggcggcccggggacgagtccagtccgcgttttgcgagtgcgcgggagtaatgcgagcgaagtggataatagttgctcgagctcgcccgctgcctctcaagccatgctgggcccgataggctcagctagtcgtgtatttacccatatccgggctagagaggaaaagagaaaagtttcatttaaacctgaactaaaaactttcaccatgaaagcacacagcaggagcaggcccagagcgtaaggcgtgcccgg

SEQ ID NO: 114261 - DNA, 30 bp, Homo sapiens; identical to SEQ ID NO: 43633
  chr6:157100263-157100293
  hyper

SEQ ID NO: 114262 - DNA, 30 bp, Homo sapiens
  chr6:157100966-157100996
  hyper
caaataggctctcccggccaggacggctgg

SEQ ID NO: 114263 - DNA, 30 bp, Homo sapiens; identical to SEQ ID NO: 43634
  chr6:157103459-157103489
  hyper

SEQ ID NO: 114264 - DNA, 30 bp, Homo sapiens; identical to SEQ ID NO: 5213
  chr6:157343361-157343391
  hyper

SEQ ID NO: 114265 - DNA, 31 bp, Homo sapiens; identical to SEQ ID NO: 5214
  chr6:157446395-157446426
  hyper

SEQ ID NO: 114266 - DNA, 532 bp, Homo sapiens; identical to SEQ ID NO: 5215
  chr6:157556764-157557296
  hyper

SEQ ID NO: 114267 - DNA, 41 bp, Homo sapiens
  chr6:157744525-157744566
  hyper
ctccatgtttaggtcgcctctagtgcgtccgtccccaactg

SEQ ID NO: 114268 - DNA, 85 bp, Homo sapiens
  chr6:157745201-157745286
  hyper
ccggcaacgttgaccgctagcaagcttggtcttccgctgggaggctggtttgcccattctgtaaatggccgtggagaggaggagg

SEQ ID NO: 114269 - DNA, 30 bp, Homo sapiens
  chr6:157801508-157801538
  hyper
ccgaaagagctgggcggcagcaacccaaaa

SEQ ID NO: 114270 - DNA, 38 bp, Homo sapiens
  chr6:157802481-157802519
  hyper
ctgggaggggttgccggtgccgcgcgcggccgcccagt

SEQ ID NO: 114271 - DNA, 60 bp, Homo sapiens; identical to SEQ ID NO: 43640
  chr6:157802883-157802943
  hyper

SEQ ID NO: 114272 - DNA, 196 bp, Homo sapiens
  chr6:157803298-157803494
  hyper
gtaagtggtggcgaccgctcccccgacgccgcactcccctggtctcccctgtcccccgcccctcctcgggctgctttcgttttctagaagtcttatctactgtaaattgttatataatgccagtctgcgctccctcttttttcttttaaaggtctgattgcttttgggcccccggaaagaacgccgttctgggctg

SEQ ID NO: 114273 - DNA, 572 bp, Homo sapiens
  chr6:158244129-158244701
  hyper
caggaggcgaggaggccgggccgcggccgagggcccagggcgcgcttccggcgggcgtcgcgcgcgccgcggtaaatgggaggctcggccgacaggggcgggggccgcgcagccggggactttcaggaactgcaggagcgtgcggcgcgggagtagccgagcgcccagcggctgggcctgagcgtcgagactcggggccgaggcggaggagcggccgccgcgccggggcccagccggagccgccgccctcgcccttgcctttgcctgcgcggctcagaatcaccatccgcggcgcgggagacgagccggccgtcccgggccgggggacccgcccgccatggccaccaaggtgaggggcgcgcggcgcaggccgggccggtcgctcaggcccggggcggcgcggagagggtcggggccggggccgcggggagggtcggggccaggggtggtcgaggggccactccgcttcctcggtggagtccccgggcgggtccgcggcccagccagtcccttctgggcatgggtgcggcgggcagtgcagacagaccaccaggatcgcaccgggggacggc

SEQ ID NO: 114274 - DNA, 520 bp, Homo sapiens
  chr6:158402114-158402634
  hyper
gtacacgcgcggacacgtgccggtgtccagagccggtgggagaggcgctgtcaccatctgacaggagaggaaggtggagcgcagagaagtcagggtcacgtggtaagtgggggtcgtggtctggggatcacggctccaggtctcttcgcgacaacgcaccgttgacccccaacacctctccctggcggggtcggtgaccgcaacagcctccgggatagaacgctagtgaaaggtaacctttctccagcccgctccacgcgctccgcacccgctaagcgcctccgcgaattaactcaggcctccgcgccgaagtaggcgcagttatgaccccgcttccccgcagggagaccgaggcacgcagggtcgaaaggactcgtccagggtcgcaggagccgaccacacagggaggcgcagcgcccccggcgggaacagtcagcgggtccagcctggcggactcccgggccgggctgcccatataaggctgcgggcggccggcatcgcagccaggctcccggggtcg

SEQ ID NO: 114275 - DNA, 156 bp, Homo sapiens
  chr6:158402897-158403053
  hyper
actctggcaagttgcgggcgcgcggggagctgtcgcgggcagcgcgccctcgggaggacgtggccccggcccccgcccgcagtgggcccgaccctcatggccctgagcaaagggctgcggctgctggggcgcctgggggccgagggggactgtagc

SEQ ID NO: 114276 - DNA, 30 bp, Homo sapiens
  chr6:158403306-158403336
  hyper
ggctgggccggtggcgcacggaggccggcc

SEQ ID NO: 114277 - DNA, 154 bp, Homo sapiens; identical to SEQ ID NO: 43644
  chr6:158430536-158430690
  hyper

SEQ ID NO: 114278 - DNA, 362 bp, Homo sapiens
  chr6:158588747-158589109
  hyper
taaaatgaccgttgccgagtttagagctctctcagcattcaatctattccatctctggggttagagagggagcaggaagcggtggtctgcaaggctcagaagtgactggtgaggccctttcctcctcctcctcatctctccgtgactaccgagcccgggaagacggaccggcaggtgcactccccaaggcctcgacagcagccagagaaaggcagcgacagggaaagacgagtcaggctcgcgaccaccagagagagaggccctcacgcccagccgagcgtcagctggtcggtccggtccgcgcgccagacggcggtgctcggccgtgcccggtccctgccctccccattctccgctcccca

SEQ ID NO: 114279 - DNA, 325 bp, Homo sapiens
  chr6:158589138-158589463
  hyper
cgcccccacaccacccctgccttcacgtcctacctgccggcaggcggactcagcccgtgcccaactgctcgtcggaccccgttgtctggggagccctactctttccgcggctcccggccgggaccctccacccggcggctggcggctcgtgaccccgccccctcggcccgctctgggcccgcctcccgccggctggctccacccacaatagcgtccctagcgcgatggcgtatcggcgcaggcgcactctgccggcaacgccgaggcgcttctgcatctgtgggccgaggtgtgtggcgagcgtccgagcggctggggaaagtgg

SEQ ID NO: 114280 - DNA, 30 bp, Homo sapiens; identical to SEQ ID NO: 43646
  chr6:158652815-158652845
  hyper

SEQ ID NO: 114281 - DNA, 30 bp, Homo sapiens
  chr6:158653925-158653955
  hyper
catggaaatcccggcgcttctgctgtctgg

SEQ ID NO: 114282 - DNA, 1371 bp, Homo sapiens
  chr6:158957206-158958577
  hyper
aagaagccagaagtcgcccgcgggagctgtccgcggtgctgaacgcggtagccggcttcagcctttgacctccccagcaggaaagggccttcggtccgcccccaagcaccattttccttcgtgctcccacctccagtgtcttcccttcccagcgctgccaatggcgagggcggcactgagatttttgtcctgggcggcagacgaccttgtgttgcacttcctcccccgccttctgcctctcccggggcggcggcggatgggcgcggaggcggatgggcgcggctccctcccccactcaggcctcttcacggggcggggggccgggtcccccagcccccacccgcgccgtgtccagctcctcgcgtgctcgcggcggagccctgagcgcactgggtccgagtcctgcgcgccccctcaccacctcccccgcacctgctcctcctcctcggtcccgcccagcgcgccagcagcccgatccccagtgctgggagaagagagggggcgcaggcggcgacacaaagggtggagcggcgggaccgggacccgggaggctgcgcggcatggacgccgagtaccctgcctttgagcccccgctctgcagcgagctcaagcacctgtgccggcggctgcgggaagcgtaccgcgagctcaaggaggacctcacgcccttcaaggatgaccgctactacaggtgggcgcggcgcgggcagcggcggggcggccggaggcttccgggccgcagtcccctccgggaccccggcgcgccccggccttggcctggtcccgccgacggccgcctccgccggccgggcgcggagcctacggatggggacggggtcggggcggggatctgggagggaccaggaaggggacggggagcagggatactggcagcggcgggcaggttcctggattcagggcagcccggcgcccccgggcgaagggccgatttccgttcagctgaaacccaagccgaggctcccgcctccccggaaaggagctgcgggttgtggctcctccctgcgccccgcgtcgttctccccccgcgcccgcctcgccgcccccgctcgggcctcacgcggcgcagtctggggaggcgaccgcgcgcgctgcggcgtcgggaggagggtcttggccgcagctctgagcgccctaggctttgcaggacgcctcggaggcgggggcgccgccaagggctgggggcggatgggcgcggcggggaagacgcggcggggcgccatgcggggacacggcgcctgggagcggctgtgtggaacttgtttgcgttcatctctgtctccctcttcagcggcctaggggagagcggtggggactgcagaccctggcgccggcccccgcccccttcctctc

SEQ ID NO: 114283 - DNA, 30 bp, Homo sapiens
  chr6:158980966-158980996
  hyper
tgggtgctcccggccgtggggctccgcccc

SEQ ID NO: 114284 - DNA, 30 bp, Homo sapiens; identical to SEQ ID NO: 43648
  chr6:158981426-158981456
  hyper

SEQ ID NO: 114285 - DNA, 30 bp, Homo sapiens
  chr6:159065387-159065417
  hyper
gcttggctgcgggccggaggcgaggccctg

SEQ ID NO: 114286 - DNA, 30 bp, Homo sapiens; identical to SEQ ID NO: 43649
  chr6:159065923-159065953
  hyper

SEQ ID NO: 114287 - DNA, 30 bp, Homo sapiens
  chr6:159240062-159240092
  hyper
tcaaaaactgcaaccgctcgggagccgccg

SEQ ID NO: 114288 - DNA, 30 bp, Homo sapiens
  chr6:159240537-159240567
  hyper
acttggcggaagtgcgcgctactcccctcg

SEQ ID NO: 114289 - DNA, 480 bp, Homo sapiens
  chr6:159290683-159291163
  hyper
ccgccccgccgcccccggatccgcgcggctgccagaagctcccctcccccagatcttggcccctccctgaggcgcgcgagcgtgtcgtcgcccgctcccggccaatcagggcgcgcgaccaaaatagcgccatataaaagctggatggcgggcgcggccggtgcagagcctcgcgctggggtggggttgcgcgcgcaggtgaggggggcggggccggcgcgaccggcggggcggggcggacactcccaccgcgcacctgcttctgcctgacgtgtacccggaaggtcgtcagctcaggctccaaatatgtaacagtgagtttctaagtgagtcacacggacgcggttggtttccagtgaggcataactcatcgcttcactcttctcaacggttccctcttcggaaggaagcgcagtccgcagcgtcgtccgagggcgtgatcgcctgcgtcgcacccgcgtctccagtggccaccccttg

SEQ ID NO: 114290 - DNA, 30 bp, Homo sapiens; identical to SEQ ID NO: 43651
  chr6:159420451-159420481
  hyper

SEQ ID NO: 114291 - DNA, 30 bp, Homo sapiens; identical to SEQ ID NO: 43652
  chr6:159421014-159421044
  hyper

SEQ ID NO: 114292 - DNA, 43 bp, Homo sapiens
  chr6:159421500-159421543
  hyper
tgtctctagtattgcggggtggggctgcgcttaaaaacgcaga

SEQ ID NO: 114293 - DNA, 30 bp, Homo sapiens; identical to SEQ ID NO: 43654
  chr6:159463878-159463908
  hyper

SEQ ID NO: 114294 - DNA, 401 bp, Homo sapiens
  chr6:159589685-159590086
  hyper
cggcggacagcagcacgcggcgtccaggacccggccttcctagagcttaggtcactgtagcctccaggggcgctccgagtccatctggagggccgcgaggcttccaggctggaaggaggaatagggagaaggaggaatagggagacctggggcagtgttacaattacagaaaagggagaggcgaggtccgctgagtccttggcctgggcaacaaggcacactgaaaactgggttccttttcgacccgcatcgtgcgcgccctagaaatgacagccagacggagcagggtctaaggacgctgaaaacccctgacgtgggcgcgccgggtgcgggtagggacgtggaaggactgggctagccacaggaactacagcgctgcggaccgggtgaggggtcccggc

SEQ ID NO: 114295 - DNA, 607 bp, Homo sapiens; identical to SEQ ID NO: 43656
  chr6:159590154-159590761
  hyper

SEQ ID NO: 114296 - DNA, 368 bp, Homo sapiens; identical to SEQ ID NO: 5225
  chr6:159590971-159591339
  hyper

SEQ ID NO: 114297 - DNA, 418 bp, Homo sapiens
  chr6:159654646-159655064
  hyper
ctgacccaggccgggcggccccgccccacgtcgcagggccgctcccactcctcctcggacccttacacggcgagctccagagggatgctccccacggccctccagaaccaggacgaggatgcccagggcagctacgacgacgacagcacagaagtcgaggcccaggatgtgcgggcccccgcgcacgccgcgcgcgccaaggaggcagctgcgtcccttcccaagcaccagcaggtggagtctcccacaggcgcaggggcaggtggcgaccacaggtcccagcgcggacatgcggcctcccccgccaggcccagccgacccggcggcccccagtcccgcgcccgggtacccagcagggcagcgccggggaagtcggagcctccttccaagcggcccctgtcctccaagtcccagcagt

SEQ ID NO: 114298 - DNA, 254 bp, Homo sapiens
  chr6:159655082-159655336
  hyper
acgaggaggaggacgcgggattttttaaaggcgggaaagaagaccttctgtcttcctctgtgccaaagtggccctcttcctccactcccaggggcggcaaagacgccgatgggagcctcgccaaggaagagagggagcctgccatcgcgcttgcccctcgcggagggagcctggctcctgtgaagcgacctctccccccacctccaggcagctcccccagggcctcccacgtcccttcccgactgccgcctcgc

SEQ ID NO: 114299 - DNA, 30 bp, Homo sapiens
  chr6:160112330-160112360
  hyper
cacggggccttttcccgtaattcaaggttc

SEQ ID NO: 114300 - DNA, 59 bp, Homo sapiens
  chr6:160112588-160112647
  hyper
aaaaaacatgactatcgattatcttccttgtgcaaaccactaacgaataaattaaaaag

SEQ ID NO: 114301 - DNA, 30 bp, Homo sapiens
  chr6:160113798-160113828
  hyper
aggttccagggcgccgtagtcgtagggcag

SEQ ID NO: 114302 - DNA, 30 bp, Homo sapiens; identical to SEQ ID NO: 43661
  chr6:160114163-160114193
  hyper

SEQ ID NO: 114303 - DNA, 30 bp, Homo sapiens
  chr6:160147678-160147708
  hyper
aaacctcacagggccgccttccccgtgttc

SEQ ID NO: 114304 - DNA, 30 bp, Homo sapiens
  chr6:160148252-160148282
  hyper
ctcgaggccccgatcgggctaggccgacgg

SEQ ID NO: 114305 - DNA, 30 bp, Homo sapiens
  chr6:160148611-160148641
  hyper
cgcggcggggccggcggcagagctgtccgg

SEQ ID NO: 114306 - DNA, 41 bp, Homo sapiens
  chr6:160182803-160182844
  hyper
gcgctctgtaaatgcgtccgaggtccgcggttctgcccgca

SEQ ID NO: 114307 - DNA, 30 bp, Homo sapiens
  chr6:160183145-160183175
  hyper
catcgtctcggcggcgcggaccatcatagg

SEQ ID NO: 114308 - DNA, 30 bp, Homo sapiens
  chr6:160183556-160183586
  hyper
gctttgggctggggtcgggctgtcacacaa

SEQ ID NO: 114309 - DNA, 197 bp, Homo sapiens
  chr6:160209888-160210085
  hyper
atgcactcgagtggcgtttcctgggctaactctactgtaagaagctgtcaacccggatacggctggacgccggacgcccgacctcgactgcagctgcgggcggacagggcaccgggctcatccgagggcgcgcggatggacctactctttttctggtaaatggtcctaaaataaaacctggcgtttaacatggacac

SEQ ID NO: 114310 - DNA, 30 bp, Homo sapiens
  chr6:160210859-160210889
  hyper
accttcgcctcaaacgatgttgcgcagacg

SEQ ID NO: 114311 - DNA, 471 bp, Homo sapiens; identical to SEQ ID NO: 43664
  chr6:160389586-160390057
  hyper

SEQ ID NO: 114312 - DNA, 161 bp, Homo sapiens
  chr6:160402852-160403013
  hyper
catcaacttagatgtcgtgtttgacttagggcttccagccggatccctctccatacaccgggcttccttccagaccctgcatacctctcagggaaaaccaaaggctgacgtttggcatttccctgcttctatttatttgtatttgtcggccctgtatcttt

SEQ ID NO: 114313 - DNA, 781 bp, Homo sapiens
  chr6:160769013-160769794
  hyper
agttccgggagtggtcgggtgaccctggaactttcttcttctggagcccgacctggggctgactgcagagcaggctgctggcagggaccaaaaggagctccgcgccaggccggaggctgcgcccgtcactcgcggtcccggccgggtccctggcgcgtagtcaggccgcaccgcccgagccccaccgcgcgcccaccccggccgggtgcgtccggctcgcggccgtccctcccgcgacctgtggcccggggctgctgcgggcgcccggggaagagaggcgggggccgcggggggcaggaggagcggctgcggccggcacagcgccagggcgagtgaggcgggtggcgcgggggaggcggcggagtaaagagaggccgccggctgggtccgcgggtcactccgaggcgcgggctgcgggcggcgggcggcgggcgcaccatgccctccttcgacgaggcgctgcagcgggtgggcgagttcgggcgcttccagaggcgcgtgtttttgctgctgtgcctgacgggcgtcaccttcgccttcctcttcgtcggcgtggtcttcctgggcacgcagcccgaccactactggtgccgcgggccaagtgccgcggcgctggccgagcgctgcggctggagcccggaggaggagtggaaccgcacggcgcccgcctcccgcggcccagagccccccgagcgccgcggccgctgccagcgctacctcctggaggcggccaacgacagcgcctccgccactagcgctctcagctgcgcggacccactcg

SEQ ID NO: 114314 - DNA, 540 bp, Homo sapiens; identical to SEQ ID NO: 5230
  chr6:160769827-160770367
  hyper

SEQ ID NO: 114315 - DNA, 30 bp, Homo sapiens; identical to SEQ ID NO: 43667
  chr6:160840236-160840266
  hyper

SEQ ID NO: 114316 - DNA, 30 bp, Homo sapiens
  chr6:160941104-160941134
  hyper
tgggagggagtgcccggctcccaaaatcct

SEQ ID NO: 114317 - DNA, 3 bp, Homo sapiens
  chr6:161188080-161188083
  hyper
gag

SEQ ID NO: 114318 - DNA, 166 bp, Homo sapiens
  chr6:161188108-161188274
  hyper
cgccctggaacacggagctggcgagaaggagaaaagcccagctggcggcgtaggggcgagggtcctgcctttcccggcggcctcgccctggccatcctggccctgcgggaaggggtcagcccacccgagcctcgtccacccctcgtccacccctccgcctcccgcc

SEQ ID NO: 114319 - DNA, 228 bp, Homo sapiens
  chr6:161188410-161188638
  hyper
cgaccctggattgctctccccattctcagcctcaccccccactccttccaccccatattttgccgcctcgaaggacatgaaccatctgctggctgaaggcgcttggacctgaaaccagcgacaggttttggcagctgcacgctcactcccagggaggcgagggcgcccggcgaagtgtggggtctgccgccccctgccggcttggctgacgttcgcttctgtttccac

SEQ ID NO: 114320 - DNA, 30 bp, Homo sapiens
  chr6:161412503-161412533
  hyper
tcggccctacccagcgtccctcccagaccg

SEQ ID NO: 114321 - DNA, 30 bp, Homo sapiens; identical to SEQ ID NO: 43669
  chr6:161413111-161413141
  hyper

SEQ ID NO: 114322 - DNA, 81 bp, Homo sapiens; identical to SEQ ID NO: 43670
  chr6:161413418-161413499
  hyper

SEQ ID NO: 114323 - DNA, 30 bp, Homo sapiens; identical to SEQ ID NO: 43671
  chr6:161694825-161694855
  hyper

SEQ ID NO: 114324 - DNA, 30 bp, Homo sapiens
  chr6:161695195-161695225
  hyper
aagttagcagttgccgagagggaagagcga

SEQ ID NO: 114325 - DNA, 181 bp, Homo sapiens
  chr6:163148703-163148884
  hyper
cactgggtaggtggcggctgcgggccaggaacaggcccatgcgcgcagcggcgccagccgcgcctcccaccagcggctctcctgggttaaatcctccaggcctccccgcccccgcgcccggccctaggaatgcgcacgcgcggagggcgcggcccagggcctgctgggagtcgtagttcta

SEQ ID NO: 114326 - DNA, 30 bp, Homo sapiens
  chr6:163289720-163289750
  hyper
tgcgggaggagaatacgcaactccttcgcc

SEQ ID NO: 114327 - DNA, 30 bp, Homo sapiens; identical to SEQ ID NO: 43672
  chr6:163591386-163591416
  hyper

SEQ ID NO: 114328 - DNA, 222 bp, Homo sapiens
  chr6:163834160-163834382
  hyper
agatttagggactgccgacttctatagatcaaggacttcattggtgcagctgaggaaattcttccaaacaagtctaaatgttggaaatccaccaaactgcagagaaagacctcttgcctccgtattctttcttcatctgtaaaaatgttgacttctgcttttcagactacgcgcacagcctctttatttcctactgcggcttcattccctcacggaacactg

SEQ ID NO: 114329 - DNA, 127 bp, Homo sapiens; identical to SEQ ID NO: 5234
  chr6:163834405-163834532
  hyper

SEQ ID NO: 114330 - DNA, 191 bp, Homo sapiens; identical to SEQ ID NO: 5235
  chr6:163834710-163834901
  hyper

SEQ ID NO: 114331 - DNA, 2822 bp, Homo sapiens
  chr6:163834987-163837809
  hyper
cggggccctcccctcccccaccgcgcgctcgcggggcccgacgggggcggagcgaccctcggaaggggcgtggcgaccgggctcgacgcgcgcacgcgctctggagccccacggctacgtgtcgggccacgtgatgcccaccccgaaagtcccccgtgaagcaacaggacgttaaaaaaaaatttctcttctgcggggtggataagaggttctgaaaaaactatagtaacgggaggcgaggcggaggcagcgctggcgcgtcccgctggaattcctctcgcctgccgcgccagccccgaccgcgcccgcagccccacccgccccgtgccgtggaaagccccgcgccccccccgcggccgtcggccccgcagcccacacccacccgccccgggcgccccgcacggcggcgacccagtccttgcgcccaggcccgccgagcgccgcagtccgtcacactcccgttgcccccgtcgcccgccccgccggggaggcagggaggagggggcgcggcgccggcggctgccccggtcgcggggcggcgggcagcaggcagcgggagcgcgccggccgggacccgctaacggccgccctgcgcggccccgcccgccgcccgcccccggccctccccgcgccgctgcccctccccccgccgccgccgctgctgccgccgccgctggcagcgccgcctgaactgaggcgaactccgccgccaagtgagtgaggaggaggaggaggagaaggaggaggaggaagaggaggagcgcagtcggagcgcggcggcagcggcagaggcgccgcggcggggaccagcccagagagaccccccgagcccgcggcacaggcggcggcggcgctgagcgggctcgaccagccgagcgagcggcggccccggctcctcctcgtccggcgccagcagcccgcgccccgcgcccgcactcggccagccgagacccgcctcccgcccgcccgccggcctcgtgagggacgcgccgagccgggcggccgagagcggcggcggctgggagcgcgtcgggcccgggcggaaagtgcctgcggggggcgggcgagcgcgcggtgccggccgccccggggctcggcgcgggagccagagcgggagccggcgcggagcgggacgccgggtcccgagcggcccgcggccggggctcgcccccgcccctccctcctctccggcggcggcggcggcggcggcgggcggagtgagctgcggagcctggaatatggtcggggaaatggaaacgaaggagaagccgaagcccaccccagattacctgatgcagctgatgaacgacaagaagctcatgagcagcctgcccaacttctgcgggatcttcaaccacctcgagcggctgctggacgaaggtgagcgtctccagggccccggccccggcccgacccccgccggggcggcccctttccccgcttgggatggtggggagggcgggaaggtcacggccgggcgggaccgagcgccggggggactgggaggccaggagggcgcacaaaggaggtgccgggccgggcttgcggcgggcgggcgggccggggtggacccgccggtgccggacgccccctgcccggccgggaccccgcgccgctggcgtccaagttggcgcgttgcggagggctgcggggtgagccctgcggcccctctagcttcggcggtcacatttccgagaggtcggcgggggctgcgcggactcggtggtcctcgccgagccctcccgagagcaggcccacgccgcgccgccggcctggaggacgcgtgtgcccggcgcgggccccgctcctccgctcggcctcccgagcctgctctgcgcggacccccaccgccccgcgttcgggagctctcccctcccgtgaggactaaagcggggtttcgtggttggggagttggtgcagctgttcaatactaagtggaagtcagtgtggggctcgttagtttaaagaaattccgtaggagaccgaaattatgctggcgtagccgacaaggaggactaagtgacggcgaaaagcacttttttcccttttgtttggggaagcgagaactgttagggagttgaacttcacttttcgggggtggggggggggggggtggagtgcgaaataacgcgatgacagatcggagcgcagcctgagttagaagaacttgggcggagggtttgctcccggggacgcagccgcctgagtttgtaggacagggtttcgagacgtttggaaagggcgaaataaaattgagccaaagtttccaaaaagctgtatggagcgctgtggggagtgaagaatgacaagaagattaatgttgaccaactttggaatttccttaagaagttctcatagcagtacctgaagtattaatttctagtagctgtgggtttctgtggacgcctagagaaaaaaaagaccacaaaaaaagtctgtttcgaaaatcgactggccaggagtttgtttgtttttttttcctgcttagaggcaccaccggaggactgtgtaaaggaaactgaaaactacaggttgaagagatgaacaatggagtttagatttttcgcaagaatttcgagattttaaaaatagagtcggggaacaggagtttgaagcttggggagttggaatgtcactagagaacaaaaggccggaaatgtttccatgataaaaaatggttaaagaaaaatcccaggagttctgttgtcttgaaagtcatagaaacaacttaaaagtagaaaatggttaggtgttacggctttctcgtcgttttgcttccgtatgttaaacatacagcactcaccaacgttgaaatgggcatt

SEQ ID NO: 114332 - DNA, 121 bp, Homo sapiens; identical to SEQ ID NO: 43677
  chr6:164377730-164377851
  hyper

SEQ ID NO: 114333 - DNA, 30 bp, Homo sapiens
  chr6:165341226-165341256
  hyper
gccgcggcgaggcacgggcgtgcccggcca

SEQ ID NO: 114334 - DNA, 206 bp, Homo sapiens; identical to SEQ ID NO: 43678
  chr6:165722843-165723049
  hyper

SEQ ID NO: 114335 - DNA, 10 bp, Homo sapiens
  chr6:166073936-166073946
  hyper
tagccggagc

SEQ ID NO: 114336 - DNA, 1131 bp, Homo sapiens
  chr6:166073993-166075124
  hyper
cgcccgtgcccgggaagcggggttgcaaggagcggccgatcccggcgcgaatacgctcgccagcccgggggctgcaccccaaaggtgcctgagcgggcggtgagcccggagcagcttcggccgcagggaggggctcaacctcgggtgccctggagacccgggtcggccaaagcctgggaatgagccgcagttgggagcgggaaaccgaaacagcaatcctggaagagcgtcggcccagagaaggcgccgcggaaacgcggctcctgagcgaggcgcagacaaaggctcgggtgcacacgcggtggacggtggctccggagccgcgctctgggccgcgggaagccgcacccgccccgactggcgccggagtcgggcgggggcccatgggcgcgacctcctgcacccggaggtgctcctacccggccccgccgcggtcttcccgtcctcaccctgctccccctccatccgcgaccgcgacgcccccctcctctgcgcaccgggcgcctcctctttcctcactgtctcccgcctgcctgcttccttctagcgaacccctgccttgacttttctgctcaatcttgtcccccacccccgtgacatgcctttctgccacctctgcctcagcgcgctctcggccccgcgcccgcgggtggcgaggaggagtggccacgccacagtgggcccgggggcgcatcctgcgagtcggaggcggcggcgcctttctcttccaccctagcgacctattgtccttcccttttctctaccaccccggaccccagagaagcccgggaccaacaggacgcggcccggggtgggggtgcgtcccctgggtggaggtgcaaccgtttccaccccgccagtccatgctctggatgccggtcactgcgcggggtgggaggccgggcgcccactccgagtcctggagaacggcggtgccatcacagttggaagcgcggggttctgaggccctggcctccctcaccccggctacagggacccggtgggctggacccccaagtggaaggaagcgcatctgctccagccaagtggccacaggctcaagagggaggaacctaagtggtcacaaagttgagtataaatacgcgccggacaagtgtggccagaaacggc

SEQ ID NO: 114337 - DNA, 509 bp, Homo sapiens
  chr6:166075258-166075767
  hyper
cgctccgccaggggcaccggctcctgcccctccagagaagccccctgggcgctccacgcccgggcacgggcacctcgctcgacacccgcttcccacccagcaggccaagccccccacctgcccccaggggatgaggagccgccccacctccggggaacggggagcaggccacttactggggctcaggaagcactcggtcagccttcggaagcagctcgcattattagaaggtccatcttccatgtcggagccgaagagcagcgcggccgcggcggcgagggcgaagctggcgccctggggacgccgcggagtttggccgccgccgcctgggccggcgccggggaagccgggggagcccgcgcggcgggcggcctggccaagggggagccggggcggcggcggcggccggggaccggcacgggctggaagcagcaagccctggagcgcaggcgagaggaagagccgccgccgcccgccgccgctgccaccgccgccgcggtgactactgc

SEQ ID NO: 114338 - DNA, 1622 bp, Homo sapiens
  chr6:166076010-166077632
  hyper
gggccgcgacccagccgcagccgccgccgcgcgcagagagggcgccggggcccccagcggggctggggcggcctgcggaggagaggggcgggcgcgggggcgcggcgcgctccgcccggccacggccaggccactcgggggccgggcccgggcccgccgcgctccccccgccggccgcgctgagccggggttccgggcggagtttgccggggccgcagcccggctcgtccccggccgctggcaggggaccctgggggcggggagcaagaggctcctcgaggctggccatggttcctccccgggccgcggaggggcaggccgcgggcgggaggggcgcggcgggccggggctcggtgggctccgcccccgcaggacctgcccacccctgccggccgcccgaaccgctgcctggtcctcctctccggtcttcggcttccctcccagtctagtcttcacattgtgctcggcttgggttgcgggaggacccgggcctgggggccaggccccggcgacggcgcctggctaccctcaggcgcgcacaatcggcgtcctcccgggccggggctagggacggcggagaccctccctgcaggcgtggcgtggtgtgtgcgcgctccggcggctgagcctcggcggcttctcgaaagcagcggagaaaagcgccgcagtgccgctgcccgtggaggcggtggtggcggcggcggcagaagacgcccactggcggagcaggcgctccccacgccgccgccgccgccgccgccttccgcgcccacgtagcgcgccccgcgggactcggcccctgcgccaggctcccgcacccgagtgatcctctgtgcgccgcctgcacccggggccggggcgggcggacagagcaaccgctgcgtctctgccctgccttgtcacatctgggtccggtgtttcggattctaaatcctgagtcctgcagctgctccagctgtgcgctgctgggcgagccacgtcggcctgcccgttgcccgagccagggaatcctcctggtagcgggccagcagctccgacccagctgtgctcagtcagagttcccgggagagagttccaactcggacctttggttggagtttaaatcaactcgcagtgtttcccataaactagggtttgaaatacggttcctccccaggactccctttcgcatactcactttaaaacgaacttcgtgtgcacaagcccagtttgccttggttggggttagagaacggaaagggcaaactgtggccaaaaatgagcaagactgtgcgatcattgccccaaaccctgagaccgccttgccatatgcggctctcttggacacccccacccccttccgtagccatgaatccaggcagttgccactgaagggaaatgagccgcccaatgggcgctcagaactaggagccgccagaagtttggggaagttggagcgcaagagcgcacacagatgcacaggtgtccgcgttcgggcaggcacgcgcggcggggccaccatggcgcgctgggtccgaggaggggcggtggctgtgctgttccacggtggcacgggctgtccggactgcctggacgaggtcaccttccccggagtggagcacacgcgccaaagctcagctttc

SEQ ID NO: 114339 - DNA, 616 bp, Homo sapiens; identical to SEQ ID NO: 43681
  chr6:166077668-166078284
  hyper

SEQ ID NO: 114340 - DNA, 30 bp, Homo sapiens
  chr6:166078816-166078846
  hyper
ctcaggtggctgctgcgcctggagaacgcg

SEQ ID NO: 114341 - DNA, 164 bp, Homo sapiens; identical to SEQ ID NO: 43682
  chr6:166188883-166189047
  hyper

SEQ ID NO: 114342 - DNA, 617 bp, Homo sapiens
  chr6:166218157-166218774
  hyper
cagagcgcgtggtcgcgaaggggaagagcagaggcaccggctcggctgcaggtgggagggtgtccgggtgaggggtgagcgcggggtcggggagcggcggcgggggactgggcgacggccccggggccgggccgcgggcggagactgacaggcgtgggcggcgacagctgcagctccgaagctcccagcgtggagtcacgcgccagcgcgcggaggggagtggggcgtggggcaagcagaggggcgcacggaggggagcatggagggacgtggggagcatggagagacgtgggggcgcacggagggacggcggggcctggagcgagcataggggcgcacggaggggcatctgggcgtggggcgagcacaggggcgcacggagaggagcatggagggacatggggcgtacggaggggcagcggggcctggggtcgagcagaggggcgcatggaggggagcatggagggacgtggggcgcgcggaggggcggcggggcgtgggacgcgcggttcttcctcgcgaagttggagaggcctcgggtcgcagggcacccactgtgcgccctggacgaagcctaccctggaggcagcggctccgagggacgccggaaggaacgg

SEQ ID NO: 114343 - DNA, 355 bp, Homo sapiens; identical to SEQ ID NO: 5246
  chr6:166267536-166267891
  hyper

SEQ ID NO: 114344 - DNA, 62 bp, Homo sapiens
  chr6:166268182-166268244
  hyper
cgagcccgcagaagccccagaggcctggcctgagcccgggagggacgcggggtccgggagga

SEQ ID NO: 114345 - DNA, 200 bp, Homo sapiens
  chr6:166298466-166298666
  hyper
tactgaattccgcctagactgcggtgcggccttcatgtgcacgcccctgccgccgtttaccgccaggtggcagcgtagaccaagtaaggaagccggcccacccagagctgggaactacaggggtgtgctttgtggctttcagactcacaaagattccagatgaacatgatgtctctttttaaaatcgatttgaaacgcag

SEQ ID NO: 114346 - DNA, 2171 bp, Homo sapiens
  chr6:166400479-166402650
  hyper
agtggcggcagaggcgaggatcaaaagagcagggggtcctgtccccactgagaactggagaagggcggctggctcgggaggaaggaagttgcggtgcacacaccatcccttctccaggccgcctcgggaggcacctgcgggtctggcgcggcagccgctgcggtttgcagctggcgcgcagccctcgctgggaacttggagctctcaaactcctcggatcaagcgttagccccgaggctgtcagttggcgctggggcgggctgcagtctctctcccctcctctgcaaacccttgagtcttcggctttatatactcccttttcttctttctcgagtccactcatcaccctttcccccaaacagtcacctccacaagcacaacacaccacacacgcgcacacgttttcttattgccaaaaagggtggagggaaaggacaggaagtttttttaagtacacgcacacacacacaaagattgggactaagtttttctggactctcaagggttaaataataggtaaaagaactgtcaacttacccgccaaagtatgctgacgcgcatatctgctttccgcttcatttcgagttcataaatttaaaaagagacagtgagagaaagaaaaagaaaaaaaaaggcaaggcgccgggagcacagtgggtccagggttccatggagaactgcgcaaagcaagttgccaagaaagcccgctggccaagttcgggacctgtccaccacgctcgcgcgctccgctcagcaggcagattccaaaggcttggggcactctggggtgcgcgccgatcttctcgcaaaaggcgagtgtgtggggttcctccttccctcctttccatctgggggtctcggggaaagctgcacccagcgccttgggcgcccatgaagaccagtccatctcagctcaagctcccagcagcagcaacttcggactcagacctctctctttagaacatgagtgcttgtgtgtgcgtgcgtgtgtgtgtgtgtgtgtgtccgagtgcacttcacatttgggggtgcttgtgctctcaggaacgactctcccggctgcccggaacttagagagtttccctttaagccggagatgctgctcggacacccccccgcgtccaacaggaggcgatgacgtctgtagcctcgttgccagaacagtccccaggctaccgctgccgttcattgacaggagcgggcgctcggacgtcagcagccggacctttggcaaggctgctcccgcggagacggctcccacccccgcacctgccagcccgcccccccggggggtggtcacgaaatcaaagccaccagaggaggggcccggggaggtgctggggctgggggagggggatgactcggatctgccctctttgtcctggagcaccggagtatataaatagtgcagtctccagccagactctctcccagtcttgcacgcccccgcagtccccccaacccgacccccgccccttgtcactacgtgtcgggctcgctctgcctggagggaggctggggtgcggggaagcagggagtgcaaacagacattggttctctttcctcttcccattcatacatttctgttggagtcctagggccgccgcgccgggagtcgcaatgaatggatggatgcccgcgcgctgggaccaccaggtccgcagagatgtcgccggcgctaggggcgctcctcccgcgtggggacaggcgccctcgcctaggcgcagtgtggggggaccccaaaagacccttaagaggccaaaggcctgctctccccgttctccccaacacacaccaggggtcttttctgccccggagaagttgggacgcaaaacgtagggaactgcgctcagtctccgcaccacgaagagtcgagatggggaccgagaccagcacggacggtagcaacagagaggggagcgcccaagtggcgcaacgttgtggctgaagccaagcctgtcgcctccccctgagtaccgctggcggcccaggaccgtgcgctctcccttcctgagcacccagggatgcactgcgcagggaaggagggcacggcgggagggtgcttgcaggggactgctgcgcggattccccatccgcacccggctcgcggggaatccgtgggcttgcactcgccagaaagagctgctgcaggagcagccggatggtgaggc

SEQ ID NO: 114347 - DNA, 151 bp, Homo sapiens; identical to SEQ ID NO: 5249
  chr6:166402752-166402903
  hyper

SEQ ID NO: 114348 - DNA, 228 bp, Homo sapiens
  chr6:166419578-166419806
  hyper
tgcgcaggagctgccggccctcgcgcgcccctcgcgggccccccgggccccccgcccgcccgcggctgctgccgtcagagctgcctgcgtcaatgctgcttggtgacacacacagctttttttcttctgctcctttttctcaatgagaggagcctaatgggattcttattatcagactcataaatcaaaccgttaggccgtcacgtctggcacgtggacaacaccccc

SEQ ID NO: 114349 - DNA, 455 bp, Homo sapiens
  chr6:166421891-166422346
  hyper
cgggaggccaggtcccgttttgaggagaggagatgcgcccaagcgggggcggaggagcgggtcgcgccgctgacattcgccaaggacaggatggggtgggcgcccgccggtggccgactccgccccgcctctcaggggtgcgagtcatcagcgcagcggcggatcctggcccagggagccaccggcccaccctcgcgcccaggagccggactcggagacgtccacctggtggagagacgcgagggagccatgcagacaggggctgctccgtggagagcccgggaagcctgcggggcgccggaggggtgggtcccgggacagaccagtgaccatccgcctcctgcgtagcgctgcccccaggagaggaaaacccatcggaggttgtgctgtgtgcgttctccaagagggaagctcagtatgagcactcccttcgtccccttaaggaggaccgcaca

SEQ ID NO: 114350 - DNA, 30 bp, Homo sapiens
  chr6:166579160-166579190
  hyper
accgggaaagcgatccgcctctgtccttct

SEQ ID NO: 114351 - DNA, 3059 bp, Homo sapiens
  chr6:166579760-166582819
  hyper
gtttaaatttaaatgcgactttgccatcaaggctgatatcttttccacccccaggagagtttagggctagacaacggaagttccccaaaagctccagtccttcaaaggggagtgctcccgctccccgttcgccaggcgtggatgttatcagcttagtataaacagcgctaaaggccttattagagaaggctgtggcagtttctccagggcagacgtcgcctcccgttcaagcagcgtcccttcccacaacccccgtgcagaaggcgcagcgcggccccctcctcgctggtcccagacctggcgggctcctcacacctacctggccccctccgttgagcttgttggtgagcttgactttgctgaaggagacgggagccttcatccagtgggccccgaagttgggcgagtcggggtggatgtagacgcagctgggcgcctgcggctccggcttgccccccggcacccattccccgttcacgtacttccagcggtggttgtccgccgccacgaagtccagcaggaaggagtacatggcgttggggtccaggccagacacgttcaccttcagcaccggaaacatcctcctggaaaacacggggcgggcgcaggaggaccccgacactgaccaggtaggccggaggcagaagctgggcacagaggcctcagttatttcggggcacagaggagccccctggggaacgtccgagggtgactcccaagctcccccttccccgagccctgccaggtccaggtggcctcctcaccatctccacggcctcgggagggaggggaggagaggacctggcgaagggtttcagtgcaggaggccacatcccgcggggacaggcggggaccagggcgcgcctcgcgggtcccgggatgcctccgaggtcgggacaccgaagtgcgcgttcctcctccccaagcttccgcggagaaagccccagaagaggggcttgtagaaatgcactcgagggagttaaccagagcgggaacaaacacaaagccctcctccaggagaaaaagggttcgacctccgggaacttgccaggtcccccaggctgcccaggcgctggagagcgcggcgcgcgcgggctccggacgcgcacccacctgccgttcttggtcacgatcatctcattggtgagctccttgaagcgcagccacagctcgctctcctccaggcccacgcgcagttcgcgctctgtggggtcgcccttctcgctgcccgcctgcagctcattctccacggcgctcagcaggtggtccactcggtactgcaggctctttcccgcgctctcggtgccaggggagctcatcctcccgtccggctcccctccccgccgtccccgaagcccagactcgctacctgagatccaccttccctgctcttggccgccgcccttccgagaaaaggggccccttggaccgagacctgcgacggctcccgggtcccgggtcccggcacagacccgggaggagggcgcggaccaagacttggggggaggggacgggggcagaggggtggggagaagttattccacttgaactccccaaggctctactagtgtaggtctctggggaccgaaattcagtgccctccccataaatagagccgcggcggcagcgctggggtgctcggcggattgggccgcgcacgctttgaagtgccgggcagcctcccattggccgagagcggccatatcagacccagccgggcgggtctgggaggccgggggccaacaatgggctcccgcacgcctgtttcatgtaaatccggggccccagccctgcgagccccggcccagcccctacacccccgcccttctccaaatgtttgcacctccatcaaagcggcggggcaagccccggaggaaggtaagctggacgccccggcctgccccagcccgccccagcccgccccagcccgcacttccgcgaggggctgcccggcagcctgcgatgctccctgattcccgcgcggggtcctcctcgctttcccagcgcgcccggatcccgcagccgcgccaggctggaacgttcgcgcggcctcacctgtccccgctccaggcgcgcctccctcccctcccagggacgagcgcatttggccgggctttgggatgcgccgcgctcgtctcgccgcagtagtagtgctgttctcgcgcctccgatgcctcaactctccagtctggcagtttccggtgcacctgtccccacacgtccctcgcccacggagccccaggcggcgttacgcacacccaggatcgtggatcagcctgccccggcgtcgggtgtccccgcggctctcaccatctggaaaaggaaggtccgcgcgcagagagggaaatggacggaaataagcaaaagcaaaacaaccccttctgagaagtgtcctcctcgctctcttataaaaacaggacttgttgccgaggtcagcgcgcgcatcgagtgtgccaggcgtgtgcgtggtttctgctgtgtcattgctttcacggaaggtgggagaaggtcggggctggcggggtggtccggactagtgggactcggggcgctttccccgcccggcccagcgccaagcggtgtcggcagcggttgttttattacctttcggtgagaacttacgcgaggagagcgaaggagaggtgacaatgagcaggaaatagttcagtggggtctctttaaacagtaacattcctcctaaaacgggagcccaggaagggggaaggaggcagaagctcccccttccaaggcctggctttgcgcttctgcacacctcgcccattcgctggacgagggcctgcctcgggtagcagcctctgtttcccggtctcctgagcgggcaccccagccccaacccctctagagaaagcctgcgcatcgggtggggcagcgagttcagaggagtcttgcgccctagcaagggggctttcccgcggacatggtatctgcgccccgcgctaagtctcccctgccccctgccccctgcccctcgcccctcgcccagccgggctcgctccggggtcgggaattgctggggaagccgaaggagggatccccgc

SEQ ID NO: 114352 - DNA, 154 bp, Homo sapiens; identical to SEQ ID NO: 43693
  chr6:166582941-166583095
  hyper

SEQ ID NO: 114353 - DNA, 284 bp, Homo sapiens
  chr6:166583152-166583436
  hyper
cgtggtgcgtgttactctccttactccgggtattaaaatgtctaagaggtcatcgctttggcccaaggcctcccgaggataagataaaagggaaaagtggaggggaggtgaaggaggaacgagggtgggtcccaggcaattgagggcctcggaaccctaggcacgggagcgaaacctctcctgcggcttcagggcaaaggagtcccgaaggctggatccctcccctgcgctcggacggcgtcgcggccgcttttcccacagtcgggaagcgccaaagaagactg

SEQ ID NO: 114354 - DNA, 109 bp, Homo sapiens; identical to SEQ ID NO: 43695
  chr6:166666750-166666859
  hyper

SEQ ID NO: 114355 - DNA, 246 bp, Homo sapiens
  chr6:166666879-166667125
  hyper
cgcgcagcggggccgccacgcccgcgcggacacggagcagcggcgcctttccctgcgactggctgtgtcgcctggagcccggcggccgccaccccagggagaaagctccggtgaggggagcagacgctgggacccgtggtctcgccctctgctctttcctggctggggacgggggtagctcccaggcaaaggccctccggggtctccgcccggggggccccacctgccttgtgacggctgagatgt

SEQ ID NO: 114356 - DNA, 471 bp, Homo sapiens
  chr6:166667161-166667632
  hyper
cgtttctcattaaaaaacaagctttttgaataaccaaatgttcctttggcgccctccaattttattttactgtaatctattgagttgtatttgtttttctgaatccgcttcctaggaaagcgccccctcccattttaaaccgttctcaggtggttttttctggaagcagcagtggtttgtccagcaaggattaactctttgccttttcccgtctaaacttctgaagacacctgacagctcgttttaactctgcaaacgacagttcatcctccggggtgtggattcgggctcccacggctgccgcctggggcaagtgcgtctccccgggcgcctacgcggccccgcgcgctcctggcagcgtcgcccccaagccagccccgcctacccagagagggccagtcctgttccgggtcccgagggccttgggaaccccacaggttccttcctcccggggtttcccagcagaccaca

SEQ ID NO: 114357 - DNA, 1046 bp, Homo sapiens
  chr6:166721133-166722179
  hyper
gaggggaagggcctgcggggccgcgccagcagctgcttctccagatgacgcttctggatgaccaggacggcctcgggggtgagattcaggcagaagcgcgcagcggagtctggacaaggccccgcccccgaggaggtgcccgcggcggtggtccccgtccccgccgaggtcgccgcataggtggtcctcgctgggctgtggccggagcctgccggccggggcggggcgcacgtggctggggcccgcgcgcggctgggcaaggcctggggggagacgcccggaggggccggcggctgcgtcctgtccaggccggggccgcgccgggccggcggcctcttgagcgtggcggagggccaggagctggagaggagcccctcgggccgctgtgggggcctcttcttcttgtcccccgcggcgcagggcctccggggtaactggcgcgcggcttgggcccccggggcgggggcgggcggcggcggcatgggcgggaagggcatagtgcagccgagccgccggatcctcagcccctggaaagagaggcgggcgctcagccactgtgcgcggagcgggtccccgcagtccgggcggcccctccacacccacctgcgtccagccgcggcctctccggcttcctcacatcccagcgaccaaacccggggactcaaagagaggcgctcccaccctcccctcctcctgggggtgctcccgggactggaccctgcaggaaccgcctcccgccgtccgactgtgggcgagtcgcggcgcccccgggtccccacagctgagacgcgggccgggccggcaggaggaggagcccagcgcgctcgctaaggacgcggccctgccaggccccgggctgtgcccggctggtgtcacgaccgactgttgaatgggagcaaagtgccaggacagcggagggcggagcgcgcgccaggcatcccggggctcccccagctggcgctccggtggtccgaggttaatgtagtccgtcgaaagccaggagcattcccctgggggagccggcagccttccggagtcacaggtgg

SEQ ID NO: 114358 - DNA, 86 bp, Homo sapiens
  chr6:166755971-166756057
  hyper
ccctgttacagggccgtagcggccgccactctgttgcctgcccctgacgcccaccaggaaaccccgaacccgaaaccccacagacc

SEQ ID NO: 114359 - DNA, 30 bp, Homo sapiens
  chr6:166756494-166756524
  hyper
ggccctgggggcgtcgctagccttcccagc

SEQ ID NO: 114360 - DNA, 30 bp, Homo sapiens
  chr6:166796269-166796299
  hyper
ggttcggcctgcggcgctcgtcacctcatg

SEQ ID NO: 114361 - DNA, 30 bp, Homo sapiens
  chr6:166796685-166796715
  hyper
cggctcccggccagcggggacgtggaggtg

SEQ ID NO: 114362 - DNA, 327 bp, Homo sapiens; identical to SEQ ID NO: 43700
  chr6:166797105-166797432
  hyper

SEQ ID NO: 114363 - DNA, 31 bp, Homo sapiens; identical to SEQ ID NO: 5254
  chr6:166822698-166822729
  hyper

SEQ ID NO: 114364 - DNA, 955 bp, Homo sapiens
  chr6:167039795-167040750
  hyper
aatctgtatcagcctcggcgctgcgaggatattgcatcaggctctttactcctgaacgccgttttagacgcctaagcagattgtgctgctgcctgttcttccccgttctgtgaattctacactgacttcaagtgcacgaatgagctacaagataaggtggaacctgccggccgggcacggcagacagcacctgatcagcgcctcggagggcggagctggggggcttctccactcgggactttgagggacccccgcggagcgctccgcgccactcggcggtctagctgcagagaaagcccctcctcacccggggctccctgtggcccacaggggaccatcccacaccccgtgcagccagcggcggagaaaccagctggaaatgcagtgggggtggagttgcccccgcgaggacccacggaccgcccaattactacggagtcccagcgataacgtttggagccgtttggttcgattttcggaaccggaccagctttccagtaacttgaactccctgacgggtctcggggtccacccaggggtggcgaggcgggctcgggcgaccacggcccgctcagtgcccggcacctgcgcgccccgagggcggccgcattacctcgagccggctcaggctggagctcttggagcgcgacttcctgcgcaggtacacagagaagaacctgcgcacggcgaacttcttcatgctcaggtccatcgccccgcgcccagcccggagcagccgcagggccgggggacgcgcatccccggcatcccaggcgcggggctcaggtccgcgggcgggcacgcgtggccagggagcccggcacggcggccatgggcgcggggcgtggggcgcgagctgcggtcacaaagggcaggccgcgccggccaccgcggccggggccacaatcgctccctccgcctccttctccgcctcccctgcgagtaccagcgccgg

SEQ ID NO: 114365 - DNA, 356 bp, Homo sapiens; identical to SEQ ID NO: 43704
  chr6:167275699-167276055
  hyper

SEQ ID NO: 114366 - DNA, 175 bp, Homo sapiens
  chr6:167276259-167276434
  hyper
cccgccgcgcctccccggagacccacaccgccacctcccgccgcagaacgggagggacaggaacacggacggagggaccgggacgaggggagggctccacgcagcacagctgctttcctgcggagcgttcaggagactcgggcacctctggaagcgctgcggactgagctgcccg

SEQ ID NO: 114367 - DNA, 30 bp, Homo sapiens
  chr6:167370251-167370281
  hyper
cccgcgccttttcccgcagctctgcgccac

SEQ ID NO: 114368 - DNA, 30 bp, Homo sapiens; identical to SEQ ID NO: 43706
  chr6:167370633-167370663
  hyper

SEQ ID NO: 114369 - DNA, 30 bp, Homo sapiens; identical to SEQ ID NO: 5257
  chr6:167412514-167412544
  hyper

SEQ ID NO: 114370 - DNA, 30 bp, Homo sapiens; identical to SEQ ID NO: 5258
  chr6:167412966-167412996
  hyper

SEQ ID NO: 114371 - DNA, 577 bp, Homo sapiens
  chr6:167764612-167765189
  hyper
ggagccccgcaggcccgtggccccctgcctggttctcccgcctctgcaagcctagccttcaggactccgcctcgcccccctcttttctgttcggagactcacggggccgtctgtctggaccacgtgtgcacatttctgaccacgattcctccgcacaccagctacaggcaccgcagcgctggggacggcacagctgaactgtgctggcagcgaaggggcctcacggggacggctcagctccctgagggcgcaacccacctggtccgggggcgggggggggggtgaggaataaacttccgcggttttcagtgacccagtttgttgcatggcacatgttggaaaggtgaatctgaccgcgttgaccgcgttacttcagagatgcgctgtgagctgctttgtgccgcgaaatgacctgtttacccgacagcgccctctgcagcccagcgccggaacgggctttttcatgatgttcctgcgttgtgtttacagcctccctgcgaggggttcgcacgcacaggcggacctcgttttgttgcgccttgctctattgtgcctcgcagatactgcacttgttttt

SEQ ID NO: 114372 - DNA, 931 bp, Homo sapiens
  chr6:168226537-168227468
  hyper
accggccctgcgctccgtacctgtgccgccacgcccaccggtcccctgctgagcctagcaccgcccatttagacccagcaccacccgtccggaccgaacctagcaccgcccgtccggacccagcagcgcccatttggatactgcaccgcccgtccagacccagaaccgcccgtccggacccagtaccacccatcggacccagcgccgcccatttagacccagcaccgccagtccgaaccgaacctagcaccgcccatgggacccatcgcccgttcggacccagcaccgcccgtccagatccagcactgcacccccatttggatccagcaccgcccgtccagacccggacccgccagtccggaccgaacccagcaccgcccatcggatccggcgccgcccatttagacctagcaccacccatccgaaccgaacctagcaccgcccatcggacccaccgcccgtctggacccagcaccgcccgtctggaaccagcaccgcccgtccacagatccatcaccacccatttggacccagcaccgcccgtccccgcccgtccggaccgaacgcagcaccgcccatcggacccagcagcgcccatttagacctagcaccgcccgtccgaaccgaacatagcaccgcccatcggacccatcaccgcccgtccagatccagcaccgcccatttggatccagcaccgcccgtccggactctgcaccgcgcgtccggacccaacacagcaccacccatcggacccagcactgcccatttagatccagcagcgcgcgtccgaaccgaacctagcaccgctggtcgggaaggaacccggtaccgccggttgggacccaccaccgccagtccagacggaaccctagcaccgcgcggggcccgccctccgacacctccctccctggcggccgcggcagcagcacct

SEQ ID NO: 114373 - DNA, 34 bp, Homo sapiens; identical to SEQ ID NO: 5261
  chr6:168227909-168227943
  hyper

SEQ ID NO: 114374 - DNA, 85 bp, Homo sapiens; identical to SEQ ID NO: 5262
  chr6:168228221-168228306
  hyper

SEQ ID NO: 114375 - DNA, 34 bp, Homo sapiens; identical to SEQ ID NO: 5263
  chr6:168228538-168228572
  hyper

SEQ ID NO: 114376 - DNA, 625 bp, Homo sapiens
  chr6:168720069-168720694
  hyper
gctgctcctgcagcgcggccagcgccgcctccagctgctgctcggggccgtggaggccgtgggggccgcagggcgcggcgggcgcgggcgggggctgcagggccagggcgccccgtacccgctcctgctgcgtggctcgcagcccctgcagctcctgcagccccgcgaacgccgcgcgcaacctcgcgcccaacctacggcggtcccagcccgcggaccccgggggtccgcccggcgtccacatctcccgggcagggtcccggcctcccgaaccccacgagcggcgccggaggcccagcgcgcgcggatcccgagctgtgtcgcgggtcctcctgcgcctcctctctccgcccccggctccgcaggtcgccaaggtgggctggaatctgtggccaggcgcggagggcggggtctgcacgcgccccgaggtcaccgcggcctcccccggacccgccccgccgaccccccagggcccctcgccggctgcgggcagggcgggcgcacccagaccccggggccagctgagcgcctccgtgacttcagcggggagggccagccgggaggaggagcccgggggagaggggcaaagaggcgcaagtggaacaaaggcggagaaaggcttgtt

SEQ ID NO: 114377 - DNA, 39 bp, Homo sapiens
  chr6:168841439-168841478
  hyper
gctgggctgatcctgcgcggaccgggcctggaccctggg

SEQ ID NO: 114378 - DNA, 717 bp, Homo sapiens
  chr6:168841502-168842219
  hyper
cgtggttgtgcttggaagccccccgagggtgcgcgcgcgtgggtatgagtgcgtgcgtgtgcctgggtgtgcgtgtgtgtaagtgtgcacgtgtgtgtgtgagagtgcgcgcggggaaggaggcacagagacagcccggacaggccactgcgcagccctggtggcccccgctccacctctcgctccgcagacccgcgccagggaggcctctgggccgcagcgggcaccggagcggagcgggcgcggcagcgggcgctgggaggtggggctgggggaggagagggggagggagagaggcgggcgggaggggaggatccgggaagctccggggtatttgacaggagcgagggcggacgcaaagaacgcggaggacctctgggtgcctgcaggggagctgctccagccgggccgccgggagcggtggggagagcatcgcggagccgcccctccacgcgcccgcccagccgcgctcgcccactgggctctcccggctgcagtgccagggcgcaggacgcggccgatctcccgctcccgccacctccgccaccatgctgctcccccagctctgctggctgccgctgctcgctgggctgctcccgccggtgcccgctcagaagttctcggcgctcacggtaagcccgggcccgcgggacctggagctcaagtggtgccgcctcttgcagccggccgggttcgggtccccgcgccccgctccag

SEQ ID NO: 114379 - DNA, 419 bp, Homo sapiens
  chr6:168842476-168842895
  hyper
gggagctgcgggtgcgctcgggtgtcccgcactcactgctgggcctgagcctgtggggaaccaggtctgggagcgccggcgccgccccgcggactgtcccaaggccaagacagacccgccgggactgggcgcccacctcgcccacggggacccggcctggagcgtgttctcccgaccgctttgggctcgtgcgccgcgcggatcccgggcctctcgccggctgaaggggctgccagtcgtgggccccactcgtgggtctgactctcccagagaccctcgtaagtgagccgaggaagaagcagatgaggttacagatgattcttcacgggcctgagtgttattagagaagcgctttcttcccttctcaggacagaactggaggcaggcggcggctccccgctctgcggggcctctgggtt

SEQ ID NO: 114380 - DNA, 30 bp, Homo sapiens; identical to SEQ ID NO: 43717
  chr6:169386136-169386166
  hyper

SEQ ID NO: 114381 - DNA, 225 bp, Homo sapiens; identical to SEQ ID NO: 5266
  chr6:169613105-169613330
  hyper

SEQ ID NO: 114382 - DNA, 169 bp, Homo sapiens
  chr6:169653481-169653650
  hyper
actgaaaacataaagcgtttacccgggttcccaggcaggtatatacattgaaatagcagcagccacaaccctcagagaggaaggggtgcccggctggtgaaagcacagccacggaggaaaagctgaggagcggccacgtgccttgctcttcaagcgggcagtagaaaca

SEQ ID NO: 114383 - DNA, 199 bp, Homo sapiens
  chr6:169653851-169654050
  hyper
ttcagtgttccggaccgagtcagaaaggcgcaggctctgctggagcgagagaccggccctgcagtgcaggatgctccggtggacgtggccgagcggctcccgggcagcgcggctttatatgccgcttctcctgtgcagggctgtcaatcagacacacgaggaagcacgtttaattcattccttcgaaggaatgacatca

SEQ ID NO: 114384 - DNA, 30 bp, Homo sapiens; identical to SEQ ID NO: 43721
  chr6:169776469-169776499
  hyper

SEQ ID NO: 114385 - DNA, 30 bp, Homo sapiens
  chr6:170102101-170102131
  hyper
cgacccacgcgagccgctatggttactagc

SEQ ID NO: 114386 - DNA, 30 bp, Homo sapiens
  chr6:170123708-170123738
  hyper
aacttcggggaagccgcgccgcgtcccccg

SEQ ID NO: 114387 - DNA, 524 bp, Homo sapiens
  chr6:170124882-170125406
  hyper
tcgccgctcctctcccgcctttgttctcgggtcgcccctctcgctggtggcgctccgagagagcagcggagccacctgcccaggccacgcttccccgagcatccgcagctgcacccgggggctgtcggcgcccgccccggagcgtgcgggaggcacagcgggaagaagtcgctgagattcggccctcgtggctttgcgtgcccgcgtggttgatgcctccgccgagaacgcggtcggccgggagccggggaggagcgtggacgccggcctggcaggtacccccgcgagaacgtgggagccggtgtatttcagctgcatttattactgatctcgggctgcaccagggcacttgtaggaccgcactaaaaacagcggaaagtgaggagccaagcctgggtccggggcggcccgccgtacagctggcctcacggattccactgcctgcgcctgcagatgacttgttctggagagtagagaatgttctcggatttaaagtacaatccggtttcctttccattcattat

SEQ ID NO: 114388 - DNA, 340 bp, Homo sapiens
  chr6:170151378-170151718
  hyper
ttcacttaaacggtcggacatagccgtctcgggcccctagcagtctccgcactcactgcctccttctcgaacatgctaggcctcctttctttcctaggcgtcaccggagcctgctgaggggtctggttcggggtctggatggggctcgacttcacgcctcggcctcgcttctccatctcgctctgttctccaagacgcccaccgcctccccttcaccgccggcggtcaaacgccctagccagtcccgcgagggcggaagtctcccacctgcgcctcgtacggtaggaagtgcccgccagggctccaaagcgcctggaggaggggcgcgcaggcgcctgcg

SEQ ID NO: 114389 - DNA, 30 bp, Homo sapiens; identical to SEQ ID NO: 5270
  chr6:170190097-170190127
  hyper

SEQ ID NO: 114390 - DNA, 193 bp, Homo sapiens; identical to SEQ ID NO: 43724
  chr6:170598158-170598351
  hyper

SEQ ID NO: 114391 - DNA, 647 bp, Homo sapiens
  chr6:170598458-170599105
  hyper
cgctaggcagatcgcagcgcccacctgcgcctcgcggggtccccgaggtcccgccaccgagcgcccaaggcgggatcccagcgcgtcctgcagcccgcccagcttcagggccggcccggcgcgcgcaggtgcggcactcaccggccaggtgaagccgaaggggaagcggatggggttgctgaacgcggagtcggcgcccccgccgtcgggcagactgaaggagtcgacgcccagcacgggggtgacggcgctgccgtaggtgcagggcggctcgggggacacgctggcctggtagtgcttgaggcacacgcggaagaaggtccggcaggcgcacggcggtggccccgcgcccccgcggcagcagttgcggttccccagcagccccttcttgttgacgaactcctgcagcttcagttcgaacaccccagagctccagacctgcacgggggagggcgggggcgtgaggacgcgggtcccgcccgagctagggggcgtgaggcctgggtggggggtgtgcggagagcctggaagggctcaggggccgagcgcgctcgctgcacggccggcgctggggtcgtcgcccccgggattcatcttccgggccgtggctggcgcggcccgtgccgctgtccgcccctccccgcgcg

SEQ ID NO: 114392 - DNA, 442 bp, Homo sapiens; identical to SEQ ID NO: 43726
  chr6:170599639-170600081
  hyper

SEQ ID NO: 114393 - DNA, 30 bp, Homo sapiens; identical to SEQ ID NO: 43727
  chr6:170601105-170601135
  hyper

SEQ ID NO: 114394 - DNA, 30 bp, Homo sapiens; identical to SEQ ID NO: 43728
  chr6:170604439-170604469
  hyper

SEQ ID NO: 114395 - DNA, 156 bp, Homo sapiens; identical to SEQ ID NO: 43729
  chr6:170604988-170605144
  hyper

SEQ ID NO: 114396 - DNA, 454 bp, Homo sapiens
  chr6:170605421-170605875
  hyper
tggaggtggtggcggcgccaggcagcattacgaggggcaccagtgcaaggcccaaagcgcgagggcacaggcggcgcggccgtgcggcgggtcatccctgggccactgcgagggcggagggcggcgccagggccctcccggtggaccccagtcgccgtcgtgacggccccacgcagcctcgcgcccggccgccgcctcgtgcgggactcgtgcccgcattcccacctcaccgggtgcagccggcccggccccgggctgtgcgaggcgacggcgcacacctcggagccctgggggccggggtcggcgggcggggccggggcgcgccctttgtgcgctcttagcggaaaccgcgcgttcccagaggagcgcggcccgccgagaccccggatcccgacgccaggaggtgctgcaggagcccgcgcggggtgggggtctccggcccaggcccctcggt

SEQ ID NO: 114397 - DNA, 163 bp, Homo sapiens
  chr6:170605909-170606072
  hyper
cgcggcggctcctttccggctgcatccggggggtcgaggcgtcgcacctggaaatcgcagcctgtgactttgtaaaaaagtgaatggggaagaaaaggcgctgagaggggcgatgggcggacgggccgtgcccaccacagggaggtcgcggcacctgtcgctc

SEQ ID NO: 114398 - DNA, 30 bp, Homo sapiens
  chr6:170606376-170606406
  hyper
agctttcgaacgcgccgtgcttccccgccg

SEQ ID NO: 114399 - DNA, 137 bp, Homo sapiens
  chr6:170615732-170615869
  hyper
ccccgcccaacccacgacgcgggcgctcctcactctcgcaacggtcacgcagaccccgcctctgcgaacccggccaagtcccgagcggaagcgccttgagcggaagcggaagtgaacgaggcggctgtggcggtggc

SEQ ID NO: 114400 - DNA, 30 bp, Homo sapiens
  chr6:170861914-170861944
  hyper
agcagcaaggagcacggagtggcggtccac

SEQ ID NO: 114401 - DNA, 44 bp, Homo sapiens; identical to SEQ ID NO: 43732
  chr6:170862216-170862260
  hyper

SEQ ID NO: 114402 - DNA, 324 bp, Homo sapiens
  chr6:170863272-170863596
  hyper
agatggctgtggcacggcggccccgccccggaactcctcaagagcttcgcccctccttacctatggaaacacaggaagtgacctatgctcacacttctcatggcctcggccctagtgggagcaactcgctgaagccgagggcagaactggcggaagtgacattatcaacgcgcgccaggggttcagtgaggtcgggcaggttcgctgtggcgggcgcctgggccgccggctgtttaacttcgcttccgctggcccatagtgatctttgcagtgacccaggtaacagattgtactcttttctgacggttcgggcgaaggccacca

SEQ ID NO: 114403 - DNA, 100 bp, Homo sapiens; identical to SEQ ID NO: 43735
  chr6:170893980-170894080
  hyper

SEQ ID NO: 114404 - DNA, 790 bp, Homo sapiens; identical to SEQ ID NO: 43736
  chr7:149019-149809
  hyper

SEQ ID NO: 114405 - DNA, 2032 bp, Homo sapiens
  chr7:191991-194023
  hyper
gacgggaccggtgccgggagctccgctgccctggcgtcccctgggtccaggcccagtcgctccttgggcctctctcgcggggccgcctccgcctcctccttgccgagacgggcgtggggcacggggtcgccgcccggcggggagctcatccggcggcgcagacgccccgcggctccggggagggacttggcctgggccccggccccgcgctcctctggggaggagccgagaggctgcagctggcggcggcggccccgggcgggagggggtcccaggaagcggccaggccggagccccccactcggccgcagctgctggcctggccagaaccgagcgcgccctcccggtctccgccgcttccctctgcaaaccgcgggcaggaggagccctctccttagcgggcccggagctcagaggcgtcgcggggcgcggccgaggggaggaggaaggagagcgggagcgcagccggcccgggcccagccgtgactcgtggggcggcggctccgccaatctgtgggcgctgacgcggggggcggctccgcggcgctcgatatctgcccgcccgggacgcggggcgccgagaggctcggccaggcgggagctgcgctcggggcggccgctgcacctgcccgggaccccgccggccgctccccgcgcccaccccttccgcccttcgccccccccttccccccagccccggtctcccgggcgcggcgtgagagcagagcccggcccggaggagccgccccttccccgcccgcccgcccggcgcctggagaggagcgcgctgaggatcgggacgcctgcggccgccgccaccgcccaggcccgtcgcgccccggccgggatggacccacacgcccgatgagccccgcgccggcggctgcgagcgccgagcctccccctgctgcggccccagccgccccccgcgcgcccggctccgcggaccaggacccctgggctccccggctgagggcgcggccgctccggagaggccgagcggggacgggcccgagatggcgcggggacccagcgctccggcggcgggcgccctgcacgcggcccgggcccggggacagccccggagctggtagccgcccggcaccgatggaccttgacccgcgaggcggcgccgcgctcgtgcccagctgcagctagaggggcgcgcgggcagaacgcgctccaggcccgggccggcccgcgcggccatgaagatgatgctggtgcgccggttccgcgtgctcatcctgatggtgttcctggtggcctgcgcgctgcacatcgccctggacctgctgcccaggctggagcgacgcggcgcgcggccctcgggggagcccggctgttcgtgcgcgcagcccgccgccgaggtggccgcgcccggctgggcccaggttcggggccgccccggggagcccccggccgcctcctccgccgccggcgacgcgggctggcccaacaagcacacgctccgcatcctgcaggacttcagctccgacccctcctccaacctctcgtcccactcgctggagaaactgccgcccgcggccgagccggccgagcgcgccttgcgggggcgggatcccggcgccctaagaccccacgaccccgcgcaccggccgctgctgcgagaccccggcccgcgtcggtccgagtcgccccccggccccggcggagacgcctccctcctggccaggctgttcgagcacccgctttaccgggtggcggttccgccgctcacggaggaggacgtcctgttcaatgtgaacagcgacaccaggctcagccccaaagcggcggagaacccggactggtgagtgggggctggcaggtgcccacccccaagggagccgtgagcccaaggcatggtgtagagaggttcaggggccccagagggccgccccccatggaagaggccgggcagggagtgtggtgcgggaggaggcagccgcctacctcagggcgctgcctttgtctccagaataacctcctccttgggaggggctgccggctggtccgggagctgtgccct

SEQ ID NO: 114406 - DNA, 88 bp, Homo sapiens
  chr7:329605-329693
  hyper
tcccggggatcccggcgcccggaaagcaccaccgagtctcaggcgcgcccagggcgcacgggaccggggctcacggcaccggggcgct

SEQ ID NO: 114407 - DNA, 71 bp, Homo sapiens
  chr7:329764-329835
  hyper
cgagccctgccctgagcgccccaggaagggagccgggtagggggggccgccccgcccgtcggaccacccag

SEQ ID NO: 114408 - DNA, 102 bp, Homo sapiens; identical to SEQ ID NO: 43738
  chr7:362169-362271
  hyper

SEQ ID NO: 114409 - DNA, 473 bp, Homo sapiens
  chr7:372707-373180
  hyper
aggagagggctccttcgtctccacgtggcctcgggccctgcaggtcccccgagggcgcagccgccagcagggggcgcctttctctaacctcccggggaagcgcaggtgccgcccgcacctcagacagcgctgccgcccgcgcccgccctgcgccgttccgtttgctccggtgtcccccagcttgggagcggggccccccagccctggtttgaggcatgacgttggtaggaagagccccttccgtggagcgcggggcccgccggggaggcggccctggagccccctcctcccacccgcccaggattgacagtccctgcctcgggcgccctctgacccccgcgctcaccgagagaggacgaggccccagacaggttgggccgcgatgcaggtggccctgggctcaggtcccagcaccggggttcctgctgaacgagctccgcccttgcccagggaggggccggcggggggggacc

SEQ ID NO: 114410 - DNA, 214 bp, Homo sapiens; identical to SEQ ID NO: 43739
  chr7:402447-402661
  hyper

SEQ ID NO: 114411 - DNA, 30 bp, Homo sapiens; identical to SEQ ID NO: 43740
  chr7:500667-500697
  hyper

SEQ ID NO: 114412 - DNA, 755 bp, Homo sapiens; identical to SEQ ID NO: 5275
  chr7:556556-557311
  hyper

SEQ ID NO: 114413 - DNA, 34 bp, Homo sapiens; identical to SEQ ID NO: 5276
  chr7:557625-557659
  hyper

SEQ ID NO: 114414 - DNA, 293 bp, Homo sapiens; identical to SEQ ID NO: 5277
  chr7:557697-557990
  hyper

SEQ ID NO: 114415 - DNA, 30 bp, Homo sapiens
  chr7:558447-558477
  hyper
gaaaatctaaacatcgaccaccctggcagg

SEQ ID NO: 114416 - DNA, 37 bp, Homo sapiens; identical to SEQ ID NO: 43744
  chr7:558726-558763
  hyper

SEQ ID NO: 114417 - DNA, 506 bp, Homo sapiens; identical to SEQ ID NO: 43745
  chr7:558985-559491
  hyper

SEQ ID NO: 114418 - DNA, 30 bp, Homo sapiens
  chr7:559850-559880
  hyper
ggcggcagcgggcagcgcccagagctgctg

SEQ ID NO: 114419 - DNA, 347 bp, Homo sapiens
  chr7:560259-560606
  hyper
ccggtgagggtcccccgggttctgagcctcccgcgtcgggatccgtggggcgcacagagcgccacctccggccgaggcgcagctcagagcgcgatgcgggggaggaacgcgcgcggaggccgaggtctgagcgtggctagacggctcccacgccgagaaagggcgggtgcgcctgggctggatggatttcgcctccctagaccaggagggattggaccctgactacaggtccaggtgctcgtcagtgccctgccagggggtctacgcgtcctggtaccgggtccagcggggtggcgtgctgtgcagaccccgaggctagacggcctaggcccctggagcccaggaga

SEQ ID NO: 114420 - DNA, 34 bp, Homo sapiens
  chr7:560650-560684
  hyper
tcacccccaaccctgtcgattaaacccctgcccc

SEQ ID NO: 114421 - DNA, 50 bp, Homo sapiens
  chr7:560731-560781
  hyper
cgcgggcggtctttcatccccagctaggccagctctagcatttcaaaggc

SEQ ID NO: 114422 - DNA, 7 bp, Homo sapiens
  chr7:560796-560803
  hyper
cttcggg

SEQ ID NO: 114423 - DNA, 67 bp, Homo sapiens
  chr7:561092-561159
  hyper
tgcatggcttctggaaagagccggactcgcagggccaggacgcaggccggaccccggcctcattctt

SEQ ID NO: 114424 - DNA, 255 bp, Homo sapiens
  chr7:561184-561439
  hyper
catcctgtcttcctgggcctcggactgctcgcgcgcagagggggcccgaggacacctctgtggggttagaggactcggtaagacggtgtggaaggcaaggaggaaggtcgcgttgtattggggatggggtacccgtccctcccagcttgagggatcctgggggtcctcgccgcctctgagggcctagatggctgcttccctcggctcccctgcccggcctggagctacgggtgcgcccagctagagtttagggcc

SEQ ID NO: 114425 - DNA, 30 bp, Homo sapiens; identical to SEQ ID NO: 43748
  chr7:562423-562453
  hyper

SEQ ID NO: 114426 - DNA, 14 bp, Homo sapiens
  chr7:751750-751764
  hyper
atggccaggccagg

SEQ ID NO: 114427 - DNA, 319 bp, Homo sapiens
  chr7:751986-752305
  hyper
gcatccccggggggcctcccaggcccggggctcccggcgcagaccccagcccggccccgcgtacctggatgcgcggcgcccgaggccaggaggcggctgcgcggggacgcggggcgcggggacggctggcgagcgagcgagcgggtccccgcactgcagcggcgccgccctccacgcccgcccccgcgccgcgcgcagctgctgcacccccaacgccgcccgcgcgggcctgcagcccgtctccccccgaccgcctccccgcggggcccccaaccccggcccccacccccggctctccccgcccccgccccatccccca

SEQ ID NO: 114428 - DNA, 109 bp, Homo sapiens
  chr7:752350-752459
  hyper
cgccccccgccccctccactcagactctgagtcgcccactccagccggtgcaggccgcggggccgcctctgatggcctgggcaccccccactcccgccccgttcacgac

SEQ ID NO: 114429 - DNA, 30 bp, Homo sapiens; identical to SEQ ID NO: 43749
  chr7:797705-797735
  hyper

SEQ ID NO: 114430 - DNA, 30 bp, Homo sapiens; identical to SEQ ID NO: 43750
  chr7:814375-814405
  hyper

SEQ ID NO: 114431 - DNA, 257 bp, Homo sapiens; identical to SEQ ID NO: 43751
  chr7:822391-822648
  hyper

SEQ ID NO: 114432 - DNA, 198 bp, Homo sapiens; identical to SEQ ID NO: 43752
  chr7:852641-852839
  hyper

SEQ ID NO: 114433 - DNA, 42 bp, Homo sapiens; identical to SEQ ID NO: 43753
  chr7:852898-852940
  hyper

SEQ ID NO: 114434 - DNA, 198 bp, Homo sapiens
  chr7:853018-853216
  hyper
cgggctcgggtttctgactcgtctcccaggagccggtttctgtttaccgctgaaaggcacgcctgctgccaaatttgaggtgtgagctcaccgagaaaaaagcactgtgctcccccgggagctttgcaaaacgggccgctgctgccctccgttctgcagcagagatggtggccttgaagacagcgagcctgcctacgg

SEQ ID NO: 114435 - DNA, 287 bp, Homo sapiens
  chr7:889349-889636
  hyper
ctcactgatgacgacgggctgttggagctgctgcttaagccctcatcacagaagctcatagccaccagatcgcatttgctttgattgttgactgtctcgtgtgtaattgagtttcccagtttctacagactgccattgctatgcacggctgagatggacagagtttgcttgtgaatccgccacactcactgcctgtcaccacacctgcaggcgacgactgtaagggcaagaggcacctcgacgcgcacacagccgcccactcgcagtcgccacggctgcccggtcgg

SEQ ID NO: 114436 - DNA, 30 bp, Homo sapiens
  chr7:913092-913122
  hyper
tgctggccagaggacgtgagcgtgtgacgg

SEQ ID NO: 114437 - DNA, 100 bp, Homo sapiens; identical to SEQ ID NO: 43756
  chr7:915757-915857
  hyper

SEQ ID NO: 114438 - DNA, 30 bp, Homo sapiens
  chr7:916378-916408
  hyper
agcgtcgagaagggcgactactacgaggcg

SEQ ID NO: 114439 - DNA, 510 bp, Homo sapiens
  chr7:932818-933328
  hyper
gtgttgggcgcgggcgcggtggtgtgtgcaggtgagtgttgggcgtgggcgtggtggtgtgtgcaggtgagtgttgggcgcgggcgcggtggtgtgtgcaggtgagtgttgggcgcgggcgcggtggtgtgtgcaggtgagtgttgggcgcgggcgtggtggtggttgcaggtgagtgttgggtgtgggcgtggtgtgtgcaggtgagtgttgggcgtgggcgcggtggtgtgtgcaggtgagtgttgggtgcaggcatggttgcaggtgagtgttgggcgcgggcgcggtggtttgtgcaggtgagtgttgggtgcgggcatggtggttgcaggtgagtgttgggtgtaggcgtggtggtgtgtgcaggtgagtgttgggcgtaggcgtggtggttgcaggtgagtgttgggcatgggcgcggtgtgtgcaggtgagtgttgggcgcgggcgtggtggtgtgtgcaggtgagtgttgggcgcaggcgcggtggtttgtgcaggtgagtg

SEQ ID NO: 114440 - DNA, 352 bp, Homo sapiens; identical to SEQ ID NO: 43758
  chr7:1001817-1002169
  hyper

SEQ ID NO: 114441 - DNA, 835 bp, Homo sapiens
  chr7:1007357-1008192
  hyper
tgctcggaggggctcgcggccggctatgcccatcagttccagctcctccttctggatttctcgtttgtagtttcctgtgtccctgcctgtctccacttcacagtaagctcacgccatatagccgcactgcgttggcgagctcatggcacgtggccacaccgcgtcagcgccgactccacggtggctgcgtcacggctcacgtgcactgtgaggacactggggttgctatagacagtgctggggcaaccctgtgcctacacaaaatattctaataagaaacaagactttccatcaactagcggtgatatgttaatacgtctgcagcactcagaggcctgacagagagcagacacgggacagtgacagctgcagccgaatcaggtggtagaacccatgggtgcagggacacagggttgggcgggcccagccgcaataggtactcagttctgtgaggaggggagggacatgtttaaccacgaaagggccaccactgcaggacagaaacagagggcctttgctgcagagaactggagatgggctgagaagcctcagccacccacaggcagagggacgagggcagcctgtttcccagagcctgaggtcggccagattggtggccccacctgccagggcttggagacagccactgccagggtcgccagagaggacgtgacctggacctccccaccccgtctcctgccaccatcctccactgaccagacaggagccagcccctttccgacagtgcctgggaaggagacaggtctggctgaggccccagatgtgcaggcacctgcgttccatccacaggtttgggccccggctggcctgacgc

SEQ ID NO: 114442 - DNA, 333 bp, Homo sapiens
  chr7:1069636-1069969
  hyper
ctctgccactggtgtccgcaccccgctttcagagaaggaagtgtgtgctcagtcaccggtttcatgggagggactcaattctgggccttctgagccccagtggccttgtgtgctgactccccagtgtgtccccagcatgaatgcgccagcccacacagtcacctgcctccatgaacgcgccaactccgcgcatccacctgtcttcccgaacgcaacgacccacgcatccacccacctccataaacgcgccaatcctgctcatatgccgtcttcaccaacgcaccaactcgcacagccacccgcctccacacctgagcccggggaccaggtttc

SEQ ID NO: 114443 - DNA, 339 bp, Homo sapiens; identical to SEQ ID NO: 43761
  chr7:1083895-1084234
  hyper

SEQ ID NO: 114444 - DNA, 30 bp, Homo sapiens; identical to SEQ ID NO: 43762
  chr7:1084579-1084609
  hyper

SEQ ID NO: 114445 - DNA, 258 bp, Homo sapiens
  chr7:1105258-1105516
  hyper
gcgacacagcggcgacgagggccgggtctgggagggcgtgggccagggaggggcgacggaggcggtctcccttgccggggtgctggtgacacagcggctgcacctgtcagaacacgccagggtggagacaggagatctgtgtgcttcccgagtacagatcacggctcagcatctcatgggaaagggacagggctctcttcaggacacgcagtaagatttcaagtgcgggcacttttaatactccgcgatccaaaggca

SEQ ID NO: 114446 - DNA, 291 bp, Homo sapiens; identical to SEQ ID NO: 43763
  chr7:1126563-1126854
  hyper

SEQ ID NO: 114447 - DNA, 31 bp, Homo sapiens; identical to SEQ ID NO: 5287
  chr7:1147466-1147497
  hyper

SEQ ID NO: 114448 - DNA, 30 bp, Homo sapiens
  chr7:1177888-1177918
  hyper
ccggcagggacccgcgccccaggtaagcgt

SEQ ID NO: 114449 - DNA, 30 bp, Homo sapiens
  chr7:1178122-1178152
  hyper
ctaggtttgggccccgcagggcttgggggt

SEQ ID NO: 114450 - DNA, 30 bp, Homo sapiens; identical to SEQ ID NO: 43765
  chr7:1216020-1216050
  hyper

SEQ ID NO: 114451 - DNA, 104 bp, Homo sapiens; identical to SEQ ID NO: 43766
  chr7:1263475-1263579
  hyper

SEQ ID NO: 114452 - DNA, 720 bp, Homo sapiens; identical to SEQ ID NO: 43767
  chr7:1263658-1264378
  hyper

SEQ ID NO: 114453 - DNA, 301 bp, Homo sapiens; identical to SEQ ID NO: 43768
  chr7:1265098-1265399
  hyper

SEQ ID NO: 114454 - DNA, 57 bp, Homo sapiens
  chr7:1265620-1265677
  hyper
aacaggaacttgcacggctccggcgccggcgccgctgcagcccgcgtggcccgggcc

SEQ ID NO: 114455 - DNA, 57 bp, Homo sapiens; identical to SEQ ID NO: 43770
  chr7:1268388-1268445
  hyper

SEQ ID NO: 114456 - DNA, 297 bp, Homo sapiens
  chr7:1269166-1269463
  hyper
ggccccggggctggcgggccagagggggaggcgctccggccgcccccgacccggacccggactccgggcccccagctgggcccaagcgcaggaggccggtcctcacggtgcgcccgggaagggaagggccgagcggcctggagctgccagaggccgcggcccgggcgggggaaggggcaggcggaaggcgggccccggaggtctccggctgggccgggcgcgcgcgcctgggccctttgtctcgcgcggccgtcgggcccggggccccagccctgtgcgctcggggcgaggaggttc

SEQ ID NO: 114457 - DNA, 640 bp, Homo sapiens
  chr7:1269552-1270192
  hyper
cgggctggaccgggccggggcgcgtccggcagcgctgagaccccccaccccgaatcaaagtagcggcggctgcgggggcggcgggtgggtgggggggagccgaggaacacggcgaggcgagcggcgtcctgaatgcgagtcgtgtgcgtcttattatcaagttaattaaagctagcatctgacaatgtcactcggctgtagaaaaagggatttaaatgcagcgtctcccaggaccgcgtgtcgagggctgcttcccatgcagttgtttggaggaacagggcccgcgagggagggggcgggggcgggggaggggcgggggagggcgcgggggagggcgtgggggaggggcgcggggaagggcgcgggggagggggagggggcggggggaccctttaaagcgaccgctccagcggcagcaactgacaaggaggcgattatgaaattttgatgttgaaaatggggggcggggtgggggggtgggggccgagagcagaagccgagcgactccccgcggcgccgccgcagccgagggcctctgaagagctctcgagccgggcgggggtcgtcccggccgcccccaccgtcattaaaggcccctctcaaacactcgaggaggttttcggagcgcgagccggcccga

SEQ ID NO: 114458 - DNA, 30 bp, Homo sapiens
  chr7:1270499-1270529
  hyper
ataaagagagatgggcgagggagctcggcc

SEQ ID NO: 114459 - DNA, 374 bp, Homo sapiens; identical to SEQ ID NO: 43773
  chr7:1270794-1271168
  hyper

SEQ ID NO: 114460 - DNA, 1236 bp, Homo sapiens
  chr7:1272151-1273387
  hyper
ggggcggggaggcggcggctggcgggaggcgcgggctcggggccggccccgagtgaagtggggggctagctgggggcccctgccccgggcccaggcaccagcccgcgcctgcccggccctgggcggcccctccctccctccctccctccctccggctccccccgcccccagcccgtcttgttgtgacagttcctgatactgtttattgaggtgcatgtcaggtataattagcaatcgatatggaaaacgtttccctgcacccagcacgcctctgacgtcagagccgattagcgcttcttattggtcccaaattccccgggccgcggctaattatcgggagcttgatgttgataagtaaagcgccggagtgcgggcgaagcatgtgtggggctccgggtccctgtctccgccgccgccgcccgcgcctcccgccgctggcccgccccggccccggcccgcgcccccgcgccccgccaccggccccgccggccccccgcgcgagatgatggacggccgcctcctggaacacccgcatgcccagttcgggggctcgctgggcggcgtggtgggcttcccctacccgctgggccaccaccacgtgtacgagctggccgggcaccagctgcagtcggccgccgccgccgcctcggtgcccttctccatcgacggcctgctcgggggctcgtgcgccgccgccgcctcggtggtcaaccccacgccgctgctgccagccgcctgcggggtcggcggggacggccagcccttcaagctgtcaggtaggcgcggcgggcgggagggcggggaggagtgcggctgggggcgggggccctggtccggccgaggcgctggggggcccggggctggcgaaggagagccggctcctaggcggccgtctctgcgcccccccccccggatccaggcggccagcgggtagcgggagggaggggtgggggtcgggcctgggccggtggctgagccgcgctgcgtcctgtgactgcccgcagactcgggggacccggacaaggagagcccgggctgcaagcggcggcgcacccgcaccaacttcaccggctggcagctggaggagctggagaaggcgttcaacgagagccactatcccgacgtgttcatgcgcgaggcgctggcgctgcgcctagacctggtcgagtcccgagttcaggtaaagacccggcgtcgctcccggatctgccatccggaccccaggctctgggcgcg

SEQ ID NO: 114461 - DNA, 267 bp, Homo sapiens; identical to SEQ ID NO: 43776
  chr7:1273589-1273856
  hyper

SEQ ID NO: 114462 - DNA, 507 bp, Homo sapiens
  chr7:1274417-1274924
  hyper
aaaaggcggttacagcgttgggggagggctcggcttcatgctggagacctccccatggacaaggctccctgcgacaaggctgggcctgctattgtgcaagtctctgtgtggccgcgacaaagaatccgtattaacgcgccctcctggggagggcaggactgcccgagcttccgcggggctcagacggatttgactgtgtgtgtttggtggctggcggttgagtgagggtgtagcgctgccgtccccggatgtcctgtgtggctccccaggacaaggactgcagagaggatggaagagacgcgatgggcccagcctctccttccggcctggtggtcgcctcttgcctccccacctgccttggccggtggcccaggccaaggaccgcaggtttgggaaggctccgttggcgccctggcccagggtttgcggaaagaaggctgtgttagctgtgccctgggagggaggctgcagaggcccacccaagtacggctccccaggcccttccgg

SEQ ID NO: 114463 - DNA, 150 bp, Homo sapiens; identical to SEQ ID NO: 43778
  chr7:1275045-1275195
  hyper

SEQ ID NO: 114464 - DNA, 424 bp, Homo sapiens; identical to SEQ ID NO: 43779
  chr7:1275257-1275681
  hyper

SEQ ID NO: 114465 - DNA, 183 bp, Homo sapiens
  chr7:1275733-1275916
  hyper
cggcggcctgtctccggagccgcccgagccgccgccgcccgccgccaagggccccggagcgcacgcctcgggcgccgcggggaccgcgcccgcccctcccggcgagccgcctgcacccggcacctgcgaccccgccttctacccgagccaaagaagcggcgccggcccacagccgcgcccagg

SEQ ID NO: 114466 - DNA, 228 bp, Homo sapiens
  chr7:1276436-1276664
  hyper
ggggactgcgcggacgcggggaccgccggccccgcgcccccgccgcccgcgccgtcgcccaggcccggccctcggcctcccagccccgccgaggagccggccacctgcggggttcccgagcctggcgcggcggccggacccagcccgccggagggcgaggagctggacatggactgaggccgcggcggccgggagaggcgcgtagccggcccgcggccgctcgctcag

SEQ ID NO: 114467 - DNA, 241 bp, Homo sapiens
  chr7:1277065-1277306
  hyper
cttcccgggggtctgcgcttaatgcgtccttttgtgtgcgtgtgtgtctgtgttttctgattcaacacatttatgcatctgcggctcccggtccccgcccgccccggcgctccccctcctaccccgcgccgcacacgcacgctcacatccgccgcgcgcccccgcgcgcactggcacacgccggggcgcgcggcgcggggtgacggagccgggggctgcgagggccgggccgctgggctcc

SEQ ID NO: 114468 - DNA, 330 bp, Homo sapiens; identical to SEQ ID NO: 43781
  chr7:1277519-1277849
  hyper

SEQ ID NO: 114469 - DNA, 392 bp, Homo sapiens
  chr7:1278130-1278522
  hyper
gctttcctcctcgcgcgggcgcaaatgaatttcggagcccgagtccctttaataatatttacataattttcgctcagtgactctgatatttgctctctaggagaccgagcttataggaaaaataattagatcaaaagaaaagtgagagggggaaggaagagcaggggagggggcgggatccacgggaaggagacctctgcgctggttgcccaactctgggacaggccgcccccagtggaagccaggagttgtcggggaggggacgcggggttcccatggaggtcgcaggagctcggccgcagagcctggccctctgcccctacccctgcttcctggggtcctgcagcctgggcctccccacaggccggccagggccgcgtcccagcagcgcg

SEQ ID NO: 114470 - DNA, 100 bp, Homo sapiens
  chr7:1279052-1279152
  hyper
gtttttgctctattatgcatccgacgccatcatttttctttctaattacggaggtgtcaggtcgagctgtcatgcaggcgctgattttcaatttaactga

SEQ ID NO: 114471 - DNA, 1312 bp, Homo sapiens; identical to SEQ ID NO: 43782
  chr7:1280221-1281533
  hyper

SEQ ID NO: 114472 - DNA, 841 bp, Homo sapiens
  chr7:1281813-1282654
  hyper
ttggggactttcaataactatcgataatctcatctgcacagaaccccccgcctctccgcgttatcggaaagtttgcagcgtttcccgagcagcgcgggcaaggccggacctgcggtggagccggcacctgccgctccgcccgggattagggagctcccggcttgtggggggtgcgggcggccggtggtccagctcgcccgccccggccgagacgctgggcccggcccccacaggctgcgcctgacgggaccggcgggaggcctttgttcgcagcccggaggccccaggctccaaaccacactcgggctgcggggagcgagcgcgggcgttgccgctaattgctgctaattttgttccattaactttatttactcttgaaccccttaattgttttccacttatttttagtaattttataatgcactaataaccaccccccccccagcctgcggacgcctcccgcctcctcctccccgctccctcctcgcttcccctccctgagcgcgacctcccaggcttcccagccactggccgcgggctccgcgtggcgctggcctccgggcacacagagaagccgcggggtgagcgagagctcggcctggggccacgggtgccggtgggtccccccgggattccgcggggagggcagctggctaggaccaggaccagtgtctccgcgccggaggccagagggtttctgcttgcaggcgttcctgcagtaggagggcgcgcagaggcccagagaggggaagggacttgcctaagatcacacagcgtcccagaggccttactgggcaggggagggggtggcccggccgggccctcgcgcgccggcttctgc

SEQ ID NO: 114473 - DNA, 375 bp, Homo sapiens
  chr7:1283685-1284060
  hyper
acctccgaccccagccgacacgctaccaggcctgcaccatagaagtgggctctgagagtgttcccaagccctgggggagggggactccccagagatcgtgtccccgacccctccttccgggcccactgctgccatcccaaacccagccccccagcgtaactcgcaccctcatcccctttcccgaggaatccaaactccggtttaatgagtcgtgaagtgtgagaacttccggagcccgcagcgcccctgatgccaattccagatgtgtgagttgggaggggcgggcctcccggcccgtgagcacccagccgctgccttcagagcgaagcatccagcacccaggttccagcgatcgggggcctgaattggaaacag

SEQ ID NO: 114474 - DNA, 101 bp, Homo sapiens; identical to SEQ ID NO: 43785
  chr7:1286444-1286545
  hyper

SEQ ID NO: 114475 - DNA, 141 bp, Homo sapiens; identical to SEQ ID NO: 43786
  chr7:1286612-1286753
  hyper

SEQ ID NO: 114476 - DNA, 484 bp, Homo sapiens
  chr7:1286886-1287370
  hyper
cgaagggagtcgccgggtacccggctcaggccgtgtctgagcgccagggatgcgcagaaatgggagcctggccgcgcctctgcagcggccttggaggagcctctggagcgggccccgcgggcgcgtggggtgggacctgctggagacccgcaggcggcggcggccaagcagggtcaggcggttggcaccacaggtcgcgccctcggctgcagtcggggcagctccagggggccgcgtacctcccgcttcacggctacgcgtgggggcggctccgtcctggcctcaccagcctccccggagcccctgccggtccccagcctgggggctcaggggtcccgttgggcgtgtgtcccgcccgggccccggtgtggggggcgcgcagtcctcagggccgcctccctcccgcccccagcacagcgccccccagctctcagccggtccttgcggccgcgggatcccagccccagcagcgggaaactgaggc

SEQ ID NO: 114477 - DNA, 222 bp, Homo sapiens
  chr7:1287431-1287653
  hyper
cgggccgcaccccccggaccctcaggacctggagcgcgtggagggcgtggaccaccccggatcccccaccaccgggcgtgtctgccaagggtgtcattgggcgccgcgcagaaggggcttccgaggacccgcccctcccccgcagccgtcagggcgctgacggaggcagctgcgcctgtttaactgggagccggttgcttggcaacccgaggcggctcatta

SEQ ID NO: 114478 - DNA, 30 bp, Homo sapiens; identical to SEQ ID NO: 43788
  chr7:1288706-1288736
  hyper

SEQ ID NO: 114479 - DNA, 158 bp, Homo sapiens; identical to SEQ ID NO: 43789
  chr7:1289293-1289451
  hyper

SEQ ID NO: 114480 - DNA, 331 bp, Homo sapiens; identical to SEQ ID NO: 43790
  chr7:1408439-1408770
  hyper

SEQ ID NO: 114481 - DNA, 17 bp, Homo sapiens
  chr7:1408874-1408891
  hyper
cgcggaccccggcccat

SEQ ID NO: 114482 - DNA, 8 bp, Homo sapiens
  chr7:1409305-1409313
  hyper
cgcagacc

SEQ ID NO: 114483 - DNA, 30 bp, Homo sapiens; identical to SEQ ID NO: 43792
  chr7:1443481-1443511
  hyper

SEQ ID NO: 114484 - DNA, 30 bp, Homo sapiens
  chr7:1443745-1443775
  hyper
ttccctcccctctccgtgttcccaggcagc

SEQ ID NO: 114485 - DNA, 1009 bp, Homo sapiens
  chr7:1498584-1499593
  hyper
tcacgtctgactcagccggcgggcgggggatgccatggctctggcccagctgcattcggtgtccgggcacactgaggccactgaggacagcctcggggggctgcacggtgggctgtgcctgcccagtcccacgcctcggctccccatcccccagccgcccgggcctcagtttccccgcccgtgtcagcgcgcagccgaacagcagaagaatcaaagggcgccaggcaggacttacatgaggtcgggccggtggcggtgcaggatggcgcagaaagccaggccgtcgcggaacgacgtggtcatgttgcagatattcacgtcgcggtagccctcgcactgctgccggcaccactgttgcagcgccctgatggccgccatgtgggcggcgcgcccgccgcgcggcggaaccgccctccgacaccttcccgcggctgtgccgcgaccgcccggccggcgggacagacgctgggaccgctacggaaccgccagacccacggcgcccagccccagctgagccggactgagggcgacgagtgccgggtccctaagagaagccgagcccggccccgcccccgccggccccgcctccttgtaggccccgcccccagccgccaagtcctgcctccggataggccccgtcctcacacctcccagccccggcataggctcccgcccaggcaggccccacctcccgacaggccccgcccccagccgccgggtcctgcctcctgataggccccgttcccacgcctcctggccccggcacaggctcccgctccaggcaggccccgactccggacaggccccgcccccagcctccaggttttgcctcccgagaggccccgccccacgccgcccggccccagtacgggctcgcgccctaggcacgtcccgcctcctggtaagtcccgcccccacgctgtcaggtcccgcccgacaggccccgccccacgccgcctggcccctccccaggccccgccccgccgctgagggccgagacccccaaccg

SEQ ID NO: 114486 - DNA, 30 bp, Homo sapiens; identical to SEQ ID NO: 43795
  chr7:1544318-1544348
  hyper

SEQ ID NO: 114487 - DNA, 187 bp, Homo sapiens
  chr7:1546634-1546821
  hyper
gtgttgacattcacacgtacctgtggccccatcccccatccctttcaaccctgtaacgaacattcccaaaccacccctgacttgtccccaggccgccagggcgccactttctgtccctggagaggcgctgtttgctcttctggagtctgtgtgaatgaaagcacacagtgcacgctccctggccagc

SEQ ID NO: 114488 - DNA, 459 bp, Homo sapiens; identical to SEQ ID NO: 43796
  chr7:1571090-1571549
  hyper

SEQ ID NO: 114489 - DNA, 401 bp, Homo sapiens
  chr7:1572208-1572609
  hyper
aaacccgggagccagcgtttaccgagggtcagggttgtcggggcgccagcctttgtgtgcacccgggaggctgctgttaagggagaccgtcttccgggccacttcgctgtctacaaggcgtgtgctttcacccacggggctcagcgatggctgcgtttgtttacagtctctggcaaagctgtttgccacccagacggagaagaagttgtgcctgttcttgtcccagctgtttctgagtctaaaggtttctggagtggactttctgggtttcgggtccagtccacacgggaaatggaaatctggccagctgagagagggctccgtgtggccgcctttcaacagtaaacagtgactcaccgctccgtccccaccctccctgctctccgcgaatggaagatgcc

SEQ ID NO: 114490 - DNA, 95 bp, Homo sapiens
  chr7:1609778-1609873
  hyper
agcggctcgggttccgcgctgccggcagggcttgggggcgccttagagccgaaccccgttttttcaggaaagggcgctgcgaccacccccgtccc

SEQ ID NO: 114491 - DNA, 19 bp, Homo sapiens
  chr7:1703852-1703871
  hyper
cccccaggccgggctcggc

SEQ ID NO: 114492 - DNA, 3500 bp, Homo sapiens; identical to SEQ ID NO: 43800
  chr7:1704118-1707618
  hyper

SEQ ID NO: 114493 - DNA, 15 bp, Homo sapiens
  chr7:1707646-1707661
  hyper
cggcctccagtcctc

SEQ ID NO: 114494 - DNA, 656 bp, Homo sapiens; identical to SEQ ID NO: 43802
  chr7:1708905-1709561
  hyper

SEQ ID NO: 114495 - DNA, 47 bp, Homo sapiens; identical to SEQ ID NO: 5305
  chr7:1709617-1709664
  hyper

SEQ ID NO: 114496 - DNA, 51 bp, Homo sapiens
  chr7:1709871-1709922
  hyper
ccgcgcgcgcagatcgatgggcgaagctggggaggaatttcaatcccggga

SEQ ID NO: 114497 - DNA, 288 bp, Homo sapiens
  chr7:1709955-1710243
  hyper
cgggcgcagccccggaaccgaggccgggcgggcaggtaagcggcgagcgcggccgggcgctgaacctgggggacttgggacccggaccacccccggggagcggcgcggccaagccccccgccacctcgaaccccgggcgtccccgagtgcgcagcgtgcgcccccagcccctgctgcgcccccaggcctggcgcgcgatccgagcgcagcgggcaaagttggaggaacttggcggcggcggagcgggcgcaggctcagcccgacaaagcccgggggcccgggtcgggg

SEQ ID NO: 114498 - DNA, 192 bp, Homo sapiens
  chr7:1710324-1710516
  hyper
cgtccgcaccctgcccggcgccccccagacgcggccccctgcccttcccttcccggaaattagggggctgtcctcacctcctggccgagtcgctgacccctccccaggctcgcatcgccctccctgctgggccgccctccccccgacgctgcgagcctcctcgctccgcgcggggaccgtccagtcacgcac

SEQ ID NO: 114499 - DNA, 30 bp, Homo sapiens; identical to SEQ ID NO: 5306
  chr7:1782562-1782592
  hyper

SEQ ID NO: 114500 - DNA, 1073 bp, Homo sapiens; identical to SEQ ID NO: 43808
  chr7:1785929-1787002
  hyper

SEQ ID NO: 114501 - DNA, 182 bp, Homo sapiens
  chr7:2018615-2018797
  hyper
acgctggaggaacatcgaatctagaaggcatcatagctgccatgtgcagagcacttcctgggccggggccacactaaaggcagcccttttcctgctttactctcggcaaccctgagaaagaggggccatccacaggtgaaaactggaaccccagggagtgggtgtgacggacgaagcagagg

SEQ ID NO: 114502 - DNA, 212 bp, Homo sapiens
  chr7:2027515-2027727
  hyper
cctgggtgggaaacccgggctcccaggcacgggaccatgtctgaagctccgatctctggggcagcctacagcctagggaggaggctgagctggcaggaagtcaggcaggcccctaggaggcatcctcaccgaggacctgtagaacacctactcacacccggggcaggcccatgagaggcgaggagcggcaggaggcccgtgagggaggggag

SEQ ID NO: 114503 - DNA, 30 bp, Homo sapiens
  chr7:2079990-2080020
  hyper
tggccccaccggcaccggggactttgttcc

SEQ ID NO: 114504 - DNA, 203 bp, Homo sapiens; identical to SEQ ID NO: 43809
  chr7:2195724-2195927
  hyper

SEQ ID NO: 114505 - DNA, 31 bp, Homo sapiens; identical to SEQ ID NO: 5308
  chr7:2250419-2250450
  hyper

SEQ ID NO: 114506 - DNA, 30 bp, Homo sapiens
  chr7:2272044-2272074
  hyper
agagcggaccggcgcgagccaccaggatgc

SEQ ID NO: 114507 - DNA, 30 bp, Homo sapiens
  chr7:2272652-2272682
  hyper
tcctggggactccgcgtccgcacccggagc

SEQ ID NO: 114508 - DNA, 30 bp, Homo sapiens; identical to SEQ ID NO: 5309
  chr7:2281348-2281378
  hyper

SEQ ID NO: 114509 - DNA, 30 bp, Homo sapiens; identical to SEQ ID NO: 43812
  chr7:2281728-2281758
  hyper

SEQ ID NO: 114510 - DNA, 30 bp, Homo sapiens
  chr7:2282237-2282267
  hyper
gtctgacctgcctccgccaccaggacccag

SEQ ID NO: 114511 - DNA, 360 bp, Homo sapiens; identical to SEQ ID NO: 43813
  chr7:2443783-2444143
  hyper

SEQ ID NO: 114512 - DNA, 320 bp, Homo sapiens
  chr7:2517233-2517553
  hyper
tctccatgggtgctgccgctggggcctgtgcccggacgtcctggtaggagggtgggactgctgaggccgggaggggcctcaaggtggtcgtgactgtccgccagccccctgggtggtgcagagcagtgcggagcctgcggctgtggagcccgtctctcctgcctggctcgtagcagggctggccgtggccctgcagggggcagccctgggcagcagaggatgagcgtgcctgccctccccggccacatccgcgtccccatcctgcctggccgtcctggggcccagcaagccgcaggtccctcctacgtgcctcccccaga

SEQ ID NO: 114513 - DNA, 78 bp, Homo sapiens; identical to SEQ ID NO: 5310
  chr7:2524319-2524397
  hyper

SEQ ID NO: 114514 - DNA, 78 bp, Homo sapiens; identical to SEQ ID NO: 43815
  chr7:2555343-2555421
  hyper

SEQ ID NO: 114515 - DNA, 231 bp, Homo sapiens
  chr7:2558675-2558906
  hyper
ggcgagggaagtggcggccttcgtttctcctcgccatggggcgcctgaggatttcggggagccaaccctcccgacggagggccaggatcgaggaaatcagccagggaggaaggagtggaatttggttctggtgctttctcgttagaacctcgtgtccccacctgcggcacaggtggccaagctcttgctctgtacaaataacggctcccctgaaccgagcgctcgggaaga

SEQ ID NO: 114516 - DNA, 30 bp, Homo sapiens; identical to SEQ ID NO: 43817
  chr7:2559402-2559432
  hyper

SEQ ID NO: 114517 - DNA, 30 bp, Homo sapiens
  chr7:2559677-2559707
  hyper
ggcggcgcccggggcgctggtccgcgacgt

SEQ ID NO: 114518 - DNA, 168 bp, Homo sapiens; identical to SEQ ID NO: 43818
  chr7:2559951-2560119
  hyper

SEQ ID NO: 114519 - DNA, 30 bp, Homo sapiens
  chr7:2560990-2561020
  hyper
gttttgtttggcggccgggccgttaggatt

SEQ ID NO: 114520 - DNA, 269 bp, Homo sapiens
  chr7:2561981-2562250
  hyper
ggctggggggagggtcggttggtcagcaggggccgcgctgagatgggcctggagtccaggatgaagagcctggcctttggcccagaggttccccgcccctcccaggagcagccaggctgccgcgctgccaccacagcggccacaattgctggggagaacttggcatcctgtgtttctttgaatcgcggctccaggaacaatgctgcttcctgtgggtgtcccccggcccccgcccccgtccaccctcatccacccggctcttcctcctg

SEQ ID NO: 114521 - DNA, 82 bp, Homo sapiens; identical to SEQ ID NO: 43819
  chr7:2595522-2595604
  hyper

SEQ ID NO: 114522 - DNA, 30 bp, Homo sapiens
  chr7:2598691-2598721
  hyper
gcggggtcgcgggccggcgccagggaaggc

SEQ ID NO: 114523 - DNA, 31 bp, Homo sapiens; identical to SEQ ID NO: 43820
  chr7:2671600-2671631
  hyper

SEQ ID NO: 114524 - DNA, 424 bp, Homo sapiens
  chr7:2727878-2728302
  hyper
gctcggtgcccggcgcggcctctgccggctccggcgggcgcgggactgcgaggtaggggggcgcgcggggaagactcgggggcgcagggaccgagagggacctccgtgccggggcgggtgggtaggggcagctccgggtccagcccggcccgcgcaccaagtcccgagggcgcccgggcggcggcggctacgggcgcgcggggaccgcggagacgcgaagggcgcacttggcgagggtttggtgcagcgccgcgccggggtccgcacagccccggcaggtcctgcagagggaaggccgggccagggaagggccacgcgccccctccccgccatcctctcccaggccagggcgacctgcgcgcttcccgatgggagcaaactggggacgggtcgggaatccagggccaagcgcccgaaagaaggc

SEQ ID NO: 114525 - DNA, 431 bp, Homo sapiens
  chr7:3018093-3018524
  hyper
ggtgagtgggagaagaggggacggcgggacagaggccttgtgacagaaaagggaacaagaactcagggttttacgttgtacccacaggtgcagagctgagaaaaggaaagagaaatgaagaacggcaactcggagggaggagacggtgggggtggcgcgggcaccgggtgcaggctgagaaagcgagagggcggtccggccagggggtgggggtgctgcaaccagctctggtcacgccccttctcctgagagctcccaggactgcaggcaacttgctgaagaacttgggtaatttcccggaggccggctcacctgtttccagcccatcagtgatcttgaaacttacaaatactcagactcacactttccgcctatccgtgcaaggtaagaggagccaaacacatctcgaaatgcaccgatttttcttcttc

SEQ ID NO: 114526 - DNA, 569 bp, Homo sapiens
  chr7:3082718-3083287
  hyper
ctagtacagtccccgcggggggctgtcctctcccatctcccagctccacacccacttttggtgcggctgcccttcctccctgagccaggccccaccttcccaggagcctctgagtcaggctgggctgtggtctgcaaacttccgggcctttcaggtgtcagaaaagtttctcttcctccctctggggcaggtgcaccaaggggctgcagcctcctgacccccgattttttcctgtccagtaggaggaggtgggggctttgctgggcggtgatactcagagacgctcaaagagacacggaggagaggcacacgaggtggaaagtgagggagaaaaagggttggaagggaaaaaggggagaggagagtgagagagagaaggggggcagggggacagagatggagagggaaggatacccccagcatcgcgggaccagcgggagccactcccatcccccgacgccccccccgccaccgtgtcatctcactgatgccccccatctcctccccgtgccctcttctcttcccccaactccccgcctcgtgctccccctccgccagctcccccatcc

SEQ ID NO: 114527 - DNA, 370 bp, Homo sapiens; identical to SEQ ID NO: 43823
  chr7:3083330-3083700
  hyper

SEQ ID NO: 114528 - DNA, 691 bp, Homo sapiens
  chr7:3340123-3340814
  hyper
agccccacaggctcccgggtcccgccctgggagaccctcccactggccgaccctgccccaagactcgcccactccacggtgggaaacctgcaatgtgtccctccctaccccgccctcctccagcgccggccaaaagtgaccttggacgcttctacaatgccatatccactcctctgaacaggaggcgagtttgcacccagtggtgcctttggttgctagaaattaaaaacccgattgcgcgtgtttgcaattacggtaacttggcgcgtcacccccaagcactgagctagctggtggtagccgggcgcctctcggggcgcgccctattccgccctcggccctgggctgccgcacgatctgcgcgtcctgctgcacctgagcccttcccactcgggcgcccgcaccgctgcggggccgggcgaggatgcaccacccccgcccgcgagcccgccacgggagcgcgtgccgaatcgacgccgcctgcagtccccactacgggtccctagggggcgcagccggcgcgggaagccgcccgagccaggcgccgcggccggcacaaaattgcaggcgggcgggcgccgcgactttgaaaacaagcgagggcctggggggcgggccctgggagcgggcgccgcctccctcggccaatcaacggcgggcggcgggcggcgggcgcgggcggcgcgtgcgg

SEQ ID NO: 114529 - DNA, 122 bp, Homo sapiens; identical to SEQ ID NO: 5314
  chr7:3341286-3341408
  hyper

SEQ ID NO: 114530 - DNA, 468 bp, Homo sapiens; identical to SEQ ID NO: 5315
  chr7:3341569-3342037
  hyper

SEQ ID NO: 114531 - DNA, 30 bp, Homo sapiens
  chr7:3342254-3342284
  hyper
gcccccgacaaaacccgtaacgtacccctg

SEQ ID NO: 114532 - DNA, 30 bp, Homo sapiens; identical to SEQ ID NO: 43827
  chr7:4238935-4238965
  hyper

SEQ ID NO: 114533 - DNA, 30 bp, Homo sapiens
  chr7:4722363-4722393
  hyper
gcttcatctcgcggcgccacctgcagctca

SEQ ID NO: 114534 - DNA, 30 bp, Homo sapiens
  chr7:4723725-4723755
  hyper
gctccactgccctccgcaccctctgctctg

SEQ ID NO: 114535 - DNA, 51 bp, Homo sapiens; identical to SEQ ID NO: 5316
  chr7:4770078-4770129
  hyper

SEQ ID NO: 114536 - DNA, 120 bp, Homo sapiens; identical to SEQ ID NO: 43829
  chr7:4770152-4770272
  hyper

SEQ ID NO: 114537 - DNA, 148 bp, Homo sapiens
  chr7:4784754-4784902
  hyper
tcgggaggtgggagcggggccaggccagaagagctggctgcctgcaaggctgtcccctcccagtgccgccccgcccccgcggtgcctgccttcctaatttggtgtgcattcgcctcgccagtcctcattggccgtggagtggctggct

SEQ ID NO: 114538 - DNA, 31 bp, Homo sapiens; identical to SEQ ID NO: 5317
  chr7:4814425-4814456
  hyper

SEQ ID NO: 114539 - DNA, 30 bp, Homo sapiens; identical to SEQ ID NO: 5318
  chr7:4815145-4815175
  hyper

SEQ ID NO: 114540 - DNA, 465 bp, Homo sapiens
  chr7:4922241-4922706
  hyper
cagcaggagggaaaacgaagcgcagactttacacactcagctctctcccctccttccatgaatcctatctttacagccccagcccgagccacgctttcaaatgcaaacataattcaatcagatttaattctgacctgctagctgctggagaggagaccgacttgccccccagcaaaagggactttcaagactggttcctgtctggaatgcacaagaggtggcctatattaaccgcgggacacgagcaatcagattcttctgtgcaattcagattagccaaacacttgacaggcgacagggcagggcaggatggtccgcagccccgccagggccctgccaaccccaccaacaggctcctcctgcgaggccccaggagctcggctcagcatctgttatcttggatgcagtatttgtcgaggggctggaaatggtacataaatagccgggaaacaatgctttgagctg

SEQ ID NO: 114541 - DNA, 134 bp, Homo sapiens; identical to SEQ ID NO: 5320
  chr7:4922839-4922973
  hyper

SEQ ID NO: 114542 - DNA, 196 bp, Homo sapiens; identical to SEQ ID NO: 43834
  chr7:4923327-4923523
  hyper

SEQ ID NO: 114543 - DNA, 298 bp, Homo sapiens
  chr7:4998288-4998586
  hyper
gcttaatcctcacggcgacccaggacacggggactcgcataacccccgttttgcaaacgtggaaatgaggttcagagaagtgaagcgacttgcccaatggcacccagcgaggaggcgcgggcgccccggttactccatcccagcgagaagacgaggctgcctgggtcctggttttctcgggcgggggtcaggggtccgccgatcccctctagcgctccgggcggcggggcccgagaaccaaggtggcctccgcggcccccgccgccgcgcgcccctccctccctccccgcggacctcc

SEQ ID NO: 114544 - DNA, 41 bp, Homo sapiens
  chr7:4998770-4998811
  hyper
cggcgcccggagccggagccggagcccgagccggagctgga

SEQ ID NO: 114545 - DNA, 30 bp, Homo sapiens
  chr7:4999041-4999071
  hyper
tcctggctgcgcgcgcgagccacccatcgc

SEQ ID NO: 114546 - DNA, 5 bp, Homo sapiens
  chr7:5014425-5014430
  hyper
cgcgg

SEQ ID NO: 114547 - DNA, 204 bp, Homo sapiens; identical to SEQ ID NO: 43836
  chr7:5085237-5085441
  hyper

SEQ ID NO: 114548 - DNA, 84 bp, Homo sapiens
  chr7:5125290-5125374
  hyper
taggaccgggggacatcgcaggcaacataaatgcccttgtgggttacaatctaataaggaagatgttcaatcatcttattaaaa

SEQ ID NO: 114549 - DNA, 43 bp, Homo sapiens
  chr7:5229793-5229836
  hyper
gagggcggggcctccgcagtgcgactgcgccgctcgaggccgt

SEQ ID NO: 114550 - DNA, 159 bp, Homo sapiens
  chr7:5230314-5230473
  hyper
ctggcctggagctgcggtcccggagcgggagaggtggtggagagggggctgctttcaccctcttgcggggaggccccctggcttcagacttaactacttctcgcaaagttggggccgaactttggggcttgacttgtcttggccgcctgtggagcgctg

SEQ ID NO: 114551 - DNA, 31 bp, Homo sapiens; identical to SEQ ID NO: 5323
  chr7:5329219-5329250
  hyper

SEQ ID NO: 114552 - DNA, 2944 bp, Homo sapiens
  chr7:5458488-5461432
  hyper
ctaatgggattagcacgggcttggctctgggcgttggcctggggtccgaggtctccttgcggctactcgaagtgggggagggggacagccagaaccagcaccggcccccacctttccctcccgggtgagcacggggttcaagggggcggcagctgtcctcctgctgtttcctccccgacctcagcctcggcgtgcagaagtcaggcagctcccagcgagcgcagaaggtgcgcagaggcagggctccgaggctacctcccgctgggcttccgaggctggtggcttggccttccctccacctcagcctcaccatccagcaaatgggcattaggccgtctgactgctgcgtcagattaggcgcggccctggcactgtgcatgcatgcatgagtagtagcttgttttcaccgcttcgcattagggcactttgccttgccaggccggagccagatcgcaggcggggagtgcgcgacgccccttcccagcctcgaaaaagccaagcgcaggcccagccagccagagagacccgggtaccgattcccaggcttggggggggcccccctgccaccactccgggctggaccaaatgacccaaaagacacacgcatgcacacacacacacatcacggtggacttgtggggagcgcaaaaggggacagctcagatggtctctgtaccccagggccgccccccaagttcttcctcgggggtcccccgcgcccctccctcgccacaacacgccactagagaacaaacccttgccccggtcacagaccccgggcggaatacgcccccagctccggagggacacaagcaggtccgggggccaagacctggttcttgcgccccggctggcggggatctccgagctcccggcccccgggcgcgcgcccctcccccgcccggcgcctcacaaaggccctttgtcccgccgagcccccgggactccagttcctgaaaagttccaggagaaaaatcaaagagagagcaaaatcggcgagctccgccgagcgggcggggcaaggccgaggtggcagctcctgagagaccccaaggaagaggggagcatcgagggctactctggaaattgcaaaaatccgaaactgcaattcgaacaggaggtggatttttttttttttttaagtcgagacttgggacgccaagcacaaaagccagggacagcccgggaaggagggaccaggtgtcctggggcggccgccgggcaggtctggaggtccccgagtctccttcccacccctctggctgcagcggccgcggactgactggagggagagtctcccgccccggcgcagcgcccgcccgggtaccgtccccaccgcgcctgggcagcccgtctcgggaaatggtggaggccgcgggaccttctcggccacctcctccagcagctcgatgtgagacccagggttttcccctccgccgcctgggccctgcccgacccgctctcttctttccccctaggttcgggaccgcgatggtccggtttcggtgtccctgccgcacctccgcaccctctttcgcgctggaaaacaaggggtccccgagggccggggtcgccgccctcctaccggggtgcaggttcccagggccgccgttctcccggggaagaaaggggcatcccgcccgccccgaggccagggtcccaaggctggggtcaccgtactcccgcatcccccggcgtactcccgcatcccccggcgctcggtaactgccagggacccggctcggcgcgagtggtggagctgggaacagaacccaggagggcccacgagcgccaaaagtagcgtttgccaagaaaaagattcgagctcggggagcgggtgtctcgcggggtgcgggggccggtttgttcttttctcgcccagattttgaaaactccagcccaggctcgtgccgccggggccccggggattggaatcgcccccggtggctcgggctaccacaccggctttcggctcacgagggccaagcacgctacggaaaaggtagccgagccgcgcgacactctccaccgccttggctccgggaccaggagtttcccagccctgggagccgagtctgcccgcacccccgtggccgaccgaaggagagtcgccgagccccggccgcgagtgcacaggaggacccggccgagtggatctccctgggaagacaggaggggacgggcacggcgcggggcacttacccgggtgcggatggagattcaggccggccatgtacttcccgggcggcagcgggccgggcaagcccgaggcgggcaagcgtccggcagtggccgcgcccacgcggtggctgtccatggccaggccggacagcagcggcggcgggggaccgtgcacggaccgctggggcccgaagtctcggccatccatcctccgcgggagtgccgcgatcagccccccacccggcccgcaggcctagctcagtgggacctaaaagttcggcctcggcgtagtcccagagtcctcgggcggcgggggctccgcggcgtgcatggcggcggccagcggggcttgcgctcggcggcgggcccgcggcccggggcgcacaggcggccggcggtggggcccctccgggcggccaggcggagctgcgcgaggcggcgcacacggcgtcttggcggggaggagacaggccgcggaagaaatagaaagggggaaagaaaaaagggaaaaaaaaataaagtaacaagtttcagaaagtcgcctcgcccttcaggatcggggggtgccgactgagtggccagaaatgaaatcgggagtagcccctttccactgaaaaatgaaatccaaactccttccgccggcggcttcaggctcccgggacctggctcggaaaagtgaccggcggcggtggcgcgctgcgccccagcccggactctgcctcggcggctgccgggtcctcccgaaaccggggagggctcctcg

SEQ ID NO: 114553 - DNA, 222 bp, Homo sapiens; identical to SEQ ID NO: 5325
  chr7:5462089-5462311
  hyper

SEQ ID NO: 114554 - DNA, 30 bp, Homo sapiens; identical to SEQ ID NO: 5326
  chr7:5462587-5462617
  hyper

SEQ ID NO: 114555 - DNA, 94 bp, Homo sapiens; identical to SEQ ID NO: 43843
  chr7:5463269-5463363
  hyper

SEQ ID NO: 114556 - DNA, 30 bp, Homo sapiens; identical to SEQ ID NO: 5327
  chr7:5463612-5463642
  hyper

SEQ ID NO: 114557 - DNA, 3442 bp, Homo sapiens
  chr7:5464579-5468021
  hyper
ctgggggcctctctcgccttccatccgccgcgccccctccagggagggcgagaccgggaaaaaaataaaatctgttgagctcagaggaagtagccgccaagcccaaaaagtgcttggctggccacggcggccgtagggggaagggagccccaatcccccagactttgtacttttattttgcgctttcagcaaaatcctttctgggttgagtagccgtgagctgcccgcggccgacctacctgaccgggggcgcagggagtgcggaccacgccagcaggactgtcctgggggcccccgcaccctctctctgcagccccccgagcccggctaggcattacgtaccctggaaaggaagcttggaggggcagaaatccttccaatgctgcctcgaagagcaactgcagtgataagattttaattaaaacaagagaagcccgctctttcgccccgcgctgcggactcagcgttttcgcattgcccgttctgttttttttaaatcaatttttaaggcaactttttgggaggggggaaaaatgagcgagttagtgcccattcgttctattttcttttctccacttttagaaaaaagtggggggaggcttcgagaacgaacgggggggtgtctaatttaattccaggataaatttgaggaaaaaagttcagcctcttgagggcagtttcaagttgcccttcctggagcttcctgcgttagtttctaggctgccctcttttggaagctgtagctccgctggggaggagggaggagtgagaaggaaagaaaggaacaaaaatagccggagccgaggggaacaagccacggtgtccgcgtttggagctgggcgtgcgggtctcagtggcggcctcggcattcggggcggcgggaggcgcccggtgcatccccgggacggccaggagcaaagacggagaggagaggggggttagagaaaggaggtattgtgtctgtgtgccttaggggaggaggggactgcaggaatcgaataaacgcagtcgagctgcgcggggctgctggaagcccaggcgggggaagggggccgtgtgtgggggcgcagagcgcccttgagccttacgcagaggtcttgtgtgttcctagttaagccctcccacgcccgaggccccatcgcttcctctccaccctctttacccaccaatattccaagcccagatcctaattccccaccgcattaccccgccctggatttggggaatgtttttctttattttaatatagctcaaggaaaaaatacgtatatcttgagagatttggggtggggaaaacaaaagccttgcggagtagaaaaaacaaaggcttatttttataaatgtttaatgttttcaccccctggatgctccgagacgccgtaattgtgacggcggggtacgtgtgccataaatcatttagttgctaataaaaattctgcctgtttgccctggatttgccaatggcgtttgcatttttcaagtgtgcgcctcggcggtgtgacgaacccagccggtatttcattagggccgcggttcggggcagaggaggtcccctccccgcctgggctttgtgcgcccagcccccttgcaccggcccttccatacctgcccccggcacccactccatatttgcgcggccctgcagccaccggagtccggccggggagcagggcctggggacgcggtggtggtggtggctcccagttcctggccaccaggcggggcggccaggacgcatcctgcccacgcggttttccagggctgccgcgtgcttgggggcgcgggcgggccacgcggagaggccacctgcccgggccaatctgtacgctccgtgatcttcgcccgctccccggccccgcgccctggtgtccctgcagtcgctgagtaaacagcgactgggagccatcttggggcggaggaccgatcccaagcgaagtagtagtggctgcagcccgggtgcccccattcgtaaaggggagcctctaggacatccctaactaggcttcagggtccagggaaacgccctccccagtatggcgggccacattgaaatgtaaaaaccaggcctgggcgctgtggccatagggcacaggccataggccaccaggtccagccgccatcttccgcgccccacccccattccatcccctccccctccccaccccctcatacttttgtttacccagcgggataggtggccaaaaactgtggacgcaattgagtgaaagtgcgtgtgtgtgtgtgtgtgtgtgtgtgtgcgcgcgcgcgcgcgcgtgtctgtgtgtgtgtgtgtttgactgggtagaaaatcggctgggggctgggggggtcttccttgtagccctaagccgcagctgcgggagaagctgccctggctagccgaggcccggcccagcgtgcttctccgcggccagcctgggccaccggagccgaggccttccctgtgttcctaggccgctggctccggcctccgctccctggacgcctcccgactgacaaaattctccgtctttgttttaaaaccaaaggacaggccaaccttgagcccggccgtcacccctgtcgcgcttttgttggcgcaggctcggccccctacaccgggctggtgcagctcccgcgatcagacggtctctctcaattcggcgttgaacccggttcttcccaaattctggtattgctggccgcttggacacgttctccccttatccctcccccagcggggaaagaaaaagccaggatcctttccttggcgcggccacccgagccactccacccgtcgcgccaaccgcctttccaggtggggaccaaagcccccactctccgctggcatctcattgaagggcacccccccgagggattgccagcttctgctgccagctgagaggccgtgtggctgggcgtcttaagcgccggtttccgcaggtcccgtgtctggcgggcgcggctaaaacccggagaggctgtgcccgggaaagccacgttcgccgtcccctcgctgcgacaggcccagccgcgatacagcgccaagtctaggtcgggccaacccagccaggagctgcccggacctgcctgaaagaccagggacgcggcgccagcgccccacaccccaccgagaccagggcgcaaggcgggcagaattcggactgatgcgccaggcccagccccgatggattccagctcctctcggccccgcctccggccctggcctcttcctccagccggggtcgggtcctccactccactgtttggctgggaaaggaccgagacgcgctcagtgcacagggggccggctgcggccataaatctccgggcgggccctccttcccgctgctcacgccggggtgctccgggccggtctcgtgtcccgggccacgccgcgcaccctgctcaccccatcacggcctggggacccggagactgcgcagggaaccacgccaggagc

SEQ ID NO: 114558 - DNA, 140 bp, Homo sapiens
  chr7:5526318-5526458
  hyper
ggccgatacccagtcgtgtgtgaaggtgagtctgtcagagacaggagggtgatggccatcaaaaaaggcagcgcggtcaccagcaacaggtcaccggcgacaggtcagcagccacgacaccggccggccctgcaggctga

SEQ ID NO: 114559 - DNA, 30 bp, Homo sapiens
  chr7:5553251-5553281
  hyper
aggcagaagcagagcggagacagtcgcgga

SEQ ID NO: 114560 - DNA, 30 bp, Homo sapiens
  chr7:5569120-5569150
  hyper
ctcccgcccgctcccggggctgccccaccc

SEQ ID NO: 114561 - DNA, 30 bp, Homo sapiens
  chr7:5570299-5570329
  hyper
ttcggaacggcgcacgctgattggccccgc

SEQ ID NO: 114562 - DNA, 634 bp, Homo sapiens
  chr7:5594637-5595271
  hyper
gtctcagcttggggtgcgggggccgactctgcccgggctgggtggatagttgttatcgggagctcccaggcccgcgcggctcacgtgggccgcagctcgcggcgcctcccgcgtcccagggccgcgaggcgctccgggagataagccaggccccgtgcgagtccagcgcggacccggccggcccccagcccgcccctcaccggcccccaccccgcccctcggccggcccggcccacttggcccgagttcctctccataaaaggcgaggtttgggagcgcccggggagggggcgttgggtccacgggccgcccccgcccaccgtgttcccctccctcactgcgagccctcgccggcccgggggtgcagcccagcccccctgccgcgacccccacgccgggcccgtagaccacgaccctgaccccagtccccactccggatcgggcccacagcaccccccgccggtccccgcgagtcccgcgctctgtccccattttgcgattgaagaaattgaggcccgcagcgtgcgtagcccggctggggccacggggttggggactgaacggccggaaacgccacacgtgcctccaggtggcaagccagctcctcatagacgcacacgaacccttctgcaag

SEQ ID NO: 114563 - DNA, 121 bp, Homo sapiens
  chr7:5595698-5595819
  hyper
cataaatgcagctgcgccctcccgccccaccccactggggagcgtgagtcagctcggtccaggcgaggctgggaagccgagccttggctctcatgtggctccacccgcctggctctggggc

SEQ ID NO: 114564 - DNA, 30 bp, Homo sapiens
  chr7:5597833-5597863
  hyper
ccagaaggctgtgggcggccagagccggcc

SEQ ID NO: 114565 - DNA, 30 bp, Homo sapiens
  chr7:5601796-5601826
  hyper
ccatgccggagtcacgcgcccgctgtgatg

SEQ ID NO: 114566 - DNA, 142 bp, Homo sapiens
  chr7:5602624-5602766
  hyper
cctctcggaacctccgtccctgcaaccgattttagggtggggatggggtgggggctgagtctgccctcaaaacggggctcaaggctcttggcttggagcaggcagggttggccctgtccgggcccccggagtgactcagccc

SEQ ID NO: 114567 - DNA, 292 bp, Homo sapiens
  chr7:5603110-5603402
  hyper
ttcagggcaagaaccgctctctggcccctgcacctgggagaggtggggtgctggaccgagggcgaagtaacagcgtcctgagggcccatccccaaatcgccttccttagggaagccggaacaaacgatgcagcggggcggccctggatctgttccttcctaagagctggagcaggtacagccccatcctagaccccagcaacccgcgcgccctccctcgcaccatctcccctacctggttggttgggttgtggggttccaggcgaccgccaggtggcgcaaccgacgcgcct

SEQ ID NO: 114568 - DNA, 920 bp, Homo sapiens; identical to SEQ ID NO: 5333
  chr7:5632265-5633185
  hyper

SEQ ID NO: 114569 - DNA, 215 bp, Homo sapiens; identical to SEQ ID NO: 43851
  chr7:5633395-5633610
  hyper

SEQ ID NO: 114570 - DNA, 30 bp, Homo sapiens; identical to SEQ ID NO: 5335
  chr7:5634149-5634179
  hyper

SEQ ID NO: 114571 - DNA, 74 bp, Homo sapiens
  chr7:5635668-5635742
  hyper
ggggtacttgggggccgaggttggggctcctctggcctcagatcttggggtccttatctcgtttctatgtcagc

SEQ ID NO: 114572 - DNA, 30 bp, Homo sapiens
  chr7:5938273-5938303
  hyper
gtgcctgaagaggacgctgcgaggcggatt

SEQ ID NO: 114573 - DNA, 30 bp, Homo sapiens
  chr7:6048950-6048980
  hyper
gttggcctttggcacgcgctaccccctttt

SEQ ID NO: 114574 - DNA, 30 bp, Homo sapiens; identical to SEQ ID NO: 43854
  chr7:6098483-6098513
  hyper

SEQ ID NO: 114575 - DNA, 149 bp, Homo sapiens
  chr7:6098847-6098996
  hyper
accttcactgggggcggggctgtagcagactccgccctttatcagacaagaagagttgggcgtgtccggccccggcgtacccccggcgcatgcgctctggtgggctcgtctaccggcggctgggtttcaggggcgcccaggtgaaccct

SEQ ID NO: 114576 - DNA, 30 bp, Homo sapiens
  chr7:6121401-6121431
  hyper
ctccctgctgttcacgaggaaacctaaagt

SEQ ID NO: 114577 - DNA, 62 bp, Homo sapiens
  chr7:6144352-6144414
  hyper
gcgctctggtgacgcgcgacgtctgccttcgcccacggctcttgggcgacgacccctcccac

SEQ ID NO: 114578 - DNA, 30 bp, Homo sapiens; identical to SEQ ID NO: 43856
  chr7:6312202-6312232
  hyper

SEQ ID NO: 114579 - DNA, 30 bp, Homo sapiens
  chr7:6312510-6312540
  hyper
cccggacactggaacgccacactctgcaaa

SEQ ID NO: 114580 - DNA, 124 bp, Homo sapiens
  chr7:6388586-6388710
  hyper
gccgcgcagcctgacgtcacaaagccagccacgcgcctgcgcggcccacaggccccgcccctggacacgcccttgccacctttctttttggcaggtaagacgcgcatgcgcgggagaggaggcg

SEQ ID NO: 114581 - DNA, 30 bp, Homo sapiens; identical to SEQ ID NO: 43857
  chr7:6413862-6413892
  hyper

SEQ ID NO: 114582 - DNA, 36 bp, Homo sapiens
  chr7:6414181-6414217
  hyper
ctttgggtggtggccgctgccgggcatcggcttcca

SEQ ID NO: 114583 - DNA, 30 bp, Homo sapiens
  chr7:6414693-6414723
  hyper
tcctcgggagcgctcgtagagcaagcgctc

SEQ ID NO: 114584 - DNA, 30 bp, Homo sapiens
  chr7:6475226-6475256
  hyper
tgcgcccggatgcagcgggcacttcttctc

SEQ ID NO: 114585 - DNA, 30 bp, Homo sapiens
  chr7:6475845-6475875
  hyper
aattttcatgagttacgcagaaactaactc

SEQ ID NO: 114586 - DNA, 30 bp, Homo sapiens
  chr7:6486936-6486966
  hyper
tttttcctatccttcgtgttgcagattcaa

SEQ ID NO: 114587 - DNA, 30 bp, Homo sapiens; identical to SEQ ID NO: 43859
  chr7:6522787-6522817
  hyper

SEQ ID NO: 114588 - DNA, 30 bp, Homo sapiens; identical to SEQ ID NO: 43860
  chr7:6523596-6523626
  hyper

SEQ ID NO: 114589 - DNA, 61 bp, Homo sapiens
  chr7:6523871-6523932
  hyper
ccccttaaagggggcgcgccccagcgcaggctcagcaggtcagctcgcagggactcccttg

SEQ ID NO: 114590 - DNA, 470 bp, Homo sapiens; identical to SEQ ID NO: 43862
  chr7:6543021-6543491
  hyper

SEQ ID NO: 114591 - DNA, 30 bp, Homo sapiens
  chr7:6543788-6543818
  hyper
actgaggcggggcccgggtggaaagagggc

SEQ ID NO: 114592 - DNA, 30 bp, Homo sapiens
  chr7:6544092-6544122
  hyper
cggggttctcgagacgctagattgagaagc

SEQ ID NO: 114593 - DNA, 152 bp, Homo sapiens
  chr7:6566083-6566235
  hyper
cccgggtctcggtcccgagcccacccgcagggaggcgcccgctgccagtgcctgtgagccccgcgtacctgcgcgcgcccccggggccggcgaggccgcccaccagcaaggaggccctgcgcgggggcggctcatcggggcggcgcggcggg

SEQ ID NO: 114594 - DNA, 256 bp, Homo sapiens
  chr7:6566246-6566502
  hyper
cgtggacaccaggaggcgctccggccgctcctcgctgcggctccggcgcagtcgctgcgcgccctgggcccggcgtgcgcggcacagcttgcccaggaggccctgagacaccacctcgtcgaagcgcgcccggtgcttcttggggatgaagatcctgccggcgaggacggcggagtcggggcgcgttcccggaccccggatctctgcaaaccgcggcccgaaggcgcgtcctcgcgggcgccgccctaggctctcc

SEQ ID NO: 114595 - DNA, 484 bp, Homo sapiens
  chr7:6570378-6570862
  hyper
tctgtcctgtcccctcgaccagcccaattgtaggaaggaaagtgggctttcaatcccagccttttatcccaacaccgactctttagggccacgcacgggttctgagcgcccaacgcttagacctcgccgccccggtacccaccgagtttatttccaacctccctgggcctcgggctccgcccaggctcggagggtgcccacccagggcagggaagcccctccacgctccagccccacccgctttcagaccagcccgaggcggatccgtggcgcagagggcgcacggttcccggaggcgcgggacgcgatggggaagctaccgaaagtgccgagagaagccctggtccttccccatctggagccggggaccgcggcgcggcaggtgccgaagggcagggggtagccgagcccaggaatggagcgagcgcgccgcgactccacgcacctctgccctgcgagcgcgcgcggcccctcccgagccgtc

SEQ ID NO: 114596 - DNA, 305 bp, Homo sapiens; identical to SEQ ID NO: 43864
  chr7:6570900-6571205
  hyper

SEQ ID NO: 114597 - DNA, 134 bp, Homo sapiens
  chr7:6575940-6576074
  hyper
tacagcagaggctgccgtttcaagctgcggggactgggcatccccaggtgtccagggctcccgctgcccaggctctaaatcgagcgcgcccaagggggttccccctcccgcgccctgcccgacccgctgccgca

SEQ ID NO: 114598 - DNA, 30 bp, Homo sapiens
  chr7:6617279-6617309
  hyper
cctgctgcactccacgtccccctaccaggg

SEQ ID NO: 114599 - DNA, 30 bp, Homo sapiens; identical to SEQ ID NO: 43865
  chr7:6629791-6629821
  hyper

SEQ ID NO: 114600 - DNA, 358 bp, Homo sapiens
  chr7:6654777-6655135
  hyper
gctcgggccgggcccggatggcgcctactccctctccgagtgccatcgaattgtgtgctaattagccacaatttgcaccgcggcaggggcgccccgaggccacgcctgccctctagggggtggcagggatcgggttgggtaccccccacccagacacccaggcagtgacagtcgccaaccccgtggcgcgaggacacgcgcagcagggatgcggcacagcgcgcgctgcgctcggcaccggccagcccgggacgccccaggggccgccgcatcgtgtcccccgggccgggtgagtggccgggccgggaatggttaagcccaccgagctgcggctgcctagagcggcggcggcgacggc

SEQ ID NO: 114601 - DNA, 666 bp, Homo sapiens
  chr7:6655355-6656021
  hyper
ccggcccaggccgcccgcaggctccgggcacctgtagcccccgaggacccgcgtcgcctggccgccgccgaccccaggcggggccaccccgtggtgccgaccccgggcgccggcctggatcccgctgcccgcgatggtcccggggggccggccctgagccccgcgcgggattcggggccctgcctcccgccccagcccccgccggagagtctccaccaacttctgctcggccgctcctctcagccccttcccttggcccagggcgacctcggcagcccagagggcgtggaccctccggagtgcccagaaagcccccggggtggccctgcgcctcctggctctttctggatggaggcgcctccggaaggagccggctgcacgccgtggccttcacctcgcagcctctgctgaccacacctccctagcgcagaggctgcccgggagcaggaaatgctccaccaggtgaggcccagggggtcgttggcgctgggcaaccggggacgcgtcccttgagagagtttggactggatggcacgagtcggcctgtttaggggagaggggccagctctgcacgggccagggtggactctcaggagcgcctgggcacagggccaggccgtgggtgacagtgctctggacacctgccttgcccgggagctggggtgg

SEQ ID NO: 114602 - DNA, 91 bp, Homo sapiens
  chr7:6677418-6677509
  hyper
ggctgggccgcggccgcccccaggacacacccatccaggaggggctgtcatcgtctaggtctctgcaggaggaggcggctccggacgcccc

SEQ ID NO: 114603 - DNA, 243 bp, Homo sapiens
  chr7:6703626-6703869
  hyper
gcggggctgaccgtgcgcttcgcctgcggggtcgtgctggggcggcgggtgagcctggggggctgcagagcgggcgcggggcgcgtccgaacagtcgcagccccgagcccctgggaccgccttccccgcggaggcttgggctcagcgcctggggcggaggtggggcgggggcggtccgcccgcagcagggggtgccggggccgcctccgggtttcctccgctggatgcggcggtggtgcgctg

SEQ ID NO: 114604 - DNA, 114 bp, Homo sapiens
  chr7:6703915-6704029
  hyper
cgccctgggccctcctccgaggtgcctcgcgtggggcccgtgccagggcccgctgagtcggggccgctcgtgggccgcctggctgccgcctggggcctccggccgctgcgtccc

SEQ ID NO: 114605 - DNA, 105 bp, Homo sapiens
  chr7:6966950-6967055
  hyper
acgatgtgtcaaacagcgtcgcttctcccagtgagatggttctcctttgcctccgtctctttccccgattgatttttccaaatggggagtcgtggcttggtcctg

SEQ ID NO: 114606 - DNA, 30 bp, Homo sapiens; identical to SEQ ID NO: 5339
  chr7:7044631-7044661
  hyper

SEQ ID NO: 114607 - DNA, 30 bp, Homo sapiens
  chr7:7221696-7221726
  hyper
gatgacccagcacccgtatgcatacttcat

SEQ ID NO: 114608 - DNA, 69 bp, Homo sapiens
  chr7:7222006-7222075
  hyper
caaaatctactgctcgtgcaagatccgacttcccagaccccttcgcattagggcggagcgtgcacccgg

SEQ ID NO: 114609 - DNA, 78 bp, Homo sapiens; identical to SEQ ID NO: 5340
  chr7:7464015-7464093
  hyper

SEQ ID NO: 114610 - DNA, 405 bp, Homo sapiens; identical to SEQ ID NO: 5341
  chr7:7605663-7606068
  hyper

SEQ ID NO: 114611 - DNA, 258 bp, Homo sapiens
  chr7:7606358-7606616
  hyper
ccagcctaggaacccggggatccggcctgtggacccacgggcagggcctgcggggtgcaccggcgctttcgggcggaaggcggggcctcccggccagtgaccccgccccgaggcgcctcccgggcggggaagggcggggctcgcgctgggaaactccccttccaaggccgaggcgccgctgcgcgtcctccaggcgtggtggtggggtcgtgggtcccagcccagtggtccaggtcacgggccgcacggccgcggccg

SEQ ID NO: 114612 - DNA, 30 bp, Homo sapiens
  chr7:7606998-7607028
  hyper
ccaggtgcctggagcgggagagtcggactc

SEQ ID NO: 114613 - DNA, 30 bp, Homo sapiens
  chr7:7680060-7680090
  hyper
aagactgcggctggcgggaaacccacggac

SEQ ID NO: 114614 - DNA, 30 bp, Homo sapiens
  chr7:7680346-7680376
  hyper
agactacctttctgcgatcacaggattccc

SEQ ID NO: 114615 - DNA, 30 bp, Homo sapiens; identical to SEQ ID NO: 43876
  chr7:7680663-7680693
  hyper

SEQ ID NO: 114616 - DNA, 247 bp, Homo sapiens
  chr7:8008151-8008398
  hyper
cactttcctagtctcgcacttacctcaaggctgtcaacttttacgctcctccctgcgcgcacagcccccacctcacgctgccacccctcacgccccgccttcaaagtaggaggcaccattgtcattggacactgcttctctcactcctattccagaaccaatcactcgagttctagtggggagcgcctaagccaatggaaatgctcgctgcggcagctgccgggtcctgggcgctgggaggcggtgc

SEQ ID NO: 114617 - DNA, 619 bp, Homo sapiens; identical to SEQ ID NO: 43878
  chr7:8009321-8009940
  hyper

SEQ ID NO: 114618 - DNA, 30 bp, Homo sapiens
  chr7:8046956-8046986
  hyper
aatatgtactacgtacgtagtacatcgtta

SEQ ID NO: 114619 - DNA, 77 bp, Homo sapiens; identical to SEQ ID NO: 43879
  chr7:8301293-8301370
  hyper

SEQ ID NO: 114620 - DNA, 21 bp, Homo sapiens
  chr7:8301429-8301450
  hyper
cggagcgcggaacgcttccct

SEQ ID NO: 114621 - DNA, 539 bp, Homo sapiens
  chr7:8301667-8302206
  hyper
gctgcttcctgcagcccgcccggcgcgcccccgccccgaccccggagggcaggtacctcggagccccggcccccaggagcctcccggccgcggtcggagcgtccctccggatcactcatccgacgtcagcgtcagccgaaggcgagggaaaggggcggggggagcgcaggaaccggcccttcctgcggcggccgccaccagccggaatagcaaccggcggagcccgtgcgcaccgcagcgcagcgcagcggccggggggtgcgggcgccctcgccgcccggctacctaccgccgcctgggcgccgccgctgcctcccttccccgcttctaccctccagcagacgcccgccggagcgacccctcccagggtgaccgggggaaggtgggtggcgttgacctcaccttgcttggggagggtcggggactcggggagtgagtttctctctctctactccccggggtctctcctcgacccccatctcctggggtatcccccgctcggatccgccgcccagagtgaccccgcccctgctctccgg

SEQ ID NO: 114622 - DNA, 391 bp, Homo sapiens; identical to SEQ ID NO: 5343
  chr7:8473064-8473455
  hyper

SEQ ID NO: 114623 - DNA, 762 bp, Homo sapiens; identical to SEQ ID NO: 43884
  chr7:8473479-8474241
  hyper

SEQ ID NO: 114624 - DNA, 924 bp, Homo sapiens
  chr7:8474515-8475439
  hyper
cggaggaggcttcttctctagaagttagcgaccggctgtaccctttggctcgaaaaaagtagtgctagagatgtgactgtgagcattcgtgggtatctctgtgtgcgccaggggttcgaatgggtaaactgatccctgctttcctgtatgcaaattgcattctctttccccacccccacttcaccgaacgtgttgaggtacctagcacctaatcgcggtcagttctacctacctcttcctctcaccgcgcccccctcgctcaatctctctctctccctttatctttcccctctatctctctctgctggtgtgtacgtgtgtgagcactgccagggctggcgaagaaccagccgccgcctttagtccgagccgccgggccacccaacacaagggcaggtctcgctgccggagaagcctgggctccgaaccagcctgcacgcggctcagtgtgctccgccgcctgggaactcgcacccgaggagcgcagggggcaaggagcccctcaccctccctctcgtccgcccgcccgcctccccagctgcggaccgcgcgcttgctggtctcaggcgctggatttactcgcttttcaatttttcgtaccctccctcccttttttttttggtcccccactccccgctacgaccccctttccccgcttgattgtcaagcctaaccttgcccgcgtagtcatgggatgtctaattttatttgcatctaggctgctgagagcgctccttgctctgtaaagtggatgtcaggtggatctatgtttctgaaggaacaaagactcaaagaaggcaccgccaaggaagtttgagacgcgggagaatgcaggctgcgtgctggtacgtgcttttcctcctgcagcccaccgtctacttggtaagtcttggaaggttcggggctttcgcatttttaccccgg

SEQ ID NO: 114625 - DNA, 702 bp, Homo sapiens
  chr7:8476377-8477079
  hyper
tctaggggtgaggtgcgctaaagcagcccgaactctctgatgggctacacctctgattggaggtgatactggcgctcctcaatcccaagagccttagatagaacccataagcctgaaagaattgccatccctacaattgacagcgtttctcggccgttgccctggtgcatgtggctgcaaagctgcgagttgtgtgaattctgtgtatgtgagtgacacgtatatatatgtgtgtgtgaatgtgtatttaaccgatttcagcttcaatccaagaaccctcaatgttgcctgtctttgcccctttatcgcctgaccgtagcagccgcggacgccagagggcgctgcgcatcagcgtcctcgcccacaggacaccttggggtaaacaggtgaaagccagggcagccaatccaaaagaacagcctttctgactctgtcaccgaagtctgtgcctttacccgctggaacgcaggcggaatgcaaaaagtgtccttcccatttcccatcttcaatcattttcacccccacctgtgttcagtaagcccactgacattgagagaccatggatggagggcagaaagtttggccagaagaaatatagaatttttttattgagagatggggggagggaatgcaaagtgaaagcgacgggggcgggggggaggtaattttaaggattcccttgaccatcgtaacccgcttgcc

SEQ ID NO: 114626 - DNA, 30 bp, Homo sapiens; identical to SEQ ID NO: 5348
  chr7:8477582-8477612
  hyper

SEQ ID NO: 114627 - DNA, 349 bp, Homo sapiens; identical to SEQ ID NO: 43890
  chr7:8479985-8480334
  hyper

SEQ ID NO: 114628 - DNA, 1726 bp, Homo sapiens
  chr7:8480571-8482297
  hyper
taacactcttcttgcgctcctgtaaagcaagtgatggaagctctgaaagtttgcctgctctcaagtgggaagttaggaagtgtgcgttctttctgatttttttaaaaataaaaagtgtctagctttgattcgattcaggaaagctcctcttgggcaaccattgtccgttaggggcttcagatctcattttaagaccttaacagtcctcgccgttctaattaaggaaaggcaggcgagcctgccagccgagagcggttgggtcagcggcttcatggtgcagccgagtctcaaagcgggtctgcactctcgcctccctctgcattctcttagccactatttgcctggtcccgtcgcgtgtgtgcaggaagtttcagtcttgatttatccactagtcaagttcccgaccagctctttttctggatgtcagcactaaccccctcccggagcttggtaaacacagcgcgcgcatttttctgcctcagattggcatgttgacgactctgcttgaaggaatgtgacaataaagtgggaaaccaaagcttggcaagcacttaatcaaggataaaaaggttccgttgtaaggatgtcactcaatttattgtgaaagtcgaatgaattacgtttaatgaaagtgctccccagatgaatattaccagcaatttcctgagttggctctgtcagctcgagatgaggaaatgccaacccagatcagaaaagagcgcccgtctcaattactatgcaagctttccaagagcggctttttattgagataatatattttggcggcttcttcaaacccctccgcgcgcccaagagcgcgtttgcgcattttccaagtttgccctgccctcgcgggttggtggctgttgtttaaacttctgatgagcgcgctgcgtttctgctacgggatgaaaacctaattacctcctctgcaaagagctttccctagtatattttattgattgcggaggtgggagccggcagggggtctgtgggggtgggcggggaggggattctcttgctccggtgccctctgttgccgaaagttccttaggcgtctagtcaggggttcggggtggtggaaagcgagatggcgttgggagccagggcgttgggacggcacaagcagtggggtcccaggagcagcaagacagtagctcctctcgggccacggcttacgaaaagctttcctagctccttcttcctataaattaatgagggtattttactcgttcaagccggaaatacgatggggagggggagacacaggccgcatccagagcgcatcgcctcatctgcatgagaatggagaaccgggaggcttttcttgtactgtttctttctcccacaataagacaaattgctgcttagaaaaactgagtgtttccttagaaactggcttgcgggagctctgcgcgtccccgctgaacctgcctctggccgcgcctcgccatcacccccgccgccctaatggattctgaagcgaaggatcctagctgccgcggctaagggcgcagggggaggccgcgcgtcctcgccacaccggaaggagagggcatccggctcacacatcccaccctatgtcttagaccccgtcctcacacattgactttaaaaggccattttccttcgtcttctacaagaagcaagaaacttttttcgacgtaggcttcataccctcccttcggaaactcagtccgctgaccaaagccgcagtgttcaggcc

SEQ ID NO: 114629 - DNA, 155 bp, Homo sapiens; identical to SEQ ID NO: 43893
  chr7:8482669-8482824
  hyper

SEQ ID NO: 114630 - DNA, 15 bp, Homo sapiens
  chr7:8482884-8482899
  hyper
cgtgatcaccacgga

SEQ ID NO: 114631 - DNA, 839 bp, Homo sapiens
  chr7:8483147-8483986
  hyper
ctggagccacccaggcgccttccaggctaaggcgcctttagcggcgcgcaggggtgagggagagggtggggagagtcctaattattatgaatttctaaaggcgcagtaattattcacggggagcaggacaaaccatggctaggcagggaaatcgatatatttgctatcgaaagttcctggctcgcctttaatgcagacgaatgggggatgcagcctcattattttccgtggttaggctcgccagcgtggggcctgatgcagcgtgaaatctatcatcattagacccgggatggagcggcgggggggagtttctctttacttaccaaaccgcaacaacaaacaaacaacgacgaacaaccgccccctacaaacactcattctcacacaacgttgccctacctccctcgccgcttgccctggccgctgttgcacactcccctgggggctgtctgcacgccctagagcagacactgcggtcacttaaagtgcgcccagttcctccaccgcagcggtcacaccgttgatttgatccagaaataagacggatagtaccgagcgttggcgctaggggttgtctatgtcaaaggcgaaggttggctgggaagttctgtccgtttctcttgccttagcataggagtcaatccttttcttgtcacccgattctgcaaattctcgctgtattaaaggagcagagatctggcatgtagtgctccattaacccgtagcataagttagctcggacataaggcaagccctcgagaagggaacgaatcagaaggtgaaaagagcggtcggaaggtgaggaagagaaggtttaggcgcaacgcctcggaggtatt

SEQ ID NO: 114632 - DNA, 30 bp, Homo sapiens; identical to SEQ ID NO: 5354
  chr7:9580107-9580137
  hyper

SEQ ID NO: 114633 - DNA, 30 bp, Homo sapiens; identical to SEQ ID NO: 43897
  chr7:10979326-10979356
  hyper

SEQ ID NO: 114634 - DNA, 30 bp, Homo sapiens
  chr7:10979571-10979601
  hyper
ggaacagaaagaggcgcaccccgacgcaag

SEQ ID NO: 114635 - DNA, 139 bp, Homo sapiens
  chr7:10979884-10980023
  hyper
acccctcatatgttcgtcctgacctggtcggaccatcatcattccacttcatagtgaaatgccttcattgccgtgccatgcatatttctgaggggaatttttttggtcgaaacgaggactcttcgattgaccagacagg

SEQ ID NO: 114636 - DNA, 70 bp, Homo sapiens
  chr7:10980263-10980333
  hyper
aaggtcagcggctgcggtttgagaagactgcagctgcttcctgtgttacgctgtcgcagacaagcagaag

SEQ ID NO: 114637 - DNA, 30 bp, Homo sapiens
  chr7:11013429-11013459
  hyper
gggggcgagtcctgcgcatgcgccctcaat

SEQ ID NO: 114638 - DNA, 108 bp, Homo sapiens; identical to SEQ ID NO: 43899
  chr7:11870584-11870692
  hyper

SEQ ID NO: 114639 - DNA, 811 bp, Homo sapiens
  chr7:11871118-11871929
  hyper
catcatggaagtgcgcgttgccctcattacagagctgcgagagaaatattccagctactcactgttgcctcttagttgttatgcttttctttcctaattgcatcggacatgacctatttgcttcctaagaaatcatactttttaccttaggataccagcataaccaagccatccaaaagcaccggggtccctacagaagcccaccagctccttaatgtggccccagatgtgaagatggggaaagggtaactccgtcccacttaccagtcttccacagatagagggtgggcgcctccgcctcgccctgcgccgcagccctgccggcgcccgggcgtagcagcagcagcaggagcagcggcagcggcagcggcagcggcagcagctgcaggacgccccggcgcggccccgcagcgccccggctcccggacgcccagcgcctggcttgcagccccatgccgcctgcagccactccagggtccagagccgtagcacgctcggcagggaatttttctccgctcttggaacgtcttttcaaagagtacagaaagcaaagctctttcctgctattgttcgcttcagatgagaaggagggagagcgcgtctaacaccagggaacaatagcgtccgcggtggtggccgtggccgctgccgccgccgccgccgcctctggcggggatgctgctgccgctgccattcctcgcagaatggcaggtcccggcggctccggaggcaactgtcctcagggggccccagctgactgagcaggtctgctaggtctgggaggcagcgcagcccccgccagctggagggg

SEQ ID NO: 114640 - DNA, 308 bp, Homo sapiens; identical to SEQ ID NO: 43901
  chr7:12151164-12151472
  hyper

SEQ ID NO: 114641 - DNA, 155 bp, Homo sapiens; identical to SEQ ID NO: 43902
  chr7:12151523-12151678
  hyper

SEQ ID NO: 114642 - DNA, 234 bp, Homo sapiens
  chr7:12250502-12250736
  hyper
cagcggcgtgtgtacggaccagtttattccattcctaaggaccagactgtcagcgacaactcgcattgcgtgagcgaggaggctgctcagctgaaagctgaggcagatggtgcacatttataccctttgcaaaaggaaatggtctgatatgggaaataggaggagcgactgttcctaggtaattcgtggctacagtggacactttgaagtctgggggacgcgaaggtaatgaaa

SEQ ID NO: 114643 - DNA, 911 bp, Homo sapiens
  chr7:12442873-12443784
  hyper
gttggaggtggaattcgtgcagtatggaattcaactctgttctgagaattcaggtccacttgcggctagcataccttgcagatccggcgaaagtttcttacagtaaattacaatgacctcaaagagcaggataacagcaggaaacaaccaaaaacagaaccaagggtcgtagagtaagaggaggcaacaaccgcatgtgcgcaaaagaaaagtgtagagttttcaagctggaaattgaccttttcaaagacagcagagggacagagaggaggcgggtgaggaacaaacatcgcttgctgccttaaaacgcacagggacgctccccaagtcgtccaaaaagtctagcctagtccctctaccgcccacgcggcgccactgcgcgcccacccccgcgcgccctacctcgcttaccttccccccaggccaggaacatcagcgcgatcaccagcacgcaggctccgccaggcatcgctgcttccgcaggtggggcgaaaggcgtcgcagagcccgggccgcgggtgccaggaggatggggccacagcagcccctcgggcctcctttcttggattttctcagtctgttgctgcttggaacagggaagctccgcgtcctcgttctggggtgcacccagtcctttcgtgggatagagccttcgcgtaatccgtctgcgactcctcccttcccattttggctgctggctgacctgaaagccacgcccaacctgtccccatagcccagcgtgtaccggcagtggctccgccgccttggatgtcaccgtgcagtcgcacagccaggagtcaagctacagggatgtagctctccgcccgctgcgtcttgctgttctaacagaggctgtatgaaaacttggtaatcctagaaactgctcagatggacctcgcataaaagaagcc

SEQ ID NO: 114644 - DNA, 602 bp, Homo sapiens
  chr7:12610062-12610664
  hyper
accgttaatgttcttcgtctattgctagagaaaatgtctttccttggaggaggcattggcacgagttactataaactccctctgaatctcaagacttctgggacgccgattccgctcctggcctggggcaaggcgtgggagcttggaagccagcgctgcgctccccgtgggaagcgatcgtctcctctgtcaactcgcgcctgggcacttagcccctcccgtttcagggcgccgcctccccggatggcaaacactataaagtggcggcgaataaggttcctcctgctgctctcggtttagtccaagatcagcgatatcacgcgtcccccggagcatcgcgtgcaggagccatggcgcgggagctataccacgaagagttcgcccgggcgggcaagcaggcggggctgcaggtctggaggattgagaagctggagctggtgcccgtgccccagagcgctcacggcgacttctacgtcggggatgcctacctggtgctgcacacggccaagacgagccgaggcttcacctaccacctgcacttctggctcggtaagggacggcgggcggcgggaccccgacgcaccaaggccggcgaggggagg

SEQ ID NO: 114645 - DNA, 121 bp, Homo sapiens
  chr7:12610726-12610847
  hyper
cgcgcccccacggggctgcctttggggccggccactttctccctaccgaagtcaactcgccggctgcaaacgcggggctcaggcgttgtccgcaattgacttacctcgcaggctttgacct

SEQ ID NO: 114646 - DNA, 1161 bp, Homo sapiens
  chr7:12726286-12727447
  hyper
cctgtgccaggctggcgggccgccgcagacagagctacccggagcaaccgttcaggggtgaggccggaagtcccatccgacctcgcgggcagccagcgctaggccgattcgaactcgaccttgttttggcgttgctaggagacgcggctcctgcgcgccccctacaggccggcgcccgggcggcgcgcgggcagggggcggggactgtcgcgtggagctgccgggcgagcaccgttagggcagcctggcgcgcggcgcccgccaggcgcccagtcctctgccatcgcccacgcctccctggtgccagggaacaggtatcagcgcgcctccccagcggctgggagagacgctgaatgaagaagagggaaggacggttagtcaggtgagccgcggcggggtgggcggccggggcggccacgccctgccgagggagaagagccggtcgtgtgcggagggacagggtgaagggatcccacttcggggaggatgggcttatcccggcgggcgcgccaggtgggatctctagcgcctcaggggcccgcgcggcaacagccggcaccctcgggcccgcggacaaagggttaacgcgttggcagtgactgcgggccccggatgtgagagccttggcttgacgccctggctgcgctgcaggtgcgccgggccgaacggagccggcagcctggcggcgacctgaccgcccgaggctccccttcacctgcagcggctgctcggctccctctgggaacgccgccttttctaacttaagggcaacaggtggtgccggtggaccgagagagagctcagctccgccgcgctgggagcggcagttaccctcaccaattagggagcgggggcgggagttgcatggcttccctgatgcgggtgaccaatgggatttgggatcatgagtggaccgggaggagtgggcgtggtcggagtctgagtccaaggtttctcgtgcggcaactgccagagctgcttggagagctaagctggaagggtgcttatccctgcgtagaaacgcctgccaatgctttctcatttggacccagactccagatcgggaggtgagaacgttgttattttgcaaggggtaggaggtaatagtgatcttgggtatgctgttaagcatgtggaattagattccgaagataggactat

SEQ ID NO: 114647 - DNA, 2523 bp, Homo sapiens
  chr7:14028675-14031198
  hyper
atgctgctgctcttcgcaaatctcagctcagtattttatattttgagcatttagctggagatttcctcaggatctggacttctatcaacctagaggggaacaagatggcttttaggcttaaaaaaaaatcatgaatgaagctcttgaatttgcatagctaattaccctccgacagtcccattcacaaaaataaccctccctacaccgcctccttcacctggatccaaagagagccaacagagttcacaatttacatattttcggtagtagcaaaaatccgaacaagaggcgatgtatttatttacactctcgatgtttccctgcgcggtcggtgtaccccgggcagctctgattcgcaaacgtgtgcaaaactagcaatggcgatcaacgagacttgctttgcacctaacgggactaaagagacggagacacctctttcatcaggatagtttttgcgacccacaaccatgcaattatctggagagacataaaaagttgttggaaagacccacctgaaggccacgctaggcgaaaggctgcaaaaacttccctccaaatttaataaaaacattaattatagcccagcacttcccccttggaagccgaaagcgcctctgacagagctcaattcggtggtttttcctctacttctcctccaggggcctccaatccaaactgatggatcgctgcctcccattggctccgcgtctctttcacaagatcagatttcgggctgtcaatcaggcggcttgctgccccttcccgcgggtctccctcgcccctctgccctagggggtgctcggccggtaggcgctgggtcctcagcctggaagcgccacggagagactcgatttcctctgtaacccgctgcttattgttaaggcgcctggggatactgaaaccgtgtgtttcgagtcgccagttcccattattggggtgttaggtccactattgggctggtttccttaaagtactgttgtgcggttctggtatacccttagagccgcgatccacaaagcccgtaccgccttattcagctgccctcccctcaggatctccaacctctctactcttgccctgactaggagctcacctcgctctctatcctcattcccactcagcttttggcccaatttattttcccgtttttcaaaacccaccatcaccattatggtttatcgaaacattttttaaacagtcatcctcaactaaaattagatcctatcgttcgtgggacagaaacataaagaatctataaggaaggcacctaggagatgcagaattgctgattagcagaggttgtgatgggaggacaacagagcaagctaggtgaaaaagtataagtcaaaatggtccctacgtgtgcactgggaaaaggtacttccagtccactgtggctgtggggaggaggagggagtgcttggggttgctcgtatatcctagaacccgcacgtttcctgagcttttgttatgtatacacggaggcggagggtgtcacttactgtacttgacgctttcacttcctctccagcttttaaacagccagagcccagggttgggggcgagcggtgagatggctcgggtttcaaggacaataactaggacgttaagcagtgagggctgcatctctgaagccacttgccctgatcctcctatgggactcagaacagtaaagcgtcactttaaggagccagtgtccaacagcggacgggaggccgcggggataggaccagggactcaatgctgttgaaattcatttgtgaccagaactagtgaccaaaagacgtttccggcagctgttccgcccgttaggaaacgtgctgcagttctcaatttctatttgaaagtttccttccttaaatagaacgttatggagacacattaaaatggagtgtaagagcgcacagcactcaaccccggacctgggcaggagaaagatctacttaaaaaagaagcaaacaaacaaacaatcaacacttattactgggaaaacaaccaataactatggacagcaaagacagaccccgcgcattcccggaaactactaaatcggagttcacaacgcgcgcacctataagcattttgagcgggaactgcattttaaccccggccaaggagagattccaggaagcgcctgggccccgaggctgaacagtgaagctcatgggtactatctgagggtgcaaccaagcagggggtcaataacaagggtcctccaccaccctgcactcctggaataacccagcgcctgtaatctgagcaacagtttccaaagaccttctctgcagcccgagcctgacgggtatccagggtaaccgcgagggggcggagcttcgggttaggtcccggcgaggttcttcccgcagccaataacgagccgtaaatccccagcccattgttgtttattgctgacccctcagcgctccgctaggagattggccgctttagggaagggggcggagtcccgcccgccccaacagccacctttcgtctccattcacaaaattccggcccttcttggtc

SEQ ID NO: 114648 - DNA, 697 bp, Homo sapiens; identical to SEQ ID NO: 5363
  chr7:15725484-15726181
  hyper

SEQ ID NO: 114649 - DNA, 772 bp, Homo sapiens
  chr7:15726406-15727178
  hyper
ctcccgctcagcctgcgccacgcgctcccagttccacttcctatctcctgctggacggacgtagagcgtccacgcccgcccagcactgccggctgccaggactacaagcggcacgccaacgtctaagtcccgcccgggagggcagcagctctgccctccagactctggaggcctgggcgcggcgcacaccacccccaacctagcaccctgattcctacctactcactttcctctcggggaaacgtgacttgtcagtgtcatttgggaactgtcacctgcagaaaagctagggatacgcctatcctttcaggaacacgaaagaagtaatagggttaaaggaaaagaccagagctagtttggcgcaccctcgaagtttttcaaactttgcatcttcccgtgccccgggcgccgcagcgcgcctaggttttcgcagctggtttctgtcggtgggttgttaataggctgggacgccagatctgaggttgcggggatgagcaccatggcctggaaaaggcggttctcagtgcagaaagaagacggacctggttgggtgggtgggaggaaggcgtgagtctgaaagggttgcagatgcctgctccctggcatcctcacgtgcgatgccaggtggaggctcccttccccctctttcccggtcccgctcaatttcctagccacttgtccaccaagaagaacttttcctgggtcaagaatatttccaagcgattgtgtcccggtcatatgagatgtgtagattgcacgcgcatttctagcc

SEQ ID NO: 114650 - DNA, 59 bp, Homo sapiens
  chr7:15727421-15727480
  hyper
ctgctacttgcttggcgggcgacagggtccgctgggggcagagtcgtttacacacaagt

SEQ ID NO: 114651 - DNA, 859 bp, Homo sapiens
  chr7:16460419-16461278
  hyper
ctaatcggcgccacacgacgggccttccccacaacctcatctgcttggggacgtaaagggctctgtgggggagctgcagctttcgtgcccatctgttaaaggccagaacttcccatctctgaaatgcgggagggaacagagctcaagcttgaataactgagcgcggcccggcagtcccccaagtgaaggtgctagcgctagagcagcggcagggcggggagcgggaggccgggccccagggaaccgcggggcgcgcccggcgccgcattacctctccagggcctgtagggtgtagctgatgagcggcctctccaggatggggcagaattgcttcggggtggggacccccatcctctccccgcaccccccggcaggcaacacagctgccacggcttgcgggtggcgcccgggctcggtcccggccacgctctgcagggaggcggaagccgtgtggtccgcgccgcgctgaccactcaggcaaggacccggctccgccggcctggcgctgcccggcggcccggcctccatggctgcgggcggaacggcgagccccgctagcctcgggccgatgcgaccccgcgctgctcccaccctcggccggggtcgcggggcgaagggcagaccacggagagggacgcagagcgcgcaagcagaaggcgcccccctcagccgtcggagccccgctgttgctgccccgcaggggacgatcccgacagctacggcagcagctgaggctgccgatctgccctcgcggctcggctgcggcctccgcacccggtcccagcgcctgcgggagggctgacttgcccgctctgcgcttcccccgggcaggcccagctgtcgccgcaagtggaaatgt

SEQ ID NO: 114652 - DNA, 30 bp, Homo sapiens
  chr7:16684306-16684336
  hyper
cacctgccaggtaacgggactcggcaggga

SEQ ID NO: 114653 - DNA, 500 bp, Homo sapiens
  chr7:16685458-16685958
  hyper
ggagccgcaggaggcggtagcgagagatcgccattggagcaacctgggaggacaaaaccaaatgcagaaagctggaggggggaattaaattcctcctacacgttccgctcccctatcctgtccggttcaaatatttcgccacatgtaatattgaaaattctacagctggcagttatgtgctcagcgacggctttctggggcatgcagaggccccaggttgtcgccgtacccccaccattcccccgggagtggcgcagtctgggcgggggcggtctaggagacgggggcggtacgggaggcggggctgcgccgggttccgtgtgtctatgtcaatgtgtctgtccttcactcctccattgtctgccgccactgctgctgctgctgctgctgccgctgctgctgcacgaatcgccgcagcccccagccttgcgcgtcgtcgctacctcctcggacaggtgagaagcagcccaggtgaggcaaggggcgccgtgagggttgcg

SEQ ID NO: 114654 - DNA, 30 bp, Homo sapiens
  chr7:16686296-16686326
  hyper
cgccccattactagcgagtcagtgagaaca

SEQ ID NO: 114655 - DNA, 285 bp, Homo sapiens
  chr7:16793056-16793341
  hyper
ttcaaaatggtgccacgtcatctgccagggccaagaatccagaggtgctgtcatatttctccttgccagcgtggatctcctccgagccccgccctccctcctcacctgctcctggggaaactacaccaaggccgccgctctggcctggggctccctcccacacggccttggccctctccccctcgccccgggaccgctccgcccctcccggatcccggtcggcggagcgcatttatttgcatatttctacctttgttccctgccagcggccaatcagcgcgcggg

SEQ ID NO: 114656 - DNA, 182 bp, Homo sapiens
  chr7:16793380-16793562
  hyper
cggctcagctgcggcggccgcaggttccaaagcgggtccgagccgccgccgcgcgcgcgccgcgcactgcagccccaggccccggccccccacccacgtctgcgttgctgccccgcctgggccaggccccaaaggcaaggacaaagcagctgtcagggaacctccgccggagtcgaatttac

SEQ ID NO: 114657 - DNA, 1039 bp, Homo sapiens
  chr7:17338061-17339100
  hyper
cacgaagatggctaccggcgggggggggcgtccttacgtcctacgtcatcacgtgccgggatgagggtggggccctcaaggaagacggaatggaatccagatgggcgggggcaagcaggacggggcggggctacgcgggatctgggcggggcggggccggtgaggggtcgggggtgctcctgctattcagccggtgcgcgcggcggcgggaggcagtggctggggagtcccgtcgacgctctgttccgagagcgtgccccggaccgccagctcagaacaggggcagccgtgtagccgaacggaagctgggagcagccgggactggtggcccgcgcccgagctccgcaggcgggaagcaccctggatttaggaagtcccgggagcagcgcggcggcacctccctcacccaaggggccgcggcgacggtcacggggcgcggcgccaccgtgagcgacccaggccaggattctaaatagacggcccaggctcctcctccgcccgggccgcctcacctgcgggcattgccgcgccgcctccgccggtgtagacggcacctgcgccgccttgctcgcgggtctccgcccctcgcccaccctcactgcgccaggcccaggcagctcacctgtactggcgcgggctgcggaagcctgcgtgagccgaggcgttgaggcgcggcgcccacgccactgtcccgagaggacgcaggtggagcgggcgcggcttcgcggaacccggcgccggccgccgcagtggtcccagcctacaccgggttccggggacccggccgccagtgcccggggagtagccgccgccgtcggctgggcaccatgaacagcagcagcgccaacatcacctacgccagtcgcaagcggcggaagccggtgcagaaaacgtgagtgtcccgagcgcgtcctcatcgcgggggctgggcgctcaggcacgcgggtgcgggaggcagccccaccccgcccccaaatccctgcgatcctgggattaggtccattcccggcactgcccgtggaatcgaggtttggaggcc

SEQ ID NO: 114658 - DNA, 534 bp, Homo sapiens
  chr7:17339331-17339865
  hyper
ggttaggttagaggacggtcttaattctcattcttcgtagagtttggtaaggcgagatgttttaaagagctaaacacatgctgacttttacgaaggggctgagtgcctctaaaggtactttttggtccccaccaactggctttgtgttgcgctcatatttacttatttggcagcaattttgtagcgctcatcgtgaccatatcggtaaagtggatagaagtggtagcaggtgggagtggatgcaacggacaggatacggtggaggatttgtattcttcagacatctttttcggaagcttgcttatcacttttggggtggctttagggtctgtaaaataaaagatttagaactgcatttgagagaggttttcattcttaacatctacctctaattcttttccccttcaaagttttcttctagttgagtgagtacaaacttgcttttgtcgttgtcggttgattttggtggaatatttgtgtgagatggccaattttttgtgtgtgtcagaaaaaactatccgtgctcaaaacatt

SEQ ID NO: 114659 - DNA, 30 bp, Homo sapiens
  chr7:17980575-17980605
  hyper
aacagctccctgcgcggcccttttctccta

SEQ ID NO: 114660 - DNA, 195 bp, Homo sapiens; identical to SEQ ID NO: 5372
  chr7:18125866-18126061
  hyper

SEQ ID NO: 114661 - DNA, 375 bp, Homo sapiens; identical to SEQ ID NO: 5373
  chr7:18126082-18126457
  hyper

SEQ ID NO: 114662 - DNA, 411 bp, Homo sapiens
  chr7:18126465-18126876
  hyper
cgccgcccgctcagctcgcagctcgcagccgcccgctgccgccctcccgagccccccccgcgcggcggcggcggcggcggcggcggcggcgcgtcccgcacatcgcgcagcgcgcaccgagccggccgcgccgcgcccgccgctctcgccgctttcgccgcggtctcctcctctagcgcccgccgcggccggtaaatctcggctggaggagcagcggcggcccccgagtcaactttcattccctttttgcttctgcctcaccattctcttctcctcctcgaaagatggctgtttggagaagggggagaagttaagaggtcgccagcgcggagcgaaggagggcgcgatagcctcagcaggagcgggcggaggtgagtggcaccacggcagagtccccggctggtgcttgag

SEQ ID NO: 114663 - DNA, 14 bp, Homo sapiens
  chr7:19145879-19145893
  hyper
tttgagaaacgcgt

SEQ ID NO: 114664 - DNA, 153 bp, Homo sapiens; identical to SEQ ID NO: 5375
  chr7:19146031-19146184
  hyper

SEQ ID NO: 114665 - DNA, 321 bp, Homo sapiens
  chr7:19146237-19146558
  hyper
cggctagaggttgaggccggaggctgacaccaccagggacccaacggagggtttattctgcccagcttcacatctgggggtcaaatcgcattaaagccaaaccaccaacggggcagggagcaggtggttaactgcacaaaataaagttacagaaaaaacctcgttttgcaggcgagtgacttagtttccctctgtagctttgccgtcataaaaagcaagtccctcccctctcctgagctggaaggcggggaaaggttatcagcggctccagatggacgcccgtaggcagggtcagtttaggaagaccggcaggcaggcgta

SEQ ID NO: 114666 - DNA, 1078 bp, Homo sapiens
  chr7:19146828-19147906
  hyper
taaggggtaaggggcacttttcgctgtaaatttcctatacaaatctcaaaatttttcttagcattgtcaactaccttcttggagacaggctacagcgcttctaaacccaatacgcttttctggagtcctcggaacagctggccggggcttttagcacacgggacgggaccttcgcctttgcctgtttttttttcgaccaggagaagcaggtgcgagagtctggggcttaggaggtggaaggcggggaaagagaatccactaggtcctcgtgtagagaacaacagtcgctccttagatattactccaggacggaaacctgattgcaaaccgctgttccttcgaaacttgcaaaacccggaacagaaaactcccgcccagccaattttagctctcgctgaactctcccgcctgcgttacgtttgcacagcaactctttgtaaatgtccgagtcctctcggaggaaagatcgttagggcgacgagaacattaagaggggacctggagggcagatatcctcgatcccaagagagcaactttgtcgcctcagaaaacacgccaacttccctcctgctctttccttggtcaactcagaatcaaccgattgtattgaaatctcctgaaatcccgaacagggattggcccagtcggcttctgaaaccgaggccggggaatggcaggaatggggggcagagaggatcggaaagaagagtccttcccccacagacattcccagctgggacacgagctcgctcgcagcgcgtttatggaaagagggggcgctgggaaccgcgctggcggcgagcagactccagggtcgagattattcgacacgtgtcttttattcctcacaatccatttcttacgggtgatttatgaacgaatctctttgatcagggacggttttatctgtccactgctacagatgacagatgcggctgctaaaatgcctggtccccgctgcctaaaaggttgctcccccccttcccaaatgctgttgctttttctctggcggtccccaccccctgcttcttcgttctccttccctacccccaaccccgtttgctgtcttagttgcaat

SEQ ID NO: 114667 - DNA, 137 bp, Homo sapiens
  chr7:19152223-19152360
  hyper
cgcgagccgggcccgccacccacgcaggggagaccgtgcccgtgcccctctcccgcgcctgccgcaggtgagaccctcgctccccacggagttctgtttgggtttccgtggcgtttgttccccgcaggtttgtttat

SEQ ID NO: 114668 - DNA, 104 bp, Homo sapiens; identical to SEQ ID NO: 5379
  chr7:19155957-19156061
  hyper

SEQ ID NO: 114669 - DNA, 7 bp, Homo sapiens
  chr7:19156125-19156132
  hyper
cggcctt

SEQ ID NO: 114670 - DNA, 442 bp, Homo sapiens; identical to SEQ ID NO: 5381
  chr7:19156303-19156745
  hyper

SEQ ID NO: 114671 - DNA, 511 bp, Homo sapiens; identical to SEQ ID NO: 5382
  chr7:19157055-19157566
  hyper

SEQ ID NO: 114672 - DNA, 465 bp, Homo sapiens
  chr7:19157633-19158098
  hyper
cggtggcagccccatccggagtggctgtgacagcagcaatggcaacagcttctacacagtgggtgatgtctcatctcgcccaagagccctctaggtccgtggggccgatttgggattgctggggctgggggggtggtgtggcgcggggtgggggggcatgccaagaaaagtgtcaaccgcggagcccacccaatggtcaggtagacgaaccccttggagttccaaaggccaaaccgcggcggcccagcccggaggtcctgggcgtttctgaagacgtggccgcgccgcgggggctgaggatttgcgtcccggcctgctctctcgcccttctgggccctcctttcccctctacaacgacccagtctgacgctccccaacatccaaaggactacgcctcggaaggtgctcgaaagaggcagaagttcactcttcggtggaaggaaacccagtccatgggaaaggcag

SEQ ID NO: 114673 - DNA, 30 bp, Homo sapiens
  chr7:19159201-19159231
  hyper
tttatctcttggaagcgcttagagaatgcg

SEQ ID NO: 114674 - DNA, 907 bp, Homo sapiens
  chr7:19183518-19184425
  hyper
agcggtggctggtggcgaagctgcagggcgcccaaggccccctgcggcccaggagtgacccgagtgcactcgccccttactctggcctggggcctgaagaaggcactggaacacggaagctgatgctgcactttagatgcaaagcgtagatttgcactctggctaaggcactgaatgaacaccactgtggccctgggacaaggagctgtggtccgtctgggatcaactaggtggcgaaggggagggagaaaggaagagagagggcttgcgcgcgggagagaggaagggacgggagggagagggaatggaagacaggaagggtgtcccttctcagaggtcgcactttgtcagcagttcctctcgactgctctgccttccatttttcctttcctcagttcctggacaagcctcggaggaccaggcagaaccctctggctagcagaaaagctcgcacccccgcacccttgcggcgtctgcttcagaccctccacgcaggcgcccgctggagcgcctgctggggatggcgtaccaccgacccttcaggctttttaaaaacgtaagaatttctactttattatctctatgaaaaaaaaaatgtaaagaagagaggttagattttatagaagctccaaagtctgccatttgcgaggagggttcacttcccacccacccagcccacggaagctcttaggagcagcctgaacggccccgactcagcctcacgctctctgacttccccgctcgcccctgaccccgacttcacttagggcggtcgcgtagatatgaactctacagcagccactctgctcagcgcatgtggggatcttacaatctcgaccccgacctccagaagaccagacgttctgtcttggggcctccctcccggccctttagcctcacccagtgc

SEQ ID NO: 114675 - DNA, 320 bp, Homo sapiens
  chr7:19184564-19184884
  hyper
cgatccgggacagccttttctcgtaagcaaacgtgggcaccttcctccgcagctggtcaaaggcctcgttgaggttgaacatccgcttcctttcgcggatgttggcggcctggcgctgggcgtaggtgatcacccttttcctcttggggcggcctaatagggagacacctcttccgcgctcctcttcctcctcctcttctccgtccccctggtccacttcgcactcctcttcttctgggtccccctcttcaaaccgcgccatcctcctgggtcttccctctcggagcgcaagggctgggtcccccaaggagaccccgggt

SEQ ID NO: 114676 - DNA, 30 bp, Homo sapiens; identical to SEQ ID NO: 43935
  chr7:19748648-19748678
  hyper

SEQ ID NO: 114677 - DNA, 305 bp, Homo sapiens; identical to SEQ ID NO: 43936
  chr7:20369104-20369409
  hyper

SEQ ID NO: 114678 - DNA, 30 bp, Homo sapiens
  chr7:20370150-20370180
  hyper
ctgttgcgcggctacgcttcaggagttctt

SEQ ID NO: 114679 - DNA, 273 bp, Homo sapiens; identical to SEQ ID NO: 5385
  chr7:20370483-20370756
  hyper

SEQ ID NO: 114680 - DNA, 30 bp, Homo sapiens
  chr7:20371061-20371091
  hyper
agcagaagccccaccggctggagagaaaca

SEQ ID NO: 114681 - DNA, 30 bp, Homo sapiens; identical to SEQ ID NO: 43938
  chr7:20371488-20371518
  hyper

SEQ ID NO: 114682 - DNA, 319 bp, Homo sapiens
  chr7:20816218-20816537
  hyper
aggcacaatagggtgagagaacgcggcattccagcgcttcccagctttccggaccccggagagagggggtgggggtgtgggctcacatcgccggctggcttgagggaggagagtggtggcggctccggaggtggacgtgtcaattatatcctggagctccgggaagccagattgcttctaccggcggctgcaggggcttgcaagcgaagataggcggccctccttccttccccactgtgggggattggggtcagtggagcccgtggatttagccacgaggggacatgactggagccctgtcacgcgcaggtgtgcgtct

SEQ ID NO: 114683 - DNA, 676 bp, Homo sapiens; identical to SEQ ID NO: 43940
  chr7:20817280-20817956
  hyper

SEQ ID NO: 114684 - DNA, 303 bp, Homo sapiens
  chr7:20817982-20818285
  hyper
cggatcgccagttcggaaccctccccgggagggccccggggtctttctcaatgtactgggcacttcgaggagctgggaagaggaaagcggagggtagcgtttagaaagggagggaaatcctcccaggctcaaaacctctcgcagaattcattcgaaaagagaacgaagggaactttgggcaggccggacctcggctcagcgccctgcgagagaagcagaggtcgctgccagcgtttcctcccgcgcagcaagaaattggtgcctgagaagcaaagttgaggaatgggctttttaaaagcggca

SEQ ID NO: 114685 - DNA, 75 bp, Homo sapiens; identical to SEQ ID NO: 43942
  chr7:20823255-20823330
  hyper

SEQ ID NO: 114686 - DNA, 291 bp, Homo sapiens
  chr7:20823382-20823673
  hyper
cggctctggaaccaagcagccgtctgcccgggcggcgctgttctgcccaggcctccagcctctccctctccaccgctccgctcaggcttgtcagccgagccgctcctgcccgcgcgaggcccgctgtctaccaggcactggattagtccagctctacctccagtggccgttccctctaaaagttacgcccttcacaacctggggggtggaggaggggaggacaaggaagagagaacgagaaataaaggcccgacgaggcgcgggttccggctgcaacgggttcaggcagcg

SEQ ID NO: 114687 - DNA, 2 bp, Homo sapiens
  chr7:20823876-20823878
  hyper
gg

SEQ ID NO: 114688 - DNA, 224 bp, Homo sapiens
  chr7:20823919-20824143
  hyper
cgttgcggtgcccgggctcggggggctgcagcagctctggggagtggcagggcgggctgcccgcggcgctgtgctcgctgtcggtgtcgctgcccttcttgccgccgctgcccgagcccgccgagccgccgccgccgccgccgccactgtgcgtcttcacgtgcttgctgaggtggtcgctgcgcatgaagcgcttgttgcaaactggacaggcgaagcgcttc

SEQ ID NO: 114689 - DNA, 344 bp, Homo sapiens; identical to SEQ ID NO: 5391
  chr7:20824475-20824819
  hyper

SEQ ID NO: 114690 - DNA, 2035 bp, Homo sapiens; identical to SEQ ID NO: 43946
  chr7:20824835-20826870
  hyper

SEQ ID NO: 114691 - DNA, 244 bp, Homo sapiens
  chr7:20827406-20827650
  hyper
taagggttatttttagggatgcgttgggacgtggatgcgcgcctgcgcgcccatgagttgtttctttgatgccgtggctttttttttttttttttttttttttttccctgaggtggaattctgctttagaagtgcacgtctcactctaggggaggaggtgtgtgtgtcccgtggtgttgagtaaatttcaatacaaaaggattagatagagaagagagtaagcgagggtcgttttttctttggg

SEQ ID NO: 114692 - DNA, 109 bp, Homo sapiens
  chr7:20828443-20828552
  hyper
ctttctttctctgagggctgacgcttaccataaatgtcgtgtttctccctgcaagccgctctgaatgattttagcgtgttgagaaggcgtgacaggccagcccagaagg

SEQ ID NO: 114693 - DNA, 30 bp, Homo sapiens
  chr7:20830090-20830120
  hyper
ctccttagatggaacggagaaaggaaggtt

SEQ ID NO: 114694 - DNA, 616 bp, Homo sapiens
  chr7:20830546-20831162
  hyper
aaaaatgcacacaaactgtagcgcgtacctctgcagggtacgtttaaacccggctcttagcatctcggtttctagagcgttggcagggacatgcagctctggaagctgaccggcgggtgcccgcgggagacagagcgaacgcagtgctggcactgcgtccctggcctgcgcctctcccagaatgggaagacgacccccaaccccttgactagtgtgcggggtcctcgcacgcggacgtgttggctactaaataaagcgtgaagagggatcgctgggtagctgagcgccgccggcggccgccgggagcagcgagctgagccaggttgggtgggggtgtttcctcgtcgagagctctctggtcaaagtttccttcccgctggaaaacaaaaacaaaaacaaaaaacaaaccaaaaccaaaacaaacaaaaaaaaaaaacctggctaggcgtggacctgtgaattcctgaggggtgccccttagcagtccatttctctttcgtgtggttttactaagaagttacctaacatttcctgggaagagaggtaatacaagcccctcgctggtggcagattgttgagccgtaggtgggaagagatcagtcggccagagcccaga

SEQ ID NO: 114695 - DNA, 607 bp, Homo sapiens
  chr7:20833038-20833645
  hyper
aggccataatggccacgttatttcggcccagtgaacacgaacaaaatcgcgtgctttagaatcattcgactctgagtccaggaaaagcagggggtgtggtggcagtgggggtggctagggaggggtgtatatgagtgggggagccgatttcatctcggatcgcaggaagagaacttgctcaaaagaatttttccccagcaaaagtggtataatttacagcgcaacttaataatccgaggggcaatgcaaaagccctttgcgttgtaaaccgcttctaattacctgccagagcaattagctgactatcacgaagaaattagatcgctcaatgtagcataaataatgcgaataattttgtaagaagaatggaaagcgagacctggtgtttctttataaggaaataacacctcgtactgtaagagccctccatgaacacatattaatgtctaggcatgcatggcaatgagtccgagcaggagccctctggctgcggttcagcactttttccgtttacgtatgcggggtgaaagtcggcttccaggcgttcgatctccagccttccagctcacagtaattaacacatagcgacttcaatgggaaaacctgt

SEQ ID NO: 114696 - DNA, 78 bp, Homo sapiens
  chr7:20834299-20834377
  hyper
accgctttcctgtgccgcccaagggaaatgggtctctcttgagcccgtctttctctagtaaacgaggtgggtcatacg

SEQ ID NO: 114697 - DNA, 392 bp, Homo sapiens; identical to SEQ ID NO: 43952
  chr7:20836773-20837165
  hyper

SEQ ID NO: 114698 - DNA, 70 bp, Homo sapiens; identical to SEQ ID NO: 43953
  chr7:20837556-20837626
  hyper

SEQ ID NO: 114699 - DNA, 182 bp, Homo sapiens; identical to SEQ ID NO: 43954
  chr7:20837650-20837832
  hyper

SEQ ID NO: 114700 - DNA, 116 bp, Homo sapiens; identical to SEQ ID NO: 43955
  chr7:20838168-20838284
  hyper

SEQ ID NO: 114701 - DNA, 334 bp, Homo sapiens
  chr7:21293814-21294148
  hyper
tcccagccctcagccccctaacgtagcagagttccttggcaaacgacagagtgccctctgttgatggaaaaagtaatgcgcagcggaggatacagagagaagctttcctactagaagtcgcagagctgcccgttagccgatacacatttgtgatgtaaaaatcacattttaaattataaaaatattgatttaatgaatattgagagagtacagatgattgcaaattcagacacaattgttggaattatgtatttagatagatacacacataaacacgctagttattcagtttctacatacctggaaatgctacgtaagacgactccttttttac

SEQ ID NO: 114702 - DNA, 166 bp, Homo sapiens; identical to SEQ ID NO: 43957
  chr7:21582474-21582640
  hyper

SEQ ID NO: 114703 - DNA, 486 bp, Homo sapiens; identical to SEQ ID NO: 5403
  chr7:21582791-21583277
  hyper

SEQ ID NO: 114704 - DNA, 323 bp, Homo sapiens
  chr7:21583303-21583626
  hyper
cgctcactcgggcactttaacaaacttggcttgaagtccccatcctgaggcccgcaggactcctccccacgtgcacccactctgcagttcagcagctgcaggttagtttcctaagtcagcagtttgtatctgaccgagaatcccgcgttgagcctgttcgaccaggataacccaagaacaccagcgctttctttagctgcttgggtgttaggcgccaggtgggctttctgtgccaaaaaacttgcgtttcagttgctcttgggtcactctggagtcacatcctttaaaaaatggggtgtttggcagagcgcatgtaactcgtc

SEQ ID NO: 114705 - DNA, 1128 bp, Homo sapiens; identical to SEQ ID NO: 43960
  chr7:21984771-21985899
  hyper

SEQ ID NO: 114706 - DNA, 185 bp, Homo sapiens; identical to SEQ ID NO: 43961
  chr7:22143357-22143542
  hyper

SEQ ID NO: 114707 - DNA, 30 bp, Homo sapiens
  chr7:22150078-22150108
  hyper
agcagatgtcgctaacgtctcacattttgg

SEQ ID NO: 114708 - DNA, 30 bp, Homo sapiens; identical to SEQ ID NO: 5406
  chr7:22396131-22396161
  hyper

SEQ ID NO: 114709 - DNA, 31 bp, Homo sapiens; identical to SEQ ID NO: 5407
  chr7:22396516-22396547
  hyper

SEQ ID NO: 114710 - DNA, 733 bp, Homo sapiens; identical to SEQ ID NO: 43964
  chr7:22589356-22590089
  hyper

SEQ ID NO: 114711 - DNA, 1278 bp, Homo sapiens
  chr7:22893422-22894700
  hyper
gttcacatcctttaacgggagccagtcttctgctacgtaattagacgagtcttgaaagaagcacccaggggcgtggctgaagactttaagaaacaccaggcaagggaggggagtgggtaccagagacacctaacattatttgagtggcaggagcttcctctgaccttcaacgaggtaaagagacatcacagccagcgagagtttggggcagactccccagactcggaggccggggcaaagtgggagccggggccaagtgggagccggggccgtgtggggtgggggggggggcccaaggcggggaaggcccgggccgccgacagggggcgcgcgagggcctccgggccccgcgggcggggcgggtgctggacccggaggggccttccggcaactttttggttggtgccgccccgcccaggccccttttaaacttgatctccgcagtgccctcccttttcggccgcggcgcgtgactgggtaagtgggctcggaccttctggacgcaggagccgaccacgtggctccggggctaccccgtgcgcttcctaggcgcgcctctcgctgcccccacgccgaggcctcggctcggcgccgcggggaagcctccgttagggcccctcgggggtgggggcgtcctcgtggcgcttgggcccttcgtcccgggttaggacggcccgtgtccttgtgcgcttgaaggggccgccccctttcctcgaggatcccacccccactcagcagaagccgccaggcgcccgtcacctcccgtgcctgagtccctgccgtccacgcattcggcctacaggcagcttttagtcctttttcaattaaatgattgcattttgaggatcaaattccaaccgcaggcggaggcgccgagccccggacggtctctgggttcttggtgcactcggggctcctgcctgcccaggggctgtgaccgcgcggacggaagcctatttgggaagcgagtgagatctgatgtctgaagcgctttaagtttctaagcggggcagtataatagcggggttagcaaacacacggaggtcatttcactcgcgcagccatcccccaccgccaccagtgccgttcatttgctactggcccgcagtcagataatttaaaggcttggagggacgagtcttgctggagccgacgcctacagtaagttgagcggagtgctgtgagccctaataagggagcctgctttcctcccgaagattcgcttttttgggagtggccagagcgttattacagcacagggcccgcttccaacgttta

SEQ ID NO: 114712 - DNA, 989 bp, Homo sapiens
  chr7:23052803-23053792
  hyper
tttcagccaaacccccgaggattcccgagtatgttaaaatgagcctcaggagaggaataactcatagaaagaaggggcaagggctcaagaagagatcttcagcgaaataaccaaggaaggaagcgtggctgctgtctgaacctctccgccctgcaggggaccaaagaccgactcgggccaacgctgctctccagggggcgagggcggggggtcgacagtgaccattgtggccaccagaccggacggacagtggcggcctcgccgaagtagagggcgcgagtgggagaggaggcagaggccagagcatccgccgcggcagggaggggacggggggctcccgccccaggcccacccggcagaggggcggccggtggggccgaggcggcggcacccgggtcacagcaggaggctggactgctcctcgccgggaaggaaagacccgagtcgcgcgcacaaagctgccgccctccaggcagcgggcaggctgcgcccaacttcggggcgagcagcgccggccgcagcccacccgcccgccagccgcccccagcgccccgcgccgcctcgcacccacccatggcgcctcgcgcgggagccgttacccccagtggagccgcggccccagggacaaagtcccggtcctgtcctcgccgccgcctcgccccggctcctccctgacaaaaaaaagttatccgttgccggacgccctgggggcccggcgtgggtctctcggctggactcaccagggcggctgccggagctccacctgcaggacctcgactcgtgaggctctcagcgacagcgacggaggctgctctgcttcctcccgagtagcagcaccacctgctccccttcttcctagcagaacgggtcccggtgagccatcttccccctcctctcactgactgacaacccagccgggagagccaccactgccgccagcctctctgacaggcacgaccagggacccgtcctcaagcagccaaccacca

SEQ ID NO: 114713 - DNA, 260 bp, Homo sapiens
  chr7:23053819-23054079
  hyper
cgtcctccggggcgggatcagaacaacttctccaccaatgagaatcttcttctgctgggcctggggcggagccatgaggcgccttgagtgggcgtggtctgagcaatgggcgtgatccgggcgtccgagggaagttgattgactgtaaggtttgcggtggccgctaggcgatgacaatcagcgaaggtctcttagattctgagccgttagggcttatggccttctcagaaaaaaataaaccttaccggatgatgtgaagg

SEQ ID NO: 114714 - DNA, 30 bp, Homo sapiens
  chr7:23145197-23145227
  hyper
cacaaaagagcaggcgcgacctcggaccag

SEQ ID NO: 114715 - DNA, 30 bp, Homo sapiens; identical to SEQ ID NO: 43968
  chr7:23221664-23221694
  hyper

SEQ ID NO: 114716 - DNA, 34 bp, Homo sapiens; identical to SEQ ID NO: 5411
  chr7:23287316-23287350
  hyper

SEQ ID NO: 114717 - DNA, 243 bp, Homo sapiens
  chr7:23287532-23287775
  hyper
ggcactgtgatggtcccgcttcccacacgaggccacgggccacagagtgggcaaggaactcgccccaagccacacagcgggtaagttgaggaggcagccttccatcccgacctctgtccttcctgcccgggtttggggttggacaggctcgggctccccgccagcctaggggctgggtctccagtggctttgctccatttcctcatttccttcaaaacgaggagttttcgtttcctcatttgc

SEQ ID NO: 114718 - DNA, 2279 bp, Homo sapiens
  chr7:23507575-23509854
  hyper
cccagcgtttacgcacgcgttccaatacccctggcgagctcacagggcagaggcaaattcctctccactcggccgcgcccacggcctcccaaccccggacagagaaggaaaggagggacccccgcgtgtccgcagctgctttcgcctctcctgctcctggaggggtgggggaatcatccgctgcttcccaagccctgcaaaccccccaaactgcttgttgggacccatttcccgtaggagcaatttgacccgctcggaccgaggacattcagctgtgagctttcgagagattttgtaaccaataaccataatcccgcggcagaggccacagaaaagctttcaattcctgcccagcatcatcaacacacacacccccgccataaacttaaaagcaaggattaaagaccggaacaccacgccacacggcagggggtaagcaccagaggacaagaagttctcagctgagtctctccacccaataacggagtgagaacagaatcggggcaaacagaagcagcagctcacctttgcctttttgggaccgagtgctcaacttctatgggtttcccgtgcagttctattttacctgcggacacacaagaagtgagacggtcggccgagttcagcggctctccctgcccgaagacccgcacagcccaagcggcgacacaaatggcctcctgaggccctcgaagggcccccgaggcccggacgcggctccaggcggagggagaagccgaccccctcgagcggcgtgggcatttaactcgcagatggttggggagcagggtccgctggcgggcccactacttgggtatcagtccagtctccaagcctcccccacccacccctgggggccaccaacaccacgaggcccgcaagagggacgcggcccaccctctcaccgccctggacacgctccacagggcagactcggggcagggggctcccctggctttcttcaggagggggcgccctggccctgccctctgcttcagcccagacccgccgggaacactcagcggtgggcttgaggaagacagggagtggcgagaaagggtcggggacggcaggggagaccacgaacgggagaactggcagaggcgcagctcggcacaggctgaaccaggcgcgaaggacggcgaggcgcccgcaccacgtctgaattgattaaaagggaagccgaaaggcacggggctcccatggggaccccaacgcagccttccccctgggcgtcctgctccgcccggcaccgtccctcgccctggcggagccatacccggaggccgcagccccgcgccagggcccggagagcggcgggcggccggtgcgtggcggcgactcccttccaggcgaccagccgcccccgcccacctgcccctatcgctcgtcggaccaggggaggtggaacggggaaaccgggcacacactctctcctcccacagggtggggaggaagcgcggggccgcctgtgcgaggcaccagcctcgcggtctcactcggcagcacggtcgaggccactttccgttctccacggccgggggtttcggggcgcagcacagacagcgccgtaaataacgaccgaggaaagcaggaaggaacgaggcacaggcgggcattctagctcggcccccgaggcccagcgtgccggggcctggagcacgcgcctgggcccgggcggggcgccgggggagcgcgcctcccccagccccgcgccccccttagccagcgccggggctttcttgacagcgcgttcgccctcacccagcaaaccccggccggggaagcagagccgcgggccggagtgggagccggagctgaggagagccccggcccccacgcgcgtgggtgtgggcgctcaggcctcacccccgctcccccagcgcgccgggcctggggcccgcggagccacccggtgggcctgggcgggcggtgcagggctggggcgagagcccgggtggggccaggcccgggcccacctgaaagcgcctcgatggccttgagggcccagctctcgtccgggcagtccacgaacgcgtagccagtcttcaccaggaagggtcccgacaccgggatcttggcgtccttgaagatactttctaggtccgagggggcggcgttctcgctgaggtttccgatatacagtttgttcattgtgaagagtggttgtttaaaaaaaaataacgagaaaaaacgaaaaattaaaaccacccacggtgatggatggatccagctggttttgttcccctcgtcttctcgcctttaaaatacacaaacac

SEQ ID NO: 114719 - DNA, 957 bp, Homo sapiens; identical to SEQ ID NO: 43972
  chr7:23510067-23511024
  hyper

SEQ ID NO: 114720 - DNA, 1471 bp, Homo sapiens
  chr7:23513225-23514696
  hyper
gggggctgccacccctcctcacgcccggcttgggaccagcctggagtctcaagccgaaacccctcacgcgggtgggcacacaatgcccggcgtgtcgcctgggcctcctcggaggtgctttaacaggctcttgcgcttttgaacggccctcctggactctgatctgtttaaactagaggcgttaataagtgataacctggatctgccctccttggaagctgcctgcctatattttattgtttaaaataaataaaaatggtgccccgggagagaagatggggttgtttcctttttcctctggctctgccccgagaaagagggcgggatcctcacggctcacagtggggagggtctttcgtcggccgccggctcgcctcggagggcctggaccactggaccgcccttccccggggccctgccgcgggaccgcgggcttctggctcctcctggggctgcgtccgtatgcgcggagcgtgtggccgggccgtcgccgcgccaccccacctgagtccgccggccagcgcggggacgcaccgggcagcgtgtgtttggcgaccctcccgcacctctggtctcagttgcgtgtgtgcacgaggggttccatagggcccagggatgcttggtacccacgggggagaatccctcgccgaaccctgcgggtctgcggggcgggccgcgagactggcgcgcaaaagcggctccaaggcggggctcccgcgctccccggggccggcttgccgagtccaagttgagcaaccggcgtcgagagagacaccgcccctgctgcgggcgggggcctctcctcgcttccgattggctgacggggggaacctatcgccgtcggccgcctccgccagagcggtttgctggttttcattcattggccccggagccgcccctggatttccatcttttgtggcgcgaaaataaccctttgctccctcgttggttttgttgaggttgaggggtgggactgtgttcccctctgctcgctctcgtttttcctgccctttaacagctcgcccccagccccaacccccaaggaagaaagagggaggtaacgctgaggaagggtggaaagcagttctgcgtccgtgggtggagcccgccccttggctgaccgcatggtgcccgcacggtcccttcccttcccccagcgtccagcgcccggaggttctggatttgcgccatgctcagcagctggagtcacatcttcgtttccctgcccatttccaacatcttagagttgatgcgtccttttttacttaaaacaactacaaccaaccatgttctcaggtaccagaacttttctgggcttctagagaaatcgactcgccctgcccgctcccttcctaaacccctttgtggtccacagggttgttttaagcaaaatcaaacaacccctccaaaaaaagcaaacgaaaaattccgggtaaaatcaactatgctgagaccacgttttcgttgaagc

SEQ ID NO: 114721 - DNA, 250 bp, Homo sapiens
  chr7:23570142-23570392
  hyper
atctacacaacagcccggaacgtgttgcatggggcttttgttttctttccagggtttcacacgaactcacttctactaactcacttctacaattccctatgtagggtaaactttggaaatgaaactcactgacaaacgttccagtacatttaagctggggatatcgtattctttgtgatgtttgtatttctccgaccccaaatatattaataaaaacttttttctgagccctcttcggtgggggatagag

SEQ ID NO: 114722 - DNA, 300 bp, Homo sapiens
  chr7:23570647-23570947
  hyper
attagaaaaataaggcgtgacagcatttccacattcatttcgaagtgaaaggaaagtcgaagggacattaagggaaaagggctccttgcgtagtttcccctcacagctctcgtcttaagaacgcttaagggtcggtgcggtcgttgactaaccacttcattaggctcgtcccaccttcaacctcaaggctttcgcctttttagacgcaacgccgccggttccaacagagacgcggccgctcactgaaatagagagccaaggagacacaggccccagctagtcccacgccagcttctcccc

SEQ ID NO: 114723 - DNA, 30 bp, Homo sapiens
  chr7:23571378-23571408
  hyper
ctagacggctcccgcggctttgtactcact

SEQ ID NO: 114724 - DNA, 150 bp, Homo sapiens
  chr7:23636895-23637045
  hyper
ggcggctggaagcacgtgccgccgcttcctcattctgggactacatcccccacaatgccgcgcgccgcgggcggctggcccccgagtgcgggaagggccggcagggaggcggagcggaagccgagtgcgagggacgagcggagtaaaatc

SEQ ID NO: 114725 - DNA, 160 bp, Homo sapiens; identical to SEQ ID NO: 43976
  chr7:23719537-23719697
  hyper

SEQ ID NO: 114726 - DNA, 146 bp, Homo sapiens
  chr7:24323182-24323328
  hyper
ccctgaaaccacgggcgggggtggggtggggagcgcagctttgggaccctctagccggagacttccggcagctgcctccgacttgttctaagtacaggaaaaatctgtgcgcccagttgcctcactccaacagcgcgcagttgtgc

SEQ ID NO: 114727 - DNA, 684 bp, Homo sapiens
  chr7:24323343-24324027
  hyper
cgctagtcgtggagatgccccaccacaaagaggattcaggtgcttcctactccggcacccagtgggttggtagtcctgttggcaggagacaagaatcgtctgggctgctcctatctctggcaggactagacggggcgtgaaggaaagaaggaaagaaggaaagcagggatcgggcactgcccgagggcagatacttgggctttggtgttgtccagcgcgctcggagtgcgctgcctcgctcacgcggtcccaggccccgcttcttcaggcagtgcctggggcgggagggttggggtgtgggtggctccctaagtcgacactcgtgcggctgcggttccagccccctccccccgccactcaggggcgggaagtggcgggtgggagtcacccaagcgtgactgcccgaggcccctcctgccgcggcgaggaagctccataaaagccctgtcgcgacccgctctctgcaccccatccgctggctctcacccctcggagacgctcgcccgacagcatagtacttgccgcccagccacgcccgcgcgccagccaccgtgagtgctacgacccgtctgtctaggggtgggagcgaacggggcgcccgcgaacttgctagagacgcagcctcccgctctgtggagccctggggccctgggatgatcgcgctccactccccagcggactatg

SEQ ID NO: 114728 - DNA, 121 bp, Homo sapiens
  chr7:24324063-24324184
  hyper
cggctaaattccacttgttcctctgctcccctctgattgtccacggcccttctcccgggcccttcccgctgggcggttcttctgagttaccttttagcagatatggagggagaacccggga

SEQ ID NO: 114729 - DNA, 440 bp, Homo sapiens
  chr7:24324248-24324688
  hyper
cgcggtaggaaggtttccccggcagcgccatcgagtgaggaatccctggagctctagagccccgcgccctgccacctccctggattcttgggctccaaatctctttggagcaattctggcccagggagcaattctctttccccttccccaccgcagtcgtcaccccgaggtgatctctgctgtcagcgttgatcccctgaagctaggcagaccagaagtaacagagaagaaacttttcttcccagacaagagtttgggcaagaagggagaaaagtgacccagcaggaagaacttccaattcggttttgaatgctaaactggcggggcccccaccttgcactctcgccgcgcgcttcttggtccctgagacttcgaacgaagttgcgcgaagttttcaggtggagcagaggggcaggtcccgaccggacggcgcccggagc

SEQ ID NO: 114730 - DNA, 210 bp, Homo sapiens
  chr7:24324754-24324964
  hyper
cgcgtgtggtagcaggaggaggagcgcggggggcagaggagggaggtgctgcgcgtgggtgctctgaatccccaagcccgtccgttgagccttctgtgcctgcagatgctaggtaacaagcgactggggctgtccggactgaccctcgccctgtccctgctcgtgtgcctgggtgcgctggccgaggcgtacccctccaagccggacaac

SEQ ID NO: 114731 - DNA, 303 bp, Homo sapiens
  chr7:24612553-24612856
  hyper
cagaaaggtcagggcggagcctgttttatgccccgaggagtatcttgcccacccgtaaatgctgacagacagctgcgacttcggcccaggagacccggcggggactgggtccgaccagccctctctcgcgggcgcaggtccgggacccctgaagcgagccggccgggcgcagagcgcagtcagtctgggcgctcagaagctgggagggggctccacctgggcgcccagccgcggcgggaggggcggggcccggctttccggaggcggtggcacctcctcgcgcccgagcgcgcgctccccgac

SEQ ID NO: 114732 - DNA, 892 bp, Homo sapiens
  chr7:24613105-24613997
  hyper
cagatggggctgctcggcggcgcctgtggctgagggagagcagcggcggcggggagcgaccgggagcggcggcagcggcggcgcggaggcggctgaggtgcgagccggtgagttaactggacccccacgccgctcgggtaacggtcgcgccgcgcgccgggccggccgggggcgccctgttgctcggcgcggcgcgccacgcggggaccctggcccgccccgcccccctcggcacctgggcttcggcgggcgcggggaagagggaccggcaggcggcggcggcggcgccgcggtcggggaggctgctggccgcccccagcccggcccgcgcggaaggggcgctcggccgggctcctgcctctctggctgcgggcggctgggcgggccggagctcggcaacgtgtctggcccatgctgcttgccgccgctccccacgcgctccccggcgcggccccgactggggctagggccgcagacgcgcggggccccttcgggcgcggggcttgggtgcctacacctctgcggcgggagtcgcggtggagcctgaatggagagccggcctgggggcggcgttgctgtgactgacacctccggggtctgtcccgagagggggtgattccgccggctcccggttctctcccgagctcggagttggtaggggaggaggctttctccaactaccgccgctacttccgaggtacgagactccagttgtttggccaaagtggctgtgggccgagcacaggctgccgcgggggcgttcgctgctgagatcgtgctcgcggattctcggtacgtttgtctgaaaccaaataggtgctggggcttttttattttggctgggtggagggtcagcaggggagtcgattgaggtatccgaccgtgtggtgac

SEQ ID NO: 114733 - DNA, 30 bp, Homo sapiens
  chr7:24788822-24788852
  hyper
ttaaagaagaatcatcgaccaggcatggtg

SEQ ID NO: 114734 - DNA, 620 bp, Homo sapiens; identical to SEQ ID NO: 43981
  chr7:24796416-24797036
  hyper

SEQ ID NO: 114735 - DNA, 434 bp, Homo sapiens; identical to SEQ ID NO: 43982
  chr7:24797067-24797501
  hyper

SEQ ID NO: 114736 - DNA, 1201 bp, Homo sapiens; identical to SEQ ID NO: 5425
  chr7:25019059-25020260
  hyper

SEQ ID NO: 114737 - DNA, 30 bp, Homo sapiens; identical to SEQ ID NO: 5426
  chr7:25021052-25021082
  hyper

SEQ ID NO: 114738 - DNA, 30 bp, Homo sapiens; identical to SEQ ID NO: 5427
  chr7:25043520-25043550
  hyper

SEQ ID NO: 114739 - DNA, 30 bp, Homo sapiens
  chr7:25164976-25165006
  hyper
ctacgcagtaacgtcgccgcacctcattgg

SEQ ID NO: 114740 - DNA, 97 bp, Homo sapiens
  chr7:25165220-25165317
  hyper
tcgcttggttggtgcgttgccctgctaaagtatcagttcttgggcgtggtgatgtaatgagctttgagcagggcgttttgccggtccaggaaaagac

SEQ ID NO: 114741 - DNA, 572 bp, Homo sapiens; identical to SEQ ID NO: 43986
  chr7:25219528-25220100
  hyper

SEQ ID NO: 114742 - DNA, 532 bp, Homo sapiens; identical to SEQ ID NO: 5429
  chr7:25891898-25892430
  hyper

SEQ ID NO: 114743 - DNA, 11 bp, Homo sapiens
  chr7:25892608-25892619
  hyper
gggatcgccaa

SEQ ID NO: 114744 - DNA, 380 bp, Homo sapiens; identical to SEQ ID NO: 5431
  chr7:25894657-25895037
  hyper

SEQ ID NO: 114745 - DNA, 262 bp, Homo sapiens; identical to SEQ ID NO: 5432
  chr7:25896367-25896629
  hyper

SEQ ID NO: 114746 - DNA, 681 bp, Homo sapiens
  chr7:25896688-25897369
  hyper
ctctccctgctgtcaatcatacatgcgcgccatagcgcgcatgcgcactggtggactccagcccccaccgatcctacgccctgtctctgcgtctgggaccagacgcaccaataagagagcggattcgggggcgggccacaaggaagtagccaatgagagcgcggttggaagccagggctagagaggagtaaatccttctgtcgtccccgttctgccgcccccgcgatgatttatgcgtcctttttattatttgtaacactttgggaagttattaaaaggaagatctactgcttcctccttttgggttaaactggatggcaatgtttgtcactggcccttattagagaagagtgtggcgaggtggagggccgttggacgctgggtttgtttgtgtgggtcttgttttttattacaagacacattatccttttaattacaagctgtagacagggccaacttcgaaggtcttcgtggcggagtgatcttggatcattcagggggctgaaacccgatgccttctgactttcgcgtccgtactcttggcgttgggaggagcctctcaggaaggtgttgcaacctttggttgtaccagaaggaaataagcaaactcccatcacccccacccccattccccgccctaacacggagtaaacttcggcctttttccgcttggatgctcat

SEQ ID NO: 114747 - DNA, 154 bp, Homo sapiens
  chr7:25897849-25898003
  hyper
aatcgcactttcaaacgtaaaacgcaattccaagaagactgggatgtagggagtatgcgatgcctctgttcaataggtcactgtcaggaacttcagtttctggtgttcagatatttgtatttgaaattaagaaaatcaacgcaggaggggttgc

SEQ ID NO: 114748 - DNA, 316 bp, Homo sapiens
  chr7:25900060-25900376
  hyper
gcaacttgatccatgcgtttccactttggtttctgaaccgaaggaggagtgccggcaagggagcgcccgcagtcctgcggtacagggctggcgcagcctctgagtgcgtgtgtgaactctgccaggaagctgtgagagccagcccaggattcagtgaccctgtttcccaacccacaaggacaagtacatggttttctctcttatcaattccagccccgcgcaaccaagtgaaagcaaatgcactggaccgcttcggaattaaaatgaattgctaaaaccacggaccgctctgtccggggcccagacctgtctcaac

SEQ ID NO: 114749 - DNA, 76 bp, Homo sapiens
  chr7:25900433-25900509
  hyper
cgcagcacccggcctccaggcctagagtgaaaaattttttaagatctggttctctccccgccgcctctgtggaggg

SEQ ID NO: 114750 - DNA, 30 bp, Homo sapiens
  chr7:25900723-25900753
  hyper
ggtgagaagttgctgcgggaggtttccaaa

SEQ ID NO: 114751 - DNA, 798 bp, Homo sapiens
  chr7:25901790-25902588
  hyper
aaaacaccagccaatcagaagcgtttccggaagacactctacacctctccgcctcttcataaatatttaaaccgcttctttctagatttgtcatttaaatctactagggaatgtgcctcaagggctcatctttcactgggtcgctcacacagaggtggggcgagagggaggaggcgcattagccctgcgctctcatttgcttaaacggccttcttacgtcatcgtaagcctaagccaatccgtgaagtgcactttgacaagctacccgcccctaatttgtcctttcaccgccagcctaagccaatagtgtggctgcatgtaaatgagaaaccgcgagcatctccccccgcccccggctccgcccaatttcccacctcttcccggagcgcacagacgccagctgagtgggaggggcctagctgcgggcggagcacggaggaggaagggcacgaggaagaggcggagcgggccgaggcgcgcggagctgggtttgctgagtgcttccttcctcggccccacctcccgccgggcaggatgccgtttgatcattggctggtttaataaagagggcgtgtttattttgcataaatagtgggcgggcacccagggctgctttgtaactcgagaacccggtgtcccgcctgtctcccggggggtatgggcgggtctcccgccagcctcgccagactgagccaagggcctgaaggaaataaatggctttctgaaaaaattcgtcttaattcgcccttttgagagaattctgtttctaaatgcatttttttcgttggttcttacaag

SEQ ID NO: 114752 - DNA, 182 bp, Homo sapiens
  chr7:25935086-25935268
  hyper
ggagggtgtagttcgcggcatttgtgattccggctgggtctccggtgcggaaatgaaactcgccccctgctggcccgccccggcgctttcagagggaaggggagccaggacgcccgcggggatggctgcccagctgcgagtcacacacgagcgtcgcccacgcccggcgcccccgcactgcc

SEQ ID NO: 114753 - DNA, 907 bp, Homo sapiens
  chr7:25989914-25990821
  hyper
aaccctcacctccctcggtagttatttaaacttttgccagcagctaactcactctaacttgtggcaactttttaccttcccatctggaaagctgggggcgggggcgctgcacgaggacgaatattcggagctgaaagagttaaacggtggggaacaaatacaggcccgggaaaagcccctaagatgggacgacccaagaaagacccgctttgcggggcctcccctgagacccccttccccagccattcccagtactctattcccggtcttccagccgcccgcgcccagccccgggaactcgggtcgaagtcgtcccatcccctccgttccacccacccactctttgggattctccctgccccattaggcagtgcttcccgcggaccccgttcgcgcacaaccttgcacacagtccccaagactgctcttctccccctcccggcacccccttttccctgcagcataagcgaccactctgtcccccatcctagcagaccccctccccccacataccgcacctgaacagctgttgcgcgcgtgcaacaggtctggaaagtgctttcccatcttcccccaaacccctcgccaccgttccatcccccgccacccctaagagacaaggccggaggggcagtgggctgcgtcccccgggccggggtgcacgggcggctggcggagtgcggggcgcccagaggctcccggggttgggggcggtggtcgcgctgggccgggacaccttcgcgagtggcccctcgtgcgcccgccgcaggctccccagcctgcccctccagcgccggccgccaggcattcccgggccggctcccccctcgcgctccgctccgctcccttccatcttgacttttgccgacgtggaaattttgggtttggagacgacctgcgctcttat

SEQ ID NO: 114754 - DNA, 30 bp, Homo sapiens
  chr7:26192184-26192214
  hyper
ttggcggggctccgcgtagacctagatctt

SEQ ID NO: 114755 - DNA, 223 bp, Homo sapiens; identical to SEQ ID NO: 43998
  chr7:26192423-26192646
  hyper

SEQ ID NO: 114756 - DNA, 192 bp, Homo sapiens; identical to SEQ ID NO: 5437
  chr7:26192666-26192858
  hyper

SEQ ID NO: 114757 - DNA, 30 bp, Homo sapiens
  chr7:26240072-26240102
  hyper
ctactgaattggtccgatttcctgcctctc

SEQ ID NO: 114758 - DNA, 30 bp, Homo sapiens; identical to SEQ ID NO: 44000
  chr7:26240545-26240575
  hyper

SEQ ID NO: 114759 - DNA, 253 bp, Homo sapiens
  chr7:26240888-26241141
  hyper
ccacccctggcccgcgtctgtggaactgacccctggtgtacaggagagttcgctgctgaaagtggtcccaaaggggtactagtttttaagctcccaactccccctcccccagcgtctggaggattccacaccctcgcaccgcaggggcgaggaagtgggcggagtccggttttggcgccagccgctgaggctgccaagcagaaaagccaccgctgaggagactccggtcactgtcctcgccccgcctccccct

SEQ ID NO: 114760 - DNA, 163 bp, Homo sapiens; identical to SEQ ID NO: 44002
  chr7:26331324-26331487
  hyper

SEQ ID NO: 114761 - DNA, 30 bp, Homo sapiens
  chr7:26331687-26331717
  hyper
ctgcccggaggagccgcccgtaagtgacaa

SEQ ID NO: 114762 - DNA, 793 bp, Homo sapiens; identical to SEQ ID NO: 44003
  chr7:26415725-26416518
  hyper

SEQ ID NO: 114763 - DNA, 30 bp, Homo sapiens; identical to SEQ ID NO: 44004
  chr7:26416815-26416845
  hyper

SEQ ID NO: 114764 - DNA, 30 bp, Homo sapiens; identical to SEQ ID NO: 5440
  chr7:26437666-26437696
  hyper

SEQ ID NO: 114765 - DNA, 30 bp, Homo sapiens
  chr7:26437984-26438014
  hyper
agagttcgcggtcacgagtggaacccactg

SEQ ID NO: 114766 - DNA, 30 bp, Homo sapiens; identical to SEQ ID NO: 44006
  chr7:26438289-26438319
  hyper

SEQ ID NO: 114767 - DNA, 30 bp, Homo sapiens; identical to SEQ ID NO: 44007
  chr7:26903418-26903448
  hyper

SEQ ID NO: 114768 - DNA, 30 bp, Homo sapiens; identical to SEQ ID NO: 44008
  chr7:26903648-26903678
  hyper

SEQ ID NO: 114769 - DNA, 30 bp, Homo sapiens; identical to SEQ ID NO: 44009
  chr7:26903957-26903987
  hyper

SEQ ID NO: 114770 - DNA, 56 bp, Homo sapiens
  chr7:26904455-26904511
  hyper
gtcacctgatccagcgtccggagcgccttacagccattttcggtactggtgccatc

SEQ ID NO: 114771 - DNA, 609 bp, Homo sapiens; identical to SEQ ID NO: 5441
  chr7:27135161-27135770
  hyper

SEQ ID NO: 114772 - DNA, 956 bp, Homo sapiens; identical to SEQ ID NO: 44011
  chr7:27135979-27136935
  hyper

SEQ ID NO: 114773 - DNA, 32 bp, Homo sapiens
  chr7:27146541-27146573
  hyper
cgtccggcctgctctgccggctcgcctcggcc

SEQ ID NO: 114774 - DNA, 30 bp, Homo sapiens; identical to SEQ ID NO: 44012
  chr7:27163863-27163893
  hyper

SEQ ID NO: 114775 - DNA, 1056 bp, Homo sapiens; identical to SEQ ID NO: 44013
  chr7:27190213-27191269
  hyper

SEQ ID NO: 114776 - DNA, 870 bp, Homo sapiens
  chr7:27191548-27192418
  hyper
tccttttgggcttcacggggtcgctagggaaggggagagagacgacccaagggatgctgccctgtgccttggcgctgtgccacggagggccgaaggaaggcgggcacttactgccaaggcgagccagggaggggagagaaagggagtggtgtgtgtgtgtgtgtgcgtgcgcgcgtgtgtgcctgtgtgtgtgacgtgtgtgggctgtagtgtgtgatgggggcaagtgtgaatgggtgagtatgggtaagggggagtatgcccctcttaaagcctccctgggtgccctctcccaccgctaccgccgccggctgtcgcctcaccacctttgctcctatctcctccccacatgtctcaccttcagacggtggctcccagaagctcctgcccctctgacagctgtcgcttgggcagcccgagagaagaattgtcctctttcctggtgccagaggacgcaggaaattagccaggttgcgagttgcaaagctgctgccgcggcgccgggaacggagcgcgcccaatctccagcgggagccgccaggcctggcctggccggggcttcccttcgctcgccatctccggacaaagcacagccgagcccggctggaaggcagagctccgaagcaggcaggacggagcggagcaaaagaatgcggctctattctcgcaagggaaattataaaaaagttcatgttcacggttctcatccacatgaccgacagcggccaatggaagggccgaacaactcataaagttgtattgcaaagttgtaaattttcataaacaacaacggatttatgaccctttccccatcactgagaggaggcagctcttacaccggcgccatcttaccaccgaggccgccccgac

SEQ ID NO: 114777 - DNA, 30 bp, Homo sapiens
  chr7:27192623-27192653
  hyper
cctagcgggggtctgcggtcctagcccctc

SEQ ID NO: 114778 - DNA, 145 bp, Homo sapiens; identical to SEQ ID NO: 44015
  chr7:27195456-27195601
  hyper

SEQ ID NO: 114779 - DNA, 26 bp, Homo sapiens
  chr7:27195866-27195892
  hyper
cgcctttggcgaggtcactgcagagc

SEQ ID NO: 114780 - DNA, 364 bp, Homo sapiens; identical to SEQ ID NO: 5447
  chr7:27196152-27196516
  hyper

SEQ ID NO: 114781 - DNA, 345 bp, Homo sapiens
  chr7:27196529-27196874
  hyper
cggccccacgcagcaccccccaccccgcccccccgccgactcctgctagtgagccctggaccaagcttgggatcctccccatccctctcctgtccgcctgcccagaccctggaagggtctctgtcccccgcaacagcctgccccgcggtggccttgtgggcaggactcagctatgagcagatcgactctgcccaagtcttctctcacccaggtccagtgggcgacaggccggacttagactcggatccagacggggaaggcgcagcatctcttgcagctgcagagagattgccaccgcaaactggagccatgtggttcgaataaagtcaacgtctcccagcttcc

SEQ ID NO: 114782 - DNA, 69 bp, Homo sapiens
  chr7:27203934-27204003
  hyper
agggcgccctaaggccgctgatcacgtctgtggcttatttgaataatctgtcatggggacccttgtggc

SEQ ID NO: 114783 - DNA, 679 bp, Homo sapiens; identical to SEQ ID NO: 5450
  chr7:27204090-27204769
  hyper

SEQ ID NO: 114784 - DNA, 524 bp, Homo sapiens; identical to SEQ ID NO: 5451
  chr7:27205265-27205789
  hyper

SEQ ID NO: 114785 - DNA, 28 bp, Homo sapiens
  chr7:27206082-27206110
  hyper
ggtccccggccctcgaccccacgcacac

SEQ ID NO: 114786 - DNA, 10 bp, Homo sapiens
  chr7:27208942-27208952
  hyper
aaggggaaag

SEQ ID NO: 114787 - DNA, 744 bp, Homo sapiens
  chr7:27209044-27209788
  hyper
cgtgatgccccgcccggcccgacccccgcgcgcagaggtacctggagacgatttcaactgaagtaatgaaggcagtgtcgtgctgtcgagagaaaggtggatcccaacaacaggaaactacctaaatcaccgaccagttctggtgctgcccgcgaagggctgcctcgcccgccgccgccgccgcctccgccgctgccgccgccgccaaggagagaaccctgccatcgcgcctggcccggcccagcccagcccctaggcaacctgcgcccgccagtgcaacagagtgccccaggcggccgcaaatgcgtcaaggaaggggaagccacaggccccagtaaggtattcctgggagggagagggaggaaaagagagggaggaaaggcagggagagaggaataaaggcggggagcaggcgagacgagagcagctccgagaagcagtgtgcgcgccgctttcccaaatcttgcagcccagcgagccggcgccaagaggcggtagccgtggaaggctcgaaagcgccagggacggtacagatcccggctccctgtctggccccggcctcccgcctctcgctctccccctctccctcctagctgcccgcccgccggggcgcgcgctcctgcgccccctccccttagcccccgccccccccactctggcaagcaggaaacgcgtggccctaaggagtgccgccaggtgggggaggccgtactgggggagggggaggcccccatgcagtccagc

SEQ ID NO: 114788 - DNA, 33 bp, Homo sapiens; identical to SEQ ID NO: 44025
  chr7:27209886-27209919
  hyper

SEQ ID NO: 114789 - DNA, 588 bp, Homo sapiens; identical to SEQ ID NO: 44026
  chr7:27212395-27212983
  hyper

SEQ ID NO: 114790 - DNA, 1073 bp, Homo sapiens; identical to SEQ ID NO: 5454
  chr7:27213188-27214261
  hyper

SEQ ID NO: 114791 - DNA, 519 bp, Homo sapiens
  chr7:27219308-27219827
  hyper
ccgcgcggcgacgctcgcgaggcctagcgaatgcgcgttgctttaaattaccataccaatcacttcttgagggtgagtcccctttttctgttatgaaggggagcgggacaagtgaaataatgtaccgtgctgctcttagtatcagaagcgaacaaaggccaagaatcatgctggggttcccggctccccggcggctttgacattgatcggaagtgcgccatctcgtggcggctgcgcgcctaggttgggccggagttccagccccgagccgagagacggaaaccagctccgggcagagagagaaggagagaggagaggatgtgcccagcccgctgctattgagatctcatttttacatctaagaaatcgctgcaaaaccccagccgggtttatagcggcgcattccaaatatgcaaattggccggccccggacgggtttacgaccacattgtcacagccatcggaggatgggcttttatagggctcagaaatcaaacccgcgcccgcccgccgcccgcc

SEQ ID NO: 114792 - DNA, 197 bp, Homo sapiens
  chr7:27222995-27223192
  hyper
gactaaacaaacagccgcctgcggacatttcaccttccagcacctgggctgccccttcccaaggcagtaaaggcggctccagtcccagtctttcccggctgcggccaagactgggcagtccttaacatctggggcggctgccgggtctttgtcagcctgagtcctggccaccagcttctgcctccccggccagcctt

SEQ ID NO: 114793 - DNA, 1836 bp, Homo sapiens; identical to SEQ ID NO: 44030
  chr7:27223221-27225057
  hyper

SEQ ID NO: 114794 - DNA, 234 bp, Homo sapiens
  chr7:27225249-27225483
  hyper
gggtgggtgagggatgccctggactggggatagccaggtgggagtccgtcgctgtgtggcctgtggtctcggagtctgttctcctggagtctcgcatttgcacccccttcttcgcagtccccctcccatagacttgctctgggaagcgcctctgcctccgaccctagccggaaccccttcggggccagagtttgaagccgtggatgtgcctgcctggtggcttgtccgatttgc

SEQ ID NO: 114795 - DNA, 2 bp, Homo sapiens
  chr7:27225581-27225583
  hyper
cg

SEQ ID NO: 114796 - DNA, 281 bp, Homo sapiens
  chr7:27227347-27227628
  hyper
ttgcggggctcgccccgcccctgggtgaaggcaaacaaattcttgcacttgtattagggcttttaagaccataattgaacccgggggcgtctaggaaaaccgaaaacagttctagacagacctgcggttttatagcagttttggcagtcaacttcagcttgtgcctgagcagacggggttgtggtggcccgccagcgggggatgccaggccacctcccccagcggcacgcagcccctctcttaattagatcggttttcccctggtgtccgggagagcggtc

SEQ ID NO: 114797 - DNA, 971 bp, Homo sapiens
  chr7:27227757-27228728
  hyper
cgaattccggagaaaaggctggggctgagaaaggcgctccgggagcggctggcagggcaattcggcaggctgcaccgaagccgagtgcccggagggacttgccgcccggaagggggtgtgtgggggcgctgccgtgaagatggatgagggaaaaggtttttgatatcagcagaagggaaaacgcctggagtggccgaacacttttagttgcccagcaggaataggagacgggtactcagctccccaaggctgcgcaatatcccagctttgcccgctcctgccctcgtgttcggaatatgctggcggtgtgaatgtgaaggtttctccaggcaggcggctggggcgaggggtgggcgcagctctgaggatcagaccaaatctaggggaaaaaggggaggcagaccttcgggtccttggttttgactttgctctgagcctatgattgactcttccgctttgcaggaggtccaacagccgagcttagcccaccgggctctgggaaagacccgactgaggctaaagccgccccggaaggccaagtccgagttccatttcttgaagaggccggcgcgcgtaaggctgtgacattggccctggcgactggcttcccaggagctgttctttctcaggagctccacagcgcgggccatctccagaaaactgtcttcagagtgtatttccttttatcgtcaacccagagccccaccgcggctaatgcaagaggccaaaaaatgtttggaggaagaaaaacaaaggcaggaagtggcggcggcctgacggtgcgtgtgtgtctgcagagaagggagggagccggctcagtctcttcttgtttttccaaacttcaaggtccaggcagccctctgcagggccgggccccattgctccccgcgcggcattggaggtggccgcccggagaggagaaggccaacgcctgcgccaggcttgtcaggcggaaacggctaacaaggaga

SEQ ID NO: 114798 - DNA, 960 bp, Homo sapiens
  chr7:27232195-27233155
  hyper
ggtaccactctgggtgccaaccgggacctgccggtgccacggtcccgtgcgccgggtcccggcctcgggctgcgggcggcttcggggcctacagcccagcggcgcggagcgtggcagaggcgcggggcgcagcgcagcccgaggctgcctcccgcccgggcggacggcgcggccgctggggtgcacagcgtagccccgcgtgcccggctcgctctccgttccctcggatagctcccaccgctcggctccgggctcagaaagcggaagtatttggtagagaaaaacacggtttcttttcagctcgtctcaaaatcccttttagagaaaatgctcctgtcaagttttatttcccgttgcaaaccaccttccacgctgccaagaattaagaccgggagagattaaatacccgattattctcctggggagggcggggcggggccgggaagtgggcacccacaccaaacattccttgaagtaggcttgtcctgatccagccgcgcccggggagccccacgaaggcccgcgcggcctgcggtgacgtcagcctgcagttgcggggccactcacccgcacagacacggcccttgctgttccgcgccgggacctccgccagccgtcctgccgcagccccgactggcccgcgtgccgtcagagggaggcccgctttacaccggcctgagcctccattttgagtagggggttcttgtagaagcgtggagggtttggggccgcgcctctgtccccgaggggcgcgacatcaggtagctctccgagttcacaccccagtacctgggggaggacctatgtcgccgcataaccgcccgcagaggtttggaaatctctgagacccgttgtaattatttctgcccagtggatccggctcttcagcgtcacgagagccgggcagaaatgaaatcaactgtggcaaggccttggctgctttcacggaggagtttttct

SEQ ID NO: 114799 - DNA, 203 bp, Homo sapiens
  chr7:27237357-27237560
  hyper
atttacctgagcagacgcttaacatgcaaagggaatggcgacctaagaaggacaagcagatgtttacaatggcctcttgcgtttgtaaccaacttccagattattaccatctaacgcagtgtcctaaaatgtaacgatcacttaaatacttacaagatttcagtaactgcgtaacttatctgaaattgcgtattttgggggtt

SEQ ID NO: 114800 - DNA, 607 bp, Homo sapiens
  chr7:27237762-27238369
  hyper
caacgagttctgaagcgtttcttcaagttgccttcttgctctatttttaatccattaactagtggttttcagtttgttgatgacttttttctctttaaccctcctgttctggaaccagattgtgacctgccgctcagagagattcgtcgtggctgatatccgcctccgtttgtccttagtaatgaatttattcgtggcgtattcccgttcaagttcttttaattgcaccttggtataaggcacgcgcttctttctccccctcctataggagctggcatccgagggatgggagaccacgtctagaagacaagggagaaggcaagttacacagggatcggaccccagccagggcataggcgacagctcgatctgagccacccgccttgcagcgcccggctgctctttgccacccgctgtacaatcctgtcttctgctaaagcctagagggtcagtggggaaggtagttagttctgaactgaaatgaaatcacccagggctccagtgacttccccaacccggccatcctgcaggagcagcgcgtaggcagcctcgagtgatagcctggtccaacggcccacaccttagcgccaggctcaaggtacaacac

SEQ ID NO: 114801 - DNA, 589 bp, Homo sapiens; identical to SEQ ID NO: 5462
  chr7:27238583-27239172
  hyper

SEQ ID NO: 114802 - DNA, 1163 bp, Homo sapiens; identical to SEQ ID NO: 5463
  chr7:27239225-27240388
  hyper

SEQ ID NO: 114803 - DNA, 222 bp, Homo sapiens
  chr7:27240996-27241218
  hyper
gaaccaagcagcgacccgtcttgtagctgccatgttttgtcgaggggttctgggggtcctgctgctttagagccacatacttccacttcctgattcactactgtgagctggtcagatgcctagaagaggaacaagcgttcaaagtgaaagtgggcacattaccggaatagtgctggggagagtgctggattcttttccaccccaggcggactggtgagaagc

SEQ ID NO: 114804 - DNA, 71 bp, Homo sapiens
  chr7:27244539-27244610
  hyper
actcctcagagctggcgcaaactccgtcctccaaaactcggctctgggaggcctaagtgactccgaagccg

SEQ ID NO: 114805 - DNA, 598 bp, Homo sapiens
  chr7:27244797-27245395
  hyper
cgcgggggacaccggcttgctggactgcaggggcccgtgccacccaggaagtgacctgcgggtcactcagccggggcgctgggcgagcgcgggacggcccggagaattccgtgcggctgcgacgggaaaaggacgaggggtctctgtacccgacgctgccactggcccaaaggaattttacccgcgagcgcccaccccaccctagcttgatgcttacgcccgcaacaaaacaggaaaccaggactgggcagtgcattctttaagtcaacaaatacactgaagacttcgagcgtttgaaggaaggagggggtttgcacgtaagcctggccccgccgggctcggctttctcgctgagaaagcggcgcaggcagccaggcggcctgggcccgcgggggtccatctcgccctagactcctaagaactcccacggccctgttcccagctgcgaattcttaatgcacaacgcgacggagggaaggaaattcaccagcgcagcgacgaggaaggggaactcaggaccccttcaagtacacactgaggtgtgatcagagttttatgggcactttatatgctgtaatcataacgatgtgtgtgcctt

SEQ ID NO: 114806 - DNA, 44 bp, Homo sapiens
  chr7:27245733-27245777
  hyper
ttcaaggaacagccgcggttcctttgtcccgcggctccagcccc

SEQ ID NO: 114807 - DNA, 336 bp, Homo sapiens; identical to SEQ ID NO: 5467
  chr7:27250160-27250496
  hyper

SEQ ID NO: 114808 - DNA, 346 bp, Homo sapiens
  chr7:27252472-27252818
  hyper
tgaggacatagaaagcggttgttatttattccaggcaccatcacaaaaggcttccaaaaatatcgagccgagatattttattgtccagcctgtctgcagcctgtaattatgcgttcaagatgtttaatgtgtgcaaatgcattagccgctttcgctggtgaaaaccctagctgggggcggggtagaggcaagtctggagataattatgtcgtacagtcgcaaacattattccgttcttactgtaaacggccccggccacctttacgagaaaccaggaaacttctgagagttactagcagcgtttacgcgggcaaactgagttctttttctttctctcccggattgt

SEQ ID NO: 114809 - DNA, 270 bp, Homo sapiens
  chr7:27252895-27253165
  hyper
cggagaggcctacgcaggtccccggtgcccgcggccctcggaggccgggccctgcgtcttggccaggcactgggtggcagctgaggctggtggcccggagccctcgcggccgcgggcaggccccttcttgggcagggtcgggcactcccgctgtccagggctcttcggcaccctccttccaatcaggtcgctctcccctgctccccagactcaactcctccgaagctgctccaggttgaaatgtgaccgctaggccgactccctgggccc

SEQ ID NO: 114810 - DNA, 896 bp, Homo sapiens
  chr7:27264695-27265591
  hyper
ttgccttcaaaaaggttttgccgttttgttttttgtttgttttaacgttccaccaatggttttcgggtgacggtgtccttgcacgatgtagtccgtcttcaaagttcttttacacaacgtgaattatattgaaattgggctacttcatagagcttcgcctcagtggaggacagcctggaataggtgagggggtctcgaaaggaataccaggccggggagtactggcaagtgtcggaggggaagggcaggtcggggagaggatccccaggggctgggtgtctgcagggctccccgtaactcagaggggccggcggccgccgcccgaagcctgagcttttctcagcagatggagaattcatttttaacccccaggaaggaatgggctgagacatcagaccaccgctcctagagggtcaaatttcctccccataaatccaaaacattctctttagggagttccctccgtggcgcgcaaacccgggaagccgcgcgccctggggtttcttggcgggccgtgcgcgcagcctgaaccgccaaagtcgcgtcatcccgcatttgcctgcacccaggagtttgcaacccgcagagcccgcagaggccaccgccaagagtgcgcgccttggcgccccgtcggcctctacttcctcggatctgagccagcgccgctaatccgcaggctgcagcagaacctgtcgccagcttggagagtccctcgcgctgccctggcttcccggtccgcgggcgactcgcgctgctcccgggtttgtcgggaccccaggagggcgctcaagcctgtcggcccctacttgtgtgtagagaataggcccgggtacaccacctcagaaatgcagaggaagccggggacactgaagcccgggtggttgcagtgaggctga

SEQ ID NO: 114811 - DNA, 484 bp, Homo sapiens; identical to SEQ ID NO: 44046
  chr7:27274929-27275413
  hyper

SEQ ID NO: 114812 - DNA, 180 bp, Homo sapiens; identical to SEQ ID NO: 44047
  chr7:27275466-27275646
  hyper

SEQ ID NO: 114813 - DNA, 35 bp, Homo sapiens; identical to SEQ ID NO: 5471
  chr7:27278958-27278993
  hyper

SEQ ID NO: 114814 - DNA, 131 bp, Homo sapiens; identical to SEQ ID NO: 5472
  chr7:27279237-27279368
  hyper

SEQ ID NO: 114815 - DNA, 704 bp, Homo sapiens
  chr7:27279453-27280157
  hyper
cgccgggcctggagcggcctccacctcagctgctatcaccccctctccgctgtcatgggattgcccaggcttaatggggttgtgcagggcttcacttgctctcggaatttaccttccttctcgagccgtgccgcgaataaccttcacgacacagtgataacgatgttattaaatactccccccacattcaccgcccaaaaaaccaaaacagtgttcttatccagtcctctctttttttgtcttctttcctttaaaaacccaaccgctcttaatgtgaggttgatgaaaggatgcttttggaagaagtgacatttggttaaaacgttttccccctaatgcgccggtggaaaggggcgggggtgggtgtggttccctaggctcctaagactggccagtcagctttgaaagagcggggcagaagtcgggagagggctggggaaggctttgggctgaggggatgtgtccctgaagcttcagatctggagcccaagggaggcaacctccctctgaaaagccggtcctcagctccatccagccctctccgcgggatgtaagccctgctccgtagggcccgacccaggaagcagactaagtggcactccttgatctctcactcctactcggctttcatctcacccagaagaaaagcggatcaaacagaggattcccattgaatgcagagctgggggcggggtggggagcca

SEQ ID NO: 114816 - DNA, 1437 bp, Homo sapiens
  chr7:27281857-27283294
  hyper
ggaatacatttttccgtagcttgtaaaaagacttttcagccagtttgaggttagctgccaggggcagacagttgtaataatgccgacagaattgaggcttgtaagccgggcttcacacttctaaaatgcagttatggattctttcatcggtgttagatcaaggcaccaagttaagaaaacaaaagtcaaaacaacaataaaagaaaaaatcaaaagcttatttaattaccgagtcccgctgcccctgcggaactcgccgcgcgcgttaagctctcttttctttctgcggaattccatttgcatcccctctgcctgggtgtctccctctctcagtgtgtgtgtctctctgtctgttttcacactctcctccccaatcgagcgaggcccacacctggcgcatcactgccgagccattagctgcgggtttcctttcatcttcgctgtggcagacgtttctatttatccacttgcgctcgccgagtggcgtcaccagcggtactgtaatgacgattgcagcaggaggatgacagcttagaaagaagagggcaatggggcttcctcccagaggcggtgcggcacagaggagcgctcgcttcacaaggtgaccctagctcccaccgccaccgccgcggtcgcggtccagaccgcgctccagcagctccgcgccctcccaggcacccggcctttctttctccctcttgcaaccaagatccgtccggccgctggagacccagggagccggggttaggaactcacttggggctttcccctcccccaccggagagccccgggatggagagccgaaaggacatggttgtgtttctggatgggggtcagcttggcactctggttggcaagagagtctcaaatttgtccgaagccgtgggcagcccgctgccggagccgcccgagaaaatggtgccccgtggttgcctgagccctcgggccgtccctccggccacccgggagcgcggcgggggaggcccggaggaggagccggtagatggactcgcaggcagcgcggcggggccgggcgccgagccccaggtagctggggcggccatgctcggcccaggacccccggccccctcagtcgacagcctctccggacaggggcaacccagtagctcggacaccgagtcggatttctatgaagaaatcgaggtgagctgcaccccggactgcgccaccgggaacgccgagtaccagcacagcaaaggtagccaccgtgcccctccgctccccgggcctcccactgcgcccacccttcacttcggcgcaggccaggaggaagacactcccttcccctagggcaggatggctggggggacccacctgagcaactctctctgctatctgcgttctggcgggggtctcctactgtgttctggcattggcgggactgagggtgacagcagtgccttgagtgcggggtgc

SEQ ID NO: 114817 - DNA, 75 bp, Homo sapiens; identical to SEQ ID NO: 44052
  chr7:27284594-27284669
  hyper

SEQ ID NO: 114818 - DNA, 132 bp, Homo sapiens; identical to SEQ ID NO: 5475
  chr7:27285386-27285518
  hyper

SEQ ID NO: 114819 - DNA, 204 bp, Homo sapiens; identical to SEQ ID NO: 5476
  chr7:27285620-27285824
  hyper

SEQ ID NO: 114820 - DNA, 30 bp, Homo sapiens
  chr7:27288642-27288672
  hyper
gtttggcgctaggcacgacttctcactccc

SEQ ID NO: 114821 - DNA, 32 bp, Homo sapiens; identical to SEQ ID NO: 44055
  chr7:27288912-27288944
  hyper

SEQ ID NO: 114822 - DNA, 30 bp, Homo sapiens; identical to SEQ ID NO: 5477
  chr7:27289537-27289567
  hyper

SEQ ID NO: 114823 - DNA, 79 bp, Homo sapiens; identical to SEQ ID NO: 44057
  chr7:27289788-27289867
  hyper

SEQ ID NO: 114824 - DNA, 178 bp, Homo sapiens; identical to SEQ ID NO: 5479
  chr7:27290940-27291118
  hyper

SEQ ID NO: 114825 - DNA, 792 bp, Homo sapiens
  chr7:27291314-27292106
  hyper
gggctgggcaagccgaggaacagcgagcccccggacgctgactgcaggacgtcccagtttgtgcccgggtctccgtccctccccgtacggggctcgtacccccgggcctgggtctgacccacagggcgctgaggcctttgtagctgaagtcggaaggcctcgttgcgagcgcggcacaggttgctggtagcttctggactctggaggcttggccttccttctaagccgatggcggggaaagaacctcgtttccacagcttccccgacccccgccgcttgccatttggggacgggaagcgcgcccgggtcgcttcacgtccctctgggccggagccctttccatggctggctcctctgggggcccttgggcctgtgagcagcgtctacttccctcagagaagaatcctttccttcccccatcgaagtgtccctttctgtatcctgaaataacccctcctgggtgaggccagttcccctctgtcgccctcctcccgcaggcgtccgggagcctcgtgaggaccccgtgcagttgagtccaggcgacaggtgcctccccaggtgtctacttgccctccctcaacctgtttagggaaagaccagaacgatgtgcgcggggaggtggttttgtttctcccgaaactggcgctcttgggtaaaaccgcgtgccgcgtctacgcgggctctgttagtgtgcgtgtcccagaagagtgggccttctaggcggcactctttggagaagtaagtgaggtgaactcagaacagagaagcgggaacgatcgtttgatgtgccga

SEQ ID NO: 114826 - DNA, 194 bp, Homo sapiens
  chr7:27701809-27702003
  hyper
ggcttgtacagccaccgcttgtgtaataaggccatcccctcggactcaggtggttaaacatcaggccctgctgcccaagtgtgtccccaacccaaggtgcaccctgggggcgctgaaagaccaggggtcgctggggtgagtgcgggttgctcctggagttgggcgctccaaacgtcctcggagtcctaactcca

SEQ ID NO: 114827 - DNA, 115 bp, Homo sapiens; identical to SEQ ID NO: 44060
  chr7:27702685-27702800
  hyper

SEQ ID NO: 114828 - DNA, 114 bp, Homo sapiens
  chr7:27779468-27779582
  hyper
tgccctttccacatcgctggtgagttacttaaacctcctgtgtgtttccccctttcgtatgtcaaaataataacataaaatcagaatgtaaatccagacgcattgttttgctgc

SEQ ID NO: 114829 - DNA, 30 bp, Homo sapiens; identical to SEQ ID NO: 44062
  chr7:28060166-28060196
  hyper

SEQ ID NO: 114830 - DNA, 30 bp, Homo sapiens; identical to SEQ ID NO: 44063
  chr7:28220032-28220062
  hyper

SEQ ID NO: 114831 - DNA, 30 bp, Homo sapiens
  chr7:28312230-28312260
  hyper
ggtttgagaagagcgcggctgcctggttcc

SEQ ID NO: 114832 - DNA, 577 bp, Homo sapiens
  chr7:28448713-28449290
  hyper
agccgtgtcacacggcgctgggctctgcaagctgttgcttgcgcagtcgcccccgccgctgccgctcccgggcgggtgcaccagggtccgcgcgggcggggcggggtcggggcgggaccggggcggggcctgccccctcgacgcgccggccccgcccctcgctccgtccctccccagcggaccgcaatgatttagaagttcaggaatcccacgtgacgtcaccgggggggtgatgtaatgcactctaaatagaatgtattgtaatctttgctcagtccaacgtggtcccttcacccgggctccgctcttgccttctccacacttgtttggtaagttcctaaaaatacggctcggccacttctggggcttttgcatttagccacttttgttgcacttgccgcaggagccatctcgggagtgtacttgtttgcaggggttggttctcggcagcagccgcgaggttacttggtccagtgggcaggtcacagggcaaggagtagggaagatgcgatgcatttttttctggagggtgatctgtgtttgtaaacattttggcggaccagagggaagtccggcc

SEQ ID NO: 114833 - DNA, 123 bp, Homo sapiens; identical to SEQ ID NO: 5482
  chr7:28449658-28449781
  hyper

SEQ ID NO: 114834 - DNA, 854 bp, Homo sapiens
  chr7:28449857-28450711
  hyper
cgtccgctccagtccactcctccggccgcctcctgcctccgctgctttcttgctggcatcgttacctcttcccggccgctgccccaaatgacagctccggctcgagctttggcggcgcccaggcaattcccaagacctggcggcggagtctccccctgcggcagattctcggcagaatcacttgaacttttcacgaagttcttagaggggcaagatgcgaaggaaggaaccaaggagatgttttctctcagcagctgcatcccgcttcttctttgccatagatttatttttaaggggcgtctggtagataaagccctagaccttgtccacactctcacccccatccccaactttccctggaccggtgccgcccccacttgatgcttgctcaaggccggggactggagcgggctacttgtatatttcgttgtcagtctgcagaatgtgtttgatttttatttttccctccttctctgacatgtgtcaaggaataaagactggatacaggtccattacgtcattctgcaggccagtaagtgtttgattaacggcttgagctcctcaagggttcaggagcttagaatgctgacaaagcaactctgctttgcatccccctaccctccccacaacacactcgtgcaatcgccggctccctgggcatctttattgccctctcttcccagcccctccctctccaccactcccccgtctacaccgttatcactctagccccgcccccgcctttttacagctttccctggggcgagcacggtccctggagtgtgggtaaaagcttctggggtctgaggggaccactgtacctgatcagcgcgcaatccgcccttttgtattat

SEQ ID NO: 114835 - DNA, 60 bp, Homo sapiens; identical to SEQ ID NO: 44068
  chr7:28725631-28725691
  hyper

SEQ ID NO: 114836 - DNA, 30 bp, Homo sapiens
  chr7:28893641-28893671
  hyper
gccttccgaaagtccgagccccaagaaaag

SEQ ID NO: 114837 - DNA, 1764 bp, Homo sapiens
  chr7:28995378-28997142
  hyper
atcccgagaagtcggcggacacgccggtgcccatggagcgcaggggccgtcgggtggagtacatgtgccgaacgtggaccggggccccgcccttccgcctagcccgcagtttcctacgcagccagcgagacgcccaggccgccaaggccaggagcaccagcagcgcgttgaccgtcagcagggccaaggtcagcagctggtagtcgacgccgccccggctcccggcctccggtagggtgaccagccccgcgcagtggtcccggggagccacagggcagacacggcccccaagcacgccctccacgcacaccaggtagggggtgtccccgcgcagctcgcgcagcgtggccgagtcgctgctctcaggcaggtagacgaagcggtggaacttgggctgctggccaaagcggtcaaagagcaggcggaagcgcgcgccgcccagcggccggggactgcggtgctcgcgcacggcccagcgcaccgaggcgctgtctgcgcccaccgcctccaccgtcaggttgcacagaatgaacttgttgaagtcgcatgggtcggacaccagcggcggcagcccggccccaccgtcggactgggcggcacgctcctggtgctccgtgcccagacgatgcttcgtcgcgcgctgccaggggtcgccggcgggcgatggcgcagagccaggagaggccgttggggtgggctccgcgagggcgggatctgcccgagtcggacggccccgctggggcttcttgtgcaggtctagggactgtggagccgggcccgcggcggcagcgacggaggggctgggctgctggaggcccgggccccgccgactcagccttagggcgctgcggttgcctaccagctccctggcggccccatcccaggccaccccagctagaaatcgcccctgctgctggagctgcggctgcggcggcagctcctccgcgagacctgcaggtggcgtcatctcctcccctgcggccgtgggtaggggctgccgcctgcggtcagcggtcagggaagctgagggcgagggatccgcgcaggatccattttgcagctgctggtcatccaggtaatccaggtatttgcctcgcagggccggggggtggcgacactgcacgaagacagtgaggagccggccctgcgagtgccagtcgcccatccagcgcttcaggcctcgcagccggcagtcgcaggtccagccgttgccgtctagatccagccgataaagggctgggctggcggcgaagatgtccccggatagggcgctgagcgcgttgttgcgcaggctgagctcgcgcagccggcccaggtggccgaaggtggccgggtgcagggcggacagctcattgccgctcaggtccagcgcctccaggctgtgcagaggctccagcagcgcagttggcagctggctcagccgattaccctccaggcgcagctcgcgcagggcctccaagccccaaaaggcctcaggcgcgaggtgcgtgagctggttgcccctgagcgagagcaggccgagacgtggcaggtgctggaagatgcgcggcccgaggtgctgcaggttgttggccgagaggatgagggaggagagggagcgcagcggtgcgaaggtggccgcgtggcgcagggagggctgtagctcgttggcagagaggttgaggaagcgcagcttgcctagctgggcgaaggcgttcttgcccagaaagcggatccggttggactccagatgtaggtagagcaggttgcccaagggagcgaaga

SEQ ID NO: 114838 - DNA, 479 bp, Homo sapiens; identical to SEQ ID NO: 5486
  chr7:28997166-28997645
  hyper

SEQ ID NO: 114839 - DNA, 587 bp, Homo sapiens; identical to SEQ ID NO: 5487
  chr7:28997676-28998263
  hyper

SEQ ID NO: 114840 - DNA, 609 bp, Homo sapiens; identical to SEQ ID NO: 5488
  chr7:29185639-29186248
  hyper

SEQ ID NO: 114841 - DNA, 30 bp, Homo sapiens
  chr7:29233749-29233779
  hyper
cactgtctcgctgctcgagagcccggcggg

SEQ ID NO: 114842 - DNA, 1058 bp, Homo sapiens
  chr7:29234008-29235066
  hyper
cgagcgaccgcgtctcctcttcttcctttgtgtgtgcgcgagcggagttggggcggagggagaagggggaggtcgctctgtctgtccgtctcccgccgcctctgcccggtctactcgaagtgcggcgggagaggcgggagcccaggagagggtgcgggagctggcggggcggctcggagctgccaggacgccctggtcccagccgcgcacaggggagcgtggacggcagaggggctcggcgggagccgagatccgcccgtcccggctgcccctcggcctccctctgctcccacctaccccctgacacccatagaaaagcgtgcaaaggcgcggagcgggacggaaaccacaaataaatagcggcggcggcagcgcgtcatctggtggagcaggaagtgcaggcagagtccggaggctggtgctttctgcgcgtccccaggactttgccatgggctgggggccgcggaggctgcgagcggccgggcgagggcagcggcggcggcgtccgcaccggggctgagcgagcagcgacgcgaggggcgcgcggagatggcagcgtccagcaactccagcctgtccggctcgtcggtgtcctccggtgagtttcagcccgtcgggcgctgctgccgcgccgggtctcgccccactgccctcgccccgcagcctgggatggacagagcctacctgtggccatcccgcccgctctctcggaatgggggcaggcgtccggggtgatacttgtttggttcgccagcacctcggtgcccagagcacctccgcgcctgacatctgacagcgcagaggtgggagagcggtggtgcccttagtgtgcggacgcgggtgttccggggcttggagtgcagcgagcgaaaagcgaaaggagcgggcaggctcgcactttctggcgcagctggagcgggggctggcggggcggagaaggttggggtgaagcagagcgccccgacctgtttgccgtgccgcgcccgctaccctggacacccaaatccggagcagaggggagcaaaccctcgctcctcgcagacttgattttctttgtt

SEQ ID NO: 114843 - DNA, 2138 bp, Homo sapiens
  chr7:29602675-29604813
  hyper
aaaaaaaaaaaagtactcttatgtgaccaggagtgcaatccccggttcacttcctgcagtggctcagggctggatttacactgccctcgttgggtggctgtccatggacttccaggcctgaaagaaggaaattcacatcctcactgagtcgtgttaagagtctcagactggcaggttgtggtggttaagaccgtagaagctagagtcaggccccctgggttccaaccctgctctgccacgtaccagacaggcaaacctgagcaaccattttcccgtgctagggtttcctcgcctgtcgagtgagaataataataataacaatacctacctcctagggttgctgtgagaaataaatgacaatccacagaaagcgcctgcaacggcgcctggctggcaaacagcggacttgttaattacagcctttcaactaagggcgcctgaaactcgcaaacattttgctcgggtgtggattcgctcccgttagttacaaacttgggatcccgggacccggaaagcaagggggaaaaataaatcgcgatggggccaagggacagctgctgcggcaacttttacccagcggagcccacctacagcctcagcctccgggtctcaggtctccgccgtttcttctcaaggagtcggtcgggggagcggcactgcacagcttttctccaatcagacacctcaaggctggcgcctgatccaatctcctcccctggagggtgggaacgcgaagttcctacctgcacctgtggcagcggtgaccgcctcctgggttattttcttttctcccccagctgccccagggttctggtttcccgaatcacttggcaaataaccagcaggtgggcagatgtcttttttgcgttcctacggacgcgtaggcaagttcgatgcgccggagtgaacagccagggtcccatctctcagccggctcccgggcggtgctagcagggaagagggacgcgccggcgaatgaaacactactagcccggaaagccgccctggaccttccacccgggcagcgagtctggcggcccctcgccgccgccccctccgaccagaacagactgcgctgcgagccccgggcttccgccgcagcgcgcagcaattggaggtgccagaggagaccagcagcagcacttgatttagctgggctgcgggaattccgacctgtacactttccagaagcctgatctctccaagtccgcgcccagggactcgagccccggcttccaggttgacccgagcgcgcccccttcgtgctctcggccgcgttcaccgcgcgaggcctccgggtcctgttaagcccgagcaggtgagcgactgggggtggttcggcgtccgccgagacagagcctggccccgggggtcaccctggggtgctgcctggtacctcccaggtacccgcctcccggagccctaagagaggctgaaaaccacggacgctccaggactccgttttctgtacttttgagtaatttgccatcttttccttgcgcaattcgtacaaagcccttccgtgctcacaaagttgatgattgtgaagaagaaaatgtaggttagaggagaggaagcagcatcaggacaccttaccaccactgttagtaaatgacttgggggtacgggttgcttttccgatctgcaaagtaggagggaatgggatgtttgcagacgcagttgctaattgtgcctgagggcgtgggtgccttttgtaccgaaagaacttttggccgttttttcttgtattgttttcaagtcgctgcccgagtgtgtcctcagggcatcctggggaggagccggtgttgcggtttcggggcgcagccgaggccgccccgccgcctcccgtaggcgatcagacttcctctccctggcggttccgggaggagaacctcctacaacaaacaccgccgaagtttccctctccagcgcgatcgccaatcccaggagcgcccggcgcgtgggctgggaaggagccgagcggaaacctggaagtgagccgcggcgcaggcgaatcctgccgttgctggtggcagcgcccaagagaccccgcacagaaagtgggctgggagtctcgcttgctgtacccgcacctaagtgctcagaagcggcctttcgctctgcagagggggggtctt

SEQ ID NO: 114844 - DNA, 370 bp, Homo sapiens; identical to SEQ ID NO: 5493
  chr7:29724331-29724701
  hyper

SEQ ID NO: 114845 - DNA, 55 bp, Homo sapiens; identical to SEQ ID NO: 5494
  chr7:29725076-29725131
  hyper

SEQ ID NO: 114846 - DNA, 829 bp, Homo sapiens
  chr7:29845967-29846796
  hyper
cccgggaggcgcgcccgccgacttgggacccgcctccagggtcccagagcgaccccgcccgccggggccgtgtccctgccgcggggcggcggcggctcccaggcaggagcctgcgagcaggtgggggcggcggccccgcctccgcgtcccggcagcaccagagccggtggccggggagcgagccgggcgcaccgagcgcagctcggcggtagcggcgccgcttggagcacgggcgctgcgggacggagcccggagccggaggcggcggcggcggagacgtcggccggagctcgagtccagtccagcccccggctccgccacctgcaggtagcggcttcccgcgcgggtgcgggtcggtgcccgagggtggaaggaacgggcggtgtggcggccgccgccctggtcggtcccggagcagagtggcccggcccgggacagagatcctgagggcgtgggagggccggggaacccccgccgggctgcagccccgggcccaggaggttgtcgacgtgccgcgcggcgctcacgccccccacccgcaccctgccacgccgccccggccgggccgggccgggccgggcggaaacaaaccgcggggtggggagcgaggtcaccacggggttgcttggtgacttctccggactggactccccggtgagcagcccctggcaccgaggccgcctcggcctggtccttcgcgacgctctctcttctccgcttcgcccccggaacaaaaggctggggtctcgctggggagggggctgtcgcgggaagggctggggcggagtaaaagagagctaggaaattgcagagccggaggtggcttggg

SEQ ID NO: 114847 - DNA, 156 bp, Homo sapiens
  chr7:29847069-29847225
  hyper
gggagggcgggcacccggccgccctggacctggaggagcgccgcccgggccccgtgggcaggcaggcaccggctctcaggaacagcgcctttggagggtggcgtgccagccgcgtgggtgtgcccgtggcgggcgccggggcggcgtggggaccgt

SEQ ID NO: 114848 - DNA, 1247 bp, Homo sapiens; identical to SEQ ID NO: 44079
  chr7:30028510-30029757
  hyper

SEQ ID NO: 114849 - DNA, 218 bp, Homo sapiens
  chr7:30065743-30065961
  hyper
ttcaaaggcctcgctcgctatataaaactggctttaaacaatttcctttcccaaagaaggaaataagatatttcggttttgtaaaagaggcaaaaccaggtacaggccacctttcctgctggagagctggcataagtgagtggattcttaattactattttacctgcggggcataattacttacgtggagtgaaataaggagccgtccttttctaagt

SEQ ID NO: 114850 - DNA, 305 bp, Homo sapiens
  chr7:30066333-30066638
  hyper
actggctcttataacgcggccgcctgggaatagcagcctcccattggctattggtgctgtccttcaggcagctctcaagccaatgacgctgcaacgatggaatttacagcccggtagagccgggcagctgccaagcggcggatcatcccttgtggtcctagagcccggtggatttcagcattcaaccagcgtggattttgggagaggggcggggcgcagagccaaccggaaactcctccggctgatttatctctgtgaagaaccctgctgagagacgtaggaagagtcccggggccctatgaaat

SEQ ID NO: 114851 - DNA, 247 bp, Homo sapiens; identical to SEQ ID NO: 5498
  chr7:30067777-30068024
  hyper

SEQ ID NO: 114852 - DNA, 30 bp, Homo sapiens
  chr7:30173002-30173032
  hyper
gcatcactgggttctcgctcaggttctgcg

SEQ ID NO: 114853 - DNA, 25 bp, Homo sapiens
  chr7:30174230-30174255
  hyper
cgctcgcaccgcttccaggtaaccc

SEQ ID NO: 114854 - DNA, 30 bp, Homo sapiens
  chr7:30174787-30174817
  hyper
atggtgctccaacacgcccttcgagctcat

SEQ ID NO: 114855 - DNA, 30 bp, Homo sapiens
  chr7:30325625-30325655
  hyper
ctaccgcatagacgcgtggttttgttttta

SEQ ID NO: 114856 - DNA, 257 bp, Homo sapiens
  chr7:30517955-30518212
  hyper
ttctaagctgctggcacgattgagaacccctgcgttcgaccacagtgggataaacgattccgctgactgtgaagttcatccctctcaactttcgctacatgcttcaaactcgcgggtttctccgcttggttccacccagagctcctccagagccgcgctgcgttccgcccgcacgcaaatcccgcctccctgcgcctcctcactcgcagcgcccaggacctcagaaagggcctgccccgcgcgaatccccagtcgct

SEQ ID NO: 114857 - DNA, 30 bp, Homo sapiens
  chr7:30518518-30518548
  hyper
tcgcccgggtctggcgcgggggggcgagag

SEQ ID NO: 114858 - DNA, 30 bp, Homo sapiens
  chr7:30544286-30544316
  hyper
atctggacccgtgacgtccttgcagcccga

SEQ ID NO: 114859 - DNA, 30 bp, Homo sapiens
  chr7:30544555-30544585
  hyper
cctccgccttccgccgagactcagaaatag

SEQ ID NO: 114860 - DNA, 668 bp, Homo sapiens; identical to SEQ ID NO: 44083
  chr7:30721274-30721942
  hyper

SEQ ID NO: 114861 - DNA, 389 bp, Homo sapiens
  chr7:30722018-30722407
  hyper
cgatctcccgggcagcctttgggcgccacctccggtcgcccagagctgtcaagtggggaccttcccggagaggagccgccgagtgcacggagctgcgggtacagccgctccgccgcggccaatggctgcgccggggggcggggccgggcggctcctctcggaggggctcagtctccagcccccgggccctccaccctgcccaaagtacggcttctcagttcgcagctctcttccactcgcggcgtccagaggagggcggtgggctggagagcgtgggcctggggtgacggaatgctctgtgcggggatcgcaggcccccgagctgcagggggcagcaaagcgcgcccacctgcccgcctgcccgaggagaacaccgcagctctgctaat

SEQ ID NO: 114862 - DNA, 463 bp, Homo sapiens; identical to SEQ ID NO: 5502
  chr7:31091703-31092166
  hyper

SEQ ID NO: 114863 - DNA, 457 bp, Homo sapiens; identical to SEQ ID NO: 5503
  chr7:31092241-31092698
  hyper

SEQ ID NO: 114864 - DNA, 166 bp, Homo sapiens; identical to SEQ ID NO: 44087
  chr7:31092713-31092879
  hyper

SEQ ID NO: 114865 - DNA, 139 bp, Homo sapiens
  chr7:31092894-31093033
  hyper
cggaggggctggggttggggatgccagggcttcagtggtccccagaagaaacgccctgcggggtctgtggggaaacgcaccggccttcccaggttgaagtgggcccgctgagacccctgcctgccgctttagaggcaga

SEQ ID NO: 114866 - DNA, 386 bp, Homo sapiens; identical to SEQ ID NO: 44089
  chr7:31232601-31232987
  hyper

SEQ ID NO: 114867 - DNA, 626 bp, Homo sapiens
  chr7:31375701-31376327
  hyper
ggtagaggggacagacggctgtctagtttgggcaaatttccctctacctggggcgtgggggcgcagttcctcctctctttcgggccttttcccccgccctctggggtttgaatgaacaggtgctaacacaccagcttagaagggcgcgttcagcacccgcgccagcagctgctcggcacctttgcccctcggtggcggctgccttgcgcaccaaaggcccaggggcgtaaaactggaggcgtagagggagagggagacgctgtcctttgcagaatggggcgcgggcctcgcagcctcggctcaggaagtcccgccagccgtgggaggagcagggcagggtcagctctcggctgcacttgggcaagagatagctggagctatcgccgcctgcgccgcgtccctgcttgtggcacaaggggcgggtgaaggggcaaccccctttctccctctccgagcgagtgcggggcagagcctccaggcccgcgcgcggcggtgcgctcgccgctctccatgccacccagcccctttcttgggcaggccaggtcagtgtgggcgccgcggcccgggttcgcagggcgcagtcccccggcccccagggcgcccactgcgggcgggacacgggcagt

SEQ ID NO: 114868 - DNA, 180 bp, Homo sapiens
  chr7:31528305-31528485
  hyper
ttgtttctaactgagatgtaccgaaccgtgaaaggatgtgggctggacatactaactccaaggagcccgggtatcattgtagtccatgtcaatggcgccccctggtgttcgggggcgcagcagccctgtgcgagtcctgcagcaggccctcctggcccatccactcggtataccccactt

SEQ ID NO: 114869 - DNA, 30 bp, Homo sapiens; identical to SEQ ID NO: 5508
  chr7:31568350-31568380
  hyper

SEQ ID NO: 114870 - DNA, 22 bp, Homo sapiens
  chr7:32110091-32110113
  hyper
gccaggcgcggcgcgcgtttgc

SEQ ID NO: 114871 - DNA, 331 bp, Homo sapiens; identical to SEQ ID NO: 44093
  chr7:32110360-32110691
  hyper

SEQ ID NO: 114872 - DNA, 300 bp, Homo sapiens; identical to SEQ ID NO: 44094
  chr7:32110703-32111003
  hyper

SEQ ID NO: 114873 - DNA, 226 bp, Homo sapiens; identical to SEQ ID NO: 44095
  chr7:32337756-32337982
  hyper

SEQ ID NO: 114874 - DNA, 174 bp, Homo sapiens; identical to SEQ ID NO: 44096
  chr7:32338043-32338217
  hyper

SEQ ID NO: 114875 - DNA, 681 bp, Homo sapiens; identical to SEQ ID NO: 44097
  chr7:32338283-32338964
  hyper

SEQ ID NO: 114876 - DNA, 352 bp, Homo sapiens; identical to SEQ ID NO: 44098
  chr7:32467303-32467655
  hyper

SEQ ID NO: 114877 - DNA, 123 bp, Homo sapiens; identical to SEQ ID NO: 44099
  chr7:32467946-32468069
  hyper

SEQ ID NO: 114878 - DNA, 41 bp, Homo sapiens
  chr7:32468313-32468354
  hyper
acggggagtcagctccgctagttctccgcgggagagcaagc

SEQ ID NO: 114879 - DNA, 30 bp, Homo sapiens; identical to SEQ ID NO: 5514
  chr7:32529846-32529876
  hyper

SEQ ID NO: 114880 - DNA, 30 bp, Homo sapiens
  chr7:32530116-32530146
  hyper
ctggcttttttccccggcaagtgagatccg

SEQ ID NO: 114881 - DNA, 292 bp, Homo sapiens; identical to SEQ ID NO: 44101
  chr7:32767519-32767811
  hyper

SEQ ID NO: 114882 - DNA, 376 bp, Homo sapiens; identical to SEQ ID NO: 44102
  chr7:32768219-32768595
  hyper

SEQ ID NO: 114883 - DNA, 1206 bp, Homo sapiens
  chr7:32981765-32982971
  hyper
ctggagccacgggagcgcaaggcctcccaagtcagggcccgaattccgcgtggtgccaaacggcagctggctccctgaatgcccaccctgaaccctggtaaaaaataaaaaaaacaacaacaaaattccctccaacccggagaaaacaagtccgcctctgttctacctagcagcgccgtggccagtccccgccgcccattctctcttcttccgggcctcgccacaccaacactgcaggacccgtgtcctcgtcccttctccgtagcagaggatgaaaagaacggggtttctccatgtcgcagtggcccagggaactcagaggtggagcgcgggggcagcgtgctcggttgaacttgcctgttcggtccacaaatgccgagcaagcgccaataactcttggcttccccaaaagaggcgacgcccacaccaaagcgggggcgaggagcgcaagccgctgccgcctccccgggccgaggcccccgcccacccgcgccgcggcctccagggcccctccgtggccgggcgggcctcgctccccacccagtgaggactagaagtcccgtcgcaggcactaggttcctcacaggcccgcacccctgcctgggtcctgggggcttggaggacccagcccagcgcccaacacggcgccgggcgcccctgttcccagaaaacgggcggcgcgcggactgcggcccagacggctgctcgagactcacaaggactccaggcgcttgagctgctgcagctgctgggcgtcgtgccgccgccgcttctgctcccgggcccgctgcagttcctgatccagcggctcccgcggccaccacgcgcccccagccctcgcatcctcgcgccccggccaggacgacatcgcggcacctgcggcgcggctctggctgcggccaagagggcacttcctccgtgcggcgccccttcccgccgccgccccgcgactcgcccgggaggggccccgaagtcccggcctcggccgccagatgcccgcctgcccgcggccggccccaagtcagtgcgcagagccccagagcccagccgccggtgggcggggagcgcccgctggcggcggctggagccgaggcggggcggggccctggttgggagcctggggaagcttccaggagcttcagggttcccgccaggccacactcatctccctgcccctttgaggttcccgaccgaggcaaggggtct

SEQ ID NO: 114884 - DNA, 895 bp, Homo sapiens; identical to SEQ ID NO: 44104
  chr7:32996716-32997611
  hyper

SEQ ID NO: 114885 - DNA, 30 bp, Homo sapiens; identical to SEQ ID NO: 44105
  chr7:33102640-33102670
  hyper

SEQ ID NO: 114886 - DNA, 30 bp, Homo sapiens
  chr7:33149301-33149331
  hyper
tggaggttcccgcccggccacacccacctc

SEQ ID NO: 114887 - DNA, 30 bp, Homo sapiens
  chr7:33168610-33168640
  hyper
tgatcttggtcttccgcctcgccttcttct

SEQ ID NO: 114888 - DNA, 83 bp, Homo sapiens; identical to SEQ ID NO: 44106
  chr7:33943415-33943498
  hyper

SEQ ID NO: 114889 - DNA, 1771 bp, Homo sapiens
  chr7:33943729-33945500
  hyper
ggacagctagctgatcgtcaggtcccaacacttgccaagcgtccctcactcccacctcgcgccttcgtactttggttacaaaaatcatctctctgcgattgcaccccttttgagtagagggtgccactgcgtggggaggaggcggcgattcagcagggggatcacaggagctgactccccgacacccagtgctgcagaggcgagagggcgcagccgggctgagagagcgacggagctccgagctgcagaggccgccgcgcggcggcccccgccagagatgagcggtggggcgggggttcctccctcttttcgggtgaatgaatgattagtcaaacaccacctccccgccccggtccgcccgagattggaagggaggagtctcggagcgactgttcattttttaaggacgaaaggcgtttgcctcggtacgtttttaaatcgaccttgtgtgtgtttcaacttcggtcatccctagtgtcaggacgcgcagacagctaagcacagaacacatctctaaggccacttgcccctctgtccgctcagccccctgagttcgctgtcgcgcccccgccagagggaagcaaagcagggcatgaaaagttgcgggggccctactgccccgggtgtgtcgctccttcccaaaggtggggcacccgggagcgagcagggtggtggggcgcccctgcgtcccgtttgctgctccctcgctggattggggcacccgggcctgagcgctagtgctgcggcatccccggggctcccccaagaaagggaggaggagccgcgctcgcccggacagtggagacgcgccttctcggctctggtccgcgccctggggccctggcctccctggaggggctggggaactggaagctgggccgagagagttcccgctgcagctatcgcgcagtccctcctgcgcccgggcgcccccagcgggttccgggaggcgcccggtgagcccacgtctgttgcggcggagcgagcgcgctccgggagggccgagagccggcggggctggcaggaggtgaggagtgcgggagtggaggacgctgcggcagcgacagcgacagcccccgaaacagtagcggcagcccgggcggcggctgagcggcagtgcgcagtcggcagcgccgcagctcctctcagtctatctccggctgccgcaacaccccttcctcctggccccctctccggcgctgaggggctgactgctaagccactgcaagcaactccctcaggaaaaaaaaaaaaaaagccgcatcggaggagcctggccgcaggacccctcctccccgggcgcccccacaccttggtctctccccccgccctccctcacacccccccgccccccagctctcgggcgcccgcctccctccttcgcggacggtctcccgacacgccggctgagagcccttttcgactgtgagctgcggcagctgagcagaggcggcggcgcgggacctgcagtcgccagggattccctccaggtgacgatgctctggttctccggcgtcggggctctggctgagcgttactgccgccgctcgcctgggattacgtgctgcgtcttgctgctactcaattgctcgggggtccccatgtctctggcttcctccttcttgacaggtaggggagggggcgggagggaccggccctccgggacgccggtttggtacctgggaaaggtggcgctggcttgccccggggatgggagggtggggagcgcgcaccttggcgcttgccctgcgctggtcgatggggatgaagc

SEQ ID NO: 114890 - DNA, 30 bp, Homo sapiens; identical to SEQ ID NO: 44108
  chr7:33972651-33972681
  hyper

SEQ ID NO: 114891 - DNA, 30 bp, Homo sapiens
  chr7:35077583-35077613
  hyper
ctgcgcttggagcccgcgcaggcgagacgc

SEQ ID NO: 114892 - DNA, 483 bp, Homo sapiens
  chr7:35225350-35225833
  hyper
gctggggaaccaccgcgcctgcagttcgtgcacctcttcccggagctgcgccagggaattacggacgaactggaaggggtcgagaagggtcttggccaccacctttagctccaagccttttcgctttttcagatttgggatcctccccggggaggacctcctggcgccccctggcagtttcccgccgcctagggccgacttttccacctccagctcccgggcgggggaggccccgtacggccgcttagacgggctggggcgggaagattgcagcggctttgggtttactccttgtttcttcataatccctagtggagctgggtcaatttcaggcacagcccatccgagtcaggcgaggtccagaaaggcctgactcgcctggcagcctcaacggacttgtccccgcagccgttgactagccgttgacgagcggacctcccggtcgtcatggcgactgtgaaatgtagggtggagcgcatgcgt

SEQ ID NO: 114893 - DNA, 206 bp, Homo sapiens
  chr7:35226044-35226250
  hyper
cgcagccccacgtacagcccccaacacgctcccagccccactggcgcagaacccatcaccgcttgcccttcacgcgcttcattgggagtgcagctcccaccccgagcgcgcagctccacgcagcctctccacactctccccagcgcttgcagcaccccccagtgcgcacagctctgccagtagcttcccggcgcgccgcccctgca

SEQ ID NO: 114894 - DNA, 53 bp, Homo sapiens
  chr7:35226469-35226522
  hyper
ttaggaaagtctctacgatcgctgaggtatcgggcagtcagtgcccgttgcca

SEQ ID NO: 114895 - DNA, 84 bp, Homo sapiens; identical to SEQ ID NO: 44111
  chr7:35226556-35226640
  hyper

SEQ ID NO: 114896 - DNA, 111 bp, Homo sapiens
  chr7:35288336-35288447
  hyper
cggtggtaggcgtagcggtacctcttgttgtccacagggacgatgtccatcaggactatgtacttggcctcaggatccacccccgaaaaggacacccggatggttggaaac

SEQ ID NO: 114897 - DNA, 43 bp, Homo sapiens
  chr7:35293043-35293086
  hyper
gggcacagacggatgcgcagcatccccagtcctcggcggacag

SEQ ID NO: 114898 - DNA, 295 bp, Homo sapiens; identical to SEQ ID NO: 44113
  chr7:35293182-35293477
  hyper

SEQ ID NO: 114899 - DNA, 154 bp, Homo sapiens
  chr7:35294031-35294185
  hyper
cgcccgagatccgggcatggcccagttggggaagctatgaccagaccagtggaagcctcgggagttctcgctttttccattctttttcttacctgcgctcaaagttccaaaagaaagtagggaagcgctcagtagaatccggcgcctctgagcc

SEQ ID NO: 114900 - DNA, 30 bp, Homo sapiens
  chr7:35294465-35294495
  hyper
gctctacggtaaccacgcgacgcgtagtgg

SEQ ID NO: 114901 - DNA, 51 bp, Homo sapiens; identical to SEQ ID NO: 44115
  chr7:35296953-35297004
  hyper

SEQ ID NO: 114902 - DNA, 216 bp, Homo sapiens; identical to SEQ ID NO: 44116
  chr7:35297137-35297353
  hyper

SEQ ID NO: 114903 - DNA, 546 bp, Homo sapiens; identical to SEQ ID NO: 44117
  chr7:35297470-35298016
  hyper

SEQ ID NO: 114904 - DNA, 106 bp, Homo sapiens; identical to SEQ ID NO: 44118
  chr7:35298121-35298227
  hyper

SEQ ID NO: 114905 - DNA, 221 bp, Homo sapiens
  chr7:35300787-35301008
  hyper
gccgcacgtggacaacgggcccgggcggcctttgtaatgttattttttcttttctgaagataattacctagtattctgcaggttcctctggtgcaacagagactgccgcggggcgggggagaaggtggtgaggggggtcgcgcatcgctcagtgcaggtctgtgctttcacttggcctgcgctcaggtcagtgcgccccttaccggagcacccatggcctc

SEQ ID NO: 114906 - DNA, 713 bp, Homo sapiens; identical to SEQ ID NO: 44120
  chr7:35301101-35301814
  hyper

SEQ ID NO: 114907 - DNA, 327 bp, Homo sapiens
  chr7:35576957-35577284
  hyper
gactcgagcaccccccggggcagagcattgccgggtgagccgcatccctgcctggaacatatgagaggtgcggggtgtaggggaagtgggagcacgcggggggtctggggaggggacagaccgaaggcagagaccaccgcgacagacacctatcgaacttcacgctaaggactgctcgttttactgatccggactcagcccttagcgctgggcggtaccacgcgccgccagtgcggatcatctgggcactggcgccacctagtgctggcagcgcggcaatggcccttttaccgactcgcgcgtctatagtgcggcctcacacaacct

SEQ ID NO: 114908 - DNA, 258 bp, Homo sapiens
  chr7:35734776-35735034
  hyper
cggaacaggcagggcggaagtgcgtcaccggcggcacgcccctgcacatggacctcccccgtccccgccatccctgccgatcctgttgctgccgccttcccgccgtgctcgggctgcccgggactctagccgccaggcttcgcgtcgcccagcggcagatcgggctcctgggagcctctcccctggccgtttgctcggcctcggccccagctgccctggggcctagccactagctcccctggcgctagcctaccctgt

SEQ ID NO: 114909 - DNA, 377 bp, Homo sapiens
  chr7:35839771-35840148
  hyper
gacagcgacattcatcgctacagtagaaactcacacaatcgcagccctttattagtattttgttacccagtagttcctgtgtccattcatttcctcaactggagtgtgagctccaagaggaccgaaccgggcaccgacaaggtgagccaatatgaatgtggcgagtccgcaatgggggctacagcggccgacctctggggctgtgccaggccactagagtgtgatggcgcgagggaagggtcggggaaacagggcctaacctcacttttcaccccgaaagtcaagatagccacggaaacagggatgaatggggagcacagacacctgcctcgaagtgtctcttcactttcactcacaaagccgtcgggtcagtaacc

SEQ ID NO: 114910 - DNA, 30 bp, Homo sapiens
  chr7:35840488-35840518
  hyper
caacttaaacatggcggctaaacccgaaca

SEQ ID NO: 114911 - DNA, 30 bp, Homo sapiens; identical to SEQ ID NO: 44124
  chr7:35841563-35841593
  hyper

SEQ ID NO: 114912 - DNA, 1060 bp, Homo sapiens
  chr7:36192232-36193292
  hyper
gagcagatctcgcctcgggcaatcctaaacagcctctaccaggcacaaccagtcctaggccccgggcggcaaccatggtccgggggcagctgacttaggacagcctccctgtgacccgccctcgccggcacggcgccggctccgccccttaagccccctaagtcccgcctctgcgctcccggggcctacccccgcgctcatggccccgcccccgcttttcctaccccatcgcgccctggccccgctcccacactctatgaccccgcctctcgcactccaggcccgccccacgcgctccagggttctgctctccacccatttgtgccaggccacgcccccacacccatggctcctcctctcgcacgccagggcctcccctcgcgctctctggttcgttctccaccctcttgagccttgatgccgccccctcttccatggccccgcctctcccactccaggcccgcccttgcgctctcgggttcctctctccacccactggtgccaggcctcgccccgcgccagggcccctcccccacgtgccctcgggagtcccggggaggagttgccgcgcggaggaggcgtggccgcggtgcctgcggaggcgcgagcggcgcggcgcggcgcggccgggactttggctttgacaccgactgcgagcgggagccgtgcggctggtgctgggtctggactggctctggcggatccccgcccgagttgggcgcaggactttttgccggggtaaacgcaactgcggcggcgccgccgcaagccccggtgcagcctcggcggcgggtttcgccgccgctgccgccgcctccgagcagccctgcggcttctattcactctgggagagcgatgctaagtttctcccatagaaagagccgggacacgcagaccgaagcggcgtagtcggcttccagggcctgaccagtgacccacacccgcgcggacgcctaggctggaggcagggggcccgtgctgtcccgggctgggctcaggcttccgagccgcaggtggaagaggaaccggcgccccgcagagcggccgagaggtggggcgc

SEQ ID NO: 114913 - DNA, 39 bp, Homo sapiens; identical to SEQ ID NO: 5524
  chr7:36217588-36217627
  hyper

SEQ ID NO: 114914 - DNA, 31 bp, Homo sapiens; identical to SEQ ID NO: 44127
  chr7:36406484-36406515
  hyper

SEQ ID NO: 114915 - DNA, 87 bp, Homo sapiens
  chr7:36406995-36407082
  hyper
tgtggctgtgcccgcgagcgcgctggggtctccagccagtgggtaacgcatattgactgatctttcagagacgtttgtacccgttca

SEQ ID NO: 114916 - DNA, 245 bp, Homo sapiens
  chr7:36429676-36429921
  hyper
cagccatgacccaccgctctaggcccccacccaccttcctctgtcaacctctgggcgaacccccaccgggcggagggcgcgtgtgtgcgcgcgtgcgcagtgtgtgcgggccggggtcgccgcggctgcggcctgctgtggttggtgggttcctctgagattttgttgtttcggtcctacagataaaactcagggaggaaggctttgagtctgtcctaaaaggctgttgcgagaggtctttcagc

SEQ ID NO: 114917 - DNA, 30 bp, Homo sapiens; identical to SEQ ID NO: 5526
  chr7:37078723-37078753
  hyper

SEQ ID NO: 114918 - DNA, 119 bp, Homo sapiens; identical to SEQ ID NO: 44131
  chr7:37487145-37487264
  hyper

SEQ ID NO: 114919 - DNA, 130 bp, Homo sapiens; identical to SEQ ID NO: 5528
  chr7:37487323-37487453
  hyper

SEQ ID NO: 114920 - DNA, 210 bp, Homo sapiens; identical to SEQ ID NO: 5529
  chr7:37487755-37487965
  hyper

SEQ ID NO: 114921 - DNA, 1106 bp, Homo sapiens; identical to SEQ ID NO: 44134
  chr7:37487984-37489090
  hyper

SEQ ID NO: 114922 - DNA, 207 bp, Homo sapiens
  chr7:37873161-37873368
  hyper
caacagaaaagacaacgccgagcccccgggtatgagctcagaactctttacatgtttgatgctccaaatggtctagggcaggggggcttcagagccttggcagcagaacgtggtcgcgtagatgtttatctgattttctgttgcgctgctgctcaaccgccactacggaagtgcacactgccaccttatggacgtcttgagaagtta

SEQ ID NO: 114923 - DNA, 1126 bp, Homo sapiens; identical to SEQ ID NO: 44136
  chr7:37955576-37956702
  hyper

SEQ ID NO: 114924 - DNA, 371 bp, Homo sapiens; identical to SEQ ID NO: 5532
  chr7:37960165-37960536
  hyper

SEQ ID NO: 114925 - DNA, 585 bp, Homo sapiens; identical to SEQ ID NO: 5533
  chr7:37960562-37961147
  hyper

SEQ ID NO: 114926 - DNA, 720 bp, Homo sapiens; identical to SEQ ID NO: 44139
  chr7:38217487-38218207
  hyper

SEQ ID NO: 114927 - DNA, 312 bp, Homo sapiens; identical to SEQ ID NO: 5535
  chr7:38670351-38670663
  hyper

SEQ ID NO: 114928 - DNA, 218 bp, Homo sapiens
  chr7:38670956-38671174
  hyper
cgggtccggggagctgcgaagagcagagcgcgcagcggggctggcggcggcgcggaggagcgggaggaggagcgggaggaggaggagagggccgagcaagggaggagcgggagaagcggcggggagccgcggagcgcggaggggtgagggcggggcgcggcggcgggaccagcttaaagcgacagagcgggggcgggatgcgtcgggactggctgtga

SEQ ID NO: 114929 - DNA, 386 bp, Homo sapiens
  chr7:39015595-39015981
  hyper
acgccaaaaccaccccggggctcacgccatccgcgcaccggctctgctgcctaagtccgaggacgcaggcggagggcgcggggctcccgggcgcccaggagggcggtgccgccggggtgcgctccaggcttggctgcaaaccccccaagaattagaaagcgggggcggctgctcagcggctgctgcggcctgggactgcagctcgcccctcctccgcaacttcccactggtcccgtcacctggctttctgtctagtgtccgcccaggcggggtcccaagaaggcgatgccaggagcagtcgcgccccctgccctctgtgagcccgcaggtttcgggcaagtttggctcagtccttgtcgatgctccaggctcggcttccctggcct

SEQ ID NO: 114930 - DNA, 866 bp, Homo sapiens; identical to SEQ ID NO: 44143
  chr7:39453505-39454371
  hyper

SEQ ID NO: 114931 - DNA, 360 bp, Homo sapiens
  chr7:39605668-39606028
  hyper
atagtttaccaaagcgcgcgaatgtaaaacccagaccatggtaagactacggtggaaatggaaggtgtctcactgagggtcccggttgccttctgcaaaggtgaaggtcgtgccggccacgcgaggaaatctgcctcgctcacaactcacaggcacacatcaacactgccaaccgagggagcccaaaatcaccgcaagcgaaaggctccggcggcggccacgggccacagcccgcctccgcgcacacgcagcccctcccgagcctccactcgccgtcttcgccccgccttcggaccggaaggagttgttggcgcttccggtggcctgcgaccccgtaattgcctcggtgatgtcgtgggt

SEQ ID NO: 114932 - DNA, 30 bp, Homo sapiens
  chr7:39606265-39606295
  hyper
cccggtccgacccgcgtcttgctaggattt

SEQ ID NO: 114933 - DNA, 30 bp, Homo sapiens
  chr7:39663039-39663069
  hyper
ggccgggcagcctgcgccctccgagccact

SEQ ID NO: 114934 - DNA, 30 bp, Homo sapiens
  chr7:39772825-39772855
  hyper
ggacaccctggaggcgacgaagctgcgtct

SEQ ID NO: 114935 - DNA, 30 bp, Homo sapiens; identical to SEQ ID NO: 44145
  chr7:39773212-39773242
  hyper

SEQ ID NO: 114936 - DNA, 30 bp, Homo sapiens; identical to SEQ ID NO: 5539
  chr7:39872836-39872866
  hyper

SEQ ID NO: 114937 - DNA, 110 bp, Homo sapiens
  chr7:40174395-40174505
  hyper
gagacaggaaaggacggacacccaagcccagcaacaacctttccagtctgagtgcccttggtctgaccgacagactagaagctggcccagcaggcgactagtgctcagcc

SEQ ID NO: 114938 - DNA, 119 bp, Homo sapiens
  chr7:40174877-40174996
  hyper
cggcctgccccgctctggccgcccagggtcgcctctgtcccgtgcgttgttgtgaccgagggctccgtgcgccgtggggtcccgctcctgcgcgtcccgcggctcgcgtttggggcctc

SEQ ID NO: 114939 - DNA, 30 bp, Homo sapiens; identical to SEQ ID NO: 44148
  chr7:40866647-40866677
  hyper

SEQ ID NO: 114940 - DNA, 30 bp, Homo sapiens
  chr7:41739208-41739238
  hyper
cacccgaaaatgccgcggctttcctccggc

SEQ ID NO: 114941 - DNA, 227 bp, Homo sapiens
  chr7:41745164-41745391
  hyper
caaatgtcagggagcgggacctgcggaggggccggctggctccccgcggacagaggcgagccgggagcgctcgcgcaccagccaactgcccccttctgagtgcggagcgcggtcctccagcgactgcactagcaaagtggcccgctgccaccgcgttattcacctagtggaggcggcctgatttactggcgacttcacaaacccaactccacgctggagcatttgca

SEQ ID NO: 114942 - DNA, 167 bp, Homo sapiens
  chr7:42267544-42267711
  hyper
ctcgctctttctctgcgctttcctgtcgagttcccttcaggttctggtttcctccgacggtggcaagggatgtttttcacgcctttcaccacttttgcccgcgcctgcgtcccctgcccgaggtcccaggccgcggcggcggcgcggtgggttcattagcgggcgcg

SEQ ID NO: 114943 - DNA, 154 bp, Homo sapiens
  chr7:42267821-42267975
  hyper
cgccagcaaacagaacatgctggattgctcagagacggctctgggtgtctgggggcagaaggggtgctcccaggcccggctttgatccgcatttctgaagctggctttgggagacaatgcatctccgccagccaggccgcgggaaaagtgaaaa

SEQ ID NO: 114944 - DNA, 2120 bp, Homo sapiens; identical to SEQ ID NO: 44152
  chr7:42275702-42277822
  hyper

SEQ ID NO: 114945 - DNA, 132 bp, Homo sapiens; identical to SEQ ID NO: 44153
  chr7:42533256-42533388
  hyper

SEQ ID NO: 114946 - DNA, 867 bp, Homo sapiens
  chr7:42927718-42928585
  hyper
aggatctgtaagtaccaaaaacgcttaaactttcacactgcggttgtgtcactgaagcagtgcctgaaatctaatccctgagtgtgacgccgccccaaagggccccaagcaggtagatcccatgctgatgctcttttatcctggcctctcagctgttgaggagagtaattgccgggctaaactgataaagtttcattccaaacaattagcctagtctgcaggattgcagtcgcggcttggacaccatcccggtgtctgtcccccgcagagggcttgctaccttgctgtatcagctggcccagcaggtctggggccgcgcgctgcttacaggcgctggatctcgctgctcgtcgctgcgcgctactaggtcctgctgtcgtccgagtcgcctccgggactctccggaattgtagcggctgtagccggctccttgcctgcggcgcggagggcaggtcccagtggtaggaggatgtgttccctttgcagaatcagaccccctcctgggactgtggggaccctctgtcgccggcctccattggaggatgcgttgtccctggagctgggtgcgctgttgcgtgacctggggcctgggtggtgggcgggcctgtccatggcaaagggcacggctgcgcgctacttcccgagaacccgccagcaggctcttgggaagcagcgatttctccttagtcacagtcagagagggtgatgcgacacactgggcttcactgtgctcgtgaagcggagccagggtgaaaggatcatatggcctaaccctaaccctaatgggagtaacttcacctgcgtcccacaggccccgcaagagtgacgctgccaggcaggcgccgccctgttcggttcctgctgctg

SEQ ID NO: 114947 - DNA, 266 bp, Homo sapiens
  chr7:42951542-42951808
  hyper
cgcaggcgcgtgcacgcagaggccgggacccgccgggaaatctcaaccgggcagcccccaccccgctcgaacgccgaggcggctccacccgcgcgagccccgccgcctcgggcacctcctgcatcacgtggttccgggccgggtgacgccaaacctgcgattcccaagcggcagcgcggcctcccgagccgggttgacgctggcgtggcggccatgtttattgagggcacctggcttctcccgcttgcgccgccgggtgagcctga

SEQ ID NO: 114948 - DNA, 30 bp, Homo sapiens; identical to SEQ ID NO: 5544
  chr7:42952074-42952104
  hyper

SEQ ID NO: 114949 - DNA, 30 bp, Homo sapiens
  chr7:42971328-42971358
  hyper
gtttcagaaaccaccgcatcaggtctactt

SEQ ID NO: 114950 - DNA, 30 bp, Homo sapiens
  chr7:42971922-42971952
  hyper
attctgtgcctgtgcgcatgctgaaagcag

SEQ ID NO: 114951 - DNA, 30 bp, Homo sapiens; identical to SEQ ID NO: 5545
  chr7:43016820-43016850
  hyper

SEQ ID NO: 114952 - DNA, 208 bp, Homo sapiens; identical to SEQ ID NO: 44157
  chr7:43151999-43152207
  hyper

SEQ ID NO: 114953 - DNA, 786 bp, Homo sapiens; identical to SEQ ID NO: 5547
  chr7:43152413-43153199
  hyper

SEQ ID NO: 114954 - DNA, 464 bp, Homo sapiens; identical to SEQ ID NO: 44159
  chr7:43153229-43153693
  hyper

SEQ ID NO: 114955 - DNA, 30 bp, Homo sapiens; identical to SEQ ID NO: 44160
  chr7:43494863-43494893
  hyper

SEQ ID NO: 114956 - DNA, 109 bp, Homo sapiens
  chr7:43622285-43622394
  hyper
tcccctcctcaccacgtgaagtcccgcttacagctcaaatgccttttattaaccgaaggtcagcttttgtgactctcagacgctcaacaggtgcgcaactctgctaacg

SEQ ID NO: 114957 - DNA, 30 bp, Homo sapiens; identical to SEQ ID NO: 44162
  chr7:43623207-43623237
  hyper

SEQ ID NO: 114958 - DNA, 108 bp, Homo sapiens
  chr7:43768999-43769107
  hyper
ggagactcttataccgcgggagactaacctgtgagcaacagaagcaccacgctacaaagagcatgacgagttcttccaggcttgggaaagcacgggtaaatgcccgcg

SEQ ID NO: 114959 - DNA, 30 bp, Homo sapiens; identical to SEQ ID NO: 44164
  chr7:43769341-43769371
  hyper

SEQ ID NO: 114960 - DNA, 67 bp, Homo sapiens
  chr7:43798004-43798071
  hyper
gccctccggtcggccggcacccaccacccacccctcgccaccaagctgggtgcagagaacagggcag

SEQ ID NO: 114961 - DNA, 16 bp, Homo sapiens
  chr7:43798080-43798096
  hyper
cggttcttacggcccc

SEQ ID NO: 114962 - DNA, 214 bp, Homo sapiens
  chr7:43798607-43798821
  hyper
cggttaagactgcccgtagtttcggtttttatgtagacccaagagggcaggctcggcgtccgcgtgccgcgtagtccggcggctccaggagcgcgagcggctgggcccgggcgtagccaccgcagggccgctagctcggccgggacccgcctgggatgccctggggtctgctccgctggggcgaatcctgaggcgccacgcgaggcacttggcc

SEQ ID NO: 114963 - DNA, 30 bp, Homo sapiens; identical to SEQ ID NO: 5550
  chr7:43896240-43896270
  hyper

SEQ ID NO: 114964 - DNA, 78 bp, Homo sapiens
  chr7:43909235-43909313
  hyper
ctagctgttactcccgccttccccgcagccctgtgaatgctcagccttgtgaatgctcatcccgccgctgttcgctct

SEQ ID NO: 114965 - DNA, 13 bp, Homo sapiens
  chr7:43945613-43945626
  hyper
ccggagcggctct

SEQ ID NO: 114966 - DNA, 30 bp, Homo sapiens
  chr7:43946440-43946470
  hyper
ccgggcggtgcctgcggtgccaaaagctgt

SEQ ID NO: 114967 - DNA, 30 bp, Homo sapiens; identical to SEQ ID NO: 44168
  chr7:43965676-43965706
  hyper

SEQ ID NO: 114968 - DNA, 30 bp, Homo sapiens; identical to SEQ ID NO: 44169
  chr7:43965920-43965950
  hyper

SEQ ID NO: 114969 - DNA, 30 bp, Homo sapiens; identical to SEQ ID NO: 44170
  chr7:44084056-44084086
  hyper

SEQ ID NO: 114970 - DNA, 35 bp, Homo sapiens; identical to SEQ ID NO: 44171
  chr7:44122204-44122239
  hyper

SEQ ID NO: 114971 - DNA, 455 bp, Homo sapiens
  chr7:44144029-44144484
  hyper
cgaccacccctgagcccctctggcttcggagccccccagcaccccttcccgggtcccctcgcccaccctaatccactctccctccctttcccggattccctcgctcaccccatcctctctcccgccccttcctggattccctcacccgtctcgatcccctctccgccctttcccagagacccagagcccctgaccccccgcgccctccccggagccccccgcgcgtgccgcggccatggcggccgtgcgcggggcgcccctgctcagctgcctcctggcgttgctggccctgtgccctggagggcgcccgcagacggtgctgaccgacgacgagatcgaggagttcctcgagggcttcctgtcagagctagaacctgagccccgggaggacgacgtggaggccccgccgcctcccgagcccaccccgcgggtccgaaaagcccaggcggggggca

SEQ ID NO: 114972 - DNA, 30 bp, Homo sapiens
  chr7:44163043-44163073
  hyper
ggagcccggcctcgcggcctggaactgcca

SEQ ID NO: 114973 - DNA, 233 bp, Homo sapiens
  chr7:44240365-44240598
  hyper
agaagggttcaggccgctgtgggaggcccagcaccacccagcacaagacagtacggtatcccgccgcgcgcccgactccacctggcgagcagggaggggccaagcttacgcgaggcgtggcatcccgcccctcgctgcattgtacttccgggctcacatttctgcatccggagtatgagaaccctcaaccaggctgaccggatccggaagtggattgcgagccaggaggagga

SEQ ID NO: 114974 - DNA, 14 bp, Homo sapiens
  chr7:44349373-44349387
  hyper
ggaagaaactgggg

SEQ ID NO: 114975 - DNA, 83 bp, Homo sapiens; identical to SEQ ID NO: 44174
  chr7:44349523-44349606
  hyper

SEQ ID NO: 114976 - DNA, 32 bp, Homo sapiens
  chr7:44349655-44349687
  hyper
cggtggccgagaccgggcgggggcgggggcgc

SEQ ID NO: 114977 - DNA, 230 bp, Homo sapiens; identical to SEQ ID NO: 44176
  chr7:44364448-44364678
  hyper

SEQ ID NO: 114978 - DNA, 383 bp, Homo sapiens; identical to SEQ ID NO: 44177
  chr7:44364698-44365081
  hyper

SEQ ID NO: 114979 - DNA, 525 bp, Homo sapiens
  chr7:44365117-44365642
  hyper
cgggagacacctcggctcgcggcgccaggcgggggccgggctgggctgcgccgggcggcgagcgcacgcgagatctgctcgctccgtcctcgccaggagcgcgccgcacacctacgcgcggggaggcgcgggcgccgctgtcaccgccgccgccgccgcgcccgccccgcccgccgccccctgcacgcgccttccccgcgccctgcacacgctgctcctgcacccgcacccgcagggcaccggcgccctgcatctgcacacgcgccctgcacacacacccttgccccgcacccgcaacgcacctgcacctgcacctgcactcacacgcgcgcccgcccccgcccgcccccgcaccccacacacacacccgcgccctgtactgacgccttcatcctctacccgcaccacgcccgcacctcgcgcacgcaggccacttgctgctgccgacccctcgctctcacataacacagaagagtgcacataatgaacgcagcctcctctctctctctcgaaggcccacctagc

SEQ ID NO: 114980 - DNA, 56 bp, Homo sapiens; identical to SEQ ID NO: 44179
  chr7:44530399-44530455
  hyper

SEQ ID NO: 114981 - DNA, 157 bp, Homo sapiens
  chr7:44621888-44622045
  hyper
gaagaggacgcctgcgcagtgatatgtactcgccgtctcctgcaactccatccgtaccgaacactgccgcgccccgccccctcacacagcccggcgcccgcctacccccgcaacgagagtagagggcgcatgcgcaatgacgttcgcccttaatttc

SEQ ID NO: 114982 - DNA, 192 bp, Homo sapiens
  chr7:44645926-44646118
  hyper
aggttcctaccaggcgctagagatatcttactttcagaaattatttatgatagcagaagccgctggaagtccatagacaacctcatctctctagcggagcaaacagctgggctccagctggccctggcttctgcaactgcgcagtcggcgctgtgacgcccggcgcggctctgtgacgtcacgaatcggtcc

SEQ ID NO: 114983 - DNA, 44 bp, Homo sapiens
  chr7:44646790-44646834
  hyper
cctgtttggattaccgcgcagaccttggcgccgcccccacacct

SEQ ID NO: 114984 - DNA, 233 bp, Homo sapiens
  chr7:44788900-44789133
  hyper
gtgtaagcggcgctcggggttctcctgagcgatgaaggctggccgggccttcgctccaacctgatcgttcctagctttggggccaggcagtctcacctacatggtacgcccctccgctcctacttacgtgcccaccagcacggcgatgtgggggccgtctgaggccgtcacctgctcgcggaggagctgttccgctcctgggctgaacgacgctgagcggccagcccccagct

SEQ ID NO: 114985 - DNA, 30 bp, Homo sapiens
  chr7:44835712-44835742
  hyper
attgcctggtaggacgcgacgtggtgtttg

SEQ ID NO: 114986 - DNA, 30 bp, Homo sapiens
  chr7:44836954-44836984
  hyper
ttgctgggatgtgacgggttgccacttgaa

SEQ ID NO: 114987 - DNA, 30 bp, Homo sapiens
  chr7:44887263-44887293
  hyper
aagccggattctgccgtcctcctccttcta

SEQ ID NO: 114988 - DNA, 700 bp, Homo sapiens; identical to SEQ ID NO: 44183
  chr7:44924078-44924778
  hyper

SEQ ID NO: 114989 - DNA, 624 bp, Homo sapiens
  chr7:45026004-45026628
  hyper
tgagaggaagtagcacgtgtagtgaaggcttggtctccaagaatcactggtgcccccactcactgcggcccagcctcccacgccgcccgccactgaacccaatcccccaggacccctacctgggctcaggaatggtcaggcaacacgtggggcccaggatggcggtggatgactagactgccgaagaccgcgccgctgcgactacgaagtacggagtacggagtacaggtctgccagccaagactgacgccgcgcgctgcgccgcgcacctcgacgtcaccgcgtagtcccgccccgaagccgtgcgtggccggggccacagcgtttggggtagatgacgtcacgcggccgcgggcgctcgcttggtagggtgtgctggggcgtagagtttagggtcctgaggctgcgtctgcgtgtcaactcagtggagtctctcgaccgccctttgttaccctcctttagtgaccagaaggctggagttacgtaatctgcccctacagctaaaaggacggaggcctgacggcgtggcctggagggacgcgctgagcccctaatgggtggtgccttcctggtgcggccgcacaggcggggccgggcggaatccaagcacgatgtggacacgga

SEQ ID NO: 114990 - DNA, 30 bp, Homo sapiens
  chr7:45039342-45039372
  hyper
gcaggctgggaagtcggccgccgtaaagat

SEQ ID NO: 114991 - DNA, 30 bp, Homo sapiens
  chr7:45040306-45040336
  hyper
ggttaacgtggagacgtttgctgctcactg

SEQ ID NO: 114992 - DNA, 112 bp, Homo sapiens; identical to SEQ ID NO: 44185
  chr7:45128760-45128872
  hyper

SEQ ID NO: 114993 - DNA, 30 bp, Homo sapiens; identical to SEQ ID NO: 5554
  chr7:45129095-45129125
  hyper

SEQ ID NO: 114994 - DNA, 179 bp, Homo sapiens
  chr7:45151425-45151604
  hyper
gggctcaagcggagcgataggtcatgggaaacttagaaaagataaagaacctaggaagaaaggcttcggttgccccccgaccagtacgccatcctcatacggagtgcgggagacgaccctttgttgtcggtgctgtcaccctatccctccctgcttgcgtaggcgtaggagagttccta

SEQ ID NO: 114995 - DNA, 153 bp, Homo sapiens
  chr7:45197303-45197456
  hyper
gtggtctgggggtgcggcctgagggcggaccccctgaggccccgccccaccccaaccccaaccgggcgtcccccagccgcgcccccagcgggaccgagcgtgacccagctgcggccggccagccatggagactggagcgctgcggcgcccgca

SEQ ID NO: 114996 - DNA, 189 bp, Homo sapiens; identical to SEQ ID NO: 44188
  chr7:45299683-45299872
  hyper

SEQ ID NO: 114997 - DNA, 355 bp, Homo sapiens
  chr7:45613458-45613813
  hyper
agaattgccgaggggcggggggtccctcatgcgcatggaagggacgtacgccccaggcctccaccttcctcctgaccccggggattcttggacgtcgattctccgtctcgtaggggcgagggccctgggttcgcagtcagacgcgggcccctctcaaatctagtggcctggttttattgagtgggggaaggcacatattttccaagattaactgccccgcaacagggaatttcgcaggatttcagtattttcgactccccaggtgacgccaagagggtgggttccactgtgcacggtggggaaactgaggctcggaggggacaaggaaggtactcgaggtcacgcggctcctccg

SEQ ID NO: 114998 - DNA, 712 bp, Homo sapiens; identical to SEQ ID NO: 5556
  chr7:45613857-45614569
  hyper

SEQ ID NO: 114999 - DNA, 424 bp, Homo sapiens; identical to SEQ ID NO: 5557
  chr7:45614580-45615004
  hyper

SEQ ID NO: 115000 - DNA, 104 bp, Homo sapiens
  chr7:45615102-45615206
  hyper
cggtcttttgccgcacccatccccacagagggactgaaagtgggcgaggagagcagacccccagggcaagctccaaggccggctctgcgcgcagcgctgggctc

SEQ ID NO: 115001 - DNA, 647 bp, Homo sapiens
  chr7:45927931-45928578
  hyper
cccaccagcggtttgcgtagggccttgggtgcactagcaaaacaaacttattttgaacactcagctcctagcgtgcggcgctgccaatcattaacctcctggtgcaagtggcgcggcctgtgccctttataaggtgcgcgctgtgtccagcgagcatcggccaccgccatcccatccagcgagcatctgccgccgcgccgccgccaccctcccagagagcactggccaccgctccaccatcacttgcccagagtttgggccaccgcccgccgccaccagcccagagagcatcggcccctgtctgctgctcgcgcctggagatgtcagaggtccccgttgctcgcgtctggctggtactgctcctgctgactgtccaggtcggcgtgacagccggcgctccgtggcagtgcgcgccctgctccgccgagaagctcgcgctctgcccgccggtgtccgcctcgtgctcggaggtcacccggtccgccggctgcggctgttgcccgatgtgcgccctgcctctgggcgccgcgtgcggcgtggcgactgcacgctgcgcccggggactcagttgccgcgcgctgccgggggagcagcaacctctgcacgccctcacccgcggccaaggcgcctgcgtgcaggagtctgac

SEQ ID NO: 115002 - DNA, 30 bp, Homo sapiens
  chr7:45957365-45957395
  hyper
gcagacctgagccacgggaggctgctgcag

SEQ ID NO: 115003 - DNA, 30 bp, Homo sapiens
  chr7:45959686-45959716
  hyper
gtactgaaagtggcacgcggagttcaaacc

SEQ ID NO: 115004 - DNA, 2283 bp, Homo sapiens
  chr7:45959968-45962251
  hyper
cctgggattgcagtccgtgtgcacccccgtgcggggcgaggagaatctcctgtgtccaggatctttccaacagctaaacatcggtaccgctcccctcagctccggaaacctttaacccattttcactgaaagcgctttgcaatttacaagtactctgcacttagagaatcgagcaagtagagggccggctggggagggtccctccggcgaccgccttcacctttcccggagcgccttcagtttccccacatattatctccagtgagaagaaaagcggagtctcccgcagcggcacccagcaacccccaggcccttcggcgccagtgcgccgggtgctgcacgcagcgcacctggcgcgggcggctcacctggagctggcggcgctggcagcaggtaggcgcgcaggcggctgacggcactagcgttgacgcagagcccgcggccgtccagcagcgcctgcagcggtcgcgcctcgtcgggcgacggctggcagcgaaggccggagccacagcgctcggtgtagatgccgcacggctggccctcgctcagtgcgcacgtcaggcagcagccgcagcccggctcgcgcaccagctccgcgcacacggcgggcggaggcgcgcactgggccagtgcacgcgcgtcgcacggctcgcagcgcaccacgggacccaagcccgccgagctcgcgccagcccgcgccaccggcggcccgcggagcagcaccagcagagtcagcgcagcggcccagagcgtgggtcgcgcccgctgcatgacgcctgcaaccggggcacgctgcttggcaggctgggcgcgcagggatggggcgacagtacacggcgcgaagctgtggaatccaggcaggaagcggctgatcctcagcgcccagccgcagtgctcgcatctgggcggcccgggcgcgccggccgctatatagaagccggggtggcccaggacacgccccggaacggcgcgcccaggagtgggggttgggaggggggcgggtcggcgcaggcacggctgcgggggcccgtgcttcgccctgagcagccggggccgagctcgggggcgtgcagctcgagactcgcccgggcacctgctcctcgtgcgcacgcccggagcccgggtcaccttgtcgtctacaagaaccaaggtgtgcccggccaccccggcactccaggccacctcagcacccccggtcaccccagtcactcctggccaactcagcacccccgatctccttgaccccgccgcccttaccccttccgctctcggggtgaggtctccctgcggcgagccggtgtcggggaaactggcatacagcgctccgcattcgtgtgtacctcgtggagctttctaaaatttaattccgttggcaggcgaagtcttgggacatttctgacttacatttgggtctcagggagccaaggcactgcggggtttaatttacacccgctgggctgtttatatccccaggggcccacaaatacgcatctgaagatgcgcccggggccttcgcccctttccaggcttacttctcaacgcaagaagactctcacgtgttgctacaccgcaagtctccaattaagagtggaccggcaagcgaatgcgtccttaaggcagggcttttcaaatattttaaatgacaactgttcttcttgtcttgggtattctccctgattatgttttcaaatggagtttacacccatgacaaaagaataataaagacaataaactgggcactgctgaaacgtaattaaccaaatagtcctttaataggcaattttcattgtcattttttgaaggcgacttcgtattactgtattctcgatgcgttgggattctagcttatctctgcaatctaaacacttttcagtaaagttcgggggcgcaattgcgcgctgaggtcgctgtaactcctgtcggccttctctggcactcgagtttcttcagttttgtctgcgcaccccctcccttcggtgaccaacagaggacgctggtggtccaggattggattgaggattaaatttttcaaggcacttttccaaagagtttgtgggggtggagtgggaagcggtgagacctccgcgggaggagactttcctgaacgctgttgaaattggacgcttgccttaggaggtggataggtgacttgaaggagccctttgcagtttggagtagtaatagcaaatcaggagctcctccattcccctccagcacgaagccttgggtgaagttaatcttcattcatcatttctgtctctcctaatcgatctctcgcccagt

SEQ ID NO: 115005 - DNA, 154 bp, Homo sapiens
  chr7:47293660-47293814
  hyper
ccccttctcgggaatcgcttttctagctcttcctctacagtcggggagctgagcccccagaagccagcagtcacactagtagggcagggcagagcccgcttgaccccttccttgggaggggggcctagcgccggggcgcgtttcctcttcgcgc

SEQ ID NO: 115006 - DNA, 174 bp, Homo sapiens
  chr7:47294080-47294254
  hyper
gccaggctcaggtcgcggagtagcggcgctccggaccggcggaacacggcgtcctcggctcagcttcggaagcgcccccgccccgcccggcgagcccgggaatggcgcgcgcgccccctgccggccacaccgggaccagcggcacccacagagggcgcgcgggcagggcgcgag

SEQ ID NO: 115007 - DNA, 336 bp, Homo sapiens
  chr7:47621010-47621346
  hyper
gaaagggaaagagacgcactggagagcttgcctagaaaaagtaggagaagggtcttgagcctgcccattgaagcccctagctgcgctctccacctggagtctcgagacggagtcctagggagcaaagtccgctcggtcccgacagcgactgcgacatagctgctccggtctctgccctcagtccagggcgcccgggcgccacgggtcccactcgagtggtcctgcgccccagccagtccccaaacccagccagtcagcgcccccgtccccggactccggcgaagctggcccgcgccccagcccctgtcctgggactcctgccgagcccccgccccc

SEQ ID NO: 115008 - DNA, 222 bp, Homo sapiens; identical to SEQ ID NO: 5564
  chr7:47621698-47621920
  hyper

SEQ ID NO: 115009 - DNA, 1006 bp, Homo sapiens
  chr7:48074953-48075959
  hyper
tccggctctgggctacgggcagttgacaggcggcgcccgcgctccgcttcctgccctgattggcccaccgctccccctcaggcttcccctattggctgacagtgctccagccgcgcccgccggttggccgttcagccgttgccctggcgacgccgatgttgtggttccgcggcgcgctgggagtttgggtttggttggctgcagccagccagccgtgtaaaaactccaacgccgggcgccgcgggcagcacccacggagacccgcggggagctggtgagcctgagcgggctggaggacaatgggggcgcccactgtggtcccgggccttgtccactgtgcggagctcgcagtgcgggcagtgcgcgccggggctggagggaggggaccaccttgtcgccgggttgggatgagcacagggcgggatctccaagcctgcccaagtcccgcggccccttggttacctgttgcttatcctctctgtacttgctgtgtccctggcgtggacgtgcctgtactggatacccggcgtgacgtgccccctctgtgtgccccgcacgcacgtgtctctgctgaataccccgcgtgaatgtgcccctgctgtgtacccggagtgcgtacgtccctgctgtgtaccctgtgtggacgtgccctgctgtctacccggcgtgcgtgtgttcctgctgtataccggcgtgatgtgctcccttctgtttacctggcgtggacatgccccctgctgtataccctgcatggaagtgccagcgctaggcgatcgtaaggcgcctgcaggcgtgtcagggcgaggcgtacagaccgacccagagcgggcgcgcggattttgcttttgcagctgcagctcctggcaactggtcaagcaggcagcgtccagcgcacccgcgaacaccaggtccggcagcatctgtcttttcccgcagcgtgcagcgcctgaccatgaggaacacaagcaaggaacttcagggcgccacgcaccgctacgctccctgc

SEQ ID NO: 115010 - DNA, 263 bp, Homo sapiens; identical to SEQ ID NO: 5566
  chr7:48127994-48128257
  hyper

SEQ ID NO: 115011 - DNA, 30 bp, Homo sapiens
  chr7:48128609-48128639
  hyper
gcgagaagcaattgcgggctgagcctcccg

SEQ ID NO: 115012 - DNA, 267 bp, Homo sapiens; identical to SEQ ID NO: 44202
  chr7:49812750-49813017
  hyper

SEQ ID NO: 115013 - DNA, 283 bp, Homo sapiens; identical to SEQ ID NO: 5568
  chr7:49813809-49814092
  hyper

SEQ ID NO: 115014 - DNA, 629 bp, Homo sapiens; identical to SEQ ID NO: 5569
  chr7:49814121-49814750
  hyper

SEQ ID NO: 115015 - DNA, 133 bp, Homo sapiens; identical to SEQ ID NO: 5570
  chr7:49815116-49815249
  hyper

SEQ ID NO: 115016 - DNA, 116 bp, Homo sapiens; identical to SEQ ID NO: 5571
  chr7:49815656-49815772
  hyper

SEQ ID NO: 115017 - DNA, 294 bp, Homo sapiens
  chr7:50343195-50343489
  hyper
acttttcccaccccctcgggtgggcactcgcatcctggggccggagcctgaacccgggagccaaggggccccagttccagggacgtgaagctgagcgtacagcgggcgctcccagacactggggaaagtgctttacgatgtcccgagtccctccagtctcgccagcggggcgagcgtgagggtgccccgaccgaccagcggccccgggtgcagggtggcgggcccggcggcgcgcgtccccctccccctcctggcggcccgcacgtgtcgcccgcgccgcgcccccacgggtta

SEQ ID NO: 115018 - DNA, 880 bp, Homo sapiens
  chr7:50343974-50344854
  hyper
ggctgcggggcaggtcgagcagggaccgccagcgtgcgtcaccccaaagtttgcggggtggcagggcgcgcgctctggccacccgccgctctgggcggcagctggtggcaacgcaagggcgcggcgggggcggccggcgcggagggggccaggtacggggcccgcgggcggcgctgtgcgcgcggggcagccggtcggccgggagcgcgaaagcctggtctgagccggctgggggcggggagtgtggcggagaaatggggaacaatgcgagtgagcaacttcaggaagtcattgtgaaagaaagctgggaagagctccgcggccaagttagcaggacactctaacaagtgactgcgcggcccgcgcccggggcggtgactgcggcaagccccctgggtccccgcgcggcgcatcccagcctgggcgggacgctcggccgcggcgaggcgggcaagcctggcagggcagagggagccccggctccgaggttgctcttcgcacccgaggatcagtcttggccccaaagcgcgacgcacaaatccacgtgagtgttttcaaattgaatttcaataggaaaacttggggtaactggtgaatttaaaaaaaaaaaaacacagtaaagaaaagcggtaaggttggtagaccctggtgtcgctcaggtccgcctctcttttctgaggacagtgagagagttcacttctgtcaagcgtctgttgctctgcactgtgccagcaggtgcaggaccaggccgacatgggacacttctgagcagccccgctgtcaccaggagaggagttctagctcccaaccatatttaaatttatgtagacctacatatacccacggaagtcagcctttataaagtcgtgtgtaaagagtt

SEQ ID NO: 115019 - DNA, 30 bp, Homo sapiens
  chr7:50345140-50345170
  hyper
gaggcatctaatgaccgaaaaccgtagcga

SEQ ID NO: 115020 - DNA, 30 bp, Homo sapiens; identical to SEQ ID NO: 44209
  chr7:50428412-50428442
  hyper

SEQ ID NO: 115021 - DNA, 30 bp, Homo sapiens
  chr7:50518148-50518178
  hyper
gcggcacctgggcccgggcaccgccaccta

SEQ ID NO: 115022 - DNA, 965 bp, Homo sapiens; identical to SEQ ID NO: 44210
  chr7:50860137-50861102
  hyper

SEQ ID NO: 115023 - DNA, 514 bp, Homo sapiens; identical to SEQ ID NO: 5575
  chr7:50861127-50861641
  hyper

SEQ ID NO: 115024 - DNA, 1781 bp, Homo sapiens
  chr7:51383330-51385111
  hyper
gtccccggcgcgccgcgctgaaaactacaaagtccaccgggactgcgcgctaccccgcggcccagcctgcaccgctggccgggatgagcacggcgcacctggctcggggtctgaataatgagcagggctgctcgtcctgtttgagggaaattactctttctgagagtcaaatcctgaatgtgacgtgtaatccctgcacgcaaggtgtggggatagcaaacagaaaccgggagaggtttgggcaaaagcggaatcgcgaagacagggatgggccgccagactcgcgggtccgctacggatgtctgcgcctcaggcctggccccactaggacgccccttccactgccaggggagaccctggaataaaggcagggagggagagctgctgccatgaaaccctccgggcaatccgaacaccttccgagaacgcggggcccgggcggctgcgaagccggggagccctcccctccacgctgccgggagagccgatcctggggctgccgccgaggccgggagagggaagacttgatgggaaccggccaggggcaagcccgcagggaagaggccggagtcaaaggccgggcgtcccctcgctccccgctccacccctacggcaaacacttggggggcctgaggaaagctcggagctgagtgggggctgtgctggcggggacccccataaggacgcctgcatacaaaccaccccgcgcgaaaagtgcgctccggccccggcccgacacggttacctgggcaacgacccgggtgcccaaagtacacagcacgcaccaccacccaacaccagcacccaacaccagcaccgcaccacctgctccaccactaccaccagcacccgctggggcggcagagagggcgccctgcccgggagcgcgcggtgcggacgcgggcgtccgagcccagggaagccccctctccaccccgcccgaccgcggggccgcttacccggtcgggggcttggccgccgaggcgcgcggcgcgtccatggtgccgggggccgggacgcgggcggtgctccgggcccgccgagtcaggcgctggctaccgccgccaccgctgccgccctcattcactttttccgcgctgacccatcgtcctcccacgcgggccggcggaggacagcggcggagcgcggcggacggaaggggctggaatcgtctctagcgggcgggggcgccgggagcgcagggaggggctggcggcggcgcggggcgggggcgccgggagcaaggtgcgccgcgcccccgccccggctgctctgccgcgcccaccggagcgccgcccccgccccgccccgccccgcctgctcagagtcccgacccggcccgcggcgagcgtccggggaaggaatcctccggcacctgggccctgcaccgacacccgcgggtgcggcagagggcttctccccgtgctcctccacccctggggggagcgcgaccctctctgggcggagtgggggatcccggggccggcgcctcctggcggagttgggggaggggaaccacctggagcctggaggccgtgcgagggcgaggtgggcggaccagcccgggaggactgacgttggagggtgagaagtgagtgtccggcaccgctctctgacctttatccgtgcagcaaatgtctagtgcgtagggtcgcaaagtgggagtcccgaccgggagcgtcaggaacacctgggaacttgttagaaatgcagatttctggggcccaccaggtcccacggaatcagaaacagtgcgggctggagcgcggcctcgctttgct

SEQ ID NO: 115025 - DNA, 149 bp, Homo sapiens; identical to SEQ ID NO: 5578
  chr7:51693437-51693586
  hyper

SEQ ID NO: 115026 - DNA, 30 bp, Homo sapiens; identical to SEQ ID NO: 5579
  chr7:51793410-51793440
  hyper

SEQ ID NO: 115027 - DNA, 330 bp, Homo sapiens; identical to SEQ ID NO: 5580
  chr7:54609621-54609951
  hyper

SEQ ID NO: 115028 - DNA, 412 bp, Homo sapiens; identical to SEQ ID NO: 5581
  chr7:54609991-54610403
  hyper

SEQ ID NO: 115029 - DNA, 30 bp, Homo sapiens
  chr7:54610913-54610943
  hyper
cccttttgtaggtccgtgtgactccttttg

SEQ ID NO: 115030 - DNA, 503 bp, Homo sapiens
  chr7:54612303-54612806
  hyper
ctgttttgcagcaaaatttaccgagtttccgcggaacgtgacggcgaccgaggggcagaatgtggagatgtcctgcgccttccagagcggctccgcctcggtgtatctggagatccaatggtggttcctgcgggggccggaggacctggatcccggggccgagggggccggcgcgcaggtagcggagcccgccgaccccgcgtctccccttcgctcgcccggtcctcagggtgtccggcccggggctgggggccgaggtgctgcctggacacccctggggacctgcccggttctgtggaagcgagtgacccccagggcttctagggagggaaagggaatttgtcctggggacgcgaagttaaaacccagaaggaagtcctgctgcccagtttcttcctgttaaaccgggaagcgcctcctcctgtaagttctggtacttaggcagatgcccgccttgcccctaccacgctgccacatcccgggacatccgggagcccctttcc

SEQ ID NO: 115031 - DNA, 744 bp, Homo sapiens; identical to SEQ ID NO: 44218
  chr7:54614067-54614811
  hyper

SEQ ID NO: 115032 - DNA, 593 bp, Homo sapiens
  chr7:54731844-54732437
  hyper
gtgacctcccagcgccgtcctgggctgcaataatcaatcaatctgtgctgcatgctggcccccactggacagtggctaattgatccattcacgagggaagacgcagatctgacaggccgcgcgcagttccacacagccgcgctgggctcccgtcacctccctccgggatgagtgtggaaggcgctctgcaccaggagcactcagctttcccaggccgctgttgccgggcacaggctccgggcacacgagggggttccgtgcagcccgctttgcagagggaacggaggcgcagagagcctggcccgggcgcgcggccgcgagggtcgggagcagggaatccaccgctgcagctcagctctgggcaacgctgccacctgctgtcccgcgcagccgcacagcggcccgggcgtcccagcctccgcgagaaagactgtgcctgacctgcacggaggatgacgctgaccggccggtgatgaggaagccaccaagggaagcaattagacacaggacgtgctggacctgcaggctgcacaggccaagggagggccccaggcgcagcgggcggatctgcgggtccgcgggctgcgtccctg

SEQ ID NO: 115033 - DNA, 30 bp, Homo sapiens
  chr7:54826598-54826628
  hyper
aagccctggagccccgcgggccggccaccc

SEQ ID NO: 115034 - DNA, 30 bp, Homo sapiens; identical to SEQ ID NO: 44220
  chr7:55086194-55086224
  hyper

SEQ ID NO: 115035 - DNA, 1396 bp, Homo sapiens; identical to SEQ ID NO: 44221
  chr7:55086550-55087946
  hyper

SEQ ID NO: 115036 - DNA, 82 bp, Homo sapiens; identical to SEQ ID NO: 44222
  chr7:55087982-55088064
  hyper

SEQ ID NO: 115037 - DNA, 30 bp, Homo sapiens; identical to SEQ ID NO: 5586
  chr7:55322292-55322322
  hyper

SEQ ID NO: 115038 - DNA, 30 bp, Homo sapiens
  chr7:55323090-55323120
  hyper
catctcagtgtgaacggcgccctggaaaac

SEQ ID NO: 115039 - DNA, 30 bp, Homo sapiens
  chr7:55433021-55433051
  hyper
cctcccccatccctcggagactagccttgc

SEQ ID NO: 115040 - DNA, 116 bp, Homo sapiens; identical to SEQ ID NO: 5587
  chr7:55593335-55593451
  hyper

SEQ ID NO: 115041 - DNA, 190 bp, Homo sapiens
  chr7:55639103-55639293
  hyper
cttcattaatttaacgcaaatttccttcagaataatgaaactaaggagaaagttgaacaagccctgattcagactggacaccccagaattcctctagttcgcattttaaggaacctgctttagtgagaagtatgtggccccatccgaggatgcaatttcacagccaggagcagccgcggtccccgccagg

SEQ ID NO: 115042 - DNA, 403 bp, Homo sapiens
  chr7:55640381-55640784
  hyper
ttcccaagggaggtcgtcctgtcgccctagactaaacccaggaaggcttttaaaagaagcagagtctccgcggggggaagcttgttccctgagaggtggccgcagacgaacccactgctcagtctggcatcccgaagccgctccgctcctggctctccccgctgttcctgcgcgcagcgggggcagtgcccccacacccacgcgtgatgggaaggccggcctgggggtgggaaggcccaccgaaatagatggtccccacacctcactgcttccttggatgtggctattttttatgccagtgttctcctgctctgaccctacttgaacttgaccgcaaccggccccgccttgcaggccaccctcccgcagcagaaaactgtgcggagctcgcgctgtcctcgcc

SEQ ID NO: 115043 - DNA, 170 bp, Homo sapiens
  chr7:56019823-56019993
  hyper
cagcccaagtcatccgtcgctgggccggggagggggacaccgcggcggccccgccgagtgctacctgggcactgagcctgtggggagaggcgacccagcggggtggagagagataagggaccagtaacgtccagcgtttgtccgtggtattgagcgttctgtgggtcaaa

SEQ ID NO: 115044 - DNA, 30 bp, Homo sapiens; identical to SEQ ID NO: 44227
  chr7:56032097-56032127
  hyper

SEQ ID NO: 115045 - DNA, 30 bp, Homo sapiens; identical to SEQ ID NO: 44228
  chr7:56032952-56032982
  hyper

SEQ ID NO: 115046 - DNA, 210 bp, Homo sapiens; identical to SEQ ID NO: 44229
  chr7:56119351-56119561
  hyper

SEQ ID NO: 115047 - DNA, 212 bp, Homo sapiens
  chr7:56174010-56174222
  hyper
agtccggacggccgcgctttggtctcaaaccctgcgatggtctcacctggccggaggggccatgcgggaggtgcggcttcggcttccacgcggcatcctaggtaagcgacggctaggcctccggacgtgggacaaccaccgaagagctaagcgacttctgaggagaccggaagatgggaggcggggctggcctcaacgcgcaaccaaccagc

SEQ ID NO: 115048 - DNA, 86 bp, Homo sapiens
  chr7:56183615-56183701
  hyper
cgactctgcccagggcgagcagcgccgcgccgtggggggacgctcctagggtccccggggcactggttgggggaggtgttgggcgc

SEQ ID NO: 115049 - DNA, 305 bp, Homo sapiens
  chr7:56183856-56184161
  hyper
ggcccttgctgcgccctgccccgcaggccgggaagtcgcgcaggtagtagtagtccaggcagtcgtaaagctcctcctcgtagcttatgggtggcggcggccgagccagagcctgcagacgtggaagcgcccgctctgcgggcgcttccatcctgcccaggcctgtggccaccggcggccacctgcccgcgtctgggcgctcctggaagacccagcagccccgcctcgagttccgatgggctccgcgtgaaggtgggggtgccttcggcgacgccacagaggcggaccttcgacgacgtcacagt

SEQ ID NO: 115050 - DNA, 10 bp, Homo sapiens
  chr7:56355476-56355486
  hyper
ttgggcgccg

SEQ ID NO: 115051 - DNA, 73 bp, Homo sapiens; identical to SEQ ID NO: 44232
  chr7:56355715-56355788
  hyper

SEQ ID NO: 115052 - DNA, 30 bp, Homo sapiens; identical to SEQ ID NO: 5590
  chr7:57351679-57351709
  hyper

SEQ ID NO: 115053 - DNA, 31 bp, Homo sapiens; identical to SEQ ID NO: 5591
  chr7:57714733-57714764
  hyper

SEQ ID NO: 115054 - DNA, 162 bp, Homo sapiens
  chr7:57928158-57928320
  hyper
cagcggcggcgggggcaaaaagccgcagcggcaaaaagcctcagcggcgggggcaaaaagccacgaccgggggaaaaagccgcagcggcaggggcaaaaagccacggcggcagggagcaaaaacccgcgggggtaggcgcaaaaagccgcggcggggggtta

SEQ ID NO: 115055 - DNA, 31 bp, Homo sapiens; identical to SEQ ID NO: 5592
  chr7:63040542-63040573
  hyper

SEQ ID NO: 115056 - DNA, 79 bp, Homo sapiens
  chr7:63767195-63767274
  hyper
aggcgaccagagagccgggagccgttaagagactacaacgtccccgcacgcccggcgaggtgcgcagcgccctgcctct

SEQ ID NO: 115057 - DNA, 438 bp, Homo sapiens; identical to SEQ ID NO: 5594
  chr7:63767573-63768011
  hyper

SEQ ID NO: 115058 - DNA, 319 bp, Homo sapiens; identical to SEQ ID NO: 44238
  chr7:63774382-63774701
  hyper

SEQ ID NO: 115059 - DNA, 30 bp, Homo sapiens
  chr7:64023509-64023539
  hyper
gggtcccagccccgcgtccctgattggata

SEQ ID NO: 115060 - DNA, 157 bp, Homo sapiens; identical to SEQ ID NO: 44239
  chr7:64030434-64030591
  hyper

SEQ ID NO: 115061 - DNA, 22 bp, Homo sapiens
  chr7:64030697-64030719
  hyper
cggcaggagagttgaactccag

SEQ ID NO: 115062 - DNA, 125 bp, Homo sapiens
  chr7:64254686-64254811
  hyper
agggcctgagggggcgggttgttaaacgttatccaatcagggacgccgggctgggaacggtccaatcaggcacccagctggagcggacatgacgtcttccgggaggcggcggggtctttgtctcg

SEQ ID NO: 115063 - DNA, 224 bp, Homo sapiens
  chr7:64337833-64338057
  hyper
cggctctgcctgctccgttttcctctgcttagacaggctgacagccctgacaacctgtcgcccgagtgcgcctcgcgaatgcgcatgcgccagtagcggggctccaggcgcgagccctgagctgcgtctcgcctcacagtgaacgccactgttgcctggcgacgggtccctgcgtcatggcggagaaggggacctctgtggacgtgcatcgccgttggactctc

SEQ ID NO: 115064 - DNA, 357 bp, Homo sapiens
  chr7:64348610-64348967
  hyper
ccagccagaggagggcgctccctcgtcagatgtccctgtctctatgggggtccttcctcctgtgagctccgtggcctcgcacaggctgctcaacacctctgagctcaaattcctgctcccagggggaagcgggttatgaagatgagagggagagagagcgagctgtaagggaagcaggtgacacggggctggacagggaagggcctggctctcaaggaagggagcttctccaggtggcttcctcctctgtcaaatgggcccacgaataccctattgatggtgagaattaagagatacgaaacccattcgttctttattatgatgatttttattttcacagtagcacttagcacctgc

SEQ ID NO: 115065 - DNA, 840 bp, Homo sapiens
  chr7:64349041-64349881
  hyper
cgcgtcttcggcaaagtcttcggggtgagaggtccggctcctggaggacagcgggatgggagagtcccgttcacacccagccccgcagagccggatagaaacgctgccactgccgactccatgctgccgggaagtgcactgtggaggccactttctggaaagaagaaaccgtctgaacacaaagttgctcaagccatgttcatctatctgccagggaaacggaggccctgagtgccagagtccaagtcaccctgcaagagaaaactctggtggagcccagggtgtccagcccctgtccacccagccgccgtggtcaaggttaataagggcaaggggccaagcagaaccgcctacaaggaaccgagtgtccacaaagcaggaagcgaagaacgtttctcctacctagagcgcagccgttttgcggaaggcacagtccgggctccgggagccaagcagggatccgggcctcgttgcggaggggacgcccgggctgagctgagctcacttgctggcggcggcagcccctgcagtcatggggtcaccggcttgtggagaggggctggcgctgttccttggccccgctccccgcccgcaaagggccgggaggtcgggctcccggcagtgtccaggctctcgcccgccggtgcctgagccgtacccaccgcgtcccctccgccccaacagctggtgctgagggtccggcccggggtcatctggcagggccgtgcggctcctgcgggtgaccaggagcgcggagccccttcccactcgggctcgggtggcctcacctttcctggggctgcgtccccgcgggacgccaggttcccggtttcttctagg

SEQ ID NO: 115066 - DNA, 115 bp, Homo sapiens
  chr7:64349983-64350098
  hyper
cgctgttggaaagcagcggggctgctgctgaccggagccgcctgggtctgttctggaaccgtcgccctggggcccctccgccccgcaaacgctcgggatgcggtttgggagtgta

SEQ ID NO: 115067 - DNA, 466 bp, Homo sapiens
  chr7:64407780-64408246
  hyper
cgcatcgctctgtccctctcatgtcaggcaagccagttccggaccgcgtggcaccaggagccgccaggagccggggcgacccagaggtctccagcgacctggcgtccggcgaggacacagcccccaggaggggttagaccacgggagccggagcccgagtcccagggccgccgagccagtttagagtggtctccaggccctagtgggaaggggctccgcgcttctgggcgtccacaggagctgcatggccctgcccgctgacgcccggtcgggacgctccacaccctgtgtgggggcggaggggacgcggtgggtgcggcctgggcgcgggtgggctagagcctggagaccgccgggagcccgacttcctggcgctttgccctttggggagcggagccaaggaacagcgccaacctctctccacaagccagggaccctacgacccaccgccgcaggtgagctccgc

SEQ ID NO: 115068 - DNA, 21 bp, Homo sapiens
  chr7:64408292-64408313
  hyper
cgagccgagactgtgccttct

SEQ ID NO: 115069 - DNA, 30 bp, Homo sapiens; identical to SEQ ID NO: 5597
  chr7:64691764-64691794
  hyper

SEQ ID NO: 115070 - DNA, 478 bp, Homo sapiens
  chr7:64700147-64700625
  hyper
ccgccaggctgagcgcgagggcggggcggggcgtccatggcaggggcgggtgtcctggcgtcctcagtctcccagagggtggcgacccccgcgtcccgctccggcaccggcgggaagagagcgcctcccggaatctggtgggcaaagagggcggctccttacgtaggcgggcagagacagaagctggcgtggccgggctcctgctcccctattctccgacccccgccacctagcccgcgccacccagggctcctggatcgtctggctcggggcctcctccccgctgcgttccctccctggcggctgcagagccctcctgggcagcggaaacaaacttccccgagcaggaagcccgtgccccagcctcctctcggcaaggaccagcccgcggaacaccccggcccctcggcgcctgccctgtccttctggctacgggtccaggagggctggcatgagaccaatcgcgaccctgcggttc

SEQ ID NO: 115071 - DNA, 767 bp, Homo sapiens; identical to SEQ ID NO: 44248
  chr7:64712192-64712959
  hyper

SEQ ID NO: 115072 - DNA, 661 bp, Homo sapiens
  chr7:64734125-64734786
  hyper
tccctgtccataaagcgcactaatgctggggacggtgggtgtgggggagggtcctggagccttattcaatctgtcagagtaggaaccgtcctatcaggcacgcagttggggaggagggcgtggcttccagcgtttggcgcggcctttgtctctggctcaggccggagcctgagatccatctctactgtcccgcgtgttgcccctcgggagcactaggtgactttgtcacatcctctgttgccctgagatctggaggtactgggaaatgcatagctaagatgccaggacatcctggaaaccaggaaatggtgagtacgcggggttgggcatcccaagaggggagagtgggctggttgaaaccagcggaaccggcctccccacggtcagctcccgggtccacagacctgagtccccgttggcgcagctgggccctcagtacccccggagagtggggtggggggcggtgcaagacggcagctgagccagcggactttgacccctcaccgtcctcttcccgcgccgcgacctgcctgaaactctctgggcagcgctgcacccgcagccccgactctctcccagattgttcagggatgacagagggtcattagagcagaatcccgactcggtgggtgcgtgggaggagctgcggccagtggggtcc

SEQ ID NO: 115073 - DNA, 37 bp, Homo sapiens
  chr7:64838771-64838808
  hyper
ctcgctgcagccggcgctccacgtctagtcttcactg

SEQ ID NO: 115074 - DNA, 21 bp, Homo sapiens
  chr7:64973893-64973914
  hyper
cctccgcgcgcagtgccgccc

SEQ ID NO: 115075 - DNA, 148 bp, Homo sapiens; identical to SEQ ID NO: 5600
  chr7:64974033-64974181
  hyper

SEQ ID NO: 115076 - DNA, 741 bp, Homo sapiens; identical to SEQ ID NO: 44252
  chr7:64974273-64975014
  hyper

SEQ ID NO: 115077 - DNA, 143 bp, Homo sapiens
  chr7:65037618-65037761
  hyper
aaaagccgcagcgggcgaaaagccgcggcagcggggggccaaaagccggacgggcagaaagccgtggcagcggcgggcaaaaagccgcggcggcaaaaaggcgcggcggcgggggcaaaaagccgcggcggcggggaccaaaa

SEQ ID NO: 115078 - DNA, 30 bp, Homo sapiens
  chr7:65446021-65446051
  hyper
actgtcaccttctcccgatccccgggccca

SEQ ID NO: 115079 - DNA, 594 bp, Homo sapiens; identical to SEQ ID NO: 44254
  chr7:65509013-65509607
  hyper

SEQ ID NO: 115080 - DNA, 39 bp, Homo sapiens; identical to SEQ ID NO: 5604
  chr7:65541036-65541075
  hyper

SEQ ID NO: 115081 - DNA, 38 bp, Homo sapiens
  chr7:65579918-65579956
  hyper
ctggcagctaggggcgacgaggcgggacgtcatggaag

SEQ ID NO: 115082 - DNA, 30 bp, Homo sapiens
  chr7:65669791-65669821
  hyper
atagtgtttgagttcgttatttgcatttgc

SEQ ID NO: 115083 - DNA, 30 bp, Homo sapiens; identical to SEQ ID NO: 44257
  chr7:65670826-65670856
  hyper

SEQ ID NO: 115084 - DNA, 30 bp, Homo sapiens; identical to SEQ ID NO: 44258
  chr7:65878896-65878926
  hyper

SEQ ID NO: 115085 - DNA, 30 bp, Homo sapiens; identical to SEQ ID NO: 44259
  chr7:65958581-65958611
  hyper

SEQ ID NO: 115086 - DNA, 105 bp, Homo sapiens
  chr7:66093259-66093364
  hyper
ccatctgtgtgtcccggtggaaaaacggtcacggtggggagtcactgtcattattcattgaactcaagcgctcctattttgggttttctcgttcggatttctgcg

SEQ ID NO: 115087 - DNA, 138 bp, Homo sapiens; identical to SEQ ID NO: 5606
  chr7:66094048-66094186
  hyper

SEQ ID NO: 115088 - DNA, 30 bp, Homo sapiens; identical to SEQ ID NO: 44261
  chr7:66119836-66119866
  hyper

SEQ ID NO: 115089 - DNA, 30 bp, Homo sapiens; identical to SEQ ID NO: 5607
  chr7:66206243-66206273
  hyper

SEQ ID NO: 115090 - DNA, 495 bp, Homo sapiens
  chr7:66309612-66310107
  hyper
cagccggagctagccggcttgcagtggccattaaggagcttctgcccgaccttctgtttgtgcccgccaggcgacaaccgcttggtgtgcagcgcctgctcgctcagcgtcaggcccttgctgcgccctacgctgcaggctgggaagtcgcgccggtagtagtagcacaggcagtgggaaagctcctccttgtagcttactggtgttggccgccgggtcggagcctgcgaacactgaccggccggctgtggccacgcgtctgcgcatgcgcgcttctggacgacccggcagccgctcctcgagttccgattggttccacatgaggggcgtggctctctgtcgtcactggggagcgccttcgctgacgtcacaggcgcgggccctcggcgacgcaatagcgccaggccttccgcgtcgtcagagtgacggtacagtgcctggagctgggctgttttgtcttcagagtggtgcctggtaaccgcgacttccccgcca

SEQ ID NO: 115091 - DNA, 9 bp, Homo sapiens
  chr7:66386085-66386094
  hyper
cgtcccgga

SEQ ID NO: 115092 - DNA, 552 bp, Homo sapiens
  chr7:66386844-66387396
  hyper
gagagactcacgtacgtccacaaagttaaatggcatagtggtgttccctgtgtcaagcttggtaaatatccggaatggggtggattctttcttcatgtttttaataaaatgaggagtgatcgcaaggtaatctagaggcatgtagtttcagttcccttgatggggaccatcagaaataaaaccaggcttgttgtgctgttttgagtcgtttgaacgccgtacccatcggacagctggtgaggaggcctttgtggaagaatctgatgtctgagtttagttctcaactagcaggtgacagccctcactggctgatgaatggtgagcttctctgaagcctgctttgtaaagattgtggcttccgcctgaactgcttctttcctgcctcaaaggtgagccgctacgggagggaatgggaagaaaaactccgagactgctgatgaatatgtgataaagtggtttgtctcgatagcaccatcagcttgggtcagcttagggtctcagcatgtgtatctcatttgtagatgagtgttccatcagcgcttgaccgataag

SEQ ID NO: 115093 - DNA, 30 bp, Homo sapiens; identical to SEQ ID NO: 44265
  chr7:66461678-66461708
  hyper

SEQ ID NO: 115094 - DNA, 30 bp, Homo sapiens
  chr7:66461937-66461967
  hyper
tcctagtctcctgtcggctctgaggaggat

SEQ ID NO: 115095 - DNA, 31 bp, Homo sapiens; identical to SEQ ID NO: 5608
  chr7:68161974-68162005
  hyper

SEQ ID NO: 115096 - DNA, 2583 bp, Homo sapiens
  chr7:69062188-69064771
  hyper
cagtgccctgaaaaacgcacagctattttacccagagaggctggtcgcttttgttgatcgattctcggctgcagtcagctctttaatacaactttttatgagcatcagccacattgcggcgggaggaggggctgtggtggaaaaagcagggaaaccgccccccactcccaaaaagtaaaggaagcccgcggggcagggactgcggtttgccggtctaacgggtcctcgagctggggcggcggtcccggccccttcggccccgcccctcgcccgcggccgcctccgaggttcaagttcggcccccggctgttaggcctcgcgctcccggatctgaagccgcccgtgcgtccctaggtcccccgctggaagacgaggcgggaatcccaggggtcatccgggcgcggggtcgctcgtccacgcactgtggtgccacgtggaggaaaagtttccaactctgccagttggtgctcccactgcgcccaggcggagcaaaggcccgcgctttggcacccgctccccgttctgtctcctccagtcgcgccccctcccagggacgccccccttgtaccccttctctgaattcccttctctcctcgcagcgcaggtagccaagggaaaacacccttgggggctggtggggcttcccgagaaggcggcctcgggccggccaggggtagaggatccagggacaagtgtcccgaggaggatgtggggggcgcgcgcgcgaagtggcctgggagcaggggcccacacgcgtccccgctgcgacaggcgggatcctccggcggcttccacgccctggcgcgccaactctgcccggccgcggccgaccccacgcgggcgccccctccacgcccccgcccccgcccccctcacagctccccaccgcccccagtgcgcaggcccggccgccccagcgcgcatgccctgggctcgcgagcgcggccagcccccagccttttgctttctacacactctacaactggggagggggcgggggaggagggagcccagccgtccacgtgatcccgccggccggggccgcgggggcgggagcgcgcgccgagagaggcgcggggagggcgggtgcgcgggagcgcgcgcactcgagcgagcgagcgaaagcacgaacgagcgagcgagcgagcgagcgagcgggcgggcgcggggttgggctgaggcgggcggcggcggcggcggcggcggtgggctggccgcggagggggaggagcgggagctgcgcgaggcaggcgggcgggcggaggatggggcagtgcccgggctcccgctgcagccgcccggggacacgccgtgcaccctccggctcggggctttctcggcggcggcggcggcagcagcagcagcgttagcggcggcggcgagagcagcgttcccggctgcgcttctccctcaggcggggcggcgagagaagcggcggcggcggcggcggcacaccggtgtctctcccgctggagatttctttctgctttcctcatcgactgactgactcaccccctcccttttttgaggaagggtgacctcttctctgggactggaaaaaatatttttgtgaggaggggggcgggtggcagcgacagggtttgcttcttctcttctttcatctccctctcctcccccctcgaagaccgaaaagcaaaccccacaactgctccagcagcatcctccttcccttcctccgcctcccttctcctccgccgctcgcagtttcgccctctcttccgctaatgattgcattattatgctcccctctctggggggtctcgcccctcttgggtcgctccggagccccggcctcccctggctgcatttcttaaaaatttgggagcctgggagtgagttttctccgaggcgtgtgtgagaggcggcgggggtgttttcctgcgcgaggggcgggtgaagttcattgcccccacttttcccgcgacctttttcggacccgattttggatcgagttgaggggggcgcgggcgttttcggggggcggggggcgcggcggagaatggccgcggggagggctccccggagcctcccagtctcttgatcaaagcattccgctattctgatttattgcttgcttggtgagttatttttttttcctctaaaggagacctgtgtgttcagccattactttgctcggcgctgctcccaggcatctccgaccctcggtgctgtggggagccccacacttgggctcctcgcctctcgccctcgctccccgtccctcctcccctctctccgccccttcccccttttctttctcctctctttcttcccctctctcccttctttcggccgccgtctcccccgcgccctcctcggggcggagggaagccgtgaagggggagggagggctcggtgtcaatttttttttgtgtggctgcggccgtagcctgtggcgggcaagcggggagaccccggcgcagcagaaccatggatggcccgacgcggggccatggactccgcaaaaagcggcggtcgcggtcgcagcgagaccgggagaggcgctcccggggcgggctgggggccggcgcggccggcggcggcggggctggccggacccgg

SEQ ID NO: 115097 - DNA, 533 bp, Homo sapiens; identical to SEQ ID NO: 44268
  chr7:69064833-69065366
  hyper

SEQ ID NO: 115098 - DNA, 30 bp, Homo sapiens; identical to SEQ ID NO: 44269
  chr7:69538625-69538655
  hyper

SEQ ID NO: 115099 - DNA, 30 bp, Homo sapiens; identical to SEQ ID NO: 44270
  chr7:69553461-69553491
  hyper

SEQ ID NO: 115100 - DNA, 30 bp, Homo sapiens; identical to SEQ ID NO: 44271
  chr7:69677254-69677284
  hyper

SEQ ID NO: 115101 - DNA, 30 bp, Homo sapiens; identical to SEQ ID NO: 44272
  chr7:69807320-69807350
  hyper

SEQ ID NO: 115102 - DNA, 30 bp, Homo sapiens; identical to SEQ ID NO: 44273
  chr7:69827455-69827485
  hyper

SEQ ID NO: 115103 - DNA, 30 bp, Homo sapiens; identical to SEQ ID NO: 44274
  chr7:69917036-69917066
  hyper

SEQ ID NO: 115104 - DNA, 30 bp, Homo sapiens; identical to SEQ ID NO: 44275
  chr7:70041731-70041761
  hyper

SEQ ID NO: 115105 - DNA, 582 bp, Homo sapiens; identical to SEQ ID NO: 44276
  chr7:70060813-70061395
  hyper

SEQ ID NO: 115106 - DNA, 30 bp, Homo sapiens; identical to SEQ ID NO: 44277
  chr7:70084964-70084994
  hyper

SEQ ID NO: 115107 - DNA, 30 bp, Homo sapiens; identical to SEQ ID NO: 44278
  chr7:70085970-70086000
  hyper

SEQ ID NO: 115108 - DNA, 30 bp, Homo sapiens; identical to SEQ ID NO: 44279
  chr7:70092963-70092993
  hyper

SEQ ID NO: 115109 - DNA, 30 bp, Homo sapiens; identical to SEQ ID NO: 44280
  chr7:70119677-70119707
  hyper

SEQ ID NO: 115110 - DNA, 30 bp, Homo sapiens; identical to SEQ ID NO: 44281
  chr7:70142308-70142338
  hyper

SEQ ID NO: 115111 - DNA, 30 bp, Homo sapiens
  chr7:70158746-70158776
  hyper
tttccctgccatggcgcaatcttggaagcg

SEQ ID NO: 115112 - DNA, 30 bp, Homo sapiens; identical to SEQ ID NO: 44282
  chr7:70160670-70160700
  hyper

SEQ ID NO: 115113 - DNA, 30 bp, Homo sapiens; identical to SEQ ID NO: 44283
  chr7:70161177-70161207
  hyper

SEQ ID NO: 115114 - DNA, 30 bp, Homo sapiens; identical to SEQ ID NO: 44284
  chr7:70170333-70170363
  hyper

SEQ ID NO: 115115 - DNA, 30 bp, Homo sapiens; identical to SEQ ID NO: 44285
  chr7:70259342-70259372
  hyper

SEQ ID NO: 115116 - DNA, 30 bp, Homo sapiens; identical to SEQ ID NO: 5612
  chr7:70294249-70294279
  hyper

SEQ ID NO: 115117 - DNA, 44 bp, Homo sapiens; identical to SEQ ID NO: 44287
  chr7:70294496-70294540
  hyper

SEQ ID NO: 115118 - DNA, 30 bp, Homo sapiens; identical to SEQ ID NO: 44288
  chr7:70294766-70294796
  hyper

SEQ ID NO: 115119 - DNA, 30 bp, Homo sapiens; identical to SEQ ID NO: 44289
  chr7:70333599-70333629
  hyper

SEQ ID NO: 115120 - DNA, 30 bp, Homo sapiens; identical to SEQ ID NO: 44290
  chr7:70373975-70374005
  hyper

SEQ ID NO: 115121 - DNA, 30 bp, Homo sapiens; identical to SEQ ID NO: 44291
  chr7:70384684-70384714
  hyper

SEQ ID NO: 115122 - DNA, 30 bp, Homo sapiens; identical to SEQ ID NO: 44292
  chr7:70388688-70388718
  hyper

SEQ ID NO: 115123 - DNA, 358 bp, Homo sapiens; identical to SEQ ID NO: 44293
  chr7:70596057-70596415
  hyper

SEQ ID NO: 115124 - DNA, 257 bp, Homo sapiens; identical to SEQ ID NO: 44294
  chr7:70596453-70596710
  hyper

SEQ ID NO: 115125 - DNA, 504 bp, Homo sapiens; identical to SEQ ID NO: 44295
  chr7:70597367-70597871
  hyper

SEQ ID NO: 115126 - DNA, 133 bp, Homo sapiens
  chr7:70597990-70598123
  hyper
cgctgctggaggacatcgtgtaccggcagctgaatggtaaggacgcacgccggcgcctccggggctcgacgcgggcgggccgggcacagggtgagccccagggtccttgcgcgctgcgccctgtgcctgggag

SEQ ID NO: 115127 - DNA, 173 bp, Homo sapiens
  chr7:70598169-70598342
  hyper
cgtttcgggcagatggccggggctgctggaaagaacaacttgcctgattcttttctgtgccccacctgcaaatttggttttatcctggaaacatgtcagtacagttggctcccggtccccgcgtgcggactggaaatcattccctggcgactccagcccgagcgcagaaacta

SEQ ID NO: 115128 - DNA, 30 bp, Homo sapiens; identical to SEQ ID NO: 44297
  chr7:70601107-70601137
  hyper

SEQ ID NO: 115129 - DNA, 30 bp, Homo sapiens; identical to SEQ ID NO: 44298
  chr7:70611826-70611856
  hyper

SEQ ID NO: 115130 - DNA, 30 bp, Homo sapiens; identical to SEQ ID NO: 44299
  chr7:70651397-70651427
  hyper

SEQ ID NO: 115131 - DNA, 30 bp, Homo sapiens; identical to SEQ ID NO: 5614
  chr7:70734445-70734475
  hyper

SEQ ID NO: 115132 - DNA, 15 bp, Homo sapiens
  chr7:70868708-70868723
  hyper
cagttattccactcc

SEQ ID NO: 115133 - DNA, 30 bp, Homo sapiens; identical to SEQ ID NO: 44302
  chr7:70926804-70926834
  hyper

SEQ ID NO: 115134 - DNA, 30 bp, Homo sapiens; identical to SEQ ID NO: 44303
  chr7:71062903-71062933
  hyper

SEQ ID NO: 115135 - DNA, 30 bp, Homo sapiens; identical to SEQ ID NO: 44304
  chr7:71117865-71117895
  hyper

SEQ ID NO: 115136 - DNA, 30 bp, Homo sapiens; identical to SEQ ID NO: 44305
  chr7:71120821-71120851
  hyper

SEQ ID NO: 115137 - DNA, 30 bp, Homo sapiens; identical to SEQ ID NO: 44306
  chr7:71190931-71190961
  hyper

SEQ ID NO: 115138 - DNA, 89 bp, Homo sapiens; identical to SEQ ID NO: 44307
  chr7:71198520-71198609
  hyper

SEQ ID NO: 115139 - DNA, 342 bp, Homo sapiens
  chr7:71217027-71217369
  hyper
tattaaatgcagaagataaaacgtttcgcagcaccgggtccaaggaagtgcaatacaacagcaaaatgcaatggccgcagcagctcagtgatgggccgagactcgtcccgtgtggcggagatgctggcatcccccctgtggctccaagcgctgagcttggcggcggggacctggcggccccggctcggctcgggacaggcaggtgtggggagccggcgggttggagggcgttttgacgctagagggcgctcggtgcccggcgagggaggcggcccaggccggcgggggagcgcgcgcctctgcacttgcacccagctctccgctgcctcctgccctgtctgc

SEQ ID NO: 115140 - DNA, 30 bp, Homo sapiens; identical to SEQ ID NO: 44309
  chr7:71242950-71242980
  hyper

SEQ ID NO: 115141 - DNA, 100 bp, Homo sapiens
  chr7:71800656-71800756
  hyper
aggagctacgggcttcgacccaaatggaagaaaggcgccttcctcacacaagcctcgtccaagaaaaaagagcagtgggaaacgatggtgggctggtggc

SEQ ID NO: 115142 - DNA, 171 bp, Homo sapiens; identical to SEQ ID NO: 44310
  chr7:71800933-71801104
  hyper

SEQ ID NO: 115143 - DNA, 140 bp, Homo sapiens; identical to SEQ ID NO: 5617
  chr7:71802206-71802346
  hyper

SEQ ID NO: 115144 - DNA, 133 bp, Homo sapiens; identical to SEQ ID NO: 5618
  chr7:71802389-71802522
  hyper

SEQ ID NO: 115145 - DNA, 187 bp, Homo sapiens; identical to SEQ ID NO: 44313
  chr7:71802577-71802764
  hyper

SEQ ID NO: 115146 - DNA, 31 bp, Homo sapiens; identical to SEQ ID NO: 5620
  chr7:75924332-75924363
  hyper

SEQ ID NO: 115147 - DNA, 1004 bp, Homo sapiens; identical to SEQ ID NO: 44315
  chr7:75931591-75932595
  hyper

SEQ ID NO: 115148 - DNA, 344 bp, Homo sapiens; identical to SEQ ID NO: 44316
  chr7:75932654-75932998
  hyper

SEQ ID NO: 115149 - DNA, 30 bp, Homo sapiens; identical to SEQ ID NO: 5625
  chr7:75933279-75933309
  hyper

SEQ ID NO: 115150 - DNA, 30 bp, Homo sapiens
  chr7:75947246-75947276
  hyper
ccaagggcccaccacgagcccaaggctcca

SEQ ID NO: 115151 - DNA, 30 bp, Homo sapiens; identical to SEQ ID NO: 5626
  chr7:75947513-75947543
  hyper

SEQ ID NO: 115152 - DNA, 30 bp, Homo sapiens
  chr7:75947884-75947914
  hyper
gccagcttcagagccgggaagggtcggcag

SEQ ID NO: 115153 - DNA, 30 bp, Homo sapiens; identical to SEQ ID NO: 44319
  chr7:75987592-75987622
  hyper

SEQ ID NO: 115154 - DNA, 30 bp, Homo sapiens
  chr7:75988197-75988227
  hyper
tggagcccaagtgccggagaggaccgaccc

SEQ ID NO: 115155 - DNA, 30 bp, Homo sapiens; identical to SEQ ID NO: 44320
  chr7:76022355-76022385
  hyper

SEQ ID NO: 115156 - DNA, 252 bp, Homo sapiens
  chr7:76145288-76145540
  hyper
atcaggcccttagaccgtcaccccagtaggctctccaggacccaggagcctccatcacctggaaggaccctctgtgcaaaacctcaagcgtccatctgtgcacaaggccggtggttcccgtcgtcgccactcggggtcgccggtgagccgcagccaggccgcctcacggccagtgtgcatgctcgctgctattcgctgccccttctgcctccgaggcggtagcagatgccacgttggcggggtcggtgaagg

SEQ ID NO: 115157 - DNA, 30 bp, Homo sapiens; identical to SEQ ID NO: 44321
  chr7:76751285-76751315
  hyper

SEQ ID NO: 115158 - DNA, 388 bp, Homo sapiens
  chr7:76751572-76751960
  hyper
gttggcttgactaggcgatgtaaacatcagctgcgtaatccccaggggcaagttgggatttgaaagctctgaactctgacctggaccccttgcctaagtccaccccctttcgctaaggccgacgggatacgtagttctaaagcggtggaaagtcgcagagctccgcctcttagaaaccacatatcccaggaggcaatgcgcaggggagcacgggtaagagggcaggtgttagaatcgctggaaaggcgggcgccctttgtttcaagaccattggctattggaggggcggtacatgggaggccactggccaatgggaagcacggaagggggcaacgagggtaaagctgcatggtcaccttggataccaaggacgcgacttcttgtttgg

SEQ ID NO: 115159 - DNA, 422 bp, Homo sapiens
  chr7:77167455-77167877
  hyper
agctggtctcaaagcgggcagggtaggacttaggccgtttctggggtcgcagtcatgatctccaacgcttgggaaaggattgcccataaggaatctcatgggtttacctaatttccatttacccgcgtcccgcttctcctctcctgaggcccaggtttgaggtggtcttggggtccgtgtgactataggttcaggggataagtgtgggtgggggaattatcctgaaggaagccagccgacttcggactccccaggggatattgccgaaggcggaggggatgtgactatcacttcctatccggggtgggggtggggaacttgggaacaatagtcctggtggggcggaggcgacgctacgggccgaagccctgaactgggagataaccttcccagcgcccccccgcctccgccaccccctactt

SEQ ID NO: 115160 - DNA, 30 bp, Homo sapiens
  chr7:77168097-77168127
  hyper
aggaggcggtggttgcggctgctgctccta

SEQ ID NO: 115161 - DNA, 179 bp, Homo sapiens
  chr7:77325998-77326177
  hyper
gccggcagcaccttcgcctcagagctatggcagccccgcgtcttggagctttgcccctctgtctgctgctccctccccgtcctcttctcggagcagtttctctttctccgctggcacggccgttccctcctcagcctccgcttccttgtctcagccggtgccgcgcaaactgctggtcc

SEQ ID NO: 115162 - DNA, 30 bp, Homo sapiens; identical to SEQ ID NO: 44325
  chr7:77326827-77326857
  hyper

SEQ ID NO: 115163 - DNA, 103 bp, Homo sapiens
  chr7:77427836-77427939
  hyper
agaggtcccttttccgcggtaattggaccatttgtccgccagtgcaaaccaaccgacctttccttactttcgggttcgacagaaaggcggcaataaaaagacc

SEQ ID NO: 115164 - DNA, 149 bp, Homo sapiens; identical to SEQ ID NO: 44327
  chr7:77428715-77428864
  hyper

SEQ ID NO: 115165 - DNA, 30 bp, Homo sapiens; identical to SEQ ID NO: 44328
  chr7:77648552-77648582
  hyper

SEQ ID NO: 115166 - DNA, 37 bp, Homo sapiens; identical to SEQ ID NO: 5628
  chr7:77649268-77649305
  hyper

SEQ ID NO: 115167 - DNA, 30 bp, Homo sapiens
  chr7:77649527-77649557
  hyper
cggggaggccaacgcgaagcccaggcctaa

SEQ ID NO: 115168 - DNA, 1525 bp, Homo sapiens
  chr7:79081509-79083034
  hyper
tgagtaaagtccatgcggacaaccattcatctcctccgacaaccattcatctcctccgacccccgcccagcactagactgcgctcctagcaccgcgccttcttccggagcctcctcccccgggctggctaggggtgagcgcaggggttagtcagtacgcacgtgacgcgcgatgcccacatgacacgaccgtgagcgggggagggggacacggagtgaagaaggggaaaagttacagaagacccgtcaaagcgcccaaagcaatttgtcccttcttttcttcgccagcggtggctcacggatccctaagggacagctggggacccaggcgcccccagcccagccccagaaacgctggacgcagttctccgctcaccccaccaccttctcttcccagacccgctggtgatgccgctgcaccctgaagttgctccttccttctttccctcccttcctcccattctttctttcttttcttccttcctcccttccccaaaagctcttcatccgcttcgggtgatgccactgacgcacattcaatttgccccagcagctctgaggaggtcagaccaggccgagcaccttccaaaggggagggtctaactgagcaaacaaagttgcacgccacaccacaacctgcccctcccctccctttagcccccaagtcgaatccccggcgaaactcacttgcactgcgggtgctctctggcccccaccccatcatcgcgcaacacacccccttcaacatgcgcggccaccctttcattgccctgcgccccgagcggtcccaccgcccggcaaaacactgagcaagccgctgctctcaccttgcttgacacacttgagccggagggggtccttgcagtgtttgatcacggccagcacgtccctgatggtgagccccgccacgggggtctcgttcacctccagcagcagctcctccgacaccaatttgctgccgctctcataggccaccttgccgggcttcacctcccccaggtaggggaactgtccattctcggcgccccccttcagttcaaagcccagctggccctccgggttcctgccaatgacactctcatggactttgctagtccagtggcttttctttttcaagcttttggacatggcagtggggcgagtcgcctcagttcctgggctccttggggttaggggggctggtggtgagagaatgaggatggaggagcaagggggcccagggggaagaacagcagactttgccttcgcccccctctattcggtgctttccctcttctttggatggagtgtggacgaggaatggggaggatgagagggacggctgggcagaggtaggagagcttggatgaggttgtgctgtcccttgaatgacactcaaggctgtggccccgcagcagaggaagcagtggtggtggcgtcggcggcggcggcggcggcagccggagcgagcagtagccgagctggtgagcgggtgtggtgggggtggggaaggagggtagggatgccgggggccactcctgcgtggt

SEQ ID NO: 115169 - DNA, 951 bp, Homo sapiens
  chr7:79083190-79084141
  hyper
cgcgccgggtggggagccacggagggcttcgccgctgcctccctccctccctccgcagcttgacccggtagtgaaggcagagagagaggcaggctgggtccgcctggcagcctacgggaggaggcgggagccgggaaggaggggagcctaggcccggcgtggggaggccggcaggaagggcctcgagcccagtgcggacctttcttcagcctctgtgcgaccgagccgcgcgccaggctcctgtgcgaggaggacgcgctgactccctccgacctgggctccgatggagcagaaatagcgggacctggacttgtggcgcgcctggtgccacatctcgggctctgcgagcgtcctggcgcgggatcctgccgtgagaaggagttggggcgggggacccggcggggcattgcgggagaaggcctgggatccctgggagccttgtagcgtgggggagttcactgtgtagagaggtttcatgtcttcatctatatagtcacttatttgtcttaaagttctcgaaattccctcttagagaaggagaaagttagagaactggaggctgcgtaccctgattacgcagaagggaagcagcctcgcattccccggggcaggcccccgcccgcgcgtcccgccagtaggggaatttagcggacggctgcggttgtctggtgaaaggctatccaaggataaggggcttcacttttcccaagtaggggaaagagaaggggtctacagggctaggggtggagggagcggatgcagtgagcagcctccgcagagaaattgacaatttaaccagggacctgcggcagagacaaggcggagacactcccttgcccaggaaagccgccagagtccggcttgtacctggggaagaatccttaagacggtctggcccaacactcctttgctcacagagaaaggggagaagactcccgagggtgaaaatgg

SEQ ID NO: 115170 - DNA, 31 bp, Homo sapiens; identical to SEQ ID NO: 44334
  chr7:79763898-79763929
  hyper

SEQ ID NO: 115171 - DNA, 1320 bp, Homo sapiens
  chr7:79764136-79765456
  hyper
cgcggaggccgagctcggctgggcttggcgaggctgcggcgcggccaccggcgggagtgcagcggccactgtacccagagattcaaaaccccaaacccgggacttgggggcgctgagccgggccgggaagcagagcctggtcgtgaggaacagccgcccgttgctgtctgcccctttgcggacagcgtctccctcgactccgcttaggaagtggtgggggcggcgtggcccccgtcgggaggcgttcgaacgcccgctaggagagagaaaggattcccctgtgcttggagcccgcactcgggcgcggagggagcggcggcaggctctcgctttcggcaccatgggctgcacgctgagcgccgaggacaaggcggcggtggagcggagtaagatgatcgaccgcaacctccgtgaggacggcgagaaggcggcgcgcgaggtcaagctgctgctgctcggtaagggcggccgggtcggggcccgggggtcggcgggggaccgggtgcggcgctgcgcggccctcggcgtttggaaacccggagggaagggggaggaagcgcccgaggaggcttctgagcgggagctgggtccggcggtgcggaggcaaggcgggtccccctctcccggtgtctggtctctctccgccccggcgggcgaggactccccgcggcggggcgggcgcgtcacttcactcggatgctttcgtgcgacccagcaaagagcccaggcgcgagtccgaggcggcgggtcgcgtggaaaccctttgctttgaagtttagctcagccttgtaaagatgaaggggcattcgcggctagaaaatgaaaacacccccccccccgcgccaccaaccccctcccggaaaacccttcttcgtgtgcggtgtaggttgtgtttcgactgtggttttctcatgcccagagtgccacgtttggtgaaatcagtgcaccttttgtggggcctctgagatggggctgaagcgtctttcctgttaacttcctatggcgactccttaagtggtcaaggagcgctgattacattccccctgcgctgagaaaaggctgcgctggatgcttgatttttcttgctgtgggggcatggaagccacccaagtggggttgggaagctttgctttagtagtaggcaaggcagatactcgagtggtgaaaactgctgtgaaagagcgagagggtcacgccagacaacagggttctgtctccgctgccaccgtttctgatgaatgagatttgccaggtacacgcaaggcttttatttgttcttagcactgttctgttcgtgaaacgctacgtggaggtcttttc

SEQ ID NO: 115172 - DNA, 857 bp, Homo sapiens
  chr7:80548006-80548863
  hyper
gcttccctgacaaaccgcgtgtgttcttaagaaaatgtccaggcttgagcataccaatgtatgaaaaatcaatatacaggccaaaaaagttatactttgctaaatctgtaatgcggaaaatgaccaatttagcttaccgaggttgaaagaaatcagcacggaaaagtcatcagtttgctaccggggttggatgcgcttgtgtctccagtccttttcccagacgaccttattttctagcacgtcgcaaaggtgaaattctttcttcccggtcctctgagtttctttgtaaaggaatctcagcgctgcagtgccgcggcacccggagctcttctccgcgtcgctcaatcaagcacctcggagtgaatggaaagtggccggaggccgggggcgagcgctcttggtgtccgattacagcgccgcggcgcgcggctccggctgccccggcgcgccgccctgcaggctcgcatcaccaccgcgcagccccggccgcatctccgccagccgcgaggccccaccccgagcgcgcccgcgagagcctggcagggagccgcgggggcggaccgggcggggccgacccttagagctcgcggctggccagacgcaagaatgcgcggccgcaggctggagccctagctccgcaaccctgctcctttcgcagtccgcggcggagtgagcaacttgctgggtgcgctccacggtttttgttgccggcggctctcgaagacttacacaggctttgcctggccgtaaatatcaaagtgcaaagcagttgtggttttttatttttgccagggaaggatcactgcagccttttaaggcaaagagatgcgtttttaaaaggacgtgagttttgtcct

SEQ ID NO: 115173 - DNA, 544 bp, Homo sapiens
  chr7:82072017-82072561
  hyper
ggaccgcgtgtctgccgacacttagatgtttcaaataatgggttggggaggttggatcgcgtggtcccagtacctgcgagccccctgcgtggacagcacgctcggccgcggggagccagcacgcgtctaatcggaaggctgtcaagtgcatccagtaacgtgggataaaacgagtttgggcactacagcaattaaagagcatctccgaggccaagtgcgggggaagtccacgctacctcggcaagcctgaaattacctgtttgtaaattacccaaccaaaacataactttttattgaactgggttgaatcagagcgggtgagctggctggaaacttttttccccagtacggctgcactctgaagtctagagaatcccgttagagacgggctgagacgccgcgagtcgtcggcgggcgcttcccgggacagtcggcccccagtgcccggccccgtggaggcgcccgagacgccggttcgggacgcattccagcggcgagcggcgcgcaccgcctgcccggcgtctccgcatccgagcctggctcc

SEQ ID NO: 115174 - DNA, 454 bp, Homo sapiens; identical to SEQ ID NO: 44339
  chr7:82072646-82073100
  hyper

SEQ ID NO: 115175 - DNA, 270 bp, Homo sapiens; identical to SEQ ID NO: 44340
  chr7:82073318-82073588
  hyper

SEQ ID NO: 115176 - DNA, 447 bp, Homo sapiens
  chr7:82791562-82792009
  hyper
acatatatgtaccgccgtgctggcacatacaggctggcacatatgtgcacgggaagctgtacatatatgcccggacatatacatcatgctgtgcatgcctgtgcatggaaggcgactccgcagcggccggggggacgcttcccttgggcagcccctgcgcccttgacatgacagcggcgatctgtctcctctcctcttcgctcagctggctcaaatccgcctccatgccggccgggatcgcggtgtgagaggggctccccgccccgctagctcctcctccagccgctgcggccgccgccagcccttcggggagcccttccccttccaagctcgcctcgttgcccatggctcagggagactcggggccgccgcgctccctcctcgcgccgcgtcccagtcgagaagcccgcggccaggggagcagtcagagccggggtccgcctcggg

SEQ ID NO: 115177 - DNA, 297 bp, Homo sapiens; identical to SEQ ID NO: 44343
  chr7:82792128-82792425
  hyper

SEQ ID NO: 115178 - DNA, 439 bp, Homo sapiens
  chr7:83277831-83278270
  hyper
ggtgataatgtgccccgcggatgccatgctgccgtgttcaccgtccaagccctcgctcctcactttaaggagggtctgagttttacttaggacttccctccaggggcagcgtgcgagaggctttgtcagaaatcgaacgcgttgtcatcagaaagcacagttccgaagtgccatttgtcaggctgtatttggctatgtaaaacctttctttcctcgggacagttgtttataagccgggagcaagaggacattccaaagagtgagtcttcagagccatgtcctgtctagagcgctcttcagcaactacgccggtagattcaggaagaagctgtatttttcagtcacttgggcaaagctgttcattcagaaaaaaaaaaaaaaaagagagaaaaaaacaaaaccgagcacacgcactcccttctcccgtggaggtcctctc

SEQ ID NO: 115179 - DNA, 30 bp, Homo sapiens
  chr7:83824358-83824388
  hyper
agagagagagaaaccgtgagcagcgcggac

SEQ ID NO: 115180 - DNA, 291 bp, Homo sapiens
  chr7:84814640-84814931
  hyper
cccctcgtctctgcgcgcccccaccccgccatcccccgctagcgcacacatgcaggagaaccctttttaggctaaaccggaaagtttaggtcttctcccctcttcttttgcttgtgcaaatagcactaagctaaacggaaagtggtggggttttggtgatgaaataagagtccacgcacagaagcttgccttttattaccgcttcgctcgaggcgaaatcgctgaaagttcggctatttaactcctgtccccataactcggaatcccggacaccagcggccccagctgctg

SEQ ID NO: 115181 - DNA, 241 bp, Homo sapiens; identical to SEQ ID NO: 44347
  chr7:84814985-84815226
  hyper

SEQ ID NO: 115182 - DNA, 1133 bp, Homo sapiens
  chr7:84815396-84816529
  hyper
cgcccattcctcttccaaaacgctacaacaaaaaccaccacgcttcccttccttcttccttgcccctttcccttctcccagaccaacaaggaaaggagcgagcgagggcgcagatgccctttggtcaagtactccccggatgttcccgactaaagcgtctccaaatgaacctgcagcctgcggaagccggggacacattcatagacgctctctgctgcccagaccaggaggggtggtgggggaaccaggaagccagggagagagcaaagttcctggacgcgtctcaggaggaaaactttgtgcagtgctgccaggcggaggctcgtcagaaggctccgcagctgctgaggcggggtgggactgcgccccaggggccgcgctgaagctggcgccgcgattactgcgcaccgatttcgcccactctctgtccgctcccgggagccttctctgtctcaggacggttccttatctcccaaaccatgctcgtcctccacttcggacccacagccacccccaaatcccggctatccccgcttagcaccgcggtctccagcacaccctcccactggagtagcaggtgacccaaaccagacttacctgctgtgaactcttctctccctctctcttttcctggtgccttttcagggagaggggaacgggatgcaggctgaggtccagcggcgcggcaacccggggcaccggcgcgcgttcctctgagccgcagccctggctgagcaagcggagccgccggcagccctggcagagccgggaagctgcggccgcaggggccaggccgggaggcagggggcgctgctgcctcccccgagagccgcgctaggacaggcggagagcaaggcaccagctggagctttggggaggagagggtggcgaggaaaggcacgctccaaacaggagggcggcttttaagtttgtggtgtgaccgcagcagctgtcctgggagagactcagtctttctaaaaagaggatgctgaaaacgccggggattacctttccccttccgatctcctcccccagccctcgccccctccttccactgcgcacgccagaactcccaagcgtgcagaagttcatccctgctgcgcggaggctgccagcagcgtggatttagaggt

SEQ ID NO: 115183 - DNA, 1073 bp, Homo sapiens; identical to SEQ ID NO: 44350
  chr7:86273043-86274116
  hyper

SEQ ID NO: 115184 - DNA, 141 bp, Homo sapiens
  chr7:86274257-86274398
  hyper
cgtggggcaggcgcagccgggaaagttgaggtagagcatggaccagtccctacagtcctgactggagtgggaagggtggagggcagaggcgatgtgggtgtgcatgagtgagagtttgtgtgtgtgcgcccacgtctgtgt

SEQ ID NO: 115185 - DNA, 156 bp, Homo sapiens
  chr7:86781442-86781598
  hyper
tatgaaaatcggcacgcgaggcctaagtgtccccagaaccagaggaaccacagttgcgtcatagcagaaggacctcttttacagcatcagcagtgggatagtcagtgccgagttttcctggcaggacagccgacaaccaccgccacagaccagtac

SEQ ID NO: 115186 - DNA, 61 bp, Homo sapiens; identical to SEQ ID NO: 44352
  chr7:86782565-86782626
  hyper

SEQ ID NO: 115187 - DNA, 148 bp, Homo sapiens; identical to SEQ ID NO: 5645
  chr7:86848938-86849086
  hyper

SEQ ID NO: 115188 - DNA, 27 bp, Homo sapiens
  chr7:86849161-86849188
  hyper
cgccagggtagcgccgcccgccgctcg

SEQ ID NO: 115189 - DNA, 110 bp, Homo sapiens
  chr7:86849526-86849636
  hyper
atctaccccagggccggcgtgctcgccgcagctcccgccgctgctctccccgcgctctctgccggaactgcagcaggagtacggtctaggcacagcgagagggagaatcc

SEQ ID NO: 115190 - DNA, 30 bp, Homo sapiens
  chr7:86849931-86849961
  hyper
cccgcgggccaaggcgccgcattggctgcg

SEQ ID NO: 115191 - DNA, 278 bp, Homo sapiens
  chr7:86974659-86974937
  hyper
gatcctgggtcaggcgccaagctccccagcatcatgcaggaagctgcagccccgcagagttaggacagctcatttggcacccggcgagcccttcccaggcccgcagcccagaatagagccggggcccaagacgcccactggagacagggtcgggtcccactaccgcgcaggcccggctcgcccccgacgtcaggcacggggcgggacccttgcagctgtccgtccagtcccgttccccggaaagtgaggggcgggaccctcgcggctttctatccaat

SEQ ID NO: 115192 - DNA, 30 bp, Homo sapiens; identical to SEQ ID NO: 44356
  chr7:87079053-87079083
  hyper

SEQ ID NO: 115193 - DNA, 442 bp, Homo sapiens
  chr7:87104709-87105151
  hyper
gcccagttcaaagtcgccctccgcgctcgtggggcgccaggctgttccgttctttgccgcctcaagatccatctcagcctgaggagaaaccacagcctcagaaccaagtacaccctctccggcggcccggcgcacgagtcgcggggcccgggggcactgggtggaggtccggccactcccgccccgcgccccacgtcccgggtctcccttcgaggccagacgcgcccggacctctctcacctcgaacctcgcgcgtgtctggcagggcctctggacgcgcgggcgctgcagcagaggggcctggactttgctcgccgcggcctcgcccccgcccccgcccccgccccccacgcgcgtccggcccgggaaacgcctaccgttgcagccagggcgagggccgcggcccgcgagagcagctcccgccgcccgcccagctctctcc

SEQ ID NO: 115194 - DNA, 30 bp, Homo sapiens; identical to SEQ ID NO: 44358
  chr7:87124806-87124836
  hyper

SEQ ID NO: 115195 - DNA, 1017 bp, Homo sapiens
  chr7:87229459-87230476
  hyper
ttcttctttgctcctccattgcggtccccttcaagatccattccgacctgaagagaaaccgcagctcattagccaaatgcatgagcctcaggcgcgctggaggtgagactaacctctagtcccccgtcgaagccagagagcagtaagagggagcgcccgccgttgatgccccagctgctctggccgcgatgggcactgcaggggctttcctgtgcgcggggtctccagcatctccacgaaggcagagttgggggtctggcagcgcgttctggactttgcccgccgccagtgcgattctccctcccggttccagtcgccgcggacgatgcttcctcccacccaccgcccgcgggctcagagagcaggtccccgcaccgcgcgggctgtgcgcgctccgggcaacatggtccagtgccactacggtttgggcgctgctccaggagctcctgagtctagatctaaccccacttggtccccatggacttgccagaggacttcacactatccacgcctcaagaagcccttctcccgtgaagaccaagttcaggaaatctgaaagcctgacacttgggaactgtcccatagtagctcccagctttgcgtgcccctacctcgcgctccttggaacggccaccaagacgtgaaattttggaagaagatactccgactttagtggaaagacctaaaggaaacgaacagcggcctctgcttctttgagcttggaagagccgctactcgaatgagctcaggcttcctgtggcaaagagagcgaagcggctgtgctcagcccacgccccggcgctgttcctgcccagccaatcagcctcaccacagatgactgctcccggcccggattgactgaatgctgattcctcgagaaactgcgaaacaggttgaatttccaggaggaatgttctggcttccgttgcacctctctagaaagggcaagtagagaaacgcgcatcagctgaatcattggggacatttcaacttatgtagacacgtctttcaaagttc

SEQ ID NO: 115196 - DNA, 987 bp, Homo sapiens; identical to SEQ ID NO: 5649
  chr7:87256906-87257893
  hyper

SEQ ID NO: 115197 - DNA, 536 bp, Homo sapiens; identical to SEQ ID NO: 44361
  chr7:87257922-87258458
  hyper

SEQ ID NO: 115198 - DNA, 30 bp, Homo sapiens
  chr7:87505086-87505116
  hyper
aagtgacctggaggcgttctgcggtggcgc

SEQ ID NO: 115199 - DNA, 68 bp, Homo sapiens
  chr7:87505446-87505514
  hyper
gcaaacctagaaggcgggaataaccctggtgacgggcggggccgggctccggcgctaactgcatccac

SEQ ID NO: 115200 - DNA, 30 bp, Homo sapiens
  chr7:87506477-87506507
  hyper
cgctcgtggcttttcgcttcaggattagat

SEQ ID NO: 115201 - DNA, 1376 bp, Homo sapiens
  chr7:87563188-87564564
  hyper
acagctctttaaggacgatgcagatgaatactggctgctgtaacggcccagttggtgcatctcggatgccaggaggcggtccagtgctgatctctttcttttgcccttccctcccgcccttccagtctgtgggatatagaggacctcacagtcacgaggtcgcgacggtccgtgccgtcgtggagacaagcgggacacggagagagaactacatttcccagctgactctcctgcgcgcgcccttgcctgcgcgcggggggcgagtgcaccgggcgctcgctccctgccgagctcttgtcgcccgcccgagcctttgccaggggatgaggtgggaggcgctagaaaccacttagctacagccaaccgcccaatgcagcactcgctcgctccccccgccagcggaagcgtccgcgaagcacaatgcagcactgagccgcggtggaggttgcagcgccacggccgccgcagcaccggccggggctgggtggaggtggccgcggggaccccgggggcgcggagcgagggaaacggactcggcggcgccggcatgaggagctgagcgtctcgggcgaggcgggctgacggcagcaccatgcaggcggcagtggctgtgtccgtgcccttcttgctgctctgtgtcctggggacctgccctccggcgcgctgcggccaggcaggtaagttagccgtcctctgtgcctttgggccataccatttcccgggaatctttggagccctcaggcgtattgaaaagggggcatccccatttcccgagtgcgcggggagattttttttttttttttttttaattcgggagggtggtgagaagtggagcaaaaatatatgtgtggaggcgcgcagatgcactggaagccttcggtcaaagcctgtttttctccttctgaagaggaatggggagaatgggaaaggggtgccctgcttctgggccccgctcctggttgctctcggatgagctggtccaaggctctcgggctggtgtctctgcgtccttcccagttgggttccgagagggagggggcggtggggattttcgtaggggagacgtaggactgcaggatggaggagtgagggtcagggtcattattttcgccttttctctccactccctcctttcccggttcctgcctggaggagacgcctcattgatggagctagagaagaggaaggaaaaccgcttcgtggagcgccagagcatcgtgccactgcgcctcatctaccgctcgggcggcgaagacgaaagtcggcacgacgcgctcgacacgcgggtgcggggcgacctcggtggcccgcaggtgagaggctcggtccgggaggtggtcctccgcgcctcccggcccacccgagaccccacgatt

SEQ ID NO: 115202 - DNA, 204 bp, Homo sapiens
  chr7:87849002-87849206
  hyper
acgatttcacgccgcgtatccgagaagccgcagggtgggcttctagggtcccaatccaccctcaccttggccccgcagggccatccaggagaagggacggggaaacgtggggagaggccgaaccccaggggcctagggcgaggccgcgagcgcagggagaagccgagggcggaaggagcccgggtagccgcccagcagcgcctc

SEQ ID NO: 115203 - DNA, 482 bp, Homo sapiens
  chr7:87849419-87849901
  hyper
gggggccgccccagagcgcaccacgcgggcgtgggggacgcgctccgcagtcgtctccagctcttgcctgtgcgcgcggccgtggctcccctgcctgcgcgcttcttcgtatctttgccattacggcgctaatgcagtgcacgactgaaggtccagtggcggcctacgacctgcgaggcaattcacaccagggactttcctccctccaaaactaatggcacattccaacaccaatacaccaccccaggaattctttttttttttttttccttcggacttggctattatctggcacatttcttattttaaacaactttattggacaggacggagctattataagcggagcgcaccatcgcgaggcaggggctggatgcgttagggcaagccttaggtgccagtgggtgaaggagtctttgaaagatggaaatacgaaagcgcccttggaaaataagaattaacttgacgaactgtgtgcaagg

SEQ ID NO: 115204 - DNA, 436 bp, Homo sapiens
  chr7:87935999-87936435
  hyper
acctgttcttcagtgcgatgggctggggagtggggtcctagcagcagggactggaggtgagctgaagcagataagggacgggagccttgtggcgaaaagtgacccacctgagggagaggcgcttccaaggaggaagcgtccagcgccaacggtgcgcgccgcgggccgggcgggtagagggaagtttcgccgcgcctgcagctcagcgctgtggcttgtggctctcgctgctataagaagccagagaagggcgggacggtctgctggatttcgcaagagaagcggaaaagaacttgtttcctggaagagttcaagctgagaatcccagcagctggaaggaccggaacttctatactgcggtgctgctgatggtgccgctgacccccgggaagcggggattttaagggttacacccgagcccttggcatctgtgcat

SEQ ID NO: 115205 - DNA, 430 bp, Homo sapiens
  chr7:88387737-88388167
  hyper
gaattagcgcattggcggtagcctttcaattccagcgctgaagcaacagactgagaggaggtgaacctttaccttctcccaggcacagacaaggcgaggtgaggcagagatggattgcagaaccgcattaagcaaccgcggggtggaggagagtgcagggtgtctccaaaccctgggagggctatcttctcctttcagagcacatttctgcccaggtctttttattctcagtgcagctcgctccctggtggcttaaattacggtaaacgaaataaggtccgttaaaaaccacttctgagaggggtgattattgggggttttgaaagcacagaggtcttatagagaccaaaaatatgtgcctcgctaagatacagaaaggcttgtaagtgaatcttcataactctgggtacgtgcatgtatatgcacatat

SEQ ID NO: 115206 - DNA, 655 bp, Homo sapiens; identical to SEQ ID NO: 44368
  chr7:88388246-88388901
  hyper

SEQ ID NO: 115207 - DNA, 358 bp, Homo sapiens
  chr7:88389046-88389404
  hyper
cgccgggtcccctccgtgctctgtgctgtcgccgccgccgcctctgtcagagcagcagctgtcggcagcaggagccccgcacggggcgcggagcagggacgcgctgccaccgcctccccctgcgtcctgctggccgcgtcttctcgggaggtggtagtcgctgttgccgctgagaaacccgcccgctttccacggctggtcgcctggtgaggagttgagactctgcgcctccgcccggacccacatggcttgttacctggtcatcagttcgagacatctcagcaatgggcactaccggggcattaaaggagtcttcaggggacccctgtgcaagaacggatctccctctccggtaatg

SEQ ID NO: 115208 - DNA, 730 bp, Homo sapiens
  chr7:89747942-89748672
  hyper
cccaccggactcacgcgggctctgccacgtgttgcccgcagtctcggcccgttccctccgctttggtaacgggcactgactgtccgatacctcagcgatcgtaggagagcagagacgtccctcatgccgggcgcaccaccggcgggccggcggttccgttggcttccctgacatacttcctacagtcatttctttcagctgagatcttcccctttaatacctcgttaattaacgtgtaaccttttggttaaaatgtcagagctaagactaaatctgaagaaaagaatgaaaccaccgtaagttcttcagactcagtcgtcagcaaggttatggcccgaagccgtgcagaggcggcgcgcggggaagctactggcagagctgtgcgcactgggggtgctgcaggcgctggggagagtgtggagaggctgcgtggagctgcgcgctcggggtgggggctgcactcccaatgaagcgcgtgaagggcaagcggtgatgggttctgcgccagtggggctgggagcgtgtcgggggctgtacgtggggctgcgcgcaaggtgagaactgcgcatctaggcttggggactgcgcgcaccaaaggcttgcaggcgctggggagggtgggggggctgtgcgtggggctgctctcaccggaagctgcacgctcggggaagcgcggaggcgggggtgctgcgcgcttgggagcacgtgggggaacacgcagggactgccg

SEQ ID NO: 115209 - DNA, 237 bp, Homo sapiens
  chr7:89748718-89748955
  hyper
cgccatgacgaccggtaggtccgcaacggctgcggggacaagaccgttgaggctgccaggcgagtcaggcctttctggacctcgcctgactcggctgggctgtgcctgaaattgacccagctctatcagggattatgaaaaaacaaggagtaagcccgaagccgctgcagtcttcccgccccagccagtctaagcggcggtgcgggcctcccccttcccccccgcctccgccccgga

SEQ ID NO: 115210 - DNA, 126 bp, Homo sapiens; identical to SEQ ID NO: 44370
  chr7:89783801-89783927
  hyper

SEQ ID NO: 115211 - DNA, 196 bp, Homo sapiens; identical to SEQ ID NO: 44371
  chr7:89840693-89840889
  hyper

SEQ ID NO: 115212 - DNA, 105 bp, Homo sapiens; identical to SEQ ID NO: 5657
  chr7:89841066-89841171
  hyper

SEQ ID NO: 115213 - DNA, 237 bp, Homo sapiens; identical to SEQ ID NO: 44373
  chr7:89841213-89841450
  hyper

SEQ ID NO: 115214 - DNA, 1026 bp, Homo sapiens
  chr7:89874390-89875416
  hyper
cgcaagcctgcaaactcgccctgccgggcgcggagtgcaattaggctttggggtggtttggctctccggctttccgtagcctctggccccgccccctagcaacgcgctggcttgtgttaacaaccggcccgggatcagaggtctgggtcaactggggggcggcagcggcgctaagcggactgtatggcggtggcctaggcccctggcggaattttgggacctttcgcgactctagcgactctcaggctgccttcccttctcggtggcggggcctctttgggcccagcggctgcgggcgcactgtaggacaggaagatccccccactctccaccccgccgccaccggccatgtggacagaggaagccggggcgaccgccgaggcccaggaatccggcatcaggaacaagtctagcagttccagtcaaatcccggtggttggggtggtgacggaggacgatgaggcgcaggtatgagcaggtgtctgtgctttcagaggtggagggggtgggagtgaagtctcgagacggggtccagacctgggggtggcaagggtggaactggggacaggagtgaagatgggggaagccgcgggatggagattccaagcgcagagctaatcctgatcccccaccccctgcgaactgcaccggttgcgaggggctggctgttgtcaaccatcctgtctggggaccagcgctgtgtggtcctcctggagggtcctagcaaactgagtaggcggggttttgccgcgcttcttcgaaaagtggtcatagagctacagggaggaaaggaatcattcttagcaaaatcttgatttgatgacctgatcagtttgaactgaactttttaatacgtagatccctgttaccgagtgatgttcttgatatagatgtaaattttcccatgcttaaatttgctgcgactaaagcctgcacccagaggggaggaaaacgctgttaaattagaaattaagcatttttaaaatatgaaattggaagctggttgttacacgttgggtcggagag

SEQ ID NO: 115215 - DNA, 405 bp, Homo sapiens
  chr7:89950292-89950697
  hyper
gagcgcgtcccggcgcggtgtcctgggtgcgctacgctcgttgggaggaggacggggcgcctcctgcccacgaggaaccagaggtttcagcggggacgacccctgcccagggcgccctctgcccagcggacccacttcccgaggcaggcgaactgggcgaggcagcgctgtgtcacccaccccgagcgctcaccgggcgcccaagctcgctcagcggaaccgtctcggccgcggtgcgcttcggcgctgggaggctctggctggcactggctcaccgcgggtggagctgccggttctgctgcggccacgcggggttcccgagacagacccgccgctgggaccgcgatccttttctagaggctgagtgagggggcagatcgtgggtggccgcgctctcgaggcccc

SEQ ID NO: 115216 - DNA, 147 bp, Homo sapiens
  chr7:90032702-90032849
  hyper
atccagggcattgccgttcagggccacgggaaaacctgactgcgctcccagaagcctccggtgtacctcgctgggaacgcacttcctgggacgctgagagggagacgctccaagaggctcctcagtgtgggcgagtaaaatgccctg

SEQ ID NO: 115217 - DNA, 30 bp, Homo sapiens
  chr7:90033360-90033390
  hyper
ggcggagggggatgcggattgctctggaag

SEQ ID NO: 115218 - DNA, 1514 bp, Homo sapiens
  chr7:90225110-90226624
  hyper
gtggaaggagaaaaccgctcaaacaactggactcggcccgtttcctttcggtaacctccccacagcccaacacgctgtccccagacgctgcccgctcccaccccggtcccttcgtgatcctcccgcgcgcgggcggggcgggggaggagcgcgggggcggccgggaggggcgcggccgggagggggcgccgccggggcgcgagccagacacagagggccgcggaggacgcgggaggcgagcggggagccgaggtcgtgctaggatcccgcgcccaggggccttcgtcgagggaggggcgtggcggcggcagcaggagggcagcaggagctgtcaggctggcggttccgcgccgcggctccttctgcgctgcgcccgcaactctgggctgagaacttctcccgccggcccactcgccctcgccccgcgcactcggcgccaggcgactcccgcaccttgtacccggcccgccccgcctcctccttcggccgcaccactccccctgccggccgcgcttctctccgttacaaaggagggaaaatgagccgggcggcggcggcgcggcgcggggccaccacggcggcggcgagcgcggccgcccccggcaccacgtaaaccgcccccgcccgcccagctgcggcccaggccggagcggagcctgccgtcctccgcctgcctgctgctcgcctccctagacctgcgcgtcgcttcccggcccgccgaggaggtggtggaggaggaggcgccgctttccccgcggcgcgcgccctcgccgttgtctgagctgtgcctggaccagtttggggaagttgtcggggctccgcgtcgcccagatgtgtgacctcattgagccgcagccggccgagaagatcggcaagatgaagaagttgcggagaactttgtcggagagtttcagtcgcattggtgagtagcgcgctgcccccggcccccccagcgcccgctcccctcggcctgcgcccccgccgcgttcctggcaccagccatgcagctgccagcggggctggcgtggggtgcgttgtaggcggggatcgagggcacagtgctagggacccgggggagggcaaggacgtaaaggaaagagacccctcttcctcaggatctgggggttcatttgtagattctctcaagcctacaatatgggttctcccctcctccgccactagtgctcgccctttcgcgcgcgtgggggacgggcgaggggacccctcggcccccaccgcgcaaggggctgcgcggctgcttgggccacttgttattttttgcgcacaggcttggatattgggcgtttagtcagtaatttagctttggaaattggtgaaacgttagactgtgccctggtattgtttaacgtatccaacctaaagggaagtgggacagttaccttgggacctattgttcggtacttcgggtcctggaaagcgagatttgggtgttcagtctcgaggtctctgaatcttcccgctgctggagagaaatgcgcgctgtggagttgtct

SEQ ID NO: 115219 - DNA, 30 bp, Homo sapiens
  chr7:90892821-90892851
  hyper
atcggagccgtgggcgtccccagggtttag

SEQ ID NO: 115220 - DNA, 195 bp, Homo sapiens; identical to SEQ ID NO: 5661
  chr7:90893323-90893518
  hyper

SEQ ID NO: 115221 - DNA, 30 bp, Homo sapiens
  chr7:90893745-90893775
  hyper
ccggtccgagggcgcgcgaggcagaggaga

SEQ ID NO: 115222 - DNA, 30 bp, Homo sapiens
  chr7:90894014-90894044
  hyper
aagtttccgcggcggcggcggctgcggtac

SEQ ID NO: 115223 - DNA, 30 bp, Homo sapiens
  chr7:90894293-90894323
  hyper
gggcagcggggacgccggtggccgccgccg

SEQ ID NO: 115224 - DNA, 607 bp, Homo sapiens
  chr7:90894560-90895167
  hyper
gctgtgcacggacatcgcgtacaaccagaccatcatgcccaacctgctgggccacacgaaccaggaggacgcgggcctggaggtgcaccagttctaccctctagtgaaagtgcagtgttccgctgagctcaagttcttcctgtgctccatgtacgcgcccgtgtgcaccgtgctagagcaggcgctgccgccctgccgctccctgtgcgagcgcgcgcgccagggctgcgaggcgctcatgaacaagttcggcttccagtggccagacacgctcaagtgtgagaagttcccggtgcacggcgccggcgagctgtgcgtgggccagaacacgtccgacaagggcaccccgacgccctcgctgcttccagagttctggaccagcaaccctcagcacggcggcggagggcaccgtggcggcttcccggggggcgccggcgcgtcggagcgaggcaagttctcctgcccgcgcgccctcaaggtgccctcctacctcaactaccacttcctgggggagaaggactgcggcgcaccttgtgagccgaccaaggtgtatgggctcatgtacttcgggcccgaggagctgcgcttctcgcgcacctggattggc

SEQ ID NO: 115225 - DNA, 312 bp, Homo sapiens
  chr7:91569808-91570120
  hyper
caccggaacttttccgttggagcttgtaggtgttcgccaatttcaccattaggtgtgttagttttgtaacctgaaggaaaaaaaaaactcatgttttaatagcagtggattcctcggacggagggtgggggtcaggccaggagcctctggcacactccgtctctcctacccctcagctcggccgccacctgtgagccgttgatgtgcgggaagggcgctctctacggcgggatcctcgctggtaggaggcaggtcccaggcctggcaagggttgaccccggagggctgggccggggcggcaccccaggagca

SEQ ID NO: 115226 - DNA, 30 bp, Homo sapiens
  chr7:91570858-91570888
  hyper
gttggggatttgtgcgctgatcatcagctt

SEQ ID NO: 115227 - DNA, 382 bp, Homo sapiens
  chr7:91763722-91764104
  hyper
cccaatcgacggaacgagagaagctggcagatggtcgtccacagggggccttgccccaggtctcctactaaacccagccccacccctcgggtcccacgcgcgccaccccgtgcgtcacagaatggggcgggatgttccgctggccacgccccttaaataacactctgtgaagccgtggtcttcttgcgcgggatagggcacctgaggaagcgggctgcgcctgtggcacagtggtacggggccggaagataacttacctgaagaggcgatcaatccctgagaatcgcgggcgacccgttttttgtgtgcccgggtgcggggtgccgggacacggcgttgaaggcgctgagcggagggatctcagggcgagctcgagcggcga

SEQ ID NO: 115228 - DNA, 348 bp, Homo sapiens
  chr7:91808297-91808645
  hyper
gtaagacacacccttcgcttcacctgtggcctcccgcggcggctgcggctccttcgcaggaccggtagggggcgcgcgcggttgagtccagcaattgcgaggacctccgcaggcgcagcccagcactgacgcctctccgggccgtggctcctctttcccaggccgaaagcggccgggccctctgctccgctgcgccctggcgcggccgcacccactgcgcgtttgtgagctggccatcggtcacactgggatactcgaggaggaggcctggggcctgcattcaattccctaagagggacccgcgctggccgctgcaggcgggtggagaacgggcgtctgagtctttgg

SEQ ID NO: 115229 - DNA, 50 bp, Homo sapiens
  chr7:91875199-91875249
  hyper
gctttccaccccgccgttaccgtggctatgaaatcgcttccgggttcaca

SEQ ID NO: 115230 - DNA, 30 bp, Homo sapiens
  chr7:91875835-91875865
  hyper
aagtctcagcttcgcggtacagatgtgttt

SEQ ID NO: 115231 - DNA, 30 bp, Homo sapiens
  chr7:92076597-92076627
  hyper
tcctgtattttacccggcaaattctaggcc

SEQ ID NO: 115232 - DNA, 30 bp, Homo sapiens; identical to SEQ ID NO: 5663
  chr7:92157245-92157275
  hyper

SEQ ID NO: 115233 - DNA, 30 bp, Homo sapiens
  chr7:92157589-92157619
  hyper
aagatcaggtggctcggggccggcaggtta

SEQ ID NO: 115234 - DNA, 30 bp, Homo sapiens
  chr7:92158040-92158070
  hyper
tccttaactcatcccgctctcttattggat

SEQ ID NO: 115235 - DNA, 30 bp, Homo sapiens; identical to SEQ ID NO: 5664
  chr7:92158278-92158308
  hyper

SEQ ID NO: 115236 - DNA, 144 bp, Homo sapiens; identical to SEQ ID NO: 5665
  chr7:92219763-92219907
  hyper

SEQ ID NO: 115237 - DNA, 1230 bp, Homo sapiens
  chr7:92462186-92463416
  hyper
ttttgacttgtctttcggctcgctgtctggcaaggtcaccggctctggctcgcggctctgtcgacaaaacttaactctcactctgtaagaccaacaggtcgcgcaggacctccccagtcgccctctgccccgcacctttctgggcctgaggattcccggctcggccctccccgcgcgcgcgaggccccagatggcgagggcgcagctccctggctcacctgaccacgttggggtgctcgaaggtctccaggtgcctcagcaccgccacctcgcggatggtggagagcggcatgccctcctcgccggtctgcacccgcacgcgcttcaacgccacgaaacggcctccgttcttcaagtcgcgggccttgaacaccttcccataggcgccctccccgatctccgccacgcattcgtactgctggtcagcgcggcacaggccgtccttctccatgccgcctggacgccgcccgccgcggcgccgctggggcgggcggggggtgcgctcaactagctggcggccgccgctcgcctactccggggctccccggagatcggtctagctttacttgctccccgccggctcaggcgctcgggcgctggggctttcgccgctgcagaagctggatggagagacctccccgcggggctggcgtaaccctggtgccgccgccgcgaaactccgcctgcagagtcgccgccgccgccgccgccggaggagcgagccgatccctcctcttccctcctcgaagcgaagtcctcaacacagacacgattacatagcctctgcccaagcgcgtctcagtccagaatcattgcacctaaaggaggagacgggaggataagaagaaagtgcaatcagacagcccagaagccttcctcggggttcctccagactcccctcctcctcctttacgaagcctccatcgctaccctccgcgcgctcctgccctctcccaagccgcttaatccttcctggttcctccgagaaaagcgaagttacttttctttccctgcagggctgaagccgtcttcgcgcggagaggttgcaggggcccctcggggatgagcgagcggcgcgggacgcagtggaacgggagggggcgtgccgagcagcccagagtgtgccgggagcgcgggggaggggaggcgccgggcacgtcaatgtcacggcttaatatttatccctatatcattgtgttgcgccgctaccctccccgcctcctgaggccc

SEQ ID NO: 115238 - DNA, 248 bp, Homo sapiens
  chr7:92463700-92463948
  hyper
acggaattctctctccggctgggaggacctccctggtggaaaccttgggaagaccagccatctggtcggggagggttggggcttatcgggggtgggcgagcgagcggtcctgggggaggggagacaccgtcccccacgggatcccaagggtgggagaaaggggtgttcgccacaatttcgcttgtcgtctccttaaagaataacttcaggaaggggatagcataatcgcgcctcgtccttaagtttta

SEQ ID NO: 115239 - DNA, 263 bp, Homo sapiens
  chr7:92464876-92465139
  hyper
tttccgcattcctccgcgactacaaaggctgcagccgcctccttctgctttctgtctctgctctctgtcttcacactcaatgaaatccttcatgcgcctctcccgaagcctgccaagcaccacaagggtcgccaccagcacagcgacaagaggccacaccggggaccgcgactcccgcgtgtgcgcacacgcagatgcgcccatatgcacacggacgggcgcgctgcggggaccagggctgctcactgcggggcgtgtgttta

SEQ ID NO: 115240 - DNA, 253 bp, Homo sapiens; identical to SEQ ID NO: 5668
  chr7:92466275-92466528
  hyper

SEQ ID NO: 115241 - DNA, 422 bp, Homo sapiens
  chr7:92861271-92861693
  hyper
ttccttctccttcgcgtcagtctctcgttctcccaccccgcccctctagaccaggtgaggtttcctccctcacactcctaggggacatcgcgtcaatctggcttatatattgtctcctctgagtttgatctttcgctcaacgcctagtcacctgtgacttaggtttccgtctcgccgaagagtagctactgcctagtgcaagcacctttgtaagaccggcgatcgcagtggtcgctctgagcagtaatatttaccggcttaactgaagcacccgctcttttgcttgctgggagatgtagtccctgggttggccactttagttcatcgttgctaccgccggcgtccagaagactacagttcccagcaggcccagggaaagacaggataccctgggtcggctcctccacgtgaccacccactat

SEQ ID NO: 115242 - DNA, 572 bp, Homo sapiens; identical to SEQ ID NO: 44391
  chr7:93203659-93204231
  hyper

SEQ ID NO: 115243 - DNA, 301 bp, Homo sapiens; identical to SEQ ID NO: 44392
  chr7:93204298-93204599
  hyper

SEQ ID NO: 115244 - DNA, 127 bp, Homo sapiens; identical to SEQ ID NO: 44393
  chr7:93204906-93205033
  hyper

SEQ ID NO: 115245 - DNA, 420 bp, Homo sapiens; identical to SEQ ID NO: 5671
  chr7:93519345-93519765
  hyper

SEQ ID NO: 115246 - DNA, 483 bp, Homo sapiens; identical to SEQ ID NO: 5672
  chr7:93519854-93520337
  hyper

SEQ ID NO: 115247 - DNA, 517 bp, Homo sapiens
  chr7:93550971-93551488
  hyper
atgtgacttggaaacggaaaaaaaaaaaggagcgggggtgcgcggagaacacaaagtaaaacttctgctgttcccagtcctgcagccccagcccagccgtcccccgcgggcgtggcaggtcctgagtcagggcctgtccgtggccagcatccctgctgggcgattgagcagcgggaagctgcttggacccagtctcaaacttaaccctcatctagcacccgggcaggcctcctgggttgcagggacttgagaaaaggcagagttctcaggtcctaggaagctggggcacgctggcgtgacaagcgtcccggagaaagccaagccctcggggagctggggaccgcagcagggctgcagtcacatcctgcgcgggtgggcggcgggccaggccttcagttgtttcgggacgcgccgagcttcgccgctcttccagcggctccgctgccagagctagcccgagcccggttctggggcgaaaatgcctgcccttcacatcgaagatttgccagagaaggaa

SEQ ID NO: 115248 - DNA, 30 bp, Homo sapiens
  chr7:93633425-93633455
  hyper
acataagacaggttcgatttcctcccgcgc

SEQ ID NO: 115249 - DNA, 134 bp, Homo sapiens
  chr7:93633681-93633815
  hyper
gcgccggatgatggcgtcaccacggcgctcattggagccctgggaagaaggttgaaaggcattctgggaaatgtagttcaccaacgcataacgtgttgctgagggcgtgatgtgaacccggttccaggagcgga

SEQ ID NO: 115250 - DNA, 30 bp, Homo sapiens; identical to SEQ ID NO: 5675
  chr7:94023973-94024003
  hyper

SEQ ID NO: 115251 - DNA, 30 bp, Homo sapiens; identical to SEQ ID NO: 44400
  chr7:94138894-94138924
  hyper

SEQ ID NO: 115252 - DNA, 926 bp, Homo sapiens
  chr7:94284358-94285284
  hyper
tatgttcatagtacaaatgcacgcaaatatttgtggccgaatctcggcaacccgctggaaaggattaaacgtgcggttgccgtgactaaacgcattcattcaccctacaagatttaggaaaatgtaacgttgcaagggaagcaaggtctctgtgtaaacctcgtaatcgccaccaaaagtcggtagctgggagccttcaaagcccgccaaacacactggaagcatccacagctgttttaaattggttttggtttctggaaatagcgcactcggtacggcagcatctctggcctccagccggggttaaccctgacctgaacgccctgtttagctcccagcatttcatgattccgcttccctgctccgtaaaaccgaagaaaaccgagatttccgtcaccgagaaatgcacttagcaagagggggaaattcggtgttttaaatgtcacatttttgtgttctctaccactatcaagaaaaggaaaaaagatgtgtttgtgtagcggggacgcagcttgacacccatttcctttggctcgcatcgcggtcgcagagcccaatcgcggggaaacgggccccccagaaaaacaggcaacgacccccagctctttgctacagggatcgggagaggactaccctggggctgggcggggagggggatgttgggaacaggaattggagatggaatttctgcgcccgcagagcagggaggggcccgcgggggcgcggagaggaaaaaaaggccaggggtcaagcctggggagagagaagctgggccggggaaatggggtacagggtgtactgaaggaggggtacggtggggtccgggacagaaagagaggctggtgcccaaagggcgcgctcaggcgcccggaacccgagcgggggagggggaggcggcggcctgttggccccgggacctccacgtc

SEQ ID NO: 115253 - DNA, 30 bp, Homo sapiens
  chr7:94285518-94285548
  hyper
ccgtactccctctagcggcgggccactgca

SEQ ID NO: 115254 - DNA, 1107 bp, Homo sapiens
  chr7:94536807-94537914
  hyper
tccggagccaacacccgaacaggaaggggccttgccccaggccggagaggcccctcgcccacggccgagggggtggggcggcctcgcctcgggccggtgcttttcgcccttccttggccgccagaggctccctctctctccctctcccgggattttgctgccgggctccctctctctgcggccctagagttaatcccatcagccgaggtgaggcacctgttaccccggccttcctcacccccgcggcctctcctccattacaccgcggccgccgaaacggcccggcgtggcgaccgcacgtgggccaaaccccttccccggccggcacccctggccccaggccggcccgagcgtgcgggcgcgtcgctgctcgggccgccgcccgcccgcaatggcgttggggagcgcagcgcgcctcccggggccgcccgccgcgggcagggagcgcctgggggccgacgcgcgagtggaagcggccgccgcagccgccctacgcgctgcgccgtgaggagcgggttgcggtgtacccagcgggccggcgccgagccgagccgccgcgtccaccgtggggcggggggcgcctgcgaggagggggtgggagccgcggcggcccgaccctccccgcccgcggcgctcccgctcgggtaagggggaggctgagcgcggggcgaggagttggggagggtggagaggaggaaaaaatcggcttgtacaaaggctgagttgcaggctgggggtgggggtgggttgtggtggaggagcaataggttgaagatcggaggcattatcagtgggatctattgtttcctggcacattgggaggaaaaacaaagggatttattttcattaccctgtaattttttttcttttctatttttttaaatgtggccagggagctcgtctctctccgtgtcacagtgggatccgcctggcagccgccgggagctgcagccaatgtgttaggacttcaggtgcttcttggcacaaagctagactgcgacctcctaccatagcgcttggcgtcacctgctctcccggtcctgccccagggccgagggattgcgtcccgaaccgggcttgggaatcggctgcctctcaagttggtgt

SEQ ID NO: 115255 - DNA, 469 bp, Homo sapiens
  chr7:95025595-95026064
  hyper
ccaggaacatctccccgactaaggacaggccgacccccagcaggaccagcgccacgagcttccccatggtctcggggtgcccagcggcgactgcgcggcgccgagagctctcgggggcgcggcgggcggttcctgcctcgcgtacggattggggcccgctcggccccgcccgcacacgcctcctacttacctgagcggcccgggtgccgcagcagggcgctgacgagtcccgccgagccccgccgcccgggttcaaggccgccttcacgcccacgattccttgttttttgggcagaggtcaaggctcaacggagagggagcccgggaccgagttgtggtgggagtttgctcctaacacccgcgaaatcctacctcaattcctcagatggcctgagggagaaaccggagggcccgggaatggcggggagctccagttcagagccggaactccggacttctgcaaggccag

SEQ ID NO: 115256 - DNA, 438 bp, Homo sapiens; identical to SEQ ID NO: 44404
  chr7:95064140-95064578
  hyper

SEQ ID NO: 115257 - DNA, 401 bp, Homo sapiens; identical to SEQ ID NO: 44405
  chr7:95225922-95226323
  hyper

SEQ ID NO: 115258 - DNA, 536 bp, Homo sapiens
  chr7:95401813-95402349
  hyper
caggaggggcgcgggcgtggagggcgtgggcagggggcggggcgagccccgcagactgagtgctccggggagctgtcagtgtcaggctctgggagagaggaagtgatcgctcccggaggagcgcgagccgagcggccggcgcagcgtgagacagcacatcctgcccgcgccggccccgccaccttcgggagccgcctgcaccaacgctgccgccgcccaggagccgccgccggctcggggagcccagttccgccgctgccgagcgcgtccaggtaaactggagcgggatgtcgccgctccccggacggccgcctccgcacctctccccaaccctccccaccccggtgtcgtctgcgctgggaaccaggctggagccgaggcccctgcagccgcagccggacccttgtcctggccccctgcccaggctcctgcgtgctccgctgagcccgaaggcggccaaagccccccagtgacacccccctctcggcagagccgagagactagggcagagaaggaagggtcgtggtgtcaccacc

SEQ ID NO: 115259 - DNA, 768 bp, Homo sapiens; identical to SEQ ID NO: 5679
  chr7:95704889-95705657
  hyper

SEQ ID NO: 115260 - DNA, 30 bp, Homo sapiens
  chr7:95951114-95951144
  hyper
gccgcaaggtggaacggctgcccggcaccc

SEQ ID NO: 115261 - DNA, 30 bp, Homo sapiens
  chr7:95951546-95951576
  hyper
gctggacagggacacgtgaccccgctgcgc

SEQ ID NO: 115262 - DNA, 641 bp, Homo sapiens
  chr7:96621715-96622356
  hyper
ctgtgattccaggagcgcgtgtgggcgcggtcctcgccgcgacgccgcgcgcgggtcaggctcaactgcgaaccttgccaccgagctttcccgcgggaggcttcgaatataaccttgcctatttctcgcctactgagatttctttccagaaaaggacattctcctgctccgaggagatggatccctgaggtccccatgcccgcacagggtgtcctggaggagtttagaggacactcctggggcccttccctgtgtagtacgcttattcccgaggtgggggctgagaatcgaagagcagcgccccccacactgggattgggggtggtcgaggggctacagatgcccgcattgggcttcttagcggcctaggctgatgcctggaggtaggggggattgggtttggctggcgactagctttaatgcccatcgagttcctgggacacccaagttcagcacttctgcatgaaaccgaaacggccagggaggggcggagtgggccgaggctgagggagcggcggtgttgacgccctcttcccacccaggatcgatcgatcggtagggaattttttatctttgggaaggagaggtgaggaagcggacctaaaacgaggggaaaattcgaatttaatatcctgtatagg

SEQ ID NO: 115263 - DNA, 46 bp, Homo sapiens
  chr7:96622654-96622700
  hyper
atgataaggctcgcacgtgagccaactccggcgcagcccaggctgt

SEQ ID NO: 115264 - DNA, 844 bp, Homo sapiens
  chr7:96625570-96626414
  hyper
gattctggagtccaccggcgcttgggcaggtagcaagcagagctagctgcacgttgccccggccggcgttttcaaacaacttgaattacaggctacatcttgaatatgaattagccttccgcactggtgtgaattcgctttgaaactcaacttgtcaagtatggttttaattaaacatcttccggcctcgaaagattacatgttttgtaaaatatattctagcatgaaatttacttccacgatctgaaattagttttttggtaaatgttttcataaaaaagaaatacgaggtgtgtgtgtgtgtgtgtgtgtgtgtgtgtgtgtcagagagagagaagagaaggggggtatgaagtagtttatattcactgccttcctttaaaacgtcctaccagctggacttggagcctgacaggtcccgggtcccaggtcccaggcagccccggccggggcagggccaagaccgcgtgcccaggacaagtaagtaactcaaacccgacccggcaagcgtggcccaagctgcttttgcagttggggacaattgagcggacacacaagttaatcccgcactgatttgtttcggatccatctgcaggacgcctgatgcctcccccttggctgctgcagcggacacctgcctccctccccatcccagactgctctgcttgtcccatgaaagcagagaaaagaaaccatagggtgcggaacggacctcagtagtattcaagacaacacttcaccgtgaaatgtaaagttctcctttaagaattcctgcctaatattgagaacaacagccatgtcaattgatagccgttctaacagacagtccgaactgctccaaacc

SEQ ID NO: 115265 - DNA, 35 bp, Homo sapiens
  chr7:96627013-96627048
  hyper
tctgcgcgctgttgccggaggaacagggacccaca

SEQ ID NO: 115266 - DNA, 822 bp, Homo sapiens
  chr7:96627404-96628226
  hyper
tctttcacgaccacgcgaaacgcaaaggatgtggagtggggaggggaggaaaaaaaaaggggcggccagccaaatcaaagcttgggagacattttgacagtgcgcttgaaataatgctcttaatttttggaaggttttcaagaagggggtggggggcacgtgggagaaccacaactttctcctgtctgtcactcaagcggccagagagggctccaacctccagctcccgcggcaacacacagtgggaaattgcttcaagatacagtggggctctattctttctctacccctgccccgcctttcccgagcagtgaacttcacagagagggtggtaagggagggttatcctgggtgtcaaaaatctgtgcatagcctgagatcagaagagttaaccccaggccctagacccagcccagcggccaaactggcaccccgtgctgatcagcccccgcatccccatatctgcatccccatatctacctccccagtcgggggtggtgaggtttgggggaggggggcgacactaccatatgcatccaccacctaagtccagcccaggctggcttcaatgaaagctggcaaatccggcgaatctcgcagaaattttcttcgaacttaattcaattttaaagtggatttttactattaaaaacgctgccgagcaacacattgaattaatctgactgtacggttttaattacagtgagggtttctctacaaatctgtacaagacagtggctggttcttggaggatctctgcctcctgaattccattatcgggcccctggttccctgcagacggcagctcgtgggagccagctg

SEQ ID NO: 115267 - DNA, 30 bp, Homo sapiens; identical to SEQ ID NO: 44414
  chr7:96628948-96628978
  hyper

SEQ ID NO: 115268 - DNA, 30 bp, Homo sapiens
  chr7:96632361-96632391
  hyper
ggtgaaacgccttcacggtgttaacaacaa

SEQ ID NO: 115269 - DNA, 380 bp, Homo sapiens
  chr7:96632630-96633010
  hyper
ttgccgatttgtaaacgtgtagatcgtgttactggttcgcgtgttaaagtgcacctcttgttaaaaggtggggaacagggcacgccacttaaaaatgaattcagagttactgaaccggctccccagactcaagaacttaagcgcaacgggctgggaaaaggagggggagaggagcgcaaacgccgctgacctgggaactcggaggaaactcgcgggcagcgagcttcaggtcttctgatacattgaaggaaagaaagaaagacagaaaaagaaaaaaacaaactgtcctggagatagctagacatccagggctgggagctgggaaaatcaattggcataagccgctgccggcgggcttcgcgcaacgtaaaaaataaagt

SEQ ID NO: 115270 - DNA, 265 bp, Homo sapiens
  chr7:96633235-96633500
  hyper
gtgggcaaaggctcgcggcttaggtctctaagcagatcgaaagtcggggtccagaccgagaggatcttcaggtctcgtccacccaatctcaagcctctggaagggcgggctgccggcgacctcctccagtcccgggacccggaacccgggaccctggacgccggtgcgggcgggcctgccctcctctgtgcctggcccccagtctggccctcctacctgttgaccaggcctgaaccacgcaccggggctccgctgtctctgcttg

SEQ ID NO: 115271 - DNA, 659 bp, Homo sapiens
  chr7:96634276-96634935
  hyper
aatatataagaaatacggcctgaaacggcagggaccgagccagaacagggtctgatttttctttttctgtaccaccccccagtggggtggagcccaggtgtgagggttcgtcttccttctgtggtttcaataaaatacgtctagaaaaatccacggtgacaaggagctcccacaagagtgtagtaggaccagagtggcagggacgtcaagaaaggggggcctggatttaatgcgggggtggggtcactgcttctaagcacaggcaacctacaagggtgcaaagggattgaaagagagcagcccccagttggctgtttcaaggctgagatattggcaactggggctccgggatttggggcacgagctgcggcgggaagcatcggcggccggccgggcagaggcgcctccctccccaacggccccgggcgccacacagcgcggcccccggctgcagctccggctgggattggaactgcggaaggtaggcgaagaactctgcaagtcgcgcacacgccagtagaagccgtgcgcctgtgacgtcagggggcgactgaccaatggggaggcactgccctttggagacaaaccattcgactcgtggcgtctgcatcaagtctgaaagcagacgcgcaactttcgcagaatccaccttaaaatct

SEQ ID NO: 115272 - DNA, 212 bp, Homo sapiens; identical to SEQ ID NO: 44417
  chr7:96635239-96635451
  hyper

SEQ ID NO: 115273 - DNA, 103 bp, Homo sapiens; identical to SEQ ID NO: 5683
  chr7:96635486-96635589
  hyper

SEQ ID NO: 115274 - DNA, 352 bp, Homo sapiens; identical to SEQ ID NO: 5684
  chr7:96635619-96635971
  hyper

SEQ ID NO: 115275 - DNA, 819 bp, Homo sapiens
  chr7:96636033-96636852
  hyper
cgcccttttccttgctccttccctccaggctgtaacccacgtttgacccggctggggacatttctgggccggaactggggagcgtgttttgcttcccagcccacgctgggcaggcagtggcctactttgcgtggggcgccccgtgctcctcagtgactcggagggaagctggcctggctttcgctctggttaaactagtaacagtcaggctctttccagtgggctttaaagtgtccctcaccttcatccctgaccgggccccctatctagcttttcgctacagtgttggctgctcctttgttcgtggaggggaagcaaagaacctcgggctgatggttctcagcacccgagggggacaaagttgccgtgagaggcgcagcctgctcgtgggctggtctgagctgttggttgtgttttgtttgaggatttggtcctcctcaggagagtcatttcaaaacatgccgaggatgcttgatgcactgagcttggagctggtgacatcaagtcaactggccgcgtaaacacctgggtggctcaagcacagcttcaggtactgttaagccgggcacaggggccccgctccgcccggacagctgccgccttgctgcgctgcgcaccccagagagcctccggcaccgcctccgctgcggcaaagcgggctgtttgtctgagggcctctggcgctcccttggcccagacgctgcacattgttcgggccagggactgggtcaaggagattacgcagacgctgggagcacacgggcagagtggaccaagagaggtcggggcatcatagggatttttcgaggtaacccttat

SEQ ID NO: 115276 - DNA, 298 bp, Homo sapiens; identical to SEQ ID NO: 44422
  chr7:96639200-96639498
  hyper

SEQ ID NO: 115277 - DNA, 30 bp, Homo sapiens
  chr7:96642083-96642113
  hyper
tggtggtgcctacgacgcctccccacgttc

SEQ ID NO: 115278 - DNA, 113 bp, Homo sapiens
  chr7:96642692-96642805
  hyper
gtggaggaaagatgtcgaaggggcttcaccgtccagagattcatcagactacacctgcctttgcaaatgtccgcatacctgtggttctaaaggagccccgtcgcgagctccgt

SEQ ID NO: 115279 - DNA, 1679 bp, Homo sapiens
  chr7:96645917-96647596
  hyper
cgcaggcggatccgccggcgtggcgagcttcccagaggtgcccgagggcgtctgccctctgggtgtgcctccgggagggctagagagctctaggttggcaagatcccagtgaccattgggaggcgcgcgatccaaggggttgcagggatggggcggagaggaggggcggttgggtagcctaaaggtccctctcccagaatacaaggaagcgctaagaaggaggatgtgggggcagtgttccagcaggcatcccaggctcttccggctggagagctcaggagactgagcggtgtcaaggctggagtgagctatagggtgcgctgggaggaggtgagcgcagcctggctttggcgcgctgtgggtgactcccaggacggcgcggccaggacgccgcgagccgtggggcgtccggtgggatcaaaggaaccagaggaggccagccgacgcgtctgggattgtgggataaggggcgggagagaggagattgacatgggcggggagatcctggcctggcctgtgtcaccggagggggttgtgtgcgtttgtgtctttgtgcggatcaacgctctcgggcctgaggccgtgccctgggtggatccgagtgtgagtggacaggctcccgggtgggtgcccagacgggagggagagcgagcgagcgagatcaagggcagcgaggtctgcgggttcctctgtgtgtgtgtctcaggccctgtggctcagcactggagccgcctggcacccacaggaatgcggcttctctcggatccccaggccgccccttgtcccacaaggaggtggccgccaggaaaaaggggggaaaaggggcagaaatccgcctagctcaacccgagcctcaaacaaaggccaatttatctgatctcttacaggatggcccaggaggtggtctgggcaccgaagaatcgcgctggccctgaccgcatgccccagccttcctggggtttgtgaggagctctgaaggtgggggtgaggtgttgtaagtaaggggtggggagtatgaagacgcccactgaaaagaacattaatcttagaaaggacttgattcgtcttgggagcactatactgagagctaggcaagtggaaaccggaaggggcaggcagaggggtcacccagtgcgatgtcaagagtggggccggctggtccgggaatatgctggggagtggagcacgtttatattcgacgtaggaaaaacaatggagaggaagagaaggtggaagggagggcaagggagagaaacatcacatagatatttttagactttgctgaagatctgttatttttacatccttgggctcgggacggcagggagttaaattcccctgagagaatccccatggggccagggaaagcccgctgcagactggtttaccagaatatttttgtccacggctcccagaccaagctaaaaaataaaaaccgcacgagagaaaaggcctttgcgagtggaagaagtgaggttggcacaagggaaggaatcctgaaaccaagtctgtgtccgcgcggcgttggtctgggccacctcgcaatgaggctttagtgatcttaacgacaagcagcctcaaagctagggtggaggagtggtcatttagaaagagcttccctctttctctagaagaatccgaaccctcccttccctcagctcggccgcgcccggtgaata

SEQ ID NO: 115280 - DNA, 402 bp, Homo sapiens
  chr7:96647813-96648215
  hyper
gcagggagaggcgtccgcgcaggggaaagccaggcgctggcacaccgcgggcgcgggtttctcccagtcggagtcgccagaaataaagcgctagctctcggtgtaatggaaactcccgaaatccttacaagcaaagaaagaaaagcaggaagtggatatcttcatctcttccccaatccccctattctctgtgagcgcagaaaacaaaatggggcaccctttggcttcccgcccccccccccgccccccgcaaaccttcctattgccccctcttccccgcacccagtgctccttccgagaaagtacggctggagcggactggggagacggaaatattgagtcgcggccgctgggggtgccggaggaggggtgcacaggccaggctgccgggcgtagttctgc

SEQ ID NO: 115281 - DNA, 15 bp, Homo sapiens
  chr7:96650421-96650436
  hyper
tcgcccgcgccttcc

SEQ ID NO: 115282 - DNA, 15 bp, Homo sapiens
  chr7:96650751-96650766
  hyper
cgcgagcccggcggg

SEQ ID NO: 115283 - DNA, 91 bp, Homo sapiens
  chr7:96650985-96651076
  hyper
tagcgccccccacctcgcgacccttcggtggccgtggcctgaagctcccgtaggctcagggcacgacccttcagtttctccgctccaggcg

SEQ ID NO: 115284 - DNA, 420 bp, Homo sapiens
  chr7:96651136-96651556
  hyper
cgaggaggctctacattgttaagaaaaccagatagctgctctgggctgcctaggccgccctagaaataaccctccgcttgctttcaacccgcgaaattggccccacagctccggaggcccgctacggggtgggggcggggggcgcggttagtgggaggtatctccagaccgctgatgaataccatccccaccgtctcaaggcctgactcaccgagttaaagcataggggctgatgtctttgggtctgttagtttctcacgggtactgtcaaaacagctccagtcccatcgagactgaaccgcgcgacccaaccagacgtgcagctcaggcaggtctagtgcatggcagcgccgtatttacctgtgtttgtgtcaatcccagcgaggcggccagctcggcgcgttccggcaaggcgaggta

SEQ ID NO: 115285 - DNA, 14 bp, Homo sapiens
  chr7:96651948-96651962
  hyper
gggattcagctctt

SEQ ID NO: 115286 - DNA, 560 bp, Homo sapiens
  chr7:96652017-96652577
  hyper
cgtttccgcccctccccaggcttcaagaacaccagcccctccccaggcttcaaggaggtggccctgggccgtgaccctacttctgtcggcgtctgttcgggcgcccgcagaagccagactcttgggcagggaagacgctaaccgaggtctccaaagttcaaagacccacaagcaaactgctccttcacttcagcagcaagcggtcggggccgccgcagacagagggtcgattatgcaacccccataatctcgctgcagatctgcgagggcacagatgtgtctggtttcttttacaaatagacttaatatgttcttggcaaaaaaaaaaaaaaaaaaaagaaatcttccacttatgcacggaatacagagagagtgaaagaaacgtagacacctcaacccggggctctcttttaaagttcagcaagagtcacacactgagaaggaaccggtggtggggtgttttcgtaggaaaggggcggcaggtcaggatgagattctcactgtcatgagtatgggtttgggcgggagggggagggattgccaaacgcgtgttgtacaaa

SEQ ID NO: 115287 - DNA, 941 bp, Homo sapiens; identical to SEQ ID NO: 44432
  chr7:96652878-96653819
  hyper

SEQ ID NO: 115288 - DNA, 335 bp, Homo sapiens; identical to SEQ ID NO: 44433
  chr7:96653862-96654197
  hyper

SEQ ID NO: 115289 - DNA, 822 bp, Homo sapiens
  chr7:96746746-96747568
  hyper
tctctctttcaaggcctgtgtcgtcaggacgcaggccagaagaagccacgacgaggcgcaggcgcgactccacgagggccacgcccctcctagagaaggaccgacccgttttccgcccgcagcggagcttgggtttccgggaggacctgattgtgcaagggaccaaaccggatagaggtcgcgcgccctctttcgtctgccttccggttcactaatacgcaagttcgcagaagtgcgggaacgcgccgtccctctgcgcaggcgcagtcggcggtcggcgtggggcgctatgccggggcggcacgtttctcgagtccgggcattgtacaagcgcgtcttgcagctgcaccgtgttctgcccccggacctcaaatccctgggcgaccagtacgtgaaagacgaatttaggagacataagaccgttggttctgacgaggcacagcgtttcttgcaagaatgggaggcaagtgacgctcccttctctttgcccaagacctttggggttcctcggtgtccaggtttctagttccagtcccccatgcggggttaaacagagcagcaacctgttctgtttgaaatagcgtaatgctgttcaggtaacactttccaaagtttctcccacgggtttctcactagagcagatcctgttacttcagcgtccccaattcagttcaacttttgagctcctgcagatgccaggtgctcaaagggtgagggtaggaggtcacaaaaatgagcaagtcgtcgttaagtgctcaaaaacctcaggagctttttgtccttttaagtgcctttgcacctagtaagcgcccattaataaat

SEQ ID NO: 115290 - DNA, 30 bp, Homo sapiens
  chr7:96747800-96747830
  hyper
cgccctgcaccattgcgctaaatattaaac

SEQ ID NO: 115291 - DNA, 412 bp, Homo sapiens
  chr7:97361010-97361422
  hyper
cttatcctgacgtctcgagggacggaaaagttaccgaagtccaaggaatgagtcactttgctcaaatttgatgagtaatatcaggtgtcatgaaacccagtttcgaaggagaggggagggggcgtcagatctgcagacggaagcaggccgctccggattggatggcgagacctcgattttcctaaaattgcgtcatttagaacccaattgggtccagatgttatgggcatcgacgagttaccgtctcggaaactctcaatcacgcaagcgaaaggagaggaggcggctaattaaatattgagcagaaagtcgcgtggggagaatgtcacgtgggtctggaggctcaaggaggctgggataaataccgcaaggcactgagcaggcgaaagagcgcgctcggacctccttcccg

SEQ ID NO: 115292 - DNA, 135 bp, Homo sapiens; identical to SEQ ID NO: 5691
  chr7:97361520-97361655
  hyper

SEQ ID NO: 115293 - DNA, 1341 bp, Homo sapiens
  chr7:97361998-97363339
  hyper
tgatgatctgaattactggtccgactggtacgacagcgaccagatcaaggtgaggccccttcccaggacggcccgcacccttcttcctgggctcgggagctgtcaccttcccacgcaacagcaccctagttaacgtggcacgcaccgccaccacggaaagaggcagcggttgcgtgcgagaggatggaaaggggcactatttcccgggttccccacgggattttgtgcccacgattcaagtttcttcccgagggctgcaccgtccggcccaggaactccctgcagtagggatgccctcccggatgagcccgagatcctcacaaggcgggaaatctcgtaagatttcatcccccaggacctgggatttcgggggctccggtccagctgcactgccctagcgtctgggcacgggcagaggagggcgcctgggtcgcgggcagcagcgggcacacgcgcgagctgcagggggattggagggccggaggctggagggaagttaatttcctgccttcacgtttgttttgcggacctgaggatgtagcttgaagtctccctttagaaactcgtaggctacaggcgctggggagcgcgcctcggaaaaacggtgaaagtcgtctgtaaagcgttgtcacccttccccaccggagccccagccccagatcccacacacctgtgtgcatttagggcggtgaggactctacaaagccggcaccgagacaagacaaagtcaggtggcggcgcagcagatgagggaaggtccccgggctgggaggaaagagcggaaagcgctcgaagcttgaagacgccgagccagctgctaactcgccctggcaggcttgcggggggcgggacgcgagttcggcggggaggggcgcagagaggcagcgcctcgggagggaccccgctcagcccgagcgtggggaaggccgcctccccacgcctcggggccggagtacagcggggggaagggctcgggttgctgggtgcctcgctctggttgccttacacgccctttgtccgtgcttttgtctcccaggaggaactgccggagccctttgagcatcttctgcagagaatcgcccggagacccaagcctcagcagttctttggattaatgggcaaacgggatgctggtgagataggcgaccgtccctaggtgtcttgggcagcccgccctgtctgctcactccttcctggagtaccccagggtctctcgctctgaatagagatttccactccaagaggggtgtaattccccaggcgcgacattggcccacaccgcactaaggcacgcacgggcccgcggggggagggaaagatctggttcgcatgcctcactgt

SEQ ID NO: 115294 - DNA, 675 bp, Homo sapiens
  chr7:97501248-97501923
  hyper
gccacgagcacgatccgacccgtccgccgcagggacccggaccgcgaaaatgtccacaggcttcgacgccacatagtaaaaaaaagtacacatataacatttacaggggctcaaactgccgctgcctcctctccggagcggtccggcctgccggccgcggttccctctcgatgcttcagggaaccaggacagaaaggtccttccgctagctgtcaggtgcgtaacaatcgctaggcgtccgccccgccctccctaccgcaggagccgcagcatcagcaggcgcccgcgaaccgcgtctgccgggtgccaggctgaagaccgcatcctccaccccttccttccggagcagccccagggcacgcgaggaggatgctggcgcggggcgcagggcacggggcgcaggacccggctcacctgggcgtaagcaggtcagggtgatgtggcgggctgaggccagggatgtggacagcttgacgggcggcgaggccgctggcgcttataccgacctggctcctgtaacgcgtgcgggaagtttcatcatgcctgcgaggaccaaccagcgcgcacaggggcggggccgcggggtgtccggggcggagcaggactaagtggggcggcggaagggcgcaaggaggagctcttttgtttccagcgccttgcgtctcagtgcgcctg

SEQ ID NO: 115295 - DNA, 30 bp, Homo sapiens
  chr7:97601571-97601601
  hyper
ccgggtccccacctcgggagcctcccacag

SEQ ID NO: 115296 - DNA, 144 bp, Homo sapiens
  chr7:97680597-97680741
  hyper
cccacttccgggatccggtttggctccgcccccgccctgctgtatccatggtaaccaggtctccttcgcaaggctggaccagtcgccacgacgagctccggggcgccaccggtggcctctctgatggcccgctcggcgaggggt

SEQ ID NO: 115297 - DNA, 42 bp, Homo sapiens
  chr7:97736111-97736153
  hyper
ccggtgtggactgacgagtggctggccgccctgtccatcacg

SEQ ID NO: 115298 - DNA, 30 bp, Homo sapiens; identical to SEQ ID NO: 44441
  chr7:97736838-97736868
  hyper

SEQ ID NO: 115299 - DNA, 30 bp, Homo sapiens
  chr7:97823634-97823664
  hyper
ggaggacgaaaacagcgacgactcggacga

SEQ ID NO: 115300 - DNA, 30 bp, Homo sapiens
  chr7:97881526-97881556
  hyper
gggtgggccggaagcggcatcaggccccgt

SEQ ID NO: 115301 - DNA, 30 bp, Homo sapiens; identical to SEQ ID NO: 44442
  chr7:97911375-97911405
  hyper

SEQ ID NO: 115302 - DNA, 52 bp, Homo sapiens; identical to SEQ ID NO: 44443
  chr7:98030098-98030150
  hyper

SEQ ID NO: 115303 - DNA, 237 bp, Homo sapiens
  chr7:98030419-98030656
  hyper
gcggccccacctgaggcgggcggggcagacgggggcggggccgcagggccggaggggcgtggcgtacccacctgaggcggcctggtgagcggggcccggccggggtgggcggggaggaggcggggccaggcagctggaatgggcgtggccagagggaagcgggccccccgagtgggcggggtcaccccacctgtggcggacagggcagcgaggccacggtgcgccccctcgcggctc

SEQ ID NO: 115304 - DNA, 186 bp, Homo sapiens
  chr7:98245892-98246078
  hyper
cccatcagcgtccggcgcctggtcctggtcccggtccccgaggcccccgggattcttcccgagcgttttccgagttggcgcggggggtggaggcggggccatggagcgcgtcccggggaccgttgcatccggaggcggccgtcgtgcggctccttcccgcctcgagagtgaggtggccgggccttg

SEQ ID NO: 115305 - DNA, 203 bp, Homo sapiens; identical to SEQ ID NO: 5696
  chr7:98246304-98246507
  hyper

SEQ ID NO: 115306 - DNA, 1240 bp, Homo sapiens; identical to SEQ ID NO: 44447
  chr7:98246533-98247773
  hyper

SEQ ID NO: 115307 - DNA, 30 bp, Homo sapiens
  chr7:98741974-98742004
  hyper
acccagcgcgcggtcgccctctgtcttgac

SEQ ID NO: 115308 - DNA, 146 bp, Homo sapiens
  chr7:98923235-98923381
  hyper
cgaaactgccaaagcgccacacttcggctcgcgattgtgaggaaattggttgaggaacggagtgggacgcccatgccgcttcgccagcacttgccaggcgttccgtggggcagcatctcctctgaagggccgccgacagtaccacg

SEQ ID NO: 115309 - DNA, 156 bp, Homo sapiens
  chr7:98971520-98971676
  hyper
ccaccgcgaccggccgaggtaaggttttcactggggtctcttccatctgcctggccgccaggccacgtatccactgaagaggcagagggtcaggatgggaagactccggggaccacctagcccaagacccgcaatcaggcggctctgcaaggctaa

SEQ ID NO: 115310 - DNA, 402 bp, Homo sapiens
  chr7:98971810-98972212
  hyper
ggagggccaagggggcggggccgggctgccctggccacgcccggaccgcctgctccccgcccagggcctgcacagttggcgcccaccggcatcagcgtgaagggagctcctcgctggctgccgacggggctgcagggctcgctagccgctcacctgcgtgtgagcgcggagcccgcagtacccgccgtccgggctcagaggacgtgactccccgaccctgcgcccggcagtccccgggggccgtgcgcccggcccaggctcggaggtccagcccagcggcggctcaggctgcgcgcctggctcccagcctcagtttccccattggtaaagcattgacggtggttgcggacggcttctgcggacagagccttgggctccgacgtctgcgcgggtaccggcagc

SEQ ID NO: 115311 - DNA, 31 bp, Homo sapiens; identical to SEQ ID NO: 5702
  chr7:98990958-98990989
  hyper

SEQ ID NO: 115312 - DNA, 30 bp, Homo sapiens; identical to SEQ ID NO: 44452
  chr7:99005908-99005938
  hyper

SEQ ID NO: 115313 - DNA, 232 bp, Homo sapiens
  chr7:99006251-99006483
  hyper
cctcctgggccagccgccgccgccgcttcagtggccgcagtggccgcaaggacccggacctcagggaggcctccgcacgaagtcggaccgtcctgcgcgccgcctaagtccaggcttgcccgtctgctgccaggcaacaacgcccctagtctctccgttcgggaagacgcgtggccctgcctgccacccaccggaagtgagggcaaatggcaacagcggctctggaattcta

SEQ ID NO: 115314 - DNA, 31 bp, Homo sapiens; identical to SEQ ID NO: 5703
  chr7:99028318-99028349
  hyper

SEQ ID NO: 115315 - DNA, 458 bp, Homo sapiens
  chr7:99036313-99036771
  hyper
cttgaagtgtccggcgcagtgcactccgacggggagccctgcccggtccccgcggcgaaccagtctcttcctcgggtccccctctccccaagcgcgcaggcgcaatccgcgtcgccgactcacgcggctggtttcaggtttctggcgaggccggtgttcggctggcggctagctgggactagcggaacggcggagtctcgattggcagtgcctggacaggcgcaagggccggcgcgggctccgggcgctcccggcatccctcgggcggcggcggcggcggcggcgaggcgaagcgaaggaggagtgtgtgcggcggggccggcggcgggtaaaggcgagaaggctgcaggagaccgagggggagccgggccggtggggccgccgccgccgccatgcaggaaatcatcgccagcgtggaccacatcaagtttgacttggagatcgcggtggagcagcag

SEQ ID NO: 115316 - DNA, 30 bp, Homo sapiens
  chr7:99063409-99063439
  hyper
caaagcaactgggtcgcagcgggagaggga

SEQ ID NO: 115317 - DNA, 30 bp, Homo sapiens
  chr7:99063699-99063729
  hyper
tcctgcttccaccacggagtccaaacagcc

SEQ ID NO: 115318 - DNA, 31 bp, Homo sapiens; identical to SEQ ID NO: 5704
  chr7:99070937-99070968
  hyper

SEQ ID NO: 115319 - DNA, 30 bp, Homo sapiens
  chr7:99097468-99097498
  hyper
ctcagcgcctcttccggtccagccacctcc

SEQ ID NO: 115320 - DNA, 127 bp, Homo sapiens
  chr7:99097908-99098035
  hyper
cgtgccggaagcgcgtcatcgaggccttgcggcacctttccctgcatttccggggcctctctaggcgcctgatggggtgaggtgcatctcgctggtttatcgtcctagccccgcccgacgcagaggg

SEQ ID NO: 115321 - DNA, 30 bp, Homo sapiens
  chr7:99102066-99102096
  hyper
ccagggaagccctgcgtaagcaacgcccct

SEQ ID NO: 115322 - DNA, 120 bp, Homo sapiens
  chr7:99102376-99102496
  hyper
ggtggtgagagtagcgaggatgcgggtgaagaaaacctaagggccccaaattcaacataagcgaggtttgcgggctgtcagcaaggtacagacctacttcaaatcggggcgcagagcgtt

SEQ ID NO: 115323 - DNA, 30 bp, Homo sapiens; identical to SEQ ID NO: 44458
  chr7:99103028-99103058
  hyper

SEQ ID NO: 115324 - DNA, 688 bp, Homo sapiens
  chr7:99149223-99149911
  hyper
aatggcacttggtatcgtgtaagatcgccagaattttacaactcggggtacccaggaaaccagaaaagcccccaccacaagaaaaaccagtgggcacaactggggagcacagatatctgactggggtcattttgtccgcgcgtctttggggtaaaacaccaggactgggggtccagaagggacacgcagaccgcctctctccagtcccaggggtgtctccaatccggaaaccaaaacttcgttcccttcccacctgtatccagggacacctctgctgggggacagcgcttgccaccgccgaggctggcgcgaggaacgggggcacggacccgcttccactccgtcccgggcggtcgtggcgaggggattgcaggacacagccatgcacgtccaactctgtccccgcccggagaagtctgggatgctgggatagaaggggttgtgactttggggaccaggagcactagactcacatccaagccccctggccttcagagcccagggaaagcgtcacaaaagccggaagtgcgtcacacccgccttccggagctgcgctccgcttcggggtcctctctaggatcgcgggaggactttgcatccctgtgtagggctctaatctcgggtttggggatcttgctcctcagcttgtccgctccgaggaggtgcacagggcggggaaaaagggatg

SEQ ID NO: 115325 - DNA, 155 bp, Homo sapiens; identical to SEQ ID NO: 44460
  chr7:99155658-99155813
  hyper

SEQ ID NO: 115326 - DNA, 1137 bp, Homo sapiens; identical to SEQ ID NO: 44461
  chr7:99155931-99157068
  hyper

SEQ ID NO: 115327 - DNA, 13 bp, Homo sapiens
  chr7:99214130-99214143
  hyper
tacacatacacac

SEQ ID NO: 115328 - DNA, 30 bp, Homo sapiens
  chr7:99214432-99214462
  hyper
ggtggtcttcgcctcgccgggttcggaaca

SEQ ID NO: 115329 - DNA, 30 bp, Homo sapiens
  chr7:99214676-99214706
  hyper
aagtggtaaacgggcgcggggacgggtttt

SEQ ID NO: 115330 - DNA, 150 bp, Homo sapiens; identical to SEQ ID NO: 5708
  chr7:99595185-99595335
  hyper

SEQ ID NO: 115331 - DNA, 132 bp, Homo sapiens; identical to SEQ ID NO: 44463
  chr7:99595462-99595594
  hyper

SEQ ID NO: 115332 - DNA, 30 bp, Homo sapiens
  chr7:99613101-99613131
  hyper
aggcgcctggtccagcgattcggaaaccga

SEQ ID NO: 115333 - DNA, 127 bp, Homo sapiens
  chr7:99613132-99613259
  hyper
atgcaaagtcctcccgcgctcctagagaggacccggaagcgcggcgcggtcccggaagacgaggtggtgacacgcttccggcctttgtgactcattgtgtctgtgtcgaggcgtcgggagggcctaa

SEQ ID NO: 115334 - DNA, 30 bp, Homo sapiens
  chr7:99647347-99647377
  hyper
ggccgctacggccccgcactacttttccgc

SEQ ID NO: 115335 - DNA, 30 bp, Homo sapiens
  chr7:99679475-99679505
  hyper
gggcggctggcaggcggcgagggcaaggag

SEQ ID NO: 115336 - DNA, 141 bp, Homo sapiens; identical to SEQ ID NO: 44465
  chr7:99679772-99679913
  hyper

SEQ ID NO: 115337 - DNA, 200 bp, Homo sapiens; identical to SEQ ID NO: 5711
  chr7:99680212-99680412
  hyper

SEQ ID NO: 115338 - DNA, 30 bp, Homo sapiens
  chr7:99686941-99686971
  hyper
actgggagtgtttccgtcgctctccatccc

SEQ ID NO: 115339 - DNA, 334 bp, Homo sapiens
  chr7:99698202-99698536
  hyper
tcctccgcccagggcgggagccagtccagccattggccatcacacccagagacaccgcgatcccagcccactgccgcctttcccgggcccgagcgaagctccggatcccaggcacgcccccccgggccgcagctctctccgcggccgccgcgcggaaggacactgtttacacgacactccctccagcctcctcgcgccacttccgcccggctccacttccgctcggagggcggcctcaaacggccaatcccggcgcgcagcggccccggcctgcccgcccccggggcctacgcgcgcctggggagggcgcgggaacctgggaatgcccaaaagc

SEQ ID NO: 115340 - DNA, 227 bp, Homo sapiens
  chr7:99699433-99699660
  hyper
ccgggcgggaggggcgcccagggccagcctgtgtcgcaggatccttcactgagtccttccacccgccagtccgcggggacagtggcggccgggatgtggccgagctcttctaccggaagctgacgggactgccaggagacgagtccccggttgtcatggtaaccagtggcgggaggcgggtgaggagcggggtcccgtcgggccgggtgggcgccagctccctccca

SEQ ID NO: 115341 - DNA, 53 bp, Homo sapiens
  chr7:99717142-99717195
  hyper
attccttcactacccggctgccaggaccttcaagaggcgccacaaaacggagg

SEQ ID NO: 115342 - DNA, 30 bp, Homo sapiens; identical to SEQ ID NO: 44470
  chr7:99724820-99724850
  hyper

SEQ ID NO: 115343 - DNA, 30 bp, Homo sapiens
  chr7:99725108-99725138
  hyper
ccagagggtgtgggcgatgccgtgcgcgcc

SEQ ID NO: 115344 - DNA, 207 bp, Homo sapiens
  chr7:99725599-99725806
  hyper
tgagcgagatggggacgaggattcgtggcaggcactgagtgaagaccccgcagcccaggagcggagccggaagagggtcctggtcgttgccgacgtggtcgtacctggtcacgggcccccctttcgagtgttaagggaagcctcgcagcccgagacggagggtggagggaacagccagcaggagccggtggtcggagacgaggagcc

SEQ ID NO: 115345 - DNA, 30 bp, Homo sapiens; identical to SEQ ID NO: 44471
  chr7:99746460-99746490
  hyper

SEQ ID NO: 115346 - DNA, 30 bp, Homo sapiens
  chr7:99755665-99755695
  hyper
gcaaaccgcccctccgtcctgtgccaggtc

SEQ ID NO: 115347 - DNA, 30 bp, Homo sapiens; identical to SEQ ID NO: 44472
  chr7:99756004-99756034
  hyper

SEQ ID NO: 115348 - DNA, 31 bp, Homo sapiens; identical to SEQ ID NO: 5712
  chr7:99775637-99775668
  hyper

SEQ ID NO: 115349 - DNA, 31 bp, Homo sapiens; identical to SEQ ID NO: 5713
  chr7:99869133-99869164
  hyper

SEQ ID NO: 115350 - DNA, 123 bp, Homo sapiens
  chr7:100027393-100027516
  hyper
gaggagaaaggggtcggcgcacgcgcggttgagtcctcgagtagttcgggtctcgcgggcctcttgttttggtctcgcgggctagtagggcgcacttggcggggaggcgcttgggcgcgagac

SEQ ID NO: 115351 - DNA, 30 bp, Homo sapiens
  chr7:100027761-100027791
  hyper
ggggagctccgcggcgggacggagcgtggt

SEQ ID NO: 115352 - DNA, 30 bp, Homo sapiens
  chr7:100034176-100034206
  hyper
ggcgtcatttccctcgctccgtccccaggt

SEQ ID NO: 115353 - DNA, 31 bp, Homo sapiens; identical to SEQ ID NO: 5715
  chr7:100064074-100064105
  hyper

SEQ ID NO: 115354 - DNA, 30 bp, Homo sapiens; identical to SEQ ID NO: 44477
  chr7:100076547-100076577
  hyper

SEQ ID NO: 115355 - DNA, 30 bp, Homo sapiens; identical to SEQ ID NO: 44478
  chr7:100077132-100077162
  hyper

SEQ ID NO: 115356 - DNA, 59 bp, Homo sapiens; identical to SEQ ID NO: 5716
  chr7:100091121-100091180
  hyper

SEQ ID NO: 115357 - DNA, 30 bp, Homo sapiens
  chr7:100136695-100136725
  hyper
ctgaggcctgaaggcggtggggcggggcat

SEQ ID NO: 115358 - DNA, 1082 bp, Homo sapiens; identical to SEQ ID NO: 44480
  chr7:100167115-100168197
  hyper

SEQ ID NO: 115359 - DNA, 30 bp, Homo sapiens; identical to SEQ ID NO: 5719
  chr7:100183957-100183987
  hyper

SEQ ID NO: 115360 - DNA, 30 bp, Homo sapiens
  chr7:100201816-100201846
  hyper
gcgggcgggccacctcgggcactggtgaga

SEQ ID NO: 115361 - DNA, 756 bp, Homo sapiens
  chr7:100202089-100202845
  hyper
cgcgggtggaatgggcggcctggggttactgggacggtgagtaactgccggcccccgtccgcaatcgggctccctccgtcgggcgcgagggggcaccccagggctggggggactaggttcctccaaccccggggggcccctacacccagccctgggctcccgattgcggtcccatcaccccctcctggcggcagaagtctcccttgcaatgtttcaggcggggacctccctaaaggggtcctcgggggctgtgccccaagtcgaggacaccctctccagcctgaaaggggactctgctgcagggccggggagatgggatctcctaggggaagaggcgcggtgcggccgcgggtcggggaggggccagaagggggcgtccagccagttcctcctcccgcttccaccgcccgccagtgcgccctgcggccccagacttccccgagccgcgctcctcccggccgctctctgttaacctgcccccatcttacctccccttcttctcgtcccctcatcctgagccccagacatccgagctgcctgccggggctcccagcctagagttctcctgaagctgaccgagggtctccaccgccccccacccccgctcctctctcccctccccagagcaccaattttgcggggggcggctggagaaggcccagggaaccctgaccacgcccaactggcccgagtccgattaccccccgggcatcagctgttcctggcacatcatcgcgcccccggaccaggtaccga

SEQ ID NO: 115362 - DNA, 289 bp, Homo sapiens
  chr7:100203045-100203334
  hyper
tcctggtataacacgcgggcctgtcacttgtgagtgcgccaggacttgaccttgccaaccacgacgaccgacacccctgcagggtcccatgggtgtgtgtggtcctccgtgctgtggtgtgaacgccttcaggaggggggcccagaggacgcgggaggtgggagtgggagctgctgcaggcacccagtaggagatgaggtgcaggcgcccaggggtgtcccgccgcgcagtccccgcctccgcccgccgccaggtcatcgcgctgaccttcgagaagtttgacctggag

SEQ ID NO: 115363 - DNA, 104 bp, Homo sapiens
  chr7:100203366-100203470
  hyper
cgtgttcaacggagccgtgagcgacgactcccggaggctggggaagttctgcggcgacgcagtcccggggtgaggggcgggacctgggcgagtccgggagagag

SEQ ID NO: 115364 - DNA, 64 bp, Homo sapiens
  chr7:100203505-100203569
  hyper
cggggttcagctaaagggacgggatctgaaccccagggctccaaaccggcgaggggagcaggtt

SEQ ID NO: 115365 - DNA, 30 bp, Homo sapiens
  chr7:100209650-100209680
  hyper
aactgttacgtcaccggaatccagccaatc

SEQ ID NO: 115366 - DNA, 30 bp, Homo sapiens
  chr7:100209982-100210012
  hyper
ggtcgctctgcaggcgcccgctgcagcggg

SEQ ID NO: 115367 - DNA, 30 bp, Homo sapiens
  chr7:100210328-100210358
  hyper
cctttcgcccctcacgccccccagctctga

SEQ ID NO: 115368 - DNA, 414 bp, Homo sapiens
  chr7:100224176-100224590
  hyper
tgtccatttcatcactttgatcgctcgggtcctccagcctgaccgatctatgagcactgcgtgtccaggactgggaagagagcatccagaggaccgggactgtgtaggcggggagagagaggagcgcgcagacggggccaggtccaggaggtggagccccaggggaggggcgggacactgggggcggggcgaggagggcggggcctcacccgcattatgcgcacgttgtacatgcgtgtcagtcgctcgtctctctcctccgagctgtagatctcctgccgcagcttttccgccgcccggatgtagtccccccgcgccgagtacacccactgcagggtcagcccgcgggcctggggtggggaggcgcgggctggggctggcggcaggggccaggacccccgcctagcatgggga

SEQ ID NO: 115369 - DNA, 30 bp, Homo sapiens
  chr7:100225002-100225032
  hyper
ctgcgagctgggccacggcctgggccacgg

SEQ ID NO: 115370 - DNA, 72 bp, Homo sapiens; identical to SEQ ID NO: 44485
  chr7:100253769-100253841
  hyper

SEQ ID NO: 115371 - DNA, 214 bp, Homo sapiens; identical to SEQ ID NO: 44486
  chr7:100253997-100254211
  hyper

SEQ ID NO: 115372 - DNA, 30 bp, Homo sapiens; identical to SEQ ID NO: 44487
  chr7:100270816-100270846
  hyper

SEQ ID NO: 115373 - DNA, 238 bp, Homo sapiens
  chr7:100271100-100271338
  hyper
gatcacgtgaccagcgagcggtctcaccctcctcatatgccagtaccacctcctccagtcccagaggggggatgtcttactcctttccgtgaagcaaaccctttgagtacggtttgcgtccacaaagcgtagggtgagaaccttgggagcgactgggcccgtctttgctccctcggtggggttttgtctcctggcttcccccaagtgcgaggcagttggtctcgcccagccgggtcct

SEQ ID NO: 115374 - DNA, 30 bp, Homo sapiens
  chr7:100272208-100272238
  hyper
gccgcaccagcccgcgccttccagctgcca

SEQ ID NO: 115375 - DNA, 142 bp, Homo sapiens
  chr7:100303155-100303297
  hyper
cttagggctcacagcgtgggtccccagcacagacaggaggcggacagcttcccgtgaactgcaggggagtcccgggacgctgtcctccagcgaggtggggaccggctatgtccctcagttccccctcggtcctcgggccaca

SEQ ID NO: 115376 - DNA, 267 bp, Homo sapiens
  chr7:100318466-100318733
  hyper
cgcgccccctggacagccgccctctcctccaggcccgtggggctggccctgcaccgccgagcttcccgggatgagggcccccggtgtggtcacccggcgcgccccaggtcgctgagggaccccggccaggcgcggagatgggggtgcacggtgagtactcgcgggctgggcgctcccgcccgcccgggtccctgtttgagcggggatttagcgccccggctattggccaggaggtggctgggttcaaggaccggcgacttgtcaagg

SEQ ID NO: 115377 - DNA, 1502 bp, Homo sapiens
  chr7:100424340-100425842
  hyper
gagttcggggagcccgggcaggggaatgtcccgggtcgtagccagactccatctctttcccaaacaaaagaaaactccactacccgtcgggcgcctcttccccgcccccctcccgttccagcactatcggtccgaagtgtttgggactgcagtgcccgggtaggggtagtcagaggccggcccctccactccgaggcccagatgttgggggggaggtcccaggagtgacggggtgcgcccccccccgcaaggaaactcaccttccaaagctgcggccaacgaagcccagcagagcagcacccggagctccatggcgccgcctcactcgggtaggatccgaactgagtttggggggccctcgcccccccaggtctgactctccctgggcgggtggacgccgatactccgcgcgggactcctcgtcggggccctcagcgcgggcccatgcgagcgtgcggggcaccgggcggcggcgccaagtgtggccccgcgtctgtgccgcgcgcgcgggcggcgggcccggagcgtgctggcagtggccgcgccgggcgggcgcgcagcaagacgtggctggagttggggtccctccggggcctcggggtcccgccccgggtggcgggggctgagccggccgctcgcggtctccccccctccctggagtggctctgctcgcgccgccgggccgagtgctctcctcgcgggcggggatggtgggagcccgagcggggacggagcgggagggagggagactgcggcgcggagccgggcgggccgggccgggcaggggctgagctgcgctggaactgggccgggcggcgccgggcccgggagggaggggcgcgcggggggcgggggcagctctcccaacgcgggggctccgcgagtgagccccgggcgcgctgattggagctcacgctactgaataattcatgagggaagcggagaggggcaccgagtggagcaggtcgggaagttgagagaaagtttggagaagggggaggggcggcgggtgaggaaccccgggaccgcccagatgtgcgccgtggcggtgcgcgctgtccaggaccgagcatgtcggggctggggcccagggacccccgggacaggcccgaacccggctggcaccagggagcagagaaaacacacacccagcagcaacacggagggccgcccaggcgtgcacgtaaatgttcaccgcgcacacaaagcccgctctgaccttgctgcggactctagatgccgctcttggatgcgcccaccaccctctagtgggcgcagggactgcgttttgggggaaaaggaaggaaaagggagtagaagctttggagaattgacggccgcccagggggcctcaaggagcaatcccagtttggatagccttgcagcgaacgttcacacagtcaccccataaacattcagtgttggggacctactgtgcgcgcaaccaagccctgaaaaatgtccagaggaggcgcgcactaagctgcgctagggagtagaga

SEQ ID NO: 115378 - DNA, 30 bp, Homo sapiens
  chr7:100449978-100450008
  hyper
cggatttcccgtgacgcacctggcccaggt

SEQ ID NO: 115379 - DNA, 30 bp, Homo sapiens
  chr7:100450221-100450251
  hyper
tggagctggagcagcgcaggctggggaaga

SEQ ID NO: 115380 - DNA, 30 bp, Homo sapiens; identical to SEQ ID NO: 44492
  chr7:100464756-100464786
  hyper

SEQ ID NO: 115381 - DNA, 30 bp, Homo sapiens
  chr7:100473296-100473326
  hyper
gagatgaaagacgtcgaggggacgattgga

SEQ ID NO: 115382 - DNA, 30 bp, Homo sapiens
  chr7:100487165-100487195
  hyper
ctagcggcgcggagcgacctcaggctccaa

SEQ ID NO: 115383 - DNA, 30 bp, Homo sapiens
  chr7:100487642-100487672
  hyper
aggggcgaaggcaccgcgggggagggagct

SEQ ID NO: 115384 - DNA, 30 bp, Homo sapiens
  chr7:100494785-100494815
  hyper
gccagtccctgggccgcgcggttcccggct

SEQ ID NO: 115385 - DNA, 253 bp, Homo sapiens
  chr7:100546903-100547156
  hyper
accctccacgggtgtcggggaggaagggcagcttccaggcagttccatgtgggccaggcaggctgtggggctgagccaatagcagctcttcctgcctgacacttcctggacttgtcctatctttttcccccgtgtcccgcttcccacagcgctgacgtctgtctgtccgggtgcagggagaagggaggaagaggggagaggtggggcggtgcaaaggtgaggctgtgctcagccctgacgctcagcaaaaccg

SEQ ID NO: 115386 - DNA, 153 bp, Homo sapiens
  chr7:100608955-100609108
  hyper
cctcacgcgccgccccggctctgcccccaggccctacagtggagcctcgtccccagagtcccgctccaagcccatccccgttgccctacagtggagccctgccctggagctctgctccgtcgccctaaagtgtagccccgcctccttgatggg

SEQ ID NO: 115387 - DNA, 138 bp, Homo sapiens
  chr7:100609360-100609498
  hyper
tctacggtggattccggccgcttgtctagggtggaaccccccagcttgccctagggtggaacccccccgctgccctaggctggagccccgccccctcacccgcccccgcggggcccaggtgcacgcgtggaccccgag

SEQ ID NO: 115388 - DNA, 558 bp, Homo sapiens
  chr7:100660366-100660924
  hyper
gtgcagggagagccccggagtccagagagtgagtggttctgcgggaccaggaagtaagtgatcgctgtgctccgggaggatgctggaagaagattccagacgcagcttttttgcctgctatggttaccgttgctatgaaggagggcggccctgctgacccagagccagccctgtctcccgctccactctgacctcacccctgagtccagggctgaacgcacgctcctccgtggcccccgcttccaccccgtgcatgtggggggcttctgctccgctccctcctgttccggggtccagcgggcggctccccaggcaggctctgcacttacccgcagcccagtgatgcagggtcggaggggtggtcggcagtgggaaagggcgtagggcagatgccgggctgactcttccttttgccagaggaaatcccctctgccccctagtcctccccctaccaaggctcccatcactcatcacggcctctccctacagaccagaatctgagggagagcagattcggccttgagaacgcctacaacaacttccggcccaccctggaga

SEQ ID NO: 115389 - DNA, 234 bp, Homo sapiens; identical to SEQ ID NO: 44497
  chr7:100728512-100728746
  hyper

SEQ ID NO: 115390 - DNA, 30 bp, Homo sapiens
  chr7:100729139-100729169
  hyper
ctgtgccaggagctcgggactccctccctc

SEQ ID NO: 115391 - DNA, 314 bp, Homo sapiens; identical to SEQ ID NO: 44498
  chr7:100770177-100770491
  hyper

SEQ ID NO: 115392 - DNA, 38 bp, Homo sapiens
  chr7:100797580-100797618
  hyper
gttgccatggtttccgcttctccgcctccagccccgcc

SEQ ID NO: 115393 - DNA, 30 bp, Homo sapiens
  chr7:100798046-100798076
  hyper
cgagccgggaggggcgctctggtcttggcc

SEQ ID NO: 115394 - DNA, 2153 bp, Homo sapiens
  chr7:100806007-100808160
  hyper
ggggccggggccccgcgtggcaagggaactcgcacaaaccacccgccctcctgggctggcccccggtcacccgcgggtgagctctgggagttcgggctcaggacccgggaggggggtctggcaggtcccgacgcagcccggggacaggggcagggccaaggggcagggccggggcgcatgcaaacaccgagggggagcgggcaacacggaggggggcgccggcgcgcgcgcgcggcgggggcgcgcgggggcgggaccgggaagggcagtcacgggcgccggagcagcacgtgctcgatgtaattctccagctcctcctgctcctgcagccggcgctcctccgcctccgcctcctcctgcgcgcgccgcgcctgggcctcccggccgggatagtggcgcgaaggcggcaaggcgtggtggtagtggcggcggcgcaaggccgagggcggctgcagtgtccgcggccggatgtagttggggaaagggtggtacggccctggcgggtacacctcgtcctcctcccgatcccagggcgggagcacctcgttccagtccggcagctcgtctcgtgcgggagcgggggcggggggcgggggctgcggggagcggacgtgggtgggggcgggggcggcacgggggggcggcacgggctcgggaggggcgttcttcttccgcttccgcttctcctccacctcctcgatgatgctgaccacgtcgtccgctggcaggtggagtttggtggacagctcaatgaggctgtcgatcgtctgcggatccatctcctcgtcgtcctcctcctccccgccctcctctgtcccctcggcctccttccgccggtggcccggcgtctcctcctgggagcgcttgtcctcggcgccggcttccccgtcctcctcctccgcgaacaggagcgcgttctgccgcgccctctccgcctcctccgcctctgcctccgcctcggccgcctcctcatcctcttcccccaccctctcctccccgccgcgtctctcctgctccgcctcctcctcctcccttgcactctctcgctcctccgccgcctcctgcagcccccgacccccgaggccgcgctgccgggccccgccctgcagcaaatactggagcagcaggtccgaggcgaggtcggccagccgctcttcctgcgccgcggcctgccgcgtggcctccgcctgccgccgcccggcctccacctgcgccagcccttgctggagaaggcgctcgcccgcctcggagccgcccaggagtgcgctctccggccggcgcgccttggggaacggggcggccacgccttggtacgccttggacaggggtgccaatgcctcgcctaggtgtgttttgggggaggacactccttccccgaacttgtgggtttcgggaaggggcccgctgtcgggcatacgcgcctggaattgagagggggccgggggcggcaggggcgcgcgctccgggacacgcgcctggaactctccccaggaagcgcgccatacgcgctctggccccgggctctccagattcactcgggtcagcgtgtgcgtgcgggtttccgtctctgctgccgccgtctcctgctggcgcttggcgctacttggactgaaatctcgcagttcctggagcagggacgctagcgcctcgagctcctcggagggatcgctcgcctcgggcccattctccggagtctgagggcgaggcggagccgcgggctccgggctctccggcgccgggaggctgtgggtctggctgcgcacggtctcggtcagcagagcttcagctgcttcttcctccggcccctgctgggagccgcttggtgccgggggtgaggcgggacggtcgagtgcctgcagcagcaccgcggccagcgcccggggatccacgccctggaaaagctctccctcgtcctgcggctcggaattccgagcgcctcggacctctggggcgctgccatcctttggcccgggcactgcgtccccggctaccggctctttatgctcagagctgagaggaggaggctgcgcctcagggcgaccagggggtgctgcccctaacccgttgatcagcagaaggcagaagagggcggaagccgacaatctgagggctttcatgaccaagaggctgccggagactgaaaaatagaaggg

SEQ ID NO: 115395 - DNA, 675 bp, Homo sapiens; identical to SEQ ID NO: 44500
  chr7:100808389-100809064
  hyper

SEQ ID NO: 115396 - DNA, 231 bp, Homo sapiens; identical to SEQ ID NO: 44501
  chr7:100809331-100809562
  hyper

SEQ ID NO: 115397 - DNA, 42 bp, Homo sapiens
  chr7:100809970-100810012
  hyper
gtggggggcgatgacgcacagatttgcgcaaagagaatccat

SEQ ID NO: 115398 - DNA, 30 bp, Homo sapiens
  chr7:100813115-100813145
  hyper
gacaccccctgactcgtacacacatgtaca

SEQ ID NO: 115399 - DNA, 563 bp, Homo sapiens
  chr7:100815470-100816033
  hyper
gagctggcacatgacgttgaggccaacgaggcgcggggcctggcgctgcaggtgccacagcagctggctctgcacctgcgcgccgtcgctaccgaaggcgtcgatgttgagatagcgccaagtgccgtcccctccgtgcgggatggggaaggggcgcgtgcacagcgtgagcacgcgcgggcgcgcgcggctgtccacgcgccactccaggcccttggccgccagcaggcgcaggttgctttcgctaggccggtagggctgccagtcctggatgatggtcccgcctggaagcacgtcgcgctgcacggagggtgacagcaggaggcgtgccacgtcgccgcctgcctcggacacggcctcggtgggcagcggcgagaaggtgccagaggtccgcagcgccgccagccgcgcgcccagcccggccagcagcgcggacgcgttgaatcggaccaaaaggatgccctgcggggggcacgagtgagcgcggggagggggggcgcagcagggctggcgagcccggcgcctctcggcaggcatcttcactcccacgttcacgcccacgg

SEQ ID NO: 115400 - DNA, 286 bp, Homo sapiens; identical to SEQ ID NO: 44505
  chr7:100816641-100816927
  hyper

SEQ ID NO: 115401 - DNA, 180 bp, Homo sapiens
  chr7:100823170-100823350
  hyper
agttttctgggtcttcggactgggaggggctgggcagaagggggcgcagccgcttggtccccctgaggggcggtggccttctgctgccccattctgcggtggaggagcacgctagccccctccccagtccccaggcccggccgcccccctacctcgccggagccggagctggagccaggg

SEQ ID NO: 115402 - DNA, 431 bp, Homo sapiens; identical to SEQ ID NO: 44507
  chr7:100823380-100823811
  hyper

SEQ ID NO: 115403 - DNA, 177 bp, Homo sapiens; identical to SEQ ID NO: 44508
  chr7:100845023-100845200
  hyper

SEQ ID NO: 115404 - DNA, 178 bp, Homo sapiens; identical to SEQ ID NO: 44509
  chr7:100845248-100845426
  hyper

SEQ ID NO: 115405 - DNA, 39 bp, Homo sapiens; identical to SEQ ID NO: 44510
  chr7:100845444-100845483
  hyper

SEQ ID NO: 115406 - DNA, 30 bp, Homo sapiens; identical to SEQ ID NO: 5734
  chr7:100860804-100860834
  hyper

SEQ ID NO: 115407 - DNA, 41 bp, Homo sapiens
  chr7:100861068-100861109
  hyper
gccactaggaacctcggattgcccacggaagccagccactt

SEQ ID NO: 115408 - DNA, 30 bp, Homo sapiens; identical to SEQ ID NO: 44512
  chr7:100861358-100861388
  hyper

SEQ ID NO: 115409 - DNA, 30 bp, Homo sapiens; identical to SEQ ID NO: 44513
  chr7:100895789-100895819
  hyper

SEQ ID NO: 115410 - DNA, 444 bp, Homo sapiens
  chr7:100951541-100951985
  hyper
agaccctccagggaacgcccttgagtaactcgcgcacttggggcccgtttccacctaggactacaggctcaagatggcctggtagatgcagccggcacgcacctctcctctgacgggaaccgaaggagccggtaggttttcacacttgcagcagatccgctaagagaacgcgggattcagccgagaagccacggggagcccgaggagcggagcagaggcacccaggcagcctgcgcggagaaattggatcggcggggacggcctgcagctcccgcgcgcggggaaagggtgagtgagagaccccggggctatgcagttcccccagggacttccacagccccccgaccctcgcggacctccagaatagggggcagcgggcgagagattccccagcggcgttgcaggagcccacgtggagcccacgtggagcccacgggcttcctt

SEQ ID NO: 115411 - DNA, 30 bp, Homo sapiens; identical to SEQ ID NO: 5735
  chr7:100964951-100964981
  hyper

SEQ ID NO: 115412 - DNA, 411 bp, Homo sapiens
  chr7:101006042-101006453
  hyper
ccgcctcctcggccccggaccgccgagggttaacaaaaaagccccacgccccctttgacggcttagagcccacctcgccgaatttgaaaaggcggccccggagaggcgtgggcgccccccacacatttccagctcgcacccgggctccgaccgctcgccccgctcctctcgctgtgctcccggccggtgccgcgggttcggtccgggcgccggtgcgctcctgccggtcctcgtgcccgggactccgggtccccgcgggctgctgcgcacgatgaagctggccctgctcctgccctgggcgtgttgctgcctctgcgggtcggcgctggccaccggcttcctctatcccttctcggccgcagctctgcagcagcacggctaccccgagcccggcgccggctcccctggcag

SEQ ID NO: 115413 - DNA, 179 bp, Homo sapiens; identical to SEQ ID NO: 44518
  chr7:101006948-101007127
  hyper

SEQ ID NO: 115414 - DNA, 84 bp, Homo sapiens
  chr7:101268842-101268926
  hyper
gctcactgctgtccccacccccgcccaggagcccgcgtcgtcgagggcaggggcagaagcgccggctgacttataattagcttt

SEQ ID NO: 115415 - DNA, 30 bp, Homo sapiens
  chr7:101331851-101331881
  hyper
aggtcctcactccccgggccccagcctcgc

SEQ ID NO: 115416 - DNA, 30 bp, Homo sapiens
  chr7:101386664-101386694
  hyper
agagtttttcctttcgcgtgaactcgccgc

SEQ ID NO: 115417 - DNA, 30 bp, Homo sapiens; identical to SEQ ID NO: 5738
  chr7:101386936-101386966
  hyper

SEQ ID NO: 115418 - DNA, 199 bp, Homo sapiens; identical to SEQ ID NO: 5739
  chr7:101447356-101447555
  hyper

SEQ ID NO: 115419 - DNA, 30 bp, Homo sapiens; identical to SEQ ID NO: 44521
  chr7:101457160-101457190
  hyper

SEQ ID NO: 115420 - DNA, 337 bp, Homo sapiens
  chr7:101457432-101457769
  hyper
acaggaatgtccctcggtggcaatgccgcttcccgccagaagcctgactccgggacagggcgtggcaggcgcgggggcctgggcgcgccggtgggcacgtgcgcggggacccgaggacccgaggacccgagtgtcggggcgccgctgccctctaccgggcggcgcggtcggagctacagcgcggcggccggccgactgagcgcgcgggccggggcgccccacacggaggcagcccttggccacccgagatccacagtgccctgctgtgcgcggcgtcaccgcatctagggtggaggctcgcaacgtgccccccgacgccagcgcgctcccacccacc

SEQ ID NO: 115421 - DNA, 468 bp, Homo sapiens; identical to SEQ ID NO: 5742
  chr7:101458245-101458713
  hyper

SEQ ID NO: 115422 - DNA, 191 bp, Homo sapiens; identical to SEQ ID NO: 5743
  chr7:101459182-101459373
  hyper

SEQ ID NO: 115423 - DNA, 497 bp, Homo sapiens
  chr7:101460544-101461041
  hyper
gcccccggtgacctgcggcgccgggtcccttccttgcgtcccctcggggcttctgccctctctgcagggcccgccatggagcgcgcggcgggtgcgctcggagatgccttctcgggccgggttctcgaaagcagagccccgggggcccgttgggaccgtggcatgccgggcggtggtccgcgcgcggagtccccggcgccgcggggggaccgtgccggggctccccggcccgcgcccgagtcgccgccgtgcccaaggggcgagtgcctgcctgccaccccccgcccggaggagcggcgcacccttagggtccgccccgcacgtgccagctcggcgcccgcggcgccgggacagccccgggactctgccaggtggatgttgtgcgtagccggagccaggttgaaggtgagcggcgtgtgggccagaagtcccgaggttgcaggcgcggagggaaccggggatgtcggggggtgcccgggtcccgcggcttagaatgc

SEQ ID NO: 115424 - DNA, 167 bp, Homo sapiens
  chr7:101499969-101500136
  hyper
aactgagctgctgaacgctgtttttttctacgcagaaaccctcccgactttcacgaggagttgacaggttttcctcttcactcgggctcccttgtcatcgttaaactgaaactgctttcttgtagccaaattctgtggtcccttttcggcctcggcctccttgacct

SEQ ID NO: 115425 - DNA, 89 bp, Homo sapiens
  chr7:101500353-101500442
  hyper
gactctgtcctgccccgtaccacccgccgcgggccacttttgggcctgcgccatgttcctgcccttaccccgcccggtgttagcgtcac

SEQ ID NO: 115426 - DNA, 112 bp, Homo sapiens; identical to SEQ ID NO: 5746
  chr7:101559393-101559505
  hyper

SEQ ID NO: 115427 - DNA, 49 bp, Homo sapiens; identical to SEQ ID NO: 5747
  chr7:101671376-101671425
  hyper

SEQ ID NO: 115428 - DNA, 106 bp, Homo sapiens
  chr7:101707444-101707550
  hyper
taaccgtctctagatccgtcctggtttagcttcttccaaatagttttgtgtctgtgtgagagtgtgtgtgaaacggagttttgctgtgttgcccaggttggtcttg

SEQ ID NO: 115429 - DNA, 80 bp, Homo sapiens; identical to SEQ ID NO: 5748
  chr7:101713617-101713697
  hyper

SEQ ID NO: 115430 - DNA, 139 bp, Homo sapiens; identical to SEQ ID NO: 5749
  chr7:101740642-101740781
  hyper

SEQ ID NO: 115431 - DNA, 125 bp, Homo sapiens; identical to SEQ ID NO: 5750
  chr7:101747614-101747739
  hyper

SEQ ID NO: 115432 - DNA, 78 bp, Homo sapiens; identical to SEQ ID NO: 5751
  chr7:101754976-101755054
  hyper

SEQ ID NO: 115433 - DNA, 68 bp, Homo sapiens; identical to SEQ ID NO: 5752
  chr7:101758485-101758553
  hyper

SEQ ID NO: 115434 - DNA, 50 bp, Homo sapiens; identical to SEQ ID NO: 5753
  chr7:101801838-101801888
  hyper

SEQ ID NO: 115435 - DNA, 106 bp, Homo sapiens; identical to SEQ ID NO: 5754
  chr7:101813724-101813830
  hyper

SEQ ID NO: 115436 - DNA, 190 bp, Homo sapiens; identical to SEQ ID NO: 5755
  chr7:101821747-101821937
  hyper

SEQ ID NO: 115437 - DNA, 60 bp, Homo sapiens; identical to SEQ ID NO: 5756
  chr7:101833091-101833151
  hyper

SEQ ID NO: 115438 - DNA, 50 bp, Homo sapiens; identical to SEQ ID NO: 5757
  chr7:101837120-101837170
  hyper

SEQ ID NO: 115439 - DNA, 98 bp, Homo sapiens; identical to SEQ ID NO: 5758
  chr7:101838785-101838883
  hyper

SEQ ID NO: 115440 - DNA, 673 bp, Homo sapiens; identical to SEQ ID NO: 5759
  chr7:101839912-101840585
  hyper

SEQ ID NO: 115441 - DNA, 67 bp, Homo sapiens; identical to SEQ ID NO: 5760
  chr7:101842080-101842147
  hyper

SEQ ID NO: 115442 - DNA, 103 bp, Homo sapiens; identical to SEQ ID NO: 5761
  chr7:101843349-101843452
  hyper

SEQ ID NO: 115443 - DNA, 846 bp, Homo sapiens; identical to SEQ ID NO: 5762
  chr7:101844638-101845484
  hyper

SEQ ID NO: 115444 - DNA, 167 bp, Homo sapiens; identical to SEQ ID NO: 5763
  chr7:101847669-101847836
  hyper

SEQ ID NO: 115445 - DNA, 58 bp, Homo sapiens; identical to SEQ ID NO: 5764
  chr7:101848392-101848450
  hyper

SEQ ID NO: 115446 - DNA, 304 bp, Homo sapiens; identical to SEQ ID NO: 5765
  chr7:101870645-101870949
  hyper

SEQ ID NO: 115447 - DNA, 190 bp, Homo sapiens; identical to SEQ ID NO: 5766
  chr7:101877330-101877520
  hyper

SEQ ID NO: 115448 - DNA, 266 bp, Homo sapiens; identical to SEQ ID NO: 5767
  chr7:101882598-101882864
  hyper

SEQ ID NO: 115449 - DNA, 9823 bp, Homo sapiens; identical to SEQ ID NO: 5768
  chr7:101891690-101901513
  hyper

SEQ ID NO: 115450 - DNA, 129 bp, Homo sapiens; identical to SEQ ID NO: 5769
  chr7:101916635-101916764
  hyper

SEQ ID NO: 115451 - DNA, 68 bp, Homo sapiens; identical to SEQ ID NO: 5770
  chr7:101917513-101917581
  hyper

SEQ ID NO: 115452 - DNA, 114 bp, Homo sapiens; identical to SEQ ID NO: 5771
  chr7:101918516-101918630
  hyper

SEQ ID NO: 115453 - DNA, 118 bp, Homo sapiens; identical to SEQ ID NO: 5772
  chr7:101921218-101921336
  hyper

SEQ ID NO: 115454 - DNA, 85 bp, Homo sapiens; identical to SEQ ID NO: 5773
  chr7:101923327-101923412
  hyper

SEQ ID NO: 115455 - DNA, 58 bp, Homo sapiens; identical to SEQ ID NO: 5774
  chr7:101924094-101924152
  hyper

SEQ ID NO: 115456 - DNA, 82 bp, Homo sapiens; identical to SEQ ID NO: 5775
  chr7:101925130-101925212
  hyper

SEQ ID NO: 115457 - DNA, 66 bp, Homo sapiens; identical to SEQ ID NO: 5776
  chr7:101926002-101926068
  hyper

SEQ ID NO: 115458 - DNA, 939 bp, Homo sapiens; identical to SEQ ID NO: 5777
  chr7:101926311-101927250
  hyper

SEQ ID NO: 115459 - DNA, 347 bp, Homo sapiens
  chr7:102104792-102105139
  hyper
cccattgcagtccacggccttcaggcaccgttggactggtattcagcaccctcgatcgaccctttccgtgtcatctccctgcaggcccgtgaagctcccagcgccagacccgagaggctacgtcgaggtttacaggcagatccccccagagtccccgaggtgacctgtaatcgaacccacccacgttccagctccttccccactcccaagcccgctccttaaagccctcatctcctcaccctgcatcacccctaccgtaagggtccctcacaggcttcgatcccggcccctatcatggccaagctggacctcagtttccccagatgcagagcgacgtttgtgggcgc

SEQ ID NO: 115460 - DNA, 231 bp, Homo sapiens; identical to SEQ ID NO: 44562
  chr7:102389176-102389407
  hyper

SEQ ID NO: 115461 - DNA, 30 bp, Homo sapiens; identical to SEQ ID NO: 44563
  chr7:102714856-102714886
  hyper

SEQ ID NO: 115462 - DNA, 30 bp, Homo sapiens
  chr7:102715217-102715247
  hyper
ggcccaaggcctgacggagaagctgcgata

SEQ ID NO: 115463 - DNA, 30 bp, Homo sapiens
  chr7:102716057-102716087
  hyper
tcctgcctgagctccgcgtcacagcggagg

SEQ ID NO: 115464 - DNA, 143 bp, Homo sapiens
  chr7:102789381-102789524
  hyper
agagatgcaggctccgcaactcgcgaggtgcgaaaattcaaatgaagccctgtcgctcacaagtgcggcatctccgagatgagggagggctcggggacgggaaacccactctcagcccgctccacttcgccgaagaattccaa

SEQ ID NO: 115465 - DNA, 30 bp, Homo sapiens; identical to SEQ ID NO: 44564
  chr7:102920308-102920338
  hyper

SEQ ID NO: 115466 - DNA, 691 bp, Homo sapiens
  chr7:102920837-102921528
  hyper
cagcacccccgcctccgcgcttccccgagcgtgcagcttccggtgagggcagccccacgcacagccccccacaccctccccagcgcctgcagacttcggtgcgcgcagttcctaagcccacatgcgcagttctcaccttgcgcgcagcctcacgtacagcccccgacaggctcccagccccactggcgcagaacccatcaccgcttgcccttcacgcgcttcattgggagtgcagcccccaccccgagcgcacagctccacgcagcctctccacactctccccagcgcctgcagcacccgcagtgcgcacagctccgccagtagcttccccgcgcgccgcccctgcaccgcttcgggccataaccttgctggcgactaagtctgaagaacttcccgtggtttcattcttttcttcgcgtttagtcttagctctgacattttaaccaaaaggttacacgttaattaacgaggtattgaaggggaagatctcagctgaaagaaatgactgtaggaagtgtgtcagggaagccaacggaaccgccggcccgccggtggtgctccgggcattaggaacgtctctgctctcctacgatcgctgaggtatcggacagtcagtgcccgttgccaacacggagggaacgggccgagactgcgggcaacacgtggcagagccggcgtgagtctggtgggt

SEQ ID NO: 115467 - DNA, 52 bp, Homo sapiens
  chr7:102937734-102937786
  hyper
catttggtaaagaccgctcagcatcatggtcgggccctgattgctttcacaa

SEQ ID NO: 115468 - DNA, 8 bp, Homo sapiens
  chr7:102937865-102937873
  hyper
cggaagca

SEQ ID NO: 115469 - DNA, 30 bp, Homo sapiens
  chr7:102985023-102985053
  hyper
tgatggcggtgccccggccgtccgcggcgc

SEQ ID NO: 115470 - DNA, 88 bp, Homo sapiens; identical to SEQ ID NO: 44567
  chr7:102985259-102985347
  hyper

SEQ ID NO: 115471 - DNA, 30 bp, Homo sapiens
  chr7:102988351-102988381
  hyper
tttagtctggacaccggccggattaacttg

SEQ ID NO: 115472 - DNA, 1182 bp, Homo sapiens
  chr7:103085749-103086931
  hyper
ggcccggcccaggtgcgcactagatgaggcagtcaaccaagtcaattggttcccgatcaactaaatctctcctaaaaataaacactgccgcgagcttcgagagttcagcgtgtcagagcctctatgatggcagagcacctgccgcgatgcctgattggtagggagaaggatttcccgggagggggccaataccaaattttagggctgttaggctctgagcagtcccttcgtgaccggataagtcagagacccggggtttgagccttgcccggcgctgagcggagggcccagtttcgggaccacagccttgctccctgggagctccgggcggccaatgccgggcaagcccagcccggcacaggaggaggcagggcccgtctccggaaagagggccagaggcagaactgagggcctggttttgtgtaattcgatttggatacaaacaggccagacccaaactggaaacggcgaagggctggattagcaccgaagggattcgaggaggcaaacgggaagtaaaaatgctgtgtggagctgcagagggcaaggggacaggggttgcaaaggaaagagcttcgtgagactttctccttcccggcgtagggaccagcagagtgcgggcaggtcagccctgtcaccggttcgtttagggaaaaagcgcgacatggggcctgggagacaggggcagaggcggtgacagcgagggcccctgctcgggtgggcccgcgggcctcagctcagtcccctcccgagggaccgcgacccccggccccgcggccgcccgcgcgcactcaccagcccgggctgccctgggcggagccgccccgccgcgctccacagccgctgcctcttcgacgcgcgcgctgcctccaggtgcggctctaggaggaggcgccgcgggcagtgccggccgcgccccgcgactcccggtaacccgagcccgccccgccccgctagggccaggccccgccgccaccctccgcgctgggacgccggggcgcgggcatccctgccgcctacggatctcttcccaagcacctagaactttccaaagcgtgcttggaatttaacaccttggtcgtcgatccccgcaaatatactctgatgagaccggctttcttcccataccgcccaggagtttctccaggtggcattcctgtcgccttgaggtggaacatcagt

SEQ ID NO: 115473 - DNA, 87 bp, Homo sapiens
  chr7:103087708-103087795
  hyper
cctttggctgggagcgctggtgctgttcttcatccgagaggaaaggctagagattccctccctactccacacgagggcgatctcttc

SEQ ID NO: 115474 - DNA, 665 bp, Homo sapiens
  chr7:103629129-103629794
  hyper
tgtcaccagcctgcccgcaaagcccagcgacagcccccaacgcccccccggggacccatctggggggaccgggagcaggacaaaggtctgaaatccaagtcctaggagtaaagaaacaaaatgcgcaggttcaatttaaagtgcctgcggtaagtacggggagtgagggggaaagacaccggcctccaagaattctcaggcgtttagcacaagcaccagctcattaccaggagatgcgttcggggagtggggacatggagaatgaatcccaacttgtgactccattctccactaactttattctcgctccctggaccaagcgcatcgctggggccagggttgtcatggttcttgtttccaaggccccttggaagaaggaaagggatgagaaaggtgcgctggcgggcgcacccggcggcggcgagcgcggaggtgctgcggtacctaccatggtattcttgtcccggaacgtagtaggtggggttgcccgcaatatgcagggaaatgagcacctcgccctgctccccatccccttccagctccccgtggtgggtgcacaggaaaaagaagggcgaaaagcgggggtaatagccagccgccgcgcgcgccctcagcgtcgcccccagcaacagcgctaggaggaaagtctgccgggcccagccact

SEQ ID NO: 115475 - DNA, 756 bp, Homo sapiens
  chr7:103630363-103631119
  hyper
cgctgagcccgcgactcttctgcgagggacgtcaaagccccgcagagggcacctcccgtccagctgtctgaaggggaaggccagcccctttggccgtcagtgtgccctgtttttcctgggaggatgcgtgagggaaggagaggggcggcagggacggccgctggcgccggtttctttgtctgagccggctgcgtcccgcgcccctcggggctcgcagtctgccagtccgggcggcccgcactcgttctgggaatccgcccgaggccgcgaaccgctaggggccctcgcgctcccttcccacccaggccccctgtccctcccgccgcggccgcccggcccctcgcggcagcgacagagcctcatctgtagaggattttaaaatgagattaagcgaaagtggaattggcagactcgagtggtgcctggaaatggtgatttgtgctgctcggttgtggggaattgtaaggcaggaagggctggcggagctaagatccgacaggctctcttcgccggactgttctgttattcattgcttctgggctcttcaggcagagatgggtgttgtaattttttaaatcagtgtttatttcctttaaatgtcggttatgaccaatggccctgaaatcgggggagggaaaaacgttcaggggagatgctggcagcggtgattgaagcgggtggtaatgagcggctgcacatgaactgcagggaagtgaaataatccataagcacgtttttaaccgaggacggctggca

SEQ ID NO: 115476 - DNA, 141 bp, Homo sapiens
  chr7:103968589-103968730
  hyper
gcagaggtcgaagcacgtttctgtgcggtgatgaaatgctcgctgaatcagcctctcgagcccggcctctcacacccaccaggatcctggggttgtctctaggatccctgtgggtgctcctgccaccttcttagactaccc

SEQ ID NO: 115477 - DNA, 606 bp, Homo sapiens
  chr7:103968915-103969521
  hyper
cgccttcagctgcagcagctgcagcggcggcggcgggaagaggggtggagggtggtgaggagggccggagcccgggccaggagggagggaggggagccgggaggctgtgccaggcgagccggaggggtgctccgcgctcccccgccctccttccgggagcgaggatgcagactctgaaactggtgctgctgggctgaggcggaggcaggggagttgcagcgcgcgaggctccgtgagtgtgtctcctgcgcgctgagaggcggggggaggcggaggaccaggaggaggaggaggaggaggaggagggggagaatgcccggagccgccgccgctgccgccgccgccgccgccgcgatgctcccggctcaggaggctgccaagctgtaccacaccaactatgtgcggaactcgcgggccatcggcgtgctgtgggccatcttcaccatctgctttgccatcgtcaacgtggtgtgcttcatccagccctactggataggcgacggcgtggacaccccgcaagccggctatttcgggctcttccactactgcatcggcaacggcttctcccgggagctgacctgcaggggcagcttcacggacttctcc

SEQ ID NO: 115478 - DNA, 116 bp, Homo sapiens; identical to SEQ ID NO: 5784
  chr7:103969562-103969678
  hyper

SEQ ID NO: 115479 - DNA, 391 bp, Homo sapiens; identical to SEQ ID NO: 5785
  chr7:103969693-103970084
  hyper

SEQ ID NO: 115480 - DNA, 39 bp, Homo sapiens; identical to SEQ ID NO: 44575
  chr7:104652242-104652281
  hyper

SEQ ID NO: 115481 - DNA, 38 bp, Homo sapiens; identical to SEQ ID NO: 44576
  chr7:104652580-104652618
  hyper

SEQ ID NO: 115482 - DNA, 30 bp, Homo sapiens; identical to SEQ ID NO: 44577
  chr7:104653111-104653141
  hyper

SEQ ID NO: 115483 - DNA, 30 bp, Homo sapiens; identical to SEQ ID NO: 44578
  chr7:104653768-104653798
  hyper

SEQ ID NO: 115484 - DNA, 279 bp, Homo sapiens
  chr7:104654731-104655010
  hyper
gggcatagacactccgagcagcctcgccgtcgtctctgcgttcctgttgactgcctggctgccccctcccctactcctcggttcctggtgaagaggctgcgcgctgctgtttggggagggggtgtgtggagccgggtcctgtgtccgcagtggctgctgtcggggggtcgcctgttcgcggaggtgcggagagactccttgggggtcgagcacataacggggttcgggtgtctcgtgtgtgaacatcacaggttagtgcctgtcgtctccatgggagtt

SEQ ID NO: 115485 - DNA, 30 bp, Homo sapiens
  chr7:105028524-105028554
  hyper
gccaggaacacgcccgaggcaaaccacttg

SEQ ID NO: 115486 - DNA, 30 bp, Homo sapiens
  chr7:105161968-105161998
  hyper
cagtccccagagcccgcgtggcgcctagta

SEQ ID NO: 115487 - DNA, 30 bp, Homo sapiens
  chr7:105162562-105162592
  hyper
acgcaagagagcggcgaaggccacttggat

SEQ ID NO: 115488 - DNA, 166 bp, Homo sapiens
  chr7:105162863-105163029
  hyper
ctgagtcgcaccagcggcagagagcgatttcaccaagcatctaagagttctttagatctttaggaagtctaaggcagcgattgcctcctttggtgttatattctaagtgtttccttcacatagttgtggccctttcacgttgcaccgaccacgcagttgacaataa

SEQ ID NO: 115489 - DNA, 196 bp, Homo sapiens
  chr7:105221810-105222006
  hyper
gaaagaaaaggagggcgctggtgaggtagctaaccacctccttgatctgatgcttttccaaatactccgcggcttggagctccctgctgctggtctccatcgctccgcgtcccgctgttgctaggcgactgcctggcgtctcagccgtgcgactctgtctccctctacccggcgcggtcacgtgacacgcctgact

SEQ ID NO: 115490 - DNA, 138 bp, Homo sapiens; identical to SEQ ID NO: 5787
  chr7:105331661-105331799
  hyper

SEQ ID NO: 115491 - DNA, 627 bp, Homo sapiens
  chr7:105332029-105332656
  hyper
aatctgatgctacgacgactgtaaacatgttgtacttttggaacctgaagcgatccacattagcacggatgtcagtaaaaaaaaaaaaaagaaaaaaaaaaagagagagagagagaaagaaaaaggagggaaaaaaatcgcaacgactaaacaacaacaaaagcccagccccaaacagagcaacgtgatacggtattctgcacggtgcacagcccgacggctgaccagctgcagtcaataccagctatccgcgcttgcacacgccaactgttttgactacacgcacttgttaaacacggagtttcaggtcctaccagttggacaccagaagttcatagaactgacccagtgccaagaacaacaagcacagaaagcgaaccggctgcctcgtgcgggtgtttttgttaactgtttatgcaagccccaaagcaattgggtaacaattacgaataaaaaagaacttaaattacaaaagcaaaagattaccaccttgaaggaaatgtagatattggcagctgaaggacagacgtcatgctactttattggtggggtgggtgggtagttttcagagagaactggttgggggagggggaggtgtcacatgacacactgcggttattagcagaa

SEQ ID NO: 115492 - DNA, 190 bp, Homo sapiens; identical to SEQ ID NO: 5788
  chr7:105516544-105516734
  hyper

SEQ ID NO: 115493 - DNA, 30 bp, Homo sapiens; identical to SEQ ID NO: 44584
  chr7:105517432-105517462
  hyper

SEQ ID NO: 115494 - DNA, 257 bp, Homo sapiens
  chr7:105517674-105517931
  hyper
cagtgggtagatgtcgttctgaaacgcaggtgagtttggagcgctacgagctaccttcccatctcaggctgcggggcgtgcaaaactcaaaagttagggcccccggacccccgggttccccgcgcggtgcgtatctccggctctcagagaaccactgcatggactttgctccagggtcagcagagcgggagggcgaatttacggctcttggaagacgacgctaacgggcctagcccctgagccgtttccagcgctcc

SEQ ID NO: 115495 - DNA, 31 bp, Homo sapiens; identical to SEQ ID NO: 44586
  chr7:105752146-105752177
  hyper

SEQ ID NO: 115496 - DNA, 30 bp, Homo sapiens; identical to SEQ ID NO: 5789
  chr7:105753119-105753149
  hyper

SEQ ID NO: 115497 - DNA, 30 bp, Homo sapiens
  chr7:105924636-105924666
  hyper
caaggagtttgaaacggagcccggcggagt

SEQ ID NO: 115498 - DNA, 30 bp, Homo sapiens
  chr7:105925957-105925987
  hyper
cttcccgtccaccacgcgcagttactcacc

SEQ ID NO: 115499 - DNA, 40 bp, Homo sapiens; identical to SEQ ID NO: 44588
  chr7:106239343-106239383
  hyper

SEQ ID NO: 115500 - DNA, 688 bp, Homo sapiens
  chr7:106508244-106508932
  hyper
agaccagcgtggcggcggacttctaccaccggctgggaccgcatcacttcctcctgctctatcagaagaaggggcagtggtacgagatctacgacaagtaccaggtggtgcagactctggactgcctgcgctactggaaggccacgcaccggagcccgggccagatccacctggtgcagcggcacccgccctccgaggagtcccaagccttccagcggcagctcacggcgctgattggctatgacgtcactgacgtcagcaacgtgcacgacgatgagctggagttcacgcgccgtggcttggtgaccccgcgcatggcggaggtggccagccgcgaccccaagctctacgccatgcacccgtgggtgacgtccaagcccctcccggagtacctgtggaagaagattgccaacaactgcatcttcatcgtcattcaccgcagcaccaccagccagaccattaaggtctcacccgacgacacccccggcgccatcctgcagagcttcttcaccaagatggccaagaagaaatctctgatggatattcccgaaagccaaagcgaacaggattttgtgctgcgcgtctgtggccgggatgagtacctggtgggcgaaacgcccatcaaaaacttccagtgggtgaggcactgcctcaagaacggagaagagattcacgtggtactggacac

SEQ ID NO: 115501 - DNA, 1363 bp, Homo sapiens
  chr7:106684799-106686162
  hyper
tggcaccacctctgcgggggttcaccatggcgaatgacgcctgggaagcggggcgagtggccagcccgctcctggacgcgcggacaggtggacacgaaggcggcctcgctgggcctccctccgcctctcccggcccgggcgcgcagccctgcggtggtctgacaggcgggtgcgcggcgccagccagcggaggttgccatggtttccgggggtcacgtgggcgcgctctcctgcgccccctcccgcgcaccgcggcggggcgggggcggggcgcccgggcgggggagaggcgcggccgcggctggagcgggaggagcaggagatgctgccagccctcccggggccgcgctcgctcagccgccgccaccacacggagcagacgcgcgccgggagccgcgggccgggccagccgggccgccggggcccagtgcgccgcgctcgcagccggtagcgcgccagcgccgtaggcgctcgctcggcagccgcggggccctaggccgtgccggggagggggcgagggcggcgcccaggcgcctgccgccccggaggcaggatgagcatcgagatcccggcgggactgacggagctgctgcagggcttcacggtggaggtgctgaggcaccagcccgcggacctgctggagttcgcgctgcagcacttcacccgcctgcagcaggagaacgagcgcaaaggcaccgcgcgcttcggccatgagggcaggacctggggggacctgggcgccgctgccgggggcggcacccccagcaagggggtcaacttcgccgaggagcccatgcagtccgactccgaggacggggaggaggaggaggcggcgcccgcggacgcaggggcgttcaatggtgaggaccagaccccccacttcgcgcccccggatcccctcgctgccccccaccgctccccgctgtgctctcggatcttgccgctttgcgcacccacctctccccgcattctccacctttccctaccttcccatctcgcccaccccctcagcatccatttctgtctctcccactcgcccaccttcctactccgctctctgtcataccctcttcccttcctctagaggtgggagagctgggatgttacgcttccctcttaccctttgccccctctgcctgggccggttggggtgggcatctgctagaaagacaactttcgctgtggttggaggtatttcgcttagaggataccattgtgcataaagaaactggcccgcttggcgtcttctttcagcccttgtatttattaatggaatgtcgaaagagaaaaggagaaccgtgtttaatatgattggctttactgttgttaggacggtagattcgctaaaagaagcatgaaattg

SEQ ID NO: 115502 - DNA, 198 bp, Homo sapiens; identical to SEQ ID NO: 44591
  chr7:106808941-106809139
  hyper

SEQ ID NO: 115503 - DNA, 30 bp, Homo sapiens
  chr7:106810313-106810343
  hyper
gaaccgggaggcaccgctctgtgtgaccca

SEQ ID NO: 115504 - DNA, 30 bp, Homo sapiens
  chr7:107204370-107204400
  hyper
cagcagaacggctccgcccaggtggtgacg

SEQ ID NO: 115505 - DNA, 30 bp, Homo sapiens; identical to SEQ ID NO: 44592
  chr7:107204705-107204735
  hyper

SEQ ID NO: 115506 - DNA, 273 bp, Homo sapiens
  chr7:107220330-107220603
  hyper
agagagtaggtgaccggaaaggagtgcgtcttaagcgcgttcgctgaatttgcaccacccaatccagccccgccgcccggcgccgctccttagacctggaccccggcaccctcccgccggggccgcacttagcagtggaaagtctgtcctcctgaagaagttgcgctccgacctccaagcatcaggtcaaaagtctaactcattctctgacctgccgccaattagaaaacaactgttgccaataaacgtggtcgcgccgcctgtgacctcagc

SEQ ID NO: 115507 - DNA, 30 bp, Homo sapiens
  chr7:107221121-107221151
  hyper
ggacaaaaacgctgcgcctcggggccttga

SEQ ID NO: 115508 - DNA, 1550 bp, Homo sapiens; identical to SEQ ID NO: 44594
  chr7:107300981-107302531
  hyper

SEQ ID NO: 115509 - DNA, 95 bp, Homo sapiens
  chr7:107383747-107383842
  hyper
aagaggaggcagctgcgccgcactggctctccaccctccatccggccctggcgcccagtcgtcaggtgttcgagaggttcgtagcgtcacaagcg

SEQ ID NO: 115510 - DNA, 183 bp, Homo sapiens
  chr7:107384543-107384726
  hyper
gcacgcgctcgctgcgactccggcgcggttgacttccgctcccactgtgctctgcgagccgaatcatggatcacactggtaaggaggcggaggcagtgggggtcccggttccaagcccccttggccggcctggggctggtcgcacagcaggcaaaagggattatgctcgccccacaacactag

SEQ ID NO: 115511 - DNA, 323 bp, Homo sapiens; identical to SEQ ID NO: 44596
  chr7:107531674-107531997
  hyper

SEQ ID NO: 115512 - DNA, 2121 bp, Homo sapiens
  chr7:107641950-107644071
  hyper
ctggacgggaggaggcgctagcagagcctcgaaccccgctctcagccctcacctgcaagtggctgacgatacagtagggttcgggcttgtgcagcccgcacgtcgaggtcaccgaaagcttctgtgctcggccgatgagaaggtcgcccgtggcgggatagcagctgccttctgcgcagccgtagctgaactcgggttcctgagcgcgcactcgggctctgcacagggctgcgggaaggacaggcaacagagttggggggacacaagcagggagtggagcccgaaaaaaacgaacaagcgggggcgggggagtgggtgcggagagaggacagtccattcggaagaaagcaaaatgcacagaaaagacaatggagagatgagcgcaggagaggctgggaaggcagggactccgaaaggagaaggacacggaaagaaacccacacacgtcatcaggtctgtccagcagcgagagcctccctcccgggaaacccaccgacgctcgcgcccaccctgatcagccccggggagcagctcccccaacaaagggtggatgtgtagaccctccacttcgacgtgtccggagcccggcgcagggaggctgacccccaaagggccacacacccacgcacgtgaacccgcgtgcacgcggcagcccgcgcatcctcggtgtgagtgtgcgcgtggagatctgtgagcttgggaagcgagagtgcgtgtgcgtgcacgcgcgagggtcaccggcgcttcgctggggacgaggcgccggggctcgcggtggacgccgctttccggagctaggggagcccatggacagtccctggggctctggagtggtttcaaggcttctccattccagggaagcgccaggtcctgctgtttctggtgccatccggagacaaacagagatggttaattaaagccacatggcccccatctgttcccagaatgaagcctccgctcagctcaggcactctcctgggcaatggatttttggagagccctcctcggtcagcaccgccaaccccagggaacctgccctctgcggtggggaaacccagggtgaaccggccgagggtgcaaaaccctgagcgggggccgcgggaggccgcaggggccggggcttgggcgcagagcccgggggatgagggtccgcggcgctccgcgtgcgctgtctccagccaccaccgaagcaagggcggtggcgtttaatcccaggggcgtcatttccatccagtccctctcccaagcccccaggatcccacgaaggtgagcaagcagcttttgggttttccttccccatgcccaagtccgtccgcctccccgcaccgtttccacggaattacctaagaaactgaaagctagcaactggagaagccccatgccggctccctgcagccacggggacgcggcagaggagtggagaagacgcccgccgagccgcctgccctttcttcccgtcttcctttctggagaggtggaaaggaggggaaaaaaggcaaatgttcaaagagagaagaggcgcccttccatttcctgtcgctcccacggaagcggggggtgggctggaaagtggggaaaatcgtgcagccactttgttctcctcacccggcgacgcgagctctcgccctgctccgggagcccccgagcccaaagaagggaattagaaagtttagccttgggaggaacagagggaggcgcctctgctcatgcgcatacggagagccggggctgaaggggcgggcggccgcaactctgcgaggaccgggtgaggtcccggtcccaccccccggggcgcctcttttgtttgaaagccgaatctgcgatcgctgcggggctggggcgcttccaggtcccagggcgggtccgccccggggtgcgcgtcccagaacggcgcgcggcggggccgtccagcgaggggggcggatgcgtgggggcgtctccgaggtgggttttcaggttgcccagccagggggccggcgggacctaccgcggactcgcgcatttacgttcgcaagaagtgaatcaccaaacgtgcccacggctaaaactctcgtgcggtgcgctcggggaaggcgggttaaccctttagaaacagggtcgacctgtcgtgtttgttcttta

SEQ ID NO: 115513 - DNA, 349 bp, Homo sapiens; identical to SEQ ID NO: 5799
  chr7:108095228-108095577
  hyper

SEQ ID NO: 115514 - DNA, 1913 bp, Homo sapiens
  chr7:108095780-108097693
  hyper
cgctgcgagatggatgctccagggcgggtaatcactcctggctcaacacagcatcccgggcggagcggatgccagatcccaccgctaagagcctgggctgggaaagcaatctttccaggcagcccccagcccggtgcgccggccccgacaagtcccagccctcggaggcagggcggggcgcagggactcccgggacccgcacctgtaaggccgacaaagcccccgcaagcgccccacccctctgtcctccgtgtctctctcgttccgcctcgattccccgagccctctccaggcagcgactggagaagcgaagtcggcctcgcccccgaactccgtggtcagcacaggtgtacgcacttccgaacaaagcccacgcccagacgtgtccgcaggggcccgaacaggcacacgcccgtgcgctcccggcccggcccccgcgctcctcgccccgccggcactgtggcgtgacgccccgcgcctccgtgtccaagcccgggaagccgccgtgccgggcccgcaggctctccatgcccaactgcccacgagcaagagctctgggcagggcttcccggaaagcgtggggtgcgggcgcggagcagaagttggccacaggctggagggggtggtgggtgccggcgctgctggatttcagctgtgccttcacccaagcgcaggtccccctgctccctctcggcgcccgcgggagtgtcgggggcctgcaggggagaagggagttggagatctgctttgcccctcctgcagcgctgccagcccggtgagcgctcggctgaaccccgcggcggtgtccaagtgacaacgcagcagcctcgcgcgtcctcctccgctccagccgtcacccccgagcaggacccagtgtcaccgccagacgcgcaaggagctacttacgttctcgcgccgcgccctccgctcagctctggcgcgactgcccaggaccctggaccgccggtgtcctccgttctcgacgaagctatcccctctggctgctccagccaggcggcccctgcgccgtcccccgcgcccgcgcgtctgaggctcggactgcggcgcgcgtccgccagcgaccctggcgaagcgaggctggccccgcgccggcgcgcgcccccgccgctcccgccctctccgctccccctccccgcgccgtgcttttgcccctcccggctctccttagcgtcctcccgtccccctcccccgcactccctgcgggcgtcctccgcctcctcccctcctggccaaccccctcttgccctgctgctgcgacggcagcgaatgggctccagccgccggcgcctcgagggactgggtggcccctcacctgagcggccgccccaccgccaacctccgtcagcctgcgagcgcgtgtggcggcgggggtgggggtgcggggacggagggcgggagtgttccggggctaggatggctgggatttagctacaaaagatgttccagaaaatgggtagtttttgaatgccactctcatgggtttagctttctgtgggaggtctgtggtcttctagttttttcttttttaaaaagcactttcttcgaaattcatcagttggggtggttgagattgggtgagtggttttgggggttttgttttgtttttgcaaccgttctttccaaacactccccgccgccccccaccaccgcagaaaaaagagcttttagcataaggcggatgctatctatccgcggtagaaactgggtcttctggtcccaaggaatagggttagttcggatttgcttatttacaaatgggggagtattatggagattttttttttttttttttggcaatgtaaatcgagaattaagattttccaactgtatagtatttgagtaaacacactgcttgctgcatagttcaggctccgaagcgcacgtctccactc

SEQ ID NO: 115515 - DNA, 30 bp, Homo sapiens; identical to SEQ ID NO: 44602
  chr7:108166530-108166560
  hyper

SEQ ID NO: 115516 - DNA, 30 bp, Homo sapiens
  chr7:108166767-108166797
  hyper
gcaaggcgggaagccgcgacagacgtgtgt

SEQ ID NO: 115517 - DNA, 87 bp, Homo sapiens
  chr7:108210023-108210110
  hyper
aggcccctggagaccggggccggcgacggatgcagggcggccctcctcactgaggatgcgccacaggtccaggcctctcgagcccct

SEQ ID NO: 115518 - DNA, 58 bp, Homo sapiens
  chr7:108210172-108210230
  hyper
cggtttaagcaccgccttttcgggggttgaagccggaagtggcgcacagccctagcag

SEQ ID NO: 115519 - DNA, 46 bp, Homo sapiens; identical to SEQ ID NO: 44604
  chr7:111202651-111202697
  hyper

SEQ ID NO: 115520 - DNA, 241 bp, Homo sapiens
  chr7:111844235-111844476
  hyper
taagcctctgcccaccgcttgtaaagaaaggcaagagaggaactaatcgataccagcaccccagctgtgacctggcacatgaagaaatcaagaaaataaatcccatccataatctgtataatttaacacttggaagaaagcaacatctgggatcgactccaagcaggacagttttgcctggatggatctgagcttcctgcactgagtgttaaagccgcttaggaggcgatgccctcgggtc

SEQ ID NO: 115521 - DNA, 30 bp, Homo sapiens
  chr7:111845167-111845197
  hyper
cgggaactgtaacccgcctgaaatgggagg

SEQ ID NO: 115522 - DNA, 30 bp, Homo sapiens
  chr7:111846353-111846383
  hyper
cagcgttgacactgcgccgcccgcagctct

SEQ ID NO: 115523 - DNA, 67 bp, Homo sapiens
  chr7:111846863-111846930
  hyper
tgagtacggtgccccggaggcgcggctgatgtgtcttcctttctctatgaccgggtgtgcaacggac

SEQ ID NO: 115524 - DNA, 58 bp, Homo sapiens
  chr7:112090451-112090509
  hyper
cgcccacagagtgacgtcaggtggcggtattgctacttaaggcgtcgtggcctcccct

SEQ ID NO: 115525 - DNA, 30 bp, Homo sapiens; identical to SEQ ID NO: 5803
  chr7:112149590-112149620
  hyper

SEQ ID NO: 115526 - DNA, 20 bp, Homo sapiens
  chr7:112429891-112429911
  hyper
aacagcaatttctctccctt

SEQ ID NO: 115527 - DNA, 181 bp, Homo sapiens; identical to SEQ ID NO: 44608
  chr7:112430003-112430184
  hyper

SEQ ID NO: 115528 - DNA, 141 bp, Homo sapiens; identical to SEQ ID NO: 44609
  chr7:112430224-112430365
  hyper

SEQ ID NO: 115529 - DNA, 45 bp, Homo sapiens; identical to SEQ ID NO: 44610
  chr7:112430590-112430635
  hyper

SEQ ID NO: 115530 - DNA, 254 bp, Homo sapiens
  chr7:112579977-112580231
  hyper
ttttgagggctgggcggaaacggaaaaggctaagggccaatgggcagaaagcgccggcggcgaacccggttgtttgggaaggcgagcagctggaggaggcggagcttgcggggatagggaggctgaggcagtgggagctccaggcctgggtgctcatctcttccccaccctccccggattctgtgcgcaggcgctgtggctcggcctcgggagacgagctgtgagcaacgcgcttgcgcgtctcagtttgctta

SEQ ID NO: 115531 - DNA, 397 bp, Homo sapiens
  chr7:112726513-112726910
  hyper
actgagcatccaggcagggctcggcggcgcctgcgcgctggagcctccttgagctccagccgcgtcctcccctgtcgcagcggcaccgtctcccccagtaacgcaggggccgcggcggcggcggctgcggtggcgagggcggcggcggggctgcttcagcctctgtggaaccagcaggaacccctacctgactccagagctggctgggtttattgactgccctgtccaatccaactggcagcattaagcttttgtcccttcgtggctgcttctgaacttttccctccccgcatttgtagtggggggctggaaaggccctttcaggacctcaggcccatcctcttcccaaaggcagcgcacgaggaagtcacagtgcccgtgacgcccgccccctccc

SEQ ID NO: 115532 - DNA, 593 bp, Homo sapiens; identical to SEQ ID NO: 5807
  chr7:113722690-113723283
  hyper

SEQ ID NO: 115533 - DNA, 418 bp, Homo sapiens; identical to SEQ ID NO: 44613
  chr7:113723338-113723756
  hyper

SEQ ID NO: 115534 - DNA, 30 bp, Homo sapiens; identical to SEQ ID NO: 44614
  chr7:113723980-113724010
  hyper

SEQ ID NO: 115535 - DNA, 1703 bp, Homo sapiens
  chr7:113724591-113726294
  hyper
tgacggtgtgtttaccgacgtgggtgccagggctgcttcctccctgggagagccgcgggttctgaaggaaagggttggtgccaagtgtgtgtgtgagctcgcgactgccctttagagaaagggcgcgctgctctttcaggaaaggaaagattcaaaggcacaagttagtgcggttcgcccgtctccccaaccaccaccacccctccctcttctgccaccggaggggttcaagttggccgttctttccccagggaggagggccgggaagcagccgggggccaggctctgttcaccacggcctattggccgcagctatttggaggaaagtttcagcgcctctcggaacgccacgctttgcgactgacttgcgagcaaagcagcgggctcagtctgcggcgcgcggaaaaggcggccggcgaagagtcgcccggcccgcgggcaggggagggaccggagggagacggcggggagggagcgctggcccccctctgggctggggctccggaggaagcccctcgccaagattccggtcgtgcgtcccctccggggcccgctctctcctccctcggcctttcccctgtcaccgccctgggtcccaagcaggccgcccagccgggtcacacccggtggatagaagccgggacccagggctggcggctgggcccgtgcatcccccacgcgggcgcctcggctttgaagtgcgcgcggagcaggctctgaccgtttcttctttcctttctttccggttacttttgctcccctcagtcactgataggacccttcccgaaaacctcagactctctaagtcccagcttggcggccccttccttccaagccgcgccccggtgacctgggctgcgcgaccacgaggaagcccgagaactccttggcccaagtgagacaggaaccagggcaacaatgaagagaaagacactcggcctctctccaccccaggccgcagaggcgcacaccgtgaaaagaaaggccaatcagcgctttaacgcacgctcgggtctccctttccgactaccatgtacttttaactccctgccaccgagggctttggatcccttcgaggctttctgcacttcaagtggaatcccctgtttcatttgccagcagctccgtctgctgagaggacgtactttggggactgccaagaagcagcagacacaactcggctttgccaatacagcatacggttttgttctcgcctccctccccacccccttccctgactcgccgtctggggcgagctggagaaggcggagcaggaggtggggagaagggtgggggtgggggaaggtctggcgtagcacaaacaagttctccagcgggttgtttacatagcaggtggacctgacgtcagccaggaggctccgctgcaaatccgaacaatattcttccccgcgtttccccctccttaaagaagttagggaacggggggagataggtggacgggggagaaaggcatcctaaccagctggttccaaacctatcaacaacaacaacgacaataacaacgcaaagtaaaacaaaacaaacaagtggtccggcggtacttcagaatcctctgcggcgtcctgtcccccaccccgcccctccgaggagaggcagccccgcgagcagtgtgtgtacagttcgcattgccaacaacacgcgcgcgcggccgggtgcgcgcgcctgccagcgcacattcacac

SEQ ID NO: 115536 - DNA, 1257 bp, Homo sapiens; identical to SEQ ID NO: 44616
  chr7:113726353-113727610
  hyper

SEQ ID NO: 115537 - DNA, 3 bp, Homo sapiens
  chr7:113727622-113727625
  hyper
cgg

SEQ ID NO: 115538 - DNA, 62 bp, Homo sapiens; identical to SEQ ID NO: 5813
  chr7:113727753-113727815
  hyper

SEQ ID NO: 115539 - DNA, 41 bp, Homo sapiens; identical to SEQ ID NO: 5814
  chr7:114562235-114562276
  hyper

SEQ ID NO: 115540 - DNA, 1074 bp, Homo sapiens
  chr7:114562326-114563400
  hyper
cgatccggatgtgatgaaaaagagcaacagagggagaagtgtttcaggattgtaggagtggaagaggggaaagagaggcagagagggggaaggccccctcgcaggggagccggctggagtgagctggctggaaagagggggcggagtgcgcggagtcagagccgccaccgctgccgcagttgccgccactgcggcgtctgggctgagccggagggaggcgggaggacgcgcaggggcggccgccgccgtcgtcaggccaccggggcgaaaatgcggccgctgccggaggctcgctaactttccggggcggaagaggaggaggaggaggaggaaggggcttggagcgactacggggggatgcggaggtaggtagtggtctccgggcggggaagaggaggggtttgatccccatccccggggttctcccaaacccgatctctctttccagcccctccccgctgggtccacctcggacccctgggaccccgccgctgtcaacttgcgctgtaacagttttcttcgcaagtttcaaatcaaaacttccccggggtggagtttgagggagggaagtggagggggagggaacgtcccgcaggggtggtgtgctcttctctaaaaacatttttttttttaattttgtatatttttccgccagaagcagtcagttccctgcacccagcacctcacagcccttcctccgtgcgccctgccgggcggcgagctaggcggcagcggcgcggcgcgggctcggcggagcggcccatgtccggcgcgggcgaagccctcgctcccgggcccgtggggccgcagcgcgtggccgaggcgggcggcggccagctgggctccacagcccagggtgagtgcgcgcttgcaagtggcaagcttctttgtcattgttgcatttttcagtttgctcacaagtgcacagataggggtggggggagtgctgtgaggaggggctcccactcgtagttgagaacttttgcacagttcgcgttactcaggcaagttcttcaggatccttgccctagatcaacaaccgggtaagagggcgggaaccgttggtccctccac

SEQ ID NO: 115541 - DNA, 30 bp, Homo sapiens
  chr7:115117040-115117070
  hyper
gcactaaaagagcagcggggctgggtgtgt

SEQ ID NO: 115542 - DNA, 296 bp, Homo sapiens
  chr7:115117318-115117614
  hyper
gagcgagccgccagacgtgagctaaagaaggtgctggggggcagaacgggtactggggcgcctggaggagagttgaggggcctgaaagactctgggggcccagctcggtcggtgggtttattccaagtgccccgtcccaggcttgcactccccaaaaaggagccgagacgggagggttgaggcgtctcggctgcctccgtggagatcccgagaaaagctcctgcgctccaagttaacttctctctgggccgcgcggcgcagtggagtctcggtgcagcccgcgtccctggaggcgc

SEQ ID NO: 115543 - DNA, 30 bp, Homo sapiens
  chr7:115117823-115117853
  hyper
agcagctcatctgggcgcccttgactaaca

SEQ ID NO: 115544 - DNA, 42 bp, Homo sapiens; identical to SEQ ID NO: 5817
  chr7:115850423-115850465
  hyper

SEQ ID NO: 115545 - DNA, 30 bp, Homo sapiens; identical to SEQ ID NO: 44623
  chr7:115850740-115850770
  hyper

SEQ ID NO: 115546 - DNA, 30 bp, Homo sapiens; identical to SEQ ID NO: 5818
  chr7:115851035-115851065
  hyper

SEQ ID NO: 115547 - DNA, 30 bp, Homo sapiens; identical to SEQ ID NO: 44625
  chr7:115851444-115851474
  hyper

SEQ ID NO: 115548 - DNA, 494 bp, Homo sapiens
  chr7:116139782-116140276
  hyper
ccgggagccgcaccgcgccagccgggctgcagcggccgcgcaccaaggctgcgatggggctggagacggagaaggcggacgtacagctcttcatggacgacgactcctacagccaccacagcggcctcgagtacgccgaccccgagaagttcgcggactcggaccaggaccgggatccccaccggctcaactcgcatctcaaggtgaagcccggggcgggcgggcccaagtccccgctgaggccgggaggtgcgggcgcccctcagccccgccctaacccgtcccaccattgctaccgggtcggccccgcagggtctgagacccgcacccttccccggtcccacccgtcaccaggccgcccgcgtagccaggaattcttagccaggttcctgtgcgcccaccgtgaccctaagagaagaggcggacgccctggcacgtccttccctcctgcttcccccgcccaaagcgctcccggttcccggggcgtcaggttg

SEQ ID NO: 115549 - DNA, 164 bp, Homo sapiens; identical to SEQ ID NO: 44627
  chr7:116164618-116164782
  hyper

SEQ ID NO: 115550 - DNA, 30 bp, Homo sapiens
  chr7:116165548-116165578
  hyper
ctggggacagtccccgggactctccgccag

SEQ ID NO: 115551 - DNA, 425 bp, Homo sapiens; identical to SEQ ID NO: 44628
  chr7:116166324-116166749
  hyper

SEQ ID NO: 115552 - DNA, 30 bp, Homo sapiens; identical to SEQ ID NO: 44629
  chr7:116311758-116311788
  hyper

SEQ ID NO: 115553 - DNA, 30 bp, Homo sapiens; identical to SEQ ID NO: 44630
  chr7:116502764-116502794
  hyper

SEQ ID NO: 115554 - DNA, 78 bp, Homo sapiens
  chr7:116503303-116503381
  hyper
tctctctttcctttcgtggctctagcagtaagcttgcagctcccatgttccccaggaggcagcggagttgctcacaaa

SEQ ID NO: 115555 - DNA, 302 bp, Homo sapiens
  chr7:116592939-116593241
  hyper
cttcaggcctactagccggcgacaggagcgcacctcctcccttctcctagctgtcccgggtttattcattccctgagcctgaatcctgataagggagcagagtagggtttaagacctcggaccccagaatacaccactgcaattgaattttggttccaccttaaggtaaactacgcagctgctgtgagcctcagtttccctacctatagaaagaggatcgtagtggggaattgttgcaggggttaaatgagattgtacggatcgtggagcagcgcctggcgtgtggtaaacgctcaacttat

SEQ ID NO: 115556 - DNA, 100 bp, Homo sapiens
  chr7:116593274-116593374
  hyper
cgcgccacttggccttctctttctaaatattagcataataaatataaatggacccagaacgcgagggggcaggggccacgtgatcgctccacgaaagcca

SEQ ID NO: 115557 - DNA, 30 bp, Homo sapiens
  chr7:116593752-116593782
  hyper
ctgggagccgggcccgcggcgcccacccct

SEQ ID NO: 115558 - DNA, 227 bp, Homo sapiens
  chr7:116594406-116594633
  hyper
accaaatggattgtcgaagggaccggagggaagaggggagagctggaatttctgagggtttcggttgcagttttcagtgatctttgctcgtctcccttccctgtaaagctacatatgctcagcaagtgccgcgtgcctcccatccttggtcggtggtaaatgcaggaggtaattaacaggatcttcacaaacttggagccagcccactgagtcgttaaaaaaacacc

SEQ ID NO: 115559 - DNA, 119 bp, Homo sapiens
  chr7:116759579-116759698
  hyper
cagtgaccataaacacgcttatttttctgttctagatatttgaatggtggtattttcgcaaatacggaacttcattcattgaacaagtctcagtaagccacttgcgcccccttctggga

SEQ ID NO: 115560 - DNA, 30 bp, Homo sapiens; identical to SEQ ID NO: 44634
  chr7:116962611-116962641
  hyper

SEQ ID NO: 115561 - DNA, 293 bp, Homo sapiens; identical to SEQ ID NO: 5823
  chr7:116962853-116963146
  hyper

SEQ ID NO: 115562 - DNA, 1390 bp, Homo sapiens
  chr7:116963330-116964720
  hyper
cgtccgctctgctcccctccgggcgcagccgagggagggggtgctgcgcctggcgggggtggggagaaacgcggggttttagacacgggtgcatgaaatgatggcaagagatgtctggggatgaggtgaggcggggaagggggaacatcgctgcatggttacgagcacacgcgaatacaggaacctttagggaagctccaggccaaagagcatccgtgggctctcggagcgtgcgttccggattgccgaggccatccgctggcaaacaagtccctgagcgtgcaatgtgaggaaacgaggaagggggccaggggataaggagattactatgcatgggatacaagaatccagagatgattctcaactcattgcttcgcttctctccctgaagctgggatgaagagctagcacttgtaaatttggagctgccgcgtctatgcagggcaaggttagggaggggccaggcctctgcgaaatgacctgttggctttgattccttggtgctgggcttaaatacagagcccatagggaggggaacttggagggtccatgaccctcgggacctaacccagcagtatctgccaaagcacccaggaaagatgcagtttttacgcacacccagctcctctccggagctgcggagcgcaaaagatcacatagagaggaaccgaggcagccaggcgttcgccgggggtgtgcgcccttgcacctcctgccgcctgggcgctcagcctgtgcgccttgtggaggttaagggaccctcggtcctggacctgggcccccgcccagccaagagagaggggcttgggcccgcgggtggagcattttgagcagtagctggcttgtagccgcgccgtttatcaccggaaaggaaggaagaccaggaactcgtggcggccgtgaactgttccattgctcttttcctggggcggagggactcactgcccgcccgaggagcgtgctctggggaatagagtatgcgcctgtgtgtatgtgtgggaggcgaattgttcgcagggcgtgggggagggggtgccgcccagatcggaaggacgggctctccctctctccagcccaccctcgggcctggactggccagagcgtcagccctcgccggcagcgagcgcggtgagaggctggacgaggcgaagctcagagacgccaaaaacctgaaagatgctgtcatcgccacccccttcccccacgctggtccctggcaggtccggcccctcccaggctgacccagatacatccccgtttgggtccggaaagggaggggagggaaacaagcaccgcgccacccacgactcgggaagagcagggctcctcgccagggccgctccgtatcgctgggccgcgacccagggaagttctgcttggtctgcgtcgg

SEQ ID NO: 115563 - DNA, 19 bp, Homo sapiens
  chr7:116964798-116964817
  hyper
cgccggccatggggagggt

SEQ ID NO: 115564 - DNA, 792 bp, Homo sapiens; identical to SEQ ID NO: 5827
  chr7:117119486-117120278
  hyper

SEQ ID NO: 115565 - DNA, 1244 bp, Homo sapiens
  chr7:117512788-117514032
  hyper
gctaggacctaaagcgctggcctcagcggcagcagcgcccacatctggacacggccctctcccagtgggcctcccgaaggcacaggaccagatgcacacaatgggcatccccacacctgctgggcgatggcccacctcccccaagctgctctcccgggtccgctgagcggtaccaggcacccccgagacacgcgctggcaaccacgcgcgcagcgagaggtgaacaatggggggtcaaattcgccaggaaacacgtcccagccttctcccccggccagaagcgaccgcagcggagggagtgggcataggggtcgcactggacgcagacagggagctgggagaaccgggcgacccggggccgcttcccgtggggcgcggaagggacaggagggatccccagccagggtggccgctccgctcccccccgcggcctccgccgtgtgggcatcccgaggaaggggggccccgatgaaggggcaccggagagtcccgggcttacggaacgccccgggggtgcgaagtcgggtccggctgggaccccggcgccgcccccggcccgcgtctacactagccccgcgcccgccccgggaactcggttaccgccgcctccgccgcggcccccgccgcgtcctccggggcccgggacaagtcgggctcgcagctcgcgccgtccgtcgccatcttcctgctctagcggatccgaatgcgagctcggagccgcggctccggactcagccgtctccgcgcgggcggcacttaacccgctgctgtccgggacgcgggcgcctggagccgggagccgggagccgcggcactccctccgcccctcgccaccgccctcgccgcttaacccgctgcgcgccggagcgccccgcctcggtcccgccccgcgccccgcgtcccgcgcccggtggcgccagccgcgggctcgtggaggtgcgagaaatgggcgcacgacctggctccgctgcggccctgcgcggggactggggatcaaagaccacggaagaggtgaaggcagaaagcgcccgaggagcgttgcattccgcagaaccccaaccaagccggagaaatccgtgcacagaccagattaaatgtcaggcctcctgaatctgaattctctgaaagatcagggaaaatcctacacttcagctccctctatcccaccgcgaggaatcacacagggcacccctttcttcttaaattgctctttcttaaatttcattgccgccagggtgttttta

SEQ ID NO: 115566 - DNA, 30 bp, Homo sapiens
  chr7:117824174-117824204
  hyper
ctgcgacccgcaggcgctatccgctgccgg

SEQ ID NO: 115567 - DNA, 986 bp, Homo sapiens; identical to SEQ ID NO: 5829
  chr7:119912398-119913384
  hyper

SEQ ID NO: 115568 - DNA, 487 bp, Homo sapiens; identical to SEQ ID NO: 44645
  chr7:119913416-119913903
  hyper

SEQ ID NO: 115569 - DNA, 763 bp, Homo sapiens
  chr7:120496811-120497574
  hyper
ggccattgtgagccccgtaagggagaagccccatcctttcaccacatcctactcccaagggcaaaacggcagcgatctgcagggggcgggggagagagaacacgggacatctcaccatcacgcttcccacagcctgcccgtccctcctccacccgccctcagcagggtccagagggtcccgaggcccagtgcattcgagacatcgcctcatcaaaaatcatttgttaaaatcataatggtaactaaactcccaaaagttccaaaccggcttcagataacacctgctgggaaaagaaaagagcaactatccggatgaatgaagtcgcacagtaaactcgcgttctcaggggacacgcggcggagccctgtgcattctgatgagacgctcttgaaaacctccctcactccacgcccctcctcgaggacagctgtgctcggcactgtcctgaaggtgagaaaccacactgccccctaccccggacacgtcagaggcgccaccggcaagcccgagagaatgagcgcccttctagttaggacagttcctgggcactccaactccgcacccctctaccccgtcccgcagctcgggtgtgaatgcaagggactggggcggcggggcgggggcgggggcgggggcgagggggcagcgcggagttgagattccgcccggctactagggtttctctgggagaacgtgagaaatgatgttttcggccccagaatgatggattagcctgggacagtgggcggggggcggggggcg

SEQ ID NO: 115570 - DNA, 549 bp, Homo sapiens
  chr7:120497835-120498384
  hyper
cagcgggcaggaaaggcgacagacgcgtggccacttaccgtcggcgctgggcccggtgccccacgcccgcctggggatagtcggggacgcacggcgggggctcatcggggcagggaacttcttcgcggagagccggagggctgcattggcttcagctggagacgcttctttctcttcctctccccccgccgccgccgtcgccgcctcctgggaaaaagaaaaaaaaaaaaaaaagtcctgggcagcagttgctggaaagtctctgctaagccacctcccagcgccgctgtccctcccaagtcctctccgagtccggacgaggcagcggcggcagccagggccagctgcacaaactctcagcgcatgctcgagccgctggctgccggggttgggtcctagtgggtgtttcttgtccctctcacccagcgagagtccccaaagggacgcttcacctctgcaggatagggtccagaagataatgcctaggaacttgggagaagtccgtgcagtaaatccctttaaaatggtggcgtcgaaggaatggaggct

SEQ ID NO: 115571 - DNA, 30 bp, Homo sapiens; identical to SEQ ID NO: 44649
  chr7:120590932-120590962
  hyper

SEQ ID NO: 115572 - DNA, 141 bp, Homo sapiens
  chr7:120627987-120628128
  hyper
taatgcctgctatgcgctaagacagccctgggtatccagagttcacaaagcaaggactgatttcctttcgccttgacagcctcagcaaaagtggaagggggtttgcagaattgcactattagcagcgtccacccgaaggtc

SEQ ID NO: 115573 - DNA, 533 bp, Homo sapiens; identical to SEQ ID NO: 44651
  chr7:120628557-120629090
  hyper

SEQ ID NO: 115574 - DNA, 1358 bp, Homo sapiens
  chr7:120969344-120970702
  hyper
cgatggacagggcggcgctcctgggactggcccgcttgtgcgcgctgtgggcagccctgctcgtgctgttcccctacggagcccaaggaaactggatgtgagtatggaggtggcagggaagcatcgggtaggtggcaaaaggggtgcccaatcctagggaactttcaactgaggctgggggagaagggcggggacccttagacgagtgacctaatttttcggaaaacatctggaattggggagcggcttaacgctacgggcggccgtgtcttacaggtggttgggcattgcctccttcggggttccagagaagctgggctgcgccaatttgccgctgaacagccgccagaaggagctgtgcaagaggaaaccgtacctgctgccgagcatccgagagggcgcccggctgggcattcaggagtgcgggagccagttcagacacgagagatggaactgcatgatcaccgccgccgccactaccgccccgatgggcgccagccccctctttggctacgagctgagcagcggtgagtcctgggtccttaggggttggtgggggacggaaggcgacaactcctccaccggttcctgcaaataaagtaaatagtgctacgtggtcctgtagctctctaagttccagaagaagccctttagtgcacggggattgagagctacaaaggccagacctggggagcaggtgcgagcctggagggaggtgactccccagttccagagcggagctctaggggctggagctcttcctctttcctgcggtgccccgccagagttggaaaaaaaactctaattctcctaccccgccgaccccctcggaccccgtagcgcccccctacgtgggtgaccagctggagaaacatgatgtcggcagcggggaatgcggctgccgcatctgctttgatttaaccaactccgctgcgcaccaaaccccggacaagtggctaattgcagcgaagccccacctttattggctcctaggagcaccgagttgacagaataatggtgacttttaaagcgactgtccgcgaccacccaacgtgcggctaacctgagcaggaccacttgtgcgcttctcgtttctttggcttttctatctttccctcctcggcgcactcccgcggcgcgggaagctgcaggaaaacaaagttccacttccacgtgcgtagtgacttggtaaggataaaggtacagggagccaggattgttcctggaatatcaacagatccaaagaatgttaggactggggcgctgaaggatgcgctgtcgtttttcatgttcatttccgttccccctccgcctttgacccttgtccacgcagtccctgcgcgcacccccgccgagcc

SEQ ID NO: 115575 - DNA, 48 bp, Homo sapiens; identical to SEQ ID NO: 5836
  chr7:120970733-120970781
  hyper

SEQ ID NO: 115576 - DNA, 90 bp, Homo sapiens
  chr7:121036654-121036744
  hyper
ccccaccgtttacacgcacaaaatcccagcctcaagggcagaacattttaaatgacccacccatcctagagatgcgccagttaggtcatc

SEQ ID NO: 115577 - DNA, 567 bp, Homo sapiens; identical to SEQ ID NO: 44655
  chr7:121512766-121513333
  hyper

SEQ ID NO: 115578 - DNA, 567 bp, Homo sapiens; identical to SEQ ID NO: 44656
  chr7:121513392-121513959
  hyper

SEQ ID NO: 115579 - DNA, 30 bp, Homo sapiens; identical to SEQ ID NO: 44657
  chr7:121514473-121514503
  hyper

SEQ ID NO: 115580 - DNA, 1018 bp, Homo sapiens
  chr7:121783353-121784371
  hyper
attcattctctctcgcgctcgagcgctctttctctctctctcttccgctccccccacccccattcccctgaaatcaatgtctgaaaagcacatttcttcttctgaagctgtcaggatagacagacattcagccccattcaaccgaggagggtgggtaaactgcttctccccgcgccccgtcccgcgcgagcgctcacaatgggctgcatagtcccgcaggggctgaagagttcaggaaacccagacttgcaaggcgcccaacttccacccatctccgatccttgctggagaatgggtctgtgtctcggagagtgggcagcccaagatggacaaggagagaagtttgtgatcagtttggctaagctgggcgtggggagggaagggggaaagaaccaccccgaaatctccatccaccgccccctcagccagccgtcccctctaagcacgccgtccacaaattaacaagccgttgtttcctcagcttcatcagttctttattccccagccacagcaccaccactgtccgccaaaaaagaaagaaaagaaatccgaattgcaatccctcgcctttctacttagaaatgctggagctgcgctgaccgctctccctcccttcctcgcagtgaaactctctgcgtttccgctctccctccattcctcgcagggaggcccgaatgctcgccgccttctccctctctcggcccggccggggtcgcctcgcggcgccgggacccgaaggccaggctcgcgggcccctcccagcgacagcccgagcccggcccgctatctccaccgcatctcacaggctgagcccacccgcgcgtctgctcagctctccgcggggacctctcctctcctcacctcgtccgctctggggcgccgacttgtcccccgccgcctcgaatcttccgagtcgctgcaggggaggctccgaattcctagaagaaactgggatggaaggccgggaagtaggaggtgtttgctcaacttctgaggacgtcacgcctctgcctcccgt

SEQ ID NO: 115581 - DNA, 199 bp, Homo sapiens; identical to SEQ ID NO: 5840
  chr7:121863465-121863664
  hyper

SEQ ID NO: 115582 - DNA, 508 bp, Homo sapiens
  chr7:121939736-121940244
  hyper
cgctccctcgctttccgaagtcaaatctaacatggatttggccccaacagtgggcaaggtcggggcatgaggtcaggaaaggagaaacatcggttttcgatctaataatggctgggctggagcttgttccctgtgtccaaagggcgtgcgtactagcacaagcgttgagaaaggtctggacccgatgtctgcaggaagtgtcaggacctccctgttctggggaccttcccagcccacaccaggtccgtgctctctagattcccccaacctcgctccacaacccggaaggagctcaggccggacttggcgtgagggtccctgcggggctgggtcacctacccgtccgcgatcaccccacaggggctgttagtaatctccctgcttcctaggccgttgagaagcactcaggtcacccactctcggtgaccagagcggtcagtctttccccgccatgaaatgtgagttcgggtggcagccgccgcgcccctgcagtgtcccctgcacatct

SEQ ID NO: 115583 - DNA, 619 bp, Homo sapiens
  chr7:121940433-121941052
  hyper
cggtgtggaccgatggtggattctccgcgacaacagccctggagggagagagtgggccgggggaggggccacggggcccctgaggcctgcggggctggccgcactggccccgggcctggcggggtggtggagtccgaagcggcgaggcgaggaccccggggcccgctccccccagtcgccctcccgggatgtggccccgctgcagtagcactacggtgctgggctgtttgtctggcagcttctactgagcagctaatagtataacaacccggctttgataaatctgaactaattacccctcttaattaaagtctttagcagttgtttcattgttttggcaagaaaacaggagagacgtgcagttagaaacaccagagcccgagctcacagcggagccgctgattaacacttgaagcatttcaaggacctggcacccgccacagtttggttttcatccatgtttcctccttgaatggaagtatattcgtctataaacatacatacacatgtaaaaacacggaggctccgtttgccagctgtgtacaagtcagtatgtgccgtcaggatgcaaacaatagatacctgtctatctatgattgtaatgcgtttgaggagatgt

SEQ ID NO: 115584 - DNA, 649 bp, Homo sapiens
  chr7:121941875-121942524
  hyper
ttagcaggtgcatgcaagaggcgaaaggccaggggatgcagaggcttctggtcggccctgaagtgtggggcccaacatgccctggggtctgcagacgaactcggaccaggagctctagtctgccgctgcctcagcgtgggggcacggctgaggctgggaggacccttagcctcgatcactggtggccctggtggagcccgggctgcaggggccccggggttggcagcggcggctgcagaggaggcagcgtcatcggcggctgctgcggtagcgggggcggcggttcagtgcctggttcgccagctggcgtgcgggccagccccaggctgctgtcgtgcagcttgcggacatgcttcttgaggtcaaagttcctgcagaaacccttgccgcacgtggggcaggtgaaaggcttcttgtcgttgtgggtgtgcatgtggaaggtgaggttgtaaacctggtggaaagccttgttgcagatattgcacttgaactgcttctccccgctgtgggtcaacttgtggtttttgtaattccctgaaacacacaaatgacaggaatatggttctgaaaaaaaaaatagcttaaaaagggaggagcagacacgtggaaggtagcgccaggcaagcagaagagccgccacaggtcccac

SEQ ID NO: 115585 - DNA, 30 bp, Homo sapiens
  chr7:121942877-121942907
  hyper
gaattcacacacaaacggtttgtagcccgc

SEQ ID NO: 115586 - DNA, 97 bp, Homo sapiens
  chr7:121943271-121943368
  hyper
gcctgaaaccttttccgcacactttgcaaacgaagggtctggctcctgtgtgcactggcatgtgacgggttaagttatagtgcgcattaaagacctt

SEQ ID NO: 115587 - DNA, 299 bp, Homo sapiens
  chr7:121943689-121943988
  hyper
cctttccacacacttcgcaagtgaaaactttgggcttggcattaggagagcctcggctgaaatccgaggttttgaacgcgattttttccgacagaagctgggcgctttctttcatgtaatgctgcagctgagcctgggacaggtctttgaaagctactccagaagggtatttctccaccgccgggaccaccagtttattcctttcggctaaatacgtttttggctgcgggtgcaaaggggaactgaggaagtaggaggccaccgggtggatgttcacgccggctgccgggtggcatggg

SEQ ID NO: 115588 - DNA, 753 bp, Homo sapiens
  chr7:121944176-121944929
  hyper
cgccgccggggcctccagactggccttccgcggctcggagcccgtcactcctgccttggggctcgtgtcgtaggccacaggcacgaaggggatcatgcaggggatcgacgagttgagatgcagagagtgcttgggttcccccttgggtaaggctccctgcaggaagtgggggactggcagggccttgggctctggggtgcgcgccatgattcgttcaatggagaaagccaagggtttggacgtgctcatcatgttgccccgagctggagcagtcgctaacattttggtagtcgcgttgtggcagctactgtccatgtctgagtcgccagcgtccgtcagccggggctgggttgcgccgtccgttgccttgttccctgcttgtcacagacctgcggagagggggacgggcaccatcaccaccagtagcctcctcctcctcctcctccccagcatcaccagccgaacctgcctgcccagcccaatggactcctgccagcccatcgcagagttcttggcgcaccaatgactcggggacaatcactacttatttctatcaatagaaagtgttgtgtcaataacgcagccaagatctcgccaatcgttaacttccaagaggagaaggtaaactagataattgctcaattcgcttccaacagtcaacaggaaaacttttttttttttcatctgcagtcagtaactacttttcattggtgagtgaggttccccgcccagaaaaggcgggggcgctttcac

SEQ ID NO: 115589 - DNA, 1471 bp, Homo sapiens
  chr7:121945133-121946604
  hyper
gctaaataaggaaacggagtctaattcaggggcaaacgccaggctatatttatcaaacgccaagctccagaaagcctcggctaggaagcctcggcagtgaaatccgaggtttcgctgcttggttccactgggcctgggtgggccgggctgggccgggctgggccgggtcagatctgtgccacctccgcagacctatttcttcctccagggctcggggttgcccgctcccggaatcccggagtctccgcggcccgaaccgagtctggaccatttagaagacgccggcaggtaactggcctccccaaacgccccgaaaattaaaagccttaggaggcttgttctgtgtttgtggttttgtaaaggcaatgcccgcggcaataggcctgggaaagtcgcactttcatccacaaagttgaggagttgcaaggaataattgggtgtcacaccacaagcaaccttgactcgatcggaccccacccaggatacacacagacgcgcgcgcgcgcacgcttccgagtttccattgagagtctggaaagagcatttctttcttaagtacctgcgctcagctagagctctcccggagcattttaaatactgaatgccgagcggagaagggaaacagagtgtattaatccccactccggttgccggtgtctgcaagcctcctctaagcagcgcaggcggcagcctggatgtctgtgcgcatcaaggagacttgccggcgccagagttgtgtccacaggtgcacttgtgcctcccaaagagcgcgcgtagagaccatttcccctgcaacgccccccagccgaacacccgccgggtgtggcacctcggccgaaactcctggggcggcgcggtggagcgtgtggaggtttccgggaagacgcctacggctgcggctccgactgtgcgggctcccgccgcccaggcaagagcgtccaggagcgcgctggaagctgcggcgcgcaccttccccggcgcagtctcttgccagccggcgatcacgcagagctgaaccccgcagctaggcgcgcaggaagggctgcacagagtttgaagacacggcagctgtaagctggcgtgaggaggccaaaggagcgcgcagagctgcaagcaaagggcggtggggcctggaccctgaagtgagtggccgaccgcagcagctcaaggtgccatctgcctggtgagttaaccccacgtggctgtgagacaggtggtggcgggtgtcaggtattgggccaagtgtagtgggggcgtccttctgctagagctctgaaaagggttggccccggaaggctggataacggcggactagaaaccctggcattattaagtccctgagcaatttcactcaaagatgcgaaactggaccttaaacgaaggaaattgacgtcaaagtattccctcctctctaccccattctcaacacatgccaggcaagctacccgggtccctccgccccactctaact

SEQ ID NO: 115590 - DNA, 127 bp, Homo sapiens; identical to SEQ ID NO: 44669
  chr7:121946855-121946982
  hyper

SEQ ID NO: 115591 - DNA, 342 bp, Homo sapiens; identical to SEQ ID NO: 5850
  chr7:121947097-121947439
  hyper

SEQ ID NO: 115592 - DNA, 256 bp, Homo sapiens; identical to SEQ ID NO: 44671
  chr7:121950008-121950264
  hyper

SEQ ID NO: 115593 - DNA, 124 bp, Homo sapiens; identical to SEQ ID NO: 5852
  chr7:121950428-121950552
  hyper

SEQ ID NO: 115594 - DNA, 76 bp, Homo sapiens; identical to SEQ ID NO: 5853
  chr7:121950994-121951070
  hyper

SEQ ID NO: 115595 - DNA, 153 bp, Homo sapiens; identical to SEQ ID NO: 5854
  chr7:121951857-121952010
  hyper

SEQ ID NO: 115596 - DNA, 133 bp, Homo sapiens; identical to SEQ ID NO: 44675
  chr7:121952043-121952176
  hyper

SEQ ID NO: 115597 - DNA, 972 bp, Homo sapiens
  chr7:121954943-121955915
  hyper
cagggagataaaagacgtcatcgtattgagtcactgggtctaggactcagaagctgccgctggctactttaaaaaaatgactggggggagaccaccagtcgggttaaacaagtggctccagtcccagcttaatgccaggcacggtctcttcccctttccagagtgctcagtttctacctccccaaggccacagagtgctagacccccagaccgccagggcgcgcgtctcccatgccaccgacgtgctgggttgtgaccctggggcgcacccttgccccaccctgtgccgccgcgttgctcaagtgttcctgggagcctagaagtactgcagtccagcaactccgggcaggagtcggtgctggcagtcgccctaagcgcttgtgcgctctctctctctctctctctctctctctctctctctctctctctcgtgcttggtttccgcagctggggccaccttgaagggtgtggacccctctgcctttctctctctgttccgcttgcagtttgcaagtgtatccttctgttgcatccctgaattgggacgcaggacatcgttctaggctcccataagccttggaaaatattaatgaacaccatttgcacctgaaattcccttgaactcaacgcactgaccacaacagccgaggcctgagattcctcgcttgtgatctggcacctcctggatcatccccgtcccatttcagagcccttgaccaacataatctgcaagtggactcaataacacatctccagctacctcccttcccaaccgcagccacaggggctgctgttagcgatgctggccctttctgagaccagagttcccttgcccctccccgtctcctcctctcctcccatcgggctggccatatatataaccggagaactggacaattctagcaagttcacagacacgccaggggctaggctgaagatcctcagagctgcgtgtgatccaaaaggaccctg

SEQ ID NO: 115598 - DNA, 278 bp, Homo sapiens; identical to SEQ ID NO: 44677
  chr7:121956303-121956581
  hyper

SEQ ID NO: 115599 - DNA, 122 bp, Homo sapiens; identical to SEQ ID NO: 44678
  chr7:121956954-121957076
  hyper

SEQ ID NO: 115600 - DNA, 98 bp, Homo sapiens; identical to SEQ ID NO: 44679
  chr7:121957253-121957351
  hyper

SEQ ID NO: 115601 - DNA, 1408 bp, Homo sapiens
  chr7:122525745-122527153
  hyper
atccggccagagctgcgcctgccgggtgcaaccgcggcgcggccggcgctgtcggtctctgtctcacggatggtgagctgacagctcctgccagcccaggcggggaggaggagaagaggtgtccgctgcagccgcatacccggcgggtgaaagcaccgtcttgtccccaaagattcctctgccctcagagactaacaaaaatacggtgtcctgcgtttcgcagaaggacgggaggcgtcccagagctctcccgggagaaaaacccagggagaagtggtggtaggaggcgcccggtcccgcaactcaccttctgctgcctccgggccatgtcggtgggctgcttggcgttgaaggggtacgcgatgcacctcacgacgaagacgtagagctgcaggcggatcctccgctcctgctcatcgtccagctgccgctggggctcgtctcgcccctcgctgagcacagaggggctcgggctcacagatctggccgcgccgccgccgcccgcgcgccccggcgcgtcccgccgcccttcccgagtcggggctggaggagctcgctgcgagctgccggctgccaccagcacatcgcggctttcctcttccagcccctcgtccgactcctcttcgctggaagacgggtccagcatggtgctcggggatccccgccgctcggcccgcggtccccaagcgcctcacccccggcggctgcgcccgcgggtctgagggagccgcggggctggctgcagcggccgcagaacgaaaggaaaactggccagggctttccggacacgtcgagttagattcaggagtgtttcctaccaccagggcgaaaggggcgggcaggagccgggaggaggattgggaggggggagagggggagccgccgggactgaataggcggagttagcgttgggggtgagcttgggcgcctcaggaattgctccgccagccccgggcgcgccgacccagcggttccccagagcccgccggcagaggcggagccgcccgagcgcccggacgcaggtggggaacctgtggcgcctacaacaagcaacacgtggaattgaatgttgaagagccgcgcggggccgcggagtgcgcgtgcgcgcgccgccgctgctgcccgggcccgcctggagccctagcacacagtttgcaaaggcggggagcggccgagcgcgatggcccgtgtaagcgtccaccggggctgctccgactaccctcaccctaccacctgtgatcttttctccagcaggtggaggtggaatggggagcggggagggactgttccctagcaagaggttagggggagcggccgagacatctccccaacccgaatcggctgcctaggattgaaccccagcgcggaaaagcgggactggagcccttcaccacgaagtatctttgcg

SEQ ID NO: 115602 - DNA, 117 bp, Homo sapiens; identical to SEQ ID NO: 44681
  chr7:122527422-122527539
  hyper

SEQ ID NO: 115603 - DNA, 30 bp, Homo sapiens; identical to SEQ ID NO: 5861
  chr7:122844521-122844551
  hyper

SEQ ID NO: 115604 - DNA, 224 bp, Homo sapiens
  chr7:123172986-123173210
  hyper
aggccggcagttgctcggagctccggcgggtcaggaggtgacgggaggaggaggaggcaggaggaagaaaggggggttgggaggtagcgtccggtaggtctgcgcagacagcgctgccagacctctgactcccccagtcctgccgccgccgatagccccacaaggcgacatgggaagtccgccggagcagaggggagaaaattcaaaacgagtctactcaacct

SEQ ID NO: 115605 - DNA, 158 bp, Homo sapiens; identical to SEQ ID NO: 44684
  chr7:123174505-123174663
  hyper

SEQ ID NO: 115606 - DNA, 30 bp, Homo sapiens
  chr7:123197617-123197647
  hyper
tggtctctcagtctcgcttgtttggagctt

SEQ ID NO: 115607 - DNA, 30 bp, Homo sapiens; identical to SEQ ID NO: 44685
  chr7:123388385-123388415
  hyper

SEQ ID NO: 115608 - DNA, 30 bp, Homo sapiens
  chr7:123388639-123388669
  hyper
cacgggtggcgacgcgggtctcgtccactg

SEQ ID NO: 115609 - DNA, 30 bp, Homo sapiens; identical to SEQ ID NO: 44686
  chr7:123389154-123389184
  hyper

SEQ ID NO: 115610 - DNA, 30 bp, Homo sapiens
  chr7:123389607-123389637
  hyper
gcttcgataggagccgcaggtgcctgggat

SEQ ID NO: 115611 - DNA, 1672 bp, Homo sapiens
  chr7:123672010-123673682
  hyper
gatgaggcccataaaattgagcgggtagtgagaatagtcccaggaacaagccccgcacgtgcggagtcccagaccccaggacagctcccacacgtagatgaagatcacgtagatgggcacccgcttccaagtgccccaaccgcggctgtagtggaggtggaagtagagcttttccaccacgaaactgcagctgccgtacataaagaaggaccagagcgacgtgtggccgctggttgtcccgtccccctgccccagtacgttgaagaagaaggtgaagaagatctcatccagaaagccgtgcattccgaagaaaagaaagcggggtaggtcgggcagcccctggctgggggctcccccggcgcccctggggccacggggtcgtcgccgccgggctccggccgcagtagggacccgggcgccgggagggacggggagcgcgcccctccgctgctgctgctgctgctgctgctgctgttgctgctgccgccgcctctgtcgcccgtaccgcaagcgcaggaagcgcttcaggaacacttggcagtggtagagcgccagcacgtactgcagcgccaggtccagcgcccctggcgccaccgcgacccccgccccgccgcccaggctgagtagtagcgcctggcccgctagggtctgcagccccacgtgggccgaggggtagaggaggaaattgaagacgaaggcgttgggacagcgccgctgctgcaggtacaccttctccagggcgaaatgggtgagcgagtgcagcaggcagcggtagggcgaggagaagcctagcatccgcaggtccgggctgcgggcgaagcgccgggccgaggacaccagcacgtccagggtgatcccgtgcatcccgtagaagtagaggcgcatccaggcgggcagcgtggcgctctcagccggcgcttcagcagtggacagcggctccgggcagccggctgccgcctcgcttcctggcccgccaggggcccccggacgccgcgccgcgccgcccctccgtgcggggccctcgctgtccacgtcgctccccgccatgggctcggaggctgtccgaacgcccgaggctgcaccgccgccgctgccgggtgcgcggagctgcagggccgagcggccgagccccgcgccgcctcctggccgctgccggcccccggggggcgcgcagggagctccgtcccggccgcggtcccgcggcagcgggggctgatgcactcaggggactcgcgggccgcccggctagcggaatccccccgccgtggccccgctgcgccctcccttccagtcccgggcgaggtgccgcccgcccgcgcccgctctagctctcaccctgcgcggcctaacgggcaccgcggcccagccaggggaggcggcgccggggctgtgaggggaaatgcagaagcttgtggaagccccatcccctccgctgcttagccccgcgcctccgctgcaggctctgggaacgtaacgcgagcagcggcggccctgcccccgccctgccaatgcccctctccgcctgcctcgacctctcccgccttctcaggccgcccccacgcgcccgcccgccgcaccgagtcccacagggtctgctcgggaaggcccggccctgcttcttcctcccggtgcgcccactcaacacaggggctccggtcgtgcggggggcgct

SEQ ID NO: 115612 - DNA, 189 bp, Homo sapiens; identical to SEQ ID NO: 44688
  chr7:124404308-124404497
  hyper

SEQ ID NO: 115613 - DNA, 627 bp, Homo sapiens; identical to SEQ ID NO: 44689
  chr7:124404543-124405170
  hyper

SEQ ID NO: 115614 - DNA, 937 bp, Homo sapiens
  chr7:124405509-124406446
  hyper
aacaagtccccctcccccagacgactcgcagtcacaaccccgctcccagctcgctggaaacacgttgcaaacagtccgaagcagcgctgatgcgccggcgaaactcttgccccacctaaccccagcgacttgcgagcctactgctgccgaggagaagcgggattccaaccccgcggccactgccaaagttgcttctcctccagctcaaagttgacgacggggcgaagcaggctgctggacggcgtgccgccgcagagaaggaaatcgtggggagaagggggagaagagggcgccgctcgtcggtggacagtgccgctagccgcgggagctagtcactgccacagcgggctcagcccggacgggaagggtggtgcctggaaccgccgcgggccaggcagtgcgcggccgggaaggggaggtggcccggcctcgcccccgcgctccagccgctgcgcgcgcccgcgaagctcgactctcggctcgttgcctcctcccactccttcgcctcctcctcggagagatactggtttgtggggagacgggatcccctggtggttcaccactcactaaacccacacacgtttcattcaagccatttgtagcggcttccactcggaggagctgggagggaacaagggcggaggcgcggagcctgcgcggctcgaggctagggatgggcgggacaggttaattccccagctgtcgaaaccagcctgacaggtccccgagcccgggctaggggcgggtgcggggcgggagtggggggtgggggtgggaacgggaatatgagagcggtcgggggagggaagagaggagggtagcaggggagtgagcagcagggtcccctccaatctgttgcggctgatgcgcatgcccaggtctcagctctggggggcgaggggcggggcgggggaggggcggacgggggttgggccgc

SEQ ID NO: 115615 - DNA, 164 bp, Homo sapiens
  chr7:124570032-124570196
  hyper
ctgacaggatgcgacgtcaacgggagcgcagggccaaggtacaggccccgcccagtccggtcacatcccccggaattctcgcagctccccttagctccgcccccagtgactttccagctttcgtggcgggaggcaagcttaggggaagcgggcgggtccgctgg

SEQ ID NO: 115616 - DNA, 3142 bp, Homo sapiens
  chr7:126891134-126894276
  hyper
ggcaaataaggcactccctcccggggtgggacttgcttaggggacttaagggtttctgcaaccggcgagggggtctgttttcacccccgctatcttgggtgcgcagacactctctgacaccaggcttcacagtttgggccacgggggaagtaattccccagggaaccgcgggggtgcggttttgcgcaactgggtgactcgcgtgtccctccgcatttcatttgcaccaagggagcgcgtgtcagacgaagggaatttttttttcttttttggtgattctgttattttttcaccaactgtacgaagctcaagggatatccgagctttctggctgggcggatgggcttcgcgcttggcatggctgagcggtccatctctacctctccgtttctatctctaccataacagcgaccactcagcccgccaggagcccctgtttcccagcgcaggttcctttttcttctcagttccttgggctgttgaagccgggttctgggtagatagagactggggccgtggggagagcgccaggctgcttttgcctttcccgcgccccggggcattccggcgcgctggggatgcagcctccgcccccgccgcacctggccgcccgagcgcccgcgcccacgccccgcgcggggccgcccgaaactggggccgcgccagccgcgggagctaccgaggagctgttggggtgcgtttgcctttgctttttaaacaagatccccgagaccttttctccatccccccaacccccagcaggacacggaactccggcgtttctcgaaagccacaaaagaggggcacggaaatcccaagctcgccgtgctaactcggagaacgcaaactcgaggcagagcgtgcgccgtgcggggatgtgggtgtcgaggaccccgaagcgcccggcttcccccgcgacccccatcctccctagatcctggttagacatccatccagcccacgctcagagggcgggggttaccccgactcatcccggaagccgctaacttcagaaatccctcctgttaggttcgcgaaacgaaggtacctcgtcatctcggcggggcaagtccggattccaccagggcaggtccgggaggtcacccagggcagacgatccgaggcagagcgctttaaaatcctgccgccgcacgcccagtcagagcgccgagcgcgcctgcccccttcccgtcacccttcagtctcccattcgccgactaaacttttgggggatcacatctccaagccttgggagttccgggtaaagtctccctcttttctgaacctctttactgtaatgtaatcatgggcagacaagaggggtggctgccttgttctttgcaacgtaaaatcaacagacacccaatcaagctccaatgcccggccagcccctcgccccctggtgcccactctccttctccccccattcccgtcacctccgcccgctatttctctcacagactacggacatgcagggccatctacttgtgctcaggaaaaacaaatcactagagtgatatgagaaggaatggtgcacctggctgtccgctgaaaggttttagagaagaaaacggaaaggggaataaaacggggggattctccttttccaacaagcagggcgttttggggaagtttgggggccaggggctttttgtcccgtggttcggcacttgctttcctcggagccgctttctgctgccgggcggcgagtcttaccctgctccccgcagagggcgcggtgaggaagcccgccgggggcccgcagctccatgtcagcgccgccgccgccgccgccgccgccgcgtgaggcgagcacagcggccgcacttgtggctgatctctgggctgagggggctgagctggcctagcaggcgccaagtctcttccatgtgaataacaaatactcccaccggcggccgcgattggtctgcgcccggcgcctcccgatcctccgcccgcggccattcacccggcgcggcgcggggagccgcggccaggatcgcgcccgggatcgccaatcgcttcgcgccaaccagtcacctcgggaagcgggaggaggaacccccgaggggcgggagcctctggatttcggtgtcacccagcggccctggcgcgggcagggagggggaccctcggcccgcggatccccctccgctcttcagcctgaagcgacgaggagaccagaaatgtcaatagttctgatttttaaaaatcatccccccttccccgcccccaagaaaaaggggaggacccaactacagagtgagagggtgggaagaagcgggagcggtagaagaaggaatatggttgtggaggagcccagcggctccggctgcctggcgagcccgggaccggcgcggggaggcgcgacgcccgcccgagcacagcgggcagcacccgcgagcccgggtccccggtgaacacagctccagaaagcgtcaccgagaataacacatggtagatgacaagtgtcccgccacatgctttcttttcgggaatgcttaaagtagagccggcaagccgcgcggttcccttgcaaagtttgcctggcgccgcgcggcggttccgccatttgtcccgccccgcggctctggcgattgtctccccactccccgcccccgagggtctgagggacgcgtgcaacagagtccccagggctcgaggtaccacacagcgcggtccgctgcgggcactgcgcaggaaggggcatgggtggctaccgggacggtcattttattgagatgattcaaggagccgcagacgcggggcaggaaactccgggggagccgtgctcgggttctgcagggaaacctcgggattcccttcgcatgccgcatgcggaaacctgccgggctcgacgtgcacagtccagcgctcctccccactagttactgcccaggccccccgatcctgcacccgccggaatgagagaaagtagcccctcgccgcccagctcccgggtagctgctccggccgggccttgcgttggtgagaaagttccatctagaggcggccgcgcgcaactgcaggcggcgccctaggcccgggcgagccagggagagcggggcgcggggggagagggggcagcccaggagataaggaggatggagaaggacgggagagaccccgaaaaggcaagctc

SEQ ID NO: 115617 - DNA, 14 bp, Homo sapiens
  chr7:126987825-126987839
  hyper
cccgtggagacggc

SEQ ID NO: 115618 - DNA, 163 bp, Homo sapiens; identical to SEQ ID NO: 44693
  chr7:126988120-126988283
  hyper

SEQ ID NO: 115619 - DNA, 30 bp, Homo sapiens; identical to SEQ ID NO: 5868
  chr7:127032060-127032090
  hyper

SEQ ID NO: 115620 - DNA, 116 bp, Homo sapiens
  chr7:127032408-127032524
  hyper
caggaggaaccgcccggcagcagctgccgccgccaccaccgaaggagccggaaccggagcgggcaggacctgaggcttccctcgccggggcaacggctgccgccgcaacccgggtc

SEQ ID NO: 115621 - DNA, 259 bp, Homo sapiens
  chr7:127033346-127033605
  hyper
tatcctggcagctccgcttctcaaacttgaaagtggagttgggtcacgtgggctcacgcactttccctcctcttctgcgccccgatcctgcttggaaaatcctcgaagatcccagtcatctgtcaaattctgccaaccaagggccgcttcttgggggcgagagagccgcctccgttgtttcctcccagctcctggaacgtaattcttgctcttggtgacatcaagcaaatatgtgtccaccgcccgtcaggaaatttta

SEQ ID NO: 115622 - DNA, 30 bp, Homo sapiens; identical to SEQ ID NO: 5869
  chr7:127225735-127225765
  hyper

SEQ ID NO: 115623 - DNA, 110 bp, Homo sapiens
  chr7:127228127-127228237
  hyper
cctaggggcctggacgcaacaaaccaaagcccagcggccggccactgaaaatgggggcaggggccgctgcggagcgatgaatcctttcctcagccgcgctcgggctgccg

SEQ ID NO: 115624 - DNA, 184 bp, Homo sapiens
  chr7:127228670-127228854
  hyper
cccttccgcccccgcgtccctccagccccgctcacctgggtctctggccccgagtcacccacctcataacgccccggggcctctgctctcgggcgggtcccggtctgcatcgccgaccccggggcctgacacccggagctgcgggcctgggtggggtgaagctccctccgccccagcccggctg

SEQ ID NO: 115625 - DNA, 30 bp, Homo sapiens; identical to SEQ ID NO: 44698
  chr7:127260376-127260406
  hyper

SEQ ID NO: 115626 - DNA, 293 bp, Homo sapiens; identical to SEQ ID NO: 44699
  chr7:127291484-127291777
  hyper

SEQ ID NO: 115627 - DNA, 30 bp, Homo sapiens; identical to SEQ ID NO: 44700
  chr7:127292374-127292404
  hyper

SEQ ID NO: 115628 - DNA, 207 bp, Homo sapiens
  chr7:127671450-127671657
  hyper
ggcgtcggccgctccgggccggcggcagctgattgcggtcgtgagctcgcggagcggcgagagttaagaggaggtgttcgcggcgccttcgccctccccagacacacaccccctttctcctcgcctcttctcggagggtggaagagacaaaaacggggggtcagttctccagtccgccggctgccggcacgcggggcggcgctccgt

SEQ ID NO: 115629 - DNA, 30 bp, Homo sapiens
  chr7:127743813-127743843
  hyper
ccaggagaggccgggcggtgagcggctgtg

SEQ ID NO: 115630 - DNA, 499 bp, Homo sapiens
  chr7:127744069-127744568
  hyper
agccgaggaaaggaagcgacttggccaaggtcggagagctcattctttgcagggcggggtttggaacccggggtctggctctcggcaacgcgccctcggcccgcagcctcctgccccctgtgccccgcttcggcccccagcgcagctgcagaggggcccccctcgacgcatacactcaagagcccgaccgcgcggctgaaatcgcggagctcggagccgcggctggctgagcgatcgcggttcctgggctgcgtgcgcgccccttggagctgaaaggagcgccaggatcgggggcgctgcaccgggctgggcccctcaacgctcgcagaccgggccgggctgcagctggagatggcagcaatcccgggaggtctccgggcctcttcagggtgcgtccaggaggcgggttccgtgcgacgcggcgcagcccacccccacgagaccgcttaacttcgcgggggcagcctcgggcgctcggagacgcggaggcccagactgc

SEQ ID NO: 115631 - DNA, 840 bp, Homo sapiens
  chr7:127775615-127776455
  hyper
gtgccccccacccccgtttccacctcccgcctgcaccgccgggagctccggaggagttcccggggacctagaaacagcggcgagagcgtgagaggggaagagctgggggtccgggccaaaaggaggatggaggggctaggcttctagagcgtgggaaggggtcccagggaccgagccaagtggaaggcttgtccaggcccccgcctgctcccctggatctggagggagcctccacgtgcttccggctggggcggcaccgcgcagtgccgggagcgcccacgagggggcgcgcgagctcggcggcggcggcggcgccccagcgggagcgggaggccgcggggcacaaagagtggcggggcggaccctggggcgcccgggttccctgtcccgtgggtccccagcaaaccgcagcggtaggagaggtgggctttgcctctgaagcacagcaggcccttaacaagttttcacggactgaatgcgtgagctatgtaagccctgccgcatcgcgacgttagaggtttcccaagttacgcccccgcaggcgctctgatgctgacatattaaaagaagcccggaggaagagggcgacgcacgcgggtggctttaggccgcctatttggggaataaatgacagaaggggcgtggtggggtggggaggaagcgggtccccgcgccctgggttccgattctggcccgaggctcagctaggatggccccagatcccagagaacgtcctacctagtgcccgtttctacacctccccctcccgccccagagttacgggttaaggagaaagacttggtcagagaaaacgtgagacggcgccggggcagggaccct

SEQ ID NO: 115632 - DNA, 2217 bp, Homo sapiens
  chr7:127806577-127808794
  hyper
gccaatgcccgggagcggcctttgggaggaaggggaaggctaatgccctctcaaatgctcttccctgcttcccgcatctactcaggtgtgtgagggagcccgcggaacccgctctgcccagccggcgcgccctcgaccgccctcggagttccgcggctccgcgcgccgcctccccgcctccgccgacattccgaggctccgcgtttgccatttcgatctggaggcgcattctcctcaccctcggagagagactgggtcaagggcccaggctgggaagaagggacagctagtaaaggaactctgcccgcctggccggcggagagccgcagagagaggacgctcacaaaagtcggtcgctacccggcccaaacgattgtggagccggcgagagcaactggtcccccagtcctcctccctggaggaggtgcgggggcgcggcaggcgggcttggcccaccccagccgaggagcttgtgggggacggcgggcggccggctggacccctgcagggcttcccccactttcgggagcccgagcggccgagggagaaagggcaggggctctccgccgtccgtctgggagagcagctcctcccagtcgggcccgcaggtgtgggtggggaggggccgtgtccgcctccgtgctaggtagagggtgggaggagggaccttgtctgtccccctcagctgggtaggaaaccccgactcggacctgtccttgagcgcgggggatctgggcaccccctcccccagcaggttcccgagagtccgcccgagggtagacagacctaggcgtggtgtgcacgcgcgcgtgtgtctgtgggtgtgcgtgcgagcgaggcaagagggtcttggcgtcccccgcaccctctctgccgggttctatattttgcctttctttgttctcaaaatagtaggcgagcgcggccggcgctgccctggcgaggggtgggggctccgcgctcgctcgcgcgagccgagttagctgcagggttacaaacagtatctccctgctcccccggcctgaattaatgtgttactatttcgggcgagccagtgtttccaggggaaacctaatgacgcaatgacgtcaatgcaggtcagcagcagactctccgggagggcgggcgggctcccggctttcgggctcggcgcagtctgcgggcgggagggcgccggcgaggtggcgagggcggctggcgcgggggcgcgggagccccggctaagcccggggacgggagggcgccccctcccagcgcccgaacccaggcaacttcccgccgcccgggcaggagtttctccgtagcccacggacatccgggaggcttgtggagggcaggcgggtaacccccactcccaccccacctttatccaggggcagccagaggagccagcaggtcgggactcgctgagggggctccacgcggggcctcccacgcacaggtacgcgctggtcctcggggtgtccccagtttgggagggagacacgcacagtcgctcccgtccacactcctctcgtgtcctggctccatgactgggagtctggggaaagaagaatgggtgtctgagacctacccctccgccggtgtcgccccgctctttctgggcgtaggagcgggctgcctgcccctctcccgcaccttcctggtctcgggctagaactggggcttcccatcggccgcgcttcccttaggggcgccatctgaggtcggaagcaaagctggaggggcgtccaggccagaggacgcgggctggggcgggagcctcggcagcctggtgggagctggtgcccactgcagggtgcgtgtacggggctgcctgcgtgtgcttggtgtgtgtcacttctgggagcgtaccccgtgtgtccacggggtgtgtatgcgcccacggaagtcctctgtgcatgcgtgtctgtgccataggcgtgggaacacctcgtgcacccatggtacttgcccggagagtaggaagccagcgagggagcggccctgctccagggtctcttccctgctcatccctccagctggcccagattacaccctactcacacccgggtcgcggcccactttccccatagccgcagcttccggcggctgcacacttcttagtgctcatcctgccttctcgccccaactcgttgtgcccttccctccttggagagtgagtagaagaggggatggggaggaatccgtttccatcccccgcgaccccctcaccta

SEQ ID NO: 115633 - DNA, 27 bp, Homo sapiens
  chr7:127841245-127841272
  hyper
actgagccacccaaggtcacccgggca

SEQ ID NO: 115634 - DNA, 158 bp, Homo sapiens; identical to SEQ ID NO: 5874
  chr7:127841338-127841496
  hyper

SEQ ID NO: 115635 - DNA, 261 bp, Homo sapiens; identical to SEQ ID NO: 44706
  chr7:127841625-127841886
  hyper

SEQ ID NO: 115636 - DNA, 30 bp, Homo sapiens; identical to SEQ ID NO: 44707
  chr7:127983951-127983981
  hyper

SEQ ID NO: 115637 - DNA, 135 bp, Homo sapiens
  chr7:127991607-127991742
  hyper
cgatggcgctccccaggggctccttgtctgggggcccagtgacccagcctcccggcagcagcggagccgcgtggcccggggacaagcggaagagcttggcccagcagcgcggcggcacgcgaggactgcagagcg

SEQ ID NO: 115638 - DNA, 135 bp, Homo sapiens
  chr7:127991787-127991922
  hyper
cgcccaggcgcaggcctagctggaaggcccaccagggccagggcccttccaggccggattggccgccgtagcccagggcgtgcagcacctcatagccctgcagggctccgctcagcagcccgaaggtgcccgcca

SEQ ID NO: 115639 - DNA, 274 bp, Homo sapiens
  chr7:127992044-127992318
  hyper
cgcccgccccagcaggagagcgccagcagcagcccggaaaggaaagcggcgagaaaggcgtgcagcccgcgcgaggcgagccgcaggggccgcagcgggcgatgcgcggcgctcccgagggcggcggcggccgccagccccagccccaggagcagcagcgcagccaggccggtggggcaccgcggcgggcgcggccgggccagcagcaggcaggccagccccaggccggcagccaagcagggcagcggaaggtcctgcagcagcagccaggcga

SEQ ID NO: 115640 - DNA, 15 bp, Homo sapiens
  chr7:127992371-127992386
  hyper
cgcgtggtcccggcc

SEQ ID NO: 115641 - DNA, 30 bp, Homo sapiens
  chr7:128001420-128001450
  hyper
cgtggcggccctggcgcccagctgggcaac

SEQ ID NO: 115642 - DNA, 252 bp, Homo sapiens
  chr7:128001887-128002139
  hyper
cctcggtgccgggcgcctccacgcgcgctcattcacccagcgctgtcaatcagccgcggcgggcgcctcgctgtgagcctggcgagagcaatcacacactcccagggcggcccagcacacacatccacacgcgcgccaggaaacacactcgcaggtcagagggcgcgcgcacacacgcgcacacatggcagcctgccccaggatggcaccccgggcaataagagtcccaccgtttgctaagtagaagtacaa

SEQ ID NO: 115643 - DNA, 30 bp, Homo sapiens
  chr7:128045844-128045874
  hyper
gcgaagagctgctgcgcggtgagcccatcc

SEQ ID NO: 115644 - DNA, 30 bp, Homo sapiens; identical to SEQ ID NO: 44708
  chr7:128046279-128046309
  hyper

SEQ ID NO: 115645 - DNA, 121 bp, Homo sapiens
  chr7:128049870-128049991
  hyper
gtcccgggtgttgccgggctccgggctccggaacagcggcggctccgcctccctgcagcggtggtggagtgagtggcccctccatgcggaggccgcagctcagggcgggcgggagcctgga

SEQ ID NO: 115646 - DNA, 30 bp, Homo sapiens
  chr7:128050260-128050290
  hyper
ccttccctgccgtccggaccttccagtgtc

SEQ ID NO: 115647 - DNA, 30 bp, Homo sapiens; identical to SEQ ID NO: 44710
  chr7:128050601-128050631
  hyper

SEQ ID NO: 115648 - DNA, 30 bp, Homo sapiens
  chr7:128095684-128095714
  hyper
taatacacacgcctcgtctcactccagaac

SEQ ID NO: 115649 - DNA, 30 bp, Homo sapiens
  chr7:128095935-128095965
  hyper
tctgcggctgacggcgcttttgtctccggt

SEQ ID NO: 115650 - DNA, 30 bp, Homo sapiens
  chr7:128096250-128096280
  hyper
ctaactaggatccacgtggcccatcccacg

SEQ ID NO: 115651 - DNA, 77 bp, Homo sapiens; identical to SEQ ID NO: 44711
  chr7:128337470-128337547
  hyper

SEQ ID NO: 115652 - DNA, 15 bp, Homo sapiens
  chr7:128337787-128337802
  hyper
cggaagctaagatgt

SEQ ID NO: 115653 - DNA, 30 bp, Homo sapiens; identical to SEQ ID NO: 44713
  chr7:128379302-128379332
  hyper

SEQ ID NO: 115654 - DNA, 144 bp, Homo sapiens
  chr7:128379662-128379806
  hyper
cctgggatggaggccgccgcccgtcttaccgcgcgctctgggaagggggctggtccggtggaactctgtcccgttgggtactgttctgtgcctggtttgctgcgtcctggtcctccatctctaggtcacgccactcaccgagtc

SEQ ID NO: 115655 - DNA, 172 bp, Homo sapiens
  chr7:128430709-128430881
  hyper
agagtgaacatcagtcgtgcccactctgagcgggctactgtgggggcgtggctcgcagcccaccgggtgtgggaccggaagggaagacagggcggaggagagggggtcttccggccctgaggcttgatggggccaccggagggctcctcctaagagggtccttggccctggc

SEQ ID NO: 115656 - DNA, 27 bp, Homo sapiens
  chr7:128430922-128430949
  hyper
cgttcgcccatccgggcctcgacttcc

SEQ ID NO: 115657 - DNA, 30 bp, Homo sapiens
  chr7:128431263-128431293
  hyper
cgctgtccgggccccgcggctccccgcgct

SEQ ID NO: 115658 - DNA, 30 bp, Homo sapiens
  chr7:128431567-128431597
  hyper
cggcgcgggagccgcgggctggagctgccc

SEQ ID NO: 115659 - DNA, 30 bp, Homo sapiens
  chr7:128431932-128431962
  hyper
tgggcaaggtccagcgagagaatgggagga

SEQ ID NO: 115660 - DNA, 30 bp, Homo sapiens; identical to SEQ ID NO: 44714
  chr7:128470202-128470232
  hyper

SEQ ID NO: 115661 - DNA, 604 bp, Homo sapiens
  chr7:128470452-128471056
  hyper
ccagcccgcccttcccgagcaccgctccggccctggagggagagagagccagagagcggccgagcgcctaggaggcccgccgagcctcgccgagccccgccagccccggcgcgagagaagttggagaggagagcagcgcagcgcagcgagtcccgtggtcgcgccccaacagcgcccgacagcccccgatagcccaaaccgcggccctagccccggccgcacccccagcccgcgccagcatgatgaacaacagcggctactcagacgccggcctcggcctgggcgatgagacagacgagatgccgtccacggagaaggacctggcggaggacgcgccgtggaagaagatccagcagaacacattcacgcgctggtgcaatgagcacctcaagtgcgtgggcaagcgcctgaccgacctgcagcgcgacctcagcgacgggctccggctcatcgcgctgctcgaggtgctcagccagaagcgcatgtaccgcaagttccatccgcgccccaacttccgccaaatgaagctggagaacgtgtccgtggccctcgagttcctcgagcgcgagcacatcaagctcgtgtccataggtcagtgccgggg

SEQ ID NO: 115662 - DNA, 13 bp, Homo sapiens
  chr7:128471125-128471138
  hyper
cggggagctgaga

SEQ ID NO: 115663 - DNA, 30 bp, Homo sapiens
  chr7:128502626-128502656
  hyper
ctctggggtctcggcgtctaacagcgtcag

SEQ ID NO: 115664 - DNA, 263 bp, Homo sapiens
  chr7:128502878-128503141
  hyper
ggccgacggggcgccgtacggcggaggcggggtttcagtggcttctggtgctctagggtgagctctgcccggctgcagggatggcggggaggggtaagctcatcgcagtgatcggagacgaggacacggtgactggtttcctgctgggcggcataggggagcttaacaagaaccgccatcccaatttcctggtggtggagaaggatacaaccatcaatgagatcgaagacactttccggtacggtaccgcgcgaggcctgaac

SEQ ID NO: 115665 - DNA, 113 bp, Homo sapiens; identical to SEQ ID NO: 44717
  chr7:128509597-128509710
  hyper

SEQ ID NO: 115666 - DNA, 240 bp, Homo sapiens; identical to SEQ ID NO: 44718
  chr7:128509981-128510221
  hyper

SEQ ID NO: 115667 - DNA, 30 bp, Homo sapiens
  chr7:128578149-128578179
  hyper
cgccccgagggtggcgggagcggtgccggc

SEQ ID NO: 115668 - DNA, 56 bp, Homo sapiens; identical to SEQ ID NO: 5878
  chr7:128579007-128579063
  hyper

SEQ ID NO: 115669 - DNA, 30 bp, Homo sapiens; identical to SEQ ID NO: 44720
  chr7:128694377-128694407
  hyper

SEQ ID NO: 115670 - DNA, 319 bp, Homo sapiens
  chr7:128695027-128695346
  hyper
cctggccttttttccggtttttccacttgattctagactcttgagtccacagattctggcgctcccgtcttcagtcgctgacttgccctcagaagcctatcttgggaggccacacaccagtgtacctaaggttcgtttacccggaccggaagcgacagcaccgatacctttggcacacttccgcctggtacactacaaacggcctccttcccggcacgcctcctcttgtctccccgccccctcccggaagtaaccctgccgggccaggagccgggaagaagagccggtgttctctctgttcctcgctagcagcttggga

SEQ ID NO: 115671 - DNA, 53 bp, Homo sapiens
  chr7:128784404-128784457
  hyper
cccagagctttcggcgcattgctcaacacacggtgtgcgtacttgttgatttt

SEQ ID NO: 115672 - DNA, 249 bp, Homo sapiens
  chr7:128784697-128784946
  hyper
agccaatgggaagtcgggctcctgcacggcgcggctcggctcatgcccccgggcgcggggcacacaggccggccggcagccgctgggaaataggcccccgggggcggtggcggcggcggggccatggcgcggagaccccgggcgccggccgcctccggggaggagttctccttcgtcagcccgctggtgaaatacctgctcttcttcttcaacatgctcttctgggtgagtctcggggtcgagggcacc

SEQ ID NO: 115673 - DNA, 1203 bp, Homo sapiens
  chr7:128828176-128829379
  hyper
tcctgagccaggagaaaagtccgcttcctgcagacgacctcagaccaagcaaggtgcccgccgagtctctccttgcaggtccggcccacgatttccactcatctctttcccccgggcgcggggcggcggcaggcggggtcaccagatccccctagcccgggcccctccaggcgccagggacgctgacgctcgcgctcttcctctctcgcctcccctccccacctctccgctccttcgtccagtccctcccccagcctcggcgcaggggggccgggcttggctccgcgaggcccgtgcattccagagagcccagcgagctagagcaacaaaggagccgggtcgccggcggggagagttcggggggctgcggcgcgctggggcgaaggtggctgctgggccgcgggctggcgcgggggcggagccggagctgcactcgcacccccggcccgcgtctggcctccctcgcggggcggggaggtggctttaatggtgggagagggaatggggctggggattgggggcccaggggtctcctagggctgaagacaacttggattgcgaggctagggcttggggagtcgtgcatcccgttccgggcctccgcagcccaacatgggccccgggttccaaagtttgcgaagttgggcgccgaggggccggggcgcgcggagcgtccgggggggcccgggcccggattctctgggcgcacaggtcgcctgagccgcctccgcggccgccgaggtcgtgcgtgtggccggggggctccgaggagcaggcgggggcgccggggcttttgctgagttggcggggttggccatggccgctgcccgcccagcgcgggggccggagctcccgctcctggggctgctgctgctgctgctgctgggggacccgggccggggggcggcctcgagcgggaacgcgaccgggcctgggcctcggagcgcgggcgggagcgcgaggaggagcgcggcggtgactggccctccgccgccgctgagccactgcggccgggctgccccctgcgagccgctgcgctacaacgtgtgcctgggctcggtgctgccctacggggccacctccacactgctggccggagactcggactcccaggaggaagcgcacggcaagctcgtgctctggtcgggtaagtgcggcggagccgggtctggggggcgggaggtgccgcggtaagatgggggc

SEQ ID NO: 115674 - DNA, 30 bp, Homo sapiens
  chr7:128864352-128864382
  hyper
atcgcagacgggcacgcgcggaggaacttc

SEQ ID NO: 115675 - DNA, 30 bp, Homo sapiens; identical to SEQ ID NO: 44726
  chr7:128865251-128865281
  hyper

SEQ ID NO: 115676 - DNA, 30 bp, Homo sapiens
  chr7:129073712-129073742
  hyper
gccctagctccgggcgagatgcgttctctt

SEQ ID NO: 115677 - DNA, 30 bp, Homo sapiens
  chr7:129074076-129074106
  hyper
tccgccagcaatgccgcaggactaaaaaga

SEQ ID NO: 115678 - DNA, 30 bp, Homo sapiens
  chr7:129074859-129074889
  hyper
gcgagtggggcaaccgcagtccccctccca

SEQ ID NO: 115679 - DNA, 30 bp, Homo sapiens; identical to SEQ ID NO: 5880
  chr7:129142636-129142666
  hyper

SEQ ID NO: 115680 - DNA, 30 bp, Homo sapiens
  chr7:129251358-129251388
  hyper
ccaaacctctgaagcgctccgtgcacgcga

SEQ ID NO: 115681 - DNA, 30 bp, Homo sapiens
  chr7:129252412-129252442
  hyper
agctgagatgtgcccgcggaggggccgcgg

SEQ ID NO: 115682 - DNA, 309 bp, Homo sapiens; identical to SEQ ID NO: 5881
  chr7:129418306-129418615
  hyper

SEQ ID NO: 115683 - DNA, 399 bp, Homo sapiens; identical to SEQ ID NO: 44729
  chr7:129418755-129419154
  hyper

SEQ ID NO: 115684 - DNA, 30 bp, Homo sapiens
  chr7:129419713-129419743
  hyper
ggtttggaaagagccgcatggacggagctt

SEQ ID NO: 115685 - DNA, 30 bp, Homo sapiens; identical to SEQ ID NO: 44730
  chr7:129420488-129420518
  hyper

SEQ ID NO: 115686 - DNA, 526 bp, Homo sapiens; identical to SEQ ID NO: 5883
  chr7:129421182-129421708
  hyper

SEQ ID NO: 115687 - DNA, 545 bp, Homo sapiens; identical to SEQ ID NO: 44732
  chr7:129422115-129422660
  hyper

SEQ ID NO: 115688 - DNA, 32 bp, Homo sapiens; identical to SEQ ID NO: 44733
  chr7:129422936-129422968
  hyper

SEQ ID NO: 115689 - DNA, 379 bp, Homo sapiens; identical to SEQ ID NO: 5886
  chr7:129423125-129423504
  hyper

SEQ ID NO: 115690 - DNA, 1584 bp, Homo sapiens; identical to SEQ ID NO: 44735
  chr7:129424363-129425947
  hyper

SEQ ID NO: 115691 - DNA, 30 bp, Homo sapiens; identical to SEQ ID NO: 44736
  chr7:129592835-129592865
  hyper

SEQ ID NO: 115692 - DNA, 30 bp, Homo sapiens
  chr7:129690946-129690976
  hyper
ccatccccactgcccgagtcgccgaccgag

SEQ ID NO: 115693 - DNA, 120 bp, Homo sapiens
  chr7:129709788-129709908
  hyper
ctgtttgattgggacgtggcttatacagggacaaatgcagctaagccgactgaaagacaaatgaaacccaggaatatctggttcttacattttagctttgactccgcccctgggtcccct

SEQ ID NO: 115694 - DNA, 91 bp, Homo sapiens
  chr7:129710294-129710385
  hyper
acctaccaagaaaacgactgaccattggctgcctttcaccaaggcggtaagtcattggtctctggtgggaccgggcgctgcccccttcccc

SEQ ID NO: 115695 - DNA, 115 bp, Homo sapiens
  chr7:129845323-129845438
  hyper
aggtagtctcttctcgcgagaaagggaggggtcgcaggcccaggcgctcggagcgttaccagggaaacaggtctcggttttgcggctcccactcagctgcgggagaaagctaagc

SEQ ID NO: 115696 - DNA, 443 bp, Homo sapiens; identical to SEQ ID NO: 44739
  chr7:129913007-129913450
  hyper

SEQ ID NO: 115697 - DNA, 30 bp, Homo sapiens; identical to SEQ ID NO: 44740
  chr7:130667105-130667135
  hyper

SEQ ID NO: 115698 - DNA, 30 bp, Homo sapiens; identical to SEQ ID NO: 44741
  chr7:130680505-130680535
  hyper

SEQ ID NO: 115699 - DNA, 187 bp, Homo sapiens
  chr7:130741970-130742157
  hyper
atgcacttcccaagtcgttgttttctttgatctccttagactctctgcctcctagagaatctaatccacatgaactgcgctcctggatcttttacataactgtggtttttcacaaggttctttaaacaaaggtccacgtgatagatttctgctcaagcttagttccaggaaacgtttggtttctgca

SEQ ID NO: 115700 - DNA, 30 bp, Homo sapiens; identical to SEQ ID NO: 44743
  chr7:130791156-130791186
  hyper

SEQ ID NO: 115701 - DNA, 38 bp, Homo sapiens
  chr7:130791782-130791820
  hyper
ttccagtggagaaccgagacaccgcgtcctttctaatt

SEQ ID NO: 115702 - DNA, 30 bp, Homo sapiens; identical to SEQ ID NO: 44745
  chr7:130792590-130792620
  hyper

SEQ ID NO: 115703 - DNA, 30 bp, Homo sapiens
  chr7:130792928-130792958
  hyper
taaaggggctcccacgtgactgcagcagca

SEQ ID NO: 115704 - DNA, 283 bp, Homo sapiens
  chr7:130794763-130795046
  hyper
tgctgcagcagctgcggttctgctgtgtcatgcaagaaggaggcggcggcggcggcggcggcggccggagctggagggggaggaggggaggaacctgatcctccggtagcgaagggctagaggcaaacaccgagctcctccagagccgcccgggagcagggagggctccgctagcccggggggccctccccgcggggcagatggtaagtggggcggtgcaggtggtcgccttgggaagggagcgcgcaggggggtaaggtggggcggcgggaagtgctagaag

SEQ ID NO: 115705 - DNA, 96 bp, Homo sapiens
  chr7:131012268-131012364
  hyper
caaaagcgcacaggcgtcccttttccaacttggtcttcttattttcccttcctgctccataactacaacgtgtttctgttcgtaatcatctcggct

SEQ ID NO: 115706 - DNA, 48 bp, Homo sapiens
  chr7:131013174-131013222
  hyper
cagtcgattgctgccgggacaaagtgtaaagccgaggagtgtctattc

SEQ ID NO: 115707 - DNA, 121 bp, Homo sapiens; identical to SEQ ID NO: 44748
  chr7:131240425-131240546
  hyper

SEQ ID NO: 115708 - DNA, 30 bp, Homo sapiens
  chr7:131241698-131241728
  hyper
cttctaagtgggcccggcgggatcccccag

SEQ ID NO: 115709 - DNA, 529 bp, Homo sapiens; identical to SEQ ID NO: 5890
  chr7:131242579-131243108
  hyper

SEQ ID NO: 115710 - DNA, 30 bp, Homo sapiens
  chr7:131339552-131339582
  hyper
gtctctgcctgggccgccctttgggcagct

SEQ ID NO: 115711 - DNA, 30 bp, Homo sapiens
  chr7:131377070-131377100
  hyper
gggtgtgtgcctgccggtcgcaggtcgaga

SEQ ID NO: 115712 - DNA, 30 bp, Homo sapiens
  chr7:131430604-131430634
  hyper
aatgcagggtgaactcgtctgtgcaaggtg

SEQ ID NO: 115713 - DNA, 238 bp, Homo sapiens
  chr7:131514696-131514934
  hyper
cctgtaaagccccagcccacccggaagcccccactttggcgctcctgggcttggatcccgctgtgaggccgggggcaggtgatcatggcaggcggtaggactcctctcactctctgccccagaccccgcctgggagcctctgccgccctctcctgctccagcaggcaaggccaggaagccgggagtgcttgctgtcaatatcacatgtggagctgcttgtggccggccaggactctca

SEQ ID NO: 115714 - DNA, 31 bp, Homo sapiens; identical to SEQ ID NO: 5891
  chr7:131630395-131630426
  hyper

SEQ ID NO: 115715 - DNA, 1047 bp, Homo sapiens; identical to SEQ ID NO: 44752
  chr7:132260160-132261207
  hyper

SEQ ID NO: 115716 - DNA, 248 bp, Homo sapiens; identical to SEQ ID NO: 5893
  chr7:132261256-132261504
  hyper

SEQ ID NO: 115717 - DNA, 946 bp, Homo sapiens
  chr7:132261534-132262480
  hyper
cggtggcgacgccgggctgccccccttcgtccccacccccgcgggctgaatgtccttgatgccaagcgggcacagcggcgtcactccgcgccgcccatgctcgcccggtcgggccgctgcccgggcgcggcgagtgcgcgggggacccgccggggagcgctctcggcgcctctgcgcgcctctctgggtagcggcggccgccccccggcagcccgcggccggccgcgccgcggcagcccccacccttgccgagacactcgccgggcagtgccctggggccggggctggggggccgcgggagccgccggctgctccccggggaggcgcggggctgcggcggtggtggctgcggcggctggcgctgcggcggcggagagctcggccgcgggccgagccgggcctcccgggcgcgcccccggccccccgggcgggctgctcgcaaagtttgcagggggcagggagcggggccgccgctggctcggccgccgccggagctcccgggctgcctgctgccgccgcggctcgctgctgctgtgcattgaagcccggccaagcgctgcaaaaactccagctgcctggcgctctctgggtcctcctctcctccctcccgccctccctgcttcccttcctccctccctcgcctcgcctcctctcctccctgccgcccgccgcccgccgccgctccctctctggctcgctctcgctggctcggagctcgcggctgacatctagagcgagggagagcggccggcagagggggcagggggcgcctccctacatgctcccacccgccgccgcccggcttgccggctctcctccgcaccaacgtttgccgacacccccctgggtcccctcggcccgcacggagctaccctggcggtggcgatgtggggcggagagaggggcatacatgggtgaccggagcgcacggcgcgcgctcagaggg

SEQ ID NO: 115718 - DNA, 187 bp, Homo sapiens; identical to SEQ ID NO: 44756
  chr7:132299530-132299717
  hyper

SEQ ID NO: 115719 - DNA, 196 bp, Homo sapiens
  chr7:132340197-132340393
  hyper
gtctgacatgcataacgggaatcaaaccagagaggaagtgctgcggcttccctggtgggacattgtgctctctctccctctcggagggcccctccctctgcactttcagcgatttcaagatccgcacattactctttatcaacttggcagatgctattgcctcttccggctcacaagcttccgtgctgggctcctc

SEQ ID NO: 115720 - DNA, 30 bp, Homo sapiens
  chr7:132766384-132766414
  hyper
tggcattccccgcccgccccagcagtgcct

SEQ ID NO: 115721 - DNA, 126 bp, Homo sapiens
  chr7:132766984-132767110
  hyper
gtttgatagctttccgcggagtccctgggtgtagtgggaactgtggtctcgatctggcgcggtgggtgatgggacattctctccccgcgcctgagcgcgctaagggagcacggcattctgggagtt

SEQ ID NO: 115722 - DNA, 201 bp, Homo sapiens
  chr7:132937608-132937809
  hyper
ttagctttcctgcgcgcccaggagacggagaaggaaaactacgactcccagagtgcttagagagaacacgcgcgtcgtggcctcaaaacttgctcccttagtcccgcctcctcacttcagtgattggattttccacttccgcgcctctggaattctcttcacccattggtggagactcctgcggggtcaaatacagaattt

SEQ ID NO: 115723 - DNA, 358 bp, Homo sapiens
  chr7:133812025-133812383
  hyper
gaaggcgagtacgcgcggaggagactacaggccccagaatcctccgcggttccccttgcctggggtcagtctcctaggcaaccccgctaaacaagatggcgacctccgagagggctctcctgaggaccagagctgcctctctcctgagaggcttgggcagatcccgaactggagcccgatcgttacagtttcgcgcagaaaaagagcgtcagccttgctggtcttttcccatggggcagaagacgaaaggcagctctaacatagcctcctcctacctgctccagcagctcatgcaccgctatcaggagctggactcggacggagatgaggaccagggcgagggcgaggcgggatccga

SEQ ID NO: 115724 - DNA, 122 bp, Homo sapiens
  chr7:134001193-134001315
  hyper
ttgaaactgttaggcgggactgccgccggtgcgcagttttgggaagcagcggactcagcggggtcccaggctgcccagacaggacggattgctggggggctcaggccgtcctgccccgggct

SEQ ID NO: 115725 - DNA, 30 bp, Homo sapiens
  chr7:134001541-134001571
  hyper
gcgcccgcctgtaccgctaccccaggaagc

SEQ ID NO: 115726 - DNA, 97 bp, Homo sapiens; identical to SEQ ID NO: 5897
  chr7:134001928-134002025
  hyper

SEQ ID NO: 115727 - DNA, 607 bp, Homo sapiens
  chr7:134142979-134143586
  hyper
ccggctaggcacttctcggggacgctgtgtggtgttgaggttttacagggaaaatgctaaccttggcgcctcctgaattatcaactagctacggggtgcccagatttttctcccgagttccagacccagggcaccccgaggcggcgcctggccgaggagctccgcactgcgccttgttaacagctgggtccgggcaaactcgcgccacctaattctctgccctctaccggcttgagatgcttattcctcagggagggcaagaatcgaaacgattgagaccaactatttacaagtgaggcaaccgggctacaggtgcctcgagggaaaggaggctgggtctgcgctcccacaccttgccgacggctccacgtccctgtctgcgcccgaggtccaccggtctgtgaagcccactttccccgcctccctctcgcgttgtgccgcttggggcgcccgctaggacccaaaatgcggactggtgggccgcccatcaagggttgcccgcggtagggcgggggctcccgtgagctgctcccaaaccccactcgcaggatgctgccctgacgcccagggccaacccggggagccaaggcccccggtctctgcaagg

SEQ ID NO: 115728 - DNA, 439 bp, Homo sapiens; identical to SEQ ID NO: 5899
  chr7:134143700-134144139
  hyper

SEQ ID NO: 115729 - DNA, 178 bp, Homo sapiens; identical to SEQ ID NO: 44763
  chr7:134331361-134331539
  hyper

SEQ ID NO: 115730 - DNA, 30 bp, Homo sapiens
  chr7:134671229-134671259
  hyper
gctgtccgaagtctcgcgagggcggacccg

SEQ ID NO: 115731 - DNA, 30 bp, Homo sapiens
  chr7:134671972-134672002
  hyper
agatttgaaattgtcgagtcctttggtctc

SEQ ID NO: 115732 - DNA, 30 bp, Homo sapiens
  chr7:134832568-134832598
  hyper
aatcactgggagcttcgagagttctttggc

SEQ ID NO: 115733 - DNA, 86 bp, Homo sapiens; identical to SEQ ID NO: 5901
  chr7:134832829-134832915
  hyper

SEQ ID NO: 115734 - DNA, 30 bp, Homo sapiens
  chr7:134855009-134855039
  hyper
ccgcgctcgcggaccgacctcagtcccatc

SEQ ID NO: 115735 - DNA, 295 bp, Homo sapiens
  chr7:134855494-134855789
  hyper
gtcccgcgggctcccggcctcgggacacttccggtcttggggaactcccggccccctcgcagtcccggcgcccgggacacttccggctcccggcagctgcctcagtcggaggtccgcgggcgccccatgctggcagtggtaatgccgccggctggcatccggttggctgcgcgctgggaacgccagcgaggcagcgccaccggcttgaggagggtgaaagttcaattcttggcccctgaagttagcggaagggaacgggcatgttttggaaaggcccgccgggaattccctcaga

SEQ ID NO: 115736 - DNA, 154 bp, Homo sapiens
  chr7:135194962-135195116
  hyper
ggagttgaagtcctcggagggtaacctcccaggggcacgccgggagttgaagtcctctctcagagggcggaggggatcgcccacctcacgtggctgctggactgatgcctttcttcgtgttttgcttccttctctgcacgcgtgtgctgcttca

SEQ ID NO: 115737 - DNA, 30 bp, Homo sapiens
  chr7:135242936-135242966
  hyper
agtgaggcttgggccgctggacccaggtgt

SEQ ID NO: 115738 - DNA, 30 bp, Homo sapiens
  chr7:135347573-135347603
  hyper
tgtcagagagtgtgcgtttccagagcttct

SEQ ID NO: 115739 - DNA, 30 bp, Homo sapiens; identical to SEQ ID NO: 44766
  chr7:135405128-135405158
  hyper

SEQ ID NO: 115740 - DNA, 30 bp, Homo sapiens; identical to SEQ ID NO: 44767
  chr7:135405190-135405220
  hyper

SEQ ID NO: 115741 - DNA, 30 bp, Homo sapiens
  chr7:135661827-135661857
  hyper
catgaactccttgtcgcacatcactgcagc

SEQ ID NO: 115742 - DNA, 89 bp, Homo sapiens
  chr7:136553409-136553498
  hyper
tcgaacacacacgcacgaatacagacacgctctcctgctgtactaaaggcgccagggcgcaaagacctagggagcgcgcgcgggcacac

SEQ ID NO: 115743 - DNA, 468 bp, Homo sapiens
  chr7:136553557-136554025
  hyper
ggccagagcctggaaatcgcagatttcaccaggaaatcgccgaggtacccgaataggtgttgcctcccaaaactaattcctacttccccaagcactttggtgaagaaatgaatccagcccagctcgccgaggcatccaggtctccattctattttggtctccaggctcttcgtgaaagccaggtttgaaagtcttgtttgcttctcctttagtggtttggcgtggagggcgggggcagcgtcaatttaactccagtctaaaccacgaacaggtcacagactagccaagtggctgagacgagtgtggggtgcgtgactctgcctgcgcgcgcgccagccccgcagctctcgccagagccttggggtcggttctctcccgcctctcccgcctctcccgccccacccctacagtgtctcggcatcaactaatcttttccttttcttttgcaagatcaagggagaaagagaa

SEQ ID NO: 115744 - DNA, 477 bp, Homo sapiens; identical to SEQ ID NO: 44769
  chr7:136554103-136554580
  hyper

SEQ ID NO: 115745 - DNA, 375 bp, Homo sapiens
  chr7:136554625-136555000
  hyper
cgtcttctgtgcgtgtgggatggaggcccggctcgctcgggctccgagctgtcccccggctccgctttcggagcagcccttgggcgctggagaggtttcccattgcggtctccaggtcatggccaaggaggagaagcaattagaatgggggaaagggtcccaagacaaaggagagggaagcattctgcaatcccatcctatttgagccccgcgcaggagctggactgtccgccgtggctgggggacaaggtctcagcccgaagctcatgaggtaccagacagtgcctgggcttcgccacctaactcacaatgggtcctgaaccgcccgggcagtccccggggtcgtagactggggaccgctgcacccctccccgc

SEQ ID NO: 115746 - DNA, 763 bp, Homo sapiens
  chr7:136555078-136555841
  hyper
cggtccatgcctggtgccggtagacgcgcagaaattccacctgtgcgcgctgcccggcgcccctggggcccctcacggggtaagtagagactcatctgggagaggtgaaaattccccagaattattgacacacacggcggcacaccctttgcctccgtccgcctccagcatccgcatccctttctctatcttcctgcccattgccgtcctcgaggctgccctgagatacagaattgtcccaggctgagtccaccgacccgccagtccctggcgatgatgccaaggctcttgcatgtacggaaataccagcagggaggttcgccaggggcagagaggctggaggagaacagagaattggaggtaaacgcgtaaagccagcagaactgtcggtggacatttcacccaggccgccctcccgcgtctttaagtcagttcaccgccacagcacgtctgtgactgcggccacccagggctccaagtctgccagcccaggcgccgcgagccaagaagagcgcggcgcctcccactcctcaagctccggaatcccccacatcgactttctatttccctgtcttcttttcttttttgtttgttttgcttttcctgctcttttcttagcgctgggtggcagtgggtatgcggcagccgtgtgatttgcccatcccctagtacacgcagccagcgacacaagcacacagcgaccagtccccacgctgtgccacacaccctccagcggtccggcgcgcagcccctgctccacagc

SEQ ID NO: 115747 - DNA, 213 bp, Homo sapiens
  chr7:136556012-136556225
  hyper
cgggccgggctgtgcggagccctgagggctcctgcggctgcagcgctgcaggccgcccgcgtctcgccccgccccgccgctgggcgtccccgccaggagcccacccgcgggcggcagcttttctccatgctgcccagggaagttcgatgcctggtgctgggatgcgccagcgcttctgttcgcttctggcaatcctggcgtctcccaatgaga

SEQ ID NO: 115748 - DNA, 410 bp, Homo sapiens
  chr7:137028150-137028560
  hyper
gccctccgagaaatcgtacgttcctctcacttactttgagttggaaacgtcctctctggcgctcagtctgcctttgttgcaaggggcgaggttgctaccgctgagtccaggtacccggctcgctgcagctcctgcttgggccgctgctgctctccccgccttctggacggatgactcactggtctctttcttcccctctctccactttggattttcctctgctctggggctctcttggcgggatttttggactggaaggcggggaacctgatcctgcctttgactcaattacgccctgacagggagggaacggaagggaaatggagaatgggagggatgagaggagcgggccaggaggacgaaggctgggcgagggagggagagcgctttgcactcgagagctgattggg

SEQ ID NO: 115749 - DNA, 165 bp, Homo sapiens; identical to SEQ ID NO: 5909
  chr7:137531046-137531211
  hyper

SEQ ID NO: 115750 - DNA, 626 bp, Homo sapiens; identical to SEQ ID NO: 5910
  chr7:137531262-137531888
  hyper

SEQ ID NO: 115751 - DNA, 279 bp, Homo sapiens; identical to SEQ ID NO: 44776
  chr7:137531908-137532187
  hyper

SEQ ID NO: 115752 - DNA, 80 bp, Homo sapiens
  chr7:137532373-137532453
  hyper
cgttgttcgtataagaagaggcatcccggaaggggcttcaaaccacttaggaccgactgctgaaacgaatccaagcttgt

SEQ ID NO: 115753 - DNA, 30 bp, Homo sapiens
  chr7:137685319-137685349
  hyper
ctgcaggccattttgcgaaagtttcaaata

SEQ ID NO: 115754 - DNA, 58 bp, Homo sapiens
  chr7:137685725-137685783
  hyper
tgctggtttttcctccgaagagggaggaaggagacttcttggtcgtacagtttaagaa

SEQ ID NO: 115755 - DNA, 30 bp, Homo sapiens; identical to SEQ ID NO: 44778
  chr7:137686691-137686721
  hyper

SEQ ID NO: 115756 - DNA, 178 bp, Homo sapiens; identical to SEQ ID NO: 44779
  chr7:137686992-137687170
  hyper

SEQ ID NO: 115757 - DNA, 30 bp, Homo sapiens; identical to SEQ ID NO: 44780
  chr7:138144669-138144699
  hyper

SEQ ID NO: 115758 - DNA, 101 bp, Homo sapiens
  chr7:138665268-138665369
  hyper
tccctggaaagatccgtggccagggcgctttccaagaggttttctttgaatgttctttgtgtcctgctgtacggggggacacggccggcctgcccgcatct

SEQ ID NO: 115759 - DNA, 177 bp, Homo sapiens
  chr7:138666617-138666794
  hyper
acagcctcggggccgcggaggggacaaagccagacaaagtcgggctcctgcgctagagctcagcgtgcaaggcaggggcgagcagagcgcacgcagctctcccccgccttcctgccttaagaaggtgcggccacctctgcgggtcttcgggaagcgaccctgcgctcagggcctggg

SEQ ID NO: 115760 - DNA, 493 bp, Homo sapiens
  chr7:138720459-138720952
  hyper
aggcctggcactcgccgcgctggtagcgggcgcagaggcgcacagaggacacggccaccaccctccaggcggaggtgccgccaccgcccaccgcgccggccgccgcctcggcctccgcgtccccgaggccctcctgcgtctccacctcctgcagcaggaaacgctcgggcccggcgcgctgcagcacgtcccggagcctggcctccgacagctccacgtggccgcgcaggtccttcaggaacatgcggccgccgtgggcgcacagcaccttggtgaggaaggagcacactgtgggctccgccatggtcgctggcgcgggccctgtgcgcgcggcgcagcgagccggggcgggcaggctcctcccagtcacgtccacgatttccagcgaacagcccggggatgggcctgggcctggcgaggggtgggcctgcgggaggccgggcgaggggcggccccggcgcgtggaagcagggtacggcgcctgcggatcccc

SEQ ID NO: 115761 - DNA, 30 bp, Homo sapiens
  chr7:138765584-138765614
  hyper
cgattttgcccatatcgtgatacgggtgta

SEQ ID NO: 115762 - DNA, 30 bp, Homo sapiens
  chr7:138793049-138793079
  hyper
gcagtggcccgagacgtgagccacactgct

SEQ ID NO: 115763 - DNA, 30 bp, Homo sapiens
  chr7:138793839-138793869
  hyper
tctggcagtacttgcgacggcagacccggg

SEQ ID NO: 115764 - DNA, 116 bp, Homo sapiens
  chr7:138794418-138794534
  hyper
ccagccgggctccgcgagccttctttagaaagaagagaaactaaaagcgatcttggggctctggccggtgttttataagccagccgactgaggcgtgtgacgcaagtcctgagagc

SEQ ID NO: 115765 - DNA, 33 bp, Homo sapiens
  chr7:138818579-138818612
  hyper
gggactcacaagaccgacgtcaagatggttagt

SEQ ID NO: 115766 - DNA, 30 bp, Homo sapiens
  chr7:138916929-138916959
  hyper
ctcgctcccaacgccgcgccgagctcgttt

SEQ ID NO: 115767 - DNA, 216 bp, Homo sapiens
  chr7:139024980-139025196
  hyper
cgccatctaacggccgctggagcaaagctcctcctggaaattcgcaacaccggaaaaggtccggctgcttccggtaaaaacccaccagagctgacgttcagagggcgagtctcgaagatccggccaatttgcccagcgcgctgtgctccgcgacggcgcatgcccgcttttgcgcaggcgcggggactacggcgcaggcgcggagactattgcgca

SEQ ID NO: 115768 - DNA, 30 bp, Homo sapiens; identical to SEQ ID NO: 44785
  chr7:139025744-139025774
  hyper

SEQ ID NO: 115769 - DNA, 30 bp, Homo sapiens
  chr7:139026043-139026073
  hyper
accgtaccattaggcgcctgggccggagga

SEQ ID NO: 115770 - DNA, 30 bp, Homo sapiens
  chr7:139026369-139026399
  hyper
ggccaaccctcccacggagccctggttctg

SEQ ID NO: 115771 - DNA, 30 bp, Homo sapiens; identical to SEQ ID NO: 44786
  chr7:139043703-139043733
  hyper

SEQ ID NO: 115772 - DNA, 30 bp, Homo sapiens; identical to SEQ ID NO: 5915
  chr7:139043994-139044024
  hyper

SEQ ID NO: 115773 - DNA, 30 bp, Homo sapiens
  chr7:139045555-139045585
  hyper
cagagatgcaccctcgagccccacagaaac

SEQ ID NO: 115774 - DNA, 271 bp, Homo sapiens; identical to SEQ ID NO: 5916
  chr7:139167555-139167826
  hyper

SEQ ID NO: 115775 - DNA, 499 bp, Homo sapiens; identical to SEQ ID NO: 5917
  chr7:139168114-139168613
  hyper

SEQ ID NO: 115776 - DNA, 350 bp, Homo sapiens; identical to SEQ ID NO: 5918
  chr7:139168658-139169008
  hyper

SEQ ID NO: 115777 - DNA, 30 bp, Homo sapiens; identical to SEQ ID NO: 44791
  chr7:139208208-139208238
  hyper

SEQ ID NO: 115778 - DNA, 97 bp, Homo sapiens
  chr7:139208472-139208569
  hyper
ctgagcgcaccgcggcggcacccggcgcagaggctccagcgcggggagccgggctcagccccggcctgccagcgccgcggtcctagcccacccgagg

SEQ ID NO: 115779 - DNA, 222 bp, Homo sapiens
  chr7:139208614-139208836
  hyper
cgggctgggccccgcaccccggtgcaggagcgcgggcgcggcgcggcggagcgccccgcatggagccggcccgggagcccccctcgcgggcccggccgccgccgcccctcgccgcgcgccccgcgcccgcccccgccgcccccaggccgcgttcgcccgcagaggctgaggcccgcggccccgaggggctgctgcggcgatccgggtcgggctacgagggca

SEQ ID NO: 115780 - DNA, 30 bp, Homo sapiens; identical to SEQ ID NO: 44792
  chr7:139475750-139475780
  hyper

SEQ ID NO: 115781 - DNA, 30 bp, Homo sapiens
  chr7:139477459-139477489
  hyper
gggaaagcggcgcgcgagctcggccccccc

SEQ ID NO: 115782 - DNA, 546 bp, Homo sapiens
  chr7:139477942-139478488
  hyper
ccgaagggcagagccgcgccggcggcccgaggggaccgcgctgggaggggctgccgcgcagcgcggggggactgggcgcagggcgggccccgggtagtgggtgagagggccggcctggacccggcgggcgcacggctccgagcccagcgcagccgagccggtctgcagaggggcccccagaactttgtgtgtgtgtgtgcacgcgcgcgcgtgtgtgcccaggtgcgagggttcgcgcgtgtgctggcggggagggaaccgacccgaaagagagccccacgctggcaaagtggctcgcccatctcacagccggttggcgctcgcggaggtaggagtggaatgaatgaatgaaggagtgggcgcgcgccgtgctccggaggagggcgggtgagtggaggagcttcggaaagccacacgaggtcagaggcaccgaagccctgccgtgcacgccgcggaaatgcagcccccggggtggtcgctgggttcctgccggagtctggcttccacgccaccctgatcttctcctcctcgcgtctacactgtccc

SEQ ID NO: 115783 - DNA, 30 bp, Homo sapiens; identical to SEQ ID NO: 5919
  chr7:139762241-139762271
  hyper

SEQ ID NO: 115784 - DNA, 30 bp, Homo sapiens
  chr7:139875163-139875193
  hyper
ggggagggggggagcggaggctgtatttaa

SEQ ID NO: 115785 - DNA, 30 bp, Homo sapiens
  chr7:139875848-139875878
  hyper
ggccccaacttccccggcacctttcaagtc

SEQ ID NO: 115786 - DNA, 30 bp, Homo sapiens; identical to SEQ ID NO: 5920
  chr7:139876505-139876535
  hyper

SEQ ID NO: 115787 - DNA, 876 bp, Homo sapiens; identical to SEQ ID NO: 44797
  chr7:139929833-139930709
  hyper

SEQ ID NO: 115788 - DNA, 30 bp, Homo sapiens; identical to SEQ ID NO: 44798
  chr7:139931030-139931060
  hyper

SEQ ID NO: 115789 - DNA, 30 bp, Homo sapiens
  chr7:140097763-140097793
  hyper
actcactgagaccacgcttcttctctgacc

SEQ ID NO: 115790 - DNA, 190 bp, Homo sapiens
  chr7:140098063-140098253
  hyper
agggggcgagcggccgaccctgcctgggcgccccacccaaggggggccgccacctacatctccccaccgccctcccgacccgggaagcccctcggattggacccgcccccgccccagcaggtcttcggccccacgcatcaccgcttgcgcacccgagatccgcagtggtcgccgctctccagccccggct

SEQ ID NO: 115791 - DNA, 179 bp, Homo sapiens
  chr7:140098296-140098475
  hyper
cgccagctcacccctggcggtgcgaccagggtttccggacgcccacgtgaccctcccgtcgcggggcacgctgggagttgtagtcccgccacgcggcctcacctgccggcgcggaggagggcgaggagggcggaggctgggagcccacagaactctgctgctgcggacctggccagtaa

SEQ ID NO: 115792 - DNA, 237 bp, Homo sapiens; identical to SEQ ID NO: 5923
  chr7:140103656-140103893
  hyper

SEQ ID NO: 115793 - DNA, 1 bp, Homo sapiens
  chr7:140339866-140339867
  hyper
g

SEQ ID NO: 115794 - DNA, 281 bp, Homo sapiens
  chr7:140339951-140340232
  hyper
cgcacacacacacacgcgcgcgcgcggacacacacacactcacactcgcgccccgagggacccagcacggcgcagggcgggggtctaccggctttctgcaggtccccgaggcgcgagacggcggcgtccgggctcagtcctgggagtcagcccgagcccgggaggaacgcctggatcgcgctctgcacagtcccgggaccaggcgggaactcagactcccgtctgcagagccgcttcccccgtcagggctcaggccgcgcgagccgtttcctccctccccc

SEQ ID NO: 115795 - DNA, 615 bp, Homo sapiens
  chr7:140340368-140340983
  hyper
cggctggcggcgcggctcgggggcgggcggcggcgggtgccggggacgccatggccctccgccctccgcccctttgtccgccgagcctcccccggccgcccgcaagcccctgggggtccccgccgcgcgcgctcccgtggggtccccgccgcccccggccccagcggcgcgcttccctcggccggcccagcgcaggctcgcccgcggcccctgcctcctcctgccgtggctccgcgacgatctgcgcgacgcgcgccccctcctcccgacccatcccgcccggcccagtgagctaatccgcagctggcgggcgcccggccggttgccacggcaacccctctcccagggcccggccccgcgcggagctgcggtaaacaggaccttctgccggactcgccccctcgcctctcggggtgggggagaggtggcttaacccttcctgggaggacgcccgccgcgcgcgggctccattccacccaggcccgggcggattcgcgaggtgcttccggcctgaggcttagacctggacgtccaagcctggggaacggcggccgcgtgcccggccccgcttactctaggcagttaacacactctcggcaccgggccggggccggg

SEQ ID NO: 115796 - DNA, 30 bp, Homo sapiens
  chr7:140372849-140372879
  hyper
ggggcctggcttcgcgtgggtcctggctcc

SEQ ID NO: 115797 - DNA, 87 bp, Homo sapiens; identical to SEQ ID NO: 44804
  chr7:140373220-140373307
  hyper

SEQ ID NO: 115798 - DNA, 30 bp, Homo sapiens; identical to SEQ ID NO: 5924
  chr7:140396871-140396901
  hyper

SEQ ID NO: 115799 - DNA, 30 bp, Homo sapiens
  chr7:140397365-140397395
  hyper
gtgtgcagagattccgtaagagcaggactg

SEQ ID NO: 115800 - DNA, 30 bp, Homo sapiens; identical to SEQ ID NO: 5925
  chr7:140453121-140453151
  hyper

SEQ ID NO: 115801 - DNA, 30 bp, Homo sapiens
  chr7:140623909-140623939
  hyper
ccccatcatccccacgaccatgtaagaatt

SEQ ID NO: 115802 - DNA, 38 bp, Homo sapiens
  chr7:140624447-140624485
  hyper
aacagagcctggcccggctccgcgccgccaccaccgcc

SEQ ID NO: 115803 - DNA, 288 bp, Homo sapiens
  chr7:140714397-140714685
  hyper
caaagctacagtgccgaaggccgtgtgatgagcagagaaactgagccttctactgttaaccaatatggaagagagtaattgcgcctgagaggaaattacggcagcggaaacgcgggtattctacgtttaagaaatcccccaactgaggcagaaaaaggccaagttatttgtgtgatgcacgtgaaccgcccgagctggtcactaatgaagtggattcgccctattcctggcgactctacaaggttggagacccccgtagacttcgcagccatcgccccttgctgcaga

SEQ ID NO: 115804 - DNA, 814 bp, Homo sapiens
  chr7:140771227-140772041
  hyper
tagatggcactgaaacgcctcgttcgcgcttttcaaaatgcaggaagggcgggggagagagagagagagagagagggaaaaaaaaaaagacaaaaagaatatggtggaggtgcgctcattttggctcacaagccccgttgtgcaaagcagggtgtcagagactctctttttccccagggcaactctttacccggcaatgccggacctcgactttggggtgagggtgaaaacgaggggtgagcattagagtgaaaaacccagcgtttgatgccgggagggagggtcccagcctttgcggcgccgtctcacgtgagcagagcaggggggctgaagttgggatgaagcggggcttgcctggggcccacccgctcaaggtctggggtccggcgctacctcccagagcccctgcagagcctaaatccagcggccacccttacaaaatgacaaaccctgcatcgaggtttcttttaaccccaccttccctcaacgctcgagctctccagcgttttcaaaatatctactaacggaccaccccccatccaccattaaatttctctcgtcttgagtcgatcagccaaatttcttctttctgttcctgccgaggagggagggcaggtggaggtgggtgtgtgtcggggtgcctggctctggcttgggactggactggggctggccggataactccgcagccgctctcagctcagtcctaggtggaaacgcctgtagcttgcaaggtagcgcctgtggctttctggggaaaaaaagatcaaatgcctcccaagacaccagcgacccaaaccggggatgcagggag

SEQ ID NO: 115805 - DNA, 338 bp, Homo sapiens; identical to SEQ ID NO: 5927
  chr7:140772337-140772675
  hyper

SEQ ID NO: 115806 - DNA, 2021 bp, Homo sapiens
  chr7:140772716-140774737
  hyper
cgctgtcgagtgagccggcatctcggcgcccgggtgggctgcgaagaaaatggtgcaatctgagagcgactgagcccagctgggcagagcagacggggtgccagagtgccaagggctcaggtgcctggagaaaggggcggattgtttggaggggccgggaccggggttttcttcggtgcctgcggcattttctttgcacctgggcggcaggctcccggggctcccgggtgccagatgaagtgaggcggaggcgtcgcgggagagccgggtccggaggcggtcgggtggacactccaggcagaagacggcgctgggaagagctgcgtgacgctcgggggctggcggctgggccggcagcgcgccgtggcggcgtgacctgtccatggtgttgaaggcgcggtgggccgagcccctagcgccgcgcgcagtgagcgctgcctggtgcaccctccgccgcgcagcccgcccctcgcgtccgccagcagccgcccagtctccgcagatcccaggccgggtctcgtccggtaacgccgcccgggtgaacacgctgtcggcccgaggggccgcctgaatggcgatgccagaggcagggcaccggggagctcgcggggaaaggtcggccgagagcgtgcgtccgcggggagtgcgcctctgagcgcagcacgcgggtcagaaggagcaaccgacctgctggtgaccagagaacggagattttaagaggacccgacccaaagaggaagaacatttctgggtgcgcgccccaggtctttgcttgcagacggggagggggagaggctctgagccagagacccaggagggactccgagaagccggccccagcacctggaggtttctttcgcccgccggccgcatccggggcgttctacttcacccggtggtccagtggcgcctcctgacagcaccccccgtccccctcagagagacaggcgagttctgtcccgtcaccatcctgcacaaagaagccccaccgcagccgaggacacttggcatttagtttccggcccgagggcagcggcgcccgaagccgggctgggagccgaggcggctgcttcggggcagtcgcttcctgcggggcggggagggggcgggaggcggccgcgctgggttcgccgccgccggaggctgcacctgcctcagaggatgcccaggagcccgcgggagcctctccggatcagaactttttaggccgcccgcccccatccccgcagtccccgggccgtgctccggtaggcgggggccgagggggcgccgcggcgcgagtccctctcctgccccctcccccagctcggccgcccgccgctttgttccgggtgcggcgagggaaggcgaggctgcggcggatcatgcccatggtgtagccgccaagcggaggcatggctgccggaaggttactgctctacactggcctctcgctagcgctctgcgccctcggcatgctggccgtggccatctgctcggaccactggtacgagacggacgccaggaagcacagggacaggtgcaaggccttcaacacccgccgggtcgaccccggcttcatttacaacaataacaacaacttgccgctccgggcgagccgctcgcgcctggaccgctgggagggcaaactcctccgggcccggaatcgccggcagctgttcgccatgagccccgcggacgagtgcagccggcagtacaactccaccaacatgggcctctggaggaagtgccaccggcagggcttcgaccccgagatcgccgccctcattcggaaaggtaagcgccgggcgcaaggcgtggcgctgcggagagcccggcgcctttaggccccgcagcccctcgcgtctccttcccaggccacaggctatcaggtctctgggttccaggcggtccggttatccaggcctggctgagcctcggggccaggacttgcctcccaatagctgttaatgaagcttggtgcaggcttaactctctcccctgcctctcctttcgcgcgtctctgtcgggattcgagtgga

SEQ ID NO: 115807 - DNA, 646 bp, Homo sapiens; identical to SEQ ID NO: 5929
  chr7:141211324-141211970
  hyper

SEQ ID NO: 115808 - DNA, 30 bp, Homo sapiens; identical to SEQ ID NO: 44813
  chr7:141250958-141250988
  hyper

SEQ ID NO: 115809 - DNA, 30 bp, Homo sapiens
  chr7:142960344-142960374
  hyper
aatttttgcaaaggcgattgcagcgcccct

SEQ ID NO: 115810 - DNA, 30 bp, Homo sapiens
  chr7:142960763-142960793
  hyper
cgtgtaactcctggcgccgcccaaggggtt

SEQ ID NO: 115811 - DNA, 1016 bp, Homo sapiens
  chr7:142985428-142986444
  hyper
ggcgcaggcgcaggcgcagtgtgcgtccgcgtctgaggggagggatgtgggggaagcgacggcccccggtttgtttgggctgtgggcggtgcgcagcggagagcccgggaaaagcgggaaatggcggcgccgagcgcggggtcttggtccaccttccagcacaaggagctgatggccgctgacaggggacgcaggtaagtagggaacggtcttagggctccttaggggagcccagggaaggggagcgtggcccccaggcgtgcggccctgcagccccctcccctcggagccccggaaagcagccgtgtccgcgcttcctgccaagggtgggacgcccgcccgagccgctccgagcctgactccgcgcaagggcccgcgggcggacctcttggccttgtctctcgtgggaaaagactgccccagcctccctttgttcaacccacgagggttctaaaggggaggtctttgcagtcctgcccgctcttgggttctcttgaagattcttcatcctttcctctggctcccttatgagggaaactataaaaagaccatactctgtctccttaaaaatcgacgagaccttctgcagacctcggtgctctgcctgatgtgcatttgatttgtatcgattgtatcatgatctgcatggctttgcatagaatgaccagattttcaaagaagtcaatacagggtttggaaattgagtacttttggcagaacaagggggttcctgtggctccgagtgtccatgcctctgccccggtcattccatttcatggcagtcatcacccaggagaacattgtaatgcctcctgctcgagactgaagattaaggtcttcgcaaagggaacctgcagaaggacacagaattaagacgtaggaactccgtggtgcccttcgcccctcctccccttccagttgtgtcctgaaattctaaatgattggaaacttttataatgttcacgtttaagactctcatactacagagtagaggaaggagcgggtgtgcagagggg

SEQ ID NO: 115812 - DNA, 253 bp, Homo sapiens
  chr7:143042627-143042880
  hyper
ctgggctcggtggagcggtcggaactgcaggccctcctgcagcgccacctgtgtcctgagcgcaggctgcgcgcagcccaagagatggcgcggaagttgtcggagctgccttacgacgggaaggcgcggctggctggggaggggctccccggcgcgcctccaggccggcccgagtccttcgcctttgtggatgaggatgaggacgaagacctctctggcaagagcgaggtgaccgcgccgggaagggctaggg

SEQ ID NO: 115813 - DNA, 396 bp, Homo sapiens
  chr7:143059278-143059674
  hyper
gctgctccggagtgggggatgcgaggaggcgctggggacggcggagcagaggcggatggcctggaggggcagggatgaggggaccgagcgtcgggccgagaggcagaggagaggagggcgatggagaggatggagaggaccgcgcctgcgggagggcgacggggagaaggaagcgagccgagcgggatggcagccccggaggcgcaagacgagagcgggcaggaaggagggacagagggaccgcgggcggacggaaggaaagtgaaggagctagcagggcaaggcgggtgcggagcggggcgcccggaggcgcgaggagagggatgggggagggggtcggagggcggcccggggggcccagccctgcccccgcccggccgcggtacccacccacag

SEQ ID NO: 115814 - DNA, 30 bp, Homo sapiens; identical to SEQ ID NO: 5933
  chr7:143060022-143060052
  hyper

SEQ ID NO: 115815 - DNA, 94 bp, Homo sapiens
  chr7:143077217-143077311
  hyper
aaaatgaagcgcctacgggtgcatactggactagcgggcgaaaggccatgactccttagtttggagaaagaactggggccgagattggggaagt

SEQ ID NO: 115816 - DNA, 30 bp, Homo sapiens
  chr7:143078767-143078797
  hyper
aagtgaatcccttccggcccggggacagcg

SEQ ID NO: 115817 - DNA, 30 bp, Homo sapiens
  chr7:143079070-143079100
  hyper
ctgggagtgggagtcgggaatgtggggcac

SEQ ID NO: 115818 - DNA, 30 bp, Homo sapiens
  chr7:143098550-143098580
  hyper
gcagctccacgtggacgcgggaagcctcct

SEQ ID NO: 115819 - DNA, 107 bp, Homo sapiens; identical to SEQ ID NO: 5934
  chr7:143105719-143105826
  hyper

SEQ ID NO: 115820 - DNA, 469 bp, Homo sapiens; identical to SEQ ID NO: 5935
  chr7:143105844-143106313
  hyper

SEQ ID NO: 115821 - DNA, 812 bp, Homo sapiens
  chr7:143579478-143580290
  hyper
aagcagcggattagacgcggttctctaggtcaggccctcaggtaactcaaccacacaaagcaagcacacacaaacatcagatgtcagaacctggagaggaggagcaatgcggcagggggatgcgggacccaagcgcagaggaaaatcaccagcagaaatacggacacaaaggggattctctgtccccgatgatttctgatttcggcacacccagacccacggcgcacccatcgcgccccgcacccccgccccggcctcccgccctgccctcccccccgcagcacccaggccgagtccaccgttgctggccccttctccagcctgccaggcttttggagagggccactcaccaggtcaccctgcgatttccacgggggcaggtgggagcgggcagagcctggcgcagagaggaatgcacagggaagaggcttccctgtaccagtgactgggcgaccgagccgggatttgggagcggggaggaggctggagctggaggagaggaggggtttccacgggagtcccctcctccccacttcctcccaggctggagtgggagctccagggggcggcgcttggcgggggacagcgcttctttgtgtcgccggccctggtggcttggcattgctgtggcttagggacgcctggagaccccatcctggcagtgtggacggctgtttcattaaagatacaaacttctctgactctacattagtaagggaaaggctgagcaaattgtgggacaaacattctgcttagtattattcagttcttaggaagagcttgaatctccatttagtcggtgaatataccgt

SEQ ID NO: 115822 - DNA, 127 bp, Homo sapiens; identical to SEQ ID NO: 44822
  chr7:143598478-143598605
  hyper

SEQ ID NO: 115823 - DNA, 309 bp, Homo sapiens
  chr7:143599063-143599372
  hyper
ggcctcggtcaccgcgggcctctcctggtccagagtctacgctgaaccccactcactgtttgccccgctgttccctgcagcgcgggttcggggcagtagcaacctgctaggagcgggaggcggttgttcccaggaggaagcagcttctccgcccaggaggcaaagggcagcgggctcgaaactacaggacttggaaagtcttaggcggagactgcgggggtggggggtggtgaggaggggccttccagggagctgattggtcgacgcggacgggggcgggacttggccggcgccgtccctcccctagac

SEQ ID NO: 115824 - DNA, 30 bp, Homo sapiens; identical to SEQ ID NO: 44823
  chr7:144074913-144074943
  hyper

SEQ ID NO: 115825 - DNA, 258 bp, Homo sapiens
  chr7:144100838-144101096
  hyper
tgaagcctcgccgggcgggcaggtgtgcagcccgcacgggccgggccgggccgggggagccgtagcccgaggctgcgccccctcacccccacccccacccccagggcgaggccggcccgggaggctcggctggggcagctgcgagggcggggaggacccgggcctgggcgccgcctgctccgctccccccagccaggagcccaggcccaggtgcgggtctccttcaggcggcccctcccgtggcggggctggagggcg

SEQ ID NO: 115826 - DNA, 17 bp, Homo sapiens
  chr7:144101618-144101635
  hyper
ggcgtgagccacagcgc

SEQ ID NO: 115827 - DNA, 30 bp, Homo sapiens
  chr7:144532367-144532397
  hyper
ggaggcgcaacagccgggaagcgcttactg

SEQ ID NO: 115828 - DNA, 30 bp, Homo sapiens; identical to SEQ ID NO: 44824
  chr7:144533077-144533107
  hyper

SEQ ID NO: 115829 - DNA, 654 bp, Homo sapiens
  chr7:145812736-145813390
  hyper
aaacatgtgcattaacggcatctgcagtcctccctccctgctccagtcagtcgggatgtttagcaccgtcacttggtgttaggaccactcggaagacctgcctgtcggacgcctgactgtggttcccggggggccggagctccaggagcctgtaccatctttatctgaaggggaggagagaaggaaaggagaaggcatccgagcgagggtgttctccttcctgcagccgggtagggggcagccaggtttggagcagggttctaggattacacggcaaatccccaacttcagcaccgcggacagcatcacctcccgcccagggagaggcgcgcgcctccttgctccgcccccgccccagctgatggaccccggccggtcggctcagtctcccttttgctttcaaacgaggccagggcagggcagaagggttttgacagccagaggggtacggtaaggaggaggaagaggaggaggaggcggaggaggaggaggagccgaggagggaaccgagaagggaagagaagggagggcttccctccgcctcgctcgccgcccgggctcacaggagctggcggcggcggcggcggcggcggcgtctcctgctctccgcggctgttgctgctgctcgcgctccgccgcccgggagatgcttcc

SEQ ID NO: 115830 - DNA, 317 bp, Homo sapiens; identical to SEQ ID NO: 5937
  chr7:145813403-145813720
  hyper

SEQ ID NO: 115831 - DNA, 376 bp, Homo sapiens
  chr7:145813945-145814321
  hyper
cgccgccggccgggaggcgaaggatgcaggcggctccgcgcgccggctgcggggcagcgctcctgctgtggattgtcagcagctgcctctgcagagcctggacggctccctccacgtcccgtaagtagccgtctcctcgctctgctctggagcagtttcagtgcggcattgatgtttggcaccagggtatcaactccgaagtgcatcgcagtgctggcaccctgatgtgtttgtgtctccgctgtcacacacttgcagccactgcagtagacaaactcgaaacccagcgtttctgttttggaagagacagggttgtgacgctggtgatgtttctggaaagttgttcctggtcttggtgatcggttggcaagagctt

SEQ ID NO: 115832 - DNA, 30 bp, Homo sapiens; identical to SEQ ID NO: 44828
  chr7:145814654-145814684
  hyper

SEQ ID NO: 115833 - DNA, 30 bp, Homo sapiens; identical to SEQ ID NO: 5939
  chr7:145815251-145815281
  hyper

SEQ ID NO: 115834 - DNA, 30 bp, Homo sapiens; identical to SEQ ID NO: 44830
  chr7:145836197-145836227
  hyper

SEQ ID NO: 115835 - DNA, 30 bp, Homo sapiens; identical to SEQ ID NO: 5940
  chr7:145864150-145864180
  hyper

SEQ ID NO: 115836 - DNA, 30 bp, Homo sapiens; identical to SEQ ID NO: 44832
  chr7:145883062-145883092
  hyper

SEQ ID NO: 115837 - DNA, 153 bp, Homo sapiens; identical to SEQ ID NO: 44833
  chr7:145981900-145982053
  hyper

SEQ ID NO: 115838 - DNA, 30 bp, Homo sapiens; identical to SEQ ID NO: 5942
  chr7:145984491-145984521
  hyper

SEQ ID NO: 115839 - DNA, 30 bp, Homo sapiens; identical to SEQ ID NO: 44835
  chr7:146042514-146042544
  hyper

SEQ ID NO: 115840 - DNA, 30 bp, Homo sapiens; identical to SEQ ID NO: 44836
  chr7:146051335-146051365
  hyper

SEQ ID NO: 115841 - DNA, 30 bp, Homo sapiens; identical to SEQ ID NO: 5943
  chr7:146072421-146072451
  hyper

SEQ ID NO: 115842 - DNA, 30 bp, Homo sapiens; identical to SEQ ID NO: 44838
  chr7:146188564-146188594
  hyper

SEQ ID NO: 115843 - DNA, 30 bp, Homo sapiens; identical to SEQ ID NO: 5944
  chr7:146415862-146415892
  hyper

SEQ ID NO: 115844 - DNA, 30 bp, Homo sapiens; identical to SEQ ID NO: 44840
  chr7:146657554-146657584
  hyper

SEQ ID NO: 115845 - DNA, 30 bp, Homo sapiens; identical to SEQ ID NO: 44841
  chr7:146658239-146658269
  hyper

SEQ ID NO: 115846 - DNA, 30 bp, Homo sapiens; identical to SEQ ID NO: 5945
  chr7:147729233-147729263
  hyper

SEQ ID NO: 115847 - DNA, 30 bp, Homo sapiens; identical to SEQ ID NO: 44843
  chr7:147959647-147959677
  hyper

SEQ ID NO: 115848 - DNA, 31 bp, Homo sapiens; identical to SEQ ID NO: 44844
  chr7:147960160-147960191
  hyper

SEQ ID NO: 115849 - DNA, 705 bp, Homo sapiens
  chr7:148036377-148037082
  hyper
tgtgtgtattgcccacgggtgggaggatgcaagtacaattacgttttttaaaactccagtccagatattggcttttccttggatacttttgtgtggctctcccagtacagtcagatccgccgccgcagcctagcgctccaccccgggttttgcgtcctcccctcacctgcctttcagtggtgcggggtttgatcccgagagcggtggactcaaagctgcccgccgggactcgggctgccggccgacaaaggacggtcctcgggggttctgaagtctgacccggccagtgggaaagccacctgcatcacaaagcgaggggcacacctgaaccggggctggcgggaagaggcaagtattgcgcgcgggctggctcccacatggagctgcctcccggtgcaagtgttgcaagggtgcgctgctccagcccggggagcgcgggaggcggcggagagagcgtccgggtgatgagcggggcactgtaactggattttaacacctctgcaagcagcgcttttggtcaaaaaatttccgattcttgatcttctctctgcaaggtcgggggttctttggggagtaaatcacagcgtttgggtttgcattcgaagcactaccaagtctactccacagggtcactgcacggggagcaagtaaaggaaaacgaggagaatctgagagtgctccttcgtgcagtgtgtgtgtgtgtgt

SEQ ID NO: 115850 - DNA, 30 bp, Homo sapiens; identical to SEQ ID NO: 44846
  chr7:148038075-148038105
  hyper

SEQ ID NO: 115851 - DNA, 305 bp, Homo sapiens; identical to SEQ ID NO: 44847
  chr7:148394978-148395283
  hyper

SEQ ID NO: 115852 - DNA, 30 bp, Homo sapiens; identical to SEQ ID NO: 5947
  chr7:148506156-148506186
  hyper

SEQ ID NO: 115853 - DNA, 80 bp, Homo sapiens; identical to SEQ ID NO: 5948
  chr7:148506411-148506491
  hyper

SEQ ID NO: 115854 - DNA, 90 bp, Homo sapiens; identical to SEQ ID NO: 5949
  chr7:148507423-148507513
  hyper

SEQ ID NO: 115855 - DNA, 101 bp, Homo sapiens; identical to SEQ ID NO: 5950
  chr7:148508711-148508812
  hyper

SEQ ID NO: 115856 - DNA, 185 bp, Homo sapiens; identical to SEQ ID NO: 5951
  chr7:148511049-148511234
  hyper

SEQ ID NO: 115857 - DNA, 108 bp, Homo sapiens; identical to SEQ ID NO: 5952
  chr7:148512013-148512121
  hyper

SEQ ID NO: 115858 - DNA, 35 bp, Homo sapiens; identical to SEQ ID NO: 5953
  chr7:148513817-148513852
  hyper

SEQ ID NO: 115859 - DNA, 122 bp, Homo sapiens; identical to SEQ ID NO: 5954
  chr7:148514300-148514422
  hyper

SEQ ID NO: 115860 - DNA, 77 bp, Homo sapiens; identical to SEQ ID NO: 5955
  chr7:148515085-148515162
  hyper

SEQ ID NO: 115861 - DNA, 201 bp, Homo sapiens; identical to SEQ ID NO: 5956
  chr7:148523535-148523736
  hyper

SEQ ID NO: 115862 - DNA, 30 bp, Homo sapiens; identical to SEQ ID NO: 5957
  chr7:148525927-148525957
  hyper

SEQ ID NO: 115863 - DNA, 120 bp, Homo sapiens; identical to SEQ ID NO: 5958
  chr7:148526815-148526935
  hyper

SEQ ID NO: 115864 - DNA, 30 bp, Homo sapiens; identical to SEQ ID NO: 5959
  chr7:148543654-148543684
  hyper

SEQ ID NO: 115865 - DNA, 30 bp, Homo sapiens; identical to SEQ ID NO: 5960
  chr7:148544315-148544345
  hyper

SEQ ID NO: 115866 - DNA, 68 bp, Homo sapiens
  chr7:148580443-148580511
  hyper
agagcagagcagctcgactcttccctcaaacttagcataaagccagaccaggcggcgagggcagcccg

SEQ ID NO: 115867 - DNA, 30 bp, Homo sapiens
  chr7:148581370-148581400
  hyper
ccgagcgccaaacgcggcagcccaatcgcc

SEQ ID NO: 115868 - DNA, 30 bp, Homo sapiens; identical to SEQ ID NO: 44862
  chr7:148581693-148581723
  hyper

SEQ ID NO: 115869 - DNA, 30 bp, Homo sapiens
  chr7:148680111-148680141
  hyper
gcgcaggactatggcgaaaccgccaggaaa

SEQ ID NO: 115870 - DNA, 30 bp, Homo sapiens; identical to SEQ ID NO: 44863
  chr7:148680410-148680440
  hyper

SEQ ID NO: 115871 - DNA, 30 bp, Homo sapiens
  chr7:148684516-148684546
  hyper
taacaagaatcagacgtgttgctaagcatc

SEQ ID NO: 115872 - DNA, 30 bp, Homo sapiens
  chr7:148725770-148725800
  hyper
cgcgtttaaaactccgagccctaacgtgag

SEQ ID NO: 115873 - DNA, 241 bp, Homo sapiens
  chr7:148762865-148763106
  hyper
ctaagctctggtctcgcggaggaaaagcaggggcggcccccgtacgcggggcctgcgcccttcagccccagccccaccctgcgcgaccccgggatctcgctcggcggcggccgttgcccagggcacaggcagggcatgctgagaacgctctgcctttcctgtgcctggacacggctcgggctgggatcccacagcgccgccttctggcgggaggcacccccgcggcgctgtgcattctggg

SEQ ID NO: 115874 - DNA, 30 bp, Homo sapiens
  chr7:148787538-148787568
  hyper
ggccacctgctcaccgcagggcccggaatc

SEQ ID NO: 115875 - DNA, 30 bp, Homo sapiens; identical to SEQ ID NO: 5961
  chr7:148788313-148788343
  hyper

SEQ ID NO: 115876 - DNA, 57 bp, Homo sapiens
  chr7:148822679-148822736
  hyper
gaaggcagggacagcgttgttgatctgagcctacaacaggccgagaaacagatcttt

SEQ ID NO: 115877 - DNA, 30 bp, Homo sapiens; identical to SEQ ID NO: 44866
  chr7:148823220-148823250
  hyper

SEQ ID NO: 115878 - DNA, 30 bp, Homo sapiens
  chr7:148823726-148823756
  hyper
ggactgagaggcagcgagagggtgagagtc

SEQ ID NO: 115879 - DNA, 30 bp, Homo sapiens; identical to SEQ ID NO: 5962
  chr7:148845054-148845084
  hyper

SEQ ID NO: 115880 - DNA, 30 bp, Homo sapiens; identical to SEQ ID NO: 5963
  chr7:148857608-148857638
  hyper

SEQ ID NO: 115881 - DNA, 152 bp, Homo sapiens
  chr7:148892416-148892568
  hyper
cccctgggcgaggccgccgcctctcagttttggggcggtggcgaccccagtccgggagtggccccggtaggtccccgcaggcgggcaggagctccgaggccattggctggcgcgcgggctgccaaggggcggggagcgccgccgaaggggac

SEQ ID NO: 115882 - DNA, 159 bp, Homo sapiens; identical to SEQ ID NO: 44870
  chr7:148936557-148936716
  hyper

SEQ ID NO: 115883 - DNA, 315 bp, Homo sapiens
  chr7:148959354-148959669
  hyper
gctgccgcgccgccccgggcccgacaggccgggtccagggactgcaacccagcgagggacgcgggcagccatggccgaagcggcgcctgcccgggtaagcgccctcggccccgcggacgcccggaaggcccaggccgccgccgcgtgagcccgcgcgagggactctggccgcgcgaggccgcggggtgagagggccttgcgcgcagcctccgcgctcgttgcccccggcccatcgcccagcccgcgtcgaaggcattgaccgggcggcccaaatgccaggcccggcgggcggggccccgacgtcagcggctgacg

SEQ ID NO: 115884 - DNA, 359 bp, Homo sapiens; identical to SEQ ID NO: 5966
  chr7:148982134-148982493
  hyper

SEQ ID NO: 115885 - DNA, 30 bp, Homo sapiens; identical to SEQ ID NO: 44872
  chr7:149111875-149111905
  hyper

SEQ ID NO: 115886 - DNA, 122 bp, Homo sapiens; identical to SEQ ID NO: 44873
  chr7:149112126-149112248
  hyper

SEQ ID NO: 115887 - DNA, 51 bp, Homo sapiens
  chr7:149112420-149112471
  hyper
cgcttttaccgtcacactccaacgcactttcttccccgagtttgggaagaa

SEQ ID NO: 115888 - DNA, 204 bp, Homo sapiens
  chr7:149119392-149119596
  hyper
ctggttcggggctgcggccgggcggctcccgcactgcgactaagggccagccggctggcaggcggggctggggctcggatgtcgggactagcgggtctctggcgcgaggcggccgccaccaccgagaaggccgcgcgcattcctagagcggccgccagcggccaggtgagggcgccgcggcctccggggcctcctcgcctctgg

SEQ ID NO: 115889 - DNA, 442 bp, Homo sapiens; identical to SEQ ID NO: 44876
  chr7:149119681-149120123
  hyper

SEQ ID NO: 115890 - DNA, 30 bp, Homo sapiens; identical to SEQ ID NO: 5969
  chr7:149120634-149120664
  hyper

SEQ ID NO: 115891 - DNA, 203 bp, Homo sapiens
  chr7:149157615-149157818
  hyper
cgctgccgtcccggcgcctctttagcaggggagctgcacagcagctgccatgttgctacaaactgcatcctgggaggcatgtccctctcaggccgtttaaagagaaacactccgaggctcgtcggaggctgccggaacccagacagctccatctacagccggtaggagcgaacagtgtcgagcgagccgcccggcggcgacgg

SEQ ID NO: 115892 - DNA, 30 bp, Homo sapiens
  chr7:149158224-149158254
  hyper
ttttgtgaaatgcccgagtgttgttttcga

SEQ ID NO: 115893 - DNA, 30 bp, Homo sapiens
  chr7:149194080-149194110
  hyper
tgaggacagactaacgcctcaacagggctt

SEQ ID NO: 115894 - DNA, 30 bp, Homo sapiens
  chr7:149195242-149195272
  hyper
cttcccccgccccacgggcacttctgctgc

SEQ ID NO: 115895 - DNA, 375 bp, Homo sapiens
  chr7:149411352-149411727
  hyper
gccgcgcttccttcccgcatcacacgtttatttgaggcctactatgtgccaggaacaactggggttaccaccccagcaaacaggcacgcaaaatgtgacacgaaggtaggtcatggctgcggcgagcgggggcgcgggcgaaagacgtgaggatgtacgggggcctggcagctgctctgtcccacccacgcccggccggaccctcgacccctttcactccaggtcgggtttccccgaccgcggcctctgggaaagatgggtccctcttcatccccaccatcagcccctggcacatgggacgcgctgagtggtggctgcgggaatgaatgagtgataagcggcgcgtacccgcgggcttgcacgcccacagccgcc

SEQ ID NO: 115896 - DNA, 530 bp, Homo sapiens; identical to SEQ ID NO: 5971
  chr7:149411834-149412364
  hyper

SEQ ID NO: 115897 - DNA, 30 bp, Homo sapiens
  chr7:149439521-149439551
  hyper
caccttcctactcccgaacattaccttaag

SEQ ID NO: 115898 - DNA, 30 bp, Homo sapiens; identical to SEQ ID NO: 44881
  chr7:149471029-149471059
  hyper

SEQ ID NO: 115899 - DNA, 186 bp, Homo sapiens
  chr7:149535231-149535417
  hyper
gacattggccttcgcgtagcccaatcagagcgctttgcccttgctgcagaggactaaaggacgccacgccgccgttgcctagtaactgtcgccggagggaggcggggagggtcgcaagcgcgccgccggcgtccaatcaggacctgcgttccgggagccaatagcagcttcgagagccgctcacct

SEQ ID NO: 115900 - DNA, 1091 bp, Homo sapiens
  chr7:149570352-149571443
  hyper
gcctctgcctggttcgctgcagatggatgtccgcgaggacgccagccctccgcctcccgccgggtccctgaacgccggcccggccggtccaacctcattccgcttcccgccatcgaaacgcgaagcccccgccttcccccaaacgtctcagcgccgctggggcctttctggctgcgccgcctccgaccccaggccccggtccgcgcccgccgctcgctagtcctgggagtgaggagaacgcgtgctgaggacccggccagagggacagcggggaccgccctcccgctgcgtctctgaaagcgaggccgttcctcccgcgtccgacccccgcggggccgtcaggttcggggcggcccaggctgcgggtccgcagggcgcttcgggccgagccggcgcggcgcgtgaagggcaggggacgccccgaaagaccgctggggtgggaccccaagctccaggggtctttggaaataagaatgcggcgtgacgttggctgtgcgggcgcggggctgacgcggaccctataacccatcgccgaaaccgggcggccgcgcccctattcctcggcatttctctctgtccgcggccctgctcagccaatcagcgagtgggctcctaggcaggtcctgagtgacagcgcggcgggctggatcaggagatgcgcgtgcgcggcccggcccggctgatcgcttcgggtgctcgactcctgttgcgcatgctcagcgcgctgcccggctggggacccgcgcacctgcagcgcccgctgctcggccctgcatcctgcctgggcatcctgcgcccggccatgacggcgcactcattcgccctcccggtcatcatcttcaccacgttctggggcctcgtcggcatcgccgggccctggttcgtgccgaagggacccaaccgcgggtaaggaaagcgcgcaggccctgcagacctctccaccccggccccctggcccggctcgcccctccgccccggggcggcggcttcctgctctgcagcgagcgtccgcaggagggacgccaggaccccggacgccacctctgaggtctctctgcacctgggtctctgacagccgggaacaggcagga

SEQ ID NO: 115901 - DNA, 238 bp, Homo sapiens; identical to SEQ ID NO: 44885
  chr7:149744520-149744758
  hyper

SEQ ID NO: 115902 - DNA, 30 bp, Homo sapiens; identical to SEQ ID NO: 44886
  chr7:149745025-149745055
  hyper

SEQ ID NO: 115903 - DNA, 100 bp, Homo sapiens
  chr7:149745489-149745589
  hyper
gagagggcacggggtcgcacaaaaagggtgcgagggtgcgtgaagagggtggaggggcggggaccacgcgggtcgtgggtgcgggggcggtgggggagtc

SEQ ID NO: 115904 - DNA, 42 bp, Homo sapiens
  chr7:149917321-149917363
  hyper
cgggtctcttaccttgtggcctttccccgggggatacctgac

SEQ ID NO: 115905 - DNA, 20 bp, Homo sapiens
  chr7:149917888-149917908
  hyper
cgctccgctccagggcggat

SEQ ID NO: 115906 - DNA, 30 bp, Homo sapiens; identical to SEQ ID NO: 44887
  chr7:150053705-150053735
  hyper

SEQ ID NO: 115907 - DNA, 115 bp, Homo sapiens
  chr7:150065155-150065270
  hyper
catgggcacaggctcgcacctgccaccgcagacgccacacaggctgctgagcctttccaagcgaaatgccccacgtgcgccaacggccacctcggccgtcgccccacgcttggcc

SEQ ID NO: 115908 - DNA, 185 bp, Homo sapiens
  chr7:150065986-150066171
  hyper
gctccatggacgggcgccgcgtccctgcacagcccgccgcagaggtacggccggggcaggggcgcggggccaccgcgggcccgcggggggccgctccacctgcggggcgcgtgaccgtgagtgtgcgcgaccgtgtgtgagtgcgcggggggggacgctgctggatctgcgggggtgggggagcg

SEQ ID NO: 115909 - DNA, 462 bp, Homo sapiens
  chr7:150075202-150075664
  hyper
agttagtgacaaaatcgaatctcagtccccagttcctgctgtgctactgaggctaaaccgcagccgggcctgtggcaaatgtttaatcagctgttgactgaagaaaataaggtccgcctgcccaacagcaaccgtttgtagagtctcagaggcccagcttctgtctgtatctacctcatgccccagaggcagcttctagcagctccggagagcatcctgccagtgggagttgacccagctgcgccccctttgagggagaagtgtgaggaatttccttacaatggggtggggagttgcgaagatactccttcctgaaggtctggcagtctggaccggggtggcaactgggcggagatgattccgctcacgggaaccctacctagtaacccgacctagtaacgtaacctcagagccgttcctcagctagaaaacaaagggattaggccgggcgcgggtttgtaa

SEQ ID NO: 115910 - DNA, 30 bp, Homo sapiens
  chr7:150076420-150076450
  hyper
cccggtgcccaagtcgccctcggggtggca

SEQ ID NO: 115911 - DNA, 30 bp, Homo sapiens
  chr7:150076840-150076870
  hyper
tgttccgagttccccgtccctgttcgcctc

SEQ ID NO: 115912 - DNA, 30 bp, Homo sapiens; identical to SEQ ID NO: 44890
  chr7:150101918-150101948
  hyper

SEQ ID NO: 115913 - DNA, 30 bp, Homo sapiens
  chr7:150102265-150102295
  hyper
agcgctggcagccccgttttccgccagccg

SEQ ID NO: 115914 - DNA, 30 bp, Homo sapiens
  chr7:150102645-150102675
  hyper
ctggggcttgcagtcgggcggggtgggttg

SEQ ID NO: 115915 - DNA, 43 bp, Homo sapiens
  chr7:150102885-150102928
  hyper
ggcgcgggtgtcgctgcgggagagttaccgtatttgcgttgag

SEQ ID NO: 115916 - DNA, 30 bp, Homo sapiens
  chr7:150383189-150383219
  hyper
actagctgatgaaaacgtaccgatatttct

SEQ ID NO: 115917 - DNA, 1109 bp, Homo sapiens
  chr7:150497094-150498203
  hyper
caggagccaccccaccgtagggctccagccagggtccaggcgtgcaggcggcagaaggtggacgggacgcgccagccccaggcctctcctcccgctctccagccgtttttctggggagaaacacctgcacccagctgtccctccctcctacgtgagtcctcctggaaaccaggttggaggaagaaagacgtcctgtggacaggacggggtgggggcatggccctggggactcctcgtgacagagggtcctgcggcaagagggtctcccgggccgcggaggccctgcctcacctgcagtcctccgggagcccgcggccgagcagagcggacactagctgaccccgagcaggggagcgacgggagggcggagacggcagatgcacgggtgggggctgcggccccgcccaggctgcgcggtttcccgaaaccagctgcggcccgggggcccggcaaagggggttccgcccggaggagcggaccgggcgggagaagaccgagcccccgcgcgccccctgcgctcccactcgcgcacacttgcacgccggccctggccgggcggggctggaggcgagaacgaccccacgggctttcccagggccgtccgcccgcggaccctcccagctccccagagcccagtgaccctcgcgcagcaggagaaccccagacggaccccaggccctgcagcctgtcatgaacccgaggggctgaagttcagccccacccccgcctcccctccccgcctccccctccaactctcaacccacttctccagccagcgccccagccctcccgccgcccgctcgcaggtcccgaggagcgcaggtgaggcggcaccccactcccggcggcccccgggcctccttccgcacgcaccccgagctgcctccgcacagttggaggagcgtaggagggacccccacccagggatgacactccaggaaggggactgcagaggaagccaggtgcggccccggcttttgacctacctccgcaccgcagcgcggtccttcacggggcaggggcggcgtgaacccgtcgggcgtgagcagcagtcggtggagcgggaggtcggcggtggcggggatgggggtatccggagcgcagccggg

SEQ ID NO: 115918 - DNA, 30 bp, Homo sapiens; identical to SEQ ID NO: 44892
  chr7:150574011-150574041
  hyper

SEQ ID NO: 115919 - DNA, 30 bp, Homo sapiens; identical to SEQ ID NO: 5977
  chr7:150595720-150595750
  hyper

SEQ ID NO: 115920 - DNA, 875 bp, Homo sapiens; identical to SEQ ID NO: 5978
  chr7:150671456-150672331
  hyper

SEQ ID NO: 115921 - DNA, 30 bp, Homo sapiens
  chr7:150675765-150675795
  hyper
ggttccccaccacgccgagcactggcttgg

SEQ ID NO: 115922 - DNA, 381 bp, Homo sapiens
  chr7:150676163-150676544
  hyper
agagaggtccctgagcgcgaggttccaaccaggggatccccgggtgcgagcggcccgccctcccccggcagcccggggccagccttgcacgcccaatcggcgggctcggggccctgcggcggcggccacggcccagcccctcggaaagccctggcctagccgcaggcccctccccccggccagctggctcgctccagctgcggctcccttatttaggcaaggaggcctagggatgctcaagggcaggcggggtgtctgccccgccgcctgctcatcgcctgcttgcgtctgagtgagggtctccgggcgcggtgtcctcggacttagcagtcaggcagggccccgggaaggccagggcggggaggcgagtgttgacagctg

SEQ ID NO: 115923 - DNA, 220 bp, Homo sapiens; identical to SEQ ID NO: 44896
  chr7:150685651-150685871
  hyper

SEQ ID NO: 115924 - DNA, 1432 bp, Homo sapiens
  chr7:150714958-150716390
  hyper
tgagggtgtccgtggcgcttcacatccataagggcaaaggaacagatgtccccaaccccagccacatccacagtgaagtgatgaaaaaagtcgataatctccagggcacgagggcggaaccagaaaagcagaaacagcggggtgaggagcggggacaggagctcctccaggagggagacctggggaagcagcggtgaggctgagcaggggtcgctgaggggcccacgcgcgttatcaggaccaagcagtccccagcgaccctcgccagggcaagaagcctccccacccagtcactccctagactcctggtatagtccgtttgtctcatgccctctcccagacagaccctccgcgcagacagaccctccgcgcagacagaccccacaacttcctcctcagcccgccgtcgcgcccaccctcaccgctcggtactgcagcagctgcgccatctgccggtaggcgcggtccctgccgccggggccgggctcctccgggaggtagtgcatgtgggccagggctgtctgcagcaggagctgcggcgcacgaccctggcactgctcttccggaatgaaagacctgaaaggcgggatccgtggggggaaggggcctgcgattaggaggacgcgcggtgggatgtagggctagagggccccagtggtgggagaggtaaggattcggggggaacctcacatggccccagatcagagaaaccaacacacaccaccaccccgggcatctgccgtcgcacctggcgacggtggcggtgaccccgagcgcggtcatggcggtgagcacgtgctccacggctagcacgtcctcgtcgtagacggtgagcacaagcagcgcggcgaagagtgcacccgcgaagaaaacgagctggcgggccagcagcgtgcgcaggggcgcggggggcgcagcggtgcgcaggaaggcggcggcggggcggtaggcgcgggccaggcgcgcgcgcagctcgtgcggcagctcgttgaagtggcgcagctgcaagcgcgccaggcgggaccagccgcgcgcccccagcgcgccaggctcgcgccgcagcagctccacgtggctatagaagacgtgcagaacctgccaggccagcaccagcgggctcagcgccaggttcagggcggccagcagcagcactgtgcgcccccagcgcgctgctagggcgccccgctggtcgctgcgcttgtaggcgtgcggcagctcccagcccccgcggaagagcgagaagggaccgcggaagagcagcaggtcgacattgagcgccaggccgcggctgaggaaagccgcactgcctccccagggcagcgggcagcgggccggcagcaggcctttgttggccagcgccacctggtagttggtgtagcgcaggatgcggtggtggatgtccagctccgtcaggggccgcggctgcacgcac

SEQ ID NO: 115925 - DNA, 450 bp, Homo sapiens
  chr7:150725068-150725518
  hyper
cccagcagttctgacgcacctaggagagcggggtgggtggcagggcatatgtacgtgttttgaaaaaactcccagtcgatttttgttcattcctcccccaaaacccgcgttctacacgcccttgagacgacgggacatctagagatcctggagccttgggaaaatggcccgaggtcggcggctgacgcgttactatggatactccatagcttggagggccagtcgggccacaccctttggacgtcacccggagcccacaggagcacctggcaaaagccaggcccacttcctgctcggctccgcccagagcagggggcgggcggataggcgattccctccaatcacagttccaaaaggagggggctgacaacatatcctccaatcacagcttgaagtgagattgatgtgtcttttcaccaatcaccgccaaggcgcgagggggttgtcggg

SEQ ID NO: 115926 - DNA, 30 bp, Homo sapiens
  chr7:150725826-150725856
  hyper
ggaatgtcactccgcgggtgttggcctcaa

SEQ ID NO: 115927 - DNA, 297 bp, Homo sapiens; identical to SEQ ID NO: 44899
  chr7:150748196-150748493
  hyper

SEQ ID NO: 115928 - DNA, 166 bp, Homo sapiens; identical to SEQ ID NO: 44900
  chr7:150754921-150755087
  hyper

SEQ ID NO: 115929 - DNA, 30 bp, Homo sapiens; identical to SEQ ID NO: 5981
  chr7:150755882-150755912
  hyper

SEQ ID NO: 115930 - DNA, 57 bp, Homo sapiens
  chr7:150756476-150756533
  hyper
acactcagaggtgccgtaatggagccaagggacggcatcctcggggctcccgagccc

SEQ ID NO: 115931 - DNA, 153 bp, Homo sapiens
  chr7:150757072-150757225
  hyper
aagccagggtgccgcgccccctgccaccaggagggggtagtctccccgaggcgccgccggccctcccactccccggctggctccagaccacccctcccctccggcccccccgcatagtccttcagtcccgtccggggcgcccagactgggggt

SEQ ID NO: 115932 - DNA, 30 bp, Homo sapiens; identical to SEQ ID NO: 44902
  chr7:150777639-150777669
  hyper

SEQ ID NO: 115933 - DNA, 116 bp, Homo sapiens; identical to SEQ ID NO: 44903
  chr7:150778107-150778223
  hyper

SEQ ID NO: 115934 - DNA, 30 bp, Homo sapiens
  chr7:150783184-150783214
  hyper
attgcctagagatccgacaccccgcccaga

SEQ ID NO: 115935 - DNA, 971 bp, Homo sapiens
  chr7:150784072-150785043
  hyper
atatctacgccatctacgacctgatcgagcgcatcgaggatttggcgctgcagaaccagatccgggagcacgtcatctccatcgagggtgagcggagccgggggctgcgggagccggggcgcagtggcctctccggcgccggccgagggctccacaggccgtgcctggccatgctctccctgtcgggggtccttgcgcgcttgaggaccaggccacgaggtttgccgatctgtgttgcagaaccggcgggcagcttcgccatatctcgttcggggacactttggggttgggggttttctgctgactgtgttccagggcgcgaaggtggtgtcgcttgggggggccgggaccagatctgtccaggcctggccggggaaggtgggcgcggcagagggcttcagctgcggggaggtggggtcgtgaccggggaggcttcttagccgctgcccgggccctgctccgcagtggggcgggggatcggagcctcgcgttagtggatggcagccttcccgggcccagcgcccgcaggcccggagggtggcgctcgccgcggcgccctctcccgacgcacaccccctacgccgcggcggccaagcgggagcgggccgggcctggcgctgggctgaggctcagcgaccgcgtgggaggcgccggcaggtccatccgcgctttggccgggtcatgagcctgacggggatccgcggctcctcggtctggaggcagctgctgggcagccgggtgctgaccgaccgccagggacaccgcacccggagtcggggaccggaaacccccggccactgcgctgcctagcgcttttttctctgggcccttaggccctggactttcgaccgctgagggcacaggaagtggtggcacgctgctggcagatgcctcgcaagccctggtgtggtgggtgctggaggcacccgcaggcaccccggtggcatggtgaccttcgagcgggcacggac

SEQ ID NO: 115936 - DNA, 441 bp, Homo sapiens
  chr7:150863955-150864396
  hyper
gtcagaacctgcgcgcgatctaaaggtctgggacttcaaggctccaggcaggtgccgaggtgccgaggttccgagcaggttcctgtctggaatttccaggtgaaccggcctcccgccagccctggtcggccctagcacttaccgggcagacttggaaaagtctctgagaagtgcggaggcggaggtggtgggggctctgccactttctcccgggccggcagcagctcatcagcttccagcccaccctctgggcgtcggccgcctggctcggggttgtttcgggcggcagtggcggcggcggcggcagcggcggcggcgagctcctggggcccgtagaaagcgtcgggcggctccgcgaagctgggcagcgcggtggtcagcgccaccatcgagggcacagcctgacccagccccgcgcagaaggtgttggtaaggcggccg

SEQ ID NO: 115937 - DNA, 902 bp, Homo sapiens
  chr7:150864610-150865512
  hyper
cgctaccgcctccggcccgctgcatcttgttcggagctgcggccgccccggggcgctcctctctgggcgcctccgtgcgccccgcggctcgggcgccccgcgcggacacgcagggctcgctccctggctcccgggccgaggtggcggcggggcgcgggctcggcgcagtgtggctccggcgccgcgctccctctctctcataaggagggagggggcgggcgagcaggcgggctgggggtgtcgccctccggactcatccatcttcctcaaattacgcttcatttcctccctccgcccgccgccgccgcgcccggctcccgctccctccgcagagcccgttcccagcggcccggccggccggcccgggacccccacccgccccccgcggcccaaccaactattattaatggagattgatgaggccggacacgccgctttgtgaaagtttgcggccgacgagaaggcggcggcagctgctgggccggtccccttccctccacccagtccacccccccaactcagcccacctggcccgggctccggctaggagggcaagcgggaggtggcccaggctccgatggggcggcggggccgagcgtggatgggacaccgggcggcaggcggagagggcgcaccagcagggacaggcggcggggccggacctcagcacccctctgctccgggccgccgccctccttcgggccccaagtcattccccggcgtgcctcccagctccgacacccctcccctgcccgtggagcggacgttgtggcggtccccagagcaagctccggcgcgacgggcgggacagcacggccaccgccccctccagcgagagcgcggggctgagggaggcgaggcggggccgacagggggcgcgctgggcccgcccggttctgcgg

SEQ ID NO: 115938 - DNA, 34 bp, Homo sapiens; identical to SEQ ID NO: 5987
  chr7:150869803-150869837
  hyper

SEQ ID NO: 115939 - DNA, 124 bp, Homo sapiens
  chr7:150924341-150924465
  hyper
ttctcggcgcgccgcgctgcctccttggaagtgtagtcctcaagttgcagcggccaagagtgagacccgccttgaggactactatgtatcccacagacctcgcggggccgcgtgacgccatcag

SEQ ID NO: 115940 - DNA, 253 bp, Homo sapiens
  chr7:150929280-150929533
  hyper
aattgggagaaaagcgctctcgagggtgggggtatgctttttccagggcagatggtgttcagcccaagttacggggcagctttggtccactctggatttgcctggattcgcgtatgtgggggcgaacgcgtcttatcggggggcggccggttggggccaggcagcccggatcccagccgaggaggtgcgcggtgctgagaggccgtgggagcgaccatagagaacgcgcgggcggagcgagcggccggatgcg

SEQ ID NO: 115941 - DNA, 30 bp, Homo sapiens
  chr7:150930135-150930165
  hyper
cgcgcttctgtttgcgttcccaggaccctg

SEQ ID NO: 115942 - DNA, 30 bp, Homo sapiens; identical to SEQ ID NO: 44910
  chr7:150942337-150942367
  hyper

SEQ ID NO: 115943 - DNA, 30 bp, Homo sapiens
  chr7:150945592-150945622
  hyper
aaaagtttgcttttcgtggctttgcgcgcc

SEQ ID NO: 115944 - DNA, 30 bp, Homo sapiens
  chr7:150945913-150945943
  hyper
tctgcctgttgactcggcggggacggggcc

SEQ ID NO: 115945 - DNA, 65 bp, Homo sapiens
  chr7:150948745-150948810
  hyper
cgcaatagggcgcccgccgcacttggggcaggccgtgcgcctgtcgggggcgagggcggccgccc

SEQ ID NO: 115946 - DNA, 112 bp, Homo sapiens
  chr7:150974356-150974468
  hyper
agctcggaggccctcggcgggccctggccagacccgttgtgatcttcagcctgtacacagatgtgtcgtaggcctgtgcttgcatctgcacgcccacgagtcacacacgcag

SEQ ID NO: 115947 - DNA, 30 bp, Homo sapiens
  chr7:151001002-151001032
  hyper
agtgggcgcgcctgcgcgtacggcacggcc

SEQ ID NO: 115948 - DNA, 390 bp, Homo sapiens; identical to SEQ ID NO: 44913
  chr7:151038573-151038963
  hyper

SEQ ID NO: 115949 - DNA, 185 bp, Homo sapiens
  chr7:151106380-151106565
  hyper
cttccgctagtgtgccgggatgagcgggggctggacttctagaaaggggtctgcgggcgcaggagctggggtccgcggtctggggccggtgagctgcggcgaagaggtcagggagggagtgggagggtctaccttgcaggagcgcgcagcactggccgtccgcggtgctccagagccgggccgtg

SEQ ID NO: 115950 - DNA, 399 bp, Homo sapiens; identical to SEQ ID NO: 44915
  chr7:151106589-151106988
  hyper

SEQ ID NO: 115951 - DNA, 455 bp, Homo sapiens
  chr7:151107395-151107850
  hyper
cgcgcgccgggaactcatttggggcgcagctccaccgacccctcggctactcgcctccaccaggcaagccaggtcctcccatgctctgagccctaaggactctgcccgaggggctctcggggacttgggggcggtcccccaatggagggtgcgacagggaaagccccgagtccgccctccctgggaaatcacgcgcacacccaggattctactttggtctggccggagtggggatgaggtgcgagccgctgcggggtcggtggagccgggatgtcaagttcaccttccagccgccgcgggctccctcggcctggggcgcctctaatggaccccggggtcggcctgagccctcccggagcgcccggcggctggtttccattagggcagttccggcgccgacttcgctggggacggggaaggtgacccccctactcggatcccccaggtcctaaagg

SEQ ID NO: 115952 - DNA, 313 bp, Homo sapiens
  chr7:151136924-151137237
  hyper
cacagggggcgaaggcggagccccactcggtttccttggggttgagggacgcactcaccttccccgagcgctgcgccatggtgcgccccgccccttccgcgggtccccgtttacaccgggcagcgccctgctggctcagcgccgccccggacaaaagatttgctgggccggccccggagcgttagtgctgtcgggcgtgctaagcccgaggggccaccaggcggttgggacccgccgcggccaccctgtgccaccgcgagtgcagcccgccctgcccggggtctccctgtgctctccgcgtttagctcccgag

SEQ ID NO: 115953 - DNA, 30 bp, Homo sapiens; identical to SEQ ID NO: 44918
  chr7:151145539-151145569
  hyper

SEQ ID NO: 115954 - DNA, 199 bp, Homo sapiens; identical to SEQ ID NO: 44919
  chr7:151215382-151215581
  hyper

SEQ ID NO: 115955 - DNA, 30 bp, Homo sapiens
  chr7:151216916-151216946
  hyper
aaaaggggacgccgcgatgcccccagaaaa

SEQ ID NO: 115956 - DNA, 348 bp, Homo sapiens
  chr7:151217152-151217500
  hyper
ctaccgcgctgttgggcgccggctaggtttgaaggcttcaaacttccaaccggttaggggcgggcgggagaggcggagagacaaacggtggctccctggtgattggccagaacggagcgcagggcggggcaataggtgggaggtgcggtgattggcgaaacgctaagcggttggcgggttcgcgcccgctgagcccgtgaagggcgcgaggcgcgtggcctgggcgggtgggctggctcctccctcggggttttttgaaaattctccttgagctgcgttagcgttcgtgtctgggtttgaggatgtagtggtgactaagcgtcaccgacggccgaaggactgtgggaa

SEQ ID NO: 115957 - DNA, 962 bp, Homo sapiens
  chr7:151572577-151573539
  hyper
acagcccattcactgcgcactcccaccctgccccgggagagcaaaataactttctctacggagcactctggtgtgtgtgtgtgtgtgtgtgtgtgtgtgtgtgtgtgtgtgtgtgtgtgtgtacacaaacatttacttggttggctgaggcggagggtgtgacccagtgggccacacctcccaccgccctaccccgctacgtggaggcgaggaacagtggccgcgggctaccggggcgccttccgaaaagagaaccactacgcggcccgccgcccctctggctggacaaagtgaagccgcaggcagatccgagtcgccaatgtcctcccgggcggctggcgcggacggggctgaagttcaatgcagcctgcacggattagggagctccgagcccccaaataccacagagacccaaagtacactcccggggcgggggaagggaacggcggcagaggagacccccgctccaggcccagaaacgcccggagagaaactggagcggagggggtgcattggaagacgcagctacacagctccccccaacccccgccccgctgctttccccacccaccgcccctcccctctcctccctcccctcccctctctccgtctccagcagccgagcgcgggctccacctccccggagcgcagtccacaccgtcccttttcagcaaaacaacacaacgcaccgccccccgcacccgcacccggctggataccgggctacgcccagccgcccacccgccgcgcccggcgccccctctagtctgcagccgcccagcccccgccccaggcggagccccagccctggctgcacgcgggcagagagagagattgagccccggctccgccagcccagctcgggccctgtccctctaccctttccccaagccgcccgaagtgacaggaggggcacgcacggcgcgcgcggggcgtccagcgttaaccgcttcggcgccggg

SEQ ID NO: 115958 - DNA, 30 bp, Homo sapiens; identical to SEQ ID NO: 44923
  chr7:151574933-151574963
  hyper

SEQ ID NO: 115959 - DNA, 693 bp, Homo sapiens; identical to SEQ ID NO: 5993
  chr7:151722450-151723143
  hyper

SEQ ID NO: 115960 - DNA, 77 bp, Homo sapiens; identical to SEQ ID NO: 44925
  chr7:151723167-151723244
  hyper

SEQ ID NO: 115961 - DNA, 30 bp, Homo sapiens
  chr7:152131879-152131909
  hyper
cgctcaaaggcaggcgaccctattcccaag

SEQ ID NO: 115962 - DNA, 33 bp, Homo sapiens; identical to SEQ ID NO: 5995
  chr7:152133405-152133438
  hyper

SEQ ID NO: 115963 - DNA, 31 bp, Homo sapiens; identical to SEQ ID NO: 5996
  chr7:152160442-152160473
  hyper

SEQ ID NO: 115964 - DNA, 169 bp, Homo sapiens
  chr7:152161043-152161212
  hyper
ggggcgccaggcggcgagagagccaatgggaggccgagccgaggaccgcgggcggtgggcctccccccgagaggagggagacccggaaggcggtgggggcggggagtggagctgacaacctgtcaaatccactttgggacgaactaggtcacgcgctccgcgggtcggg

SEQ ID NO: 115965 - DNA, 160 bp, Homo sapiens
  chr7:152161897-152162057
  hyper
ggtacggaccgcggcgttctgtttccaggcaaaggaaaataagtcaaagactcagaaggcagcctgaatccagggcctgggatgcagggtttgctggaacgccagccggtgcgatcgcgcccctgggattccgcttagcccgcgcgtccatttccctgca

SEQ ID NO: 115966 - DNA, 30 bp, Homo sapiens; identical to SEQ ID NO: 44929
  chr7:152373188-152373218
  hyper

SEQ ID NO: 115967 - DNA, 120 bp, Homo sapiens
  chr7:152373448-152373568
  hyper
tgtaaactttggttcgttattattatattaggtaaagctggtcttatgtattaatttgtttaaccattaaaaataattgtattgcacaagcaggcccctttgtccgttctcgggttaaaa

SEQ ID NO: 115968 - DNA, 30 bp, Homo sapiens
  chr7:152457009-152457039
  hyper
gggtaagagcagctcggcgcccacccccgc

SEQ ID NO: 115969 - DNA, 30 bp, Homo sapiens; identical to SEQ ID NO: 44931
  chr7:152457591-152457621
  hyper

SEQ ID NO: 115970 - DNA, 167 bp, Homo sapiens
  chr7:152591570-152591737
  hyper
gctcccccttcgccccggccctcggtgggcgcctctgacctgggccgtagtttccaggcccgcgcgtccccgaggcggacgccagagggcgcgcgccccccactcctgcccgcgtcggggccgcagccgcgctccgccctttgcctgcagagcgctgggggtttaaa

SEQ ID NO: 115971 - DNA, 159 bp, Homo sapiens
  chr7:152622354-152622513
  hyper
cggtttcctgtcccgcgtggttcatggggcttgccctgggcctgggaggccggtggcgggagcctcccctacagtgaggtgggtggggggcgccacacggcgtctcagggagaggggagaggcggcttctgttccgggaagagggaacggtggaggccg

SEQ ID NO: 115972 - DNA, 308 bp, Homo sapiens; identical to SEQ ID NO: 44934
  chr7:152622545-152622853
  hyper

SEQ ID NO: 115973 - DNA, 21 bp, Homo sapiens
  chr7:152623254-152623275
  hyper
ggcagggagggacgtgcggct

SEQ ID NO: 115974 - DNA, 95 bp, Homo sapiens; identical to SEQ ID NO: 44936
  chr7:152890308-152890403
  hyper

SEQ ID NO: 115975 - DNA, 102 bp, Homo sapiens
  chr7:153446175-153446277
  hyper
cggcaggtttgtggagggagtgtgagcagccgctggtgcgtctgcatgccttgcaggggtcggtgactgaggatggttggcggatcgcgggggttgagagaa

SEQ ID NO: 115976 - DNA, 112 bp, Homo sapiens
  chr7:153583417-153583529
  hyper
gacgggaacccaggtcgcggtcactggtcaacccgcctcttggggtggaggttagagaaatgggcgctgggatttggccccggccagtgctggggttccagggtagggagag

SEQ ID NO: 115977 - DNA, 797 bp, Homo sapiens
  chr7:153583631-153584428
  hyper
cggaggcccggagggaagtggaggccgggaagccaggtgtgcggcggggagagcggcccctgccacccgcgctggtagccgggcgctgccattcactgcaaggtcctctgcgccctggaattgccgcggcggcggatgcagaggccaacccagagtgcaaccatggagacgcgacgtgtgtcccatagtaacctgttacaacattatttataagctgccatccctagccttcccccgcttcccctccgctccctcgccagacttgcgggcgacgggcacagccgcgtctggctcttcccggcctctcccttctctcgcgggcgcagccgatcaatagttaacacccggctgcggacggcggctccatccgcggcaatcaccgtagtgcttgtttgtggaagccgagcgtgcgtgcgccgcgcgcgcacccagtccagcgcggagtgggcgtctacccgaggaggggtgtctggggaggggctgccctcgttacccaaacagtttgcgctcgcttaaccttgatgcagctcgaggcttcccagtccagctcagttcagacagaaaacctggcgcgcgcgcgcgcacacacacacgcctcccctggcgtcgccgcccggccgggtccctgcccttagggaccagagcggcgaccgctgcaccccgcaccgcctgctggaggagcccccggagccggggccgagccgccggcgtccccgagtgcgccccctgtgcgtgccgccgcgctgttgctcgcagtgtgctggcgccgagctcggtggacacgcgcgcagtcagag

SEQ ID NO: 115978 - DNA, 424 bp, Homo sapiens
  chr7:153584825-153585249
  hyper
gccacggacagggcgcgcgctgggtcggggggacccaccgtgaggagcgatgctgggggaggtctgtccttctcagtcccgaacctccctggaaggacagcgaccccatgcccgcgcgcggcggcgcttctcccacttcccacccgagcccacccagcggcagggggatgcggaggagcaggcatttctttgcaaattgcaactttgcggctccgcggcccctctccttcgggcatgtggctttgtgttttgggcgcgggatgggaggaaggggctgcggggagccctcgctgaccgcgggtcggtccgagccccaagcagacccccagggctcttctggggaaacgcggggagaggtggtcacttcggccagggaagggccactgggccctggcgcccgcgccggcctcggtgctccgagtcc

SEQ ID NO: 115979 - DNA, 102 bp, Homo sapiens
  chr7:153585293-153585395
  hyper
cggggcaggcgccagtcgctccgctccgttccagacgccgccgccgggcgggaccctgctccctggattggggacgctgactcccccaaaagcttgactgtg

SEQ ID NO: 115980 - DNA, 33 bp, Homo sapiens; identical to SEQ ID NO: 5998
  chr7:153749741-153749774
  hyper

SEQ ID NO: 115981 - DNA, 65 bp, Homo sapiens; identical to SEQ ID NO: 44941
  chr7:154705760-154705825
  hyper

SEQ ID NO: 115982 - DNA, 30 bp, Homo sapiens
  chr7:154794567-154794597
  hyper
gatgtcgcccaccgcgtaatacttgacctc

SEQ ID NO: 115983 - DNA, 30 bp, Homo sapiens
  chr7:154795306-154795336
  hyper
ctggccgagcaaggcgcggggccccggtct

SEQ ID NO: 115984 - DNA, 572 bp, Homo sapiens
  chr7:154861684-154862256
  hyper
tccagtccacccctagagggacgtgtgggggtggctaggggaacgttttgaggaaagttcattggtcaacttgttcaacgtggcaaactcatttcaggcaagagaggcagcaccgtggacagcgccaaccctcctgctcccgggcggggcgaggtggcagcaccgcggacagcaccacatgtggtggcgcacactgggagccgccaggcgcggggagcgcagcagcaccgcggacagccccaaagccgcgcgctctgagccaggaggcggggagagatggccttatcagctgatggcttacgtagggctagatctccacttggataaggcaggtctcggtgggcgcgccagcattcgctctccggagctgcagcctccgaaggggtggcgggggcaacagggacagaaggcaggtcccagaaagcaggttcccccaaaactggcttccctagcacggagttaaggctgcagccggctgcctagagagaagggtgggcagggagacaacgcggtgagagcgactgctctgacgcaccagcccctctcctgcacccacacgctgctggccgccc

SEQ ID NO: 115985 - DNA, 30 bp, Homo sapiens
  chr7:154982527-154982557
  hyper
ccgcgggactggtgcgcacctgggacgcgg

SEQ ID NO: 115986 - DNA, 30 bp, Homo sapiens; identical to SEQ ID NO: 44943
  chr7:155089015-155089045
  hyper

SEQ ID NO: 115987 - DNA, 30 bp, Homo sapiens
  chr7:155090196-155090226
  hyper
agcggccccgagcccggcagcccctacccc

SEQ ID NO: 115988 - DNA, 110 bp, Homo sapiens
  chr7:155090928-155091038
  hyper
gtctgaagccaaaccgcctacaccctgaactgttagagctctgtagattacgttcttaaggaaaagagtaacccccttacggcgtttagattttcgtacacccaagcagt

SEQ ID NO: 115989 - DNA, 30 bp, Homo sapiens
  chr7:155137860-155137890
  hyper
gctgagaaatgcagcgtgtacgtcggttgt

SEQ ID NO: 115990 - DNA, 2633 bp, Homo sapiens
  chr7:155164456-155167089
  hyper
aaggcgagcggaccgcgctgcacgggtccaggctgggtgcccctctcccctggggtaaagaggcagcacaggttgggacagctagatgggggcaatccaggcgtcctgcccacggtttcctgggagccaacaaaggcgccgagacctcacccgtgtgaggcaaccgccccgtggtcccacagagcttctggaagtctgcgtcccggccttcccgatgcaaggcgccctctccacctgcctcggccgtgagcaggttcaggagggcgagaaaggttaggccgagcggaaccgcgcggccagcgttacgcagggtgccctggacacccctaggcgcccacctggacttgttcccacctcctctcgccccttgccttcttaacccgcattacccgtgtaggcctggggtggaatcggactacttgttcgggatttgctcgagaacattctagggagaaggcacgcccggctttgggcttggccgagagtttagggcaggagcgccggcggggagctccccgggtgctggagaatgcgtgtccggaaagaagtagggcgcgcttcgtggatgcaaccagggccgtctcgcgcactttcttcctaccctgggacagcgcctgaactggagctgggcgcacacactttacggagccagctcgggttcttacgccctggctcacccccgcccgccgccccaggatgcaggtgctgcggcgctccctggtagcctcccgcgctccctgggggcgcgctttcctccatttcagggaagtccccggacaggtgcccacgttttacgctgtccggtagaagcccgcgggctcaggccgacttgcgcggccgcttctccccagggagagaagctggagcttcccccacgcggccctaaggcggggccggctgggccggagtgggcgcggccagggtgtcccagcgcgccccctgccgaccgcgcgctgcggggggcaactccacctcccctggggaggcctcgtccccgctgcagggagactaaagcgtgggtccgcgaccagccggtttaggaacgaaaactctggaactaaaaacaaaaaataaaactggtgagtgcgcagcgtggtcagtgtttccctctgggtaatgcttggccaagggggaagatcgagtactcccgcccacatccgcctcccccaggagggaggattccctctctgctcacccaccctgacccacgcctcccgccaggtccactgctcagacaaatctgtaggtttctgagtatccgtatctcgaaaagcttcaatgcacaaacgaggttttaagcccatcgcggcttcgcaaggggaaggggctgcttccctaaaaacaaaacacaacaaaaaaggcaagggggtactcttgcagatggactggaattagtaatttagccagggtctcttccaaactcactgcaaaattcgccagcgtctcattcttcacacacggggcaccacacgagaatcaccccctccccagaattttgcaaagcacgtttgctgagttttctcgcctttccttccgacaagctcgaactggaaccagcgctctcccctctagacctgcctccgcgccccacccttcttcccccacacagtccctccgcagggagaattcaggtgctaaaaatgctcgggcctcgcagcttcctccctcctcctcggttcctcgaatgacccaagctgcctctttccgggcccttggaagacggtgcgaattccgcggcggcccgctctcgccagcgccacagccctgactcccacccggaggcctgagttcaaccgctttcgcttccttgcgggccgttcaaccctctgaatacgcagattcatttatttatgttttttaatgtagtaagtgggcagctaaatgaattgcaatttgtcatttttatggttaatttgaaatctcgctcttgttgcctaatcctgttagttggtggcaaaacaaggagaaacgcgtgtttcggcagcagtgattctaacaggcgttttatgttaaattacagcagaacccagaacaaaagcaggcggcggacttgcagtcccagcggcctcggccggtccgcgctgccggtgtgagccccgaaggaaagcaccccaagctggctgaccccgcgcacccccggccacacccgcccatcctggcttcgagattaagaagcccagtttggcaccccaattatgtttggcaatgtccccggtgccccagacccgcactccgctgcctcctggcttctcatgcccgcgaagcacggcctcgccctgggcgcggggcatcaccggcgcggaggcccgagggcgggtcacttcggatccctttcttcccttcctcgtctctgcctcttttcctttcttttctccctccgcctctctgtcagctcttcccgtcgtttcctcggcacccagctccagtccaggcgctgtcccagggtaggaagaagggcgatgccccttcttccccttctctggtcccctccccagcctccggctccccaaggtgcagggctccggcgggggctgggccgggcgggtgggtttctgagccgcagcgcttggagctgggggagcgggagcaggggcggcccggcgggcgggccgggacccggcttttccggctac

SEQ ID NO: 115991 - DNA, 486 bp, Homo sapiens; identical to SEQ ID NO: 44946
  chr7:155167174-155167660
  hyper

SEQ ID NO: 115992 - DNA, 15 bp, Homo sapiens
  chr7:155167833-155167848
  hyper
cgcccagggccggcg

SEQ ID NO: 115993 - DNA, 342 bp, Homo sapiens
  chr7:155168225-155168567
  hyper
agccagccttagcggcggtgacagcttcctcacggtggtcctgcagctggagctccagagaaagaagggaggaagcacttccggaagtctctgccaagagattttaaattgtgttgcctgcggattttgtggttgaaagaattacctggtgacttgccaaatctctgagtttgttgaaaggagatgacctgcccttagaaacccctccattcctgcctacctccgagaccagaggctgtgcctctctttctcttttctttcctagtccccacaggagggaggaggaaggttacagcgtttgtggaatcaggctgccaggcgacgtttcgtggttgtatttgg

SEQ ID NO: 115994 - DNA, 708 bp, Homo sapiens; identical to SEQ ID NO: 44948
  chr7:155170270-155170978
  hyper

SEQ ID NO: 115995 - DNA, 1251 bp, Homo sapiens
  chr7:155173869-155175120
  hyper
cttcaccttccaaaccgcagtccctggtgatcctgacttttgcagcctggctctgggtccacacggggctggagaaggggattcggtctgaatgggttcgtggagggtggggcagggggctgagctgaggaacgcgctggcgagggagtcagatactgttacttcgtattttaggaatgtatttctcctgcacacccctccctcccctgcccacccccctctcccagtatcattgctctttgaaatgtcatgaacttggcgctttcagaccaaaccgccgggctcaggcccgagacaatgggattgtcagagggccagcgcggagctttttctgcgtgttcacggagcgttaagcctttatcccacagaacggctctgtctgaccgggtcagacaaaagccaacttgcatcttccgctccgaggggatctgggcagagcccgggtacagccctgcgcggccccagggagaggggggagagggcgcgtgtccccagccctgccaagtggcgtggggagcgcgaggccctcctcggtcagagccaccaactctggtctccgtggacatcccccttcccccgcccgctcccgaggctctagggcggcctcctggccgctgccttctcgcacccagggtcttcggcctgggctccacacctcaggcccctcaagtaatcggcctcttggtggccgggcactgcctttccggctgctctctgcacccgtctgcccctccggcctcccctggcggctacaggcgtccggggccctcgctccccagctccaggcgtcccgggagccaggcgcgcagcggggcgagttctcgtgtccgtgtgagcgcgggcgtgtgtatgcgtgcgcgtgcacgagcgtgagtgtgcgtgagcgtgagtttgagtgtgcatgcgggtgtgaatgtgtacatgtacacgaatgtgagtgtgagtgtgcatgagcgtgagcgtgcgtgtgcgtgcgagtgtgcacgagcgtgactgtgagtgtgcgtgcgtggaagcgcggcggggagcctggctgaaggcctgctgcctgcatggctgtcagagaaaaacagaagtgggagcctgctgcgggctccgagaggacttgatgggagccctggcgcgcgctgggcaccgcgcggtgagtgtcgggggtgggggccgcgggtctccagcagcccctgccctgtgcggaccgccgccccgagggtccctgcttgcgggtccggggctgggcgtgcctggctcccc

SEQ ID NO: 115996 - DNA, 902 bp, Homo sapiens; identical to SEQ ID NO: 44950
  chr7:155241406-155242308
  hyper

SEQ ID NO: 115997 - DNA, 139 bp, Homo sapiens; identical to SEQ ID NO: 44951
  chr7:155242379-155242518
  hyper

SEQ ID NO: 115998 - DNA, 834 bp, Homo sapiens; identical to SEQ ID NO: 6009
  chr7:155242699-155243533
  hyper

SEQ ID NO: 115999 - DNA, 681 bp, Homo sapiens; identical to SEQ ID NO: 6010
  chr7:155243755-155244436
  hyper

SEQ ID NO: 116000 - DNA, 31 bp, Homo sapiens; identical to SEQ ID NO: 6011
  chr7:155244946-155244977
  hyper

SEQ ID NO: 116001 - DNA, 471 bp, Homo sapiens; identical to SEQ ID NO: 44955
  chr7:155246272-155246743
  hyper

SEQ ID NO: 116002 - DNA, 621 bp, Homo sapiens; identical to SEQ ID NO: 44956
  chr7:155246858-155247479
  hyper

SEQ ID NO: 116003 - DNA, 487 bp, Homo sapiens; identical to SEQ ID NO: 44957
  chr7:155247650-155248137
  hyper

SEQ ID NO: 116004 - DNA, 213 bp, Homo sapiens
  chr7:155248840-155249053
  hyper
tggcctggcaggccacgctgcctcggagatgcttgccagactccccaagttcactcagggcctggcagcaacctgctggctgcctctgcgggggtctgggttgctgagcacggtgcagctgcccagggccaatcagccctagggtgtccgtgccaggctgcggcctccccgcctcccccgcactgagggtactcatggcgtgcaaatgctccc

SEQ ID NO: 116005 - DNA, 921 bp, Homo sapiens
  chr7:155249382-155250303
  hyper
ttaaaacaaagaaaacgagatgaccggtctgggagctcctcaatcagagtagagaagttagaggggggcgggcgacttggttttgaagtcttagctgaacagtcacccctcctctccttggcaaaaaggattcctttagaacctccgaggctcctggatttctcccttcgcaaatggagccgcatactgcattcccccgctctttcggatcgctaagcatgtttcatgagggtcgctgtccccgggtggaatgcggccgtatgcacgcgcctccctgcacacgcacacacacgcacacttacaataagtgtctgcaggaggagtgtcctgcgcgccagctctgcgtttaagacaggaagctgccgggttaccgagtcaaatgggagtgacactattcctctccatcagcaaggaaagcggaccacaaaagtccctttgtatctcggcagctcatttaatattatttatgcattttgtgcaaggaattgtgggatttcgccccacggtaaacaatatggaaatcttaaaaatagcgatcttcctgtgcgtgtccacctacgcgccccggggtgacctggcggggctgtcgccgggtgactcacacccctgaaccgcgaagcgacagggaaagcgcgggcgagcgcaggagacgcggtcgggggtctctccgggttcctgggctcccgcacccggagcgggggacgcggccgctttaaggggaggaggggcggcgggctgctcctgtcacccagcggcggccggagcgtcacgtgggcgcgcggcgccgcggccattggcccgaggcacgtgtccaggagaccggcctgcgacgtcactcgagggggctctgttaaaaataagaacaaaaatccagagtgaaagtgtctcaggttgcgccgagtggcctggaaatttccgagc

SEQ ID NO: 116006 - DNA, 935 bp, Homo sapiens
  chr7:155250323-155251258
  hyper
cgagggcggcggacggccggggagcgcgggcggcccagcccggcccggccgggccctggcctcgcgtctctcacccatgcgactcgggccgcggagctctgcggggctcggcgggggcgcggccgcacgccggtggggcgccccggcccgcagcggggcggcggccgcgaggagggggcctccatgtgcgtgcgggcggtggcgggcgcgctgaccgcgggcgcccggcaccctcgagggccggctagggcgtgcgggcggggacggccgggcggcggcggcggccggagccggcccgggcgggcgtgagcgccggggaacgcgctgcctgcatgcgcgcagctctcgccccgggcggcccaggcggcggcgccggagcccgaggcggccggacgcggagaggagcggggagcccgggaggcggcccgcgtccccgccggaccactgcgactgtctagaccccggctgcgcggcgaagtcgaggacttggctctgttgaatctctcatcgtctgggcgagcggggcggctcgtggtgtttctaacccagttcgtggattcaaaggtggctccgcgccgagcgcggccggcgacttgtaggacctcagccctggccgcggccgccgcgcacgccctcggaagactcggcggggtgggggcgcgggggtctccgtgtgcgccgcgggagggccgaaggctgatttggaagggcgtccccggagaaccagtgtgggatttactgtgaacagcatggaggagaatgaccccaagcctggcgaagcagcggcggcggtggagggacagcggcagccggaatccagccccggcggcggctcgggcggcggcggcggtagcagcccgggcgaagcggacaccgggcgccggcgggctctgatgctgcccgcggtcctgcaggcgcccggcaaccaccagcac

SEQ ID NO: 116007 - DNA, 203 bp, Homo sapiens; identical to SEQ ID NO: 6018
  chr7:155251346-155251549
  hyper

SEQ ID NO: 116008 - DNA, 193 bp, Homo sapiens; identical to SEQ ID NO: 6019
  chr7:155251661-155251854
  hyper

SEQ ID NO: 116009 - DNA, 371 bp, Homo sapiens
  chr7:155251890-155252261
  hyper
cgacattgtgtgaagctgacgccggcccgggcagcggccaggagtccagcggcaggactgattcgctagggggtacagacttcttaggaccgcagaagggaccttctttctttctctgtctctctctctccttcctctctccctgtctcccctctctgtcttccaccccgccttggcgcatctcttcccagcccctagcccatgtctcccccactgtagttttttttggtgggaacgtggtggctggaagatgggcccggaagtgcacactctcatccccttccctacgatcttccaactcaggccaggccggggacgcatgccccagcccaccccagacttgtcctaccatccggttatcccggctgtgc

SEQ ID NO: 116010 - DNA, 110 bp, Homo sapiens
  chr7:155252316-155252426
  hyper
cgctgaccggtgggactcaggaggatgcacacagggaaggaggaaaataaaggcgccctttccccttggctccactttgtttgccagcgccagcccgcagtggtggggct

SEQ ID NO: 116011 - DNA, 440 bp, Homo sapiens; identical to SEQ ID NO: 44965
  chr7:155252633-155253073
  hyper

SEQ ID NO: 116012 - DNA, 383 bp, Homo sapiens; identical to SEQ ID NO: 44966
  chr7:155254934-155255317
  hyper

SEQ ID NO: 116013 - DNA, 94 bp, Homo sapiens
  chr7:155256268-155256362
  hyper
cgctgtccccagtcccaccgcagtcctgccgcaggcctaaccctcctgccctgggcactgcctccatgcagaagcgcttcgaggttctggggct

SEQ ID NO: 116014 - DNA, 30 bp, Homo sapiens
  chr7:155257063-155257093
  hyper
ccaggggtgtgcacacggctgagctgggag

SEQ ID NO: 116015 - DNA, 734 bp, Homo sapiens
  chr7:155257753-155258487
  hyper
aggaggaagtgttcaaaactacggtgctattccagtgactacatttttttaaattttgcgaagttcaacaggtctccctccggctgggtgctcactggccctgccacccgtgctggaccgaggcgctttcccctggggacaggaactttttactccactgagacaaagagactctccttttcaaagtgtcatttttgtttaccttttgttgtttcccccccaaaacaaaagactttgtacaacttcctaagcaggattgggggagggatcagcttcgcctgtgctgaccgcgcctctggattccgctcatcaggaagtgtttggggtctttgagcgagtgatctacgcgttgaattgctgtttttccaaactttcatggcttaaaaattttttttcttctccctgtaaaagaaactcagagactggtgatctgttaccgaagacgactttttaggcgttttctgtttccccaggcagctgggccgttggcgttcccaggcggaagcggggcctctgggctgggcctctgccctgccaggaagcggtctgggggctgcccctcgggattttcagaaccctggaaggagagagctggggtctcaccgcggagactcccgagttctcgttgcctgggcccgagctgcgccccagggtcatcgctgatggcgcgagaccacgcattccccgcgaaccccgacttctgaacagttcagaaagttcgtagattaaaaacc

SEQ ID NO: 116016 - DNA, 49 bp, Homo sapiens; identical to SEQ ID NO: 44968
  chr7:155258814-155258863
  hyper

SEQ ID NO: 116017 - DNA, 163 bp, Homo sapiens; identical to SEQ ID NO: 44969
  chr7:155258914-155259077
  hyper

SEQ ID NO: 116018 - DNA, 503 bp, Homo sapiens; identical to SEQ ID NO: 6025
  chr7:155259119-155259622
  hyper

SEQ ID NO: 116019 - DNA, 124 bp, Homo sapiens; identical to SEQ ID NO: 6026
  chr7:155259833-155259957
  hyper

SEQ ID NO: 116020 - DNA, 852 bp, Homo sapiens; identical to SEQ ID NO: 6027
  chr7:155260038-155260890
  hyper

SEQ ID NO: 116021 - DNA, 594 bp, Homo sapiens; identical to SEQ ID NO: 44973
  chr7:155261070-155261664
  hyper

SEQ ID NO: 116022 - DNA, 190 bp, Homo sapiens; identical to SEQ ID NO: 44974
  chr7:155262412-155262602
  hyper

SEQ ID NO: 116023 - DNA, 30 bp, Homo sapiens
  chr7:155262959-155262989
  hyper
gccttgcctgtgtgtcggtcagtgcacgcc

SEQ ID NO: 116024 - DNA, 30 bp, Homo sapiens
  chr7:155263357-155263387
  hyper
cagccatccatcgtccgtcccctacctgca

SEQ ID NO: 116025 - DNA, 630 bp, Homo sapiens; identical to SEQ ID NO: 6030
  chr7:155264016-155264646
  hyper

SEQ ID NO: 116026 - DNA, 219 bp, Homo sapiens
  chr7:155283716-155283935
  hyper
cctgggagtcctgggctgctccgtccggccctccctccgtgagaaggggaagccgaggcttggatgagctgccctggccggctccgggctccaccccccgcgccctggctgttgccatggttggcctcaggcatccggctcggcctacaggaaacacgcttgtaggactcgctagggcaggagagaatggggtaacgcggaagatggattttttttttt

SEQ ID NO: 116027 - DNA, 300 bp, Homo sapiens
  chr7:155301650-155301950
  hyper
ttttgtctcctttcctaggagcgaatctcttgaaagttctctccttcgtcacagggtcttcctcaagcttgtagtcgttcattcgctcacagactttctccaaaagatccgttaggaacgcctccgactgagctagggggatctaagaagaaagacagggcgaggaaacttgtcttaatgttaatgttacttcaaagaccttccggcgagtccacatggaaacgccacactctccctgaatgcaaacgtgtgccacttccctagcacgggcccagaagacggtaccgcagattgttatta

SEQ ID NO: 116028 - DNA, 587 bp, Homo sapiens
  chr7:155302308-155302895
  hyper
aagtctggccctccccggggctgcccttggctgcgcgtcccccacgctgcagccgcgcgatggcccgggctggggtggacgtggggctgggagaggaaggggctcacggacgggcgccccatctcccaggcgggctcctcggctgctttctttgggaacagctggtgcacgtccccgcgcgcccctctccctccggaattcggcgaggattcagctggaccctttggccaccacctccgccccgggcgcgggtcaaagagcacccctcgcccttggtaacggagacaaaacgttcggggccgtctagacaggtcaaggtgcaggatgcggcgtccccgcggctccttccggaagggggcgtggagccgccaagggcgccggaccgcgccgcagcccgggcctttgcgggctttttccctctccaccctctgctgatcaaagtaggaagtttgcatgacaaccgcagtgaaaggggctgaatcacaaatgaactcgatttctgcagtgttgatctatccagcctccattgtcccctttcaggcgcagtatgaacccttccggtgccagcggccgcgctacattcacag

SEQ ID NO: 116029 - DNA, 297 bp, Homo sapiens
  chr7:155302963-155303260
  hyper
cggcggcgtccccttgaaagcgcgggcggagggtgcgcttgtgttcttgagacccaggttccattacaaaccacccagcatcgccaccggcgccccccgtttcaataaggaagccactttgtcaaaacattctaaaagaaacttgggaagaggacgcgtcagagaaataccgccgccgattaactatcagctgcgcctcccctgtgcacaggtaacatccctccttctcccccacgactcggctggagcttgattttgagctgctctcaaggcccaggcactcgaatcggaagttaa

SEQ ID NO: 116030 - DNA, 30 bp, Homo sapiens
  chr7:155304416-155304446
  hyper
ggagacactaccttacgatgttcgttaaaa

SEQ ID NO: 116031 - DNA, 938 bp, Homo sapiens; identical to SEQ ID NO: 44979
  chr7:155325790-155326728
  hyper

SEQ ID NO: 116032 - DNA, 141 bp, Homo sapiens
  chr7:155437083-155437224
  hyper
gggagacgggctgccgtaaagcttcgctttgccgactgctgcaaagcgccttacgactgaacccggaatcgacctatggccagcagtcgtccccgccctgcttcaaacatttgggtttcaggagccgggcggaggtgactg

SEQ ID NO: 116033 - DNA, 14 bp, Homo sapiens
  chr7:155579914-155579928
  hyper
agccccgaggcgtc

SEQ ID NO: 116034 - DNA, 231 bp, Homo sapiens; identical to SEQ ID NO: 44981
  chr7:155580181-155580412
  hyper

SEQ ID NO: 116035 - DNA, 212 bp, Homo sapiens
  chr7:155580714-155580926
  hyper
ctgtttcccccaccctcgggcctggaccgtcaatgccggctccgctcacaccatctgtgtccacgcagagggtcgggccgtgggagccgcgagtgtctggcccacacttctgttcttaacctcgcaatgtattcaggtttccccaggcggagcgctcagcatatcgacagctaaaaatccaaccaaggccgggcgcggtggttcacgcctgt

SEQ ID NO: 116036 - DNA, 2851 bp, Homo sapiens
  chr7:155600561-155603412
  hyper
ctctgcttggagtctggttgtcgccatggagggacagcttctatccagggccctaactgtagcgtgggttggggggactctttcgagagggtggggcgaggacgctggccccactgctgcggcgctttaaggggacgtgacaaattgcgcaacaggaaaagtcctgtgtatctggcagcaataaaacccagtaatatggttgtagagttcaacatgcaacaactgggggtggggtagggctgggggccgccctggtaacaggtcagtgcctgcatgtttgtgggcctgccagcagttaaaaaaaaaagtcggaagggcagagtttgagtgaggtcatcttgaggattgaacgcgttttacatgaaaatcaatcagtaaaccagggtcagtgtagagctatgatgtgaggcccgttgcgcgcaggcgcacaccaccaacacgcacagggacccccatgcaagccccccaccccaccgcagctccctcccctggggctgtgccgaagaagctttaaacagcttcccaggagggcagccagggagagggcggcagggtgaggatgacctggcccccagctctgtgagctgcgccacttgggcaggcatggaggaccccgggcagggagacccgggtccagccgggccgcgacgggaggtggctgcgcgagtgaggggcggaggccgagggttgctggagttggcgcccccgccccttgcgccctcctccggcccgggctccgcgcggcctcggctggcggcctctcctccgcccgcgctgggcgggattgtcgcaggcaaagccgggaagcccaggccggttattaattcattgggtcgtgtgccgcgaatcaagcccgactctgtgcagccaccgtgaagcccagcagggccgccggggccgggctttgtgtcggcggaggccaagttgttccccacgcctgagctcccgcctacctccctgatctgcgagccgcgccggcgagtgtcaccgccagcagccggtgggcttcccccagcgcgggggcgggggcgtcccagcttcaagacagccccagcccctaaacgcacctctctccactgtcctttcccccaagcttggtggaacagcccctccccaaccccatacctgagcgtctttcctggcggccccagagcgcacattaaatctatttagtgtagcggctcgggaccccactccaggcttcagatccggccctctggcctcctgccccttaggagccccctggccgccagcaccctcgcctggcacctaggcccgcgcggggagagcgtgtctgtctgcgctttcctctcccgggttaatattaaccggcagctcctgcgttccggaactgctccgaaagttccactggggacgatctcgccatggttgagggacttgggcggcagtcacattagagacccagagacagggagggagacagaagaagagggtcacgcacctggggcagagcctaggtggttatttaaaatgagggcggccgagcaggctccccaaacctcccgccggcctggggctcccctgccgcctcctgcaccccgcccctgccctcagcacccgagcctccgccttccccatcccttcctcccccacccttaactcctggaatcgggagaaggaaggtaggggagggatcaaccggggatacctcacagactgccagcccctacccccctcggttttaggggacctttgtggggtctgcctgataatcccggcctggctctcctcacccaacccccacttgggccgtccttccccctccttttgtgttgggaacgggaatagccactgcccaaggaaaaaagtatttgttttcgtttcgttcgtctgagggaagttgacagaaggtcagaagttcaaatgctgcctgtgcgcgcggcggcgagagtggccgggcgcggggccgctgggccctgcgtcccccggcagggcggacgggggtcggggggaggcccccgggctgggggctccggctgggacgcggaggcctagaggccaggcaggcggcggactggggatgggggcgcgtcccagggcaggccggcggagcccgcgatgcgccccggcccctgcgcgggcgcccccatctccgcgcccccgccgccggggacactacagcgagcccggcgctgctgttagctcctgcggtgcctgcgctcccgcgcgtggagcagcagagcccggcggctccagcccagcccctcgcgcactgaaaccctagccgcgggggatcgataacccgggagtaagtggggctgcaggcgtctgcctcgctgcgcggctctgtgcgcttgcagctttgcagcagggctgcaaggcccaagccctgggaaggtgtgcgagcccaggaccccttctgcggtattggcctcccgcagagcagggcagaagctgacccactctggctctgggacctcgggtatccacgcccccgccgctctctccgcagtgcctccctcctctcgggttccgagggaccctggcaaggcccctcctccgcggggagtgagggtgacgagaggatgggcgcctcgggctagccggagaactccctccagccagctgcacgcaacgggcaccccatggcccgtgcagagttaattgtggatcgcgctgctgtctggcactggcgcgcgcgtccacactcgcggtccagatttaaggtggtcgggagcagatgagggagagcaaggaaatcaggaccatttcccattcctctcccttccgacagctggagcaggctaccttgcctgcccctcgcctttctcggcctcaagcaagcctgggaatcgggtcgggaagcagggcggcacggaggtagctcctc

SEQ ID NO: 116037 - DNA, 590 bp, Homo sapiens
  chr7:155604519-155605109
  hyper
agtcatcagcctgtccgctccggtgttttcttcatccttaaatatgatgtcggggttgtaattgggggtgagttccttaaatcgctcggagtttctggagatcttcccttcataccttccgctggcgcctagggtcttctcggccacattggggataaactgcttgtaggctaaaggggtcagctttttggggtgcctcctcttcccgaaccccctgcccggtccgcacgccagtcccgagcataccagcagcgaggagacgaggactagcagcagacatctcgccagcagcagcatctcgcccatggaactgatgacttccgagctgtccccgtgcgggtccgtgcgcgagtgcgcgcggcgggtgtgtgcgtgtgcgctctctcttgcgctttcccttcctcgctccggctcgcccgctcgctctctccctcgctggctgcctcgctctttctcttcctatataaccttgcccgccgcggctgcgggggactctccaccgctccccacccagacaggggctggaatggcaggctgccggccgctgataacggaacacatcggagttgggtcgcgagacagcaatcaaa

SEQ ID NO: 116038 - DNA, 30 bp, Homo sapiens; identical to SEQ ID NO: 44987
  chr7:155605478-155605508
  hyper

SEQ ID NO: 116039 - DNA, 374 bp, Homo sapiens; identical to SEQ ID NO: 44988
  chr7:156409138-156409512
  hyper

SEQ ID NO: 116040 - DNA, 128 bp, Homo sapiens
  chr7:156409727-156409855
  hyper
cgcgctcagccgggtgaacctggaactgtgttcctggcccagcgctttcataaaagggcgcggaatagtaagtcctagttcaaggaataaacacggatccccactggccatgccgggactgacgcagg

SEQ ID NO: 116041 - DNA, 1052 bp, Homo sapiens
  chr7:156432928-156433980
  hyper
gccctcgactaacagcgcagcgaaggggcggtgcgctcgagaccctggaacgggaacgaccacagccaccgcagggaaacaaccggggcccaggcccaggtgggcgggcggctgaggagcgtggctgcgcccacaaagccgccgggggctgcggactacagcgaagccggcgcggggctcggccctcactacacgaggcctgggcgcctgcacgcccccgtgcttcagcccgcggctcccgaacacccccgccaggcgatccccaaaaacgcccgctgcgcgagcctcgacgggaacgcacctgcgtctagacgctgacgccgtgcgcggggcgggggccggcgagcatgcgcagtgtggtgtggacagggcgtggttggcaagcatgcgcaatgtgggccgggcggggctggcgagcatgcgcagtatggggcggggcggggcagggctggtgagcaagcccgcggggagcgagcgcggaggcgggcgttgctacggcaacggtgggcggccagggagttgcctgagggaaaaggggcagacgtccctgggttccggtgttcgcggaggagtcgaggcacggagaggcttcgggggagggacggaaagaagggtggcccgccaggcgggcggggtccatggattcggggtgagggccgtccgcggcctcgctttcgcctcctccgagccgggccggcgatggccgcagctgtgaggcgaggtcgggtcccgtagcggcgcgcagcctccttgggggactcggggtcctggttagtttccacagctccttctatctgaggggtacgaatttacggctgcctaaagccttagaacagtgatcccacgtcggtaattttagaacccggtaggaccggctgccatcaggggccccaggtgcagggtggtgtcagctttgagaggaattggagcctcgtcaccgcgcgcttcctgcatgagtggaacctcagaaaacggtcagcggggttcagaaggcaggagataacaccaagaccctacgtaggattgcatctttacgtcgtaggcttggtctc

SEQ ID NO: 116042 - DNA, 30 bp, Homo sapiens
  chr7:156684959-156684989
  hyper
tcgaactcaacccacgtgggggctggggga

SEQ ID NO: 116043 - DNA, 145 bp, Homo sapiens; identical to SEQ ID NO: 44991
  chr7:156701793-156701938
  hyper

SEQ ID NO: 116044 - DNA, 47 bp, Homo sapiens
  chr7:156742209-156742256
  hyper
acctccatgctcatcgcgagcctgacgtccacgcggcgcccacccgc

SEQ ID NO: 116045 - DNA, 339 bp, Homo sapiens; identical to SEQ ID NO: 44992
  chr7:156792491-156792830
  hyper

SEQ ID NO: 116046 - DNA, 30 bp, Homo sapiens; identical to SEQ ID NO: 44993
  chr7:156793031-156793061
  hyper

SEQ ID NO: 116047 - DNA, 35 bp, Homo sapiens
  chr7:156794450-156794485
  hyper
attacaggcgtaagccactgcgcccagcctgattt

SEQ ID NO: 116048 - DNA, 399 bp, Homo sapiens; identical to SEQ ID NO: 6043
  chr7:156794955-156795354
  hyper

SEQ ID NO: 116049 - DNA, 234 bp, Homo sapiens; identical to SEQ ID NO: 6044
  chr7:156795401-156795635
  hyper

SEQ ID NO: 116050 - DNA, 267 bp, Homo sapiens; identical to SEQ ID NO: 44997
  chr7:156795899-156796166
  hyper

SEQ ID NO: 116051 - DNA, 308 bp, Homo sapiens; identical to SEQ ID NO: 6046
  chr7:156796431-156796739
  hyper

SEQ ID NO: 116052 - DNA, 1429 bp, Homo sapiens; identical to SEQ ID NO: 6047
  chr7:156797005-156798434
  hyper

SEQ ID NO: 116053 - DNA, 620 bp, Homo sapiens; identical to SEQ ID NO: 6048
  chr7:156798526-156799146
  hyper

SEQ ID NO: 116054 - DNA, 330 bp, Homo sapiens
  chr7:156799290-156799620
  hyper
cgcggccggcggcacttccccaggaggttcgactgcgcctgggctggggaccaaagggcagtgaggcccacagccggctccggtcctcgccccagcccctcccgttgctgcttgtaccactacactcaaggccccagcgccaaggcctggccctgcagagggcggggctgttccctcactatcagtgcccactccccaaggaatgcggactcaggaccaccaagtggaaatggatagtttggagttaatgagaccaatttttttttttttttttgtctaggagacgtctgagtgtccctgttaaacagggcccatcgcaggaggcttcct

SEQ ID NO: 116055 - DNA, 245 bp, Homo sapiens; identical to SEQ ID NO: 45002
  chr7:156800317-156800562
  hyper

SEQ ID NO: 116056 - DNA, 30 bp, Homo sapiens; identical to SEQ ID NO: 45003
  chr7:156800933-156800963
  hyper

SEQ ID NO: 116057 - DNA, 474 bp, Homo sapiens; identical to SEQ ID NO: 45004
  chr7:156801397-156801871
  hyper

SEQ ID NO: 116058 - DNA, 2671 bp, Homo sapiens; identical to SEQ ID NO: 45005
  chr7:156801943-156804614
  hyper

SEQ ID NO: 116059 - DNA, 366 bp, Homo sapiens
  chr7:156808857-156809223
  hyper
gtagcattggcctgggcgcccaggcactcctttagaacccacctgttccccccacccaccctagtgggaggaggagagggttacactgacagataccggcagctctgcaacccgggaacaacgcagacaacatacaactcgacagagtcacagaaggtggcgtccatcgcgcctggatggtgactactgccctgcgggctgctgggtgggtgaaacacacagggaagaagcacaaatacacacacagatgtggctcagggacatttgaatgcttcagtgtgtgaattttttagcgcattctgactcgaaattatggctgaatagtggcgcactaatgtccaagtccatgttcgataatggcaggaa

SEQ ID NO: 116060 - DNA, 73 bp, Homo sapiens
  chr7:156809439-156809512
  hyper
ctgaagagccctccccgcccccaacagtgttcatgtcccgggctgggggcccgcctgggaggggctctatatg

SEQ ID NO: 116061 - DNA, 2 bp, Homo sapiens
  chr7:156809643-156809645
  hyper
cg

SEQ ID NO: 116062 - DNA, 490 bp, Homo sapiens
  chr7:156810031-156810521
  hyper
acacctgggagcagcatgggccgccctctgcctcaccgaggggcaaaccggctgaggacccaggcacgaagagtgtcaccagctctgaccacaagccccgtagaccagggctgcgtccataatcggggttgatggcattagttattatattataacctccttgttgcgtgattctagtaatttattttcccacttggcctttgactgggctgggctcctcccagtggaacaacagggggtgtcgtgtttgcagcagaaacgcacactgggatcctttcttgcaacagctgggccggctgggtcttttctcttgtcttctgtacacaggcccctctccgctgtttctgcagagaccgaggtgggagggagaaagaccctccagccctctgctcccaccctccccgcagtctccggggccctgtgctgcaggcaagataatttggctaatgaactcgttaaagggcccctggtgacccgccccggcttcccc

SEQ ID NO: 116063 - DNA, 203 bp, Homo sapiens; identical to SEQ ID NO: 6054
  chr7:156810597-156810800
  hyper

SEQ ID NO: 116064 - DNA, 1008 bp, Homo sapiens; identical to SEQ ID NO: 45012
  chr7:156811302-156812310
  hyper

SEQ ID NO: 116065 - DNA, 979 bp, Homo sapiens; identical to SEQ ID NO: 45013
  chr7:156812846-156813825
  hyper

SEQ ID NO: 116066 - DNA, 243 bp, Homo sapiens; identical to SEQ ID NO: 45014
  chr7:156813986-156814229
  hyper

SEQ ID NO: 116067 - DNA, 4 bp, Homo sapiens
  chr7:156815095-156815099
  hyper
tccc

SEQ ID NO: 116068 - DNA, 93 bp, Homo sapiens
  chr7:156815537-156815630
  hyper
catctctccactccatctgaacgtgatcggagctatagctaagaggccagcccaagggtgacctgccagacttgagtgcgtgagcgctggctg

SEQ ID NO: 116069 - DNA, 194 bp, Homo sapiens; identical to SEQ ID NO: 45016
  chr7:156870958-156871152
  hyper

SEQ ID NO: 116070 - DNA, 77 bp, Homo sapiens; identical to SEQ ID NO: 45017
  chr7:156871282-156871359
  hyper

SEQ ID NO: 116071 - DNA, 30 bp, Homo sapiens; identical to SEQ ID NO: 45018
  chr7:156931980-156932010
  hyper

SEQ ID NO: 116072 - DNA, 232 bp, Homo sapiens; identical to SEQ ID NO: 45019
  chr7:157129085-157129317
  hyper

SEQ ID NO: 116073 - DNA, 77 bp, Homo sapiens
  chr7:157129623-157129700
  hyper
ggaaactgcgcatgcgcggcgtcagggtcgggcggaagttgacgccgccgtgccgccgccgcgtgacgcatttcctg

SEQ ID NO: 116074 - DNA, 397 bp, Homo sapiens
  chr7:157130633-157131030
  hyper
cggggcaggaaacagcgcaagtagaacgatcgtgccaccaccgaaggggtgccgcctgcgagctcggaggcttcagcctgtttgggaagagtaggctgagcggcgctctttgtagttttcaacgtttttattgagttgcgaattttagtaaggatttgtcgctacaatttaagccaaattattgatttagtagaaaagttagagtgaagaccgaagaaaggaaacagacgttaaccattaaagcttgattgctgctgcttcgtgtttaaccgcacttttccaaatagtgttgcgtatcagaacgattcatgatttctgaaaggaattatatgcagccgccttactcctccgccagtccacccgtcccgcgttctctctgggtttactccagacttcc

SEQ ID NO: 116075 - DNA, 105 bp, Homo sapiens
  chr7:157150796-157150901
  hyper
tcagggcagggacaacgtgtttgtccttggagccccgtggtcttgcccgatgcctggcacaggaatgcattgaatgaaagaggtaactgacgttccctgagcaca

SEQ ID NO: 116076 - DNA, 116 bp, Homo sapiens; identical to SEQ ID NO: 6059
  chr7:157156193-157156309
  hyper

SEQ ID NO: 116077 - DNA, 267 bp, Homo sapiens; identical to SEQ ID NO: 6060
  chr7:157361385-157361652
  hyper

SEQ ID NO: 116078 - DNA, 74 bp, Homo sapiens; identical to SEQ ID NO: 45025
  chr7:157361751-157361825
  hyper

SEQ ID NO: 116079 - DNA, 414 bp, Homo sapiens
  chr7:157476559-157476973
  hyper
atgggggagcacgcccggccttggtcctggctgctacaagatgagaacaattagcaaacccctttccaccacctaatttcgcgtggtaacaaaatggatttttccccatgaatgcctggccggcctattcattatctctcttctattagtaattttctgctccgtattcagcctcccaactcttcatttcctcccgtctcccagcgtacacagtgcctcttatgtcaggccgggcccgtttttatcttgtaatcataaaggccaccaaagcaattatcgccggtcttgactggaaaagctggtcattaattagcctccttttgccttcggtgcagcggattagctggtgccgggactgagttaatggaaacgcgggttaaatgagaaaagacgcccggattttcctgcctggat

SEQ ID NO: 116080 - DNA, 494 bp, Homo sapiens; identical to SEQ ID NO: 45027
  chr7:157476994-157477488
  hyper

SEQ ID NO: 116081 - DNA, 109 bp, Homo sapiens; identical to SEQ ID NO: 6065
  chr7:157477710-157477819
  hyper

SEQ ID NO: 116082 - DNA, 16 bp, Homo sapiens
  chr7:157481533-157481549
  hyper
cgtccctcccccctcg

SEQ ID NO: 116083 - DNA, 314 bp, Homo sapiens; identical to SEQ ID NO: 6067
  chr7:157481759-157482073
  hyper

SEQ ID NO: 116084 - DNA, 2285 bp, Homo sapiens
  chr7:157482200-157484485
  hyper
cgggagactctctccggccctaaaaggcaattgtgctgagattttaactctaacttgggggttcgcccgattccctggagcaacgcttctctaaaaccacggagcaggccagtgttcggaactgcacaggtagttacgaaggaaggaaatgaagtccctcgttccaacagcttcgggtccagtcacaagtttctctctggcgagcacgcggccgcctcacctggggtgggggaggcgctgagaaagcgcagttctctttgggggaggagagatggcctctcagaggcgtccccacctgcctctggaacgcctctccctgcaggccccctcggttccctgcaattcgccgcccgctgggatactcccatggctcggaggcgcgctcccggaccctggtgaggagggtgaagagcgccccaaaatgggctgagaggaaaatgcgcccacactggcgcctctccatcctggctgctcgccccttccctcctcctttcccacacgcctcccatctccgtgcctgcacccccccacccccagcaccctgcaatggtcggaactgcagggagtggggagcaacgcgaaaggccgagagaagagcgctggggagaagtcccggaggtcctagactccttggggcggtctctgcggggcgctgggccaggacagctgccaaccctccaaatctgtgcgctcagaaggagctgccctttgcccgctcctcctcacaggcccaccctagacccacttggggatgatcccaggcgcagctctcccctgccggcccaagcctttgacaggagtcctgcggcgaggcagagaccccctgaactgagctctccgacgccctagttgcccgttagagcccccatgcgcgccctccagccttcgaaagctctcttcctcgccccaccacctacgcgcctggtgatgctctcgtgggcccttcctgctccctccgcccccatcccagcctctctcgcctcttccagggcccacccaaccgcactacgagcgcccgcgccccgcccggcacccctggttacctgcagctgggccggcgcccagcgcccgcgcgggaggaggtgggggcgtgcgccgggccgagcggcctcggggcgcagcagctgcgggtagcggcagcgccatcatcacagccagctgcttccctgcgctggagccacagactagcggggtcatccgcttctgaccacaaacttctagggcggccggaggagacaaaggtgccgcgcgtcgctgctccagcagcagcggctgcgcggcggcacgggctcggagcccgcaggcgccggagctctgcgcggccgctcggcccagctccgcgtgctccgccccggcccggcccccgggctaggcacgctgggccggggcgcggcgcgggcgggctcagggcgggctccggacggtcccggtagggccgccggccgcgcgcgtagcaccaaccagcgcggccgccgcgccccgccttatatccggcccggcgcgcacccggccggcggcggcgcggctcgcggcccagccaccggttgctatagcgatgtccccccccccccccacatgttgctgacagcaattggctaaggggccgcggctctccaaacaccctctcccgcccgagactatgaatggacatcagctttgtcagtcattggtacaacgccgaagccagggccttcgccttttctttcttttcagtgtttctccctttcatcgttcatactgggcaagttcagggtagcaccgaggggagagagacctcggccagaaaagtcaaggcgcgcggctctgctgtgacctttgtcctgggaggggtgggtggggtgcgtcgccactcttggcaagagaaaattgcacggcatatcgttcttcccagttaccttttccagtgttgccgttcgggcctttttgctccctttccaaatggaagcaggccaatgattcagggcgagtagacgagagcccctctgctcactttaccagggtcctcccgagtgtttaggtcccgatgcgcgtagaaagtgtcttgcgagacgcggaactggtgagactttgccaccatttggtccaggccaatgtcggccgccagcccaaaacgccgaagggagacggcggtgaaaacccaggcgtgcgagctgcgtccttgcccttccccctacccaggtcaatggtctggcctagaccaccgctctgcgggcgaaaggagtggagcagaatcacaggccacgctcccagtcgttcgagcctgcccacataacccccggcccctg

SEQ ID NO: 116085 - DNA, 1094 bp, Homo sapiens
  chr7:157484507-157485601
  hyper
cgagaagagctagggtctcggggcgactaggaccactgagcacctcccccccgcgcctcccgcccatgctctctctccccaggccctggaccccgggccacagccacaggttggggcaccccggtgcgcggcgcccccgcggagctggcgagagccggagagctgaaacccaacatctgtgtgtacaatgcgctctccgaggcccacagctgcaggaacaaggagaagaaaggaagaggggggcgcagatcttgtcacacgcagatgacagtctgcggagggctctttagtttctccttttctggaaaccccagcggccccctcctaggcccccctctcccaccgcctggccattgttccctgcgcccgggacagctggagacggcggcccgcgccactcgacgcccctcccgccgcacacccggctgcccgcggcgcccgctcccggcccctccggggccaactcctccacaccccccacctccccaggccaggcccaggcggcgcttccacagtctcccctcccctcccttgcactctggcgctgcccctagacctgctcggtgcagagggccttgcctggcgcttttctctcacaaacctagttctgtaaaacctgggggcgagccccagggggcagggctcagaggcgggggttgtccacagatatgagtacggtgccgtccgctgcaggcccctgtctaaaagtggccgaaggaccccgtttcctctgactgcaggcccaggctgagttccgcatttatttttgtatttatagggcaaggccagagcgcttcataaagctccagggcaaagaagtggcctcgcatcgggccatggttcccgcaggcctgagcgggctgcaggaggcccggtgcggctcggcgggggcgcgagaggcgagaaactgcggcgtcactggcgtcctctgcccatgagtgaacccctccagtaggcggggacggggtacatcaccttggccctctcgtcccccctgcccagggcaaggcccgcaaaaacccccgcaccctggctcgggggcggcgcggcggcgggcaggtcagagagaagcggtactcgggttcccccagcgc

SEQ ID NO: 116086 - DNA, 432 bp, Homo sapiens
  chr7:157485649-157486081
  hyper
cggttcctgtccctccccgccaccctcctccggtgcctcggcgtccccagccaggctccagggcgaccccaggcccggccctgggcagagacagaggaggggaggggaggtggcgctggggggcggggggccggagacggcgggaggaggactcgggagccggggcgggaagaggggaagacagcggagagaagggacggggaggggagggggctcggaggaggggacctgctgccctcagcctggctggtaaccggcctctccatagcaacggccagcgcgcgcgtctgtgtgtgcgcgcgtgtctgatgtgtgtgtgcccgtggtgttcccgggactccccgcgggggctgggaggggatcgcagaaccctagggtggcgacagagcaaacccctccaggactggaggcccgacctccgcggtgctggga

SEQ ID NO: 116087 - DNA, 21 bp, Homo sapiens
  chr7:157486204-157486225
  hyper
cggtcgcagggccttggggca

SEQ ID NO: 116088 - DNA, 139 bp, Homo sapiens
  chr7:157486275-157486414
  hyper
cggcgcccccaccatggccctgcccggcccgagcgcccggcgcacctgaggtctgggccggggagcagctggggaaccgcgcgtcgcctcggggagctcccggccaggccggctccgggcagaggccagaggggccctg

SEQ ID NO: 116089 - DNA, 127 bp, Homo sapiens
  chr7:157486475-157486602
  hyper
cgccctggatcgccggagcctcatccaggctggggtctccagcaggcggccgggagctctccgaggtggccaggagtggccggtagccgtctccctcggccaggccgtgtccagcccctcagtctcc

SEQ ID NO: 116090 - DNA, 60 bp, Homo sapiens
  chr7:157486656-157486716
  hyper
cgcagaccctgccgtctgggggtcctggggcggccacggggccggcgaccccagagcaag

SEQ ID NO: 116091 - DNA, 271 bp, Homo sapiens
  chr7:157594762-157595033
  hyper
atgggacttcacttccgtgtgctaagaacgtgtagcgaggcccaccgtgttgacacttccctgagtgtgcagcgtggtactgttggctctcaaccgtacggcagatgtcgagaccgcgttgaggccgcgtcgctgaaaccttgtgcccttggaacggccccttcccgtgcttcccccagcgccagacccggcagcctccatcctcctctcttcttcggtgcgttcaattgtcatagattccacgcttcagcgacgtcgtgcagcctctgtc

SEQ ID NO: 116092 - DNA, 170 bp, Homo sapiens
  chr7:157731889-157732059
  hyper
aagttaagtaaagcacgcaggtccccacctcaatagcgaggtttccagtatccaaattctgaattacaataagataaaataaagcacgcaggtctcctgtctcactagcaaggtttccatcactgagcggccacaggggctggtggctgtcctgcaggacagcacacatg

SEQ ID NO: 116093 - DNA, 463 bp, Homo sapiens
  chr7:158379347-158379810
  hyper
cggcttccactccctcgctgccgtgaagctgccgccctccctttcctcccgcggctgccacggaggaaaaatgtcctctgatttcggcggcgctgcccgcgggggggtgcgggggacgcaggtagaagcgggtgcagcgggacatccgaggcccggcccctcgcggcacacgcggcggaacacgagcggggggcgcacccacgccggaccagggccgcgcgctccagggccaggggagtgccgagtggcggggctcggggcgtgaggcccaggagccggggtagaggcaggaggcggcgccggggaggaaactgaggcaggggcgcgagacctgctccgagcccccagtgaggacagagaggcgcgcgacccgtggccgggggcttgagacccagagcctgggggtgtcgcgctggaaccccgagacccccggagcccccgacccgctcgccaaggcgcgctc

SEQ ID NO: 116094 - DNA, 228 bp, Homo sapiens
  chr7:158380260-158380488
  hyper
gggagctgccggccgcgggggacggacgaaggggcggcaggcaggacgcgtggcggcagcagcagcagtagcagcagcagcagcgggagcggcggccccatccccgcggcctggccggcggcgctcagtccatggccgcgcgggaggcggcgggaggcggccgagtccgggcccagggaggcgcgcgccgccggctcctcccgccgcgcctctcgcgctcttgcggcg

SEQ ID NO: 116095 - DNA, 136 bp, Homo sapiens
  chr7:158380510-158380646
  hyper
cggacagcgcccggccccgccccggccccgcccccggcggcagggccccgcccccggacgcgcgtccgccctcaggccacgcccccggccagccccgctcgccccggccacgccccccgcccgcccggctcccttc

SEQ ID NO: 116096 - DNA, 196 bp, Homo sapiens; identical to SEQ ID NO: 45038
  chr7:158380862-158381058
  hyper

SEQ ID NO: 116097 - DNA, 30 bp, Homo sapiens
  chr7:158497982-158498012
  hyper
ctgtccgggtggtccgcagcctgcacacgg

SEQ ID NO: 116098 - DNA, 30 bp, Homo sapiens
  chr7:158621770-158621800
  hyper
tgcactcacccaggcgggcaggtcgcaggc

SEQ ID NO: 116099 - DNA, 30 bp, Homo sapiens; identical to SEQ ID NO: 45039
  chr7:158649013-158649043
  hyper

SEQ ID NO: 116100 - DNA, 30 bp, Homo sapiens
  chr7:158649312-158649342
  hyper
gctaggcgctgggacgcgcctcccgaaggg

SEQ ID NO: 116101 - DNA, 224 bp, Homo sapiens
  chr7:158769732-158769956
  hyper
cattcttcctagacgcaggacaagagctctggcaaaggcgctgcagccacagaggtttccggccggaaaaatcggcaccccagagatcccatgagaacgtcacgtacagcactgagacggagccctaatgaaaactgtggctctgggtgataatgacgttactgtgggttcatcaactgtagcaaattcgccctctgctgggcgttgttggaaatgcagaggct

SEQ ID NO: 116102 - DNA, 526 bp, Homo sapiens
  chr7:158823223-158823749
  hyper
ctggaaggaggaagccggcgtctcagccccgcagaagccccgaaccgtgggcctcccgccgcgtccgacaggcaggggtggggctagatgaccgaggtctccgtttgcaggaaggactgggcgcgggagccgcggtggaactgcagggcgccctccgagccgttgcgggagaaggaggaaccgcagaccctgtaatcccggctcgcggacggggtcgggcaccggcttcgccattttcgcttcagctcgcactgcacctgggaggtgagggcagcgggaacgcccgtgagcctgggcaggtgcgggcggctgctatgggaagcgcggcccgcgagcctccagctctccctcccgcctgctcccgtatctgtgttgccagcagatggacagaaacagaaacggccttgggggcagaggctggagggagcgggaactggacggccacaggagggcgggggacgctgccagactctaagactgtgcgtgggtggttcggggatcgccactgccgcggtaagcgcagtcc

SEQ ID NO: 116103 - DNA, 597 bp, Homo sapiens
  chr7:158936493-158937090
  hyper
aaagcagcattaaccgtgataaaacccgttactttccaaggacccgctccgcaaagcgcccaccctcgagggaggaaagccgagctgcgcctccgcgcaaggccagggagtgtggctcgagccccgctgcagaccgggcgtcgccggttaatcaatgacactgtcgggtcagcagcgcagcctcccagctgcggaggggccgcggatcgatccagacctgcctcggctgcgacgcgcacgaaaaccgcgcgcaccgcaaacccgcttcagtctccaagaggaaagcaagaaacaaggctcgggtttttttctttcttttttctttcctttttttttaaggttcacagagggaataattcagaactccatgtgcgaaggcacttaatcaacaaacttatgagcagttagttcctccagtgcccttgggaaaaagcaactatttccaaaaggaaactttatttaaccgacgccacgtccccccgacactaaaactaaccagtaagtacagggagggaccgagaggcatctgcggccaacgccaaccccgatctccccgtgaaacgcgcagcccgcgcaggcgcccgcagctcccagctc

SEQ ID NO: 116104 - DNA, 172 bp, Homo sapiens; identical to SEQ ID NO: 45043
  chr7:158937202-158937374
  hyper

SEQ ID NO: 116105 - DNA, 469 bp, Homo sapiens; identical to SEQ ID NO: 45044
  chr7:158937576-158938045
  hyper

SEQ ID NO: 116106 - DNA, 147 bp, Homo sapiens
  chr7:158938146-158938293
  hyper
cgccgtctttgtagccagtggggctaggttggggcatctgaaaatggagaaaatcagagtgctttttggtggggatccccgcagcctcaaagaggacatcaggtcgaacagaaagctggagaaaaacgcagacgggggtataggtgg

SEQ ID NO: 116107 - DNA, 77 bp, Homo sapiens; identical to SEQ ID NO: 45045
  chr8:356767-356844
  hyper

SEQ ID NO: 116108 - DNA, 46 bp, Homo sapiens; identical to SEQ ID NO: 6076
  chr8:494134-494180
  hyper

SEQ ID NO: 116109 - DNA, 10 bp, Homo sapiens
  chr8:494853-494863
  hyper
cgcgggccca

SEQ ID NO: 116110 - DNA, 93 bp, Homo sapiens
  chr8:495071-495164
  hyper
acccacccccaaattcgacggggctccgaatcccatcccccacagaaaggtcaaccccggccccctcctcccagtgtggtccccgccaccgcc

SEQ ID NO: 116111 - DNA, 44 bp, Homo sapiens
  chr8:495478-495522
  hyper
gggcgtggccacgtccgctcgggtcaccaaggcaacggccggga

SEQ ID NO: 116112 - DNA, 242 bp, Homo sapiens
  chr8:495635-495877
  hyper
cggggcctgggcgccgggcatccgggactcatcccctccggcgcccgaggtcgcgggatagtgggggcgccgggaggaagcctcgcccagccctggtgggcggtggggccgctggggcctggggcgccgcgggctcggcccggactgacggcggtggggggcggggatggggccgtggtgccgggccgcgcagaacccttgggacccccgcggcgcccaggttggggctcagggcccggaga

SEQ ID NO: 116113 - DNA, 73 bp, Homo sapiens
  chr8:495952-496025
  hyper
cgcctggttcccaggccgaaaggagccggcgaggcgacccccgatcccgggacggagccgcgggaacggggga

SEQ ID NO: 116114 - DNA, 165 bp, Homo sapiens
  chr8:681197-681362
  hyper
ggtcctgagctgagcgccgtgccttccgggttccgccctcctgggtccgcccacaacagcaggaatgcccaatccgaatacgggaccccgccacgggcggtcagtcaactacatcacggccgtagattggctgatatcgagtctgtaggcgtgtcgcgaggctcc

SEQ ID NO: 116115 - DNA, 75 bp, Homo sapiens; identical to SEQ ID NO: 45049
  chr8:686809-686884
  hyper

SEQ ID NO: 116116 - DNA, 55 bp, Homo sapiens; identical to SEQ ID NO: 45050
  chr8:687162-687217
  hyper

SEQ ID NO: 116117 - DNA, 128 bp, Homo sapiens; identical to SEQ ID NO: 6078
  chr8:687513-687641
  hyper

SEQ ID NO: 116118 - DNA, 138 bp, Homo sapiens; identical to SEQ ID NO: 6079
  chr8:687837-687975
  hyper

SEQ ID NO: 116119 - DNA, 241 bp, Homo sapiens; identical to SEQ ID NO: 45053
  chr8:688498-688739
  hyper

SEQ ID NO: 116120 - DNA, 21 bp, Homo sapiens
  chr8:689295-689316
  hyper
ggtcccagagcctggcggagc

SEQ ID NO: 116121 - DNA, 170 bp, Homo sapiens; identical to SEQ ID NO: 45055
  chr8:798794-798964
  hyper

SEQ ID NO: 116122 - DNA, 30 bp, Homo sapiens; identical to SEQ ID NO: 45056
  chr8:799238-799268
  hyper

SEQ ID NO: 116123 - DNA, 340 bp, Homo sapiens
  chr8:1771703-1772043
  hyper
ttagggtctgcccggcgcaccctccccaaggggcgcagctctgagccgggagcaggctctgcggggaggatccagatgttgggggcggggagggcactcggtctgcccagcgacccctcccgaagtgagcgcggcccggggtccgcggggcaggagatgatccgggggcgggagcctctgccgcgcgccccctcccacgcgtgcgcagcctgggccgggcgttgggcagcgggagggggcgcgggcggccacgtggcctcgaaggaatgcgcgggcgcgagggcagggcgctgccgagaaaccggcaggctctgcggccaatgggcgcccggaacggtct

SEQ ID NO: 116124 - DNA, 297 bp, Homo sapiens
  chr8:1772285-1772582
  hyper
gcgggccccgcggaccgtgggtcccctcgcgggcttctggtttcctttgagagttgcacttctgcccggctcccccgaaatcgctgggtcccacccggaggtggctgcgcccccgaccccctgcgcagatgtttcagggaaggggctgagaccccctccccccgagcagctcccccttccgcggcgcccccggcccctcaggataacggcgcgggcctgggcggggggagcagggactggcagcagggacccctggccccaggggcaggagcgaactccgatcggcggaaggagccc

SEQ ID NO: 116125 - DNA, 30 bp, Homo sapiens
  chr8:1921395-1921425
  hyper
gaacccgtctgcaccgcagggcccgagtgg

SEQ ID NO: 116126 - DNA, 30 bp, Homo sapiens; identical to SEQ ID NO: 45058
  chr8:1921725-1921755
  hyper

SEQ ID NO: 116127 - DNA, 159 bp, Homo sapiens
  chr8:2970508-2970667
  hyper
gtggcatcaaaggcacgtttgcatttccccaagtggtggcgtctcactgagctccgcagagacgggggcctgtgatctgccactgcaggaagtgtgcgtgtctcggcaggaagcgtatcccccctgccttcctttccctgaaggcggggttcaaagtgg

SEQ ID NO: 116128 - DNA, 309 bp, Homo sapiens; identical to SEQ ID NO: 45059
  chr8:4848953-4849262
  hyper

SEQ ID NO: 116129 - DNA, 1026 bp, Homo sapiens; identical to SEQ ID NO: 45060
  chr8:4849296-4850322
  hyper

SEQ ID NO: 116130 - DNA, 154 bp, Homo sapiens; identical to SEQ ID NO: 45061
  chr8:4850418-4850572
  hyper

SEQ ID NO: 116131 - DNA, 498 bp, Homo sapiens; identical to SEQ ID NO: 45062
  chr8:4850993-4851491
  hyper

SEQ ID NO: 116132 - DNA, 241 bp, Homo sapiens; identical to SEQ ID NO: 6084
  chr8:4851508-4851749
  hyper

SEQ ID NO: 116133 - DNA, 895 bp, Homo sapiens; identical to SEQ ID NO: 45064
  chr8:4851780-4852675
  hyper

SEQ ID NO: 116134 - DNA, 44 bp, Homo sapiens; identical to SEQ ID NO: 6086
  chr8:5997931-5997975
  hyper

SEQ ID NO: 116135 - DNA, 30 bp, Homo sapiens
  chr8:6263253-6263283
  hyper
aatctggttgcttccggggcaggggatccg

SEQ ID NO: 116136 - DNA, 30 bp, Homo sapiens
  chr8:6263608-6263638
  hyper
atcagagtcccctccgttgggtctgaggtc

SEQ ID NO: 116137 - DNA, 42 bp, Homo sapiens
  chr8:6264166-6264208
  hyper
tggccggatcccgccgtctgtcatggcggcccccatcctgaa

SEQ ID NO: 116138 - DNA, 30 bp, Homo sapiens
  chr8:6565831-6565861
  hyper
tggaactatggcaacgggcgaccaatcaga

SEQ ID NO: 116139 - DNA, 30 bp, Homo sapiens
  chr8:6566642-6566672
  hyper
ctttccccgcccctcgcctgggtctgatgc

SEQ ID NO: 116140 - DNA, 31 bp, Homo sapiens; identical to SEQ ID NO: 6087
  chr8:6638106-6638137
  hyper

SEQ ID NO: 116141 - DNA, 150 bp, Homo sapiens; identical to SEQ ID NO: 6088
  chr8:6673900-6674050
  hyper

SEQ ID NO: 116142 - DNA, 1538 bp, Homo sapiens; identical to SEQ ID NO: 6089
  chr8:6691843-6693381
  hyper

SEQ ID NO: 116143 - DNA, 30 bp, Homo sapiens; identical to SEQ ID NO: 45069
  chr8:8217417-8217447
  hyper

SEQ ID NO: 116144 - DNA, 31 bp, Homo sapiens; identical to SEQ ID NO: 45070
  chr8:8313040-8313071
  hyper

SEQ ID NO: 116145 - DNA, 72 bp, Homo sapiens
  chr8:8559446-8559518
  hyper
aggcgtggcccagccgcccggctgcaaggtggggtgtccccgccgctcggatccccatctcacctgccgcgg

SEQ ID NO: 116146 - DNA, 109 bp, Homo sapiens
  chr8:8559542-8559651
  hyper
cgctcacctcgggtccctccctcccgggccaggtttggccgcggcagccgcccctgggcgcccgcgcccggacccgcggtttcggtcagacccgcccgcgggctggttt

SEQ ID NO: 116147 - DNA, 216 bp, Homo sapiens; identical to SEQ ID NO: 45071
  chr8:8639884-8640100
  hyper

SEQ ID NO: 116148 - DNA, 376 bp, Homo sapiens; identical to SEQ ID NO: 45072
  chr8:8750283-8750659
  hyper

SEQ ID NO: 116149 - DNA, 463 bp, Homo sapiens
  chr8:8820809-8821272
  hyper
ttggaaaggaaccaggcgggctgaggaactggcgcgccctcgtccgcccacaagtccttggaaagcgcaggcctcgtgcgctctccagcgcccttccagggcgcaagggcaggacaggtacatcccgcgtgctgcggtggcgatcagcgcggacacggagcctggctccacccgtccgcccagccttggggttctgccagagcgccgggcgcagagcaagcgggtctgagctccagcacctttggcagctcccggccccggggtgcgaacggcggccgtggctcaccgcttcaggagcaggcgaccaggacactaggaagagaagcccggaccagggctagtttgtttccccaactcctctggccagctcaggttcttaaacccgccgtgcaacagacgcaggtaccggctcagaaagctcagtcagtggtgcaggaagcctgggtcgcggtgcatcgtgttt

SEQ ID NO: 116150 - DNA, 30 bp, Homo sapiens
  chr8:8860186-8860216
  hyper
tcaggaaacactgacgggaacacacgtgcc

SEQ ID NO: 116151 - DNA, 30 bp, Homo sapiens; identical to SEQ ID NO: 45075
  chr8:8860450-8860480
  hyper

SEQ ID NO: 116152 - DNA, 30 bp, Homo sapiens; identical to SEQ ID NO: 6092
  chr8:9007918-9007948
  hyper

SEQ ID NO: 116153 - DNA, 267 bp, Homo sapiens
  chr8:9756016-9756283
  hyper
gatgtatgggcggggcgtcctaatggggaatccaggaggatgcactgagacggaccccccactccagcaaataaaacccaacccccaagcgctttcgcggcggggtcctcttcccaggctgcacctgccagcccctctttcttgcaagttctgaggctttccgggatgcacggtggggtcctcgaggccgcaggtactgaagtggatcagagagaggcccggagccgcactgcgggcgccgggcgcacaggctgaccggctgcacgg

SEQ ID NO: 116154 - DNA, 62 bp, Homo sapiens
  chr8:9756486-9756548
  hyper
cgctagagtgaaatcgatgtgcatggaaaatggaaaaatgacctctccggggacagtccctg

SEQ ID NO: 116155 - DNA, 30 bp, Homo sapiens
  chr8:9756894-9756924
  hyper
ccctgggcgcggtcccggccgacggggccc

SEQ ID NO: 116156 - DNA, 30 bp, Homo sapiens
  chr8:9760237-9760267
  hyper
ccacgctttcaactccgatagagcttgtga

SEQ ID NO: 116157 - DNA, 1245 bp, Homo sapiens
  chr8:9760513-9761758
  hyper
caaaaacacagtcacggaggaaggtgttgacccacatacaatgagtcctgagcccagagaaaaatctgcacacacaagcactccgcaatgcgctcccaggcgaccccctccccacgcacaccgcatctgtgctgcacagatctgcttctgtcacagaatcagcttctgtttctctccctgagtctgtttgcatctctaagcccctgtctgtcacaggctgcacacctccccaccccacgggctccggtgcgggacaggcagccggagggagctccagacccctcccctcgcgcccgcggccgctgcgcggaggtctgcggagggcgcctggctcggtcggtcgctccttccttggcgggccctcgccgacccacggtgctcagccagccccattcttggcattcaccgcgtgccttaattgtatggacatttaaatcaaggtccgctgtgaacacggagagagaggcctttctcctgaggaaggaaaggaggaaggaaggaaggaaaggtgaaagaaaggaagaggggtgggtagaagatggaataagaaaaccaggaaaaagaaataaaaagcggcgcgtgtgcgtgcgcactgacagcggggagagggatgggggtggggaacgccggaggaagggaccacagcatcctccccgccgcagctcccccaatcacacagacaatgagataacagcgacgtcttccaaaggctctttgttctcccccatcctttcgcatccaggctttttcctgcaaagcggagggggtggagggatgggggtgtgggtggaagtgggagacggaggggtgcctcccccgtgttaattaccccggctcccctcgcccctttccccgcgcctcgcctcccctgcagctccagacaatgaaaaaacaacatcgaccccacctcgccccagcgcagcaacccacccacccatgtcgccctctgcttcgcccaggaaactgaaggggactaggaggaggaagaagagagcgaaggacaaggagagcagcggggactcggcagcggcagccggggcagggcgcgcggccgccgcctctttacctccatcgctgagtgggggcgcagccgggccgggcgtgccgcaggggcgagttgccgcggtccggggctgggacctggggattcagccttccggaactcgcctgctgcagtcctctcgctcaggtcccaagtggtggaggggggaaaggaagagagacgagagagagagagacagagag

SEQ ID NO: 116158 - DNA, 73 bp, Homo sapiens; identical to SEQ ID NO: 45078
  chr8:9762042-9762115
  hyper

SEQ ID NO: 116159 - DNA, 30 bp, Homo sapiens
  chr8:9762659-9762689
  hyper
tccgaataccctcagcgttccgcacgccgg

SEQ ID NO: 116160 - DNA, 1010 bp, Homo sapiens
  chr8:9762751-9763761
  hyper
cgccgaacccaaggtgctttgtcccggcggccacacaaggtcttcggctttttgttctccttttttaagagactggccgcagtccccagcgattcagccggcccaaccaaaggcagtggatctactgaaatgaaaaggatcgagataatacacaggcagatgaataaggggggggatgctggaggtgcaggaagcatcctgggagcggccgccacggccaagcccgaactgcttgctgccttcgctggggaaggcgcaggaggcgagccggcgctggtggtcgctccacctggcaggaggaaatgataaccatgataaggaacgtgatgatgatgatgatgatgatgatgatgatgatgagcatgatttaaaaaaaatcagtctccctcttggtgaaccagagcatgcgtgccggagggactgcactgctggcggcggcggccgggggaaggagagcggcgcaggaggcaaaggttgaggaggcagcaccctcggatgaataataacaccgcgccgcgcaagttgcggagccgcctggaaatccagcccttcgcgtgaactcgcgtcgagcgcggattgcaggggatgaggaagaagggggaggggaggggagggtggaggagggagggggaggggtagaggggaaggcagagagggacagagagaattgggagccttttaatttttccttaccaagccctaatctcgtgcgccgtcctctttggctgaggtcgagctcctttttaaaaattattactcctttaaaggattattcaggtaaaggaagccgcatctgctgacggttccgaaaacaagaggattaggagcccgtccacagatccaggcccgcagacccccaccccctctgcaccagcacacgtcattctcactgcccccgggtacctccctctccttcgtgctcggggagagctgtgccaaggaaaatgcggatttggggaaagtgagaagtgggagagctcggaagagcgggaaagccaaggccggaggtg

SEQ ID NO: 116161 - DNA, 262 bp, Homo sapiens; identical to SEQ ID NO: 6095
  chr8:9763787-9764049
  hyper

SEQ ID NO: 116162 - DNA, 551 bp, Homo sapiens; identical to SEQ ID NO: 45083
  chr8:9764195-9764746
  hyper

SEQ ID NO: 116163 - DNA, 30 bp, Homo sapiens
  chr8:9764965-9764995
  hyper
gcaggagtggctgcacgaagggtgacccgg

SEQ ID NO: 116164 - DNA, 30 bp, Homo sapiens; identical to SEQ ID NO: 6096
  chr8:9912494-9912524
  hyper

SEQ ID NO: 116165 - DNA, 186 bp, Homo sapiens; identical to SEQ ID NO: 45085
  chr8:10058671-10058857
  hyper

SEQ ID NO: 116166 - DNA, 30 bp, Homo sapiens
  chr8:10421764-10421794
  hyper
gaggagctgcctctccggaggaagggaggg

SEQ ID NO: 116167 - DNA, 218 bp, Homo sapiens
  chr8:10447759-10447977
  hyper
cagattatcctgggcgcacaaagccctgtcgtatccgcacttgccagcagagggcgacacacagccgcctgcagggacagagctggagaaggctccaaggatctgtcccggaccagcggggccaccaggcggctttccctactgcacccacgccccctgacaaagtggccccatctaagacgacagcagaggttcctgggcccgaacatctgagccag

SEQ ID NO: 116168 - DNA, 15 bp, Homo sapiens
  chr8:10586922-10586937
  hyper
cgacaccggagaaaa

SEQ ID NO: 116169 - DNA, 391 bp, Homo sapiens
  chr8:10587211-10587602
  hyper
ctcttcgggaatattcgttaattataatttcatctgtgacagccttcctctgagatggcccaattgtaaggtccagggaatgctggcttttcccgcttcggtattcctagtaaacgcctgttccacccagcctcaaacgtttccgtccctgccctgtccatgcacgccggtccctgtcgccaggcgtcctggcctggccgctgccccgtctccccgccccctggggcgccgatctccgctcctgtcccagcagaggagcctccctgcccgccgcgcggtttcactttggaccgcgccaagtgcccccgctctgaatcctgggcaccgcgagcacccacgctcgcgcagatggccagccacgcgggcacgaagagggccctcgtcccgcgtg

SEQ ID NO: 116170 - DNA, 114 bp, Homo sapiens; identical to SEQ ID NO: 45087
  chr8:10587893-10588007
  hyper

SEQ ID NO: 116171 - DNA, 108 bp, Homo sapiens
  chr8:10588184-10588292
  hyper
cggagggagggagtgagggagggcctcctccccgcgcctgcccccggcccgcccctccgccgccagggcccgcccggggatctgcgcccggctgccccgggccgcctc

SEQ ID NO: 116172 - DNA, 30 bp, Homo sapiens
  chr8:10683029-10683059
  hyper
ctgaagacaacaaccgcatgcacaaatgat

SEQ ID NO: 116173 - DNA, 30 bp, Homo sapiens; identical to SEQ ID NO: 45088
  chr8:10697350-10697380
  hyper

SEQ ID NO: 116174 - DNA, 30 bp, Homo sapiens; identical to SEQ ID NO: 45089
  chr8:10847825-10847855
  hyper

SEQ ID NO: 116175 - DNA, 55 bp, Homo sapiens
  chr8:10872633-10872688
  hyper
ggcgcctctgatcgcgtgatatgggtgccctgcatctggccgtgttcactcggga

SEQ ID NO: 116176 - DNA, 1160 bp, Homo sapiens; identical to SEQ ID NO: 45091
  chr8:10873135-10874295
  hyper

SEQ ID NO: 116177 - DNA, 31 bp, Homo sapiens; identical to SEQ ID NO: 6099
  chr8:10898619-10898650
  hyper

SEQ ID NO: 116178 - DNA, 359 bp, Homo sapiens
  chr8:10916679-10917038
  hyper
tttcgagggctcccgcggtttgggcgctctgcccctgcgctccccaagctgcgaccccctgcgctggccagcgtcgtgtaggccgggcccagcgcggtcctggcgcctcagaaatctttgttgagcgaatgaatgaaggaacgaatgacggaagtaaaaggtatgagcgccccggagactctggcttgcgttttccctctccagcccccagcgaactggagccgggctggcgcccgaagggagtccccggccgagggcagcgctcagctccgcgtccccgcgccggcgccgagaaggaggccccgcccgacaggcagctgcggagccatctgctgcgcgggcggcgccgctccagtgtt

SEQ ID NO: 116179 - DNA, 30 bp, Homo sapiens
  chr8:10917245-10917275
  hyper
ccggaccccgccccgcggctccctctcacc

SEQ ID NO: 116180 - DNA, 192 bp, Homo sapiens; identical to SEQ ID NO: 6100
  chr8:10950048-10950240
  hyper

SEQ ID NO: 116181 - DNA, 43 bp, Homo sapiens
  chr8:11058123-11058166
  hyper
tgccagatccacacggagaggcgacacaggcgctgcgcccccg

SEQ ID NO: 116182 - DNA, 976 bp, Homo sapiens
  chr8:11058198-11059174
  hyper
cgggccgcgccgtggacgtagccggcccccatcatgggggggccccggctggtgagcccctccacggcgcccagcccgccgcccgtgtagtcctgcacgaaccagcggaagctcaggctctgcaccagcagcgacggcaccagcacgaagaagagggtcagcccgaagtagacgtagtcccccttgcggtagtagtcgagggccagccacaggtcggtgcccacgtccccgaagaacaccagcagcgccagcacgatccacaggcagtcgagccacggccgctccacctgcggcggcggcggctccggccgcgcggccgagggcgtcgggggttggcggccggcgccgggggccgcgggaggctgcagcggctggtcccccccgtcggcggcggcgctgcggcgcggcttcctgcccaggagggagcgcaggcaggcggagcggcagccccagtagcacgaggaggtgttgcagcagtggcagatgtgcatcgagctgctctcgccgggctcgctgccgtcgccgccgccgccgcagccgcctcccccgggctccccgtcctcctcgccgccgctgcccaccgcctcgtccaggttgtgcagctgagcgaagcccacccccacgccaccgccatcggatttcgccgccatcttgactctcttcccagctccggaggttgggggggagggacggcggggggggggggaagaaggcagggaacggggagggggggaaacgaatggagaggaaggggggcggggaggaagcgggggagcaaacgaacgaggggggagtgggccagggaaccccctccgcttccgggtagttggcgtcacttccgggcgagccccccaatcgcacggcgcccgcagctccccagccctaccctcccggccaagatggccgccctcctgtgcctcagctgctgggcgggggaccggggggttctccccgccagggctccccttcccctctt

SEQ ID NO: 116183 - DNA, 172 bp, Homo sapiens; identical to SEQ ID NO: 45097
  chr8:11059210-11059382
  hyper

SEQ ID NO: 116184 - DNA, 896 bp, Homo sapiens
  chr8:11204525-11205421
  hyper
cttcttaagctactgcgcgcaccggcgtcccgctgggggcgcgcgagccccacccccagagatgctgactcagcaagtcgggaggggttgggggtgggacctgccaatctgcatttccaaccggcgcccaggtgacgctgactctgctggtctaccgtcttgggggtcacctaatttttcagcgatgcctcccagctggggaggccaagaagtgcctcgctcaaggtcttccaacacccgacctccagaccctcaatcctgggccagctacaccgcaaacctttccagctgtctctcctgcgccctgcgtttcttccccacgtcacttgccagggagccgctaaacagcaagaccgcgcgctctgcggctccagagtgcggatttcggtcgcgtgcggctctgaccgcgtcgccccatccctggcggggccacgcacggacgccatggctggcgccgcggagccgggcgatgcgcgcggactctcccggggccctgactgtccctgagtcctccctgcggggggcgtgcgcggcccgccccccgcggcgccacgcggcccctcctcggccggggattggtgcgccgggcggggcggggcggggcgggataaaggcgcggggtctggctgcgcggggtctgcgggcagctccaactctgggttcgtagtttgcgctgggtgcgcaggaaggtcagtgtgggggtcgcccgacatttcccccccgcggaggtgggagccgagccacatcttggagtggggactggccgcggagcgggttgcccagggccggccgaggtcggggcgagccctgcgcggcgctggagactctgcattcccgggcgcgcgcagggtccccggccgtggtcgcagagtcaggaggggcggctccggagcccg

SEQ ID NO: 116185 - DNA, 264 bp, Homo sapiens; identical to SEQ ID NO: 45099
  chr8:11205445-11205709
  hyper

SEQ ID NO: 116186 - DNA, 199 bp, Homo sapiens
  chr8:11205993-11206192
  hyper
aggcaagaagccaggcgcacacagctaggcgggccgcgggccgcgaccccctggctggtccgtgctctccccctggggaggggtgcaggctgccaggaaaggtgccccctgcgtggccctgggggtgtttcttcctctttgtctcttcttaggcatctgatctcatctcttaagtgggaagagtcggggtggtggaagt

SEQ ID NO: 116187 - DNA, 30 bp, Homo sapiens; identical to SEQ ID NO: 6104
  chr8:11324802-11324832
  hyper

SEQ ID NO: 116188 - DNA, 393 bp, Homo sapiens; identical to SEQ ID NO: 6105
  chr8:11536630-11537023
  hyper

SEQ ID NO: 116189 - DNA, 432 bp, Homo sapiens
  chr8:11537156-11537588
  hyper
cgcggccttaaaagtatcccggcgagccctgagtgggccgggtgctgggcgaacagtcctagccctgcactgaggttggaaaagcgaacggaaagtgacatttttacaggggcgaggttgggatcgggagggagatggagacccccgaataatggaaacgcagaagcctcagagacaccagcaacagatagagaagtgtccctaagaggggaaaatgaggaagagggtaacagtattgttaactggccatgaattttaatccctgttgtgtgtcgccgaatagtttacaaactctttttgcactggggttttgtttctcccactccccgcatgatgagaagaaagaaagattgggagaagttaatcagctcaaagtcacatcgccggggtctcctgccagggggcttggaccagttgctaaaggacttcccg

SEQ ID NO: 116190 - DNA, 70 bp, Homo sapiens
  chr8:11538169-11538239
  hyper
cgccctttgcgtcagagaccccccccttggggagaccggaatcctccagccgctgcgcacggataccctg

SEQ ID NO: 116191 - DNA, 30 bp, Homo sapiens
  chr8:11538951-11538981
  hyper
gcagacgccggaatccggggcccggtcccc

SEQ ID NO: 116192 - DNA, 147 bp, Homo sapiens
  chr8:11539329-11539476
  hyper
ggccgtgggcagacccggctgatgtaaggactgcagcttttccctggcatactctgcgccttcagatgtggtctgcgtctgcctgggtctcttcccacctcaatctgagatccttgcccctcacaataaattcgtttttattcattc

SEQ ID NO: 116193 - DNA, 30 bp, Homo sapiens
  chr8:11539723-11539753
  hyper
cttttaaaacggtgtcggatggcttctcct

SEQ ID NO: 116194 - DNA, 474 bp, Homo sapiens; identical to SEQ ID NO: 45104
  chr8:11540255-11540729
  hyper

SEQ ID NO: 116195 - DNA, 278 bp, Homo sapiens
  chr8:11540851-11541129
  hyper
cgtattatgcttgctgatgccggtaaatagtaattctacccattgtgactgttaggaagtagcagaatccttttgggttggaggtatcgttttttttcttttaagaagttcaatgagctttacattgtctcattcaaactcacccatcaaggggcgcggttcgattccaactttcaccgtattccttgagactaggtagactaaatccatccccccattctttcattcattcattcggcaaacatttaccaagctttcctctgcgctgggcgttatgc

SEQ ID NO: 116196 - DNA, 688 bp, Homo sapiens
  chr8:11550050-11550738
  hyper
ttgaatctgatccttcgggccgcggcggctccgcctgggagggcgtggcccccgcgctggggcgggaaccggcttctggggacccgcggcctctgcgcctcagccgacctccaccgcgggtgcgtgcgggggtgcgggggtgaggggtgcggggctgctccgtcgggaggctgggagggagagcaggcgccgggacccacgcgagggcgcggacggacggggggcgggaagcgaggctgccgaggggaggaagcggggccggcgcagcgggcgccaggccgggcagaggcgggggcggccggccgggggctgaccccgagcgccgccgagtttgcgccgcccgccgccccgcgctcgcctccagccgcctggggttccgcggcggccgtcagcgcgcacctcatcaataaggcctgccaggcgccggccccgcggccatccatcacccgggctgcacccccggccgcgcaccgaggcttctgccagcgcctgcggggcctctgcgtggagtgggccggcagcgtttttctacccggcaacaaatacatggctttattccacttcttaatcccagtgtctgttaacgatgtggtgttcatttgttcctaaagagctgtaaggaagcttagaaatgattcggcaagctgggcgcggtggcgcatatttgtaatcccagcacttagtgagg

SEQ ID NO: 116197 - DNA, 456 bp, Homo sapiens; identical to SEQ ID NO: 45107
  chr8:11554710-11555166
  hyper

SEQ ID NO: 116198 - DNA, 210 bp, Homo sapiens; identical to SEQ ID NO: 6109
  chr8:11555473-11555683
  hyper

SEQ ID NO: 116199 - DNA, 290 bp, Homo sapiens
  chr8:11557847-11558137
  hyper
cctctcgtctgtaaccggctgcagagcacggttccgggcgaacagggcggaggctctacgtccactccgtatccccaagaaagagtgtccgaggcacggaccatagcaagtgaaggaaggtaggtcgacgtggccttgcagctgaattcgttctccatttttccttcagcagggacgcatcctgctctgcaccctggttctcggcgctgcgcccgcggaggctcgtgcagggcaggctgcccgtgcgggtgaggactgagtgccgcgcagggaaggagtatcgcagaccg

SEQ ID NO: 116200 - DNA, 37 bp, Homo sapiens; identical to SEQ ID NO: 45110
  chr8:11559706-11559743
  hyper

SEQ ID NO: 116201 - DNA, 785 bp, Homo sapiens
  chr8:11560081-11560866
  hyper
gcttttccgcagcgccggcctccgagatccccagcaccccttcagccttaagttcccacgtttcgggtccgtggcgccaattctgctaagtagcaggctaggaattgggggaagtcggagaagaaaccctaagtgtgtcgcccccagcttccgggatgcaggcccgccggggtctagaggggcggctgccgtgcgtccagcctgtgcgcaggcctttcgccgctcggcgccccaggcagcctcagtttcctttcctctgtttgcgccccagtgaacctccgcacctctcattcagggaagagaattccccgcgcagccgcgctcgtttcttcctctgggattttcctgagaatccccaggagttggccacgatcccatggggggtttccttctacccagccccgcgtcctggcctcgtccttaacccccgggttgccttcactcaggctgggaatccacgattgatttcctactacggaagcgggtggcgttcccagcctgctttcggagcagcacgggtttcgtgcagggtgttatcccgaccccttcccccatccctctaatctggcttgagaagcccgtgctggagagaaaaacgcggccttaaaaaaaaaaaaaagtttaaccgaaagcgtgagagccacccgccggctgttatctggggctgaaggctgcggtaatcgatgggttatttttacgcggtaatagggccctgtgattgctctattaacctttagacctgtctgagggactctccggctcgcagccccgctgcgctggggcct

SEQ ID NO: 116202 - DNA, 928 bp, Homo sapiens; identical to SEQ ID NO: 45112
  chr8:11561267-11562195
  hyper

SEQ ID NO: 116203 - DNA, 828 bp, Homo sapiens; identical to SEQ ID NO: 45113
  chr8:11562235-11563063
  hyper

SEQ ID NO: 116204 - DNA, 23 bp, Homo sapiens
  chr8:11627472-11627495
  hyper
cgcaccccgaggcagagttggga

SEQ ID NO: 116205 - DNA, 30 bp, Homo sapiens
  chr8:11659817-11659847
  hyper
gccggacacgtgggcgacttattgaccaag

SEQ ID NO: 116206 - DNA, 96 bp, Homo sapiens; identical to SEQ ID NO: 6114
  chr8:11665927-11666023
  hyper

SEQ ID NO: 116207 - DNA, 30 bp, Homo sapiens
  chr8:11725477-11725507
  hyper
cgctgcggtggccccgggtccccagcactc

SEQ ID NO: 116208 - DNA, 270 bp, Homo sapiens
  chr8:11726003-11726273
  hyper
ctgcctgccgagttggcgggggtggggtggtggagagggcgccgtcgcttatttcattcattcagaagccgctgcagaggctgggggtggcgaggctgtggaccccacagaacagcctttagaagggccactttgttgttcagagaacgtacccacaaaacactacagctacgtacaaatagaaaagagtggctgtcactgcgaaggaacctaggagctgcgtcaggatttctaagaggagaaggaccttgggggcggaaatcggtttgg

SEQ ID NO: 116209 - DNA, 30 bp, Homo sapiens
  chr8:11771107-11771137
  hyper
cttttcacctcaggccggctcatcagtgcc

SEQ ID NO: 116210 - DNA, 153 bp, Homo sapiens
  chr8:11801272-11801425
  hyper
agggaatcccaaactcgctgctgagaacagaacagctgtgccctcgccgactgggacccgagtgacatctactggagcaagcaggggctgcacgtgagcaggcagccattcggtcactccccgtcattccaacacaatcgaatttgtgtagaa

SEQ ID NO: 116211 - DNA, 30 bp, Homo sapiens
  chr8:12613546-12613576
  hyper
tgggagcgcaccttcggcagatgactggga

SEQ ID NO: 116212 - DNA, 30 bp, Homo sapiens
  chr8:12615469-12615499
  hyper
atttgtattctgtttcggtttttgagtgtt

SEQ ID NO: 116213 - DNA, 217 bp, Homo sapiens
  chr8:12808843-12809060
  hyper
ttaagtgagaagagccgcgctaaagccaagcgtcgtcgtcacccaaggtactgcgctgatgcgctgcgggccgaccaggtgctcccgccggggcgtcttctcctacgcaggaagggccacgccgagagaggcaggcaacaagggcacggctggaggccggaaggtcaccccgtccccggcggggcgggcgcggcccagcctcacttcccgggcacgt

SEQ ID NO: 116214 - DNA, 397 bp, Homo sapiens; identical to SEQ ID NO: 45116
  chr8:12809462-12809859
  hyper

SEQ ID NO: 116215 - DNA, 2079 bp, Homo sapiens
  chr8:12989415-12991494
  hyper
acgcagcaaactacacgcagcagggtgctgcagagaggaggggtgcacctccttcggagggatcaaaggctcgccccaggactctggaggtggggacagcgacatggagtgggggcaggcttccaagaagctgtcgccttgttacgaaaatagtcgggtcgggaggcgagcttccttcctctctccggcccaggaactcgctcctcggcctccttgtccgggtcaagggggtgggcatccccaagggggcatttcagggacacgattcagcgacccatctccgggaaaaaaaccaaaactgtgtgtgtgtgtgtgtgtgtgtgtgtgtgtgtgtgtttcctagcaagaagcacgtttgcaagccacggggcttgctaaactaccccaacactctccaggtacctgcggccaccaaaccgagacttccctggccaggtctgagttaattcccagcgcttaaagtatcttacccaaaaatggttgaaaaggaaaacaagtttttggtgaactttcaggcagtgatgaaaaaaaaaaatttccaagcgccactagggtctaaaatgttcccaaacagtaaactctcccggagttcactttgattttggactaagctggtgaatgacaggagatcagtacgagcgcagagcagtccccagaggaaaggaaggtagaaggcggtgtcgccgcgcccctcgagccagagccgcgagcccccgcccggctcaaggaggaaagtgaaccagggcttcccttcacgggttgcgaccgatccggagcccgcctggtgcgctggcccgcggtccccaggcaaaaggtaatcaagagtcactcctccaaaattcaaactccctccccaaactgcgagtcctgctatccccacaccacctccaagaaaatccggagactctgcagaaagcgtttaaagagcacagaacaggcaccgacttgacaaggcggggtgacactttctcgcggcgggtcccctccgcagcccgctcccgcggccagcccgacggcaagacgcaagtctagcttacgtgttaggatcatggtgtccggcttctttctgcacatcaagcacggcaggcggcggcggaagcgctgtggggaagtcgaggcaggcggaggcggctcggcttccgcgtcgggacccacggcggcacccgagacgcgcgccctcgcggtcctcaacgcatccttgctcgccgctccctgcccctcgtcacggccccagaaagaaagcggggttttctaaagatcgaaacgagggagcgctcagggagttgggcgagaagtccgtgagccggcgctcctgatgcggagaggtgcggccatgtcctggctgggagcgaagcgccctcgctcgggcagtcggagcgaactgtctcccgcgcgctccgccagccgggccctcccgctgggcccaccccccgaggggcggggccagagcgggcggcaccgcctcctccccgctgtctgggtcgcaggccttagcgacgggctgttctccggccccgccccattcccaggctccgccccccgcccctcttcctcgtggccgcagcctcaggccgccctctagccccgccccgcccaggccccgcctctcctctgtcccgccccctcggttccctcctcccccccgccccgccccgcgcctcctccgccgaaggctggaatgtttcccccacgggcctccacgttcccagcgggaagcgccgaaaagtcgccaactattggccccgggtgcaaaggcaaaggtcacaaggcatttacttggcggaggtgtccggcctggaccctagtgtgccttgagcgtcccttctttttcttggtagctctgcgtactttttacctgtcttttatcctggcgggaaccacgtaaatttgcgggaacggaggggaagcggagaggaagggatggtcagtgtttccagatctgtaaaaacgagcgaagggtacctgtcccttggacattggttatttattgctaaaacccgcatgggtacggagccaatgtaggtgataaatactgccttagaggaattgagctttcactcggcacgtgctgggggtcac

SEQ ID NO: 116216 - DNA, 509 bp, Homo sapiens; identical to SEQ ID NO: 45119
  chr8:13133801-13134310
  hyper

SEQ ID NO: 116217 - DNA, 44 bp, Homo sapiens; identical to SEQ ID NO: 45120
  chr8:13424065-13424109
  hyper

SEQ ID NO: 116218 - DNA, 30 bp, Homo sapiens
  chr8:13424404-13424434
  hyper
ttgagatccattcccggaggggtcagctcc

SEQ ID NO: 116219 - DNA, 30 bp, Homo sapiens; identical to SEQ ID NO: 6119
  chr8:13624575-13624605
  hyper

SEQ ID NO: 116220 - DNA, 200 bp, Homo sapiens; identical to SEQ ID NO: 6120
  chr8:15094366-15094566
  hyper

SEQ ID NO: 116221 - DNA, 438 bp, Homo sapiens; identical to SEQ ID NO: 6121
  chr8:15094645-15095083
  hyper

SEQ ID NO: 116222 - DNA, 252 bp, Homo sapiens; identical to SEQ ID NO: 6122
  chr8:15095136-15095388
  hyper

SEQ ID NO: 116223 - DNA, 31 bp, Homo sapiens
  chr8:15095898-15095929
  hyper
ccaggtgactgacttcgcttctctcttccca

SEQ ID NO: 116224 - DNA, 4 bp, Homo sapiens
  chr8:15397655-15397659
  hyper
agct

SEQ ID NO: 116225 - DNA, 357 bp, Homo sapiens
  chr8:15397991-15398348
  hyper
ggtacctgcccaccgggagctttcccttccttctcctgctgctgctgctctgcatccagctcgggggaggacagaagaaaaaggaggtagaatggatccccttggccttcccctgtgggcgggggcgggccagggtgggccgcgttgccaggcagccctgccgtgttgctaggcagcctggtcgccggcgtgggcgatgccggcgctggggcgggagccgcgagggtgggaggccctggggcgtttccgggacgtggagttagcagggttctgacttgaaaaacgacggcaaagcgtgttcttgactgcttctgagcacctcacacctttcagacccagggcgcctttattcccagc

SEQ ID NO: 116226 - DNA, 30 bp, Homo sapiens; identical to SEQ ID NO: 45127
  chr8:16859436-16859466
  hyper

SEQ ID NO: 116227 - DNA, 1202 bp, Homo sapiens; identical to SEQ ID NO: 45128
  chr8:16884157-16885359
  hyper

SEQ ID NO: 116228 - DNA, 30 bp, Homo sapiens
  chr8:17013029-17013059
  hyper
cctgtggatcaggtgcgttcataatcagat

SEQ ID NO: 116229 - DNA, 129 bp, Homo sapiens; identical to SEQ ID NO: 6126
  chr8:17013472-17013601
  hyper

SEQ ID NO: 116230 - DNA, 30 bp, Homo sapiens
  chr8:17014774-17014804
  hyper
gctggccttggcggcggagctggatccctt

SEQ ID NO: 116231 - DNA, 30 bp, Homo sapiens
  chr8:17104050-17104080
  hyper
caggctccttcctccgccagccgcactcca

SEQ ID NO: 116232 - DNA, 30 bp, Homo sapiens
  chr8:17104458-17104488
  hyper
ggtggagcgctgggcggccaggctccctgg

SEQ ID NO: 116233 - DNA, 914 bp, Homo sapiens; identical to SEQ ID NO: 45130
  chr8:17354230-17355144
  hyper

SEQ ID NO: 116234 - DNA, 400 bp, Homo sapiens
  chr8:17434526-17434926
  hyper
gggaagaagtgctgcgcaccgcggctccgccagggggcaggagaagtcacattacacagagaactaaaaaaaaaaaaaattccccaactttttcccccaaaccttgttcctcctgaagaaaccgaatcctcccgcttcggcgtcccaggagcccgcccctcgcccgccgcctcccctgcgtccccgccccgcgcagccgccgcgctcctgcgctccgaggtccgaggttcccgagatgaaggtctggctgctgcttggtcttctgctggtgcacgaagcgctggaggatggtgagtgactctgggcgcggggccacctagcttgtgccctgactttagccgggacccgaagcccccgccgccctcctgccagctcttggtctaacgttcggccctcggtg

SEQ ID NO: 116235 - DNA, 1492 bp, Homo sapiens
  chr8:17657927-17659419
  hyper
agtatgtgtaactacgcaggctaaatgaattaacctcttccttcctagtcccaaattactccaagtcaaaaatcaacaaacaacttggtagaaaggagtacgtcttcaaaaaagaacaaaaacgttcctcagtgaacacctaagtccactaagcactatagagtagtcaataaggtcaccttaattaagatgagatttttctagagcgtgaaaaagtgcaaacaagctgcagaaagtagcgaggcgccacgaggggtctttgggacctgcagcaaccctattccacccgctttctcggccccgcttgcttctgctgagaaggggccctgcgagaaggctgggaccgccgggcccgggtgggcggcgtaaggagtccacagtcaagcccctcggtcactttcaaggtgacagcgacgagatccgcatccgtcccttccgcaggctctgcgctggcccacgtgagacccgcctccgctccgccggcgctgccgccccctttagccctcagcttcggcccccaggcccctggaacgccccctcccctccccgaggaccggtcccgtcaccctgggcggcgcgctcgcctgtcccctccccaccccggccgccgggcagcgggaacagattccagcgcgcacttacccgcagctccttcaagcgctccgggagcaaagacgcagaggcggggagggctggcgccctttgcaccactggcggggtcgccgagaacccgccccggaggtctcgggggcggcgtctgcacctgggggcgcgcggcgcggcaccaccccacgcctgcggcggctaccaggcgggacccggagccccggcctccccgcctccccgcctccggggccgccagggggtggagcagggcggggagttcgggaaacttgtaaatagccgaactcgggcctcccgccccaacccggggcggctccttccgaaggctccactccagcggctcgctgcgggagaccaaggccagccgccgtcccaggggacggccctcggggaacctgaatgacgtgcgaggccgtacctcggggcgctggactccgctcgggcgctcccgctctccgctcccgctctcgggtcccaatcccgacgctccgcgcgctcccggactaagtgcggacgcgccccacgccccccggcgccagcccgggacagcgctgcacctgttgccacgtgcgacgcggcgctcagcggctgccactgccgccggcgcacctggctgcaccgcgcgtcccgggaccacgctcgtccccgcaggagcccggggctccgccgcacccagcgctagggcccaggccgggccgcggtaggtgggggatctgactcctgcttgcctctggccacctgcaggccgaggggcctcgcaccgcggggcgtatagaaggtgggaaggttgcagaattatcagggcggaagcttgcaaggaaggagtcgtgattgtctcttagaagggctgattcgcagtctgtattat

SEQ ID NO: 116236 - DNA, 92 bp, Homo sapiens
  chr8:17780091-17780183
  hyper
ccgcacagcgcctccgctctttctccacgggctgagggatcaatgcacttccgcataggcctagggccccacgctccgcgatcagcgccgga

SEQ ID NO: 116237 - DNA, 23 bp, Homo sapiens
  chr8:17780528-17780551
  hyper
cggttggcgctgcgtagctgagg

SEQ ID NO: 116238 - DNA, 295 bp, Homo sapiens
  chr8:17940759-17941054
  hyper
gggcgtcaagaggctcggacgttacgcatgttcagtaaacaacagtgtaacctctggctaaatattttctcactctaggtctacttcctcttctgtaaaatgaaagagtcacgctcgtccctcactgtctcttgcagttaggaagtccgtagccctgtgacttgctcgtgggaaagagccacgggacaggcgatcccatgacttgggtgcaaaaggccacagggggccctttggggcctgctctgggctgctcgcaccgcccaagcttgggaccactcagcgtttcccacggccc

SEQ ID NO: 116239 - DNA, 41 bp, Homo sapiens
  chr8:17941542-17941583
  hyper
aggcgacgcaactccggcccggcatcgctctagcagccaac

SEQ ID NO: 116240 - DNA, 13 bp, Homo sapiens
  chr8:17941967-17941980
  hyper
tacccaggcgtcc

SEQ ID NO: 116241 - DNA, 374 bp, Homo sapiens
  chr8:17942224-17942598
  hyper
gcctcggtgaaaagcgcgctgagacttgggtaggaggcccggtgggacccgcgagctttctctcccagcccgatgcagcagttcattaagcggctgtgtttcctcctaactggcgaaggactcaggtgggcggagcagagctcagcttgggaggaggcggacgcgagtagctcggcagggggactcgcttggctttcgtgccatccgtggacacagtcgcgcgggtaggtgaccgggttggatttcaaagtccagcaggaaatcctgccctctgggttgcacttcctggatgagcctctgacgtctcaagcagcattgttttaatgctttgatgaagctcagcacgctgccgaaatctcggcagtattttttct

SEQ ID NO: 116242 - DNA, 30 bp, Homo sapiens; identical to SEQ ID NO: 45137
  chr8:18272865-18272895
  hyper

SEQ ID NO: 116243 - DNA, 30 bp, Homo sapiens; identical to SEQ ID NO: 45138
  chr8:18671751-18671781
  hyper

SEQ ID NO: 116244 - DNA, 1086 bp, Homo sapiens
  chr8:18870211-18871297
  hyper
catactcaattacaacgaacgcattgaggcatttgttgccagaatcccacttacagtaattttccagatctccgtcttccctacaccaacacctggacccactcaagagttattctggagcggaaatcctggatcccgctatcgggagaaccagtgtctagaaaatgaaatcgtggtgcccattccatcctctgcctagtgggcgtttaacatcctttgacatcgaggggaatggcaaaacgaaacatttattatttaggtcaccaacaacattctaaacccacgtcctctaatcggtgttaatgtgtttaaaaaaaaaattcagaacatcattcgccagaacggaaagctgaaaacggcggataaagttaaatgcatgtaaaacagaatgacttaaacatctgtaaaagctcctgggaattgcaccgaataatcttcccttgtccgtttgctcgctcaattcaagtttgtttagtttagtctttttttctttctttctgacagaaacgtgatagtccctaaatacaagctgaccgggcaaagaaagatcggcatacgaggtcctctttcatgttgccttcttttgatagcttttctccaaagtctgaggttttcaaagccgaggtatgaactaaaacccctaaaccttaacaccacaaagttgaccctgctgggctcctaaaaaacacaaagcaagcaagcgcgaagagaaaaatcgcaccctgcacctatccagacagcacaaacccaggtggccccgggatcctgggggacagagcggcgacaaagcaacacaaaccccacgtcgaacagcggcgccgcgtgcgcaccccgcgcccgcgccccggccccggagctcaccgctgcgctccttccttccatcttccatcgccagcccggccgcgcgccgaaaccgccgccgggcgctccggggccgcagcctcagggcgcgagtgccggcggccagcgccgcgtgctctttgttgagctcccgggactgccgagaggcggcggcccgcgcgcaccctggcggaggctggcgaggctgcgagcccgcggcagccgcccgcccggcccccagtaacg

SEQ ID NO: 116245 - DNA, 455 bp, Homo sapiens
  chr8:18871512-18871967
  hyper
tgcctcccgcagccgcgcgcccgccctgggcccagcctccagcccgcgagcgaaaacctgcctgttgctttgtcttcttccttcacagttttcccaccctgagaaaagtgagaggtgctttccctggtgtttcctctcaggaagggccgtgtgactggagccgcgagttgggcgccgtctcgccggggctggaggtacgcgggcttcgggacacgcacctaggcgtccctcggggtcccggcctctctgaccgggctcccccggcaccgatccgcggccggagcgtttagtcccggggacccgtcgagccctgaaagggccatttccccctgaggcgagtccccccaggcgccccgcagcctggcctcgggactgcccccaccgacagtgcgtgcgcggggagaggtcacttaaaactgcattttcgaacattagtgccccggacccgcaccttt

SEQ ID NO: 116246 - DNA, 71 bp, Homo sapiens; identical to SEQ ID NO: 45141
  chr8:19125227-19125298
  hyper

SEQ ID NO: 116247 - DNA, 1010 bp, Homo sapiens
  chr8:19171053-19172063
  hyper
gccacgcagcctcgccgacgagtggccctggagagcctccaggcgcccgggtggggccgcgattgcgccccgccagtcaccccggcatgtgggcgcggcggggcggcgcgggcgggacggctacaagagctgttttgcgtccgggccggagtatttgctcagcccgcctgcgccgcttgggacgcctctgcctttccctccctcccttccccgacggcttctggcggccaagtggatgtggcgggtgatcgagccaccctgcccaggggcgcccagcactggtaggtgctgggggtggggcgaggctttggggagagtgtgcgtggggtgggagtagggggaagggaatttcctcggaggttgcatgggtgcatgggaggcgcaggggccagagcgggcgggcggaagcctcacccccgcctccaccccttcgcggcgcccggggcgggctcaggtgcggggttgggcggcgagagcggccgcggcgggtgtccggtgtccggtgtccggtgtccggtgtctggagccgctggctaggtgagcggcggtccccggggcctgggggcttgcagggggtggcgggggaacttcgagggagagggtctgccggggctgaggaccttcggggaagttctggaatccggcagggacacgcggcgcgtgcttccacccgcggggagtgcaggccccgggagggtccgggctggcctagagtttctagactcctagcaggagcacgtcctcgacttgcgcatggaaatcttccaggagggaagtcccgggaaacggtggcagctggcgcagcacccccgcagcacgttccccgcgcaccggcacccaggggcgcccccacgtggggtctgggagcgcgcggaggccagtgcagcgccgcctccctcgggctgcagcggcggggctggcccagacccagaccgggtgcccagtgcgctcagccaagcggcgcccctgcccgctcctggactcgggggtcacgcgggcaccggaaggag

SEQ ID NO: 116248 - DNA, 31 bp, Homo sapiens; identical to SEQ ID NO: 6132
  chr8:19266668-19266699
  hyper

SEQ ID NO: 116249 - DNA, 770 bp, Homo sapiens
  chr8:19614010-19614780
  hyper
gtgcaggaagtgcgacggaaacaaacaactttgcctccgcttcctacagctttcctctcctccccgcccttctagcccccatcccaccccaagatcatgccctcgaacagcttctgcccaccgatcgcacgtcccctgggcatgttcgggcagcggtgaccctcagccacatcccccactagcccggtcccgggcaggcgagcgcgctgcccaccggccaccctcgtcacgccccctccaccctctccatcccagccacaataatacaataaccgcagtcatcgcgcggcacgtggaaaggctacttttcagtgggttttgcagaaagcaatcagacagcggaaggccacgagaaacgctggtgaagccaaaccgaccccgggagcgcagcggccccggaccctccctggaagctccctccgcgtccccgcgcgcccacctggaggcgccgcgccctccgcctgccaagccggtccccggcccctgcccgtgccctgggcccccggcgggcagcggcggagggaggccaggcgcggcaccgtcctccgcagctgcacgagccaccccgaggtcgcggggtgggcgggcgcgagctaggcgcgcggggctgtggggatctgccggcgccactgacgcccccgcgcggcacaccgcgcccggctggcccgggaggggacccgactcacccgaagcgccctgctagctgcccggcccggctccggccgctgccgccgtcgctgaactttccctcctgcgcggccgccgcggac

SEQ ID NO: 116250 - DNA, 478 bp, Homo sapiens
  chr8:19614842-19615320
  hyper
cggcggcggcggcggctcgggcgggcgggcgcaacagcggccaagcctggcgccccgccgcagggtaggtccggcgggggcggccaaggccgggctggggtcgcggttggccgcgtacctccgcgtcacccacggcctctctgcagtgcgtccctgcgcccgtcggagcggcgccctggccgaagcctgtcactctcggaaggggccgcgctcggacaccaggggcggtttacgcgtgactggacaccaagagccggagaagtttagagactaggacactgtggcgtggcccgagttgcaggagagaggtgtccaatctccatggggtccttactcttgcaggacagagttccccatccccctgctccacccgctctgttcccttggctgccctccccgccgagcgccgacttccatgcaaaaactttgtaaatcgcacttcggggaattcacgctttagtcgcggtctctgctgccc

SEQ ID NO: 116251 - DNA, 164 bp, Homo sapiens
  chr8:19674698-19674862
  hyper
cctgcccgctcccgcgcatgctccctgacttcaccaaggtcacgctgcagcccgcaggaatgaaaatccacttctccgcattttcgaggtgacctggaagcggttcaactgctctggcttctcagaagaggaggggaccgggcggtaacgaggagccaagggga

SEQ ID NO: 116252 - DNA, 786 bp, Homo sapiens; identical to SEQ ID NO: 6133
  chr8:19796822-19797608
  hyper

SEQ ID NO: 116253 - DNA, 412 bp, Homo sapiens; identical to SEQ ID NO: 6134
  chr8:19797677-19798089
  hyper

SEQ ID NO: 116254 - DNA, 30 bp, Homo sapiens; identical to SEQ ID NO: 45148
  chr8:20054580-20054610
  hyper

SEQ ID NO: 116255 - DNA, 148 bp, Homo sapiens
  chr8:20054941-20055089
  hyper
attgtcaacggggccgcacccgagctacccgtgcccaccggtgggccggcggtgggagctcgggagcaggcgctggcagtcagtcggaactacctctcccagcctcgcctcagtgagtatcagagagtaatacgtctccggtctttgc

SEQ ID NO: 116256 - DNA, 216 bp, Homo sapiens
  chr8:20126213-20126429
  hyper
aagggggtgggggaacgtgggcaacatgaggaggggctgaggttgctgaggtgctggggggagaggctgctggtgggttgggagcaggggcccacgcagctctcaattaagtgcacttggattccatggaaaggcagaaagtgaaagggaaatcgctggcaggctgagtcattccatcgggtcgaacaatcggaagcaattcggcttcccactgct

SEQ ID NO: 116257 - DNA, 30 bp, Homo sapiens
  chr8:20126735-20126765
  hyper
aagtgagccgggcaccgctggataaaggga

SEQ ID NO: 116258 - DNA, 660 bp, Homo sapiens
  chr8:20160990-20161650
  hyper
cgaagacaaagacaggaggacagacgcacagtcacctcctctgggccgggccggagaagcggcgcccaccctgcagaggggagaccctgacagctccacgcggagacaaagacacctcgacagccacggacacagacagacaaagaccgacggacgcgcggacgcacggacggtccggcccggcgaggggaaagcggtttcccgcagccagggcagcagaccctccaggggcgaggagatccccggccaccgcaccttacctgccccctgcgcctcgggcgcacttgagactttttttttttcccagtgtttcccggtgtgttcccgtctctctttttccagagctgctgagcgggccgggccggtcccactgcgcgggatgcagctcccggctcccactcactggccgaggcgggcagagaaactttcggcctccccgcccggccgctgccaacccgccagctccaggcgcgccggcctctgcgcgggtcccggagccggggcggggcggggcggggcggggcggggcggggccggcccggggcggggccagagccggcgccgctgattggcagcgagctgccggcagcctggtctgtgccgctcggcggcctttgttccgggctgacagctggggctgctcgcgacctcgcggctcct

SEQ ID NO: 116259 - DNA, 15 bp, Homo sapiens
  chr8:20161666-20161681
  hyper
cgcggggtcccgggt

SEQ ID NO: 116260 - DNA, 30 bp, Homo sapiens
  chr8:20233962-20233992
  hyper
gggctactcctgggccgagccacagagtca

SEQ ID NO: 116261 - DNA, 30 bp, Homo sapiens; identical to SEQ ID NO: 6135
  chr8:20293185-20293215
  hyper

SEQ ID NO: 116262 - DNA, 242 bp, Homo sapiens; identical to SEQ ID NO: 45151
  chr8:21776836-21777078
  hyper

SEQ ID NO: 116263 - DNA, 364 bp, Homo sapiens
  chr8:21779566-21779930
  hyper
ataacactaatcaaacgtgaagtttataaaggtgtctgctacagattcatgactgattattggagagttgcatttgttgaactaaatagtcgagtcattatgttatctagtgcttttctgaaccaccagggtgagcagttttttcataattgaggctgagtgtcatatgattctcgggttctctcaggctgatgtcttggatatctctcttctaaggatatgtattttatggacgattttaagtgctataaaactttagtaatgggaaaattataatatttggattgccctttagctctgttgatgttacaggcaagtgtctgtagaagtgtgcccttaagcagctcctcgatgtgatgggttt

SEQ ID NO: 116264 - DNA, 31 bp, Homo sapiens; identical to SEQ ID NO: 6137
  chr8:21867535-21867566
  hyper

SEQ ID NO: 116265 - DNA, 30 bp, Homo sapiens
  chr8:21867969-21867999
  hyper
cttgggcccccacggcgccgtgtgcctggc

SEQ ID NO: 116266 - DNA, 83 bp, Homo sapiens; identical to SEQ ID NO: 45153
  chr8:21868698-21868781
  hyper

SEQ ID NO: 116267 - DNA, 578 bp, Homo sapiens
  chr8:21881967-21882545
  hyper
gggtccgcaattggccgggacagcttctcacgaaaggtcctgggccggcatcatcagcctcacctgggaactggttagaactacaaattccctcggccccacccagaccgacgccaagggcagctgtggagtggggcgcggcaatgcgccccttaacagccctccaggtgattctgccgcgcagaggaggaaagaatgggagaagggaaggggagagggaggcggcttctttgcgactaattggacacctgcccttccccttcccaggcttcttagcccgggcttggacagccgccttccggccagaggggatgaggttgcgctgcgctccgggagcgccgatggcgtgactggccccgcgcggagcagcgacagtaaggctgtgtggggggagctgggacctaagccgcgcgcacacccctttctctgcgtctggtggaggtgcacagaggcttttgagtcaggcccaagcgcagccaggtgacctccccgcggcctttcaagcctgagctcggtggacagctccctctcccgtgagtcccgctgtcctgtacgcgcccggtcgagccccgggctgc

SEQ ID NO: 116268 - DNA, 125 bp, Homo sapiens; identical to SEQ ID NO: 45154
  chr8:21906318-21906443
  hyper

SEQ ID NO: 116269 - DNA, 30 bp, Homo sapiens; identical to SEQ ID NO: 45155
  chr8:21907630-21907660
  hyper

SEQ ID NO: 116270 - DNA, 30 bp, Homo sapiens
  chr8:21947287-21947317
  hyper
gttggggtgcaggacgcccttcccgtcacc

SEQ ID NO: 116271 - DNA, 31 bp, Homo sapiens; identical to SEQ ID NO: 6139
  chr8:21966148-21966179
  hyper

SEQ ID NO: 116272 - DNA, 30 bp, Homo sapiens
  chr8:21967313-21967343
  hyper
tgtcccgctgttgccgtaaacacacaatgg

SEQ ID NO: 116273 - DNA, 30 bp, Homo sapiens; identical to SEQ ID NO: 45157
  chr8:21976724-21976754
  hyper

SEQ ID NO: 116274 - DNA, 914 bp, Homo sapiens
  chr8:21987760-21988674
  hyper
gttttctggagccaccgctccgccgtggtctggccgcgtcgggcttcctaactttcaggtgtcagaatgtgtggcccagcccacaggggcacggggaacacgctccgtacgggcaccgcaggctcggctcagaaatcccccgccacgagtgtccccagacggcgcgctcctggcgcttacctgggcttcaccggccggtcgcggcgcgggcggtggcggtcgtcgtggccggcaccgggcgcctgctccccatgggccagctccggggcctcccggccggcgggcgaggacgcgttctcccgctctgtctgctcagcgcgctcgcgctctccttcccccggggcggcgggggcgctctagggccgcaggttggaggggtcggactccgggatctgcaggatgcggcacacggcgcggatcggccgcaccagcttctgggccgaggccgtaggttgcgccatgggacgccgagactccgtgctgcgccgcggggagggccgggccggggctagggagcgggtgcccccggagggagagaaggcgccgggccggggggaacacgcgccccgggtcggagatggccgagttgggggaaaggccgaggggccggggaagggggtcgtgcctggatggtgggggccgatcctgggacccaggagagaggcaccggcgagggcgcagcaccgcgcagcgcggctaatggaggtagagcgcggcggagagcgcagcaggacctctgatcgccatcgccagaagcgcaactgagagtggggaagctgctccgccggtttcctcctccagcaccctgcgggaaacaggagcccgtgattcggcggccgcgcctgggcctgccccctcccgggccccgggggcttccgccaacgccccggcgatgccaccggctgcgcacgggg

SEQ ID NO: 116275 - DNA, 30 bp, Homo sapiens; identical to SEQ ID NO: 45161
  chr8:21998782-21998812
  hyper

SEQ ID NO: 116276 - DNA, 30 bp, Homo sapiens
  chr8:21999373-21999403
  hyper
tacagggcggagttcgcaactcacttgaaa

SEQ ID NO: 116277 - DNA, 30 bp, Homo sapiens
  chr8:21999688-21999718
  hyper
gtgtctttccctctcgcctcattttcccct

SEQ ID NO: 116278 - DNA, 30 bp, Homo sapiens
  chr8:22014637-22014667
  hyper
tcgtgagtgacagacgcatatctaagttag

SEQ ID NO: 116279 - DNA, 220 bp, Homo sapiens; identical to SEQ ID NO: 45162
  chr8:22089409-22089629
  hyper

SEQ ID NO: 116280 - DNA, 329 bp, Homo sapiens
  chr8:22102410-22102739
  hyper
tccacgccaccgcccggaggccaagacccccgagcgccgcagcatagcgtagcccagaccagtcacctcatcctttttcgccctctcaacccagcttttcccgactccgggaagaaccgggaagagaaggcggaggggagcgaagcgccgcctgataaatactgtggcccagtcccgcccccctaacgtcacttccgccccgcgccaagatggcggcgcccaggccctgccacgcagacttccgcccggcgcggagaccgaaggctggcggctggtcgcgttgcaggtgaggttgtgacgcgcggtgtggagccgcggcccgggtgcgt

SEQ ID NO: 116281 - DNA, 452 bp, Homo sapiens
  chr8:22224958-22225410
  hyper
cggcggaggagccccgcaccccaggctggggcagtgggtgggggcggggacagccctgcgccgaggaccgggcgccgctcccgggcaccggcacacgcccggacggctgggtggaggctgcacctggccgtggtgccgcgctggcgaggggagaggtcaaggcgcggcctgtccgcctggagggtgcgggatgctagagccgcagaagggtgcccagagcgtgggtcgccgcgccgaaggctgagccaggctcccggattccccgcgcggacacggacgcagaacgcagacagtaggtggccaatccgaggggcggctcttggggcggctctatggggctctggggtctggactttgcttttcaggagctgcgtccccgggcccccgccggtccatctcccctctgaaggtacatgtacccaatcttccggctgagcgaatctccaacctgg

SEQ ID NO: 116282 - DNA, 245 bp, Homo sapiens
  chr8:22298225-22298470
  hyper
cccaggaggcggcgcggagccgctgcgaggccgcagggccgggtcgcaagatggccgggccggcctcccgcgcgggtcgcgcgggccacgcgggcgggtttcagatgttccgggcccgggtaggggctggcaggagagaaggggccggctgcggggagggctggctgagaagaagcgaaaatgggcggttagcagcagggacccggagccggaggagccgagagcagcgcgtgcgccgagctcta

SEQ ID NO: 116283 - DNA, 236 bp, Homo sapiens
  chr8:22298920-22299156
  hyper
ccatgtccgggaggcgcttccacctctccaccaccgaccgcgtcatcaaaggtgcctggcgggccgggccttcctctgggacccgcgggaaacggccttcggctgggcggcggctcggggcggagggaggctggggccgggctgcgcccaccctaggagggctcggaggggtgtagacagagccgggcggcagcctccgagagcagccacccggacccggcgttttctgctgcacc

SEQ ID NO: 116284 - DNA, 443 bp, Homo sapiens
  chr8:22299370-22299813
  hyper
cacccttttttaggacgtataccatgtgccttttgacccgctttctctagatcattgcaagtcactgctattactggaataaacttagtatgaacaagtcagataaatccattatatgatgtttaaaataagtttacggagctcttgacagggtaatggtattttattttccctttggttataaagacttggagaatgacgttttctgattcatatgtgtacctgcgttagatttctgttgttgttataagaacaaaatgtaaagggctctttgctctctaaatcttgtagagttttaggttatagttgtttctccctttaaactaagaagatggattacacataaccactaatttatgtgctgcttttattcagccgtaagtcttaggcacaacccttctctctgagattaacaatcggtttgaaagcgctattttgtaaga

SEQ ID NO: 116285 - DNA, 107 bp, Homo sapiens; identical to SEQ ID NO: 45165
  chr8:22408651-22408758
  hyper

SEQ ID NO: 116286 - DNA, 141 bp, Homo sapiens
  chr8:22409076-22409217
  hyper
gccagccctgcggtaggggccgggatggcagctgggaaaccagagagggctccccggggaccctcggcggcccctcccggcgccgcctccccgccggccaggcctcctcggcagggggccaccagtgtccccgcgcgcgcc

SEQ ID NO: 116287 - DNA, 142 bp, Homo sapiens
  chr8:22409253-22409395
  hyper
cggcccagccccggcccgcagtccagatccgagacccaaactccgcccgccccgccgcgcgactctcacggtccggcctccggcgcgcgccccttcggcctccctcttcctgcgccggcgcccggcccggcccggcccgtcc

SEQ ID NO: 116288 - DNA, 71 bp, Homo sapiens; identical to SEQ ID NO: 45166
  chr8:22419404-22419475
  hyper

SEQ ID NO: 116289 - DNA, 29 bp, Homo sapiens
  chr8:22436798-22436827
  hyper
cgcgcccctgtcggcgcggaaccctggcc

SEQ ID NO: 116290 - DNA, 892 bp, Homo sapiens
  chr8:22436855-22437747
  hyper
cgcatcagcgggggcgcccccgcgagctgcgctctccccggccggagcgctcctcctccagcccccagcccgcagggtactttgccctcggagcgaaggaggctccagaactggtagagccgggccatcgggctgggcacctccccgcggcgcccgcagcgcggagtccactgaccggctcaaaggtctgggaatctcggggcggccgcgagccggcctcggggactggggtgggggcggtgctgggaacagaggctaggcctgggcccaaggggaaggcagccggggatggagcggacagaccgctggtgctcttgatagattctcgcagcacttgcgtccccagggcagccccaggatgggtgctgggcagggtggtgcccagcctggcaccgcggcttcctgcctggattggctcctggctccagagctagaggctcaggaaatcccacaggggtctgtctgcaagggcacttccttgcccagcggaggggctgtggatgggaggcctgtcaccccggctgtctgtcgggcagcatcaggaatctgggggtgggtgtgtccagcttgacagatgaaccctggcctccttgccctggcagccggcccctgggggaggtggggagcccggtcttgcccgtgtgatccactttgccaagaacgaggtgggcagctaggaggcccatgtgaagactcggcctcaccccaccagtccttcacctggccagtgacttacacagtctgtactggtgccagcctgttccttgacccgtcactcctgcttcctgagccctgctctccctaggccactcaccagccctcccccagagtggagaggaagtaccgtgtgctgtgggttttggggacaggaagcaagcgctagtgggactga

SEQ ID NO: 116291 - DNA, 30 bp, Homo sapiens; identical to SEQ ID NO: 45168
  chr8:22462095-22462125
  hyper

SEQ ID NO: 116292 - DNA, 30 bp, Homo sapiens
  chr8:22526640-22526670
  hyper
tctccaggaagtgacgtaagcccgcctctc

SEQ ID NO: 116293 - DNA, 30 bp, Homo sapiens; identical to SEQ ID NO: 6146
  chr8:22549553-22549583
  hyper

SEQ ID NO: 116294 - DNA, 30 bp, Homo sapiens
  chr8:22549789-22549819
  hyper
ccccggaaaggcagcgtcgcagtacctctc

SEQ ID NO: 116295 - DNA, 218 bp, Homo sapiens
  chr8:22550330-22550548
  hyper
ccgagtcgctgctgccggagaagaggttgagcgcgctggggatctcctcggggtacagattgtcaggcagttggtttagcaaactgctcatggtcaccggcagcttctcggcgagtttgccggtcatagcactcccgagctgccgccgccgccgccaccgccgccaccgccgccgctcgctcctaacgcagcttccaggcaagcggcatccgagaggc

SEQ ID NO: 116296 - DNA, 257 bp, Homo sapiens
  chr8:22550911-22551168
  hyper
ctctgccgccgctgccgccgctgctaccaccaccaccagccccgccgcttcctagcaagctcactgctgcccaaaagctcccagccagggaactccaccagcctatttatctgagccccgggaaagctccgtgacgtagctgcccatatatggacagacaaagcccagccgaaggggcgcgacgtcacaatggaagctcctcacaatggaacattagaaagcaggaagcgggccgcagccaacgtgcggcgcccgca

SEQ ID NO: 116297 - DNA, 30 bp, Homo sapiens; identical to SEQ ID NO: 6147
  chr8:22552223-22552253
  hyper

SEQ ID NO: 116298 - DNA, 227 bp, Homo sapiens
  chr8:22552609-22552836
  hyper
cccgccgcctctcccgccaggctccccactcctatactagggagccacagcgccccccgggctgtcctccgccagcgcggctcagggagggagagcgctgcagcggtcccgcgctccggtcagaatcagggcaggctgcgcctcccgcccccggctccctcccttagggggggcgcgcggccggtcggggggcgtgggcggcggtgtgagccgggctaggtgcggga

SEQ ID NO: 116299 - DNA, 115 bp, Homo sapiens; identical to SEQ ID NO: 6148
  chr8:22562486-22562601
  hyper

SEQ ID NO: 116300 - DNA, 254 bp, Homo sapiens
  chr8:22613668-22613922
  hyper
gccttgcgaggctagcgtgggatggtctggagacaaggtggcaagactcaggcaggagctgaacagctggcgcctccttctggcctcgcagggctggagcaggactggggagggcgggcttgtgcgagaacctctgcccctgggctcccaggatgtgaccctccctgccagagacccttaaccccggacagccccagctcaggagagctaacagtgagcgagggaggctgttatgtaaccgactgaactcctcg

SEQ ID NO: 116301 - DNA, 189 bp, Homo sapiens; identical to SEQ ID NO: 45173
  chr8:22722334-22722523
  hyper

SEQ ID NO: 116302 - DNA, 605 bp, Homo sapiens
  chr8:22722723-22723328
  hyper
cagcctggggggcggcgggagggggagggaaggtgtttttgcgaaaatgacaaaacaactccttgctcagggcagcccgggaagagcggcgggcggatgggaattaccccgggtccccctgcggcgtctcccgctgcccacccacgggcggtgacggtggcggtggcggtggcggcggcgggaccccgggcctggctgcgcgctccacctgcgcctccagggcgttgggcgggggccgcactttccccgccgcgaggtggagcgcgccaccgcccccccggccgcgcagcgagaaggagcctcggggaagagctaaaaaaggcaaggcgctgctgccggtgccggtgccgcagccgccggggaaggaattccctccgcccgggcgcacgcggccccccgcccccgccccatcctgctcagaaaagcctcggatgctgcccgggaggaggaggcaaaggaagactccgttccagccacctcccgccgcccggatcccagaggaaaggggagaggaatctccccaccggatctggtgggcggaagatgggccacgcgggaaggagatcggcggccactcccgggggcgcgagcggcggcgcctagag

SEQ ID NO: 116303 - DNA, 30 bp, Homo sapiens
  chr8:22856687-22856717
  hyper
tgccgtcgcctccccgtgggcaagtggtgg

SEQ ID NO: 116304 - DNA, 31 bp, Homo sapiens; identical to SEQ ID NO: 6150
  chr8:22857229-22857260
  hyper

SEQ ID NO: 116305 - DNA, 30 bp, Homo sapiens; identical to SEQ ID NO: 45177
  chr8:22857657-22857687
  hyper

SEQ ID NO: 116306 - DNA, 30 bp, Homo sapiens
  chr8:22875775-22875805
  hyper
agtgcacggcgaccccgtgctcctcagggc

SEQ ID NO: 116307 - DNA, 30 bp, Homo sapiens
  chr8:22876055-22876085
  hyper
gcacttctctgactgcggaggccctgaccc

SEQ ID NO: 116308 - DNA, 310 bp, Homo sapiens
  chr8:22925471-22925781
  hyper
tgttccctacaaagccgactctttgtcccttccccattatcacggatacttgccaagaggtggcaagaaaggctcttcccaggccaaaatgcagctgctattatcaagcaggtcaggccccaagtgccacaactcccttctcctaaatctcgttttcccaaggaaccccaaacaatggcattggcgatgagcggccccgcacgcgtaggggcgcagccgctaaggaggggaaggggcctctccagctgcgcccgcgacgactcccgcgcacggaacggaaccactgggccgcagcgaccacaggggagtt

SEQ ID NO: 116309 - DNA, 30 bp, Homo sapiens; identical to SEQ ID NO: 45179
  chr8:22926238-22926268
  hyper

SEQ ID NO: 116310 - DNA, 32 bp, Homo sapiens
  chr8:22926894-22926926
  hyper
gtccgctttccaggcgcgtcttgatcttctcc

SEQ ID NO: 116311 - DNA, 519 bp, Homo sapiens
  chr8:22960451-22960970
  hyper
acctctccacgcgcacgaactcagccaacgatttctgatagatttttgggagtttgaccagagatgcaaggggtgaaggagcgcttcctaccgttagggaactctggggacagagcgccccggccgcctgatggccgaggcagggtgcgacccaggacccaggacggcgtcgggaaccataccatggcccggatccccaagaccctaaagttcgtcgtcgtcatcgtcgcggtcctgctgccagtgagtcccggccgcggtccctggctggggaagagcgcacctggcgccgggagggggcagggagacggggacacggcagggatgcctggccctggtcacctgcggccgggcatgtccgggcaggacgaactcgccgtcggagtcaggggaagaactgggtccccgggctgggcaggagggacccggccgcgagggagcagagaggcggtccccctggctgccccgagcccgcgaagggagggaagttccagaatcgagagagggagggagtcaagg

SEQ ID NO: 116312 - DNA, 198 bp, Homo sapiens; identical to SEQ ID NO: 6152
  chr8:23020932-23021130
  hyper

SEQ ID NO: 116313 - DNA, 533 bp, Homo sapiens
  chr8:23021192-23021725
  hyper
cgcaggcgacccgggccaagcatccccaccgtgtccccctctctccctgcccactcccggcgccaggtgcgctcttccccagccagggaccgcggcggagactcaccggcagcagaaccgcgacgatgaagacgacgaacttaaggatcttggggtccaggagccatggtctggttcccgacgctgtcctggctcctggatagcgccctgctcgagcgctcgaggcggtcgggacgctttgtccccaaagtcccatgagaagggaggagggtggatcgaaagcgccaaaaatcaatcagaaatcgtccccgtagtttgtgcgcgtgcaaaggttctcgcagctacactgccagaatagaacgtgctcctccgcttttataccccggaaaaaaggcgtggtcagttgtactcccttcccgcagtcacttccaggcactcaggctgggtctcccccagcacctccaggagggcccaggttgtgtgggtgggtgcatggacggacaggaactggctctttccggcagcggtgaccc

SEQ ID NO: 116314 - DNA, 30 bp, Homo sapiens
  chr8:23082218-23082248
  hyper
cccggtgccaggcgcgcttttccccaggca

SEQ ID NO: 116315 - DNA, 102 bp, Homo sapiens; identical to SEQ ID NO: 6154
  chr8:23082554-23082656
  hyper

SEQ ID NO: 116316 - DNA, 172 bp, Homo sapiens
  chr8:23082729-23082901
  hyper
cgctctcagcttctgttcctcaaccacggccgccgcgtggatgccgctgcattcggagtcgttttgccacttggtcccagcgccaggcttctcggtcgggagttgacctcagcctttctgtgacccagttcctggcacccagcaggcgctcggtggacggatgggtggcgga

SEQ ID NO: 116317 - DNA, 30 bp, Homo sapiens
  chr8:23145514-23145544
  hyper
aggtgacaagaacacgcactctcccgttcc

SEQ ID NO: 116318 - DNA, 30 bp, Homo sapiens; identical to SEQ ID NO: 45186
  chr8:23197238-23197268
  hyper

SEQ ID NO: 116319 - DNA, 30 bp, Homo sapiens; identical to SEQ ID NO: 45187
  chr8:23218852-23218882
  hyper

SEQ ID NO: 116320 - DNA, 178 bp, Homo sapiens
  chr8:23260562-23260740
  hyper
tcatctctattccagcgctgattcctgggacacctcgagcaggcagccacacccagagggcttccaaatttgggctggtgagaaggggcgcggtgggcaaagcgcctgcgtaaaagttgtaggcacttcagaccaccggaccaacggctcaagattgggatcagctgtagccgtgggt

SEQ ID NO: 116321 - DNA, 458 bp, Homo sapiens
  chr8:23260788-23261246
  hyper
cgggagagggtccctggtccccggagaggcagggcgacttgggagtgcatacctggcgtgccgagagcgcctctgctcccgcaggactcacggcgctcccgcgctcccaacagcctttcgagcaggctgggggttgaaccgggttcaagcagtggacgctacagctcccgggcgcagcccccggggtccccgcccccactccgtcccagcccagcacgctctacatccccaaaaccacagccccgagggcagtcactgtctcccgacccgtcccccgcgtgccccactcctcaaagccagaattccggagacgctgtccctggagccacgctgcactctccaagacgcccagcacacaccgagacttgacgggctctgtcccgcctgattacgggcgctcgggacgatccagggacccagcgcctcgctccccgggcgcgccagcagccgcgccgcgc

SEQ ID NO: 116322 - DNA, 482 bp, Homo sapiens
  chr8:23261271-23261753
  hyper
cggggccgcccggggcggcaggaggacccgttagcctgcacgtcctcgcatcgctccccgcaagaagtctttgggaacccccaggcactgtcgagaggcagccccgcgcaggacgaagcctggagaccccatagggacgctcccgctttctcgcgaaccgcttcggggagggggtggcgcgggaagcgctcttacttggtttcagggatccgcagtggccgggctgggaccgcgctctccacggtggtccccctccgcttccgccgccgctgagcccctttctcgagcagagggggcggctctggtctccgatggctggagaaagcaagcaccaagcgtaggtagccgcgcgctggagtcgcgcgtttactcttttcccccttacttttaactagaggaggatggcaaacccctccccggacccacccccttccccgaaggcggccgccgcagcaggcccggcctccggcctcttttgttgt

SEQ ID NO: 116323 - DNA, 30 bp, Homo sapiens
  chr8:23315286-23315316
  hyper
ggatgattggcgtccgagcgctgggctgtt

SEQ ID NO: 116324 - DNA, 30 bp, Homo sapiens; identical to SEQ ID NO: 45190
  chr8:23330024-23330054
  hyper

SEQ ID NO: 116325 - DNA, 360 bp, Homo sapiens
  chr8:23386070-23386430
  hyper
tgtttgcaaacccacccgccacggggacggattttccccgagacactgtcacccatgcctccagctctgggcataccccactgcggcccctccccaatgacctcccctgcccctcgcggaccagcccatcctcaagatagtacaactttccgggccaccccacgtctcctctcgcccccgtccggttgcttggaaatgtgcacgggacggtgacgtcacacagggaggcgggtccccactgtcccgcacaccaatggcgcggcggccgccggcctcttggttcccggcgattggtgtctctggccgctgcgctccaccccagcccgccatggcgtcaggcgccgcggccccggggaggtg

SEQ ID NO: 116326 - DNA, 30 bp, Homo sapiens; identical to SEQ ID NO: 45192
  chr8:23387346-23387376
  hyper

SEQ ID NO: 116327 - DNA, 30 bp, Homo sapiens
  chr8:23539612-23539642
  hyper
ttcgctaaacgaggcgttcggtcgcctcat

SEQ ID NO: 116328 - DNA, 45 bp, Homo sapiens; identical to SEQ ID NO: 6157
  chr8:23539859-23539904
  hyper

SEQ ID NO: 116329 - DNA, 48 bp, Homo sapiens
  chr8:23540841-23540889
  hyper
acaggggatgagcacgcagtcactgcagccgcgcggtaccgtgagagt

SEQ ID NO: 116330 - DNA, 158 bp, Homo sapiens
  chr8:23559443-23559601
  hyper
aagcaggttactcttcgtgaacttcccggatcctcaagttcccagctcttcagcccccttcccgccctcccgtcctcttctctttcttccccaacagctgtcattaattggaggatggtaggcccgctagatcaccatctccattcaccgccgatgcc

SEQ ID NO: 116331 - DNA, 1003 bp, Homo sapiens; identical to SEQ ID NO: 6159
  chr8:23559665-23560668
  hyper

SEQ ID NO: 116332 - DNA, 30 bp, Homo sapiens; identical to SEQ ID NO: 45196
  chr8:23561988-23562018
  hyper

SEQ ID NO: 116333 - DNA, 182 bp, Homo sapiens
  chr8:23563265-23563447
  hyper
cgggagactcaatcgccacccggtccccaactttcgtcttccagaagaaaaatccatgaggaggaatgggggggtcccccgaccagaccagcaagaaagggcccagttaggagtgacctcagcgccacgagggttccactgctttgatggccacacgcttttgcaaacggtttgggggtgga

SEQ ID NO: 116334 - DNA, 325 bp, Homo sapiens
  chr8:23563698-23564023
  hyper
tttttttggactcctcgagagaaaatggagagagtctcgaacccaggagataggaggcgtattttccccatgcacccatggatcacgcccccgcccccacattccccccgtaggaggcaagacctgagcgcttactcacgtggctcccccatccgttccgcgtccatctccaagactgcctcacagggacccccaggaggctccgaaccatccagctttctgtcaccgccgccgccaccagcgttgtgaacctctgaccctcgcggctctgcgtccattctcaggtactgaaagttttccgggctcttccgcacccgcggatgtg

SEQ ID NO: 116335 - DNA, 476 bp, Homo sapiens; identical to SEQ ID NO: 6161
  chr8:23564192-23564668
  hyper

SEQ ID NO: 116336 - DNA, 407 bp, Homo sapiens
  chr8:23564702-23565109
  hyper
cgcagaggccggaccgcagagtagaagtgagtcttgacccaccagggcctatattgagatggaaacctctctctttgaacagaatccaggtctgcggagtcccgacccgccacttcctaggagcagcttctcagccccaggaccgaggaatgggtgtgggggctacatgtggggagccctcgacctcttaaagggctccgcgaatggtgggggagactggaaggcaatctctgcggcccgcgcaaagtggtcagaggcgggagtgggggtgggggggggtgggcttccgtcgcccttggcgtccccacgttctttttcttcctctcctttatcctccttaaagcggattgcctggagcgtgccagcttgtgtgcgcgtataaatgcggcgcccgccgaagggctggg

SEQ ID NO: 116337 - DNA, 70 bp, Homo sapiens
  chr8:23566784-23566854
  hyper
gagtgcctggtctacgggtgtttacaatcatcaccgggcacccacaagagaccctgaacttagaatattt

SEQ ID NO: 116338 - DNA, 313 bp, Homo sapiens
  chr8:23566900-23567213
  hyper
cgctgggttctcgccttccaagtgctggaggggggaagtagggccacccggggtagaaacctaacgccagaaaccttccagcgccttatcagttggtggaattttcgtggcagacagtcgcgctctacctaagtcgtagaagaaaagacaccttgtgggggacttggcgtcggaagccttgagttcaaatcgtagccctaggtccccagccttgcccttcctggcttgctgcgaggatgaaatgagatttttgtacgtgaaaatgctttctaacccctctcgaggggtggaaacgtctccattcgaccagagt

SEQ ID NO: 116339 - DNA, 271 bp, Homo sapiens
  chr8:23567311-23567582
  hyper
cgctcccggcgtagacctggggataggggtccctgtcgcgctcgccccacccctgcagggagcaaggccgtccttctgcagcaccgcgccacgcggcgggaatttgcagtgtcctgctttctggtttcagcttcttcgctcgcttgggtctctctcggtcacctctcggaggggcctggagtccctcctccctcctcctacttcagcgccagaagcattgaaagccgcccgcccgccgagagtggaaccggtacctcgaatctcgctcatt

SEQ ID NO: 116340 - DNA, 116 bp, Homo sapiens
  chr8:23567657-23567773
  hyper
cgctggcgcccaggaaagccggggaggaaactaggaagggaggcgacagcagaaaagccagagagtccagagactcctaggcaggcctccgtgcagccccaacagcgtggtgccgg

SEQ ID NO: 116341 - DNA, 28 bp, Homo sapiens
  chr8:23567832-23567860
  hyper
ggaatggagacatcgtgatcacctctgt

SEQ ID NO: 116342 - DNA, 160 bp, Homo sapiens
  chr8:23568379-23568539
  hyper
aggcgtgaaccaccgcgcccggccctgaacctctacttctccgtggttaacaaaagtcattatttcctgtttctttcactctcctgaaacgaagggattccctccagcaagtaccatactcaacaggcaattcctggtaacctcgcggcttagtgggccc

SEQ ID NO: 116343 - DNA, 893 bp, Homo sapiens
  chr8:23571717-23572610
  hyper
cagaggcgctccgcgcgaaccccgaaaatctgtgcaaaattctcagggttaggggaagagcatgggtggagagtaaagtgaagcgggccgagagatttcttgcattaaatgtttagaagaaccaaccagttaaaggaaataaaaatctgccggtatgtaaccgctgggtgggcttctccatttctccgtgtcaccctcccccagccggcctcttagcttctcggctttgggtggcggagaccgtttagttctgggacagaccgtcgggggctgactccgggggtttgcgggcgccgagctgcctccgcgcgcgttccactccttcagcgtggaaaagaaaaccctcagcggccagagaggcggcggggccttcccggatcgctgattcggggagccgcaggcggggacgctgctgggcgacgcttatctgcgccgcgctcgccagctccgtttcaattaacattccagtgccgccgcccgccgcgggagcggagtccccaccagcccctggaaaaataaactctaggcctagcggctgtgcgtgcgtgtgtgtgtgcgtgcgtgtgtgcatgtgtgtgtgtgtgcgcgcgcgtgtgtgtgtctgtagagccgacagagtcccagatcagtgcagtccagagctgcctatccccgggtcgcggttccctgcggggtcgagcctgcgccgggctgcagctctctgtcccactgcgcggcgggatggcagctgctcttttaataaactagcagtcggcggtctgagccctacaatatccccaaagcctggtgtgcgatggaacacatggctgcgtccccagaccccgagaggggagttgcacacacattgctgaccttgagggtcagacagaccctttctcgtctagtttttagca

SEQ ID NO: 116344 - DNA, 51 bp, Homo sapiens; identical to SEQ ID NO: 6166
  chr8:23583965-23584016
  hyper

SEQ ID NO: 116345 - DNA, 307 bp, Homo sapiens; identical to SEQ ID NO: 6167
  chr8:23584093-23584400
  hyper

SEQ ID NO: 116346 - DNA, 200 bp, Homo sapiens; identical to SEQ ID NO: 45206
  chr8:23584581-23584781
  hyper

SEQ ID NO: 116347 - DNA, 52 bp, Homo sapiens
  chr8:23585197-23585249
  hyper
gacctgcacctgccccgcacctaccccacatctgccccgcagctgccccaca

SEQ ID NO: 116348 - DNA, 145 bp, Homo sapiens
  chr8:24272687-24272832
  hyper
gaccttttacgccctcgtgtggccataatgttgacagcagcaaagcccaggtctccatcttctgttgaatcctaggtgataacgtaacccgcggagaacggctttactgcaggcctccggctgtgctggtcgagccgtatgtgag

SEQ ID NO: 116349 - DNA, 34 bp, Homo sapiens
  chr8:24770327-24770361
  hyper
ctcgccgacctgggcgctgtccttggtgctgccg

SEQ ID NO: 116350 - DNA, 117 bp, Homo sapiens
  chr8:24770413-24770530
  hyper
cgtcccccaaacgttaaaaacgccatatcccactttttatacaaataactaccccggcctgttctctttgtccccttcccgaagccttcaggcagaccgttccgcaaagtctttttt

SEQ ID NO: 116351 - DNA, 181 bp, Homo sapiens
  chr8:24770943-24771124
  hyper
aagaaagggcgctggcgatattcgcaccaagggtgcgaaacgcaatcgggaggtgagaaatggaaagaaggcgaatgcccggctacaagtagcctgggactgaaaggggacctgggggaggggctgggcccagggcagaaaagtccaggttcccatgcggcctgggcccacgtggagcggg

SEQ ID NO: 116352 - DNA, 225 bp, Homo sapiens
  chr8:24771349-24771574
  hyper
ggcgggtaaccgagacccgctcgagcttcagccgcgtcagcggctccccgtccagtggcttccgctcgcagtcgtggtcccgcggctcgcccagcaccgtgtcctcctcctataagcgcagcatgctcgccccgcgcctcgcttacagctcggccatgctcagctccgccgagagcagccttgacttcagccagtcctcgtccctgctcaacggcggctccggac

SEQ ID NO: 116353 - DNA, 1586 bp, Homo sapiens
  chr8:24771632-24773218
  hyper
cgaccgctttgccggctacatagagaaggtgcactacctggagcagcagaataaggagattgaggcggagatccaggcgctgcggcagaagcaggcctcgcacgcccagctgggcgacgcgtacgaccaggagatccgcgagctgcgcgccaccctggagatggtgaaccacgagaaggctcaggtgcagctggactcggaccacctggaggaagacatccaccggctcaaggagcgctttgaggaggaggcgcggttgcgcgacgacactgaggcggccatccgcgcgctgcgcaaagacatcgaggaggcgtcgctggtcaaggtggagctggacaagaaggtgcagtcgctgcaggatgaggtggccttcctgcggagcaaccacgaggaggaggtggccgaccttctggcccagatccaggcatcgcacatcacggtggagcgcaaagactacctgaagacagacatctcgacggcgctgaaggaaatccgctcccagctcgaaagccactcagaccagaatatgcaccaggccgaagagtggttcaaatgccgctacgccaagctcaccgaggcggccgagcagaacaaggaggccatccgctccgccaaggaagagatcgccgagtaccggcgccagctgcagtccaagagcatcgagctagagtcggtgcgcggcaccaaggagtccctggagcggcagctcagcgacatcgaggagcgccacaaccacgacctcagcagctaccaggtaggaaccgcggctgcgcggccagcctgcgccagcgccagcgccgcgcgcccccgacacttgggctcgtgcccaggcgccctctccgccgcgctccctggtggccgctcgctagagcacgcgcgccgcagacctagggtatttgcggatcagcgtcctcgcccatctcatcctccacactccgcccccacccacctgccccagctgctaagggtcttgacctttttcagaaacgtgcatcttttccagttctaattttgcacgcttgcacgtttaaagcaggagggatgaattcggtagtggataaatcagcaactttaggatagcttatgcagaaacgcgtgtattctctacttttccggcagtgatcggaagagctctcaaaattggcttcagcccaaagggctcagatgggaatggccaggtcagccatggagtttccccatgcatgtttgtgtcctgttgagacgtgttctaagtccactggtctccgtgcgtgatgtgcccaggaagtgtcctattgtcttactgatcttgtatgttcatttgagaatcgcttagatttaaaagaaaaagggggtgggacggggggctgggagtcaggtgtcagcgaggtttgcagaagtggagggagacgggaggaggccagggggaaggggtagcaagtggtttgcgaaggaagttgctgtttgcaaggatgagtctggggagattctctgtgtctgtttcaggacaccatccagcagctggaaaatgagcttcggggcacaaagtgggaaatggctcgtcatttgcgcgaataccaggacctcctcaacgtcaagatggctct

SEQ ID NO: 116354 - DNA, 694 bp, Homo sapiens; identical to SEQ ID NO: 45210
  chr8:24812769-24813463
  hyper

SEQ ID NO: 116355 - DNA, 275 bp, Homo sapiens; identical to SEQ ID NO: 6173
  chr8:24813618-24813893
  hyper

SEQ ID NO: 116356 - DNA, 398 bp, Homo sapiens; identical to SEQ ID NO: 45212
  chr8:24814010-24814408
  hyper

SEQ ID NO: 116357 - DNA, 702 bp, Homo sapiens
  chr8:24814786-24815488
  hyper
acacacacacacactcgtgaaactgcggcactactgcaggtattggtttagcatttttaaacctttacagcagttaatccgcctgttagtgtttctagattttcacatttcttaactgagaatgaagccgcagatggctttaacgtgttgcagtgtgtgggtggtggagggcagagaaagagttggaaacacagagactgacttgctgaggcagccgcgcgctccgcagccgggagcttcaagctgcctggatcctcaccaagctaaattcctgcttgctaccaccaaccgcagcacatttaaagtccgctttcctctttttacacatgtgtagcacacgacctgatgatttcgataagccttgcagttggctgattttcagggaagccgctgcggccagccctgagcgctgggtgtggtctctggggaggagaactcggcacccaggcttcttcaggaacggatagaaaatagccatagccgcgtgactcttcccccgatacaatgtaataacccgaaaacagatgcagtcaggaatgcatggatttccttcaggaagcacccagatgcttgaaactggcgcacgcggtagcgcacgtggatacaaccctacggtttgcagggcattttcacacgcatgatgttaggagtcccccaggtttcatggagggattgcagagatttacacgaaacacctaagat

SEQ ID NO: 116358 - DNA, 295 bp, Homo sapiens; identical to SEQ ID NO: 45214
  chr8:24816310-24816605
  hyper

SEQ ID NO: 116359 - DNA, 1946 bp, Homo sapiens
  chr8:24857494-24859440
  hyper
ctgaactggtgcaggcgtgcaaagaaagctccgtgccacgcccggcagcctccattctttggtagaacgcagcgcagcaatagccgccaagtcccctcctgggtacagtacagctccacagcgcccctgctggtggcttgggaagggcgcgcaagcagagaaagcaagtgtcagagccgggactggcctcccagggcatcgcctacagcttgtgctctgagagtcggggtcatcatagctgcgctcttcgatggacactaaatgcgggacatctgttttacactcaccctccctccccgcgtggcaggagacctacactctcccgctatgcgcgctccgcggcagctgccgctgcaccattcattctctcctgcagaagttcaatattgctgcaaatatcgagaaaaaaaaaaaaagcgctgagagggggagggagggagggaggaagggagggacagcgagccagcggccactgcaaaggggcgaagggcagtcccgcggtcagtaagggccactgaactttctgcccaccggtcatccggagctgaggactgggacatggtggggtgcgtcggcgagggtcccctgaccctgcacaaacccaggggtgtggtgtggatgacccgggaagccgcacccagagctggcggtatgtcaggccatagagaaaaagggatgttcctaggctaaaggagacatcggggctggggatgacatcccaaaactcccagcgccggggagctcaggctcgggcggtgcctggctcccctccccggttcccgccgcaggaggctgctgagtcactcccgcctgagccacggccgcccccagccagccacgcgattggcgggttagcccgggcgcagcgccctcttcccagctcccgcacccccagggcttcccgcaggcagagggtgggagccccggcgagcgaccagttggggcttggtaggaaccccctaaaaatgcgccccacttgtgcattcgtgcatgggcgcattttgggagtaaacaatacataaccttcttcgcattcaaagggtctggactcaaaagagggctcagccttgctcctcgggagcaacccctgttttaaatctgggaaatggtgatgccagtggggaaagggcttctccgggcccggggctcccgagctcctggtgccagccgtgttgctctggcttttgtattttaactccgtgggcttctgtccccatccccatgtaaggccagtgcccccttccgcgttttgccgaaagtatcttcaatgcccgtttaaaaaactatgtctgcgatttctccatctctgctctttcccagttcctctcttttctcttcttcaggccccctcctgtccttcctcatcctttcactgagcgggttcaggccctagttactaccgcaggcaccagccacacccggggagatgtgtgctgttttgtgcaagacgctgcggtcacccagtccggaattctgctggtctacaccgagtgccgcaacaccaccaccacctccgcacacatacgccctccttgaacctcttccccatgaatgctttggcttttaaggaactttgtggcgtttctgctctttcggaggcagctgcccgaggcagcttcccaaggcagaacagggactgactgctgaggttccgcggggtcggggaggtggagaagccagttcccaagtggctcgtcgcgggtgttagagtccctcgttactaaggacgccgccgcccgcgcgccaggcttggggaccagggtgactctgccctttctgggcggaatacgggtgaaggctgtctttggggatccacaggtgatctgtgccgttctcattgtattctcaactctcatcccttccaggttagcccgatccctttaatgcaaggatcggtgccgggaggaaagagagcgtgggccactctggaacggaggctggtgttt

SEQ ID NO: 116360 - DNA, 30 bp, Homo sapiens; identical to SEQ ID NO: 45216
  chr8:25041358-25041388
  hyper

SEQ ID NO: 116361 - DNA, 1682 bp, Homo sapiens
  chr8:25041593-25043275
  hyper
cttgcaccagctctccggtgataaaagttctgctttccaggctctaagcggtggccccgggagattcagtctgccctgagtccggcttctcccgctcgcggcgcgggttcaagctccagggggtgaaggcagaagtcaactgctcattcattcaacaaatatttattgcgcgcccgcttagtgccaggcaccggaggtgccccgagcaagaagccgctctcgctgatccgtttccgctccccaagtgtccggcgcgcgccgtgggagcgcagcccgcatccctcgcccaccggccgcccggcctgggcgtgcccggctcctccagcgcagccctctgtcgggagccggacccccgggacccagcctccggggtatcagccgggtggggagggcgggagaaaggcaaagtgccgccagcgtcaaagtcccgccggcccaggaagccgctccagggaagcgcgcgaggcggagccgcagtcggcccccgcccggcagagcgcagagagcggcgcgggcgggagaggccgggcgcccgcggctcggaggcggccccggcgggcggagggtgcggccggcgggagggactggggcggcgccaggaggggcgcgcactgctgcgctgcagcccggcccagcaggtgaccgcgggcggcgcgggcacgggcacgggcgcgggcggcgcggcgaggaggcggcccgcggagtccagcgaagtttggcggaacatggcggaagcgtctggggcacgcaggagcgcggggcggcggcggccggagcccgaggagctgtagcagccttagtcgccgccgccgcggggcgaggtcgccgccatggcccgctggatcccgaccaagaggcagaagtacggggttggtgagtgcgcgccccaccttgtcccggcccgacccacgcggccaagttcgcggacagcggccctgccaggtttgcgcagagcccggcggaggaccctggccgggggctcggcccggctgcgcagctctgggagccggggacggtaggagtcctctccagggagcgccgatggggaagtcgcccagggtttggggactccgagtgcttccaagtgcagctgagcttcgggaccgtaatcccgctcttgcatcccaatctccggcacttcacaccagggaaatgtcaacgcgaggggggcgcgcctgctgctcttttggggccgcagctctgtggctcgccccggtgcgcccagcgtgggtttcacctgggagtaggtgaccagcccgggtcggcacatggactggtgctcattgtcccagtgctttctgccccccgctttcgtaggttcttctcagacgccccttaagtgaggagttgagggtggaaagccgccctgccccctttcctccagagactgggatcttgatgacagttgtgagctggatggaaactagagtcgtggcgtggaagtgatggaagggacaggaagttgtggcacgggaagggggtggctggcccctggggctgtttgtgcgcactcatcccctaacggagcctgtctggagagggtgtaaggctgccttccggatcctgagtttcatcctggagacgagaagaggacattttattaaggaaactgtgccagaccccgtgctgggcacttggcattcagaacagcggtgctggagagccccgggttgtgcgcaggg

SEQ ID NO: 116362 - DNA, 122 bp, Homo sapiens
  chr8:25316377-25316499
  hyper
ggtaagagccagctcgtcgctctgttaggattggttgaatgagtcttttcgaagtttgcagcatccaatagaaaggtgggaggcggagttaaagcgctaagagaagcgttactccgcgagac

SEQ ID NO: 116363 - DNA, 229 bp, Homo sapiens
  chr8:25897084-25897313
  hyper
accccggaaatgagccgctggaccctctggtggtccctcgcccagactaggagtcgttccagggctttcactcagtaactccaagtggagttactggaaatctaccacaagaggcccggcgggaactccagccgatcccaaacccggcccggggttgcccagcccgcttccaccactaccactgacaagggcacagtggagactttccacgtagccggaggaaactcct

SEQ ID NO: 116364 - DNA, 11 bp, Homo sapiens
  chr8:25897560-25897571
  hyper
cgtcaggagaa

SEQ ID NO: 116365 - DNA, 36 bp, Homo sapiens; identical to SEQ ID NO: 45219
  chr8:25898086-25898122
  hyper

SEQ ID NO: 116366 - DNA, 74 bp, Homo sapiens; identical to SEQ ID NO: 45220
  chr8:25898395-25898469
  hyper

SEQ ID NO: 116367 - DNA, 30 bp, Homo sapiens
  chr8:25898941-25898971
  hyper
gcgcacgcagggccacgagctcagggactg

SEQ ID NO: 116368 - DNA, 637 bp, Homo sapiens
  chr8:25899443-25900080
  hyper
ggaggttcgggaaatcgactgatttagaggctgggggtgagtagcctcgatttatcatccctgatggtgagagtggaaaagtgtcgcgagagtgacagatggaatctttagtgcttcgcaagagggagttattaggccgcggggtttggggggtactttccgcttactttgtcattctccacaaagtccacgaaggccgtccgctcgatctccaccggctggccctgcctgtcatagagcgccaggacgaagtgaaagaagttggatttcctcaagttggaaggaggctgtttctcaaagtgggcccgggacagggcgaccccgctgcacagggagaaaaacgggggaacacaagacacggggaagcacaaaaaggcgatgttactaaccgcccacaacactgcagaggggtaaggggtccacttcccaggtccagagttctgaacccttcgggccttttttccaattcggataaggaagaggagactccttaaaggagtcaccgtggccacgggggttgggtggcagggttgatacctggggtctctgacaccaccaagtggtccggcatcccaccgctgggccactcaccatcccgtctttagtcgaaaccgaaagaccccggctgcagacagag

SEQ ID NO: 116369 - DNA, 275 bp, Homo sapiens
  chr8:25900417-25900692
  hyper
acagggcggaatcctcgcgaccagccccggggatcgctggccaccacaaatgagatgaccgacatagggggccctccctcccagaggtgctaggtggggaaaagccaaactgttaaaaggcgagaacctcctttcctggggccaacgcgatccccactcatgctgcgttttctggcggcgccagccgaacccagtgactgtgaaacccaagttgggggacccggaaggcgccctcgagcgtgctgagtgtgtgcacacgcttcccagccaaccgg

SEQ ID NO: 116370 - DNA, 1549 bp, Homo sapiens
  chr8:25900780-25902329
  hyper
cggcgctggggtctcccaggttgaaccccggtgcgcaagcaccttcattcactcttttgaaaggggtaacattttggctaagctctcccccactaagtctgctccttccagcttcaacaaactttttgatcccgggaaggaaggaaagcgagggaggcgtctttaaggagcccagctaaggaaatgcgcggcacagttggctctgcggtgctgccttatttcccttagctcgcaggcgggccagtcccgaagcgctgcggaaagccgcggccgccgcgctgtgcggtctgccggagggaaatccgcgctccccgggccacaggagggagggaaccgccgccggcccaagtcccggagcgataaaacttctgctttctccgctccaagggtagaggccggttcgctctacccgggacacctggccagtttgggaaagggatcatttctccgtgtgatgttggcacttaaatgtgggtggccaggagggcagcaggggaagcgagggtagtggaagaagttcatcggctctttgggggtagaagggctgcctctctcgcagacaaggacctggaggccacaaatcccaactcagtagtggtgatgagagagtgggaccgtaatgtcttcgtagggtggcaccccggacatggtatttactatcccagcacgcagacgcctaaacacaaagtcaacttcagggatccgcaaaaccagaggctggcgatccctgagccagtctagctgctggtggccttttctcgcctctttcttcttccgcaactctttctactgtgactcagtattttctcttcttttaaatctcttcttttctccagttccctagctccgttcgtctggctcactgttttatctttgagccgggaccctccagcctgtcccccctcccagagctcccggccgcctcgtcttcccgggcagccgctccggcttttcccgctcccctcgccgccgccaccctctggccgccggcctcccaggctccaggaatcgcccagcaagatgcgggaggtaggcgctcgcaggcggcgtggcgaagccaagagtggccaggaagccggctttcctcccgcgccgccactgccagcgccggtgttcacgctccgttcggggccaggccggctcggcttgcaggactaggggctgagctgggagatgttgggggctactttatttttccttgcaaagagtggactgtggtaaaggagagggagagaaacgcctacgacccaggcagttcaggaactcgagtgccggctgccgggtgagcgttcgcctgactgcagcgatctgcttgcccgagggcgagccccagcgcgcagggcctgggcgacagatggggggacagggagagagaaaggcacggggtgcgcggggggggtgcacacggagagacagaccgtaagagcgagagacagcataataattgcgcggccgtgtcgttacctctgcgcggcgacattagcgtccaccactccgacattccggacccaggacctgaccgaatccatctccgcgcccagcgatttct

SEQ ID NO: 116371 - DNA, 1584 bp, Homo sapiens
  chr8:25902868-25904452
  hyper
gagcgccacggagcccggctgcagccgcgcgcgggccccatgaatgggttactacggccctggctgcgggaggcggagctgcggcccgataaggagcctcatttgcatggacgcgcgggattggccggcgcctggcaagccgggccgacgtcctccggcggcgcgcgccacgctctgcgttgccgggactccgggaggtgaaaggggacagaaagctgcgggcgtcgagtcctagcacgaaccccgtgtgcttgcgcaggattggggggcccccacaccctgcactgacttagggtagcaggtctctgcgggctggggacgcaggggttcggcctggctgcgggaagcctccctggatcctgcctctagatgtaggcttttgtagcctgccgggaggcacgttcgttcccggggttcggatctgtgtgcatgcttgtgagcgtggccacatgtgcttatgttttgcgcaaacgtcccccagagcacccagctccctgaatggctccccaggtctcctggagttccatggtgatatcagatgttgtgtgcggcttgcacgttgctgagagtggagaacatatgaaagaaggcgggggatggggtggggcggacaagcgaggggcaagtgctgctcaaatacagtgctggggaaaacggtccaggacctaaggaaaacacccgcgggcgggcgggcgcgagcggcagtcgcacccgtgtggaggagaggttgctgacagatcgaggcgggctgagtgcgcgagcggccggggagtattcccgcgggtcctccggttccctccccacctctccgttcccgaagcccccggtagtgggcggggagggacgggggagtcgtggaaacttcgcccaccgcgcgcggtcgccgcggtgctggccgcgggctggtggccggcaggcggtggcagcagcctcaccgaacagctgaaaccctagacggttttttaactgcgcggggctgctcgcggtgcctattaaacatcctcctggctgggtgtcattttcttgcttctccttttgtattctgatctgcgcatagatctgctgctgctgaaatctagaacaccagcgcgaaaacagatttgaagacaatgaatgcaaatctgtgctcaaagaccatctgccgtggaggagacaatcagctgttcgtagttcgagcgattgcgccccagtctcccggtctcattacggggagggcatttgcgagcgcctggactgcgttcagggcactttctcccctcttgggtctcagatttgagagaccagatcccttaggtgtaggtgagcgctcgcaaatgaactgctagagtttgccgctagaggacacagcgccttgcaactggtttgcctaggctgacaggaagcttgcacttcaagaaaactcggctctctcgagaaagggaccggtgcgcgcctccacctccccaagggacaaaccgcggcaccacgctgcgtgcgcgggattgcgactaggaagtgctggtccgaactgcggagattcgcttgaaaacggatagggggttagggagtttgcggggcgggtgcacggaccgtctctgcacaggc

SEQ ID NO: 116372 - DNA, 825 bp, Homo sapiens; identical to SEQ ID NO: 45226
  chr8:25904803-25905628
  hyper

SEQ ID NO: 116373 - DNA, 297 bp, Homo sapiens; identical to SEQ ID NO: 45227
  chr8:25905695-25905992
  hyper

SEQ ID NO: 116374 - DNA, 88 bp, Homo sapiens
  chr8:25906080-25906168
  hyper
cgccaagtctctcctcccgatcagaggttcggaaattttacttagaaactgctctcctggctgtgttcctgtccggcaggacactggg

SEQ ID NO: 116375 - DNA, 231 bp, Homo sapiens
  chr8:25906742-25906973
  hyper
gcagaaatactgagtcgtggaggaacgttttagagacacttgatgtcggttgtatccaggccagtcggggcactgcagtaagtttacccaaaatagactggaggagccagattcaccgctaccctaacacttggcaactccagaaagtcttcctcctcgtcttcctctcctctgctcctcctccccctggtattctccttcagaaatatccctctttcccatctccttatt

SEQ ID NO: 116376 - DNA, 240 bp, Homo sapiens
  chr8:25907061-25907301
  hyper
cggaaatagaggcccgggaggtgtgtgtgctgcggaacaggctgtctgtatagggaagtgattgatagcttccacgcgaacctggggacccgatttcccaggtgggaggggtgactttcacgtgaagcccctgctgggggccttgctggggtaaatcggctggccgattacagcccctttcagggaactgtgcacgaaggcggtggcatctgtcatcactatttacggtgcagcgatcag

SEQ ID NO: 116377 - DNA, 361 bp, Homo sapiens
  chr8:25908063-25908424
  hyper
cgcctcccggatttgaggatgggggagactttggcggcgggggtcagctgcaaatatggcaccatctagaatttcattccatttagcactaggcaacctcctcctccaacacacacacgcactcgcacaccatcacgatcacctccacctacactggcacacctcactcaggtggcaagagagaaaatccaggaaagtcacttgcatagagtgcacggatttcaagaagtctttgacggtgcaaactggacttctaatcatgggatctctccaaacacagcccaaggcctagaaattccatttctggctcacggaaccttccacccccaccccctcacctgccgcgagccgggcaatcatt

SEQ ID NO: 116378 - DNA, 276 bp, Homo sapiens
  chr8:25908502-25908778
  hyper
cgctctcctggccgggcagctccataccaccctcgaagggggacacaacttccacttactcttttctcccaaaggagagcagatgggggtcacagggcttgggggtcactgcgttcagacagtcaccccgcgcggtaagtgcttagagcaacgtttatagggcaatgctggcctcgccgcgtaggggtcgctggactaaatgcccagaaaccctcacaacccgtgatgtccactttccgtggatctgaacccgggcaagttcggtcgtttctgttg

SEQ ID NO: 116379 - DNA, 440 bp, Homo sapiens
  chr8:25909229-25909669
  hyper
gctttttgtttgttccgcatggaattgcatgtgagaaaagcgctttggaagctgtttggtgcacgcgggcgtcagagggcaccgtaggtcactgagcggggtctcacccagggagagaatgcgacttcattcctaggaggctgtgctgggggctccgcgctgcgcgcggcagtgagtagggcgcaccccgaatgcaagtgcggttcgctgcgtggccgcgtgctgggatggatcgcggaactcgctagataattgaagatctcgaggagctctgaaatggatcttcggtttctacgacaaacccccgtcgatgagtggttcacagagagcttggggagcccctccccgccctgcgccctcaggaagagacgcggctcgcctgacactactggtctctgtctcccgagagccagagccgagctccccgagtggtgctttcc

SEQ ID NO: 116380 - DNA, 83 bp, Homo sapiens; identical to SEQ ID NO: 6184
  chr8:25910857-25910940
  hyper

SEQ ID NO: 116381 - DNA, 312 bp, Homo sapiens
  chr8:26148758-26149070
  hyper
gccccagagccccggcgctagtgctcgaggctgggacactgctaggtgcacacagccgcggcctggcgcaggcggtgcggacagagggtatgccatggcgagacgctggcgcggcgcaggccctgccggccgggacacggagggcggggcacaggcgcagcaggaagggggcgtggccaagagccgcccggccgctcccccgcccctccccctccgctctccgccccagcccggcggctccgccccctaggtgacgtcactggccaggccagccggcgccattttgaaagtggagtcgcctgcccctgccgc

SEQ ID NO: 116382 - DNA, 30 bp, Homo sapiens; identical to SEQ ID NO: 45234
  chr8:26149285-26149315
  hyper

SEQ ID NO: 116383 - DNA, 67 bp, Homo sapiens; identical to SEQ ID NO: 6185
  chr8:26150335-26150402
  hyper

SEQ ID NO: 116384 - DNA, 30 bp, Homo sapiens; identical to SEQ ID NO: 6186
  chr8:26150768-26150798
  hyper

SEQ ID NO: 116385 - DNA, 30 bp, Homo sapiens
  chr8:26240873-26240903
  hyper
tgactgacagctcccgtcccctgtcaagag

SEQ ID NO: 116386 - DNA, 30 bp, Homo sapiens
  chr8:26241550-26241580
  hyper
tgaaagttaacggacgaggctgatagacaa

SEQ ID NO: 116387 - DNA, 145 bp, Homo sapiens; identical to SEQ ID NO: 45237
  chr8:26305931-26306076
  hyper

SEQ ID NO: 116388 - DNA, 30 bp, Homo sapiens; identical to SEQ ID NO: 45238
  chr8:26306315-26306345
  hyper

SEQ ID NO: 116389 - DNA, 30 bp, Homo sapiens
  chr8:26307401-26307431
  hyper
gtttctgaagctttcgattcctcttcggct

SEQ ID NO: 116390 - DNA, 255 bp, Homo sapiens
  chr8:26370012-26370267
  hyper
actgtgggggtggttggtaaccgcatttaatcctgggctgacaatgggactggatccctggttacacggccctacgcggtggccctgcggtaaacggcctctcagcccaaacccaccctggttactgagcatgcccagaactccctcccgggccaccaaaggaggggcaccatttctgcaggattttgccactgtggaaagagaggcggagctgtcatcgcgcagaggcagggactgatacgcggaaaggacgtg

SEQ ID NO: 116391 - DNA, 287 bp, Homo sapiens
  chr8:26370480-26370767
  hyper
cttactccccaaacacgtggcatctggtaacccgggaaacgctgcgactgtggcgcagtgcgcaacaggggcgggggaaccaggcggggctctggggcgcaggggaaagctggagatttgggaagggggtttcagtttgttttttctctctttttttttttttttttttttttttggtggaggaagcagaataaaccaaatcgcgacacgttcctgcgcccttcttggcgcagtggcgcagacacggtccatggcgccttgcgcaatagagtcggtctgcaccccgt

SEQ ID NO: 116392 - DNA, 255 bp, Homo sapiens
  chr8:26371162-26371417
  hyper
cccagggtaacggggcgggacccctatccacagtgcgccctcgcccccggcccacctccgccatgcggcggggcagaggcgcctgggccaggcaggtggaggagaggggcactggggctgggggctgcgtcctccggtcctcactccgcgtgccctgcccgatacttacccaggcgcggagagcggtcagcgggccctccgctccgcatccattagctggtggtctggccgcttcacttccggagcgcggggcta

SEQ ID NO: 116393 - DNA, 1121 bp, Homo sapiens; identical to SEQ ID NO: 45242
  chr8:26371675-26372796
  hyper

SEQ ID NO: 116394 - DNA, 65 bp, Homo sapiens; identical to SEQ ID NO: 45243
  chr8:26435019-26435084
  hyper

SEQ ID NO: 116395 - DNA, 221 bp, Homo sapiens
  chr8:26435403-26435624
  hyper
gaaagggagtggctggcggcgcatgcgccacggtggccgacttgaaccgaggcttttattgctgtagtttatttccacccccttccctcctgtttctctctctccttctctctctctctctctctctctcttttttttccgccctagctggggctgtgttggaggagaggaagaaagagagacagaggattgcattcatccgttacgttcttgaaatttcc

SEQ ID NO: 116396 - DNA, 605 bp, Homo sapiens
  chr8:26436193-26436798
  hyper
ggactcctccagcagcgatggggagatggggacttggatcctccccgggtcttccgcccccacccaaaaagggctttctggagccttctccgggtccttggaaaaaggagcgggtttgagccctaaggcgtaatgacagcagagggatgctgaaaagggcagggtgtaccggaatggtgtggaaacgggaaggaaaaacagggacgaggtgatgagcagaggaggaaggcggggggcaaggcgggggcttcttgttggccaggaaccggttttgggtgccccccccccggttttctcgccctgtagttcggggctggggccctggcggggattcgggctctttttcacgtctcttttccgccccttctgccgctcaggaggcgtccgtgttggtgcatacaaagcggactgcagggtgggcgcggggaccgcggcgagcggccgggcgctaatggcgctgcgcgacgcgggagcagatggcccggccccggccagacaatgatcgcggcggccggagggctcggcgcagtgctggggcctggacttgttggtttgcaaaccacggggaaaacgtctgtgccgtgaattagcgatgcctcagagat

SEQ ID NO: 116397 - DNA, 1484 bp, Homo sapiens
  chr8:26722955-26724439
  hyper
aagatcagccgtcgacgctcaaaggcagggaccgatggttgggtagcgcagcgctacaggttgggcgctgctcctggcccgcagttacctacattttgagctgccccaccgaaggctcctgctctctccagcttctaggagcacaggtcaggggacgtaggtgtggaatatgtgctgagacccaggaggctgcggggcatcgtttgaccgcgtccacctgaaagagcgcaaagagaaaggcggctttgagctaggcgccccagggaaagaggctgtgctgagcttgacgggttgggggacaccagttgggagccgggttggttctgcggtccagaagctgcttcgcccggcagcggtggaggcgacttcggagctcatctcgcgcccccaccactgggaacctgcctagcgcactctactgagtcacctctgcccgagttcaggatccgaagcgaaaaacaaacaaaaaaacaaatccccaaaaccccaggctccagcgctcgaagtctggatttcgagcgcaggtaccacgaaattaaaatcctcgaagccccggaggggcgactgcggctggcgagtgtgtcgcacggatcctagccggggaattctggaggatgtactcggtttccgttagaacaggttgcctcgcagtcacctggagggggcggcctgggagagggaacagctgcgacccagggacctcagggccaggaccacgagcacgctcactctcacgccggtggaattcgcactcgggtgtgcagagcgcaccggtctgtccaccagccaagctggcttgagagccaggtcccgagcgaagccgggagggacccgaagacagaaagcgacccaggtctgtccacgacgcctttccaagcctcactgttggccacccgaggggctccagctgccagccgtagcgggactggcgggggacggggtggggaggacgtccctctgcagagggagctttgcaagtgacagtcactgcggattttgcaggcgtaaacattaagccggcatgccagcgggcaggggccgccttcgattttctgggctgggggccaccatctgcgtaagaaacctgggtttccacaactgcgaacctaccgcagggactcggcaggacagcgcggcgtgaggaagtgcccaccttgccttctggggttgggccctgaggtgggacctcgggcaaagactcttgttaaaatcgcaagttggagacctcacaggtggtattaaaaacgtgccactgcagaaacccttttcctcctacctcgagggtgataaacacagggttaaaaagacacttgttcagtagaaggcaacttcgcagaagatgtaagggaatcgggggtggggtagaggggccggtataaaacctggtggaaaaagcgggaggcgctgggaaaagtgggggttccgtctcaccagacggcgggggaggtctgccctcacccactcggccctgcgggacgccggcc

SEQ ID NO: 116398 - DNA, 509 bp, Homo sapiens; identical to SEQ ID NO: 45248
  chr8:26724484-26724993
  hyper

SEQ ID NO: 116399 - DNA, 31 bp, Homo sapiens; identical to SEQ ID NO: 6195
  chr8:27099006-27099037
  hyper

SEQ ID NO: 116400 - DNA, 79 bp, Homo sapiens; identical to SEQ ID NO: 45250
  chr8:27168527-27168606
  hyper

SEQ ID NO: 116401 - DNA, 157 bp, Homo sapiens
  chr8:27168865-27169022
  hyper
acgctgagagacagcggcgctggccaatcgtgcgggggggatggcgagggggagggagggggcgctcggaggagccccacccacttccggtgtgcgcgggaaatcttgggagagcggggtgggccttctgcccgcagttcccgcctcctcaggtccg

SEQ ID NO: 116402 - DNA, 30 bp, Homo sapiens
  chr8:27169241-27169271
  hyper
acttaagtttgcagcgcctttttgaggacc

SEQ ID NO: 116403 - DNA, 251 bp, Homo sapiens; identical to SEQ ID NO: 45252
  chr8:27327201-27327452
  hyper

SEQ ID NO: 116404 - DNA, 205 bp, Homo sapiens; identical to SEQ ID NO: 45253
  chr8:27348567-27348772
  hyper

SEQ ID NO: 116405 - DNA, 250 bp, Homo sapiens
  chr8:27449812-27450062
  hyper
tccccgtcctcaggccgcttcctttcctggtttccaggtcctcgtttctcccagcgctgccctccccatctaagcccaagtcgccgtgagcccgcgctgcccccttgtggccaaagccctccccagctcaggaaacgggaacgcttggcggccaggctgagagtcggtgcgcgtgacccggcttctgctcgcagcatccaagaagttgcaataacgtggaaggatggggaacggcgcctccctggctagc

SEQ ID NO: 116406 - DNA, 91 bp, Homo sapiens; identical to SEQ ID NO: 45255
  chr8:27472370-27472461
  hyper

SEQ ID NO: 116407 - DNA, 595 bp, Homo sapiens
  chr8:27491096-27491691
  hyper
gatcaaggagctctcccggtgagcccccccattgcggccgcagcgcgggcagggaggacgccgcgggagcccgggttcgaggctgggctgtggggctgcgggggcgcacgggcgaggtaggcggggcgcggggcccccgcggcggcacaaagaggccggccgcggcagttttgaaaataccaaggaagttgatctgggccggggcccaagaagtgacgaggagggagggaggcttgcgagcgagggaggaaaggagggagagggagaggagaaggcgggaaggagggagggaggaagggtgcgcggggcgaggggcggcggcagacctcgcggggccccagcgggaagcgcgggcggcggcgggatgcgcgctctgggcggcggggcgcggcgctaggcgcccggcggggcttccccaggctgcgaccccgcgggaccctccactcctcccgccgcctccgcagcccgcgcgccggagcatgagtcccggccggagccccacggccgcgggcggcgcctaggacggcgatccgcgccctggaggatccgccggccgcccggctccactacagctccagccgcctgcagcggggcc

SEQ ID NO: 116408 - DNA, 30 bp, Homo sapiens
  chr8:27630004-27630034
  hyper
ccaggaggacgtggcgcccactcaccgctg

SEQ ID NO: 116409 - DNA, 31 bp, Homo sapiens; identical to SEQ ID NO: 6200
  chr8:27694968-27694999
  hyper

SEQ ID NO: 116410 - DNA, 30 bp, Homo sapiens
  chr8:27695461-27695491
  hyper
gaaggaaggaaaggcgcggggagcacaaac

SEQ ID NO: 116411 - DNA, 30 bp, Homo sapiens
  chr8:27814374-27814404
  hyper
aggtcagccaagacacgatgcctgcaggac

SEQ ID NO: 116412 - DNA, 30 bp, Homo sapiens
  chr8:27945134-27945164
  hyper
atttcgttcacataccgatggctctcgact

SEQ ID NO: 116413 - DNA, 32 bp, Homo sapiens
  chr8:27950283-27950315
  hyper
tggtctcgcccattcgcgttcccacccaccct

SEQ ID NO: 116414 - DNA, 30 bp, Homo sapiens
  chr8:27950610-27950640
  hyper
tacgatacattgaccgacattttacgacag

SEQ ID NO: 116415 - DNA, 30 bp, Homo sapiens
  chr8:28221259-28221289
  hyper
ccagtcttcagacggcgcctgaaatgtttg

SEQ ID NO: 116416 - DNA, 227 bp, Homo sapiens
  chr8:28242658-28242885
  hyper
cctgcaggaatcccccgcgcctggtagcctggcatcatgggaacgcctgcccggtggaagtcctccaaggccacagggagctggccagggctgcccaaaaccgggaggcggcggcggccccccttcccgctggccaggtgggcttctttaggtctctgagtcagttccaaagtgaaggcgctgagccctgcactcccaggcagggaagaaaacgctgccttggaaat

SEQ ID NO: 116417 - DNA, 30 bp, Homo sapiens; identical to SEQ ID NO: 45260
  chr8:28243919-28243949
  hyper

SEQ ID NO: 116418 - DNA, 30 bp, Homo sapiens; identical to SEQ ID NO: 6202
  chr8:28244371-28244401
  hyper

SEQ ID NO: 116419 - DNA, 114 bp, Homo sapiens
  chr8:28258794-28258908
  hyper
cccaagcagcgttgcccggacgcgccgctcggggcccagagcgctgcgtgcacgcagcctctagcaaccacttaccgcgtgtgtgcgcatgtgtgtacgtgtgtgtgcacgtgt

SEQ ID NO: 116420 - DNA, 30 bp, Homo sapiens
  chr8:28259394-28259424
  hyper
tcccggccgccccgcgcccgagggttaaag

SEQ ID NO: 116421 - DNA, 385 bp, Homo sapiens
  chr8:28347826-28348211
  hyper
gtctataaatcccgtcgctggcatccggggtctcttaggcaacaatgtgtgggctcctgattggccgcgagatccaggagggctggctacaaaattgggcacggggataaaattaacaagtgtggcggccaagagcgtgggagggactgcaatgtctcaatataaccctagaatgaagacgcgtcgaatcctgaaacaagtagcgttgaaaaccttcattcaagacgtagtgtgtcccaaatcagccctacctacggagcacgcccagtcacattgtcctggtcactccggagctgcgaaatgcaggctccactgtgccaggttttaagagtggccaacaggtaaacagagggttggaggaaaaagaattcgagactggttcaat

SEQ ID NO: 116422 - DNA, 30 bp, Homo sapiens
  chr8:28348432-28348462
  hyper
gcctgtcttgtaatacgaagcaaaatgaga

SEQ ID NO: 116423 - DNA, 30 bp, Homo sapiens
  chr8:28351202-28351232
  hyper
gcgcgcaccagtaacgaccagcgccacctg

SEQ ID NO: 116424 - DNA, 114 bp, Homo sapiens
  chr8:28352544-28352658
  hyper
gatccccgagggtccgcatctgaaatgaagctgctgtgaaatagccagcaaggtgaaggagccttgtgtcctttcaagacatgtaaacatcttcctagcggtgttttacatctt

SEQ ID NO: 116425 - DNA, 127 bp, Homo sapiens; identical to SEQ ID NO: 6204
  chr8:28560084-28560211
  hyper

SEQ ID NO: 116426 - DNA, 563 bp, Homo sapiens
  chr8:28747284-28747847
  hyper
attgctacccctcccgtgcgacgattccctgcccaacgtaggaaaaaaagaggtccaaaaggttatagcatcacctttgccctctgacctaggagcgaagactcaccagtttcataatggacttttggtggttcaatagcagtcactgaactcctcaaacccaggaagcgtcttccggtgcaatctccgccacctgccagccgagagcatcgcgggacttgcagtctttcatcctcacgtcccttccaggggaataatgggaaatgtagtctcccctccaggcatcatgggaactgtggtcgcctttccttttcctccctttcctctccgaacgcctccttccgtcagctcaaattcatcccagccgccaatgcatcctccctctccaccccagcatgatatcatgtcttccttacgggcctggggcccatggtgttctgggatgtgtagtcccgacggctccgactcccctttccctcctcccaaagggaaggcggatgggcacggggcttgccggaagttgtagttcccttggccctctaggcgccgggctccgcaatttt

SEQ ID NO: 116427 - DNA, 30 bp, Homo sapiens; identical to SEQ ID NO: 45266
  chr8:28748664-28748694
  hyper

SEQ ID NO: 116428 - DNA, 334 bp, Homo sapiens; identical to SEQ ID NO: 6205
  chr8:28748908-28749242
  hyper

SEQ ID NO: 116429 - DNA, 30 bp, Homo sapiens; identical to SEQ ID NO: 6206
  chr8:29120171-29120201
  hyper

SEQ ID NO: 116430 - DNA, 63 bp, Homo sapiens
  chr8:29120733-29120796
  hyper
gtcgtgggcggggccgcagcgaaggcgggggcgggaatgctcgggcgcgagtcgtttgctaca

SEQ ID NO: 116431 - DNA, 30 bp, Homo sapiens
  chr8:29121067-29121097
  hyper
tgtccataggtccacgggttaacattgtcc

SEQ ID NO: 116432 - DNA, 31 bp, Homo sapiens; identical to SEQ ID NO: 6208
  chr8:29172530-29172561
  hyper

SEQ ID NO: 116433 - DNA, 2289 bp, Homo sapiens
  chr8:29205972-29208261
  hyper
aaaagacagccctcgcggaaaaagaaagaaaaatcagcaaaatcgccttagcagttcaaccaaaggtcaacagcagcgtttccccagcagctgacaggtcaaatgggcaggaaacaactgcggggaacaaagccccccgctgtccggcaggggcgaacccggctcctccgcactgaacagttttgttgtgctttttggaggggagaggtttccgccccctttccagctcccttcctcccgggtggacaggtcggaagaggagcggaaaggaaaggaagggagggaggcggcgaaggcgcctgcgggggggaggagcggctctttgatgggtgtgggggggtctgaactgcctaccgggctcggaagcgcagaccctacccgcgcggaagaatgcgcggaatgcggcggcgggaggcggaggcgcagcgcggcggggggcgcccggaccccacgcgccctgcccgctccctagcccgagggccgcggacccaccctgccctgcaggtgtggcgggcgccaggtccctccagggactcggacagcacgcgatttttccaggatttccgactaccaaatgtgacaagacagtctcgccgccgagagtttcgccagggctcgctaaaatccggcacgcgccgccatcagatagtcgaaaatccgggctgaacaaaaggtgatcattctccgctgcccggatttgcaggcgctagaggaccggttccgcccggcgtcccccagatacccagtccttcagcctcccgctcccagagcctggatctagcccgggacggggattggccaccttccaagctgagcttggagttgggcagcgggaacgcagatacagatcgctctacacagtgtgtgcaacccaatctccctttctgcatttgccagggtcttgttttcagtgaaactggcaaggccaattgtacctcggcgcccacccctcttcaccttttctccacctctgggattctcccggtccggctcagtgtagggccccagcacgccaaaccaacaggcctatcttgtccccacgcgccccgtggtacttggaaactgttcccgggactcaagatggaccgcgcagaggagtcgcttcatcctcgaggctaggaccgttaatgtcaataaacggggcctcgctaggacggtgcggaattgcaggtgaccggagaaacccgtccgcactttccctgaggacttgaacctcgcacttgcacagaaaccttgcaaacccctacacaccaacacacacaaaggggcgcgcggggatccccgcaaccacgaatcacgccggggactccttcccgtgccaataaggcgcaggccgccaagaccccctccatctccccgactccagctagcgcccggagccctcgtttacctttgagcaggcagatgtcggtgcgctcggcgttgcggcgcagcgcctgcaccaccagcgacacggtgctgtcctcgcggaggctctcggcgcgcgggctgcgctcgtcgtagacgatgaccgccgagtagaggccggagcgcaagcgggcgcgtacctcctcctcggcgggcaggatctgctccaggctcacggagcccttagcccgccgccgcacgatggtgttacagcgcacgttgaccgaacctaggatgtagcccgcgctgtgcgccaggaacggtctgcagtccagcagcaggcacttgccgccgctcggcagccccagggtgccgtggctgccgctgccgcccgcgccgccgccattctcgtcccggttcatcagccttttgagcacactgcagtccatctcccgcagctcctccatcgtcaccatggtcgccgggaaccgaggcggctgggcgcgcgaggaagagaagagaacccgggccgcctaggctgcagaaaggggcgggcgagagctaagaagggacgcctgcagaagtggccgcaaacttggtcctcaagggctcccgcgggagagcctcttcttccctgtccccttcctcccgcagcctcgcggtcacatagcagtcggagcggcctcgggcgcccagccgggcggcgcgcagagcggagggggaggcgccggtggaggagagtgtgtttacgagagaggaccgcggactcttttcggcgacggcctcccgtgtatttttgccggtcgcgcggctcctgtcgccactggcgccagcgctgccctgcctacgctcctccggcgctcagcgcactgccccagccagagttttctcctcggcttagaggtttattaatgctcctccgcgctcccgggggagggggcg

SEQ ID NO: 116434 - DNA, 414 bp, Homo sapiens; identical to SEQ ID NO: 45273
  chr8:29209536-29209950
  hyper

SEQ ID NO: 116435 - DNA, 646 bp, Homo sapiens
  chr8:29387042-29387688
  hyper
aggccctgcgccatccgtcatttctcggcttcctcccacgcgccttcatgcggatgtgtaggtatctcctctccctggctgagtcaagtcactcagagactgaaaagagagagaggatgtggcgtgaagctgaagcctgcacccagggcctggcacctactgggttgggcttggcgctgcgtgcttgcatttccgcggatagaccgagatggcatctgggctgtgacactggctgcccagcttttcttttctttttttccaacagcatctggaagaggctctgggagggtccaaacaacaaaccacgcggcgttctctggtggctgtgctgggacgagtgggcggaaacagccgcaggtctctctcttctcttcagcctgaaactcactgcacaaataccagaggttttttttagagattagataaatttgcatccttctccccccaaccccgcccctaagccagaggaagtgcttgaggaagtaatgtgtttaaagaatgtgggggaggggagcttacattaggaagcaggactcttagcgtgtagccagaaaccccaataacctttaagctgttaacccttgaggatacggctcaatggtgtacccacgtggagttcattatttatctccgaaagccctgtctg

SEQ ID NO: 116436 - DNA, 30 bp, Homo sapiens; identical to SEQ ID NO: 45276
  chr8:29509600-29509630
  hyper

SEQ ID NO: 116437 - DNA, 31 bp, Homo sapiens; identical to SEQ ID NO: 6213
  chr8:29939478-29939509
  hyper

SEQ ID NO: 116438 - DNA, 30 bp, Homo sapiens
  chr8:29939983-29940013
  hyper
acaacagcaggccacgatgacatcacacag

SEQ ID NO: 116439 - DNA, 136 bp, Homo sapiens
  chr8:29952640-29952776
  hyper
atccaaaggacggccgctacccgcgaccccttcccaacgcacgcgggaggttgcgggatcagggacaggggcttcagcagggagcccccagaccggccctgacaggaattcaagacctggcgcctgctcattcccc

SEQ ID NO: 116440 - DNA, 30 bp, Homo sapiens
  chr8:29953049-29953079
  hyper
cctgggttgcaggacgcgggagggctgggg

SEQ ID NO: 116441 - DNA, 30 bp, Homo sapiens
  chr8:30013698-30013728
  hyper
tccgcgggcggccccgcaccgctaccaaaa

SEQ ID NO: 116442 - DNA, 30 bp, Homo sapiens
  chr8:30013972-30014002
  hyper
aacctgttcctggtcgccaatggtggcgac

SEQ ID NO: 116443 - DNA, 2259 bp, Homo sapiens; identical to SEQ ID NO: 45278
  chr8:30241416-30243675
  hyper

SEQ ID NO: 116444 - DNA, 30 bp, Homo sapiens
  chr8:30515908-30515938
  hyper
gaagtgggaggcggcgccactgaagatgga

SEQ ID NO: 116445 - DNA, 386 bp, Homo sapiens
  chr8:30601507-30601893
  hyper
tttcttctgaaacacggctacagactataactttaaaacacggggcttagctccccctcaataacgacacggccgtcagtatttaccacgttattgaccctctcccagccggcccgcggcaagaagagttccacttccttcccggaaaacgcggccggaaggggcgggctttccgcctgcaccaggcgcttccgccaccatggcttcacgtggggttgttggcattttcttcctctctgctgtcccccttgtgtgtctggagctccggcgtgggatcccggatataggtaagtgtgactttttcccttcgacagtcacagctgggtaattttcacaggaatgttgcatagaacgaccgcctcttcggctgcgtggcttcggagcag

SEQ ID NO: 116446 - DNA, 483 bp, Homo sapiens
  chr8:30769299-30769782
  hyper
cgagcattccaaacgcggaaactcaaccccgagcgcggagaggatggaaactgcctgaaaggatctgtgcagggctgggcttgggacgcggctcacacgaaactgaggcaggagtctcttcctgcacccgcaccacgccgggacccgaggggtttcactcccttcactgagccgagccaggaagccaagagccaccagggcgaagcagccctgcaaaacctccactcagccttacaacagccacagcgccgggacacgcggcaccgcatcccgggcgcgccagtcctcctgcagtcgggggacgctcccctcaggcgcccgcgtcggagcccagctacccccgcgccgccctcacctaccgaggctcccccgcgtccaccggctcctgcagcgagacagccggcgcaggcgggcatggtccgagcgcgggctctgcaggggagaatgaggcgcgcggactgccagtcacccgggcggcgttcc

SEQ ID NO: 116447 - DNA, 287 bp, Homo sapiens; identical to SEQ ID NO: 45282
  chr8:30769822-30770109
  hyper

SEQ ID NO: 116448 - DNA, 212 bp, Homo sapiens
  chr8:30890057-30890269
  hyper
gggagctttgcttcacgtctaggtaaaacctctttttctggatgtccactcgtttggaggccagctcctggatttcggctgcgcccccggcctgattaggggtggctgaggccgcgtagtgggggtagtgggagtgctgggcctggggatagagtctactcttgcttaggccagagccccctacattcttgcctccgcggccgcggccgccg

SEQ ID NO: 116449 - DNA, 95 bp, Homo sapiens
  chr8:30890540-30890635
  hyper
cgccgcccgtcccgcgctccgcggccccaggtctccagccggcgggcactcacatcatctctgccatcaccgccgccgccgatgcccttcacgac

SEQ ID NO: 116450 - DNA, 240 bp, Homo sapiens
  chr8:30890887-30891127
  hyper
cgggcggtggaccccgcctcccccggcacagcctgctgaggggaagagggggtctccgctcttcctcagtgcactctctgactgaagcccggcgcgtggggtgcagcgggagtgcgaggggactggacaggtgggaagatgggaatgaggaccgggcggcgggaatgttctcacttctccggattccaccgggatgcaggactctagctgcccagccgcacctgcgaagagactacactt

SEQ ID NO: 116451 - DNA, 30 bp, Homo sapiens; identical to SEQ ID NO: 45285
  chr8:30891356-30891386
  hyper

SEQ ID NO: 116452 - DNA, 1131 bp, Homo sapiens; identical to SEQ ID NO: 6218
  chr8:31496427-31497558
  hyper

SEQ ID NO: 116453 - DNA, 384 bp, Homo sapiens; identical to SEQ ID NO: 45287
  chr8:31497576-31497960
  hyper

SEQ ID NO: 116454 - DNA, 628 bp, Homo sapiens
  chr8:32077880-32078508
  hyper
aacatttgcccttgtattccacgcatcaccttgacagcctgcataatataagggacggagcggagcaggggctcggggtgggagcctggaaagaaaactggggctcaaggaggtttaatatcggttagtagcttgggatccttcggataacggctgggcaatgaaaataaaaagccccatttccagaaatcaaagaacttggggagaaataaacacgctggttcaaaggaggggaaaatatatcagaactagtcggacctaagggagcagatattttccaaaaatatccttcccaccagccatgctgcagatgtgtcactgtggctcagaggcaggccatctgctgcagtgtttccctggaaacccccagcaacgcccctcccggagctcctccgcggtctcccccactccatccccgcgcagcggaggagcttgccggtgatgtcactgctgctagctgggagggaatcccaggacctgcgtccctcgggtagagccaatcatggtcggctctggatgctggaaacctggggcttttaaccagaaagaattgcaaaagcaatatgcaattcatcacagtccacaaagcacagttcctaacagattctgaaaacgtgattttaaaaaa

SEQ ID NO: 116455 - DNA, 30 bp, Homo sapiens; identical to SEQ ID NO: 45289
  chr8:32349021-32349051
  hyper

SEQ ID NO: 116456 - DNA, 1066 bp, Homo sapiens
  chr8:32405170-32406236
  hyper
gcgcaacctagcatctttaaggttcgcttagcccttcctgtgcacctggaaggaagccttatcttaaactcccttccacctagagtttattttcgcctgcgtgcgacagggcttttgtacttaagtgagttaaggaatgaaccccgaactcttctgggaaagccaccaacgttccccccgcacccctcccagggttcctgaccacggagactctgcttggggcacaggtgtgggagtcgcaaacttttctctgcgccgtccttttccgcgtggaatgggacggagcagccctcccaggcgctgcctggctgcggaggggagcgggcagcgagagcctcgggtctccgcctgggttcccgggtctccggggcgctggcctcggtctccgcgcagcgtccagcgacccctgtcgggggttcccggcagccgcgccgccaccccccgcccggccagcgcgggaggaaaaggggctgcgcccgggagcgccgagcccaggctcctcccggtggcgtgtccgcgcctcggggtgggggtgtggtggggaagagggagggggcgaggccaggggagggtgcgaaggaggcgcctgcctccaacctgcgggcgggaggtgggtggctgcggggcaattgaaaaagagccggcgaggagttccccgaaacttgttggaactccgggctcgcgcggaggccaggagctgagcggcggcggctgccggacgatgggagcgtgagcaggacggtgataacctctccccgatcgggttgcgagggcgccgggcagaggccaggacgcgagccgccagcggtgggacccatcgacgacttcccggggcgacaggagcagccccgagagccagggcgagcgcccgttccaggtggccggaccgcccgccgcgtccgcgccgcgctccctgcaggcaacgggagacgcccccgcgcagcgcgagcgcctcagcgcggccgctcgctctccccctcgagggacaaacttttcccaaacccgatccgagcccttggaccaaactcgcctgcgccgagagccgtccgcgtagagcgctccgtct

SEQ ID NO: 116457 - DNA, 592 bp, Homo sapiens; identical to SEQ ID NO: 45292
  chr8:32406351-32406943
  hyper

SEQ ID NO: 116458 - DNA, 30 bp, Homo sapiens
  chr8:32504742-32504772
  hyper
tgcctctcctgccgccgctgctgctgccgc

SEQ ID NO: 116459 - DNA, 44 bp, Homo sapiens
  chr8:33330279-33330323
  hyper
cagaggctccggcccggcacccgcctcccgcctggtggatcagg

SEQ ID NO: 116460 - DNA, 30 bp, Homo sapiens
  chr8:33330569-33330599
  hyper
gctcgcactcacctcgcgcggagcagggtt

SEQ ID NO: 116461 - DNA, 30 bp, Homo sapiens; identical to SEQ ID NO: 45293
  chr8:33342762-33342792
  hyper

SEQ ID NO: 116462 - DNA, 103 bp, Homo sapiens
  chr8:33370084-33370187
  hyper
ttagagtcttcctgcgatggggcttccagagcgctgtcaagctccattcctgactgcagcaccagaaggctggtctctcccacagaacgaggatggaggcggg

SEQ ID NO: 116463 - DNA, 30 bp, Homo sapiens; identical to SEQ ID NO: 45295
  chr8:33370678-33370708
  hyper

SEQ ID NO: 116464 - DNA, 691 bp, Homo sapiens
  chr8:33371760-33372451
  hyper
tgttcaatgcaatactttagctggtttctggagctagcgttttaaagcctgtagccacaagcgtttgaaaattcaaattctagcgtcaaggtagaagcccccagctggcgtctggggcagccctgagggaggtgggtcgtcgggttggcggatccggcttgggcccgccccgccagtgtcggcgccgggtgcgcagggacagcagagcgctgtcttgggcatgggtcgcaggcggcgcccggaacgggccaggggagctggaggctgcagactcgggctcggcgggtgtaggaaccagtggtgtttgcttgggttttgagaaggcgcgagaagggtcgcgcctgtgcgaccgccctgtgttgggtcccccacgccgcgtcggcattgcttgttccctcttcctgcgctttcctggagggtagaattgcgtccgattggccttcagttcccgaggagctgcttccatttaggaccttgtgactctcatagcttccacggtttcgcaggagcccgaggaggcaaacttcatttgtgccactgcacaggcgggagcttcggaccctgggaggggtggcgcgagagagacgtgtcgccagctgctcggagagggactcttattcagcctctaaggcgtcaattgcgcctccagggttccaggagtccagagaaagcccttcggggtcttctgacc

SEQ ID NO: 116465 - DNA, 30 bp, Homo sapiens
  chr8:33424335-33424365
  hyper
cggggtcggggcagcgcgctgcagccgccc

SEQ ID NO: 116466 - DNA, 30 bp, Homo sapiens; identical to SEQ ID NO: 45297
  chr8:33457211-33457241
  hyper

SEQ ID NO: 116467 - DNA, 30 bp, Homo sapiens; identical to SEQ ID NO: 45298
  chr8:33457468-33457498
  hyper

SEQ ID NO: 116468 - DNA, 30 bp, Homo sapiens; identical to SEQ ID NO: 45299
  chr8:34704372-34704402
  hyper

SEQ ID NO: 116469 - DNA, 14 bp, Homo sapiens
  chr8:35092688-35092702
  hyper
ccccaagaggccag

SEQ ID NO: 116470 - DNA, 123 bp, Homo sapiens
  chr8:35093036-35093159
  hyper
cggcggggactgcgggcgactccggcatccgcgctggcggcagcggtcgccgcgccgtgggaagctatggggacgcgccctttctcggggtgcccattcagcggcggctcggagctccctgcc

SEQ ID NO: 116471 - DNA, 274 bp, Homo sapiens
  chr8:35093225-35093499
  hyper
cgggaccctcatcgccgaccctttcccgggctcccggagcgtgaagaagagccgccctccggaacgcggcgaggagcatggggagagcggcggccaccgcaggcggcggcggaggggcgcgccgctggctcccgtggctggggctgtgcttctgggcggcagggaccgcggctgcccgaggtaagcgctgggcggagcgggcagctgggggcgagggcgcaggggcgccagcctgacggagcgggacctgcaccgatggcgttggcttcccaac

SEQ ID NO: 116472 - DNA, 58 bp, Homo sapiens
  chr8:35093915-35093973
  hyper
ttggcacccctcgggcgtccttagcccgaggtcccagccagccctggagctcgggaga

SEQ ID NO: 116473 - DNA, 33 bp, Homo sapiens
  chr8:35094035-35094068
  hyper
cgaggctgctcaccaggcgcctcctctcccttc

SEQ ID NO: 116474 - DNA, 30 bp, Homo sapiens; identical to SEQ ID NO: 45301
  chr8:36858467-36858497
  hyper

SEQ ID NO: 116475 - DNA, 30 bp, Homo sapiens
  chr8:37311203-37311233
  hyper
ctccttgtgcggggacgaggccccaaaagc

SEQ ID NO: 116476 - DNA, 49 bp, Homo sapiens
  chr8:37552072-37552121
  hyper
cgcgcctccactggccgccgagcgcacggagaagtgggctccccagagt

SEQ ID NO: 116477 - DNA, 2024 bp, Homo sapiens
  chr8:37552160-37554184
  hyper
cggatccggaacttggatgtcaggactatgactacgtaaaatctctgcccagggcgaagctagcaatgcacactgtatcagaaaggcgcagggagtcgggaagggtattgttatttttaattaaaagtttttatcccgaaatttgcctggggaaagcaagtgctttttcccccggagtgagaaggatgggggggcggaggggttgtgttgccgagcagcgcttagagagagatccccctccagggacacccgcctcgcccgtgatctcggtctctcctcgtagcagctgggcgcggtacagtgaggaacttcacgcccctcagcaggacacggtaagaagcctgtaacacaccagacaccgagcctctaacgcagggcgcaggcacagcgcgcacagcctggggtcccgcgcttggtcgccgaccatgtcactccagaagggagacaaacttgcaggcttcagacaagacgggctcaaagtagttggagctgcctacgccgcgtcccgagaacagtgggtgcctccgaggctcgggcgcttccaagtgaacacaccaaggggaggccaagtaggggaaggagagcggggccgaggagagccggagcagctctggagaaggacccgggctcccgaggcgaggcctgcccccaggcggcctctgggagaggcttgaactccagcgtcccagagcccgcgccgtgcgatccctcccaccccaccccaccccaccccaccccacctcggacacacacggcgggcggggttacagcccccgccagcatcaccccccacccacccagtggtgagaagggagagaggagagagagcggccggaaaggaggacggggcgcagagctcagggtcccggagaagtcccgtcccaggcgggggaccccagggcgaggaaggcccagtcggggggaggggaggaatcccgggagcggccgagaccgaggcagcggcggcgcgcggcgcggcccctttaaggctctccccgcccaccgatggagccggcctcagcccgccgctctccccgccccggggtcccggcgagagctgcgattgggcgggcgcggcgatccctttgaagtgtggctgccgatcgcggctatttgacgtgcggctcgaggaaggcgaaggtttttgtgttgctagccggggccagcggcggtggcggcggcggcggaggcgtcggtggaggaggggaggcggcgaggaggcgcagctcccgctgcaccgcgatcgacgctgcggagcgagcccacccgccccgggagctcgcctccccggtgctcccccgccctccccgcccccccagcggcgctgcctcctccaaatgagcgattcgcccgctggatctaacccaaggacacccgaaagcagcggcagcggcagcggcggcggcgggaagaggccggcggtgccggcagcggtgtccctcttgccaccggcggaccccctgcgccaggcgaaccggctcccgatcagggtcctgaagatgctgagcgctcacaccggtcacctcctgcacccggagtacctgcagccgctgtcctccactcccgtcagccccattgaggtcagtccccggccgctgcccccgggcgccggccccattcctcccaccgcgaccgggaccctgacccagctcccagcgccccggggctcggtgcgacacccaagtctggtcacgctggcgggctgagtgaggaggggaagaaaaccgagggatcagagcccaccagggcttccccaggcttccccgtggaagggtctccttccacgctcgcccttcggagctccgtgttttctctcggattggatttgctcctggagtcccctctgggtcctttacttttcctctgatccccagtttccagccaggagttggtctctgctgggtcttccccgccccccacgccgggctgttttctttgaagccctggctgcccgggtcccacttcgcctctgtcccatccggtgagggcgcacggcgccctggcgctcccgatcccggatcttt

SEQ ID NO: 116478 - DNA, 30 bp, Homo sapiens; identical to SEQ ID NO: 45304
  chr8:37593820-37593850
  hyper

SEQ ID NO: 116479 - DNA, 30 bp, Homo sapiens; identical to SEQ ID NO: 45305
  chr8:37594581-37594611
  hyper

SEQ ID NO: 116480 - DNA, 210 bp, Homo sapiens
  chr8:37595168-37595378
  hyper
ttctcccttgagcaacggctgtatccggagccagtgcttcctcagtgcggtgggggctctaattttacagttaaagaaaggggaacgttgactgagaacgaggaggaagcgagttgtagatctagccttgtgttcacacgacaccaggctggatatgagtcactcgcagggagctcagcttggtgaggtcctctcgctgttgtggccttt

SEQ ID NO: 116481 - DNA, 30 bp, Homo sapiens
  chr8:37619941-37619971
  hyper
cttggaaccaggcgcgcaaaacctcagccc

SEQ ID NO: 116482 - DNA, 30 bp, Homo sapiens
  chr8:37655022-37655052
  hyper
cggccttctgcctaacggcaccgttaccct

SEQ ID NO: 116483 - DNA, 122 bp, Homo sapiens
  chr8:37655253-37655375
  hyper
gctgcgggggacaggcgcaccccagagaaaggcaccgcaggcgcccactcacctgcacaggtgaagtggagagcacgcctgcagggcacccacgccccggatttccagcctggactagggtt

SEQ ID NO: 116484 - DNA, 515 bp, Homo sapiens; identical to SEQ ID NO: 45308
  chr8:37655475-37655990
  hyper

SEQ ID NO: 116485 - DNA, 155 bp, Homo sapiens; identical to SEQ ID NO: 45309
  chr8:37656049-37656204
  hyper

SEQ ID NO: 116486 - DNA, 30 bp, Homo sapiens
  chr8:37707270-37707300
  hyper
cgcagtccgggcagcggcctctgcctggca

SEQ ID NO: 116487 - DNA, 227 bp, Homo sapiens; identical to SEQ ID NO: 45310
  chr8:37756347-37756574
  hyper

SEQ ID NO: 116488 - DNA, 743 bp, Homo sapiens; identical to SEQ ID NO: 45311
  chr8:37756610-37757353
  hyper

SEQ ID NO: 116489 - DNA, 905 bp, Homo sapiens
  chr8:37822626-37823531
  hyper
ggtcccattttggttcgctactcctcgttcccttttctctccaagcaaagccatcccaccttctcttaataaactccacactcaaaaagttgacccacggacacatcgcatgcttcccgaccctgagccgccggtccctctgccccggttacctacccgtcgagccgttggcaaagcctgggctgcgctgggctgctccgggccgcaggaacgcccgaggggaagagggccgggcgggcggcggcgcagggctccggaggcaggcgacggccgcagcggcacagaagacggcggaaggcgctgcgaaagtccgggctgcggcagtagatgagcgggttgaaggcagaattggcataacctagccagttcagggcaaggaaagccgggcccgggactagagaggggccccccagggcgcgcagcacgttggccagaaagaagggcaaccagcagagagtgaaggtgcccatgatgagacccaaggtgcacagggcccggtgttcccggagaggcaggaggcgcgcgggccgccggccgcaggcgggcaccccttcgggcggagcgcacgtccccaccggggccggggccagagagcgcgacggcgccggcggagactcctcgggcggaaagcggcccagctccccgcgcagcaagcgcagctggcgcgtagccaccacgaaaacccgcgcgtagacgaagagcatcacgagaagaggaaggtagaaggagacggaggaggacagcagcacgtagggcatgttggaggcgaaggcacagcagcgcgggttggagtggcagcgctgcgcctcggcgtcggcccctacgcgccaccactggctcatgatgggcgcaaacgacaccgcggccgacacgacccacaccaggaccacagctgtccgggcgca

SEQ ID NO: 116490 - DNA, 72 bp, Homo sapiens
  chr8:37823789-37823861
  hyper
cggagtccaggcgatggccacgatgaccagcaggttgcctcccacggtggccagcaccgccagcgccagcag

SEQ ID NO: 116491 - DNA, 110 bp, Homo sapiens
  chr8:37887620-37887730
  hyper
gaaacagggagtgccgaagggtacaccaggcctgatgtcctaatgcagaaaccgggccttcctgcagtgggccgggtcagctcggatctccgcgcggtcctgagtcgccg

SEQ ID NO: 116492 - DNA, 30 bp, Homo sapiens; identical to SEQ ID NO: 45315
  chr8:37887937-37887967
  hyper

SEQ ID NO: 116493 - DNA, 216 bp, Homo sapiens; identical to SEQ ID NO: 45316
  chr8:37888749-37888965
  hyper

SEQ ID NO: 116494 - DNA, 63 bp, Homo sapiens
  chr8:37963269-37963332
  hyper
ccgcccgaggaagacgcgggagggaggcccgcccctcgcgaatcccgcggctcctggagccct

SEQ ID NO: 116495 - DNA, 428 bp, Homo sapiens; identical to SEQ ID NO: 45318
  chr8:38008203-38008631
  hyper

SEQ ID NO: 116496 - DNA, 43 bp, Homo sapiens
  chr8:38034152-38034195
  hyper
cctcttaaggaacacggtgtcttccttcgtctccgggttcccg

SEQ ID NO: 116497 - DNA, 44 bp, Homo sapiens
  chr8:38034986-38035030
  hyper
agcaatttatcctgcgtggctggcaggccggctctcccggggaa

SEQ ID NO: 116498 - DNA, 30 bp, Homo sapiens
  chr8:38088957-38088987
  hyper
ctagaaactgatctcgaagccccttccgcc

SEQ ID NO: 116499 - DNA, 30 bp, Homo sapiens
  chr8:38089480-38089510
  hyper
ctcccgggaagccccgagcctgggggaacc

SEQ ID NO: 116500 - DNA, 44 bp, Homo sapiens; identical to SEQ ID NO: 6238
  chr8:38089776-38089820
  hyper

SEQ ID NO: 116501 - DNA, 30 bp, Homo sapiens
  chr8:38126083-38126113
  hyper
aaggtctctgagtgcgcgtaaccgggcgcc

SEQ ID NO: 116502 - DNA, 30 bp, Homo sapiens; identical to SEQ ID NO: 45321
  chr8:38238618-38238648
  hyper

SEQ ID NO: 116503 - DNA, 30 bp, Homo sapiens; identical to SEQ ID NO: 45322
  chr8:38239402-38239432
  hyper

SEQ ID NO: 116504 - DNA, 30 bp, Homo sapiens
  chr8:38240324-38240354
  hyper
tgcatttggaaagccgggggcgatgcaaga

SEQ ID NO: 116505 - DNA, 255 bp, Homo sapiens
  chr8:38240654-38240909
  hyper
ttcgcatcgagggacgtgagggacatttgtcctagagggcccaagataagaacgagaggaagaaccgggaggcaactctccgtcatcctctagccccccgcatcctaggaaacgtatggaaaacaatggaaggttaagtgtgtgcacagtgatctggccctgcaggagtgtgccgaccaggtgatatttcctggggcctggtgataaggatttggaaggttacagcacagagacgtgaacgtaaaaaggaaacag

SEQ ID NO: 116506 - DNA, 30 bp, Homo sapiens
  chr8:38243581-38243611
  hyper
tcaaatcctctcagcgcccctctggcagtt

SEQ ID NO: 116507 - DNA, 30 bp, Homo sapiens
  chr8:38243930-38243960
  hyper
agcttattggttggcgatgtcgtcactcag

SEQ ID NO: 116508 - DNA, 30 bp, Homo sapiens
  chr8:38244600-38244630
  hyper
gtgcgagtggtgtccgccgcccgggagcgc

SEQ ID NO: 116509 - DNA, 608 bp, Homo sapiens; identical to SEQ ID NO: 6240
  chr8:38323126-38323734
  hyper

SEQ ID NO: 116510 - DNA, 552 bp, Homo sapiens
  chr8:38323755-38324307
  hyper
cgcaccgggcttgctccgggaggggcgcgtgacgccaccgcggggcagccgagaggggaccgcgggctccgggcagggcaggcgctcccgcagctccagctataacacaagggagagaaagcaacgctttggttccagaaacttccatcgtcaaggccagttctggccagacgcacagccaaagagcccccctagtctagcggatgaaccgttcgcgagtggcaccccctaaaaccttggccccatctcccaagatgcctctttactgcgcaatccagaaagcacccggaccgccgccacccaccagcggcggcgaataacttggtgagatcttaaataactcgggatccaagggaactttcttttctcccccgaatctcaacgccgcatctccaagtctccagaaatgttaaggagggaggtggtcaagacaggctgaagaatctgagttttaatttgggggagggggaggggaggaagagggaagttaataatgcggctgcggtgtacccgtgtggggtgaaacggaaccagatgcggctgctacatctg

SEQ ID NO: 116511 - DNA, 241 bp, Homo sapiens; identical to SEQ ID NO: 45326
  chr8:38324507-38324748
  hyper

SEQ ID NO: 116512 - DNA, 1505 bp, Homo sapiens; identical to SEQ ID NO: 45327
  chr8:38324811-38326316
  hyper

SEQ ID NO: 116513 - DNA, 30 bp, Homo sapiens
  chr8:38385962-38385992
  hyper
tttgtctctctgttcgctgctcaacccttt

SEQ ID NO: 116514 - DNA, 645 bp, Homo sapiens
  chr8:38614518-38615163
  hyper
ctccacctgctgccccgtgccacctaggagtttccttgccgggcgaggaggcgccgctgcccgggctccccgcagccccgcacgccccaggggctccgcatctccaggcggcagcacccgcggggccctgcaatccgcggagaagttggcggcatctgaagccacctccttccccgctttcccagcggcggggaccctacggccgggcgccccaccccgccctccctcgccccacccttcctcccgccccaccgcctccccgcccagggtctgggcacagccgcccgccgcccagcacaggagggtgcagccccggccccaagttctgcgccatgggaggctcccactctcagaccccgaggggccgggaacccgccggggagaggcacccgagacccacggagaccgcgtgagtcccagagccctctccaagggccgcctttgggggtttgcgtgccagcccgggatggagcgcgctggggcccgtcccagaaaggctgggaaggtggggttcccgctggcggcagcggggcacgagcgctcggcagcggggcacgagagtttggccagcagggccccaggggcgtccggctgggagcgtcctgccaggaccccaccgcgaccggatcgcgtccgggcgtgacc

SEQ ID NO: 116515 - DNA, 125 bp, Homo sapiens
  chr8:38645088-38645213
  hyper
ggagccgcgctcatggcgttcagcccgtggcagatcctgtcccccgtgcagtgggcgaaatggacgtggtctgcggtacgcggcggggccgccggcgaggacgaggctggcgggcccgagggcga

SEQ ID NO: 116516 - DNA, 30 bp, Homo sapiens
  chr8:38758467-38758497
  hyper
ctcgcctcctcctgcgaggacgccccctgc

SEQ ID NO: 116517 - DNA, 30 bp, Homo sapiens
  chr8:38758742-38758772
  hyper
gttttgctttaatgcgaaacgtaattaacc

SEQ ID NO: 116518 - DNA, 246 bp, Homo sapiens
  chr8:38853839-38854085
  hyper
gcggtcgcattttgcgagtggctccgagacacacaatgcagcagaagtaaattccccagcagcaaagccgcctggccgcacagaagtaagtaactaaccgggcaaccacctagcaccatcttcccgggcacaggagcggagacccggcctcaaccacaaccccaggccagcagcacagacccaagaactgcgtggtcaggcctttccgcgtagccccgcccgcgtagccccgccaaacagccaatg

SEQ ID NO: 116519 - DNA, 30 bp, Homo sapiens
  chr8:38854335-38854365
  hyper
agaaatcctattctcgcgccggggactgga

SEQ ID NO: 116520 - DNA, 30 bp, Homo sapiens
  chr8:38854656-38854686
  hyper
agtcctcggtgcggcgcggccaggtgggtg

SEQ ID NO: 116521 - DNA, 31 bp, Homo sapiens; identical to SEQ ID NO: 6244
  chr8:40047837-40047868
  hyper

SEQ ID NO: 116522 - DNA, 141 bp, Homo sapiens
  chr8:40809173-40809314
  hyper
aggtgaatgacagaacgttaatcatcagttcacctccaaactcatccttgtgaaatctgaaaaccactgctccctttctggaggggtccccaccaggctctaccaacaggggccgctagagggtaacggaaggctggagga

SEQ ID NO: 116523 - DNA, 30 bp, Homo sapiens; identical to SEQ ID NO: 45329
  chr8:40851621-40851651
  hyper

SEQ ID NO: 116524 - DNA, 234 bp, Homo sapiens; identical to SEQ ID NO: 45330
  chr8:41165684-41165918
  hyper

SEQ ID NO: 116525 - DNA, 151 bp, Homo sapiens; identical to SEQ ID NO: 6246
  chr8:41166000-41166151
  hyper

SEQ ID NO: 116526 - DNA, 413 bp, Homo sapiens; identical to SEQ ID NO: 6247
  chr8:41166266-41166679
  hyper

SEQ ID NO: 116527 - DNA, 243 bp, Homo sapiens; identical to SEQ ID NO: 6248
  chr8:41166745-41166988
  hyper

SEQ ID NO: 116528 - DNA, 323 bp, Homo sapiens
  chr8:41167025-41167348
  hyper
cgcgcagccaatcagctcccggcggggcgagccgcactcgttaccacgtccgtcaccggcgcgggagccaatcgcctccctcgcgagcgggttcggtttactagaaccagacgcggctcaacaccccttaaaaaacaaaaccaaaaatacataaataaaagggggaggaggaaagagacaaggggagaaaaagaaggggaatggatcacggcgtggggtggagagagaccagggcggacgctgtaattaactcgcattggcttgcagagaagcggggagcctggatcatacttgcaaacccatgaaattatgaagactttttt

SEQ ID NO: 116529 - DNA, 265 bp, Homo sapiens
  chr8:41168153-41168418
  hyper
aagggtccccactagggcagacgccaagaggacggtatcagcacaacagctcggcccccaggaacagaagtctctctgccaccttctacctcgaattcctgagaattcttcgtaggtttcaaacattcccctgagagggagggttaagctctggagagctgggagtgagacccggactatcccgggacagaagaccacagcaaatagttcatgaagttcctggagtctccatatcttctgtccctaagtgcgggtggagagaggc

SEQ ID NO: 116530 - DNA, 241 bp, Homo sapiens
  chr8:41168655-41168896
  hyper
gacacggtgattccacggtgcacacaggaggcttctgcagatggatgacttctctgtcatttcgtggccaatggaagatgccttgacactcaaaaggtgacatggaggctggaaggaaaacacagagaagagagagcaagatcgggatggccaagggttaatcccaagacaattggtgaggccggcctgtggagctgaggaagacattcctcacagagaataagaccgcaggagacccggc

SEQ ID NO: 116531 - DNA, 30 bp, Homo sapiens; identical to SEQ ID NO: 45336
  chr8:41179541-41179571
  hyper

SEQ ID NO: 116532 - DNA, 40 bp, Homo sapiens
  chr8:41347780-41347820
  hyper
ggaagtgacacagccgggaaactccgcccctcacaccccc

SEQ ID NO: 116533 - DNA, 30 bp, Homo sapiens
  chr8:41386439-41386469
  hyper
gggaccccccggggcggacaccgccgctcc

SEQ ID NO: 116534 - DNA, 30 bp, Homo sapiens
  chr8:41424712-41424742
  hyper
ccccgaggggcgccgcggcctcggctgtcc

SEQ ID NO: 116535 - DNA, 30 bp, Homo sapiens
  chr8:41435286-41435316
  hyper
aacgggcagaatgtcgctgcatacggacag

SEQ ID NO: 116536 - DNA, 48 bp, Homo sapiens; identical to SEQ ID NO: 45338
  chr8:41436143-41436191
  hyper

SEQ ID NO: 116537 - DNA, 169 bp, Homo sapiens
  chr8:41511160-41511329
  hyper
cagcttccttgggccgtcaccgaatcggtcccagccgcgctgtgcggcccccctgccgtggcccccgggatgggggaggatggaggggggcgcctctgcgccctggaggccgggccggggtggcctctggcggagacggcagccgtccgggctcgccctgcagctcctc

SEQ ID NO: 116538 - DNA, 30 bp, Homo sapiens
  chr8:41559288-41559318
  hyper
aggaaccacggggacgggacccgggaaaac

SEQ ID NO: 116539 - DNA, 760 bp, Homo sapiens
  chr8:41624633-41625393
  hyper
cgcagccttcaggccagaggaattttcctctggatcctgctagaagcctcggcagcagaagggcagccccagcgcgcgcacccgcacccgccggggaaagttggcgccgggcagccgggcgcggagccacaacccgcaggacggacgcagagccccggccccggccccggccccgatccccgcgccccggccccggccgggcaaccgcgacagctcgtgcactcaccgcagggtctggcccggacctgccctgtcgcgctgccatcgtccggcgcccgcgctgaaatccgagcccggctcccgctccccctcccggttatctgctgggcggcgcggggagcgccagcaagttacgcggcatctggctaaaaatacaggcgccctccactcgccccggcccggccctggccctgcgctctcccgcccgccagcctgccgctaatgggatctcttcattttctctccatgattatgtcagatgggaaagttaatgcgaagcgctctccggagagcaggcacctgctgccaagccctgcgaagggggtgcgcgcgggggcgcgggcgggggtgcagccccagctgcaggtgccggccggcgggctcggggcgggcgtcctgcccctgcggaggggaggcacacacgtccagtggaggtgaggagctccaagctgcatggcctccctccctgcctcccgcctccccgaatgccctggtgaatgggccccggagcttgccgagacgtggccggggtgagctcagc

SEQ ID NO: 116540 - DNA, 857 bp, Homo sapiens
  chr8:41685764-41686621
  hyper
cctcccgctccgccccgctccgcccgtgctgggctgtggcctccacaccaagcagccgccctgggccgccttccttcgtctgtgcgtgcagcgccgcctccttcagcttaggcccgacactccatgaactctcattttccaccttctccgtctccagcttccaagctgcacagggccaggccgaggtacgtgatggcgggcactgaattacagatcccgtctgtggccgccagcctctgtgtcctgccacctcctccgagaggacatcaccgccaccaggtggagcgagtctcctcctcggcgctccaaccacgtgctgtttattactctgtggggattcccataccgaggcctcttcagttcctggaacagtagcactaaaaggctcctgagtgcctctgttaatttgattgttctggttcgcactacaatgaccgggctggagagggggcgctcgtaatgaaacaggaactgctcctcgcgcccgctccagagtcctttacatctttggggagagggcatacggggagctacatttcattttcctgaagattttccacgcgaaagtgctggggagagagttgggcctgggaggctgcgccttcttcccgcgaatcccgaaaactgcgcggcaaaggcgggttccgcagaagtcgcgcgtgacccggggcgccgccctcctcggggcccattcggatctgccgcccgtcctctccagagcgccccctggcgccctctaggccatcttgattccaccgccgcagttgaaagaattaataaataaatcctagtctcgcgtctagaccggtccgtgagggtcccctgctcaccggacaccctgccgcaatctctgctgt

SEQ ID NO: 116541 - DNA, 16 bp, Homo sapiens
  chr8:41733637-41733653
  hyper
cctagagctcggagcg

SEQ ID NO: 116542 - DNA, 360 bp, Homo sapiens; identical to SEQ ID NO: 45344
  chr8:41753392-41753752
  hyper

SEQ ID NO: 116543 - DNA, 1438 bp, Homo sapiens; identical to SEQ ID NO: 6254
  chr8:41753770-41755208
  hyper

SEQ ID NO: 116544 - DNA, 30 bp, Homo sapiens
  chr8:41755444-41755474
  hyper
gcgagctgggccccacgcagtgcaaacttg

SEQ ID NO: 116545 - DNA, 30 bp, Homo sapiens
  chr8:41909946-41909976
  hyper
aaatccggcagccacgcaggatgggaactc

SEQ ID NO: 116546 - DNA, 115 bp, Homo sapiens
  chr8:42010324-42010439
  hyper
ctccaatcaggactcggggtctcggagctgtaccaatcggagatgaccgtggcctcaacagggccaatcgggggactcgagcccgacaacagggcaagccgccaacagcgatcaa

SEQ ID NO: 116547 - DNA, 30 bp, Homo sapiens
  chr8:42010851-42010881
  hyper
gcccggcacccctgcgctcttcaccccgga

SEQ ID NO: 116548 - DNA, 30 bp, Homo sapiens
  chr8:42011101-42011131
  hyper
tggccacatcctggcgactggcaccagaga

SEQ ID NO: 116549 - DNA, 35 bp, Homo sapiens; identical to SEQ ID NO: 6255
  chr8:42040328-42040363
  hyper

SEQ ID NO: 116550 - DNA, 30 bp, Homo sapiens
  chr8:42128237-42128267
  hyper
aggaaggagatgaacgatgaacctcaggct

SEQ ID NO: 116551 - DNA, 30 bp, Homo sapiens; identical to SEQ ID NO: 45348
  chr8:42128637-42128667
  hyper

SEQ ID NO: 116552 - DNA, 30 bp, Homo sapiens
  chr8:42195524-42195554
  hyper
ccgggctccggcagcgccctagtacgtaag

SEQ ID NO: 116553 - DNA, 30 bp, Homo sapiens
  chr8:42196039-42196069
  hyper
gttgctcctgctcccgtctccaagtcctgg

SEQ ID NO: 116554 - DNA, 30 bp, Homo sapiens
  chr8:42249139-42249169
  hyper
caagggcacaggtgcggtccccagcctctt

SEQ ID NO: 116555 - DNA, 30 bp, Homo sapiens; identical to SEQ ID NO: 45349
  chr8:42249554-42249584
  hyper

SEQ ID NO: 116556 - DNA, 30 bp, Homo sapiens
  chr8:42697872-42697902
  hyper
gccaccctaggcatcgcccgtgggctccga

SEQ ID NO: 116557 - DNA, 147 bp, Homo sapiens; identical to SEQ ID NO: 45350
  chr8:42751622-42751769
  hyper

SEQ ID NO: 116558 - DNA, 34 bp, Homo sapiens; identical to SEQ ID NO: 6256
  chr8:42807055-42807089
  hyper

SEQ ID NO: 116559 - DNA, 30 bp, Homo sapiens
  chr8:42911300-42911330
  hyper
aaactcgcggcggacgcagccagcacccgc

SEQ ID NO: 116560 - DNA, 30 bp, Homo sapiens
  chr8:42948090-42948120
  hyper
tttcccggagcaagcgcccgagtgcgtgtt

SEQ ID NO: 116561 - DNA, 30 bp, Homo sapiens; identical to SEQ ID NO: 45352
  chr8:42948452-42948482
  hyper

SEQ ID NO: 116562 - DNA, 30 bp, Homo sapiens
  chr8:42995074-42995104
  hyper
gtgtgcacactcctcgacctgctcccttcc

SEQ ID NO: 116563 - DNA, 30 bp, Homo sapiens; identical to SEQ ID NO: 45353
  chr8:42996191-42996221
  hyper

SEQ ID NO: 116564 - DNA, 433 bp, Homo sapiens
  chr8:42996734-42997167
  hyper
gtctttcccctctcgcgcccttttcttggtcagaatacgaagttttagtgtctgtgtatggagttcaaacgacccctcctctccaagcagaagctggaggagaaaggcgttgtgaattttggaaaagcggctcagaggattacattttgtgcgatccttgatccacccaaccttcatctcctgcgctcccctcctttaaaattgcaaggaccccggggaggttatgtaatctgcctgatcacaatttgtcagggactgatcccgccgaacactctttgcattttagcgccagtattagcttatcaaagggcacttacttttagagagaggtggtttgtaaatagtaatcacacgtagtgaggggaagccgcgttgggaccgcaaggctttccctgtcacctggagcccatgtttgggccgcacagctttccta

SEQ ID NO: 116565 - DNA, 592 bp, Homo sapiens; identical to SEQ ID NO: 45355
  chr8:48100164-48100756
  hyper

SEQ ID NO: 116566 - DNA, 96 bp, Homo sapiens
  chr8:48100826-48100922
  hyper
cgcaatgtggcagtggaaggcgcagggtctgaccccggccgcggccgccgcagcagctgatctgtcaaccccggccagagccgagccgcctgaggc

SEQ ID NO: 116567 - DNA, 202 bp, Homo sapiens; identical to SEQ ID NO: 6257
  chr8:48604759-48604961
  hyper

SEQ ID NO: 116568 - DNA, 30 bp, Homo sapiens
  chr8:48619158-48619188
  hyper
tcgcctttatagccacgtcgatcctttttt

SEQ ID NO: 116569 - DNA, 1724 bp, Homo sapiens; identical to SEQ ID NO: 45358
  chr8:48649724-48651448
  hyper

SEQ ID NO: 116570 - DNA, 51 bp, Homo sapiens
  chr8:48872786-48872837
  hyper
cccggggacccctgcgggaaggcctggccagtaagcgcgcctctttggccc

SEQ ID NO: 116571 - DNA, 20 bp, Homo sapiens
  chr8:48920488-48920508
  hyper
atttatttttttgaggcgga

SEQ ID NO: 116572 - DNA, 70 bp, Homo sapiens
  chr8:48920803-48920873
  hyper
tttcattttgagagcgggattcacaagggaattgcggaaacagcagcgaggccccgcgacccctcggccc

SEQ ID NO: 116573 - DNA, 30 bp, Homo sapiens
  chr8:48921392-48921422
  hyper
tgggtcaggccaaccggcaccgaagatggg

SEQ ID NO: 116574 - DNA, 51 bp, Homo sapiens
  chr8:49292488-49292539
  hyper
gcctgtgcgcggccccgggggccacatgtgcccggccgcctgccccagccc

SEQ ID NO: 116575 - DNA, 626 bp, Homo sapiens
  chr8:49292888-49293514
  hyper
gggctccggcatgggcgcaaaaacaccagtgcggaggagttctcgggaccccccggggctgcggggccttgcggggacagccccaggcccggagctgcagaaacacccagaccccgcgcctcccggaaccacgcgtctctgtgcacagacattcctgggggcaggctcctgtcctttaacacagtctcaaaggagtcttcaaaaacaaaaagtttacaagcactgatagggaaaacagaaggatgataacaccaagagggactttcccgggagaggacggcttccagggactgagaaaggatgggcaagtgggcggggcccggcgccgtgcgggcagggctggcgccgggagtccccagactcccccgcagtgggaagcacctctcccattcacgccgggcaggacacctggccgggcgggggaggcagcgcaagggccggccggggagtacgggactcgagccggggacctgaggcaggagccaagcatcgtcgcagggcaaccagcagaacggagagggaggcgcgggggcgaaggctggcgggagccgcgctgagggcaggagcccggagccccctagggcagcgccgatccgcccgccccgtcccgccgagctgggcctccg

SEQ ID NO: 116576 - DNA, 435 bp, Homo sapiens; identical to SEQ ID NO: 6265
  chr8:49309321-49309756
  hyper

SEQ ID NO: 116577 - DNA, 178 bp, Homo sapiens; identical to SEQ ID NO: 6266
  chr8:49309797-49309975
  hyper

SEQ ID NO: 116578 - DNA, 30 bp, Homo sapiens
  chr8:49343853-49343883
  hyper
caaactcacattcgccgctcctcacgggga

SEQ ID NO: 116579 - DNA, 529 bp, Homo sapiens; identical to SEQ ID NO: 45366
  chr8:49468662-49469191
  hyper

SEQ ID NO: 116580 - DNA, 173 bp, Homo sapiens
  chr8:49647748-49647921
  hyper
tgggcgcgcggctaccgagaccctcgcgggacccccgcgagccctggtgctgggtcaacgcggtgaggtctcagttactgatctcgtgcgcggccctaacagacggtgtagccaaggcaacggctcagcccgccgcggattggctcccaggctgcccgcgacgtagccaaagc

SEQ ID NO: 116581 - DNA, 207 bp, Homo sapiens
  chr8:49782678-49782885
  hyper
cccaagcttcgcccccggctaaacacccccttggcgtccgcctgggggtccccatgaaagtccccgcacgccctccccggccccgccctcctcagagcgtgggccccgcgcgccgccaccgcccggccgggaggcgcggggctccctagaaggctcgggcatgtcggagggagccgcggtgcagagacttgccacgcggctgcccgg

SEQ ID NO: 116582 - DNA, 270 bp, Homo sapiens
  chr8:49782922-49783192
  hyper
cgacgggcatcctgccctgcggaacacccacccgagccctgcgcgggaggggcggccgggaggcgcgcgggcatgcggaggggaaacagggctgcagcttcaagcccaggcaggacgcccttagtcaccttatcggaaagtgggcagcgccgcgtctccggttagtcagagccccaggtaaataaagagctcggtgtctgcggggctctggcctcagtggctcgctctgtcactccgctttccaatacacgcacccgcaggactttcttt

SEQ ID NO: 116583 - DNA, 169 bp, Homo sapiens; identical to SEQ ID NO: 45367
  chr8:49833817-49833986
  hyper

SEQ ID NO: 116584 - DNA, 448 bp, Homo sapiens; identical to SEQ ID NO: 45368
  chr8:49834210-49834658
  hyper

SEQ ID NO: 116585 - DNA, 177 bp, Homo sapiens; identical to SEQ ID NO: 45369
  chr8:50822180-50822357
  hyper

SEQ ID NO: 116586 - DNA, 1137 bp, Homo sapiens; identical to SEQ ID NO: 45370
  chr8:50822494-50823631
  hyper

SEQ ID NO: 116587 - DNA, 383 bp, Homo sapiens
  chr8:50823924-50824307
  hyper
tcgtgcgtgtatgtgcgcgcccctgtgcgtgcgttttctttcatttctggcattaggaaactcgtgcagggccactgaaaagtcaggggaggctcagatgttatttcccagggattcctgtttttccagaaacgttgtcaccaaataagtatgagactgttaatttggagaaacaattagcccctacaaaaaaaaaaaagaaagaaaaaagaaaaaaaaaagaaccggaggggagaaggctagggcggaagacaaggaagctgctgcttggattcgctggtggaggaaagtgcgacctggacctgcgcttaggggctcccgtccccttacttcagcaccagaggggatggacagcgtctccggactgagctgcagccacaggg

SEQ ID NO: 116588 - DNA, 92 bp, Homo sapiens; identical to SEQ ID NO: 6272
  chr8:50824352-50824444
  hyper

SEQ ID NO: 116589 - DNA, 23 bp, Homo sapiens
  chr8:51149016-51149039
  hyper
ttttttttttttgagacgcagtc

SEQ ID NO: 116590 - DNA, 87 bp, Homo sapiens
  chr8:52811696-52811783
  hyper
cagctccccgcggacgccaaagtcaacaaggccgggagacgcccccatctggccccgcccccctcagggctcgctccgcccccaagc

SEQ ID NO: 116591 - DNA, 30 bp, Homo sapiens
  chr8:53477202-53477232
  hyper
ggggcattcctggcacggtcaggtgtctac

SEQ ID NO: 116592 - DNA, 213 bp, Homo sapiens; identical to SEQ ID NO: 45375
  chr8:53477523-53477736
  hyper

SEQ ID NO: 116593 - DNA, 799 bp, Homo sapiens; identical to SEQ ID NO: 45376
  chr8:53477944-53478743
  hyper

SEQ ID NO: 116594 - DNA, 30 bp, Homo sapiens; identical to SEQ ID NO: 6276
  chr8:53626223-53626253
  hyper

SEQ ID NO: 116595 - DNA, 30 bp, Homo sapiens
  chr8:53627188-53627218
  hyper
atggtgctagctgccgtcccggtgcgtact

SEQ ID NO: 116596 - DNA, 23 bp, Homo sapiens
  chr8:53852160-53852183
  hyper
ggaggaggtttggggcgccgcgg

SEQ ID NO: 116597 - DNA, 348 bp, Homo sapiens
  chr8:53852565-53852913
  hyper
ggcgccgctggcggtggctgtaccagttgtctacgcggtgatctgcgccgtgggtctggcgggcaactccgccgtgctgtacgtgttgctgcgggcgccccgcatgaagaccgtcaccaacctgttcatcctcaacctggccatcgccgacgagctcttcacgctggtgctgcccatcaacatcgccgacttcctgctgcggcagtggcccttcggggagctcatgtgcaagctcatcgtggctatcgaccagtacaacaccttctccagcctctacttcctcaccgtcatgagcgccgaccgctacctggtggtgttggccactgcggagtcgcgccgggtggccgg

SEQ ID NO: 116598 - DNA, 129 bp, Homo sapiens
  chr8:53853384-53853513
  hyper
ctacgccttcctggacgccagcttccgcaggaacctccgccagctgataacttgccgcgcggcagcctgactcccccagcgtccggctccgcaactgcccgccactcctggccagcgagggaggagccg

SEQ ID NO: 116599 - DNA, 937 bp, Homo sapiens; identical to SEQ ID NO: 45379
  chr8:53853579-53854516
  hyper

SEQ ID NO: 116600 - DNA, 67 bp, Homo sapiens; identical to SEQ ID NO: 6278
  chr8:54163282-54163349
  hyper

SEQ ID NO: 116601 - DNA, 432 bp, Homo sapiens; identical to SEQ ID NO: 6279
  chr8:54163694-54164126
  hyper

SEQ ID NO: 116602 - DNA, 27 bp, Homo sapiens
  chr8:54164390-54164417
  hyper
cgcaggctcgcccggcccactaactgc

SEQ ID NO: 116603 - DNA, 342 bp, Homo sapiens
  chr8:54570290-54570632
  hyper
gacgcagctcccacccggcctcccctccgcagagctgggaccgtccccccaccccccatccttgctctgtgggcgccgcctgcactctctgaagcgcgaggctctgcacggtgtggggctggggcctttcgctccccttggctggctctctcctcctttgtcatttgcctttgtttgctgtgtgtgtctggttcaaagggcacgcctaccgagctggatagagtaaaggaagaatcagaaagagaaagcgctcagcgcgtgttgcttagcagcacagactcaaaacaggacaaagcaattagagaaaattatcacgggcggaaggggcggatcggtcccctg

SEQ ID NO: 116604 - DNA, 93 bp, Homo sapiens; identical to SEQ ID NO: 6280
  chr8:54754897-54754990
  hyper

SEQ ID NO: 116605 - DNA, 294 bp, Homo sapiens
  chr8:54755404-54755698
  hyper
aggctccagaatttcgcttaataaacctggttgaggcctggaagaaaagcaatctggcaaccgggggccgaagaacaggagaggaccaagcggcgagacaccagcacgcaccaggcaagctggagaaactgcaagagtcgcctgacctggtctgcagcctgagaccaaacaacgcgagggcggccttacctcgcgaatcctcgggaccccacaacgcacccaaagccggcagggagggtggtccggggcgccggggacacagccgggctggggcgccgcgtcagagccaagtag

SEQ ID NO: 116606 - DNA, 30 bp, Homo sapiens
  chr8:54756021-54756051
  hyper
tgggaggcggcgagcgtggcgggcacgcta

SEQ ID NO: 116607 - DNA, 712 bp, Homo sapiens; identical to SEQ ID NO: 6281
  chr8:54789093-54789805
  hyper

SEQ ID NO: 116608 - DNA, 840 bp, Homo sapiens; identical to SEQ ID NO: 45385
  chr8:54790022-54790862
  hyper

SEQ ID NO: 116609 - DNA, 35 bp, Homo sapiens; identical to SEQ ID NO: 45386
  chr8:54791910-54791945
  hyper

SEQ ID NO: 116610 - DNA, 486 bp, Homo sapiens; identical to SEQ ID NO: 6283
  chr8:54792184-54792670
  hyper

SEQ ID NO: 116611 - DNA, 2079 bp, Homo sapiens; identical to SEQ ID NO: 6284
  chr8:54792701-54794780
  hyper

SEQ ID NO: 116612 - DNA, 123 bp, Homo sapiens; identical to SEQ ID NO: 6285
  chr8:54794826-54794949
  hyper

SEQ ID NO: 116613 - DNA, 222 bp, Homo sapiens
  chr8:54795139-54795361
  hyper
cgtaacttggcaaaagctcgcgccactgccctccggcctgggcgacagagcaagactccgtctcaaaaaaaaaaaaaaaaaatggcaaaagcctatcgctctttgtcgaactccccacgttccccagtcacctggctggggttcgttggtgtcaaaaccccagccttggtgccctcggtgccagcaggaccctcgcccactggctagcggaattaggcacct

SEQ ID NO: 116614 - DNA, 30 bp, Homo sapiens; identical to SEQ ID NO: 45391
  chr8:54935213-54935243
  hyper

SEQ ID NO: 116615 - DNA, 30 bp, Homo sapiens
  chr8:55014025-55014055
  hyper
gctgcagaggctgacgccgtgccctaggcc

SEQ ID NO: 116616 - DNA, 30 bp, Homo sapiens
  chr8:55014656-55014686
  hyper
ctttcgccacaccacgcagcctgcgcatgc

SEQ ID NO: 116617 - DNA, 30 bp, Homo sapiens
  chr8:55047608-55047638
  hyper
attaaaagggaccccgaggacaaagcagga

SEQ ID NO: 116618 - DNA, 30 bp, Homo sapiens
  chr8:55047889-55047919
  hyper
tccggggcctgccgcgtgtgagcctggcca

SEQ ID NO: 116619 - DNA, 237 bp, Homo sapiens; identical to SEQ ID NO: 6287
  chr8:55366130-55366367
  hyper

SEQ ID NO: 116620 - DNA, 697 bp, Homo sapiens; identical to SEQ ID NO: 45393
  chr8:55366951-55367648
  hyper

SEQ ID NO: 116621 - DNA, 273 bp, Homo sapiens; identical to SEQ ID NO: 45394
  chr8:55370159-55370432
  hyper

SEQ ID NO: 116622 - DNA, 146 bp, Homo sapiens; identical to SEQ ID NO: 6290
  chr8:55370567-55370713
  hyper

SEQ ID NO: 116623 - DNA, 197 bp, Homo sapiens; identical to SEQ ID NO: 6291
  chr8:55370835-55371032
  hyper

SEQ ID NO: 116624 - DNA, 203 bp, Homo sapiens; identical to SEQ ID NO: 6292
  chr8:55371172-55371375
  hyper

SEQ ID NO: 116625 - DNA, 285 bp, Homo sapiens; identical to SEQ ID NO: 6293
  chr8:55371439-55371724
  hyper

SEQ ID NO: 116626 - DNA, 74 bp, Homo sapiens; identical to SEQ ID NO: 6294
  chr8:55371993-55372067
  hyper

SEQ ID NO: 116627 - DNA, 168 bp, Homo sapiens; identical to SEQ ID NO: 6295
  chr8:55372416-55372584
  hyper

SEQ ID NO: 116628 - DNA, 214 bp, Homo sapiens
  chr8:55379016-55379230
  hyper
tagaggtcaccggagcgcgctcccctcgccagggacctacactcttcccgctgctacattaggccgcattaacaaggatctggattcactttaatttaaaaggtaaaagatcttaggtctgatgggggagtgcggcgaggagagctcggaccgcgacgtcgcgcgcccgcttcgaggagttttgagctcttagcttggtgccggggcccgcccg

SEQ ID NO: 116629 - DNA, 161 bp, Homo sapiens; identical to SEQ ID NO: 6297
  chr8:55379295-55379456
  hyper

SEQ ID NO: 116630 - DNA, 107 bp, Homo sapiens; identical to SEQ ID NO: 6298
  chr8:55380036-55380143
  hyper

SEQ ID NO: 116631 - DNA, 4 bp, Homo sapiens
  chr8:55382668-55382672
  hyper
tcct

SEQ ID NO: 116632 - DNA, 62 bp, Homo sapiens; identical to SEQ ID NO: 45404
  chr8:55383182-55383244
  hyper

SEQ ID NO: 116633 - DNA, 257 bp, Homo sapiens; identical to SEQ ID NO: 6299
  chr8:56013635-56013892
  hyper

SEQ ID NO: 116634 - DNA, 173 bp, Homo sapiens; identical to SEQ ID NO: 6300
  chr8:56014011-56014184
  hyper

SEQ ID NO: 116635 - DNA, 367 bp, Homo sapiens; identical to SEQ ID NO: 6301
  chr8:56014376-56014743
  hyper

SEQ ID NO: 116636 - DNA, 18 bp, Homo sapiens
  chr8:56015034-56015052
  hyper
ggtgtggaggcatcatgg

SEQ ID NO: 116637 - DNA, 476 bp, Homo sapiens; identical to SEQ ID NO: 6303
  chr8:56015185-56015661
  hyper

SEQ ID NO: 116638 - DNA, 57 bp, Homo sapiens; identical to SEQ ID NO: 6304
  chr8:56015749-56015806
  hyper

SEQ ID NO: 116639 - DNA, 250 bp, Homo sapiens
  chr8:56686111-56686361
  hyper
accgagcggaggcccggcaggcgcgacccgggctgcgtacgtcagagctgcctccgaagtggtaaaatgtgctgcgagaagtggagccgcgtggcggaaatgtttctcttcattgaggagcgggaggattgtaagatactgtgcctttgctccagggcatttgtggagtaagtagaaaagagaatctcttcatgttctagcacagtcattacccagaaatgtaggtattgcaaacgtggttgtaattgat

SEQ ID NO: 116640 - DNA, 1390 bp, Homo sapiens
  chr8:56791849-56793239
  hyper
aaacggagaacttgccgggccatttgactctacgtcatcccctcccccatcaatgccctgaacagcctcctgtacacccttaaggaacttactttgtaatgattattaagaactcagcgagaccccgagcatcacctcggcatatcgcatcctttctctagagaacccctaatgttggaagggatcagagcgcacctcctccgctcctgggagcacccccttcctaataataccttggggatgggtcggaaggaaaggaaaggagacgcgagaggtgtagtcgatgtgcctgcgaagcccaggctcctctggagatccttccgtccgtccctacaggagaaggctggcccgggctgctccactccccggagctgcagactgagtcgccaggtttctgtgccttcaaagccctgcgcgacggccacaccaaacacccaaaccttgggcagggaccaaacggtcacttccccgccctccgggctcaatatgcaaatccgagcaccaggaagtagctgggacctctcggccgagcccagagacagccagttcctctcccgccgcgccgggccgcgctgccgctcgctccccggccgtggcgcctccgggccagacgcgctgcagcctccagcccgcggcaagcggggcggccgcgccacccccggccccgcgccagcagcccctcgccgcgcgtccagcgttcccggccagcagcctccccatacgcaggtcctgctgggccgccccgtcgcgccccccactctgaactcaagtcaccgtggagctccgccgccccgaaactttcaccgcgagcgggtgagtcctctgcgcgagcccaggggtgggcgcgggcacgcgggcagtgggtgcaggggccgcggctgtgccaccagccggagtcccgggcgcagggtagactcggggccgggggcatcggcgcggcccgcggcggcttcctggccgcaccgcctctgggctccggcggcgaaggctcttagatgtcttcagccgacgggtgaccgggcccgggggagccagggcgcggggactgaggctccgcaggtgtccgccgcggagccgcgcaggggagcggtgggaggtgcgggcgcgggggcgggctcaccgcgtgtccttcccggtgagggcccgagggccggctgctgtccctgctccggccgcttctcgcacacagtggggaagccgctgcccttgcggagcgggcgcgcggcggggatactggagaggactcctcggattgtgcaatctgatctcccctctggaccctgggtctcctggcagtgggagatggggctcggccggcgccctctcgaggcccgcggacagttgccctccctggtggccccgggcaggagcgtgacgtcgaggggctgca

SEQ ID NO: 116641 - DNA, 125 bp, Homo sapiens
  chr8:56987180-56987305
  hyper
actagtggagttggcgggaaaggcacggctgcgggcgccccctgtccgcacggaggagccgaagtcccgcagggtggggtccccgcctgcgccgagagggccacctggtcgagagaacaggcgac

SEQ ID NO: 116642 - DNA, 30 bp, Homo sapiens
  chr8:57006404-57006434
  hyper
agcagcgccccctggcgcctttttcgtttt

SEQ ID NO: 116643 - DNA, 68 bp, Homo sapiens
  chr8:57025551-57025619
  hyper
gctcggcctctgcgccgcgctgggtctccagcagcgctggatgacgtccccaaggcgctgcccgggga

SEQ ID NO: 116644 - DNA, 44 bp, Homo sapiens; identical to SEQ ID NO: 45414
  chr8:57025775-57025819
  hyper

SEQ ID NO: 116645 - DNA, 279 bp, Homo sapiens; identical to SEQ ID NO: 45415
  chr8:57026042-57026321
  hyper

SEQ ID NO: 116646 - DNA, 15 bp, Homo sapiens
  chr8:57026501-57026516
  hyper
cgctccggaggtagg

SEQ ID NO: 116647 - DNA, 215 bp, Homo sapiens; identical to SEQ ID NO: 6308
  chr8:57069522-57069737
  hyper

SEQ ID NO: 116648 - DNA, 378 bp, Homo sapiens; identical to SEQ ID NO: 45417
  chr8:57069850-57070228
  hyper

SEQ ID NO: 116649 - DNA, 815 bp, Homo sapiens
  chr8:57122655-57123470
  hyper
acgttttctcattgtcggttgagttataaaaggcttttgcccttcgaaagttttaaaaaataaataaatattaactccttggtccctgcaaagtcaaaatggacttcaggggaaaggcggtacatacttttacctttagcgagaaaagggggagcatcccggatttttagggattttttgcgattttttaaaaatttttatttggttatatgcctgagttctccctccattttggttgtttatgatactgacaacaagctgtccctgctctgtgccgatctcctgctttcatttagcaccccctccccctaccccccctcgcagccacacaccccgggctcacacctccctgcagaccccgcaccccgaccccggcttgcccacctgaggaaagggcaaaaacaaattcatttctccagaaaagaaaaacctcttttgaaaaaggggcaaagttaccccaagtcactcaaagtgccccccaaatattgccgactgcgggtttccgccaggccctttgggaagcgaccttcccccgggatgttttggtggaaaatgcggagagtttactctcaaaactgaatttatattaatttttcccttatttttcgggtctctaatgtcttccgctctcgctgctgccgctgccgctgtcacaatattcacagcaccagagaggaggaggaggaggaggaggaggaaaacttttcaaactttccagaccctgaataaaggtttttttttttttcccaccgacctcaccttcgggtccccagccgcatcgccccctgccctgtcagaagcgacttcgggagtcc

SEQ ID NO: 116650 - DNA, 30 bp, Homo sapiens; identical to SEQ ID NO: 45419
  chr8:57124332-57124362
  hyper

SEQ ID NO: 116651 - DNA, 30 bp, Homo sapiens
  chr8:57125265-57125295
  hyper
gttgtaattcagccccgctcctcactgtaa

SEQ ID NO: 116652 - DNA, 541 bp, Homo sapiens; identical to SEQ ID NO: 45420
  chr8:57232274-57232815
  hyper

SEQ ID NO: 116653 - DNA, 32 bp, Homo sapiens
  chr8:57358114-57358146
  hyper
acttggtttgtgcggcgacaccgctaccctta

SEQ ID NO: 116654 - DNA, 197 bp, Homo sapiens; identical to SEQ ID NO: 45421
  chr8:57358464-57358661
  hyper

SEQ ID NO: 116655 - DNA, 285 bp, Homo sapiens; identical to SEQ ID NO: 45422
  chr8:57358806-57359091
  hyper

SEQ ID NO: 116656 - DNA, 352 bp, Homo sapiens; identical to SEQ ID NO: 45423
  chr8:57359259-57359611
  hyper

SEQ ID NO: 116657 - DNA, 26 bp, Homo sapiens
  chr8:57360599-57360625
  hyper
gcggcgctgctcccgcggggctccgg

SEQ ID NO: 116658 - DNA, 33 bp, Homo sapiens; identical to SEQ ID NO: 6314
  chr8:57360769-57360802
  hyper

SEQ ID NO: 116659 - DNA, 30 bp, Homo sapiens
  chr8:57905910-57905940
  hyper
gccgccgcggactgcggccagcactgacac

SEQ ID NO: 116660 - DNA, 30 bp, Homo sapiens
  chr8:57906348-57906378
  hyper
gactcgccaggcagcgcgctctaggttctt

SEQ ID NO: 116661 - DNA, 92 bp, Homo sapiens
  chr8:57906840-57906932
  hyper
ctcttcccggcaggacggggaactgggcggtgaggggaagaattgtacttggctcttcattctgttgacatctttgtcgtgccctaaatgct

SEQ ID NO: 116662 - DNA, 325 bp, Homo sapiens
  chr8:58906789-58907114
  hyper
gggtgggggtgcttgcgtgcggacataggtgggagtgggggatagggaggaaatggaggcgccgaccgagtggaatggggggtgggtcagggatggggtgggatgggcatcagtagcggggtggagatgttgagagagaggcagggcttggagtggaggtgcgagaagggtggggacccggaaggtggggtgggggcgggatggaggcggggcggggtgtacgaggggcgtgtacactggctcagggacacgcgctctcggccacagcaactggctccaagttccctccctcactctccggcgaagcctgcctgagccctcccac

SEQ ID NO: 116663 - DNA, 283 bp, Homo sapiens; identical to SEQ ID NO: 6317
  chr8:58907135-58907418
  hyper

SEQ ID NO: 116664 - DNA, 587 bp, Homo sapiens; identical to SEQ ID NO: 6318
  chr8:58907483-58908070
  hyper

SEQ ID NO: 116665 - DNA, 30 bp, Homo sapiens
  chr8:59323678-59323708
  hyper
gctgccctctagggcggcctacagtgcctt

SEQ ID NO: 116666 - DNA, 30 bp, Homo sapiens
  chr8:59465752-59465782
  hyper
acgcgcctcgggggcggtcctcgggcgcgc

SEQ ID NO: 116667 - DNA, 30 bp, Homo sapiens
  chr8:59572112-59572142
  hyper
tcttcagctgggcgcgcacctctccttgga

SEQ ID NO: 116668 - DNA, 30 bp, Homo sapiens; identical to SEQ ID NO: 45430
  chr8:59572542-59572572
  hyper

SEQ ID NO: 116669 - DNA, 2619 bp, Homo sapiens; identical to SEQ ID NO: 45431
  chr8:60030067-60032686
  hyper

SEQ ID NO: 116670 - DNA, 30 bp, Homo sapiens; identical to SEQ ID NO: 6321
  chr8:60699763-60699793
  hyper

SEQ ID NO: 116671 - DNA, 1043 bp, Homo sapiens
  chr8:61193214-61194257
  hyper
aaaacgaattcttcacgctaacactgtcttcctcaggtgtttagtaaaatgtaccgctgctcttcttgactactcagaagacataaaaggtacagccacggcttggaggctagcccgccctccggaccgcagcaggtgcgaacgccagccctgcggaaggctcccgggtgagagcgcaggcggcggaagagcgcaggcggcgagcacgcctccctggagcgcctcccgcccgaaacgcaccaggggagtgggaaagtggcagagacccccgtgggaaagagggggcgtgggggtgctcggagcgcgcagcggcagcaggactcgagtcccgcgctcggcgagacactgacgccgccgcgggaccccggacaccccgactcgcggccacttaccttcctcgtagccccactccacaccctcctcttcttcctcctcatcctcttccttctcggggaaggcgacggtatcttcgatgaagctcaggtccgccatgggaaggccgcggggcccctcggcgctctcggcagcagtgcctgcgccttcgctgggcgcggggctggagccggagcggagcgcgcgtgggggagtgtgagcacgcgtgagcggcagtgtgagtgcgagagcgcctccgggtgtgaaccgcagtgtgagtgcaagcaggcgtgcgttcggaccgagtgttccagagacccgcgtgggaagcgcgtccggaggccccagcagagcgagggagcggctgtggcctggggagcgagcgcctggcgaattttatacccgaccggggcgtgtctggtacgcgaggatccgcccccttctctctctggccgttggggccaggggagccgacagttagaatgcgcctcggggcgactagtcccaagtcacggaaacctcggcgcatccccgcccgcccttcccccggggtcgcccccgccgcctcctggcgcttcctcgctgcggcgactcctgcttggccgcccgagccttccttccagaagcccgcaagtctcccaaggtcactcgggacccctgtgtgcctggcc

SEQ ID NO: 116672 - DNA, 30 bp, Homo sapiens
  chr8:61429231-61429261
  hyper
cgcagggctgaaggcgacggaaccgagcct

SEQ ID NO: 116673 - DNA, 30 bp, Homo sapiens; identical to SEQ ID NO: 45434
  chr8:61566019-61566049
  hyper

SEQ ID NO: 116674 - DNA, 30 bp, Homo sapiens
  chr8:61593164-61593194
  hyper
tgaagcgagcggcgcggagagtgctcctgc

SEQ ID NO: 116675 - DNA, 789 bp, Homo sapiens; identical to SEQ ID NO: 45435
  chr8:61822238-61823027
  hyper

SEQ ID NO: 116676 - DNA, 30 bp, Homo sapiens; identical to SEQ ID NO: 45436
  chr8:61936318-61936348
  hyper

SEQ ID NO: 116677 - DNA, 681 bp, Homo sapiens
  chr8:62200448-62201129
  hyper
ggagggttgtggtacggaggcatttaggacccaggggaaagctaggctccgtatagaaggacagagaatcgggcgcacacgcctcctaccaaaatcacagccccttgtggagcccgagctctcattcacagctttctagagaaatctgagcccgaacctgccagaataggggatctcacccacccagttcagcagcgaggacacctgcagaaatacattcccaaagcaaggctgggcggccgtgtgaaggtatttgttaccttttttctcccctctgtatttgccgagcctccccgcctttcccccgctctttcgatgccatggctgcggcgtttcagcacttcggtatgtggacagctcccatctgcaatccctctgcactccatccctcccgcaccgcaccccgctccccgccgcctccgcggtccatcctcctcccggcgcccgctcagcctgcgcccccttacacatcagcacccccatctccaccatcaccgtcatcatagccaccatcaccagcgcggtaactatagtcacacaactgtgtcttgccacttagacaaagcccgaggtccgcagggcagagggaaagagctcaagttgacaggcataggaaggaaagttcaggtgaacaaacccctgaaaacaaagagagacgcctgtttgcgagaaagggaaagt

SEQ ID NO: 116678 - DNA, 1219 bp, Homo sapiens
  chr8:62626214-62627433
  hyper
tggtaaaaatacagacgctcgttcagtatttcatgacattctattttaaaggcaactgcaacgcatattaagaaagctacatacaagcaaaaatatttaaaataatttctgagagcattcaaatcactcccaacttcttccctccccctgccccccggcgcccccattttcacctcctttgagttgctctgaaacgctgctggttaggcaggaactcactttccctgactttggctcattttcaactccccaaaacacgcaaggcaaacgataaattgttctcttactcccatgttcaattccacggaaagccaagaaacagtcgttcagcaacctctgtctcggctgcgccctgcaggtgaaggaaccgctgggaaggggctccccgagactagcatcccgagggctcggaccccggtccgcctggcccctcgcccgcccgccaggcccgccgaatgcggcctccgccccgcgcgcctaaaggaggagcgtcgcgggggatggaggcggcgcgcggtgggacctggggagatgcacccgcagcgtccgccgcgccagccggctccctaccccgaggcgaggccccagatccccgccccgcagggcctctgacctctccgggccccggggctgctgctgcccgcactcgtgctaccgctgccggagccgctgctgctgctgttgccgctgctcttggcattcttacgctgggccattgcacggtccgcgggggctggtgagggctggcggacctccttcagtgcgcgggggtacacacgcgacgcgggaaccgctggcggcggcgggccgctggagcgggttcgggccgctgctcctgcagcagaccctgtgcctcagcaccgcctgcagcacctgggaagacttcacccgcctgccggctgcgcgcgcccggcctcgcgtgtacgaacctgtgactccctcccggggcgagagcgcgcggctcgccgcccgacggccacgccccttcccggcctcgccccgcccccggaaggctgagtgacggcgcctgggacccaatcgcaagggcccttacgaggcggcggtaccctgccgcgctccccgcccctgctcacttagggctgttcgggcgctacgcagctgcctgtgagcgcgagcctctttcggctttccagtttgtctcggtcctttggaacgtggcaaacgtggaagccgagagggctctcgcgagcgttggcag

SEQ ID NO: 116679 - DNA, 1689 bp, Homo sapiens
  chr8:63160323-63162012
  hyper
tctgcagaacgcctccgctctgttttattaggtgggagagagcaggagagtttccacaggattcagagagagtttgtccgtatcttaactatccgagatcttctttccaaatccttctcaatttatttctgtgaagatatatttatacctattccggaaaccttctccatttctagaaaaagctacgcatcttcttcttcctcgacttctcttttctccctcccggtgaggatttcaaagggtatgtgagaaaagaaccttaagccaggtctccccgcggcgtcctggctagtcccggcgccctgggcgggtgcatcgctccgccgcagcgccccttgccacccaactctgtccaactttccctttcagactccagcaggggcgccctccaggcaaccggctgtggcgggcagaagcaagctcggatgggagacccccgagctgcgtgcccagcgccggctcaacagacttgcccgcgcagcgcccgcgggccccctcgcatccgggcaggttccggagctgggccttgcgctccccggcgcccgcccaccctgggtgtctcgcgtcccggcccttcctccccggaacccaagctaacccaactcccatcctcgccacctctggggcagctcaactaagccgtgtcccctcccttgcaaacgcgtccgaccaccctcccaacccccagcacaaccctcagcaagaaagcccagctgggtctacccagttacaccggtcaacgagggtctccatcgccgccggccgccctaattcacgctcattcatattcattctcttttctctctgtccctcttcctttctccccaaagactcttaactagacaggccgatcctccccagcggcactccctttcattcttcccttcccaccacacacacacacacacacacacacccggacccagacagcccactccactttccagacgcccacctcctacatactcccctcccctaaacagacattcacccactcgccatctgtagcctccttccaaccccccgccccgcccgcctggctccccctccccaagaaacagacctgcacagtgggacgcagggacccccgccagacgctcgggtcgtgcgcaccgcactgacctcggcccgccccgccgggaaactaacaaaggcgggcgcgagccccgagccctggagccgcgagcggcggccgcggggccgaggagcctgggccgggccgggcggggactactccggagtcaggaggcagcagcggcggaggacgaggatctctggcagtcagcgccgctcggacgccgccggcaccatgggctgctgcaccggacgctgctcgctcatctgcctctgcgcgctgcagttggtgagtgccccgagggcccctgccccaggacaggtccctgctccaggaccggcctctgcgactccctctgcggttccgcagctcccggcaaggggcgaacgggtgaacagggcgctccgcccgcctcccaccctccccaccgcctggctgggctcgcactgctctccagccgcgggcactcgccaggtcgcccctgccctgcaggagggcgcggtctcacccccggtcccatgcgctggggttcgccgcgctcccgccgggcgtcgccacgcggtccaggggccaggagccggcggagtgagggattttcccgccccttgatccga

SEQ ID NO: 116680 - DNA, 30 bp, Homo sapiens; identical to SEQ ID NO: 6329
  chr8:63951061-63951091
  hyper

SEQ ID NO: 116681 - DNA, 256 bp, Homo sapiens
  chr8:63951627-63951883
  hyper
taccgggtggtctccgcgtccttccctttcaactgttacgtcgatgtggacttcagtcacccgtacaaagctgggctggccaacccaggtcctcgagaggggaggttgggtgtccccggccgagtttggtaaccaggcagcggggaggctggcaggggattctagaaggcgcctgagaactgcgcgccaaccgcaccgcccccttgaaggtcggggccctatctccgggaatggtgacaacgttcgctgtacggac

SEQ ID NO: 116682 - DNA, 733 bp, Homo sapiens
  chr8:63998149-63998882
  hyper
ctttctagctttgtcgtttccatgacccagagaaactggaggaccagctctggattctcggaacatctacagcctcagcgcccacgccgggtggttaggggcgcgttacccgccagggtcctgcctgcaccctgggcttcggcaggggtcagatatccggggtcgtggggcgggggacggggcgggtgaggtgcgcactgccgagcgccctgggcacgcacgcttacccgccaggccaggtccagatcgaaatcccgggcgcgcaggaaccgcagcaggaaggagtcggtgagcggcagcggcgcgagcgggacgccagcttcccgggcccggcgccgcagcgccgccaggcccggctgcagcaacggagagtggtccggtagcgcgttgagctgcggccccgccgagggctgggatcgcgcctctgccatgcccgccgccgctgctgcggccgcagctacccgggcacccgggaaaagcgcgcgccccgcgccaccctcggccccgcctctgcggccgctgcccgtcgcacaaccactctccagcctggcagggcggtctccggcctcgcacgccggacccgcggcgagcagagctgcctcttaaaggaaaccgcacagtgtccccacgggtgctagccacctgtttagcagctttagttagggaccccagctttttcccagcgagggaagccactgatgttcaaacaccgaggaaacgatgtcaaagttag

SEQ ID NO: 116683 - DNA, 30 bp, Homo sapiens
  chr8:64081827-64081857
  hyper
tttttactcctacgcggatagtctaaaata

SEQ ID NO: 116684 - DNA, 420 bp, Homo sapiens; identical to SEQ ID NO: 45446
  chr8:65281382-65281802
  hyper

SEQ ID NO: 116685 - DNA, 179 bp, Homo sapiens; identical to SEQ ID NO: 6333
  chr8:65281825-65282004
  hyper

SEQ ID NO: 116686 - DNA, 108 bp, Homo sapiens; identical to SEQ ID NO: 6334
  chr8:65282332-65282440
  hyper

SEQ ID NO: 116687 - DNA, 578 bp, Homo sapiens
  chr8:65283513-65284091
  hyper
tgtggctgccgtgcaggtgtcccggcccagccatctgtatggggtgggggtggggtgaaagtcttggactaatggtggggtgcttgcctgtgatctctctcacgttttcctttgaggcctccactcggaataagccgccggcgagggagcggcccattcgtgggaaacgcgcccaccgcttgggttctttcctaaggcctccccaccaacaaggctgaaattccaaggccctggaagatgaggcaaagctagcattgccagagtcgggggagaggggaggatgctgggtaaagtgcccacccggggtggtctaaagtcgtcaccccacagagcagattctgctgctaaccagagcagagagccgcaccttcccagcggcgggccccagtgcgcacagcgtgactttgcctcccccaggctcagcaagtcgttgacgatctttagcagtcccgcatcccaggtcaataaactggaaacggatagaatgagaatcatggatgagagataaagggcagcggggtgatgcgcatttcttgtagtgcctccaaaaaaccgtggtctctcgccgctaataaaac

SEQ ID NO: 116688 - DNA, 30 bp, Homo sapiens
  chr8:65284967-65284997
  hyper
gagctaaaaaggcgccgccctgtcctccca

SEQ ID NO: 116689 - DNA, 168 bp, Homo sapiens
  chr8:65285898-65286066
  hyper
tctttccttgggctgcgtgtgccgagcgtagacaatgaaaatcttcatccccctcccccattctactaggctacaagattcttgttttcgttccttctcaccggtggaagatgtgtaaaatcaaagatgtagaggtgtgtagtgatttttttaaaagccaactaacca

SEQ ID NO: 116690 - DNA, 656 bp, Homo sapiens
  chr8:65286370-65287026
  hyper
cgtcgcgagcatgcttgagagccgccggctcagctccgggctgtaaggttggttcctggcaatggatggaaatcaggtcacagagatccctaagcttgccaggctctcagacacgcttgggagacagaatggaattggaaggagggatctgaagaggagggaggggatccgtgttcccccaccccgggcctagaatggagccccggccagccgcgggccgggccccttggttttcaggacttattcttgccggggttggctcgcacgccagcatcgcgccttcggtgcgtcttttatctccatctcaaatatgggatcttcttgggacgaggactgaatgagggtgggagagagggtgtgtctcacggcgcccaggagggagaaattgtggttctgagaaggtattttttggcctcttgaaaatgtgcaagaattccgcgggcccaggctttctttgtgtggcgggcagcgccaagcgctttgtgcttcacaaggagaaaatggcgagtcctattgtgtttaggccattttcttccggtactaggattttcccaagttcgaaatacttcttgagaaagtagccttctcgtgcccaagaaagtgtgaatcgctgaggctcggccccatggcctggcgtgggtgctgacctcagttta

SEQ ID NO: 116691 - DNA, 1548 bp, Homo sapiens
  chr8:65289133-65290681
  hyper
gtccccgtggttcaccgagtggtggtccagggctctggttgggacgctgagttaggttggcaaagcgtcattgttttgaaaggcacattcgtccggaatggcattcgtgataagattaaacataaacctaaaccttggcctcgggggaaggcaggctgcggggttgagaagaggagatgcagattagctctgcttttgctgcttgcgcacataattaagaggcggtccctcagctggagcgtgggctgtgtccggcctaaggtgcttattttcctgttacttggccaaccgagtgtgagtgaacaggagcccgagagcttaaatgtgggatctagataaggtgtcgactgggttgtgggcgtttgtctccatgttagggagaggcaactgagaacggtgactttggcttgttttgagagagcctgggttttgacagcaggacggcgaagggagcgcttggagaggctggaagctcgacgtcttagggagctgcctgcgggcactgggttgacgccaagaggttgtcggcaagggcagggctcttgccctctgctgtacctaggctctgcaactgggggctgcgagccttctgcggctctttggtttcaaggacacagcgagctgctcaggactttgggagccaacatctgtctgactggtgacgtcagcagcccgtgtaatcctcttgtgctgaaggcagatgccttatttgtttggctggagcgagccattaatccctaattctggatcagcaagcgagggggaaagaccggaccgctccgacccaccccctccctacccccacctcccaccttaaagcaccttataccacggaaggctctcagcctcttctttcctctgcgaacgcgctgagcagcgattgaaaacgttttggtcctctgcaggtttgaacagggctagcaggtctctctccggatttctagggctatgggtatatgtaattctttctctcatcgatcgtttcgattctcttgccggtcttgcagtttgcagggtcctaaacgaagaggggtggagattcgagagtgcgggtctggcgtgtggtccaagggagggggtgaggctgggaaagggggtgcagaatgcgggaacggctgggactgcacagaaggaccatctgcggactcgttttcactgctccagctcccgaaatcgtttctctggacgcggcagtatccgcagcgcatgcaccctcctctggacttccgcagcccagacctgcgcttacagtcatcgcgccaccccctccccccgggctgcgggccccgcgctccgtgggctcagggtcccctccgcgtccccctgaagcctggggacggaggtcgcgaccggccgactggggtcctgtcctcttgtcaccttgtatccctcgcatgctccctcccgcctcgtgtccctctccccaccctccccctcctctctcccgcctccctaacactgcgctttgattctgtttttcaggggcgcattctggggtctctgcgcaagaccagctctcagctctctctcctttcctcggactctgga

SEQ ID NO: 116692 - DNA, 60 bp, Homo sapiens
  chr8:65290897-65290957
  hyper
cgctgccctgagcctaatccctcttccgggcccagacccgaggtccgcgctcctgggcag

SEQ ID NO: 116693 - DNA, 30 bp, Homo sapiens; identical to SEQ ID NO: 45452
  chr8:65291272-65291302
  hyper

SEQ ID NO: 116694 - DNA, 156 bp, Homo sapiens
  chr8:65292571-65292727
  hyper
ctgcaggggttgggaacaaaggagaggagctaagaggatgcaccaaagtagccgcgccctccctgcctggcgctgtccgcggtgctgaccgtggcccttttctctctccgtaatcaaactggaaaagcaataggaccgtcccgtccctactcaaaa

SEQ ID NO: 116695 - DNA, 108 bp, Homo sapiens
  chr8:65293265-65293373
  hyper
cgcatcccagccggcgggaggcactggagggccaggaggcctgaaacccgcactgcggaaaaaccgacctcagccacatcctcatagctcacgcgacggaaagaggca

SEQ ID NO: 116696 - DNA, 30 bp, Homo sapiens; identical to SEQ ID NO: 45455
  chr8:65487802-65487832
  hyper

SEQ ID NO: 116697 - DNA, 858 bp, Homo sapiens; identical to SEQ ID NO: 45456
  chr8:65488196-65489054
  hyper

SEQ ID NO: 116698 - DNA, 120 bp, Homo sapiens; identical to SEQ ID NO: 45457
  chr8:65489462-65489582
  hyper

SEQ ID NO: 116699 - DNA, 1062 bp, Homo sapiens; identical to SEQ ID NO: 45458
  chr8:65489646-65490708
  hyper

SEQ ID NO: 116700 - DNA, 67 bp, Homo sapiens; identical to SEQ ID NO: 45459
  chr8:65490762-65490829
  hyper

SEQ ID NO: 116701 - DNA, 133 bp, Homo sapiens
  chr8:65491294-65491427
  hyper
cgtctacgtagtatttctgtccccggaagactggatctcagggaattattatggaagatactgctgagcccctttcatcctttccaggtgaaaatacagacatttttgtgtcgccctcacccttcctttatga

SEQ ID NO: 116702 - DNA, 30 bp, Homo sapiens
  chr8:65491871-65491901
  hyper
tacattctcccttcccgaaccctccaagaa

SEQ ID NO: 116703 - DNA, 1239 bp, Homo sapiens; identical to SEQ ID NO: 6340
  chr8:65492339-65493578
  hyper

SEQ ID NO: 116704 - DNA, 148 bp, Homo sapiens; identical to SEQ ID NO: 6341
  chr8:65493806-65493954
  hyper

SEQ ID NO: 116705 - DNA, 523 bp, Homo sapiens; identical to SEQ ID NO: 6342
  chr8:65494076-65494599
  hyper

SEQ ID NO: 116706 - DNA, 81 bp, Homo sapiens
  chr8:65498471-65498552
  hyper
ttagctttgcgtgtacgactgcaggaccagcaaatgatcatcttcgatagagctctctagttacccgtgcttctccctccc

SEQ ID NO: 116707 - DNA, 501 bp, Homo sapiens; identical to SEQ ID NO: 45464
  chr8:65498611-65499112
  hyper

SEQ ID NO: 116708 - DNA, 394 bp, Homo sapiens; identical to SEQ ID NO: 45465
  chr8:65499628-65500022
  hyper

SEQ ID NO: 116709 - DNA, 262 bp, Homo sapiens
  chr8:65710821-65711083
  hyper
gctttaatatgtacgcgtatgtgtgggaaaaagacagaagaagcctttgttattacaaagtcccaaaggaagccagtaccccgcagcaagttctgactgtctgcactggaaatcatggagggggactcccctcgccatctgggtcgcgcgcggcccgcggggcccagggcgcatgcgtggcctggcggccgaggcgcttacctggtgcgccggacaagcaagcagagggccaggagcagcagggccgcggcgagggccaggc

SEQ ID NO: 116710 - DNA, 185 bp, Homo sapiens; identical to SEQ ID NO: 45467
  chr8:65711221-65711406
  hyper

SEQ ID NO: 116711 - DNA, 184 bp, Homo sapiens
  chr8:66546064-66546248
  hyper
acgtgggggtagagcgtgctaaagcgcctcactgggacccactactggatctgacaagaggcaggcggggcgcccctcccaggcggattcgctgcctcggtacaggggccgcttcccgcggccttcccggctccactgctttgtctgccgcccgtggaccccacataccgctccagagctttag

SEQ ID NO: 116712 - DNA, 163 bp, Homo sapiens
  chr8:66546467-66546630
  hyper
gataatgagtccaacgtgaggataaagtatccaatcagtgaaggtctttttagagtgaagcgctcataggtggtttagggaaatacactaagagtcaagggactgatccaatgaggacccaggaacactatattggccctaactactcgccgtccaccaagcc

SEQ ID NO: 116713 - DNA, 30 bp, Homo sapiens
  chr8:66556429-66556459
  hyper
tcggactgaacagacgctggaaccgaacat

SEQ ID NO: 116714 - DNA, 195 bp, Homo sapiens
  chr8:66556750-66556945
  hyper
cacaaagcaaggtccgcacaaaagcacacgcccctctcagagctccgcgcgtgcgcacaccgactgtgactctcagcagccggcttgcggagcggttgccgcgtcctctgccgagcttcttgtgcccgcctccgagcctgaggaaacagctgattgatcagcctggctcaggcttggggcggggattggctgatt

SEQ ID NO: 116715 - DNA, 30 bp, Homo sapiens
  chr8:66557273-66557303
  hyper
tgaaggctgagactcgcccacccgccaatc

SEQ ID NO: 116716 - DNA, 30 bp, Homo sapiens; identical to SEQ ID NO: 45469
  chr8:66557532-66557562
  hyper

SEQ ID NO: 116717 - DNA, 30 bp, Homo sapiens; identical to SEQ ID NO: 45470
  chr8:66753074-66753104
  hyper

SEQ ID NO: 116718 - DNA, 1524 bp, Homo sapiens
  chr8:67024904-67026428
  hyper
gatgtcttagtagatgcggtggaaccagctctgtctacagaaccccgggcttcagtggcgtcttcctaacccggcttgcctgccgggggcgttccgagaccctcggggccttcccttcaccccgcgggagttggaccggtggcgctggtaaggcctcccgggctcaaagtgcaacggacactgcagaaatccaaactgctggcattcgcggtttggggacgccagaggaggtaatgatttctggtttgttaacctcaagtgacaataatgccgagccaggcaggagctggacctacaatcttctgatgcgtggtcagacacgttatcccttgcgccactggcctaccacgctactccttcagtcgccgttggattactgtgtgttgagaacacactcggcaaccactttaaaggacaacgcaggctggtaaaggaaaagtacgacaagggggggcggtggaatcgcagggtcttggcatcgcggaccccagacacctgggttgagggcctttcccgggtcagtcaggctagcgagccggagcgttctgtctttctgcgcacgcgtagagcacacaggccggctctggggctctgcgctcctcggattacgcatgctcagtgcaatcttcggttgcctggactagcgctccggtttttctgtgctgaacctcaggggacgccgacacacgtacacgtcccttcgatagctcagctggtagagcggaggactgtagctacttcctcagcaggagacatccttaggtcgctggttcgattccggctcgaaggagacaagtgcggtttttttctccagctcccgatgacttatggcactttccttgggtgccttcagtgacacattgcattccaacgagcagtttgaaagtctagcgctttctccccattttgggcctcccagcctgcacggtaattctttttagccattcgccctgcgggaacgtgtccgggcaggttcccagcgcagctgtgggtctgcgcttggccgagcgactgccgggtcacgacttctgcgtcttcttaacccgtctttggcattgcccgggccccgagtcacacaggaggcagcgccggctccagggggccaggcggggaccttctcctcagagccccgggcagcttctgcgacccgagggctcgcaacggctgccgtgaggaggtggggggtccgcgggaagaggtatctggcgctcccggaacctgggaatcagaaagagagaacacaatactaaaaacacgaagcctaaaaatgacacaatgttatggagacaaggcggcacccgggaagctgtgcccgctcccttcgatagctcagctggtagagcggaggactgtaggcgcgcgcccgtggccatccttaggtcgctggttcgattccggctcgaaggagagacacccccccccccattattttgttgctttgaaccaaaaaagtctgtcttcagcgctcaatgttctgacccttctctaaaggaacagataataagccgtgcccagccgtggggg

SEQ ID NO: 116719 - DNA, 503 bp, Homo sapiens
  chr8:67026487-67026990
  hyper
catcctccagttttccttcctgtcccgtacggtttttctttcgattctcagcccaaactagagctgaaaagtcagacgaagtcaggtgaagagtagggcgagctccagcttaccactctaaaacttcccagacaatgagtggtgggcgctagcagtttatccttctagctttaaatttttagacccatttaattggggggaaattcacgaaactggttatttttgcttcaaaaatggcgacagattgccgtcacatgtattatcactcagaatcctttatgatttgtgataagatgtctgcatttccagggactcatctgaggctaagctgcccatagttcggggagacccacagggaaaacaaaacaagaaacagagaacttggaaacggacgctgattactttgaacgtttgctcaaccgaggaagcaggaactgttcggccccatctcaagtccgcagggcggactgcctggctctgggcagatccgaggtggataggac

SEQ ID NO: 116720 - DNA, 797 bp, Homo sapiens
  chr8:67089300-67090097
  hyper
tagcgccgcgctccgcgagagccgcggggctgtcgagcgagcgccgaggcagcagcagctgctgcagcaacacgcggaaaaagttggcggtcgcctgttccggcgaagggcggctgccgctgcctccggcgaggagcgaggaggcgggcgaaaggggagcggccgggctcttgttgaggttccccaggcggaggaagtactcctctcccatgcggagcaggaccggccgagcctgcggctgctggggctgctcggactgcggcggcggctggaagaaatccaagggctgagggtgctgcggcgcctgccgagctcccgggaccggcccgcggctcaggagcgccctgcatggcgggcagggcaggagagccaccagcaggactcccgcggacacaagcagcggcagccgcatgttaggggcactcgctgcggcacagaggtgggcggagggcggaatgagagaggggaagagagaaagaaagagttggttagagttcgctcagctgggaggtgcacacggggtcttcctacgggactgccttagacgtgctgggctttggcctcagtgattcggatgggcgctgtccgcggtgctgaagcgcctggggagcggggaaagggggcgcctgcagggctccgcacctaagctcatgcgctcaccggccaggagtgacccttctttctagactctgaaaggacggtccctgcgtcctcttcctaacgatcctcaaaactaattttcccgatcctagagaagagccacagatttaagatcccacccgcgctgactacctccc

SEQ ID NO: 116721 - DNA, 33 bp, Homo sapiens
  chr8:67090318-67090351
  hyper
tagtccgcgaacacgcgcgcacacacacacgca

SEQ ID NO: 116722 - DNA, 42 bp, Homo sapiens
  chr8:67090410-67090452
  hyper
gcacgcacacacatgcatacacacgtacacaggcaggggcag

SEQ ID NO: 116723 - DNA, 30 bp, Homo sapiens
  chr8:67090473-67090503
  hyper
cggcagctcaggcaacgcaaagttggtggc

SEQ ID NO: 116724 - DNA, 30 bp, Homo sapiens
  chr8:67341051-67341081
  hyper
tgcatcctgggaatcgtagtcccaatcctg

SEQ ID NO: 116725 - DNA, 30 bp, Homo sapiens; identical to SEQ ID NO: 45473
  chr8:67341291-67341321
  hyper

SEQ ID NO: 116726 - DNA, 210 bp, Homo sapiens; identical to SEQ ID NO: 45474
  chr8:67344491-67344701
  hyper

SEQ ID NO: 116727 - DNA, 285 bp, Homo sapiens; identical to SEQ ID NO: 45475
  chr8:67344809-67345094
  hyper

SEQ ID NO: 116728 - DNA, 450 bp, Homo sapiens; identical to SEQ ID NO: 45476
  chr8:67417574-67418024
  hyper

SEQ ID NO: 116729 - DNA, 52 bp, Homo sapiens; identical to SEQ ID NO: 6348
  chr8:67524785-67524837
  hyper

SEQ ID NO: 116730 - DNA, 30 bp, Homo sapiens; identical to SEQ ID NO: 45478
  chr8:67525264-67525294
  hyper

SEQ ID NO: 116731 - DNA, 30 bp, Homo sapiens; identical to SEQ ID NO: 45479
  chr8:67525834-67525864
  hyper

SEQ ID NO: 116732 - DNA, 30 bp, Homo sapiens
  chr8:67526278-67526308
  hyper
ggaaataacgtgcgcggcggaggagccctg

SEQ ID NO: 116733 - DNA, 30 bp, Homo sapiens
  chr8:67579192-67579222
  hyper
tagctcctggctctcgtgtctcgctccgcg

SEQ ID NO: 116734 - DNA, 30 bp, Homo sapiens
  chr8:67579876-67579906
  hyper
gggtctgaagttcacgactactagaagggg

SEQ ID NO: 116735 - DNA, 30 bp, Homo sapiens; identical to SEQ ID NO: 6349
  chr8:67625265-67625295
  hyper

SEQ ID NO: 116736 - DNA, 30 bp, Homo sapiens
  chr8:67687045-67687075
  hyper
tggagccctgaattcgtgtgtgactcctac

SEQ ID NO: 116737 - DNA, 149 bp, Homo sapiens
  chr8:67687303-67687452
  hyper
accggcagctccttcgggggtgtggccgaagagctccgagggcggggctgaccgagccatattcgggcgtggccggtggtgattggtgagggcggggcctgccgcagggggcggggcctgcaggtttggcccccgcagggagcgcagct

SEQ ID NO: 116738 - DNA, 44 bp, Homo sapiens; identical to SEQ ID NO: 6350
  chr8:67837265-67837309
  hyper

SEQ ID NO: 116739 - DNA, 30 bp, Homo sapiens; identical to SEQ ID NO: 45482
  chr8:67837938-67837968
  hyper

SEQ ID NO: 116740 - DNA, 38 bp, Homo sapiens
  chr8:67873383-67873421
  hyper
caccccggctttaaacgcctctccagccacctgtgaac

SEQ ID NO: 116741 - DNA, 252 bp, Homo sapiens; identical to SEQ ID NO: 6352
  chr8:67873798-67874050
  hyper

SEQ ID NO: 116742 - DNA, 508 bp, Homo sapiens; identical to SEQ ID NO: 6353
  chr8:67874164-67874672
  hyper

SEQ ID NO: 116743 - DNA, 927 bp, Homo sapiens
  chr8:67874755-67875682
  hyper
cgaccggctaaggcaggtcgggcggaggacctggcccaccggagaggctacgccgggggctgaggcggcttagagggtcattaatcaaaccctccggcggggcgggctcgggggcggggcgtcctcctggccccgcccctcggctcactgcctcacgctgctttccccgaggcgcctcgctgagggcggcgtgtggagagtttggggtgtctgccgccggctgcggtggggccgggctggaggccgcgggtgaggcctgtggttaacctcgcgctgccgaggtcttacctcctcgagtccagtctgattccaggccgcttccaggccggtgcccagctgaggcgggaacgctgcagtttggttgagcgtgacttttaggctctgtgaggaaaagtcgagcgcgccacatcgaggcgctagccgtttattctaccacaaggtaaaagattcatgctgtcctagttaccctaaagctgggagatacactgcacttcctaccagaccccgaatgctctcagtgtctgtaattctttaagaagttcctagagcagacagcccttggatcgtgggcacttctccccggggacggggaccctgctgaccgcctccgctgcccccgcgggggccaccgctctttaattatttgggcgaaacattcttttctggttttgcacttgtggactcacgggaagcgtgacttgcagcgaggcaggacccgatcccaggcttctttagaaagcggacgctgcgccccaaggcctgttcagagccgccccaggaagccgtgggtccccgaccgccccaaaccgcagcggtttctgcaggtcctggacccgtcgccttcgtaggtgaaatctaagtacttttcagcaacataattagaacacactcgaaacaatgcctgcagttctccgagtaggacatttt

SEQ ID NO: 116744 - DNA, 438 bp, Homo sapiens; identical to SEQ ID NO: 45487
  chr8:67940670-67941108
  hyper

SEQ ID NO: 116745 - DNA, 13 bp, Homo sapiens
  chr8:67974198-67974211
  hyper
tttctgggccata

SEQ ID NO: 116746 - DNA, 221 bp, Homo sapiens
  chr8:67974225-67974446
  hyper
cgccatcgccgaggaagcggagaagttgtcgtctctacaaccaagacgcaactttacctcgctaggtttccgggtgtgggccttgaccctccgcaccacgggaacaaactcttacctagactcttggggcagccatgacacctagaaccggaggtgaagttggtagagaccattcagggaagacagggacctttccgggacatgacgatataaacagcagt

SEQ ID NO: 116747 - DNA, 30 bp, Homo sapiens
  chr8:67976458-67976488
  hyper
ggccagcgtactggcgaaccgagagcagcg

SEQ ID NO: 116748 - DNA, 144 bp, Homo sapiens
  chr8:68256144-68256288
  hyper
ggcccgagccgcagcgctacggcggcccggcggggcctccagcgttcgcctgcagggcggcgtggggcgtggcgggcctctggtggcaccgcgcccagcacttcgggctcttggtggcggccgagctgcgggaccagagatccc

SEQ ID NO: 116749 - DNA, 473 bp, Homo sapiens; identical to SEQ ID NO: 6355
  chr8:68863997-68864470
  hyper

SEQ ID NO: 116750 - DNA, 361 bp, Homo sapiens; identical to SEQ ID NO: 6356
  chr8:68864545-68864906
  hyper

SEQ ID NO: 116751 - DNA, 318 bp, Homo sapiens
  chr8:68864942-68865260
  hyper
cgcggggatttgttggtgccccgagactcactgagttgcgggggccttggagacctccaggtctgaaaagttagctctagagaagagagctccagtccagggaatcccggctgccctatcttccctcacttttcttttacccgcctccccagtctgctcaagtgcactgtgtaattgattttccttcttgttctttcctggagactttgttttaaagctttggttttgtgattaaaggtccagtcggctacatccaggtacactaagttaaaaaaaatccttgaatgtgctcgagcttgagttcgttactcagataac

SEQ ID NO: 116752 - DNA, 320 bp, Homo sapiens
  chr8:69242746-69243066
  hyper
ccttctcaacccctgcgctagagtaggcagggcagaaggtgctgaggagaggctcagaaggggcggtggggacgatcccctttcgaactgcatttgtagctgccaaggagtagccaacaagcaccagatttatgtgcactttgaaagaagcaccttcaccattggctttttaagcggcgctgtcgctagggagcggctggtagggcgagcagcctcggggagcagcccgggctgtttgttccgtcaccggggaaaggaggtacacacagtcgcgcgcgcacggacacacacacacacgcacgcacgcacacacaccggtg

SEQ ID NO: 116753 - DNA, 618 bp, Homo sapiens; identical to SEQ ID NO: 6359
  chr8:69243284-69243902
  hyper

SEQ ID NO: 116754 - DNA, 1048 bp, Homo sapiens
  chr8:69243963-69245011
  hyper
cgctatcttgagtgttcgtgttggattttcttttttcttttcttttctttccttctttttttttttttttttttttttttttttaatgagggcggtaatagaacccgaaaaggtggaggaggtgcttagcagttaatacaattaactggaagacagctgaactggtgaggagtaggcttcagtcggtgcgggcgtgatgaatgaaattggcaaactgagagactgccatttggtcactggacgaaaggagagtcctttgcactgcagaccccacatgtgttagcaggagaaagggacggagaaaggttctgaaaagcacacacgtatttgtggaagaagactatagctctgagctggttttgtttttttttctctctctcgccattaaagaatttaagacaaaaatacagtagaaggaagagcgcgaggacacgagaaaatgagaacaagagattgaagcctggcaccagcaaagcgtcccgcgggttgccagggtgctgagcaggggtggggcgtgcggaccgtagtcagaagtggaggcccttgcggagggactcccttggtcccatccagttcagggggcactgaccggcggcgagagttcgcgggagggtcgaggtgctcccgccttgcccccgccttgcccccgccttgcccccgccccccacgtctcccagaagcagttgtagctgttcttaacagcttggtttggggtgagggcttggtatggggaggaggttacgtgtcagtgtctgagagaggcagaatcgcggcaagtggaaggggctgcactggagatcgcggaaaacctagcaaagactgaagagaagcaagtgagaactgtggagaacaaaaaaataatgcgagttaatgaccctgcaaaaaaagggcgcggaggacaaaggtgtggtccaataggtcttttgggaggacgggtttcacataacaagatttgcaagatctcctaagtttttttgcccaactttaacgttgatctgtcttagacgataagaccattgtttcaattgaagctcgcattgtggggtgc

SEQ ID NO: 116755 - DNA, 306 bp, Homo sapiens
  chr8:70404913-70405219
  hyper
ccagtcctttcagccgtgtcccgaaattcacccttagtgtaacttctgcctctgctcctcctcttcttggaactgccttttgtttgtctggcagcgttggttctatgggggtgtgtgatgataataatacgcgggcttatataaccgtcttcatcttgcgagcacttcgcagaccgtcgctaatgaatcttggggccggtgtcgggccggggcggcttgatcggcaactaggaaaccccaggcgcagaggccaggagcgagggcagcgaggatcagaggccaggccttcccggctgccggcgctcc

SEQ ID NO: 116756 - DNA, 30 bp, Homo sapiens
  chr8:70623592-70623622
  hyper
ccgcgttcccagcctcggagggacccccga

SEQ ID NO: 116757 - DNA, 30 bp, Homo sapiens; identical to SEQ ID NO: 45498
  chr8:70744328-70744358
  hyper

SEQ ID NO: 116758 - DNA, 2402 bp, Homo sapiens
  chr8:70744865-70747267
  hyper
gctgctctcccgccccgggctgcagtccagtgccttcgtccatggcgcttagaattcagatttgatagctgatggcacccaagcactccggcacgtttcatccaccggcacgaggggccgaagccgggcccagtcagtcttgcccacctgggactggggctgggggcgcagggccgcgcagcagggcatcctcaccagctgcgaggcgcccagtgcatcctgatcacagacacggcttcaaggctccgcagccgcgtgccacagggggcaggggtccgcgcggtactgcgatgagccctactcggcgtccctctccgggcggtagcttgaggcaggcgcctcgcgcgtcccgggctcatcccctccgccgccgccgccgccgccgccgctgggcccgcggccaggagcgagtgcaccctgcgccgggggtgggggggcacttagcgctgctgtccgtacagcatcccacctcgctgcgccaggggtaccgggtgttcgccgcctgggctcgcggcaccctcgggagtgaagctgccgacctgcaaagcagaaagagggcggtcagcgaagagcggctgcggcttggggctagcgtcccagcgccccggggaccagggttaggtgaccccgaaccgtccctagagggacggaggagctagtcaggagcggagccccggaggactaggcagcagccggctgcagtctccagtcccggaacaataagcagcaggcggtcggcggagactctccctcattgtctgccgcggacctgcccccgtcccgccccttctgccttaaacattgcgtttgcttttatatgttaataattatcaacctggcagctctgactcagaggcagtgtcttttaatcgagtgaactaactgcagcctttccgtactcctactccattactcaaaatagaaaatgcccaaaagaacaaaggaaactttttcacagacacacaatgtattccctgtcccaatttttctaaaaggaaaaaagaaggtgggggtaaactacgtgtgtagaaatgtgtgtgcacactggtgtgcgttggcacgtgtgcgcgactagatttgaatctgtctgctccaccagagacacacattcaaagccgaaggcagcagcaaaaaggtcaacatgcttgcctctttattcccaacaccaaaaataaccccctgaccgaaagaactcttcaattacaaataccaggggcattcgaggctgtggcccgcactaagtcccagagcgcggtatcaaacgaaaccgaaaatccgtctgctttgccgagagctagggaagccacaaccaaacaaagagatcccggcacgctgtcagagagcgcgcgaggagcccacggagccggctgggcgcacgcgggccggcggggaggtgtgctattgactgagcgcaccccgctagcgtgggcctggggagcgtgtgcgcgtgcgcggccacacacacacacacacacacacacacacacacacacacacaccggcgtactggaacctctctcgcgatcccgcacccagcttgaattcagcaagaatcgaaaacaggtgtgcccccgtggtaagaccccgcccctaatcttggggacccccactccactcctccagcctggggcaaggacggggggcggaatatgcaccaggtgggagacagccgagcttcactacactgggtttcattttgcagcgcgcctttgtgatgctgctgagaaaagaaaggaggaagggcaagggagaaaggcagagaggctgggcggccaagggtggccgctccggcatctccctcggctgtgctgggccaaacccgctcccagattcccggcctgccagccactcacaatcccgggcttccccgccgctgccttacccaggcgccttcccggggaaccccaccagccgctgcgtgaggagccggggaatcccagcaaactctcgccgctcgcggggggcgtccgaaccccctgcttaggcgagcgccctcacagcatcgcagactcggatggacacgcggatcccggcagggagctcttggagcaggcgtggaatcccagggacaccccctgcgcgcacatcacatacacgcacatcctacacacacacacacacacacacacacacacacacacacacacacagagcccgtgggaagacaagaccgccggcgacagcccgccgcgctgcccgggcgctcaagccgccgctactcactagcgagtctgtcagtctgtctgcctggctgagtagagcggcgggaggggggcactgagctacgggaatagttgggagccgcgtgaggaggcagcctccgtccagccgaagagaaatcagtgaatgagactgtgactcaggctgaactcttccccccacccctcgcctgtcacccaagc

SEQ ID NO: 116759 - DNA, 259 bp, Homo sapiens
  chr8:70945213-70945472
  hyper
ccgctgcgcgtggtccgcgctcgggctcgcttgccccctctctagcccaaagccccattcgcagcgcctgggctggtcccactcatctgcgccaggtggaggggaaggggaggaggtctaaaggtgtggagtaagggagggagaggagaaaggaggaagggagagactgggcacttcaagggtcagaggaggaccacctgtggtcacagccatcgtcacgaccccctgccgcgcccacgcacgcgtggatggggccagg

SEQ ID NO: 116760 - DNA, 39 bp, Homo sapiens
  chr8:70946875-70946914
  hyper
gtcaggttcaagaagcggcccggagttgcaggaagggcg

SEQ ID NO: 116761 - DNA, 525 bp, Homo sapiens; identical to SEQ ID NO: 45504
  chr8:70947090-70947615
  hyper

SEQ ID NO: 116762 - DNA, 21 bp, Homo sapiens
  chr8:70981858-70981879
  hyper
gctcagcaagggaggcgccat

SEQ ID NO: 116763 - DNA, 304 bp, Homo sapiens; identical to SEQ ID NO: 45505
  chr8:70982262-70982566
  hyper

SEQ ID NO: 116764 - DNA, 1019 bp, Homo sapiens
  chr8:70982850-70983869
  hyper
cgtccgccacattccccgggttcctcggaaactccaatcattctaccaggactattggggcctggggtagcccctcgggagccgcgtggacgagccctggccaggtgggagcgaagagcctcggcgactgccagtcctcccgcccccgcaccgccgggaaaggatggcgttttaatagacaggcagcaagttcaccgaggctgaagaatgaagccccttcagggccggcgggtcttgagatcaatgagcccaataagaaaaccaagcagggtcatgactcagaaattaaagaacacggggtcaggagaagaggtcagccacgacacaggcagcggcccgtctcctcccgatcctccaaaggcgcccttctcctagcctcctccgacctcagggatctgcaacttgggattcaaagcccccgagagggcagaacgaccatccaaaacgaactgcgccagcgagtgctgccgccctccccaacggccctggaagaccaccgccccgggccccaggcgcgtcctgtcccgtgcctacctccgacaccacctccaagagcgccaccgcggagcgggcgcctcctggacgctgcggggccactcgggctcggtaggccactcgggctcggtagacttcgggcgggccctgagggctgagccaggcttaagagggcgggcggggccgcggggcatcgacaggtcgagggtagggaattgacccggcccacgcagatccccgcgtcgtcttctccccgcccaccgcagccattggccgactctcgactcgccctctgtcccctggggtcgctcacttaactcatcagttttccaaaccctccctgggaccctagtggcgagcactcgccgctggccttctagggcaggcagtattgccgctccaggcgtgcggagtcggggagaaaaaaaccgaacacgtgtgctacccagggcccccagataagcccctccgcgcgcacacacaccctgaaccggagtccagaaggccggactcgcgtcccgggg

SEQ ID NO: 116765 - DNA, 276 bp, Homo sapiens; identical to SEQ ID NO: 45509
  chr8:70984016-70984292
  hyper

SEQ ID NO: 116766 - DNA, 318 bp, Homo sapiens; identical to SEQ ID NO: 6369
  chr8:70984343-70984661
  hyper

SEQ ID NO: 116767 - DNA, 140 bp, Homo sapiens; identical to SEQ ID NO: 45511
  chr8:70984744-70984884
  hyper

SEQ ID NO: 116768 - DNA, 30 bp, Homo sapiens; identical to SEQ ID NO: 45512
  chr8:71119062-71119092
  hyper

SEQ ID NO: 116769 - DNA, 45 bp, Homo sapiens
  chr8:71315998-71316043
  hyper
tgtagccgaggctgcggccgccatgttcccgtgttaataactgct

SEQ ID NO: 116770 - DNA, 369 bp, Homo sapiens
  chr8:71316514-71316883
  hyper
aactagcgactgggacgggcctgggccgctgagttagaggcagtggggcctgggggctgcagacggcagggacggtgccccaggacgaagatcggggagagccgagttccagggtcgccagcagaggaccctcgcgcccgtccggccggacccttcggccagcaccctgcaccccctcgggcgcacctcaccctacccaactcccggtcctgccgctgctccccggaggcgccccgcatccgtcaagtcccctacggctccaacagggagaggcttctcccattgcagtcctagctccagaggggatggagaggcgcgactgtgggagctggaaggggcaccacccggcaattgcgggataaagcaaat

SEQ ID NO: 116771 - DNA, 30 bp, Homo sapiens
  chr8:71520288-71520318
  hyper
gttgggactcggggcgggctcacctcaaac

SEQ ID NO: 116772 - DNA, 30 bp, Homo sapiens; identical to SEQ ID NO: 6372
  chr8:71520835-71520865
  hyper

SEQ ID NO: 116773 - DNA, 30 bp, Homo sapiens
  chr8:71581501-71581531
  hyper
tgtgacaccgcggacgagccggggcgggga

SEQ ID NO: 116774 - DNA, 348 bp, Homo sapiens; identical to SEQ ID NO: 45515
  chr8:72273960-72274308
  hyper

SEQ ID NO: 116775 - DNA, 14 bp, Homo sapiens
  chr8:72459556-72459570
  hyper
ctcccctccgtccc

SEQ ID NO: 116776 - DNA, 64 bp, Homo sapiens; identical to SEQ ID NO: 45516
  chr8:72460433-72460497
  hyper

SEQ ID NO: 116777 - DNA, 69 bp, Homo sapiens
  chr8:72466268-72466337
  hyper
ctgtgctgttggaagcggattgccagtgaggccggacacagggggatataaacgcgtgtagaaaattaa

SEQ ID NO: 116778 - DNA, 397 bp, Homo sapiens
  chr8:72466617-72467014
  hyper
agaagggttttctctcgtcgatttcaccttcactctacggaaatctagcaaggcttatctcgtttctcaagcctaggacgctggtgtattttgaggcagtctcctagaagtcctgggagactctgggagctggtactgtgtgcaggcgcgacctatagctctgcctggtggatctgcaattcgatttcaggcctttttccccctcggcatttttttttccctgactacttgagaggaaaaaaacaaaaactgtataagaaactcgagaagagactgtgggatgcagaaccgcacacgtggtcctgcaaattggataggagactgggggaggcggggaagagaggagaagtgaaactagaaattatggtacagctttagaattcgagaatctccattg

SEQ ID NO: 116779 - DNA, 30 bp, Homo sapiens
  chr8:72467764-72467794
  hyper
attgctagatatcaccgaagtagtggaacc

SEQ ID NO: 116780 - DNA, 984 bp, Homo sapiens
  chr8:72468590-72469574
  hyper
actcctgcgggcgctcgctctctccacgccgccgcccgcgcgcccgcggcagccacgagcgtcccgggcggggaaacgcgttgcctcccggcggcgcctattactagcagctgcttctgcttagcccttcgaggatcggtttgccccaacccacggcctctcccagggttcggtcttctcccgcccctccctcccttccccgcctctcccccaagctcctcagtggccgcggcccgtcaacactgtcgcgcagtcactggcgcaggttcccagctctcagctgggggtttcggggggagggagcagaaggaatgagacagaaggaacgggaggctttaagcccaccgagggaggttagaggaaggcgctgtggctgtgggattaggaggccacagacgggaaccgcgccgagctagactagctgtagaaggctgtctctccaccccgccacagcgctccgagaaggagcgggaggcctgggcaggggagaggcgctcctgcccccacccgcgccctgctggccacctgtggcgtcggggagaccacctgcggagagggtgcagggatgctgctgccctgacgaggggcctcccggggactagcgaaacgtttcgcctcgccggtgccgggggagagcgcatggtgacaccagggcagagtagccatggcggtcctctccctctttctggcactccactgtcagcgtcggctagaagcaaacgcccaggaagcactaaccgatgcacacaaggtttcgatggacagggacaggaaaatcggctctgcagcgcgggggagcgcaggctggaggccgggccactgaggtggccccggctgagcgactggcgtcggtttctcctcctagcgctaggcgggagtgggaccccgggccacagcaagagtcgccgggtgaggacgggcccggcccgtggcgcctagctgtaaagggccctaatgctgcgcgtttgtcgcaaagggaggcct

SEQ ID NO: 116781 - DNA, 20 bp, Homo sapiens
  chr8:72470185-72470205
  hyper
atgccctcttgctgacagat

SEQ ID NO: 116782 - DNA, 973 bp, Homo sapiens
  chr8:72470259-72471232
  hyper
cggtctccagccctaatcccaacccctcctccgttttcatccctaagctctagactgttttgtggtcagtaccatttccttactatcaaaaacggccgcgggcagaaaattacgataagtaaagcatagtctcttctcgcctttatggacatccccgcattttttggcggtcttagcctcggccaagtgcaagccgtccgtttcaaggcaggggtggagcctttaaagggtcgcttgggccagcgttagcattcctccccctgccgcccgccgggaacatccaatctaagtggtaaaaatgctagtgtgcagtggagctcagcttgaagacaagaccccccacctccagccgtaagacccaaaccaattcttgcccttagcggaggcctcctagaatttctggggccgccactgctctgggggaatcgtgggacacagtccggggaaagaacaaagctaggcgccaggaagggccgaccagcccggacgggtcagccgggtcctagccgtctcgggttctttccaagaaatcaggaaggtgactgtgcaggaggcaaaggacgcccagttaccgtttcctggagaaacacctttgctaatgcatttagggaggttgctaattgttagccatgtgccacctaaagccctgttggagaaagtcagagggcggatggctgtagttttctggaggtggagaaagaagtgggacattttggaggtgtcgatcaacggcttaaaaaaccactctgacagaaaacgtttgtaaaacccgacattcgttgtaagcaccttcaagaaaggcgagttctcgcccctaatatgcccctaatacagagcttgcacacggaagtgccatggccattgaatgaatgcgggaccgtttgcgttaataccggcaacgttctttctccggtgacactacgcagctgtcgttttccctatttctatgatcgttatgggacccaagtacata

SEQ ID NO: 116783 - DNA, 772 bp, Homo sapiens; identical to SEQ ID NO: 45522
  chr8:72754490-72755262
  hyper

SEQ ID NO: 116784 - DNA, 261 bp, Homo sapiens; identical to SEQ ID NO: 45523
  chr8:72755553-72755814
  hyper

SEQ ID NO: 116785 - DNA, 364 bp, Homo sapiens; identical to SEQ ID NO: 6378
  chr8:72756655-72757019
  hyper

SEQ ID NO: 116786 - DNA, 303 bp, Homo sapiens; identical to SEQ ID NO: 6379
  chr8:72917125-72917428
  hyper

SEQ ID NO: 116787 - DNA, 290 bp, Homo sapiens; identical to SEQ ID NO: 6380
  chr8:72917515-72917805
  hyper

SEQ ID NO: 116788 - DNA, 584 bp, Homo sapiens; identical to SEQ ID NO: 6381
  chr8:72987459-72988043
  hyper

SEQ ID NO: 116789 - DNA, 88 bp, Homo sapiens; identical to SEQ ID NO: 45528
  chr8:73163572-73163660
  hyper

SEQ ID NO: 116790 - DNA, 392 bp, Homo sapiens
  chr8:73163859-73164251
  hyper
cgagagagcgctgtcagccggccaggcgctggggtccgcgcgagcccgagctctccctcgctgcagctcacaggcagcgaaaatctcgctccgcgagagccctggagaacttctggaaggagttctcaggcccgcgctacttacagtgcaggaagcaagcggggcgtgaagaggaggtagaaacacagacctccctagcaaagagggaggcggcgcagcgtctgccgaggactcgccccttcaggaacaaagtgactcccccgtcccgctgtcctgcagctgcagcagcgcactcccagagtcaagcgtgtcaggtcggtgtggatgcagcgaatttgttgtaatctacacattaagagcccccttgcctcgccctgccccctccaaccgtg

SEQ ID NO: 116791 - DNA, 1277 bp, Homo sapiens
  chr8:73448677-73449954
  hyper
gggttaaggttgccacggacccggctttaccctcaaacccaggaaagccgggtcacttggggctagggacggcccccgagcgagcggggctgcaggtgccgcgaggaaagtcagatcttatctgcgctcctagttatctccgcagctctttctccaggaaaataatcctggcaccaccactcaggagccatctgtcttcgccccagttccccggggtcgagcagtcagcccagggtcagggtcctgctgtgggcgggcgggaggacagccctgcagttggaagcagaagggccgagggaatcccgcgaagccgccggagcgcgtcgcggcggggcctcccggggctttcccggccccgggtgcgcggcagccgcgggggctgcgtccctctagtccagtgcagccgggtgggagctgcagagcgaagcaggtgggtgtggagccaggcccggggcagcaggagtggctggcgcgcggaagctgagggaggcaccccgccgaggtgtgggcggtgcctgcccgcgccccagccgcgccctgggcaccagagcgctgtccccggccgagcgcacagctccggcgccgcgaggcagagccccggcgtccccggcggtgcgctgccggctcgcgcagcccagccatcccgccccgccgcccaccttgacagccgggagcgctgaggaggaagagggggagggggaggaggaagagaaggcggcggccgctccagcccgcgggtgcgcggagcgcgggaggaggcggagcgggaggctggggtggccgcagccctgtgtgcgcgccgggccggctagctgcggggcgggggagcggcgccccagagcgccccgcctagcctcccgcgcgcagcctctaccctgctccgccacagacacacacccaccaagcacccaccgccctccgccctccgccctccgcccccgcggccgccgccgccgctgcgcctcgggcagccccagcgagcggcaactcccgggctggcgcggctcgctttctggctccttccgcgcggcgagctcagccccgctcgatttttcctcttctgttccagccctctcttgtctgggtggctgtggcggcggcagggggatggggaccccgtgtggggaaggggttgaagatcgatgaagattattgttcttttaaaggatgccttagcttcctcccgccgcctttcctctgagccttcctactagagaccgtgaaccagagtcagggatgtaaagacagggggaaagcacgccgggagctccagccag

SEQ ID NO: 116792 - DNA, 176 bp, Homo sapiens; identical to SEQ ID NO: 6385
  chr8:73450026-73450202
  hyper

SEQ ID NO: 116793 - DNA, 188 bp, Homo sapiens
  chr8:73450495-73450683
  hyper
gaacacagagacatgcgtgcattttattcttcaagcggtgcgcggtctccgttctgtagcacgattcctgagagggagaacgggtctctaaggaaagagcttcatggctgtttccaacacactctgctaggggacttgggaatacgtttgccctgaatagcaccaaaagacatcgaccatttgcctca

SEQ ID NO: 116794 - DNA, 111 bp, Homo sapiens
  chr8:73920990-73921101
  hyper
agccaggcttgaaccgctcgcccatgtcccgccggcggaagagactctccgcggccacgccccgagccctcgaatgcgagccaatcgttgctcggcgcctgaaggggcagt

SEQ ID NO: 116795 - DNA, 489 bp, Homo sapiens
  chr8:74005171-74005660
  hyper
tccagcctccagccgcgggcgaagcaggcggggtcccggccgggacagcagcgcccggcctcggcgcagccggcctgggccccgggccacagccgcgacagcgcgcacagcgccatccacagggtcctcatggccagggctccggcggcgcctgcgacgcgacagacccccggggcaagcgctctgatcctcggctggccgcggcccgggagctgcccgagcggccggcgaggcacagccgggccctgccctgcgcccggcccccgccctccgcgccgcccctccccagccctggcggcgcgcccgtcgaggcccgggcgggtggcggggctgccctgcccaggtggggagggcgctgcagttcccgggacgggcccgcaatcgacggtccgggcgccacccactccccgctgccagctcgcgccccagctccagcccggggacctccggggcgcgggagcggaaaagcaggtgctggcggggcggggg

SEQ ID NO: 116796 - DNA, 61 bp, Homo sapiens
  chr8:74005798-74005859
  hyper
cgatgggcaccaaacgtgtctcagcagcactctgcgcgggccaccccgccttcgcccggga

SEQ ID NO: 116797 - DNA, 30 bp, Homo sapiens
  chr8:74205385-74205415
  hyper
cccgagactttaagcgcaaaaattaaaaaa

SEQ ID NO: 116798 - DNA, 30 bp, Homo sapiens
  chr8:74206516-74206546
  hyper
ggaccagtggggaccggacggccggaggag

SEQ ID NO: 116799 - DNA, 30 bp, Homo sapiens
  chr8:74207572-74207602
  hyper
gcgttcgtgctggccgcggcgcgctggctg

SEQ ID NO: 116800 - DNA, 184 bp, Homo sapiens
  chr8:74208008-74208192
  hyper
ggtgccctgtcctcgcggaggttcggtctctggggaccacggcggggggagggggcgggtttcctaagccctccggggtagggaaggcggagggaacttgttaccacaggtttggatcccaaagaaatgtcttgctccgacttacaagcggcgcgatgggaaactgaagcgtctttgggaagtt

SEQ ID NO: 116801 - DNA, 30 bp, Homo sapiens
  chr8:74790422-74790452
  hyper
gtccgcgagaataccgaggctgatggaaat

SEQ ID NO: 116802 - DNA, 30 bp, Homo sapiens; identical to SEQ ID NO: 45535
  chr8:74791001-74791031
  hyper

SEQ ID NO: 116803 - DNA, 166 bp, Homo sapiens; identical to SEQ ID NO: 45536
  chr8:74791234-74791400
  hyper

SEQ ID NO: 116804 - DNA, 30 bp, Homo sapiens
  chr8:74883963-74883993
  hyper
aatctgagcggacacgaggaacaagcagaa

SEQ ID NO: 116805 - DNA, 72 bp, Homo sapiens
  chr8:74884737-74884809
  hyper
gtcggcgttgggaccgaggcagccctgcatcctgggacttgtagtttctcgcactgcgtgttaagattttgg

SEQ ID NO: 116806 - DNA, 245 bp, Homo sapiens
  chr8:74888247-74888492
  hyper
cccagctcagctggcggataacgcgcgcggccgggaaggcggcaggcgggcggcaggcgggcggcaggcgggcggcaggcgggcggcaggcgggcggcaggcgggcggcaggcgggcggcagattctgcgcacgcgcaggcagcccagctgccagtcaggcgtcccgggctgggcatgcgccacttgtgcggcagtcgggtgggaagccgtgtctcgcagtcgtggactcgtgcagctggggcgt

SEQ ID NO: 116807 - DNA, 30 bp, Homo sapiens
  chr8:74888909-74888939
  hyper
cgagtccaggagaacggctggaaagtgctt

SEQ ID NO: 116808 - DNA, 1185 bp, Homo sapiens; identical to SEQ ID NO: 45538
  chr8:75232541-75233726
  hyper

SEQ ID NO: 116809 - DNA, 226 bp, Homo sapiens
  chr8:75233937-75234163
  hyper
tcctcggcaggcgggcgcgcgcggggaccggctggcgcgcatgtgttcgcgcagtgggatgccggtgggagggcgagtgtacccggggacgcacgagaatccctgcctggagatgaaggcgcggctgcctgtgtgggggccgctcgcgggcgccggagcccccggtgtttgtgtttggggtttttcaaagtggttaagctcctgtgagtgcggccacgtgtgtgtt

SEQ ID NO: 116810 - DNA, 30 bp, Homo sapiens; identical to SEQ ID NO: 45540
  chr8:75262507-75262537
  hyper

SEQ ID NO: 116811 - DNA, 30 bp, Homo sapiens; identical to SEQ ID NO: 6389
  chr8:75262744-75262774
  hyper

SEQ ID NO: 116812 - DNA, 30 bp, Homo sapiens
  chr8:75263028-75263058
  hyper
cctctcgcgaaatgcgacaaaaaagcatca

SEQ ID NO: 116813 - DNA, 985 bp, Homo sapiens
  chr8:75896507-75897492
  hyper
cccaccaggggccagaccttccgggcttgggtctcgggagcccaaagcacgcccacaaaggccgagcgccctggcttcgctgcgttccggagaagcagggcgggctgcttctcccggatctggcgggcctctggccacggctggttggaggtgggggtgggcgaggaggggcgctcaagtcacgtgcccgcgctggggccgcaataaatgctcgcgaacgcgagagagcgacggaagcgctaggcgcctggttctgcgcgtactggctgtacggagcaggagcaagaggtcgccgccagcctccgccgccgagcctcgttcgtgtccccgcccctcgctcctgcagctactgctcagaaacgctggggcgcccaccctggcagactaacgaagcagctcccttcccaccccaactgcaggtctaattttggacgctttgcctgccatttcttccaggttgagggagccgcagaggcggaggctcgcgtattcctgcagtcagcacccacgtcgcccccggacgctcggtgctcaggcccttcgcgagcggggctctccgtctgcggtcccttgtgaaggctctgggcggctgcagaggccggccgtccggtttggctcacctctcccaggaaacttcacactggagaggtaagggcgattctaaaatgcatcgctgagtcgtcaagctgccaccctttcctatctccctttgccttcttaaactgtacttaaaaaaaaaaaaaagccaactgtacagagtggttgggcgcgatgggtgggtgggctacccggaaagcagcgacgatagaaattagcgggagctctagttcttgtaagtgactttgttggtttcacctactttctctgtcgcgcgctttccatttgagttcagagaaagaacagtgtgtgccttcacacttgagaggaaaagctctcaagttgccggggagctgctggcttcttcgggtgcaggccacagattagt

SEQ ID NO: 116814 - DNA, 30 bp, Homo sapiens; identical to SEQ ID NO: 45543
  chr8:76230285-76230315
  hyper

SEQ ID NO: 116815 - DNA, 202 bp, Homo sapiens
  chr8:76316353-76316555
  hyper
ttggaggctacggtgcaggtcggagaagatgaaatggcctagcatcccccttcccaggggctcgagtcggcagctttagagctccgacaatctgtgccctcgctttgggctgcgccagggagcaaaaaacctctgcttttttgaaagaggccggggcaacaaggtagagagccgcggccagaagcagccccgggccataaac

SEQ ID NO: 116816 - DNA, 574 bp, Homo sapiens; identical to SEQ ID NO: 45545
  chr8:76316614-76317188
  hyper

SEQ ID NO: 116817 - DNA, 281 bp, Homo sapiens
  chr8:76318949-76319230
  hyper
gatgtttttaaaagccggcgctctggctatatttctggtgaacaaatgcctgaccaagaagatcagcgcatctgggacgggtctgagacccacttctgcaagtcgaaagctaaagggtatgggagggagaaagggaagttttccatcaaatacatatctaaagaggtacttaaagactaaaaccacaggtagctggcacggatgggaacggaaaaccattccccctcctcttcccagaactcttgctgagctaggtggtcaggagcgtcatggtagaatat

SEQ ID NO: 116818 - DNA, 941 bp, Homo sapiens; identical to SEQ ID NO: 45547
  chr8:76319436-76320377
  hyper

SEQ ID NO: 116819 - DNA, 30 bp, Homo sapiens; identical to SEQ ID NO: 6395
  chr8:76386311-76386341
  hyper

SEQ ID NO: 116820 - DNA, 30 bp, Homo sapiens; identical to SEQ ID NO: 45549
  chr8:76417921-76417951
  hyper

SEQ ID NO: 116821 - DNA, 640 bp, Homo sapiens
  chr8:77585200-77585840
  hyper
actggaggtctgggattaaagcgggaagaggcagcggccacagcgaatttcagcggcagctgcagcagctagaaacaagaagcaagagtacgaggtctttaggctgcgtccccctcccgcagtcagggctgccagtgagggaaagagaagaaagggtggacggttgaaatggtgatcactcgaagtcagaagatacaagtgagggctttgagacccgctcaggaataactcatgagcaatcagcacgcgctgagaggaaacgtcttccagaattcgttattattcacattagacattactggagtgggtggtgggactgagagtaaaaaggtgttaaaagggacctaaatggttgatacatttccccccacaccctactgttcatttgggcaacgaaataatttcacagatgcaaaggcgctgtacggtgaactttatatcgtggaaactaacttaactccgagaagagaaagtgcaattagacggcaaccgagtataagaaaatagttgccttggacggaggctggcggggcggggggagcgggggcggggaagtcagagagtgcatgtgcaatgcacaaccccagacggaaattgtaaactaggaaatgaaagggaaagaaaccgcttctgttataaa

SEQ ID NO: 116822 - DNA, 560 bp, Homo sapiens
  chr8:77586175-77586735
  hyper
agttcaggctcccagcgtaaggaaaggaggaaacgacaagaatccctaagagaaaaagaggaaaaagctgtgtgctgctgaggcggggcgtgggaagacaaccacagtcaattggaaggagcccgagtcagggagcaattgctaggacttcggacagagagggcagaagattgtgtagacaggcggtcaaccagagcagcgcggggcaggacccacgagcgcgaagccaggtgccgcgcggtccgcgccccggctccgggcgacgcagggactttgctggcaatgagaaggctgctcgaccagcctgccggagtcacgattccccgcgagtcccaaacacacgcttcactaactactttacagccacttccattgattttctttaacaaataaacataatacccgttacagcaacacttcctcttgccgccacagctagaatgccataagctctaatggctgcatttctccggacagcagttttcacatctccaaataaatcgttttccttcacttcaggtttggagagtctagtcctcgcccctctctataatttggga

SEQ ID NO: 116823 - DNA, 721 bp, Homo sapiens; identical to SEQ ID NO: 45552
  chr8:77589893-77590614
  hyper

SEQ ID NO: 116824 - DNA, 1506 bp, Homo sapiens
  chr8:77593168-77594674
  hyper
gtctgtgtttgtgtgtaagagcgcgtgtgtgtctaatgaagtttgggagtcgcgcgcaggggcgcgtagggtgcgagacccggaggtccccatcccctgtcctctccgcggtcgccgcatccggggctccagccgcagcgctgggagctttggaagccgtgaggctccggagctgctctgagtccgggctgcgcgtcatttgcagtctggggaatgttgatcacctcactaattacacctctctctcccccctctccctctccctctccctcgctctcctctctcattcccagagtgcatatcgggaatagacacacaaagacatgcgcactcaacttaatcagccatttttttaaacagggctaaaacgataataattagcagaataaagacatatcggattttcatttcctttcctccttttcccaaccccttcacaaccaaacagcgagaccgcggtcggcacatgctttaactcctcccggacccccgaggaccgctccatgccccccactttctgctccagcgtttttattttcacccaataaagttcgaggattattttttattttttttgtttttttaatgaaccctctcgttttacttggatgtgatcagctgtaagtaaaataaaagcaaaacaaaaaagaggcgaagatcgagtaggaactgcaggggaaatggaaagtaagttttttctttaacttttattgagtagtttctgttaaatttaggtcgagtatcgattatctttccagcctgatcttgcacaatctttgatatttcgctccctctctctccctctccgcctctcttcctctctacccctacctcgctcgctcctgctcgctgtcgcacacatcccctcatcccgaccatctcttccgctctgccccccttttctatctctttccccttttttttggctcaaggttttgctccgctgagggagggagggggcactgagggacctgattttccactttctttaggggggctgcgtttttccggatttaacttttggattaagtggcggaggatcatctacgtttgcttgggcagttttctctccttttccctgtcttttcgggttttgccttccccgcgagccccgggcattctagtggctgggggaagctgtcagctccgcaacggcgcgggcactgccaggggtctccgctcgccccgcgcccctgcaccccgatcgggatgactggtcctccgcactcatcctctgaaagtttggacgttggtcggtggggctgggagcccctctctccctgctctttccctgctttaccctccaccccccaccccaccttattcagcctcgtttttcttcctccttttaccacccgcccctcttccccttctcaagttccccgaaggtcgcttagtgtgcggggctggcggaggcccgggggttcgtgagctctggggaggggattccaagaggctggggtgaacgctggggctggggctgcaggtagacacccgcccaccgga

SEQ ID NO: 116825 - DNA, 713 bp, Homo sapiens
  chr8:77594757-77595470
  hyper
cgggatcgcccggcctctgggccagggacccgcgaggcggcggctgcttgctccgaacggaacgccgccgggtgtgcgttagaccagcggatagacgcccgcggcttggggtcaagaatcttttcctttttagcaaagggcaaggggtgtgtgcgtgtgcgtgtgcgtgtgtgtgtgtgtattgagtggctgtgttcggctgtgagaaccgattcattcttcggcccccctaaaagggttccatgcctacaaatgaacttcacctccttcgtttctccaagcatcaagtgcgccttctggctgggagcagctaagggaaaagggactggaatgcgccgggtctctccttccttctacttctatccacccccaacccccttctcgctcctcttttctatcagaaaaaaataataaaatctctcatggaattgtataaagtttctctgccgatgtccaagttacagaaggttccctattctaatccccttcccctagaagacggtgcactggtttctatttcttttgttacctgtgatccgggcggggggctcctttcggccgctcgggctggggtccggcccagagaggaggcttctgcgggcgcctttggccgcgacttctcacttccgcgcggttctggtgaggttttagctaccgttcggtgagacaccctccttgtaggtaccaaaggttcagatcgcaaacacggaccc

SEQ ID NO: 116826 - DNA, 30 bp, Homo sapiens
  chr8:77596115-77596145
  hyper
tggctgcgattgggacgcgacagtgacacg

SEQ ID NO: 116827 - DNA, 30 bp, Homo sapiens; identical to SEQ ID NO: 6407
  chr8:77912333-77912363
  hyper

SEQ ID NO: 116828 - DNA, 272 bp, Homo sapiens
  chr8:77912575-77912847
  hyper
cccgggtcaggggccgcaagtgaggacactacaagtgtcgaggggcctaggggaagccggggcttgggagggcagggctttctctgcttgcggacatcgcgaagggcctctggcaggcgccgccgggtggcggcgagacgcctccgcgcctccggggttccttgttcgctgtcggaggaggaccggctgagggatggcctggtggggagggagccctcgggcaggtggctgcgtcgggcctggggcagttgtgctgcgcttggagacctgcc

SEQ ID NO: 116829 - DNA, 700 bp, Homo sapiens; identical to SEQ ID NO: 45558
  chr8:79428283-79428983
  hyper

SEQ ID NO: 116830 - DNA, 30 bp, Homo sapiens
  chr8:79578612-79578642
  hyper
caactgggctttcccgcccggagccagatc

SEQ ID NO: 116831 - DNA, 557 bp, Homo sapiens; identical to SEQ ID NO: 45559
  chr8:79716725-79717282
  hyper

SEQ ID NO: 116832 - DNA, 599 bp, Homo sapiens
  chr8:80523883-80524482
  hyper
aagaaaattgcaaagtcaaagcggtcccatcccgctgtttgaaagatgggtggagacggggggaggggatggagagaactgggcacattttacggtattgtctcgtcgaagaaaccgctagtcctggggtgcggtgcagggaggtaagacggcgggggacagggtgggggtaggacctccgctcctttgttttagggcaagggaggggaaggagagaggaagtcgcggagggcgtggagggcgcgggtgggcagctgcaggggcggggaagcgcgcggcagggaggggtggagggacagcggcttcgaaggcgctggggtggggtttctttgtgtgcggaccagcggtcccggggggaggcacctgcagcgctgggcgcacaatgcggacagccccacccagtgcggaaccgcgcagccccgcccccccgcccggtgctgcatcttcattcgaaagggggtcgggtggggagcgcagcgtgacacccaggagcccaaccctgcggggacagcggcgccacgccccgcgctccccgctcccgactccccgccgcggcttccaagagagacctgaccactgaccccgccctccccacgctg

SEQ ID NO: 116833 - DNA, 1084 bp, Homo sapiens
  chr8:80524695-80525779
  hyper
tcttaagttaagccacgcgaaatttccgttttgtgggtcagacagtgccaaatatcggcaatttcataagctcagagagacaagacagtggagacacaggatgaccggaaaagattctggattcagggccttcatccgcaattggtcttgtgccttgagtgcccacggttctggcgctcagtggccccggggtgaaaaggcagggtggggcctggggtcctgtggcagctggaagcacgtgtcccccgggacttggttgcaggatgcggagacagggaaagctgccgaaaggactccatctgcgcggctccgccctgccctaccctccccgcggagccggggagacctcaggctccgagactggcggggaagaggaatatgggaggggcagttgagctgtatgcagtcctggaacctcttttttcagccccgcagtccacaacggcccgagcaccccttgatgtgcgcagacccccggcgtggctctcagccccagcaccgagcccctcccagccaagcgggtggctctgcagaaaagctggctcgagccccgcccggccacacaaaggcgcggccccacccagcccgggcgcgagaccgcagaggtgacccccttcccagggattcagggagggctgtctcttctcgcccacccacggtccgcggagctcggggctttttttcccccagcccaagccccccgcccaccctctgttctctatgattttccagaatggagaccccgcgaggggcttctctaagggagaccctcgctcctccagcggggcgcggctcggccccacccctcccagctgaggcccagagccgcctaccgctggccgggtgggggcgcacgtggcgactgggtgtgtggagcgcagccagccctgcagagccccgcgccgcgccctgcgctcccctccccggagttgggcgctcgcccccgcggtgcagccggggagaccggtttctgcgcagtgtcctgagctacccccgctttccacaattcgcagttcactcgcacgtccagaaaggttctgagaatgggtggtgggggcgatctcgcctcgctttctgcacccct

SEQ ID NO: 116834 - DNA, 505 bp, Homo sapiens; identical to SEQ ID NO: 45563
  chr8:80677511-80678016
  hyper

SEQ ID NO: 116835 - DNA, 30 bp, Homo sapiens
  chr8:80680884-80680914
  hyper
accagcccaggggccggtcacatggaggag

SEQ ID NO: 116836 - DNA, 180 bp, Homo sapiens; identical to SEQ ID NO: 6411
  chr8:80695877-80696057
  hyper

SEQ ID NO: 116837 - DNA, 478 bp, Homo sapiens
  chr8:80696101-80696579
  hyper
cggtgggcccgcgggctcctgatctgtccaggcccctaaactatcacaaggaggatatttgatgaccgtctttcttccctcgctctctcccaacaaagggtaactgacctctcgcgtgacctggccagcgctgagattccctcaacacgctttccccctattgtgtgcagacccccacagggcggaggcgagcggcgcgacccactggacggacgcggcccggagctccaggcgcccggacctggcgggccctccctgggcgggcgggtggcgcgtcgcccgccgccgatccgggcggggtgaggggggcgctgtaattgcagcgcagctcgggttcccacgctcctattgttggcgactttgtttccaattcccatcacgtgtgctaattagttagcgctgctggctggctgggaggcgtgtggctggcctaaaagcagaaagatcacttcctgtagggagccgggccggctgaata

SEQ ID NO: 116838 - DNA, 559 bp, Homo sapiens
  chr8:80803548-80804107
  hyper
gacagaaaaccgagccctatttgttattagtatttttttttttatactctcaaatgccaccggcacattcttttaaaaaaaaatgaaaggaaagaaagaaagaaaaagaaaataagagaggaaaaggtcctgagaaatgacggacgcttgaacctcgggcccgggaagaccagcgccctttggcggctaggcctcgggggcgtgcggagggcgggcccccgcgcggccgccgctttcccaggccgccaggggtgaggaggtgacgctgcgggcttggtggcggctggtttttcacacaggaatcctcctcgccaccgctccctcgaaggccgccccccgctccacccccagcactgggcgcccgcgcctcccaactcagcccgccgccgagcagacggcgcgccgcggtaattgggcacaggggcctttttcagagtcgctcagtcgataaatgaaacgtcagctcccctgtgatcccgcgtgtgtggggcggcggtggctgcgagccggggcgcagggccggccggcagccgctgctctttcacagccccagaccctg

SEQ ID NO: 116839 - DNA, 289 bp, Homo sapiens
  chr8:80942045-80942334
  hyper
cggcccagtacgcaaatgccacacaaaaggacaacgaaaggaagaaaaacaccaagcacagattctaggggccgagggctgagccacaacgcaccgcaactccggaaaactgggccccggacctcagctccccttcctaagccaggctccgcccctattcccgaccccgcccaccgcgtcgttggcgtaattcccgcgactccctctcacccgcccgggctccaccttctgtaggggctccaccttctgtagaagctccgagtgccgctccaacgcgctcgcgaaaccg

SEQ ID NO: 116840 - DNA, 30 bp, Homo sapiens
  chr8:80942603-80942633
  hyper
tcatctgggagtggcgtggggaagaagaga

SEQ ID NO: 116841 - DNA, 30 bp, Homo sapiens; identical to SEQ ID NO: 6414
  chr8:81083416-81083446
  hyper

SEQ ID NO: 116842 - DNA, 30 bp, Homo sapiens; identical to SEQ ID NO: 45569
  chr8:81084041-81084071
  hyper

SEQ ID NO: 116843 - DNA, 2545 bp, Homo sapiens
  chr8:81397817-81400362
  hyper
acagcaataagacactcggggcggtgcattttctgtgaaatgactactgtccggggcccgaggtgctgcctcgcacaatgcatcaaaggaggttgtgtccgtggtcgtaacctcttcgcgtgaaaggcaccgcctggtccagtctttgtgaaggaacaaaataagttcacttccttgggcaccgccacccaccctcagcaaatgacaaggctggagcgcagctcccaccgcacagttatttgcaaagtcccaggtgaactcgtggcgagagaaggaaaatgcgcgtcccgggcgcgggtaggtgcgtgtgggcagcggggaggcggccagaccctgacactcgccagctgtttgtcctccgcgtagcccggccccggccgcacacgcccgccccctccctgagacccccagcccgccgcccggccttttgtccccaacccctcggccgacttccttccccgcggccgcacccccgcccccaggccggaggcgcagcccagcccctttcccggtcccctggcgcccccaccccaccccagcccagccccaagcccagcccccctcccccagcccggcccccaccctttccccctccagcggttactgctaccccggtgcattgtgggcgcacggtccgttgttcatttgccattcgacctccgccagggcctggtcggacggaaacgctccgccggctttattgtcgcttcgttatgtggcggagccgagcagtttagcgtgcctctcaccctcagcgcctgcgaagccggcggcggcgtcgggactcctcggcgcgcggaggaaggatatctgtgtggaggatcggtgtgtgcgcgcgcggctttaaagagggggcagcggagggtctccccgcactccgctgctcaacttcgaaggcctcgctcgctgcaggctcgctcctcacctctccgccgcccgcccccttctccgcgcgggacgctgcccggagcgcggcggggcgggggtggaggacgagagagcggtcggaggcgtcggcccggcagcggcagcggcagcggacgcgtgcagcagacccgggagcgagcgcgagccgggctgccgggcgagagggcgaggccgagccccgcgagaccggaacgccgggggcgggggcgagacagagggggagccgcggggagcgcgcgggacgcggcccgaggccgtgcgcgagccggggcaccgggcggcggcggcggcggcgcgcgccatgtcgttcagtgaaatgaaccgcaggacgctggcgttccgaggaggcgggttggtcaccgctagcggcggcggctccacgaacaataacgctggcggggaggcctcagcttggcctccgcagccccagccgagacagcccccgccgccagcgccgcccgcgcttcagccgcctaatgggcggggggccgacgaggaagtggaattggagggcctggagccccaagacctggaggcctccgccgggccggccgccggcgccgccgaggaagccaaggagttgctgctcccccaagacgcgggcggccccacctcgcttggcggtggcgcggggggccccctgctagcggaaaggaaccgtcggactctggccttccgaggcggcggcggcgggggtctcggcaacaatggcagtagccgcggccgccccgagacctcggtgtggcccttgaggcatttcaatgggcgagggccggcgactgtggatctggagctggacgcgctggaggggaaggagttgatgcaggacggcgcgtccctgagcgacagcaccgaggacgaggaggagggggcgagcctgggcgacggcagcggggcggaaggcggcagctgcagcagcagcaggcggtcgggcggcgatggcggggacgaagtggagggcagcggtgtgggagctggcgaaggagagactgtccagcacttcccgctcgcgcggcccaagtctctaatgcagaagctccaatgctccttccagacctcctggctcaaggactttccctggctgcgctattccaaggatactggtcttatgtcttgcggctggtgccaaaagacccctgcagatgggggaagcgtggaccttcccccagtggggcatgatgagctttcgcgagggacccgcaactacaagaaaaccctcctcctgaggcaccacgtctctaccgagcacaaactccacgaagccaacgcccaggtacagtatatcctgctcctacttttttgagatcttttagggaaaggtttatcagcactcccttcacccccacccacccccgaaaaaaaacctcaaaaccattttcctgggtgaagacatcgttccagttgagaggtgcgggaagcttaggcgtgggggtttagaaagcctgggaacaagttttataaaagttctgtatgtgttgtggggggaaggggatggaatgacaattgtcgtggcgctggattttcttttttatgactcatttcttatcagattgaatcaaaaagaaagtgaggttgaaggttttaacctaaaaggctgactttgcggtaaaaaaatttt

SEQ ID NO: 116844 - DNA, 235 bp, Homo sapiens
  chr8:81478188-81478423
  hyper
tgcagaggctggcgtcgaaggagaggtgctatgcgaggatggccccaagttaaacagtgacagcctctgccctcccagaccccaggcgcgcgggggcgggcgcggaacaccggttccaccgccaccttcaggcctcccggtgtggcgcggttcgggacgtcacacaaataccagggcacccatgtttctgccctgggaaactctcacgtcagccggccccccaattctgctaaag

SEQ ID NO: 116845 - DNA, 365 bp, Homo sapiens
  chr8:81490258-81490623
  hyper
ctcggaattccctccgcggccggcgcctcccctccgggggcctggctcgcagcccgtggggacgagggcctgcacgtccccgggggactgagggctgctctgggtgaggatgggaaggcgggtgccgcttccgagggctcctctcgccaagggagagagccctagacccgttcccggggcgctgctcttcccgggctggggtgggctgcagcggcggcaggacctcgccccctcccggccgcccgcacccccgcgcctcctcctagggcccggtgtcccacgggcctgccgcggtccccgccctctccggctcccgcgactccctcccccaggcagctggggcaggaattcggctggagaatctg

SEQ ID NO: 116846 - DNA, 31 bp, Homo sapiens; identical to SEQ ID NO: 45573
  chr8:81490949-81490980
  hyper

SEQ ID NO: 116847 - DNA, 120 bp, Homo sapiens
  chr8:81599501-81599621
  hyper
tggcctccgcctcgtcgatgccgtcgtctggctgcgcggggctgcggaagggcttgaagctgtcagccgagagcggcggcgacggcgtggacgggttggactggtcgctgggggcgctcc

SEQ ID NO: 116848 - DNA, 1868 bp, Homo sapiens
  chr8:81784962-81786830
  hyper
ctgaagatacacaaacggaaaaatctctcggcgcttcagtgtacaggggacttcgctagaattctcagcagaaactcacatccaatttaaatgctaccccccacccccttttcctggtttcctctttttttctcatttgcaattttgaggagggaaaaaaacctcaaacgctaaatgatgtcgagtggaaacacgggagggcgagggtcaatgccaaaaactgctagcaaaatgcatgtggaaaccaagggcttggattttgctgtactgggtttaccggttctctcacaagcgcctgtgatggaaactcatcgacaattgttcttggttggaagaaggggctgagagattgacaagaaacaccgctttctggtttcaataagcttgaatagccctcaaaataaggagaaggggacactccttccttgggggagaataaaatctcactctcccctgcctcacccgtccccaccgggcacgaaccggcgcctccgtggtcccatcacccaagttccccacctcactggggagaagcgccctttcccggcacccacaccaaacaacaaacccgacacggcctttgaggaaagcgggagccgccgcctgggagagacgcaggggcccaaggcgcaggcaaatcaacagttcctcgcgctgccccgcgcggccgcccgcgccgcctgacacacccctcctggccgggtctctccccggcgccgctgaccgtcctcggccaggcgccttgccccggggcccgggcccgtccccctccccgggctggcgggtcccacgcgcgccaccgcgcccaacacgcaccttcaacgcgccccgggccgggcccctggggactgcgtggccgggtccgaggggcacgaaacgctcctcgccgtcctcgtcgtcttcgtcgccgtccaccacctcgacgaccacctcctcgtcctcctcttcctcgtcgtcatcctcctcctccgcgccccctcggggcttctcctccacacgcccgagccccctccgccgcctgctcccgccctcctcgtcctcgtcttcctcccctagaagcagcagcaccggcgacgaggcggcggcggcggccccggtggcccgaggggggccggtcccggcgctgcgcggcggcggcggcagcggcggcctccagctctccggggcgggcgccggggccgggcccgggacagggggcgggagcccgggtagggcggcttccttggcgggcgcgggcgccggcccggcaggctgcagcgcggcgcccccccggcggctgcccaggctggagcgcttggctagacgccgcgcctgcatgcctgagcgcggggttgcgggccgcggcgcggggccggagagtttgtcacctcctcttcctcctctgcctccgccggtggccgcagggccggggactcgcggccgcaaggggctgcaggagccgccggccaggacccgcggctgccactggctgcagaggcgcgggcgccgccttcgctggaccggccggcggggacgccggcggccggcggctacggcggggcggcgcggcggccgcgggcgggggtgggtgtgagcgagcggcgcgctgccgcctccgccgccgccgccgccgcccgggagccgcgggccgcgctgcgctccatgcggccggcggccgagcccgcgcgcgcctctcccggccggctgcgcccgcgcgctccgggcctaccgctgccgtgcctcggcgcgagctgtttgtgttgtatgttttccaccaccgcccccctcttcgcgagccattcctcacaaccctccggtccccccgctcagacaaaacccggactggattttttttttctcttacccacagtctccgaaagtctggcgct

SEQ ID NO: 116849 - DNA, 1395 bp, Homo sapiens
  chr8:82192416-82193811
  hyper
tgaaaggaaaaacggcggtggatatgttgtcaaacggaggggtgcaggagaggcggggccaggcctccaggtgacccctctggcttcctgggcctgcagaggcgccgaaacgtgcaggcgccggcgtccatgaggcgtggggcgcgccgggcgagtccctgcttgcaggaggcgcccgagaggccgtcgcgtaccctggcaagaggagctggttagcacctcccgaccccgagaaggcccagggggcgcccggcgggcggggcggggaccgggcgaggcccgcctcccattggccgcatagcgccgcccagcgcgggccgccgttataaagcagccgccggcgccgggtgcctcacagcacgctgccacgccgacgcagacccctctctgcacgccagcccgcccgcacccaccatggccacagttcagcagctggaaggaagatggcgcctggtggacagcaaaggctttgatgaatacatgaaggagctaggtgaggcacccggcctggcagcgcctgcaacgtggcgtgttgtgcggtcgtctgtccctaggtccccgtcagcgtgccagattctggggcaggagatgctcggcggcctacccccatcccctcccatcttccccaccacgcggccgttgggtgcagcgcgcgcagcaccacgcgggcaggcggcgaggagcagggagcgtgcgcgcctcttgcccgcccgcgggccgcaagattccggaggtggtccaccccgtggtccacctacctctgcttctttcccttcgcccaaacggcagcccttccgcattgcttcctgtcctttagcgcgcgcacccgtcacctcacgctgcacttctttcgaccccctccaggcgaccctgtatttcccttttttccccctttactcatccttccccttcctgccaccattctgtctctcccatttaccccatcgtggcagcacccactcccctttccctccctgtcgcatcttttgttccctgtggcgcgcaggtcaccctccgttttcttcatggggacgcggtgctggcgcgcagtttcccgcagaaatcctgtggaggggtctgagtggcgctacagcttcagcttgcattcctctgtcagccccgtctcccccaggtcctctgctcgcccttaccagttgagccgaaccctttggattggtaccccatggaacaccagggcccccgagaagcgtggcgctggcggtgccgacctgctgctggcactgccgggccggggcgccgcagtgggcgggtggcctgtgggaggagcgcaatgaggcctgggggtggccgtgtgttgccatcctggcctctgccacttgagggtgaggaggaaggaggcagtgggctttgctggaaaaccgtaacagaaactgc

SEQ ID NO: 116850 - DNA, 173 bp, Homo sapiens; identical to SEQ ID NO: 45577
  chr8:82543133-82543306
  hyper

SEQ ID NO: 116851 - DNA, 193 bp, Homo sapiens
  chr8:82598486-82598679
  hyper
cttgagtcggaggacgtccggctagctctgtgaacggtgttaccgcactcgtctcttccggaggtagaggggctactcgcaacaggaagttccgcccttaaaaactccattcctgagggggcgtggttgctttgctgggccccgccccgagctgcgccctgcgagcctctgccaggccgggccgggtcctgac

SEQ ID NO: 116852 - DNA, 34 bp, Homo sapiens; identical to SEQ ID NO: 6423
  chr8:82633553-82633587
  hyper

SEQ ID NO: 116853 - DNA, 30 bp, Homo sapiens; identical to SEQ ID NO: 45580
  chr8:82653628-82653658
  hyper

SEQ ID NO: 116854 - DNA, 75 bp, Homo sapiens
  chr8:82692880-82692955
  hyper
gttgtcactgctgccgctcgttgttcccactaggcggcactctaagctcatcgtcaatgcgaggaccgagcacct

SEQ ID NO: 116855 - DNA, 104 bp, Homo sapiens
  chr8:82754298-82754402
  hyper
cccgtacgagaacccgggacagcgaccgcctgtcctgaggtaatgacccagtctttacctcagccccctcggcgatcccgaacgagcgcgcttcccggtgacgg

SEQ ID NO: 116856 - DNA, 457 bp, Homo sapiens; identical to SEQ ID NO: 6424
  chr8:85094383-85094840
  hyper

SEQ ID NO: 116857 - DNA, 118 bp, Homo sapiens; identical to SEQ ID NO: 45583
  chr8:85094922-85095040
  hyper

SEQ ID NO: 116858 - DNA, 750 bp, Homo sapiens
  chr8:85095301-85096051
  hyper
ccacagcacacactcccaatgcgaggcggcggcggcagcaacagaggcagcagcagcaatcgcggcagcagcggcagaggcggcggcagctgcgcgcctcgggcccaaccccgctcggctccccctctcgccggcgccctgcctgtcttgcgtgtgcgtgtgcgtgtgctcagcctcagcgtgaggggcacctgctcgtctgggctcacagcgaaggcagcctcgccgcgagctgccgctgccgctgctgccgccactggtgttgccgctctcaggcgccaggctccccgtcgccgccgccgccgcctcgccagccagagttgggctccgtgggcttcccccctcgcagcctcggtccttccccgctgcctgcaagtcagcctggctccgagtcacgtgtcagtgcctgaggcagagactgcgagaaaaaaacgcgcttcattccttcttccaccgccatactgtattttatactaaatctcatttttattccaacattttactcccgctcggtgagtaccttctcagtggcattcttgtcctattcttttttttgtccttttttttggttttttgttttttttgtttttgttttttttctttttttccacttctttgattattgtttatatttgggaaagctggaggagcatggttttgagccttttcctgaatccaagtttttctagcatgcgatcgttctgtagacaaggcgctgtgtctcggagtccgcggcgaccgtgcccgctg

SEQ ID NO: 116859 - DNA, 137 bp, Homo sapiens
  chr8:85096577-85096714
  hyper
tggaaaaaaaaaaatgaagtgcggtttggtttccttgtcaacggaggatgaagtgaacagctgagcagctcgcagagagcaggtacttggtccccttggaggcgtttcccgggtgtgcagtggcaacactggtccta

SEQ ID NO: 116860 - DNA, 150 bp, Homo sapiens
  chr8:85096852-85097002
  hyper
cgttttctagatgtgcgcaaaatacagtcccctccccccacccctcccacggtgagctgcgcccaggtcgtctcccggcggggcgggtggcgtctgcgctgcgggccgcgccggccgggcactaggcggccggcgggccctgtaagttct

SEQ ID NO: 116861 - DNA, 147 bp, Homo sapiens
  chr8:85097062-85097209
  hyper
cgggctagaggggaccctcagagcacccgggagatgggggtagaagcggcagagaccgcatattccggaggggctggctccaggccacgcgagccggagctggagacatttccagagccttgaggatggcaccggccctcgcacgct

SEQ ID NO: 116862 - DNA, 30 bp, Homo sapiens; identical to SEQ ID NO: 6428
  chr8:86019335-86019365
  hyper

SEQ ID NO: 116863 - DNA, 197 bp, Homo sapiens
  chr8:86089318-86089515
  hyper
tttctaggcaacggcgggcggcggcgtcacttcctgccatttaaactcaggtccccacccctcgcagccccttctcctcgtttccacccctcccccctcggtcgtgggcctcattcacgcttccccgggcttggggagggggcggaggcccggcgtgacaagcggcccagactcccgtgggcgccgcacacctgttg

SEQ ID NO: 116864 - DNA, 30 bp, Homo sapiens; identical to SEQ ID NO: 45589
  chr8:86089831-86089861
  hyper

SEQ ID NO: 116865 - DNA, 68 bp, Homo sapiens
  chr8:86090171-86090239
  hyper
cttctgtctccgggcgcagggacctgagggtaaccgagtgtctgttgctctgcgtccacctgtggcag

SEQ ID NO: 116866 - DNA, 30 bp, Homo sapiens; identical to SEQ ID NO: 45591
  chr8:86132407-86132437
  hyper

SEQ ID NO: 116867 - DNA, 251 bp, Homo sapiens
  chr8:86132758-86133009
  hyper
aggtgcagtgaaaaagcgaagccccacccatagagcgaggttcggaagtccagtctcattagcatcccttgtcttccgcggtgttgcagacttatcctcagctcaagcgagtttggggcgttatggagccagccaagtctccccttgctggcgtgggtacttgtgcagaaacttcccgaggtgcttctgagactgcacagtgaagaccgccgcaccggaggtcagcgctccgccgcggactcccggctgac

SEQ ID NO: 116868 - DNA, 67 bp, Homo sapiens; identical to SEQ ID NO: 45593
  chr8:86157558-86157625
  hyper

SEQ ID NO: 116869 - DNA, 30 bp, Homo sapiens
  chr8:86158148-86158178
  hyper
gcgcgacgccccggcgctcgctgaccacac

SEQ ID NO: 116870 - DNA, 57 bp, Homo sapiens
  chr8:86350926-86350983
  hyper
cgacagctgtcccgctcttggaattcattggcttcctctacccggcctcccaaacac

SEQ ID NO: 116871 - DNA, 30 bp, Homo sapiens
  chr8:86375435-86375465
  hyper
taggagaagatgagcgcttcatgtaaggct

SEQ ID NO: 116872 - DNA, 30 bp, Homo sapiens
  chr8:86375904-86375934
  hyper
ccgcagccgccgcacgcccagagctccgag

SEQ ID NO: 116873 - DNA, 30 bp, Homo sapiens
  chr8:86376291-86376321
  hyper
cccgaccgccagcgcgaccatgtcccatca

SEQ ID NO: 116874 - DNA, 30 bp, Homo sapiens; identical to SEQ ID NO: 6432
  chr8:87354736-87354766
  hyper

SEQ ID NO: 116875 - DNA, 30 bp, Homo sapiens
  chr8:87356622-87356652
  hyper
ttgctgtttaccccacggtggctgaaattt

SEQ ID NO: 116876 - DNA, 30 bp, Homo sapiens
  chr8:87520829-87520859
  hyper
agtcgagcagccagcgccatgacctgcaac

SEQ ID NO: 116877 - DNA, 90 bp, Homo sapiens; identical to SEQ ID NO: 6433
  chr8:87527031-87527121
  hyper

SEQ ID NO: 116878 - DNA, 945 bp, Homo sapiens; identical to SEQ ID NO: 45596
  chr8:89339036-89339981
  hyper

SEQ ID NO: 116879 - DNA, 12 bp, Homo sapiens
  chr8:89340040-89340052
  hyper
acacacacacgc

SEQ ID NO: 116880 - DNA, 155 bp, Homo sapiens; identical to SEQ ID NO: 6437
  chr8:89340081-89340236
  hyper

SEQ ID NO: 116881 - DNA, 711 bp, Homo sapiens; identical to SEQ ID NO: 45599
  chr8:89340273-89340984
  hyper

SEQ ID NO: 116882 - DNA, 30 bp, Homo sapiens; identical to SEQ ID NO: 6439
  chr8:89928884-89928914
  hyper

SEQ ID NO: 116883 - DNA, 170 bp, Homo sapiens
  chr8:90769555-90769725
  hyper
agtcggaagggagtcggaaagcagaccccggtgccccctaataaagcccccagccggacgctgccgctaccggggtttggcaacttccggaagacctgtggcccaaaggagaatcctgttgggggaggcgggggccggtggtcgctaaccaatccgacacccgccagcag

SEQ ID NO: 116884 - DNA, 220 bp, Homo sapiens; identical to SEQ ID NO: 45601
  chr8:90770541-90770761
  hyper

SEQ ID NO: 116885 - DNA, 211 bp, Homo sapiens; identical to SEQ ID NO: 45602
  chr8:90914086-90914297
  hyper

SEQ ID NO: 116886 - DNA, 30 bp, Homo sapiens
  chr8:90914577-90914607
  hyper
cgccggtcgagccgcgcagtttgcctgcag

SEQ ID NO: 116887 - DNA, 30 bp, Homo sapiens; identical to SEQ ID NO: 45603
  chr8:90996367-90996397
  hyper

SEQ ID NO: 116888 - DNA, 154 bp, Homo sapiens
  chr8:90996933-90997087
  hyper
gagtgcgacttgggcgcttgcccgccacctggtggttggaaaaggaacagcacaatctgtattgaaatgtgctgcgttaaaagggtatgtttctaaggtgtcgctgaatgtaaggttactacctttcctgattatgaacgaaaagaattttaaa

SEQ ID NO: 116889 - DNA, 199 bp, Homo sapiens
  chr8:91012992-91013191
  hyper
atattctcattttacgaatgaggaaagaaatgtgatctgagctaatgccttgtgtcaacaggtatattacactaagatggagaatgatatactgaatctgtgtttgcctttaacgtgtgtttaacttcgagaaaaaagccaaggctgggcggtcgcagtcacgctgcatccggcgacagggggcggtgtgtcctgcgaa

SEQ ID NO: 116890 - DNA, 30 bp, Homo sapiens
  chr8:91013411-91013441
  hyper
aaacccttgcagggcgcggggtttcgtaca

SEQ ID NO: 116891 - DNA, 166 bp, Homo sapiens
  chr8:91014312-91014478
  hyper
agagacgtgattttcgaagttttcacagttctgcaagtttccaacttgtgtgtaaataggtagaaagaggtagggaaggatacggcgcccgtccaccccttaaggagtgagaggggatcaggccgagcgagcactgacctttgacgtcctttgttgtgaggaaagt

SEQ ID NO: 116892 - DNA, 30 bp, Homo sapiens
  chr8:91094146-91094176
  hyper
acattacccagaaagcgctttacgctactg

SEQ ID NO: 116893 - DNA, 30 bp, Homo sapiens
  chr8:91094406-91094436
  hyper
atctttctggcgacccgagaggctctctct

SEQ ID NO: 116894 - DNA, 243 bp, Homo sapiens; identical to SEQ ID NO: 45606
  chr8:91094840-91095083
  hyper

SEQ ID NO: 116895 - DNA, 71 bp, Homo sapiens; identical to SEQ ID NO: 45607
  chr8:91095141-91095212
  hyper

SEQ ID NO: 116896 - DNA, 560 bp, Homo sapiens; identical to SEQ ID NO: 45608
  chr8:91657127-91657687
  hyper

SEQ ID NO: 116897 - DNA, 65 bp, Homo sapiens
  chr8:91803654-91803719
  hyper
ggcgtccttaccttgcgctttggctgctcaggacaaacgccctgccattcgtcccttctctctgt

SEQ ID NO: 116898 - DNA, 218 bp, Homo sapiens
  chr8:91804064-91804282
  hyper
ggtgcgtccgcctagccccgctccgcctgaggccgtcagggctcccgaggatggaagattcccaggagacatcgccgtcctccaacaactcctcggaggagctcagctctgctctgcacctgtccaagggcatgtcgatcttcctcgacgtaagtacagatggtgggagctgggcggttgcttcccagcacctttcttttccccgaaaggaaggggtt

SEQ ID NO: 116899 - DNA, 604 bp, Homo sapiens; identical to SEQ ID NO: 45609
  chr8:91996904-91997508
  hyper

SEQ ID NO: 116900 - DNA, 486 bp, Homo sapiens; identical to SEQ ID NO: 6442
  chr8:91997527-91998013
  hyper

SEQ ID NO: 116901 - DNA, 30 bp, Homo sapiens; identical to SEQ ID NO: 45611
  chr8:92053389-92053419
  hyper

SEQ ID NO: 116902 - DNA, 239 bp, Homo sapiens
  chr8:92082263-92082502
  hyper
ctctgcgcgcctcacgtcagggccaagagcctagcgcgtagctttatggctgactcggctctggcgctctagccaattccgaggctgcaaactccgcttctccgctcgcagtctggttcctcccctgccgccccgcccatcacggcagggtcacggtagcgcgcacgcgcagcaccccatttaagtttctcgtctttgcagtggctttgcttagatccggtgccgccttgaaggcgggg

SEQ ID NO: 116903 - DNA, 378 bp, Homo sapiens; identical to SEQ ID NO: 45613
  chr8:93113863-93114241
  hyper

SEQ ID NO: 116904 - DNA, 1630 bp, Homo sapiens
  chr8:93114306-93115936
  hyper
cgacgggaacacccaggagggccggggcggctgagtccagagcgcgcagaggtcgggcggggacgactctccccatcggcccctgactgcgaagcccgggaccagcctcgggcgggagccgccgtccgcccgctcacccaggagcttcccagtccagcaccccaaacggccaggagtaacaaggaaagttcgcaggcaggcgcagagcgcctgggtacctctaagcaaacccccaccctagttgcagccgggtcccaaagttaagatcccgcctctttactccttagggctaagttttccaccatcaaaacaagtctttgcttccagtttacagaaaaagaaaagaaaaaaaaaaaaaagaaaggaaaagaaaaaaacccacgatgcgggcatagggccacctgccaaatgcactgtgggcacctcgatcggttgttttgtcgggggagaaacccactcgtcatcttcctgctcgcataccgtgactatggagagggaagaaaaattatttttaaaagacactgtggggaatataatagtaaaaactgcatcctcggctgacccgcgaagttcagtgtcatcgcagaccggagtcacccgcgatgttcctctttgccctggtgcgtagtcctaccctaattgagcgacaagtacagcctggagcctcgcggtcgaataatccaaacgaagatgacggtcatcggaacagtaattaataacagtcaggggcccgaccccgccgcccgcccgccggccaagccctaccgcggacacttacactgcacagggccggagagtcccaccatccgccacaggctccgagctgcaaataaaacttcccgtcgtctcggccggcccgcggggcgacggggcgaggacgcggcgcggcttccctcgcgaggccagagtgtccgcggccactcgcccacgcgcgctcgccacgagaccgcggagtcgcgccgcggagcgactacggccgcccggcgctgcgcagagagagctgccgtgcaaaaagcccggggtcggggacgccagccaaacgcaacctccacgcagagcccaagacttgcggagctctgctcccctcctcccgcctccctccctccctccgcttttctgttgttgctgctgtggcagacaaatgtgatgtggggcgcagggaattgccactgtcacaggcggcgtctgcgtctccctcgcccgccctcgctcactctcgaggaaggcgacgcatttatctgcagggcggccgggcgtccgccggggagcaggagcgccgcgcgctgtgcgccgagagcgcccgcatcaggccggctccggcgcacgctcgcgccaggggcgccgcggccggtcgggagggaggcggctgcgcggccgctaccaggtgcaggggggaggacccgcggcggggcgtgggggaggtggaggtgggagacatctgtgttgtgcgggggtcacggaggtcaagtatatgttaacaatgggcaggcccggcacgctagggcgcgcgggctggcgggcggcctccctcccggcctcgccctctcccatgcaggctggacgtggggttggctccctaatgatgccttcccgggccgccagctctcaggcggcccgagtgccctgcagt

SEQ ID NO: 116905 - DNA, 877 bp, Homo sapiens
  chr8:93977673-93978550
  hyper
ggtatgcaaatactcgttcattaataagaggaagcaggaaaaagagtgaagaggagtaccatgggaaagggggccccaaaagggaacggcagaacccagagagctgcactgacaagtaagcgaccgcgagtaatcggtcagcacaaaggagccaatcccgagccgcgtggaagaccttgggaggtgggcgggactaacgtgtccagggcccagcggctggcgccagacacgctggcagggcgggaaccgcgcgttccttagcaaccgcaatggccacgcccaccgaacccagcaccctccatcccccatcccgcagccagcgccctactcaacgggaacgggtccttcagtgatcaccgtacctactgggtttcccggactccgggtttctcttgcagagcctccctccgcccagccccaccaagtgccgctcccagggacggaacgatcgtctcccaaacgctttagggctcgctaaagaggtgcgcccgctttcattcccggaccccgagcttcccgggcagggtctccccaatcccctcgcactcgccggacacacacctcagctctgccaaggcaagggccgacaaacttcgtgtcctgtgggaaatgttgctgtccacggttctgtcactcaggggcaggggcgggacaagccagccgcacacccctactcccaaagggtgaggcggaaaagaggcgaggctctgcccccaggggcgggaccaggcctcagcctgctctcggattggtcggcctttctcccgtctgtacgccggtccaggacgcaaaggcgctggccctgaggcctttccctcattttgatgccactccggagttctaatacctgtctcacgaggtgactgtagaaattaaa

SEQ ID NO: 116906 - DNA, 1077 bp, Homo sapiens
  chr8:94712352-94713429
  hyper
attcagcagtgaagcggacgcgtctggtacgagactacaagtcgcacaggcggagagggggcccccgggcctctggtttcacgtctccctcctggtccccggcggaccggcgtcttttctcccctgctcggagtagcctagcagcgctggaggctggctgtctggtaagcgcggctgttagagaggatggaggcgccgtagccccgcggtgcttctcacagccttcgccggcagggacgcgcgggacaaccgcgcaggcggctctgcaggggtgggcgcgccatcacccctctcggtccctgcctgcttggcgctttccgagccccagccgcgctcaggctgcctcgggcattgaccgcgggggcgcgcgccccgtttccatagaaacgcccggcctgccgcggcggcgcgaggggcgggctttcaggctcccggcggctgcttgcgccccagcgcgcgcccaggcgccttggaatccccgtccttgggcccccgcaaggtccccggccgtgcgcgaggcagcatgatgaggcgcaccctggaaaaccggtaacagcccgagcccagctgcccagggccgcccacactggagggctggggtgagggaagtggaagcctctgtccatggggcctctgcgccgaattccgaccctgagtgggaggctgcacggtccccgctgtgacctggggcctaattccttgggctgcagccaccgccggcggcgaagaggagcccggggcccggccggctgccacccacccacgccaccgggtctcgggtccccacactgccgcgggcagtgcggaagcctaggaggcagccgggcgcccaggccgcgctgcgcggagcagccggagcagccacctccccagttaaggccaggcccacccggcctgggccttttcctgtgcctacacagtccggatagtgaggtcaggaccccatggagagcagtccgcgccgggagacgctgggtcgttgatgggtttacgccttcaaagctgcagaatgcccggggaatgtttgcatgttaaattaacgtgaagccttctcatctctaacgagaatgttttgcc

SEQ ID NO: 116907 - DNA, 30 bp, Homo sapiens
  chr8:94753230-94753260
  hyper
tccggacaaacggacgtacggtttatctgc

SEQ ID NO: 116908 - DNA, 181 bp, Homo sapiens
  chr8:94766988-94767169
  hyper
acctgccaacttcgcgcagggttggtaacctagcaaccaagcaacacgagcagtgacttccggtacccggacttgggttgtccaatcagctcagcgaagccgccgcagaggctgatggggggctggaggctgtgaggcttccagcgtcggtaccatggcgacgcgcggtggggctggggtg

SEQ ID NO: 116909 - DNA, 30 bp, Homo sapiens
  chr8:94928391-94928421
  hyper
tgagcacacatctacgctacagagataatt

SEQ ID NO: 116910 - DNA, 30 bp, Homo sapiens
  chr8:94928840-94928870
  hyper
tgctcagccaacaccgccgagctccacaga

SEQ ID NO: 116911 - DNA, 210 bp, Homo sapiens; identical to SEQ ID NO: 6451
  chr8:94929136-94929346
  hyper

SEQ ID NO: 116912 - DNA, 10 bp, Homo sapiens
  chr8:94929748-94929758
  hyper
gccgggcagg

SEQ ID NO: 116913 - DNA, 4 bp, Homo sapiens
  chr8:94929775-94929779
  hyper
cggg

SEQ ID NO: 116914 - DNA, 296 bp, Homo sapiens
  chr8:95003742-95004038
  hyper
ttgatttcagcagggactgggcgtctgcacagagctcccggctccccgcggcgggggcaggagtcaacgccgtcagttacatgctcgtcagatgtgcacgggcgccacacacgatcctgctaacgtggtcggagaaatatgacctcagcgcaggtgaagcgtgggcagctgacgccacggtgatgtgtgcagatccggtggggactctgacgcagccccagggcaaaaccaacctgctttctaccttcaatccagcaggatgcccgtcatggagaaaaaggcggggcctgcttggg

SEQ ID NO: 116915 - DNA, 485 bp, Homo sapiens; identical to SEQ ID NO: 45625
  chr8:95246498-95246983
  hyper

SEQ ID NO: 116916 - DNA, 30 bp, Homo sapiens
  chr8:95274639-95274669
  hyper
ctctgcagcaaactcggagttgcagccact

SEQ ID NO: 116917 - DNA, 30 bp, Homo sapiens
  chr8:95487024-95487054
  hyper
cgctccaaggcccccggggccagcaaccag

SEQ ID NO: 116918 - DNA, 12 bp, Homo sapiens
  chr8:95651256-95651268
  hyper
acgcacggggtt

SEQ ID NO: 116919 - DNA, 711 bp, Homo sapiens; identical to SEQ ID NO: 6455
  chr8:95651324-95652035
  hyper

SEQ ID NO: 116920 - DNA, 820 bp, Homo sapiens; identical to SEQ ID NO: 6456
  chr8:95652419-95653239
  hyper

SEQ ID NO: 116921 - DNA, 284 bp, Homo sapiens
  chr8:95653290-95653574
  hyper
cgggcaactgaatacaaaaagggcaggcctcctgcgccctccttcccaccccccttcctgccctgggcgtggagcaccgaccaggtgtgggcttgggtggttggttaccgccttttgcactagcagtagcaaggaaggggggtgggcgctctttctttttctcttagaagagggtttagcacaggttttttcgttctcacttccacaccaccttaccgcctcccgaccccccctctccccctccccacctatcgtcatgacggcctctccggattacttggtgg

SEQ ID NO: 116922 - DNA, 901 bp, Homo sapiens; identical to SEQ ID NO: 45630
  chr8:95653852-95654753
  hyper

SEQ ID NO: 116923 - DNA, 30 bp, Homo sapiens; identical to SEQ ID NO: 45631
  chr8:95731815-95731845
  hyper

SEQ ID NO: 116924 - DNA, 53 bp, Homo sapiens
  chr8:95835298-95835351
  hyper
ttgtctcattttctcgctggagaactgtcagggaacacggaaaacccacccgc

SEQ ID NO: 116925 - DNA, 30 bp, Homo sapiens; identical to SEQ ID NO: 45633
  chr8:95835759-95835789
  hyper

SEQ ID NO: 116926 - DNA, 30 bp, Homo sapiens; identical to SEQ ID NO: 45634
  chr8:95907849-95907879
  hyper

SEQ ID NO: 116927 - DNA, 30 bp, Homo sapiens
  chr8:95908104-95908134
  hyper
ccggccttgcgcggcgcgcccagggaaggc

SEQ ID NO: 116928 - DNA, 30 bp, Homo sapiens
  chr8:95908793-95908823
  hyper
gagcagtgcgaaggcgtctcggaacccgcg

SEQ ID NO: 116929 - DNA, 30 bp, Homo sapiens
  chr8:95909200-95909230
  hyper
aggatggctctcggcggggcagaagttgcc

SEQ ID NO: 116930 - DNA, 3 bp, Homo sapiens
  chr8:96037645-96037648
  hyper
cct

SEQ ID NO: 116931 - DNA, 1025 bp, Homo sapiens; identical to SEQ ID NO: 45635
  chr8:96145957-96146982
  hyper

SEQ ID NO: 116932 - DNA, 137 bp, Homo sapiens
  chr8:96147205-96147342
  hyper
ggtgaatgcctaccgcgttttgagcatttactttttttaaatactctggcagctcgtggggtcttcacgttaattcagtattaacgaaggcttcattataatctctttgggtcccgaccacacggggaatgaatggt

SEQ ID NO: 116933 - DNA, 30 bp, Homo sapiens
  chr8:96281870-96281900
  hyper
aaagctgacattcccgtagtcggcaggatt

SEQ ID NO: 116934 - DNA, 30 bp, Homo sapiens; identical to SEQ ID NO: 45636
  chr8:97145465-97145495
  hyper

SEQ ID NO: 116935 - DNA, 303 bp, Homo sapiens; identical to SEQ ID NO: 45637
  chr8:97156906-97157209
  hyper

SEQ ID NO: 116936 - DNA, 231 bp, Homo sapiens; identical to SEQ ID NO: 6462
  chr8:97157666-97157897
  hyper

SEQ ID NO: 116937 - DNA, 134 bp, Homo sapiens
  chr8:97158021-97158155
  hyper
ggcctaccgggttttccccccaaaaggcttcgtaaccactaatgtgccctttgtggtctcaagcctgggccgcgtttcccctagacctcctctgggctgggctggctcgttctcgttgacgtctcaaatgtcac

SEQ ID NO: 116938 - DNA, 98 bp, Homo sapiens
  chr8:97165550-97165648
  hyper
tgcttctcttttcaacggggtcccattctgggctcccgaccacagcggctcaaatcttaatttgacatcactgcagatgaaacccaaaccgaagctct

SEQ ID NO: 116939 - DNA, 125 bp, Homo sapiens; identical to SEQ ID NO: 45641
  chr8:97165702-97165827
  hyper

SEQ ID NO: 116940 - DNA, 30 bp, Homo sapiens; identical to SEQ ID NO: 45642
  chr8:97166032-97166062
  hyper

SEQ ID NO: 116941 - DNA, 129 bp, Homo sapiens
  chr8:97166407-97166536
  hyper
cctgggctagaggcccgcccctggcctctttcacgcccactctcgggtccctaaaccatgccccgcccccaggcgccggggccactagcgccgccgcgcgcgcttccctaggaacgttgtccagcgccg

SEQ ID NO: 116942 - DNA, 646 bp, Homo sapiens
  chr8:97166796-97167442
  hyper
cggcattccacacctcgagggctcggctcgattcagtcccctggtccaaagagtgtcgtttgacccgggttattcaatacccgaggggttatcgaactaatggctttccttttacttaaaagcccccagggattactgttgatttgctctaagacctttggtgcacgcagtagtcctagcaggaaacaaaagttctcgttctgccctgtttctatcataccatcttcctccccacagtctccacctcattcccttcttccttctccgccaccgccccagaaagacgtcaccactttcgaggaggtgtgtaagaacctcaaggactccagctaagaaaaacatgtggtgttagggcctccgatgcagtgccctgcgttccccgcgggtccaggtgacacgcatcctctccggtcggaaagaggagctttcaagtcctgattcaattggggggtggggagggtggagaagagggattcgccaggcctgtcgtgatctgtggtctgagtgacttttttcttttaatgcgcagaaaccacaaggatgtttgagcacgtttttagatcccctcccccatcggcaactccaccgcgcgaactcccagaggcccgagagcctcccgcgttgaggaaaacgctatgtccgtctc

SEQ ID NO: 116943 - DNA, 292 bp, Homo sapiens; identical to SEQ ID NO: 6466
  chr8:97167785-97168077
  hyper

SEQ ID NO: 116944 - DNA, 28 bp, Homo sapiens
  chr8:97168213-97168241
  hyper
cgcagccgggctattcccagaatggtcc

SEQ ID NO: 116945 - DNA, 13 bp, Homo sapiens
  chr8:97169606-97169619
  hyper
aactttggggttt

SEQ ID NO: 116946 - DNA, 247 bp, Homo sapiens
  chr8:97169708-97169955
  hyper
cgctcctccccttgggggacccccggctccaccgagccaggccagccccactcgacggcgatttaaacatcccttaggcaaggcgccaagttagcgctgctggcccagctctaggcgggccgctgctctttcctcctcgccaggccgtccacgcgttgggggaggggaccctaggggggttggcgcggttaagagccccacgtgagaggggcggaagtccttgccaggagccggggatgcgcggctg

SEQ ID NO: 116947 - DNA, 284 bp, Homo sapiens
  chr8:97170053-97170337
  hyper
cgatgctaagcaagccccggaaggtccagcctgaggtcaccgccggtgacacatcaaatcaaaatcagtgagagggaaagtgaggctttccctttatcaagctggggctgcagccagcaacgcaccccctcctctgcgcacccctcccgcccgtggctccgcactccttcacccccgcgcggcgtgcgacaagccgcaccgccttcccagtcaacgaactgcctttcttcgcattttctgagaacccggagacgcggaggagacagcgcctttgaagatgctgt

SEQ ID NO: 116948 - DNA, 887 bp, Homo sapiens
  chr8:97170377-97171264
  hyper
cgcatccccagccctccaccgcattccggggttgtagcggtacttgtggatctcggtcctgctagtctggaggccttggctcgggaacagaggcctccccagactgggtgcacatgcaatccctcctctatctccaggatcgggggcatacagcgcagtggcggggatgggggtggggaggctacagggcaaaccagggtaaagtgatttcgcgtctacgccggattggggcccccaagacttttccccaacccttgtctgaatgccacaggcttccggagacacctccgaacagcccgcagggtcttttggtcctgtgccaaattcacagggcgcagcgaaccagttatggtgcccacttgggggaggggcagagattcttgccacttcattcccgggcaaagaaaatccgcgcccaaccgccggccagcctaggcctctgggacttcttctcttgaggaagggcctcttgagcagtcttctctgagcttccttagcctccttccgcaattgtagtagagaaagtgcacgattaacagaggactttgagggacagaaacaactgtagcaaggcgtgcgtcgtggggagggttggcgagctgcacgggcagcacggaggccagggactcagttgcactactacgaagaagccacatgtctttgcaaaggtgactttagtagccctaaaatcatcataaaatacctggcgttaatttgccctctggacctttcagcagctcatgaacctcgctgacctcgggctgcagcggcgagaccctcgagcaaggaacgcgactatgagtgagaggcggggactggagccggggaagagctcggggctgggggcgggggggccgttagcctgctctaaaaagcttaagagatgt

SEQ ID NO: 116949 - DNA, 29 bp, Homo sapiens
  chr8:97171317-97171346
  hyper
cgctgcaaggtttccgggcaaccccactt

SEQ ID NO: 116950 - DNA, 360 bp, Homo sapiens
  chr8:97171598-97171958
  hyper
cacgctgcagatcaacgccggtggcaagaaggggccgcaagggtttccgcagacacccacacatgcaggcgttcccacagagggtaccagggatttcccagacccccaccagccctcaggaatagcgtagagagaggaacgtcgcctggctgagaaaggtggatgggcatacccatgtacctttgtgtattaagtacccacaacctccgaacttagccgtccctgtcccggcccgcccaactgctgccgccgcatctgcagaaaccactcgtgttgaggcctcggagcagccgggagcaccacgctggagcaaaaaagccggagggcgcagggctccagcccggctgaccatcccaccca

SEQ ID NO: 116951 - DNA, 721 bp, Homo sapiens; identical to SEQ ID NO: 45653
  chr8:97172018-97172739
  hyper

SEQ ID NO: 116952 - DNA, 1042 bp, Homo sapiens; identical to SEQ ID NO: 45654
  chr8:97172821-97173863
  hyper

SEQ ID NO: 116953 - DNA, 70 bp, Homo sapiens; identical to SEQ ID NO: 45655
  chr8:97174100-97174170
  hyper

SEQ ID NO: 116954 - DNA, 30 bp, Homo sapiens; identical to SEQ ID NO: 6474
  chr8:97247827-97247857
  hyper

SEQ ID NO: 116955 - DNA, 30 bp, Homo sapiens
  chr8:97273734-97273764
  hyper
cgaggcctgcttcccgtagcgggtgacccc

SEQ ID NO: 116956 - DNA, 30 bp, Homo sapiens; identical to SEQ ID NO: 45657
  chr8:97274037-97274067
  hyper

SEQ ID NO: 116957 - DNA, 30 bp, Homo sapiens
  chr8:97274275-97274305
  hyper
cctgcgtggggagccggaccctaagcaagg

SEQ ID NO: 116958 - DNA, 30 bp, Homo sapiens
  chr8:97274551-97274581
  hyper
ggctggctgctccacgcacacgcactggca

SEQ ID NO: 116959 - DNA, 184 bp, Homo sapiens; identical to SEQ ID NO: 6475
  chr8:97505578-97505762
  hyper

SEQ ID NO: 116960 - DNA, 247 bp, Homo sapiens; identical to SEQ ID NO: 6476
  chr8:97505801-97506048
  hyper

SEQ ID NO: 116961 - DNA, 230 bp, Homo sapiens; identical to SEQ ID NO: 6477
  chr8:97506177-97506407
  hyper

SEQ ID NO: 116962 - DNA, 1382 bp, Homo sapiens; identical to SEQ ID NO: 6478
  chr8:97506447-97507829
  hyper

SEQ ID NO: 116963 - DNA, 34 bp, Homo sapiens
  chr8:97657329-97657363
  hyper
agctgagaagccttccggccgatctgtggccctg

SEQ ID NO: 116964 - DNA, 357 bp, Homo sapiens
  chr8:97657754-97658111
  hyper
tccagcatcgctcattcgggggcgtgacgggaggacctggctggggagcggcgggttgggagcctgtggctgccccttcggtgacagtggagtcaccgagcctagaaatggggaagctgtgacgtgggggtggtggagggtgctgcgggacagcagcgagcacggccctcagccgtccttcccaacacggtttcacttcccctcagctccagggctcagccccaagccgcccccttcatcccccatctgcaaacaatcctggtccccctgagcctccaatatgccttatgcagttcttttggggttcctttcgcattttaccgtgtactttcgcttttgatgcgtctagtttctgct

SEQ ID NO: 116965 - DNA, 88 bp, Homo sapiens; identical to SEQ ID NO: 45663
  chr8:98289922-98290010
  hyper

SEQ ID NO: 116966 - DNA, 274 bp, Homo sapiens; identical to SEQ ID NO: 45664
  chr8:98290080-98290354
  hyper

SEQ ID NO: 116967 - DNA, 30 bp, Homo sapiens
  chr8:98610460-98610490
  hyper
tgcggtggggccgttcgcccagcctagaac

SEQ ID NO: 116968 - DNA, 192 bp, Homo sapiens
  chr8:98657022-98657214
  hyper
gccgcggcccccgacgacctggccttgctgaagaatctccggagcgaggaacagaagaagaagaaccggaagaaactgtccgagaagcccaaagtgagtatgggatgagcggcagtagagaacgggcgaagggcgggcgtggagaccctcgagcttgggggaggccgcgccccagccgggaaggaaaagagt

SEQ ID NO: 116969 - DNA, 408 bp, Homo sapiens; identical to SEQ ID NO: 45665
  chr8:98657500-98657908
  hyper

SEQ ID NO: 116970 - DNA, 225 bp, Homo sapiens
  chr8:98787239-98787464
  hyper
aaaaaaaaagctaccggaagcacagcgaggatgtccttgacacacatcctattttctgggaaaagattactaccacagtaattgagctgtgaagcggagacaaattgctctcggtggtggttcaaagtactgcaattgactggaatagcaccgcgcagttttccttcctctcgtgcaagataagagtgataggagctgtatcgattacctgcaagatagaagtag

SEQ ID NO: 116971 - DNA, 225 bp, Homo sapiens; identical to SEQ ID NO: 6481
  chr8:98787763-98787988
  hyper

SEQ ID NO: 116972 - DNA, 574 bp, Homo sapiens; identical to SEQ ID NO: 6482
  chr8:98788320-98788894
  hyper

SEQ ID NO: 116973 - DNA, 948 bp, Homo sapiens; identical to SEQ ID NO: 45669
  chr8:98880994-98881942
  hyper

SEQ ID NO: 116974 - DNA, 30 bp, Homo sapiens; identical to SEQ ID NO: 6484
  chr8:99058278-99058308
  hyper

SEQ ID NO: 116975 - DNA, 21 bp, Homo sapiens
  chr8:99076661-99076682
  hyper
cctcccgctctcttccgcttt

SEQ ID NO: 116976 - DNA, 584 bp, Homo sapiens
  chr8:99076759-99077343
  hyper
cgcgcttgcgctctacgcccaagggagccgggctgcagagctggagaaacttccgcggctacgggtgcagttgccttcggttcccggttccgggccgacacccgcgcagggctgagacaggtgtctgcgctccccgcaatgggctgctccagcagcgccctcaacaaggccggcgacagcagcaggttccccagcggtgagcagggtaccggcgccgcccgcgcccgggctggggactcgggtgggctaactccccaggaggtccaaagggtgtgtcccgtggccaccccgcctggcaggagccgggccttgtcccggaggatgcgagcagaacccgggacaaagcgcgatttccttccaaatctggagcggcgctgctgtgaccgcgggtgcggcggccctggtgcgctccgcggcgctcgctgcgagacgcgcggggcccgaggccgggcgctggattcaccctgtccgctgatgggatctcggggagttggtgttgaggccctaaggcggttagcctcggcattgccttaaacacaggagaaatgtcctatcaaggccttctaccaaggctgggggcggtg

SEQ ID NO: 116977 - DNA, 21 bp, Homo sapiens
  chr8:99077402-99077423
  hyper
gaagttcgagaaaaacctggg

SEQ ID NO: 116978 - DNA, 30 bp, Homo sapiens; identical to SEQ ID NO: 45672
  chr8:99129207-99129237
  hyper

SEQ ID NO: 116979 - DNA, 120 bp, Homo sapiens; identical to SEQ ID NO: 45673
  chr8:99129465-99129585
  hyper

SEQ ID NO: 116980 - DNA, 30 bp, Homo sapiens; identical to SEQ ID NO: 45674
  chr8:99129924-99129954
  hyper

SEQ ID NO: 116981 - DNA, 176 bp, Homo sapiens
  chr8:99182335-99182511
  hyper
ccccagaaggggtgacaatggcgggagagcggggctccccggtgtagtccgggaaggtgcagttcccaggtgtgaccgcggggtggcgcggtgcgccggcgccggcgcttgcagacttcccgggagagaaacctccgtgcagccctggggctgacgtggatgccaccctggggtgg

SEQ ID NO: 116982 - DNA, 30 bp, Homo sapiens
  chr8:99306095-99306125
  hyper
cacctcttcccactcggagaggccgggtgt

SEQ ID NO: 116983 - DNA, 30 bp, Homo sapiens; identical to SEQ ID NO: 45676
  chr8:99306733-99306763
  hyper

SEQ ID NO: 116984 - DNA, 27 bp, Homo sapiens
  chr8:99438691-99438718
  hyper
ccgaccagaactcagcgactcccgccc

SEQ ID NO: 116985 - DNA, 1076 bp, Homo sapiens
  chr8:99438739-99439815
  hyper
cgccccccgcgtactaagccgatctccaccttggacttcccggccccctcttttcccctccagctcctgttccccaacaaccccacccccgggcttcgggaaacttttcttcaggtccctaaaaggggacacctggagttcctccggtcccgccctgtccccggacacgcgcaagccgccctttatttcccagcccagctcccgccagacccagcggggaaaggtcaccgtaggcagccccctgcctgcgccctgggggtggtgataataacagctgtcaccgggggatggtcggggggaagggagaggtgtcggccccgcgccgagccgggggcgcaaggtggtcgcggtgacgcgccggggaagcgcagagaagcagcggcggcggcggctgcgccttccgagcccgggcggcggccgaggcacgcggagctgtccgttcagcaccaccgcgccgcgccccgcgcagggcgggcgccccgtcacacccgctctgctcccgccccggctcacggggcgaatgcggcgcgggttcctgcctctctgggtgggtgaggggcgcgcggatccggagagggggctccgggagcggcgggaccacgcagccacctgtgagccttcggcagctgcgggcggcggcggcgtacccggcccgagacgggaggagacgctcggcggcccccgcccgccggcccgccgggcgcacacactcgcacccgcgcacgcaccgccagcaggcagcggccaccgccgcgatgctcgcccgcgggttggggaagtttcccgccggcctcggccgcgggcacccgtgctcccaggtaagcgcttccagaacgcgcagggcgagcccgggcagccccgctgggtgaggcgcagcgcacgcggccccggggcatagcgccaggccggcagggagacctgggccggggacgcgggggctgcaggcgtgggatctggacccaggggaggccgggccgcccccctcattcccgcggcccgggtttccagactccagcgcatcccccccaccccaccaaagctacgcgccccccgtgtcggcccggccctgcccgtgc

SEQ ID NO: 116986 - DNA, 113 bp, Homo sapiens
  chr8:99440156-99440269
  hyper
cgcttccaggtgtagcgcccccgcgcggcgcgggcggccggcgcctccagcatgaccggccagagcctgtgggacgtgtcggaggctaacgtcgaggacggggagatccgcat

SEQ ID NO: 116987 - DNA, 55 bp, Homo sapiens
  chr8:99837476-99837531
  hyper
ggccgcagggagcccggcgctgcccacccgactttccacgcgccaggcctgccgg

SEQ ID NO: 116988 - DNA, 13 bp, Homo sapiens
  chr8:99951152-99951165
  hyper
gaaatcagtcaga

SEQ ID NO: 116989 - DNA, 65 bp, Homo sapiens
  chr8:99951421-99951486
  hyper
agtgaaggaagaaggaagaggtagggacggaggaggagagagagcacgcgcgggaaagataaatc

SEQ ID NO: 116990 - DNA, 346 bp, Homo sapiens
  chr8:99951797-99952143
  hyper
aaacaagtctggagacgggagggtagcgctgctcagctccagccaactcactgccgcgtaggaacggaggtcatcggaaatcaagatttccgtttgaattttcccaaagtttaagcgttggcaagtgcgttgaaaaacacacacaatatgaaagcctaataaaaatataggtttgcagaccgtgccctagtcttttccgaggatgttcttttctgtcatccatcgtctacccacgttgagcacgacagccgggccagtcccgccctgggcggttggggccttcccagaggggcccggtgcggagagcccccctctccccggatgtgtctggggcctgtccttcact

SEQ ID NO: 116991 - DNA, 105 bp, Homo sapiens; identical to SEQ ID NO: 6488
  chr8:99952198-99952303
  hyper

SEQ ID NO: 116992 - DNA, 400 bp, Homo sapiens; identical to SEQ ID NO: 45680
  chr8:99952532-99952932
  hyper

SEQ ID NO: 116993 - DNA, 242 bp, Homo sapiens; identical to SEQ ID NO: 45681
  chr8:99952968-99953210
  hyper

SEQ ID NO: 116994 - DNA, 776 bp, Homo sapiens
  chr8:99953786-99954562
  hyper
cgagtgggagaggcgcgcggtccgagtgggagaggctgagagtcaactccagggaagtctgtgtctgacacctgctcgctgcttagctggcagagcctcctgggtgggccggggggcaggggcctgcgctgcgcgccccctcctcctccacctcctcctccgcgtttcctgtccctggccttcatcccggcctcccggggcgtaaacttgcagcggttggggttcaggcagccgctgctcgcgcgcccctcgtcagttagccatttccctgagagcgtccttggtgtcgcaagtccagagccgcgaggacagcagatgaccgggtcagcggaaatttcagagccagccagcagctcaggtccccggggccgcggcaggaatggaacggctccgcggagacagcctcgggggcacagccgggccactgcagactccgggacttccctctccgcacacccgaaacccacaactcgcccgtgggccgcgtggcctttctgcgccgagggctgctgggggcgggcggcgagcctggcgggtgacctgctcttgggtgggccccgcaatgcctgcgccctagacgccggccgggacgaggggctggctgggtctgagcctggagaaacacaagggtcagcccccagtgggcgcagaggtggcccaggagggcccgcggacggtgctgcgctgcgctcagcctccgggccgctccccgcgttcggcgcgcacctgcccatcgaggcggcagggccagcaggcggcctaggcgcggccgggcc

SEQ ID NO: 116995 - DNA, 532 bp, Homo sapiens
  chr8:99954686-99955218
  hyper
aagtaaacacatttatggaaaaaccccggggttaggaggtttgcggaaagagggagcagctcgtggggttggaaattctgcctacccctcgggaaaaccaaacggttctgcacccaacgtacacatacttaagggcgggaaaggtgtgaagcccgctgctggggagttgcctcccctttgatgaaaaggaagtgcgaagcgtaggaacgctcttcaggtcaccaccccgtgagtgggaggcttggggagtctgaaggaagagaaagctccctccaaatctcccaaactgagaaaagctgcaggaggaatgaggcagttggagagagaggaccgcaggcatcccgcagctgaggctcaggactgagctctaaaatgaaagcacccctatgggacccaccaggcaaaacgttaaaaaaaaaaaaaatctgaatgcttaggcattctgctgcttccattctgtgtgtcaaatctactttgaagcagttaagtactgcaggatattaaacactcgaatctccgtttcaagctcact

SEQ ID NO: 116996 - DNA, 141 bp, Homo sapiens
  chr8:99955427-99955568
  hyper
atctacttccccgcacgattgagattttttgaattgtcctttggggcgtctcattcaaaaccatctttcgacggaacacttttgaattgtacagcctcttggttgaagatctacgtcctcaaagtgcgggcttgccgtgga

SEQ ID NO: 116997 - DNA, 182 bp, Homo sapiens; identical to SEQ ID NO: 45686
  chr8:99955967-99956149
  hyper

SEQ ID NO: 116998 - DNA, 1314 bp, Homo sapiens; identical to SEQ ID NO: 45687
  chr8:99956452-99957766
  hyper

SEQ ID NO: 116999 - DNA, 276 bp, Homo sapiens; identical to SEQ ID NO: 45688
  chr8:99960221-99960497
  hyper

SEQ ID NO: 117000 - DNA, 252 bp, Homo sapiens; identical to SEQ ID NO: 45689
  chr8:99960921-99961173
  hyper

SEQ ID NO: 117001 - DNA, 30 bp, Homo sapiens
  chr8:99961667-99961697
  hyper
ggttgccctccaaaacgaaaaaagagttta

SEQ ID NO: 117002 - DNA, 203 bp, Homo sapiens; identical to SEQ ID NO: 6497
  chr8:99963487-99963690
  hyper

SEQ ID NO: 117003 - DNA, 101 bp, Homo sapiens
  chr8:99963899-99964000
  hyper
ctgactcacaccccgcggcaggacttctagagaagcccaggatctgtcccgtgccgccgctgctcccctccccagacacctctccacgtctcctacccagg

SEQ ID NO: 117004 - DNA, 177 bp, Homo sapiens
  chr8:99985866-99986043
  hyper
catgaagcctctccacgtggccgacttcccttagagaagtcccacaagccctcagccctcacagcctcgcccgcgacgccgtgcccacccctcccctggcagccccgagactctgggcgtgtgcttcccgctccccgagggccttaggcccagcggacgcccggccggagcctgatg

SEQ ID NO: 117005 - DNA, 301 bp, Homo sapiens; identical to SEQ ID NO: 6500
  chr8:99986225-99986526
  hyper

SEQ ID NO: 117006 - DNA, 230 bp, Homo sapiens; identical to SEQ ID NO: 6501
  chr8:99986791-99987021
  hyper

SEQ ID NO: 117007 - DNA, 339 bp, Homo sapiens; identical to SEQ ID NO: 6502
  chr8:101118151-101118490
  hyper

SEQ ID NO: 117008 - DNA, 434 bp, Homo sapiens
  chr8:101170170-101170604
  hyper
atctgcagatctgccggactgcgggtcggggcgtggcaggggcctagtccccgccccggccgtcagcctgtcgcctctggctcgggccgggcgacgagaccctccctcagcacctgcagtgcagccagagccggtgcggcggccgcgacttccccgacgcggggcgctgagaagcagtgagtgcctgtgtgtacctgccggccgggaatataggacttgtcgcatctcagcccttccctcccggagcgggggcgagaggtcgaggcggggaggcgaaggggcggtgggccgcgagggagaaggagcgatggggtggacgtccttcaaggccggggaacacgcggggctttccaggccgcgggggacggtggcgggtgtcggggcgcggtggcaacgctggagttcccgggtccaccggcgcggtcagccctggt

SEQ ID NO: 117009 - DNA, 30 bp, Homo sapiens; identical to SEQ ID NO: 45697
  chr8:101321913-101321943
  hyper

SEQ ID NO: 117010 - DNA, 108 bp, Homo sapiens
  chr8:101322698-101322806
  hyper
gttgccagactcggcgactctggctcttggcagtttgcccggcattattcattcctttgtgttctcagggttcacctgctagattggcaggccgagggagagaagtgc

SEQ ID NO: 117011 - DNA, 30 bp, Homo sapiens; identical to SEQ ID NO: 45699
  chr8:101499210-101499240
  hyper

SEQ ID NO: 117012 - DNA, 30 bp, Homo sapiens
  chr8:101571450-101571480
  hyper
taacccgggcaccccggagccatgtgccat

SEQ ID NO: 117013 - DNA, 83 bp, Homo sapiens
  chr8:101572035-101572118
  hyper
ggccagagcggtctcgcgctgcagcccccggcgcgccccctgcaggtgggcggtcctcacggtggctcgggctgctctgagtc

SEQ ID NO: 117014 - DNA, 30 bp, Homo sapiens
  chr8:101625765-101625795
  hyper
atacaaacgtgcatgcgctactgcccacct

SEQ ID NO: 117015 - DNA, 499 bp, Homo sapiens; identical to SEQ ID NO: 6504
  chr8:101661575-101662074
  hyper

SEQ ID NO: 117016 - DNA, 30 bp, Homo sapiens
  chr8:101735185-101735215
  hyper
gcccgaccctcctccgtgtcttcactggac

SEQ ID NO: 117017 - DNA, 137 bp, Homo sapiens; identical to SEQ ID NO: 45701
  chr8:101821967-101822104
  hyper

SEQ ID NO: 117018 - DNA, 361 bp, Homo sapiens; identical to SEQ ID NO: 6506
  chr8:101920198-101920559
  hyper

SEQ ID NO: 117019 - DNA, 44 bp, Homo sapiens; identical to SEQ ID NO: 6507
  chr8:101920618-101920662
  hyper

SEQ ID NO: 117020 - DNA, 86 bp, Homo sapiens; identical to SEQ ID NO: 6508
  chr8:101962306-101962392
  hyper

SEQ ID NO: 117021 - DNA, 286 bp, Homo sapiens
  chr8:101965388-101965674
  hyper
gacaggcagtcaggcgtgaccgcacggacccgtttctcgtaggctaggttttcctacccaaataaagctttcacgtgaagacctcatactgcacatgacgatcattacctttttatctcctagaagcaaggtttgagggacgtcgtagtccccagggttccagctggcggtgggagtgggccacaggccgggtgatgagccgggacgggagcccggaagaaggggaaggagaaaggcggaaattgcaggtgcctgaaccggtagggcctccgcccagttgacttca

SEQ ID NO: 117022 - DNA, 91 bp, Homo sapiens
  chr8:102038369-102038460
  hyper
gatggcctgtgaagagggcggagaggaagtgggaaggtcgcgccctcccccagcctctgagtccctggctcccactcggatggccgtcttt

SEQ ID NO: 117023 - DNA, 341 bp, Homo sapiens
  chr8:102092938-102093279
  hyper
ggaggcttccctgcccgcctcggcctcgcttacaccgcaggtgctgtgagtcacccacctgcgtggtgagtcaggggaggaggccgagaaggcaggtgggcggcgcggcagggcgccgggcttcgcggggaggggagcgctgtctccccacgcgcccctcccccacgagcggcttccagaaacccgtttgcccatccccggcaggaggcctccgcccggcttctcgctccctcttccctctccccgaccccctcccgggctgtcagccgactgccaccgtcaccatggctacgcggctcccgctcagttccacagtcagcaggagtcgagcaggggaggcg

SEQ ID NO: 117024 - DNA, 30 bp, Homo sapiens; identical to SEQ ID NO: 45708
  chr8:102138579-102138609
  hyper

SEQ ID NO: 117025 - DNA, 31 bp, Homo sapiens; identical to SEQ ID NO: 6510
  chr8:102217068-102217099
  hyper

SEQ ID NO: 117026 - DNA, 107 bp, Homo sapiens
  chr8:102218019-102218126
  hyper
ggccaatggcagcgcgcccctattacataagcgcgagggggcgggccctggctgacacaaacttcaggggacgtcgccttctgtccccaggcgcccctcctctccgg

SEQ ID NO: 117027 - DNA, 31 bp, Homo sapiens; identical to SEQ ID NO: 6511
  chr8:102219053-102219084
  hyper

SEQ ID NO: 117028 - DNA, 618 bp, Homo sapiens; identical to SEQ ID NO: 6512
  chr8:102504306-102504924
  hyper

SEQ ID NO: 117029 - DNA, 429 bp, Homo sapiens; identical to SEQ ID NO: 45712
  chr8:102505556-102505985
  hyper

SEQ ID NO: 117030 - DNA, 52 bp, Homo sapiens; identical to SEQ ID NO: 6514
  chr8:102506365-102506417
  hyper

SEQ ID NO: 117031 - DNA, 30 bp, Homo sapiens; identical to SEQ ID NO: 6515
  chr8:102636867-102636897
  hyper

SEQ ID NO: 117032 - DNA, 30 bp, Homo sapiens
  chr8:103136304-103136334
  hyper
caggttcccagaaccgcgcgctcctcgaac

SEQ ID NO: 117033 - DNA, 271 bp, Homo sapiens
  chr8:103136686-103136957
  hyper
gccaagatgaggcgcgggatttgcaggtgcagtggacgccccccccctcccccgcttgccctggtgcagcctccgggcgtgtccccacggtgccccatagtcctagctcaccgcccaggcctctagccagcctgcactgctactttccaaggggtgccatctgcttgcctcctcgggtcctgggaggtcagattcagcctagagcacctccttccaagcttcgatttgagggggggtctggggtccctgctctaccgcagtgaagttcaag

SEQ ID NO: 117034 - DNA, 30 bp, Homo sapiens; identical to SEQ ID NO: 45716
  chr8:103251114-103251144
  hyper

SEQ ID NO: 117035 - DNA, 232 bp, Homo sapiens
  chr8:103424260-103424492
  hyper
gcagtaaggacccccgcaccccaccccagctggccggccggcgcgtaaacacccgcacccgcccggcacggcccgtgggggaggggagggagggaagggcgcccctccccccgcgcccgccgacccgccagccctattacctgtcattgagctggtcctcggtgcccggcagcgggtgaaccacgaaatggatggacgtcatggtgctttccttctcgtcctccactcgagg

SEQ ID NO: 117036 - DNA, 30 bp, Homo sapiens; identical to SEQ ID NO: 45717
  chr8:103667238-103667268
  hyper

SEQ ID NO: 117037 - DNA, 277 bp, Homo sapiens
  chr8:103667885-103668162
  hyper
tggccacagacgggcgcacggagacactcgacgccgctcccgccgccgccgcgctcagcgccgtctgccccctccccattcaggtagccgctcagcctgccccgcgccgcgggcgggggtgggggcggagcctgaggccggccaatcaacggcaaaggtgtgtgaggcgccggccaatgggctcgcggggccacgcgtgatcggcgactgcccggcagcgtgaagctggtgtcagtggagcgtgtacacaatccccggcagcgtgttccctctgccc

SEQ ID NO: 117038 - DNA, 30 bp, Homo sapiens; identical to SEQ ID NO: 45719
  chr8:103818621-103818651
  hyper

SEQ ID NO: 117039 - DNA, 30 bp, Homo sapiens; identical to SEQ ID NO: 45720
  chr8:103819472-103819502
  hyper

SEQ ID NO: 117040 - DNA, 224 bp, Homo sapiens
  chr8:103822600-103822824
  hyper
ctggcaacctactgcgcaccagaggggaacccgcccgccgtcccaggccgggctctccctgctgcggagcggcccgggcgcggcgggacagggaacggaaggaacgggcttggcgcgcactcgccgaggcccaggcaggattcgagcgccagggaggcgcccatttcccttcccccgcgcctgggaacgcggtgctgggggcggggcccgaccgctgccccctc

SEQ ID NO: 117041 - DNA, 32 bp, Homo sapiens; identical to SEQ ID NO: 45722
  chr8:103876452-103876484
  hyper

SEQ ID NO: 117042 - DNA, 190 bp, Homo sapiens
  chr8:104033103-104033293
  hyper
aacactggaagaagcggaaaaccccacccactctggaacaacagcgatcagccccgaatatagggtccccttgccgccccgtagcctcctagtcccgcccctctcccaaggcccggcagtggcagcggctgcggctgcgcagtggcgcgggcgtaggcggagcagcgcgcgccgcggtcagctgactgct

SEQ ID NO: 117043 - DNA, 818 bp, Homo sapiens
  chr8:104152743-104153561
  hyper
cgggtccgagcgcctcgggagccccagccctcctccggctgcggggccgctgctcctgctcccgggccgtcacggagccctgagggagggggcgggcgagcgggggccttggggcggccagggcgctgggagggaggactgggcggtggggaccggaggggagggagggccttggaggcggagaggagggacgggctgggagagggcccggactaggggcggcgggcaccgcaggagctccgcgcggctgcagcgcgggcgggagcggggacgcgatgtcgccgccgccgcctccttgcgggccggggctgcgcctccggggctgagccgccgccagagccgacagccgagcagccgctgggcgctcccgcggcgcaggaggatgggctgcggcgggagccgggcggatgccatcgagccccgctactacgagagctggacccgggagacagaatccacctggctcacctacaccgactcggacgcgccgcccagcgccgccgccccggacagcggccccgaagcgggcggcctgcactcgggtaagtggccgggcccctgcagaccctcgcccgcccgctaccccgggcgccttggcccgggcactgagagaggagccggttccctgaggaattgatggcgcggcgggggtggctgggaggaagcagaggcaggacctgcccactgatcagtggacagatgcaagcccagggagtggggtcgaccagagccccttaccgaaggctgcgccgatgccccagcttccagcagcccaatgctctttggccttgtccaaagcttgctcgctggtcgggaga

SEQ ID NO: 117044 - DNA, 327 bp, Homo sapiens
  chr8:104310698-104311025
  hyper
aagcaaattggctccgtttaaggattcttgactcctgaaatccgcaaggaagtgggttcttttagagccagcgccaagagcttcaaaaaatccttctaaggtgaacccctccggacccggatagcgagatggggctcagccttgcgcctcgggggtcgtaacagacggcaaggtggaggtggcttcccggccccgcagccggacctcggcaccccgagcccgttcaccggggccgggtcctggcgggccgcggagtgaggccgggcggcgcagcgcaggcggtgcccgggcgcagggccagtcccgccgccgccgccgccgccgccg

SEQ ID NO: 117045 - DNA, 24 bp, Homo sapiens
  chr8:104311076-104311100
  hyper
cgcgggatcgctcagctctcgctc

SEQ ID NO: 117046 - DNA, 201 bp, Homo sapiens; identical to SEQ ID NO: 45727
  chr8:104311337-104311538
  hyper

SEQ ID NO: 117047 - DNA, 30 bp, Homo sapiens
  chr8:104383583-104383613
  hyper
gggtctgcgcagccccgcgggggtcctgac

SEQ ID NO: 117048 - DNA, 80 bp, Homo sapiens; identical to SEQ ID NO: 45728
  chr8:104427305-104427385
  hyper

SEQ ID NO: 117049 - DNA, 30 bp, Homo sapiens; identical to SEQ ID NO: 45729
  chr8:104427702-104427732
  hyper

SEQ ID NO: 117050 - DNA, 2953 bp, Homo sapiens
  chr8:104510980-104513933
  hyper
attgcttgcccagggcgcctggaagagctggcgagcccgcccagctctgttcacccggccccgccccgccccctccgggagggctctccgggcggcgcccagccccgagcagagcaaaggacggcggcggccacctccgttctccggccgctggtttctcgtctttcctcgtcctttcattgaacccatctccgtgcttcgaaaatctgactctaacccgatctcttcgcgtctccgcctcttctttctagagtgagcgccaaaaagggcctgacagacagaagcctttggccccagcaccggcccagcccgtctctagacgattcttgctcctttcaccctcacagcctccagtggtcgcttcatcttcgcaccctcccggccaaccctaactctcctcgtctctcctcgcgctgtctcgcgtcctcccctcaggatccttccgcacattctcagcgtccagcgcggtttcccacaacttcctcacgccccgctcccctcgccctgtccccgccctcgacaccacctgcgttccccactcgctccaacctccctcccccgctatccccacttgtgggcctccagctctctgcccctttcctggcccccatccctgacaccccagggacccttcctccctcctcacgttctccctccttccaggatcccgccccgacacttcggggccctcccgctacgcgcactctttctcctcaggtcctgacacctgggcgccccctccctgtcacccaccttcagctccagccctgactctcgggcgccttgccacccttacgctccccgccccgccccggtccctcgggcgcccccactcgccgcctctacctccctacctgctacacctggcacccctgcccccacccctgctcatactcttcccccgcccccgacacctcgggcgccccctcacacgctcctattctccacacttccgtccccgaaaactcgggcgccctctcccttcacgctcagtctctcctccctccccgcccggccccggacccagcctggagatcgcgctcgggaggggcggctgccgcccgcggggcgcccgcggtgcccgggcctgggcagcgaggaggtgacgccgcccccgcgggatgagcccgggaggcggaggggcggaggaggtgctggcggcggcactgagcggcggcggcgcagggcgcgcgggccttccgcgccgactccatcgacccaaggggcggcggcggtggcggcggctgagcgaccctgggccgggcgcgtgatgaggaggggccggcgccagaccccgctgcacgtcggagctcgcctggatccgggcgttggcagccgaagggccctggccccgggactctccgccgctagcccccgtcatatcttctccgctttcgcttctccactctagccgggggtggggtgggtggggttggggtctccgcgggggtttccggccccgcggcccgctcccgggtgtgcctggaggagttctccctctgtggcgcgcgggagccctgtgatgcgtcagccggcgggacggatgagttgcttctccgggaaaccgtcctcgcttcctcacgaccctctcggctcccgcctgggtgcccctcgggccggcagtactccgcctccgggcgctcgaagcgagttccccgggggcttgttcgcaggcaccccttcccctccgaggcggcgcgcgcgctcccggccctgaccgcggccggacacactcgcgccccggtccgcctgtcgccctcccgcctgctccctccagtcaccccacccttagctgtccccgccaccttactccaccaccctcccccgcctctccgcgcactccgcgtcccggcctccagttcccctttcccttgaaccgctcacttcacagcccttcgcccccgggaagaagaaacatttcccgaagcgcactcctcagccctccttccccacgcgctcgccctcccctccccctgcttttcttgggggaggggggctgtcgccttggattgaaggccattgatttgtatgtatttgtcccagcgctggaggctgccccagccgccgcgccggtgccgccgctgccagtggagttgcctccccgcttccctagggtggttcggctccaccaaacatgtcggctcctgtcgggccccggggccgcctggctcccatcccggcggcctctcagccgcctctgcagcccgagatgcctgacctcagccacctcacggaggaggagaggaaaatcatcctggccgtcatggataggcagaagaaagaagaggagaaggagcagtccgtgctcaagtaaggacctggctccatattcccgcctctctccctgccctccgccccctcgcccactgccctgcggccgcctgcgcgccccagttcgccgccctccctcccgctggcggcgcccaggccacgagggctgcggccagcgccggccgcccgggctgttttaggggtgtctgagagcaggggtgtgtgtcggggagggagggcgccaaggccggctgaggtgagggtggcgagccttaggcggtgtgattttccttggcgcctttccggatttcctcgctggtcatcttggctccggggccccagcgggactggggctgaacccaggctctgtgcgtaccctctcctttcccgccgcgctgaggcagtgactggggcacagaatccaatatggccgtgcacaggtgctccctggacggacccgggcgaaggcgcgctggcaggggatgcggacgccaccctggtcccacgcctccgcggggcggctctaccagcaacgcgggacagagcagggctgcccacagtggctgcgagcagcgggcggcggcgcgggctaggggcctaagctctgtcgcggtcgggtgggtgtgcgtccgccgccatcttccagcccctccccctcggcgagtgctaacaccctgcactc

SEQ ID NO: 117051 - DNA, 138 bp, Homo sapiens; identical to SEQ ID NO: 6521
  chr8:105235363-105235501
  hyper

SEQ ID NO: 117052 - DNA, 160 bp, Homo sapiens; identical to SEQ ID NO: 6522
  chr8:105235643-105235803
  hyper

SEQ ID NO: 117053 - DNA, 329 bp, Homo sapiens; identical to SEQ ID NO: 6523
  chr8:105235863-105236192
  hyper

SEQ ID NO: 117054 - DNA, 14 bp, Homo sapiens
  chr8:105478765-105478779
  hyper
cacccagctcctcg

SEQ ID NO: 117055 - DNA, 50 bp, Homo sapiens
  chr8:105479247-105479297
  hyper
cgacagcccccgagctctgcctcaggctgcaaatccggagcccggcggcc

SEQ ID NO: 117056 - DNA, 1749 bp, Homo sapiens
  chr8:105600478-105602227
  hyper
aggaccctgcacgcccggattcggcagagcccttgcccccgaggtggagtggggagaagtcagcgggaagccttttcagggaatcgagtaggacaagggctggcgcggtgggaatctcgccggtgagagaacttcctaaccccgggttgagggggcggggggaaggaccgtcccggcagcggcgggggcgagctcctctgctttctcacagtcaagcatctttgtgtgtggattgtgccaggctacgggtcctggagcaactggccgcgggggccctcgaacccaggtcgggaagtccgcccgccaccccctcgctccgccggggccctcccggccgggccccccagcccctctccaccacccgagggtctggaggtggacgagtggagaaaagcatctccgtgtggggacacccgttccgccacatccaccccctcaccggtctttgtcccgccggtagccagggtctccgcgggagtctccaggggaacccccgtcctggaggcctcggggcccgggtcgcctcagctttgttcggtcagcggggcgcggggacgcggacacttaccgtacaccccagcgaggaaaagcaagagcaacgcagacctccaccgcggagactcttttgtgctccagcgacaggccataaccacagcagatggagagagagaggaggagacggaggaggagggaggagaagctggaggtagacgacgccgacgccgccgccgccgccgccgccgccgccgagccaccggctgctccctgcgctctccgcggctgcgggagggggaagggaggggccgccgccgcccgcgcgcgctccctcctccctcctccctccggctcgcctgctcccaccccgggcggtgcgagagccccacgcggggcggccctcctgggggcaagggcaaggagctcgcgcgccagcgcgagacgagagggtggcggacgccggactccggcctcgcgccgctcgggctagccggcgccgccactcgccagactgagcgcgcgcccatccgtgcgatcggcaatcccctggcccgcctgcctcggttccctccccgcgctccgctggactttccaagtttcgggccgatttccacgcgacgggagcccaaggagcaaggcagcgccaatcgatgacagagcgtgcgaacgccggctgctggatgcccaggggctggagcgcggggtgtgtggaggagcacggtcgctgtccgagggctgggctctggcccagcgggtggggggagggggggtgggataccagctgggaggctgaaggtggttccgtgttgggggaggcgtggatggtctgaagctgacaacttgggagttccttcctctatccggtacccccaagtctccacttgctgtcggcgcggagcttcgagtgggggtgggctcaagttagtgcggccaacctggcagctggtcggtcaaggggcagtgtggactcccacgctcaaggtgcccggaatgagtcgggcaaggcttgtgcagagcccctccagtctggcgtggaagcgccaagaggtcatttgacatctcacgctgggtcgggtgcagctgggccaggatgttcggcagggctggagccgactttcagggtagatatattgaaaggaggattcgcccatcacgctgcagtttccctaaagctcttttctcactcccagcaaatgggagtcctcctttacttagatccccagaacacttttctaagtacgtctgtagtgacgc

SEQ ID NO: 117057 - DNA, 681 bp, Homo sapiens
  chr8:106330392-106331073
  hyper
ctggcagctgcccagcgttgacgcggtgacaactgcagaaggtggccctcctccaagccgtccccacgcctcccctccaactcccacccacccctgcccccatcccccaccaccgcctggatcccccgcacttcgcccgaccaaggccggggccgtagtttgcatccggactggatttggatgcagccaatcctcctttggctgatggaatagtctcccctccccacagccccggcgcgcccctccctcgcgcgcctcgccgcctcccgccgcagaacaggagctgcgcggcccggagcggcggcggcggcgccggagtatccgtcccgcacgccggggcgaggggcgagcgagcgcgctcctcctcccgcgccctgcgcccccgcgctccccctctcctcgctgctcgctctcccgtccctccctccttctcttccttctttccgtgttatttttctcttctctttccccttttctctctccctgaccgttcgcttgtacattcccattctccccccgtcgctctcctctccccctcccctcctcactgtcacactctctgtgcccccgtctctcttctctcatttgcttgctcatctccgaacgtgaatccgcggctcccggaggagcccagcgcccggagcacctggagtccggccggcggcgggccgagcctggcca

SEQ ID NO: 117058 - DNA, 173 bp, Homo sapiens; identical to SEQ ID NO: 6526
  chr8:106331083-106331256
  hyper

SEQ ID NO: 117059 - DNA, 530 bp, Homo sapiens; identical to SEQ ID NO: 6527
  chr8:106331443-106331973
  hyper

SEQ ID NO: 117060 - DNA, 215 bp, Homo sapiens; identical to SEQ ID NO: 45739
  chr8:106332003-106332218
  hyper

SEQ ID NO: 117061 - DNA, 30 bp, Homo sapiens; identical to SEQ ID NO: 6529
  chr8:106490682-106490712
  hyper

SEQ ID NO: 117062 - DNA, 2370 bp, Homo sapiens
  chr8:107281805-107284175
  hyper
gaacccccttcagcccgctccaagctgccttgggtccctttctaggctgtcagacttcgccttcctttcctccttgtttttcccagcaaccaaagcatctgaagaacatttttttcctccgtaaatctgaacaaatttccttgcagctttccttgcagaagcttttttatcgctttaacaaaactttcctctgcttctctagggagagcctagtattagagctgcccgacaggcgggaccccgaaatcggggcagctctggcttagtccaggctattcgagtgggcgcctgaactggaggcgccgtctccaccgggatggggatcctagtgcaggcagacgcctggcaggactcggcgagctggggtccccaccgcggtagccagagcagaaacccgaaccccagccagaggggccgcgcgcggggaggggtgcgcgctaagccagcgtggcttccgcaggagctatttttagcggtgcgtgcctccccccgcccccggcgtggtagcctccggctcgcggcgccccacggctcctctcagtctcccccgccgctgccggctcttggtagcttccacgcgggcaggtccggaaactgagcatgtctgcaagcgctcagcggcgccggcagcagcggggctagagctgggctgcgtcaggctgagcccattcacctcgcggccacaggagctcagcgccggcgccgcgccgcccagccccgccgagaggggcgcactcgccgccgcggggcccgccgccgctcaccgcagccccctcctggcgacccgcaagtaagtttgtgaggctgctgggcgttagggcgagggcttggcgcccgggggagtccaggagggatagcgagaggcgcggctggcgcccgggagagccggctggcctctgccccctgtgcctggcgcctctccgagccacttagccaatttgaaagcgggtggccattgggatgctcgagcggggacgacgggcagagcaggagggcagaactagctccagcgggggcccagagggcggacttgggaagaaggaaagaccgcgcggcgagggaggagaccgggcggcgagggaggagaccgggcggggaggctgggtttggggcgcgggagcccggccagggacagccgcagaaggaaagtgggggtgtcgccgggggatagagtgggagcagcgtgagagcagtgttgggggcgcagagtggagggcaagcgtgtcttgaacagaacggcaggaggatgggtggaaagtggggcgcgtggaaagcggatttggacgagagcaaaggacgccggtggaagggacagtgggctccggaggggcgagtggattcggataatttggggaatcagtaaaaggctagggggcacatcatgatggagtcagcctggaatctgtctcccgctagagtacccgaggccacatgttgggaactggctggggaaaggatggatgtagaaagtggcctggagggccgactggaaaatcgctgagggatttgggtgaagagggggggagctgtgcagtatcgggcggaggaactgggctgctggtagggcctgaaaggttcaggagagggttggaggcttccccgtgccgccccttgaatagtgatttagtactgttatctgaggttcactttcacccctggctcctcctccgtctactacccggcttggacgcacctcggctcgctgtaggcgagctttaggagatttaaatagacattaggcagtggggaaggtagtcgtttacggggggagctgctcgggcttccgttcagtggttcccggcacgctcagggtgcagtgtagggtctgaatgtgtgtattgcgggggtagggggagtggtgtcagttctaggccacaggaattcgtggtctggccccagaggtgcggtgtttttggccgggaagtcaggcagaagtctgcagcgtgcaactcgcagcggggcgtgtgtgtgcgtgtgtgcgcgcgcgtgtgcatgtttccggcccggggtcgcgtgtgtggctgcagcctgtctccgtgacaagaagatccagggatctacgggcggcacggggaagggattaaggggaacatacttccctacgtcttttctgcctccttttcccagggtagcattctttgcttatccaatgatgcctctttctaacctctccctctccacttacatcccaaacctgatgcgggtcttctctgattcggcactctaaggaggactcagccgccggctgcgaccaccgtggactccctctatggaagggaatcctgggagtcccggccgtcagaggggttcccaaatccaaagggtccatctccaaggcgtcactccaggggtccgcggttcactttgctg

SEQ ID NO: 117063 - DNA, 30 bp, Homo sapiens
  chr8:107526808-107526838
  hyper
tggagctcagtgccacgtcctttgctcatt

SEQ ID NO: 117064 - DNA, 1732 bp, Homo sapiens; identical to SEQ ID NO: 6531
  chr8:107669365-107671097
  hyper

SEQ ID NO: 117065 - DNA, 240 bp, Homo sapiens; identical to SEQ ID NO: 45743
  chr8:108509537-108509777
  hyper

SEQ ID NO: 117066 - DNA, 1791 bp, Homo sapiens
  chr8:109093645-109095436
  hyper
cattcatgaacccggcgacaaattctaattgcgcaaaagtccaaagtgccgaatgaaatagacagctctcaccaggtccctgggaaggggctgctgcgcgcccttcctgcgcgggtaattcgatgtgcgtgtggtgagtggtttatgtttaaatccacccagaaaattgaatcgtgtctagccgcccttcttctaaaatgcagttggattagttgcatctccagcggactccgagacagaaatacgcactaaatctgcaggaaagcgagttccccgaaacctttctggaggcttccacccgccttctccgctacgcacaagtgatggagagggagggagcagttaaaaagccgcaagtgaatttcattgagaacagaagcctccaccggtgtggctgcttttgcaaagcaaatggagagagcgaagtggggcctgttttaaaaacaaacctctggaggcgaggactccccagaaaaccagcgcgggaattgctgcttaattcagaaagttcccatctcgtcgcagtttccagaaaaaagagatctatgttggcctttttctggaaagggaggtcctccccctcgacttggtacccctcccaagctccggaatacagacacacgcttgggtacacccacacaccacacacacactatgctaggtcaagtccgaagagatctgaggccgggtttggggcgcacgtggatggggaagataaaacaaatgagctacagggaagatggttaggaggacagagagaagaacaacgacgacaaaaaaaaaatgcatgtcagataagaaatacgtcctaaagagacaagtttagatgaggaggtggggcggcgaacatgagtgcggaccgcacgacttagccctgagcgcccgattggcgcccggctcgccgagctcccagcgcgtctcgctccggctccccgcgcctccagggtacagaaaacagagtgttttgtagagctccagggtcctaaaggtggggactggggacccgcaaaagctggggtggagagcacagccctgaccatctgagcccccggagccagggcgtgagtgagcgcctccacacgccacccctgaagcccaccacgcacctttggcagagagggacccacctcgcttactgcgtctccatcggttgccttggcagtggctgtaatccatgcagttcagaatgatgagggcaaaggagaaaaggcgaaactgcatctgggcggtcgggcgggggagagacgcctctcaaagtctaggaactggagggttcgcccaaagagccggcgccggccgcgctgctggggaggactcagagggagactcgccactcacccccgggccgcaccggtcagttcagcgcgatcagcatctctccgccacgaacctgagagacaagaagcgaaaacagggtgtgtgggggatggagagagccccggggaggcagctgcgccttcgcacgtcccaatttaaagaagagagggaaggaggaagcgaacccactgcctagcacgagccgcggagcggcttaatccagagcgggcagctgcggacgagttggagaggaaggtgattataatcagtgaattagcaacctctgccgagccctaagctccgacccagcggcataatgcgttgtgccggcgctccggggaaaggaaagaactctaaaggcactgagagcgcagggctaaaagaacgctcttaggccatttggagtccacggcggtgtacccaagcgccgcagctgcggctgccttggtgtgggttgcctaccgtgcgcacgtc

SEQ ID NO: 117067 - DNA, 468 bp, Homo sapiens; identical to SEQ ID NO: 6535
  chr8:109095505-109095973
  hyper

SEQ ID NO: 117068 - DNA, 30 bp, Homo sapiens; identical to SEQ ID NO: 45746
  chr8:109260512-109260542
  hyper

SEQ ID NO: 117069 - DNA, 167 bp, Homo sapiens
  chr8:109260967-109261134
  hyper
tttattggtagcgccgacaaacgaacagacagatcctgtactgcgcatgtgctgtggtaaaactggcctaaagaaaggggcggggtttaccctggagagcagaggacaacgacgcatgcgcgcgggttgtcccaccctttgcgttagggcgcgagtgacggaaacag

SEQ ID NO: 117070 - DNA, 30 bp, Homo sapiens
  chr8:109456086-109456116
  hyper
ccttggcccggacgcgtactctgcagcgtt

SEQ ID NO: 117071 - DNA, 565 bp, Homo sapiens
  chr8:109799174-109799739
  hyper
tgctagcagcacagtcgatttcctttgcagctccctaatccggggtttccattctcagtggagaatggataatcccaggggaccagctaaagactcttttcttccgtcctctccctctttttcctctgatctgcttaaaagcccagttaacgacattgcaccttaaagcgaggggacacgcactttccctcgtccatctgtcatcaattaaaagcattaatatttgctttaaactgacacaggcaaggctgatctcggggaggcgacctctggatgcgccctgtgcgagcaaagccgggagagcgagccccaagcacctggcagcggtgcccccagcaggcgccgaggaatccggctatccatttctggtgaactctgcgcccactgaggcattcgaggtacggatgtgtccgcctagtactcggagacgaaggagagagagcggggatatgcgctccagctctgctaggctccagggctctcacccttgcattcaaagcctccaccccatcccactccccgccactcaccttctgcttcggccacccggtgcggctccagcacc

SEQ ID NO: 117072 - DNA, 78 bp, Homo sapiens; identical to SEQ ID NO: 6537
  chr8:109799888-109799966
  hyper

SEQ ID NO: 117073 - DNA, 30 bp, Homo sapiens; identical to SEQ ID NO: 45750
  chr8:110345841-110345871
  hyper

SEQ ID NO: 117074 - DNA, 88 bp, Homo sapiens
  chr8:110346425-110346513
  hyper
ctcctggtacttaacgcgcgcgcgacggcaaggtctgaactctgttacccagaggccctagcaaccaggaggcggcccgcgctggtta

SEQ ID NO: 117075 - DNA, 313 bp, Homo sapiens
  chr8:110552598-110552911
  hyper
ccagcaacttagagcgtttcacgtcacgccgggcgccaggcgtcggcttgtataacctgaaaacgctcctgtttttctcatctgtgcagtgggtatgatttttttttcatcaacaaatttcacgtgggtaatctgaaatgaaaccacttaagttatgaaactctttccttttgagttattctggagaccttactccgccttcggaaccgccccagtggtgtcacatacttgagggcctgactctcggttgccagacatggcacagaatgttcgattttactaccagctctcacactccgcttctgtttcccct

SEQ ID NO: 117076 - DNA, 707 bp, Homo sapiens
  chr8:110703596-110704303
  hyper
aggaggaggcacctacgtgcgcccgggagaccgggccccggctgggccgggtgccggtgcggacgggaccccgcgtcgctgctggtttgcgctcaggcccggggagccgggcccggcccgctccgcccgccttagcccggcttggacacgtggtgccgcggaatcccttgcgctccggtgccctcggcccctcggcctctgcagccagccgggcggctgctggggctgaggacaaaatggagagaagggcgggggaccaaagggcaggcaccgctgggtggggcgcagcggcgtgagcacgctgagggccgcgcgccgggggcgccaggattctgctccctgggctcgctgcctgaaggaccggttcctgttgccagggccctggcagattatgctgcaggatctgtttcttgaagaagccgctctcagcgtgggtggcgcgctgcagagactctgggctcctgccagatgagggagccccggcggaggccaggagggcttgcgttgcacaatctggagcggatccccgggggcggctgagggcctgggaccccagtctccctcgaggtcttcactcacccctctgctaaggagcacccttgtcctcacgctggagaggaagagccctgaacactgacttcagcgtgaacctaaggtgccctttaggacagtctccctgggaaaatttatctcgcgaccacagcctg

SEQ ID NO: 117077 - DNA, 171 bp, Homo sapiens; identical to SEQ ID NO: 6540
  chr8:110986092-110986263
  hyper

SEQ ID NO: 117078 - DNA, 1067 bp, Homo sapiens
  chr8:110986328-110987395
  hyper
cggggttggcatcgtcgcaaagctccagagggctgggcacggcggccagggccccggggcggcggtaggaagccaccaccacggccagcttgccaaggcgcgtgtgcgggaagcaggacagcgcctgctgcgagagcacgaagcggctgccgcccacgttgaccgtgaagcagtccccgagcgccaagggctccccttcaccctcgctgcagaagacactagagtccagggaggtcagggagccgctgtccagcggcgagtccagcagcgctctgccgctggaaggcatctctaacccagtcgccgcggcctgagggcgccacaaagttggggacacgccggaagctttggtcccgcgagggcggtggcacggcccctggtggcggccgggattccccgggctcccgaaggggttacctctccttggcgcaccctctccacccgctgtgcgccttcctcctcctgccgctagggagccgggagtgcgcggaagcagcgcacaagtggcagaaagaggagacagggagcagaggaagggtcgcgctaagagagaggatcaggtgaggtccaagcccgacacagtccctgtgcacactgccggtcgccctggcccttcccaaacgttgtcaccccgcctcccaacttcgcaattgcgattcccagcccaggaggtgtacagattgaatgactcgctacttggtgggtggaggggttggggaagggaggaaggagggagatgtggggcggaggaggaggaagaggagagaagatgactcttagctgaacgcaagcaagcaagcaagcaagggggatggcgagactcactcctgcccgcaggagaccaaaacaaaaagttcagaaagcaaaggaagtggtaaccgggtcccttccaacttgagaatttatattcctcccttttcttttactgctgcttcataggcctcccccggggtgttcgctgggggtgtgagcaggtgggggagggttctctgggtgagggggccgcaccattttctcccaattcactctcattctagtctgatgatcactgacgctccattttcttc

SEQ ID NO: 117079 - DNA, 669 bp, Homo sapiens
  chr8:110987602-110988271
  hyper
tgttctgagcacagcggagctctcattttagaaggaaaggcaaaaagacaaggaatagaacaagcgtgggctggggcaggaatttaaatagtaacgacggcctccctcggtaaagggagaagccgaggccagcgcccaggtgagactagaagtgtacccacggggcccctggaagctgcgctccagccaacctgttggactcggggtgaggaggtgggggtgggagggaagagcaagtgactcacctgcagctcccggcacatctggtctgcgcacaaccggcgccgcaggtaacgtactcttcttttgatcctcttagtctacacgtgaggtctgactcgaccggtccaggagggaaactgtgttccagctgagctctacccagcgcctgctgccttgccttgccccgcctccacctccctccgggctcctggcccctgcgcttacgctaagcgtgtccgccccgcccgctctagctctgagagccactcgcccagtgcttccagcaccagcagaggggagtggcaggatctaagggagggaggtgagacggcgggggtggaggcggggggtagtgaggtgcccggtgacactcaatattacattcatcctgaatacacttgcagaattactgcatttgattcccgtttccccggatctgtgcttttg

SEQ ID NO: 117080 - DNA, 5 bp, Homo sapiens
  chr8:114444388-114444393
  hyper
tgatt

SEQ ID NO: 117081 - DNA, 757 bp, Homo sapiens; identical to SEQ ID NO: 45759
  chr8:114444481-114445238
  hyper

SEQ ID NO: 117082 - DNA, 414 bp, Homo sapiens
  chr8:114445555-114445969
  hyper
gtgggtgtcagtccccgggacacacgcggggctgaaagctccggacatggccacctgggcgggcgtctgtaaaaggtgctaatgagtgcctctggcagctcttccccctcataagacacccgcgcccctctccagtagcaactaactgcgggagaggatgcgatttccacttttccaaaagacctctgtggcaggagtagtatctccttggagtctcagagcacgcagaaacgtggatccttcgcgaagtcgctctggcgagaatccctggaaagacgctctggcgtggggtgcgcgacgccgcacccggtctcccacctgctgcctacccagagatctgtgccttcgcggtaccttcgctgcacggtgtgtgttcccctgggatccactgacaagcagcgtgggaaaacatcc

SEQ ID NO: 117083 - DNA, 181 bp, Homo sapiens; identical to SEQ ID NO: 45761
  chr8:114446353-114446534
  hyper

SEQ ID NO: 117084 - DNA, 945 bp, Homo sapiens
  chr8:114446925-114447870
  hyper
tcaatatctccaaagctaaaccgattatatcagtccaaagtaaattaacgcgcctttcctttctatcggcgcatctcattcggaaaatacggtaggtgcgggcagccggggctctaattgcaggcggcgcggatcagcgttagtcaggctgtaatgctcgccccgcttcggagacttccctccccctcatctgcccccgaatgtgttttggctcaacaggtatcacatgaaaactcgcacttaaaccctggtcatcttctcacaggagccacccttacatttttctgccagggctgctgctggctattcgcgcctcccccacgcgaagcgcgcgtctagcaggcagccccagggccatccattaaccaccaactcccagtggcaggcgaactaagcataaatgtgtggctcctcacccgtcgagccagcgacaaagaaaccttgtaagcaacctgagccgtgctttgtacatttggcagtgtagttgtgccacttaggacaagcttttcggctcagagctgctctgaggccccagagagaaaagaaaaatcaagcttcaaggagcaggttgggattacaaggcagttgctgccacagagaccggggcgactgacttcctggcattttgggatgtaaattaaaattctagacatgccacccatcattggttatagtagagggaaaggtaacctctccagctccctcctcccaaaacatgaattatcatttccactgaatgcaaatgagctgccttccgtggggggacagccagctgcaagctggacaataaactgtttcatagagacgcggcccgattgcagttcagagaggcactcctttacaaaggaagaagcgtccagtttgtgttgacagccctggcgcgcctgggccaaaacagcaccccctttcccgcgatcccccgcccccccgcgacacacagacacc

SEQ ID NO: 117085 - DNA, 1778 bp, Homo sapiens
  chr8:114448650-114450428
  hyper
ccaactcacgtattcgtttgagcatactgcaagaatatttattgagcacaagctcaatcaccgcattgaacgccaaatctggcaagcaaaatgcatttcctatctgagggggggagaacgagctgtgaatcaactcctttagtattatcagattattttatcggtgcaaattgcaaagtaagctgccagcctctctccatctacaagtcagcccacctccatccaaagcggaggggacccccaaagcagacctacctttcacacaagacaccgtcaataaaaagacgaggttccaaaacgtaaatccacttttaatccccattttcttcatcaggatgaagtctaggcggccacatttagcgcatcttcgcttgccaggctcccagggtttggattcctttgctcggctttcccctttgcggatccctttcatattattcgcgagctcctaattcctgctcctcagcccggcgcagtggagttgttgctgttgttggtgcgcggtcacagctcggagtgaatggtgtttctgggataccacagcaaccttgacgaggactcaaccatctctccaacgggggcacaaagtctccgctactctggattctgtcttttcttgtgcgttttttcccctccaccaaaatctaccccaattctggctcgttatagcaaccaccagaaaccactagtgagcctcttaaagcccacctctgctctctgataaactccacacaatatttgaaattaaggggcttgctttttttccccgaatagatcaattctgcctgtaaaagcagcccaagaaataatgttagtgagctctccgttgcaggctgcgaatacagaagcatgtcaaaggaatattttaatcggaggatctgtgttgcttttggggaaaccgtgacgataatgaatcgggctccatcgatgcccacgtcgttataatgggacatgtgttactactgtagttgcagtatatttcaggcaggcttctcccatttattatcctgtgatttaattgaaaaaggaaatcacagagaattttctcaataaattctgccttcacacggaaaagaatgtatttgaacacatgtatttacatactcaaataactacgtgtaaacccttcaccgggtttttatgattcgggaaacggatttcatccgtggcctgggcgggggtggggtggggagggaagtcaatgtcgtttcctcaaatagttctccctttcatcctcccaacccccttttcagtttgtgtgtgccgcagttaaactactttatctgtggtagttatctagaacaaacccatttgtcttaattctgaatcggtaccaaatatgtaaataggaggtttctttcaaaacgaaaaatgtatgtatctatacatctggatctgcttcccccatgcaccacgcaagggttaagattgcacaagggaagagttcttgcgccatctactggccgtctccgagccgcccgttcttccttcgcatgtataagggaccctgtttttgccatcccttggtgtcaggggagctgtgtccccgggaccagtatgtcgtgctccttgatttttttcgaccacggtcctggcccaaatctttcaatgaacaagttccttagattaggcaactgattggtgatctgaccttttcgggaatctggtcccctctcagcagtggggagtgccacagcgctagttctgaaacaggatattgctgttgcgtgtggctccatttaactgcctcaggctatcatgggcgtgagcgtctatca

SEQ ID NO: 117086 - DNA, 31 bp, Homo sapiens; identical to SEQ ID NO: 6549
  chr8:115172751-115172782
  hyper

SEQ ID NO: 117087 - DNA, 275 bp, Homo sapiens; identical to SEQ ID NO: 6550
  chr8:116660296-116660571
  hyper

SEQ ID NO: 117088 - DNA, 215 bp, Homo sapiens; identical to SEQ ID NO: 45768
  chr8:116660615-116660830
  hyper

SEQ ID NO: 117089 - DNA, 219 bp, Homo sapiens
  chr8:116680621-116680840
  hyper
tccccgctcgcgatcgcccacattttgcgcgcacacgagcgggcgctgcactcgcgtcgcggcgccccgggcccggccgaggggcgcccgcgccccccgcgccccccgcagcccccggccccgcggcccgctcgggcctcccctccttacctgttgattaatcgtcaagaacaccctcggcagcccgaaagatggtggcgcggcggccaaagccatgaa

SEQ ID NO: 117090 - DNA, 30 bp, Homo sapiens; identical to SEQ ID NO: 6552
  chr8:116681233-116681263
  hyper

SEQ ID NO: 117091 - DNA, 152 bp, Homo sapiens; identical to SEQ ID NO: 45771
  chr8:116681607-116681759
  hyper

SEQ ID NO: 117092 - DNA, 30 bp, Homo sapiens; identical to SEQ ID NO: 45772
  chr8:117209532-117209562
  hyper

SEQ ID NO: 117093 - DNA, 30 bp, Homo sapiens; identical to SEQ ID NO: 45773
  chr8:117624077-117624107
  hyper

SEQ ID NO: 117094 - DNA, 30 bp, Homo sapiens; identical to SEQ ID NO: 45774
  chr8:117630667-117630697
  hyper

SEQ ID NO: 117095 - DNA, 30 bp, Homo sapiens; identical to SEQ ID NO: 45775
  chr8:117647772-117647802
  hyper

SEQ ID NO: 117096 - DNA, 392 bp, Homo sapiens
  chr8:117767859-117768251
  hyper
aactgcgctccccacgtgggccagaggaaaaagaacagcactcacaaggccatctatctgcacttgcttcacggctgaatctcccgagccgcctttgcctttgcctttccctgctgcgccggcggtggagctggaagaggtggcagtagagccggtaccttccttgcgggacgccatctttccaagcagacaggaagaaagagaaacgtgagttaccggaagcggaagtacaagtctcgcgtgacgtcactcgcaggccggcgttcgaggggcggagacggaaggagaagccaaaattgggccccgcctccctcctgttttccagttttaccttctttccaggcggtatcctttgtgcatgcctactgtacattttcgacctctttccgatg

SEQ ID NO: 117097 - DNA, 328 bp, Homo sapiens
  chr8:117778473-117778801
  hyper
agaagctcttgctacgcgcctctaaaacgtaggtaacacgctaaatgtattctcgtaattttcttttaccgtggccccagactgcgcatgtgcgcccccgtgcggaatcgcgcaccccagcggttttccagcgtacgcacaagttccgccctaagggaccgcccctttaagcgcgggcactgcggtggaagcgcgcgctggtctggacatgacgtaaaccaatgggcaggcccggaagacagaggcgtttgcttccgtggccaaaggcgcttcatttccgggtgaaactggcattgagggtactggggcgtgcgtgaggcgtttactg

SEQ ID NO: 117098 - DNA, 1759 bp, Homo sapiens; identical to SEQ ID NO: 6554
  chr8:117858171-117859930
  hyper

SEQ ID NO: 117099 - DNA, 85 bp, Homo sapiens; identical to SEQ ID NO: 6555
  chr8:117861183-117861268
  hyper

SEQ ID NO: 117100 - DNA, 162 bp, Homo sapiens; identical to SEQ ID NO: 6556
  chr8:117862855-117863017
  hyper

SEQ ID NO: 117101 - DNA, 150 bp, Homo sapiens; identical to SEQ ID NO: 6557
  chr8:117864185-117864335
  hyper

SEQ ID NO: 117102 - DNA, 175 bp, Homo sapiens; identical to SEQ ID NO: 6558
  chr8:117864772-117864947
  hyper

SEQ ID NO: 117103 - DNA, 225 bp, Homo sapiens; identical to SEQ ID NO: 6559
  chr8:117866482-117866707
  hyper

SEQ ID NO: 117104 - DNA, 124 bp, Homo sapiens; identical to SEQ ID NO: 6560
  chr8:117868403-117868527
  hyper

SEQ ID NO: 117105 - DNA, 134 bp, Homo sapiens; identical to SEQ ID NO: 6561
  chr8:117868876-117869010
  hyper

SEQ ID NO: 117106 - DNA, 222 bp, Homo sapiens; identical to SEQ ID NO: 6562
  chr8:117869490-117869712
  hyper

SEQ ID NO: 117107 - DNA, 108 bp, Homo sapiens; identical to SEQ ID NO: 6563
  chr8:117870589-117870697
  hyper

SEQ ID NO: 117108 - DNA, 113 bp, Homo sapiens; identical to SEQ ID NO: 6564
  chr8:117874066-117874179
  hyper

SEQ ID NO: 117109 - DNA, 131 bp, Homo sapiens; identical to SEQ ID NO: 6565
  chr8:117875367-117875498
  hyper

SEQ ID NO: 117110 - DNA, 177 bp, Homo sapiens; identical to SEQ ID NO: 6566
  chr8:117878823-117879000
  hyper

SEQ ID NO: 117111 - DNA, 30 bp, Homo sapiens; identical to SEQ ID NO: 45791
  chr8:117886522-117886552
  hyper

SEQ ID NO: 117112 - DNA, 114 bp, Homo sapiens; identical to SEQ ID NO: 6567
  chr8:117886848-117886962
  hyper

SEQ ID NO: 117113 - DNA, 237 bp, Homo sapiens
  chr8:117887066-117887303
  hyper
cggcaggatgtttacggtcaaaatggtacctgtgcgcctgcgcagccagcccaagcccccccctccccccagaaggagcggcgcaggcgcaatgactatttccttttctttggaacccgccctctgtttgtggagtccacaactgagcaagcgcaaaggtgattctcttgcgagggtctttgagagttgcggtgttagccaatagcgtaagatagcgcacgcgcagtgctttccagt

SEQ ID NO: 117114 - DNA, 541 bp, Homo sapiens; identical to SEQ ID NO: 45794
  chr8:117950438-117950979
  hyper

SEQ ID NO: 117115 - DNA, 30 bp, Homo sapiens
  chr8:118057023-118057053
  hyper
aattggttaaaattcggggaatcagatcct

SEQ ID NO: 117116 - DNA, 23 bp, Homo sapiens
  chr8:118532845-118532868
  hyper
ctacttaacccgtccgtcctttc

SEQ ID NO: 117117 - DNA, 208 bp, Homo sapiens; identical to SEQ ID NO: 6570
  chr8:119123497-119123705
  hyper

SEQ ID NO: 117118 - DNA, 30 bp, Homo sapiens
  chr8:119124093-119124123
  hyper
ttccattcccgacacgacagcgctgacctc

SEQ ID NO: 117119 - DNA, 30 bp, Homo sapiens; identical to SEQ ID NO: 45797
  chr8:119124447-119124477
  hyper

SEQ ID NO: 117120 - DNA, 30 bp, Homo sapiens; identical to SEQ ID NO: 6571
  chr8:119634587-119634617
  hyper

SEQ ID NO: 117121 - DNA, 30 bp, Homo sapiens
  chr8:119964233-119964263
  hyper
ttaggaagcttgggcgggagcggtcggggg

SEQ ID NO: 117122 - DNA, 253 bp, Homo sapiens; identical to SEQ ID NO: 6572
  chr8:120220352-120220605
  hyper

SEQ ID NO: 117123 - DNA, 340 bp, Homo sapiens; identical to SEQ ID NO: 45800
  chr8:120220895-120221235
  hyper

SEQ ID NO: 117124 - DNA, 535 bp, Homo sapiens
  chr8:120428387-120428922
  hyper
ccaggaggaaacgggcgtttccttcccacgcgctcgagcgagccctgggtcctggcctcggaactccacccagcccctccccaccctctgggaaaagccagtcgccacacacaggcacacgcaggccccggcgccgcgccctaaggagagcagcacccacagccaattgccatggcaaccccggggttcgttccacttccccacccagccgatctcccccctcctccctgcactgcagccaaccggcttgtgcgcgtcccaggagcgcgctataaaacctgtgctgggcgtgatcggcaagcaccggaccagggggaaggcgagcagtgccaatctacagcgaagaaagtctcgtttggtaaaagcgagaggggaaagcctgagcatgcagagtgtgcagagcacgagcttttgtctccgaaagcagtgcctttgcctgaccttcctgcttctccatctcctgggacaggtaagtggcacacccttaagatgcccccaagttactttgcccgccttggtggcccccatttggtca

SEQ ID NO: 117125 - DNA, 199 bp, Homo sapiens
  chr8:120428985-120429184
  hyper
cgctgcgactcagcgctgccctccccagtgcccgggccggtgccctgcgacgccgccgacctgcgcccccggggtgcgcgcggtgctggacggctgctcatgctgtctggtgtgtgcccgccagcgtggcgagagctgctcagatctggagccatgcgacgagagcagtggcctctactgtgatcgcagcgcggacccc

SEQ ID NO: 117126 - DNA, 30 bp, Homo sapiens
  chr8:120651053-120651083
  hyper
ttctctttgccttcacggagtgcactgctt

SEQ ID NO: 117127 - DNA, 112 bp, Homo sapiens
  chr8:120651301-120651413
  hyper
ggtttgttacattgccgtggcccataacagtgcatgttcattttcctttcctcacaaaaacatggtttgtcaaaaagaaaccaaatgcatttcatccgataaaaatgaaaac

SEQ ID NO: 117128 - DNA, 176 bp, Homo sapiens; identical to SEQ ID NO: 45803
  chr8:120844817-120844993
  hyper

SEQ ID NO: 117129 - DNA, 30 bp, Homo sapiens; identical to SEQ ID NO: 45804
  chr8:120845214-120845244
  hyper

SEQ ID NO: 117130 - DNA, 30 bp, Homo sapiens
  chr8:120867611-120867641
  hyper
tcctgacttgctcccgctgacacatgcctc

SEQ ID NO: 117131 - DNA, 30 bp, Homo sapiens
  chr8:120867897-120867927
  hyper
cagcaggcagaagtcgccggctgcagcgcc

SEQ ID NO: 117132 - DNA, 366 bp, Homo sapiens
  chr8:120885800-120886166
  hyper
cagctcagtagcagcgccccgcccagatgtttatattttcctccatcggccccgccccccgaccatgaggggctctagccacgcccccaagctcaagtttctggggccggactagcccagcgcgtctgcctacccatagggattccctctccagccaatccagtcagagcagcggagctgccccgaacaaagatggcgcgggaagcgtctgtgagggcagactgatccgagcacccaaaccctcggcggacagcggagccagtggtagccgcacggccctaaaaccatggaggagggcggcagcactggcagtgctggcagtgacagcagcaccagcgggagtggcggggcgcagcaaagggagct

SEQ ID NO: 117133 - DNA, 30 bp, Homo sapiens
  chr8:120886435-120886465
  hyper
ggtggtgcgcgctgcgccctagcctggctg

SEQ ID NO: 117134 - DNA, 30 bp, Homo sapiens
  chr8:120886830-120886860
  hyper
ggtccgcaagggggcgtggaggcaccttgt

SEQ ID NO: 117135 - DNA, 30 bp, Homo sapiens; identical to SEQ ID NO: 45806
  chr8:121136147-121136177
  hyper

SEQ ID NO: 117136 - DNA, 1305 bp, Homo sapiens
  chr8:121136687-121137992
  hyper
aaaccagaatctctgcgggtggggaatcagcaggttatgaggtacaaccacacgaaattgcctacattcgtctttttgtaacctacagaaatgtccatttcgatacctccagctgattcccctgcaccttaaagtttgagcatcgctgctttggcgttttagagcccttggacttgttcacaagaggaagagggagaagaggaggctcgaagggggcctttatagtggatacctgtttcactcggagctcagggtctttgacgcgggaaggcaaagtctgtcttttggaaatggggaagtgggcacacagcacctgagaacaggagggctcgagacctcccaaagagagcagggggcctggtttgggagcttgcagtagcttctgccccagtggaagggaaagagcctggctcgctctcggcgcgccacatccggctgccgcgcgcacctggggggaccgccaggttcggggtaggcgagcgcgtgagcggcacggggctggcttctccacatctccggtagggcggggatgggggagaggaggaggagagaaagtgggggcgttatgggcttaggcctgcctcccacctccccacctcccgcctccgcggccaccctccgctctataattggctgccggcgggccttcctttcctcttatctgatcctgggctcccagctggagaggcggaggcagctccagggggctggaagtggaagcgcagcggcagaaggagagggagagagaaagagagagaggctaattaaaaaaggatactccgagggaagagagcaagggcggtgcgccgccaaggaccaactagcggcggagcttcgatcttgcctaggcgcggagagctcccaacctgggctggaaccttgcccagcacaggtcagttcgtctttctctgctcttctttggctcggcttcgaagtccattcatgagcaaggaaaagtggaggcagcgagccacctgcagacgcaatgcagttccatggactttcttttcacgcgcgcgcccagaatggactggggacctttgggacgggatgggacgggtacacctggatgccttttcgcggggttcacggtgtagggagattagaggcattgggtgatgagagcgcagggatagtggaaataccatgtgctgctccgggaagcttttcccagtgtttgagtgacgtgagcgtgtggcgggaagaagctgcgtttggctgcgggacagtggcggctccagcatttccatatagaaggggcttaacaaaggcggtaatttgggtgggatccgtcttgaagggctg

SEQ ID NO: 117137 - DNA, 118 bp, Homo sapiens
  chr8:121457553-121457671
  hyper
tcccaaaaatatctcgcttggtggaaaaactgcggaaaaccgacggaggacataatttccagccgacctaaacgaagggaaccggaaatgcgtcatagcgcgcgtctgtttggatgtg

SEQ ID NO: 117138 - DNA, 30 bp, Homo sapiens; identical to SEQ ID NO: 6576
  chr8:121706824-121706854
  hyper

SEQ ID NO: 117139 - DNA, 620 bp, Homo sapiens
  chr8:121823345-121823965
  hyper
atgctgccaccccctgcgccacccttcccccccccccaacacacacacacccggccccctggggtgtgtccgcatgtggccgagtgagtgtgagtgtgagcgtgcgggtgggaagccgagcaggtgtgtgcgcgcccggcgcggcccgcgcgctgttaaccccttaccttccagcagcacttccttgcccgcgcgcttcaacgcctgcaccgcctcgtcgtgggtggcgtcccgcaggtcggctccgttcacggacaggatggcgtcgcccacgtacagggcttgggtctggtccgccgccagccccttgaagatcttgctgatgaggatgggcatcttgttctccttgccccccttgatgctgatccccagcccgcccagctcctgcttcagcaccttcacgccacgcttctggttcgagatggactcgggcacctgctcgggcaggtcggtgaaagcggtgcggaccccggcgggcgagtccgggggctgcgcgccgcccgcgcccgggtgcccagccccggcgcccctgcagaacgagccattggtggcggtcccgatgccgttgtacgccgcagcgccctcctcgctgctcagaaccagggcgtcctcgctcaagt

SEQ ID NO: 117140 - DNA, 386 bp, Homo sapiens
  chr8:121824315-121824701
  hyper
gaagaaggagagaccgagacaggggaggggaaaaaagccagcagccagttgcaaaaccccaaagcaaggggagccgcggagcagctcagcgctggagagagtccgtgggaggaggcacgctggcggtgaagggcggggacccacaacccagcggccgctcacctgttccagccgccgcagcctcggcggtcacacgccacccgcccgcccagacctcccctcctctgtccccagagcgcacgacgccgcggggacagcttcccgagcgccttccccgtcccgcttctctccagcccaccgcagccccctttcttcccagctcccccactccgtgggcgcccacactgcaccttcgccgggtgcgtgcgtcccgcctcggtgccctc

SEQ ID NO: 117141 - DNA, 939 bp, Homo sapiens
  chr8:122651464-122652403
  hyper
gggaagcccttggtggccaatcggggcttccctatctattgcgtcacacctcccccgtgtgtgacgtcaaaggcaatcccagcccagacacgtgggttggagcagcgtcgcgtttctgggcaattgctcctgagacccaacaggcagcaacggtcccaagggtgagggagtgggcagggagaggctgatggggcttctacacgttccctcccgtagctgggctgctgcagctcgttcgccccagaggcgcgcggtgtccttgagtccaagtattcagcgcggacgtttgggggacggagggagaggcgctaggggaactggcacctaagactgtgtaataggacacaggtcttgcaagtcctcctccccaggcaccgcccctgtgctcccagcgcctctttgcagctttaattatcctttcagcgccgttcccccgcggctgcgtttccgtggtcagaggaaaaaggctctttcgcctcccggttctcaccctcatacagaccctcctttcagacccgccctcctgttcacagggacccatttcggagccctggctcacgctgggcgggaactgccgtgacgaattccccccaaggtgttgattatccatcccaacccagcctctggcttccctcccacctccaccccagctcccacaggcccctcgccccgttcatcggctgggcgctcgagacggcgcccccagatctcccaccgggcagtgtccccagctgcagctgaggagagaagcgccggcgtgcgcggtgccacgtcggaattggctctggggacgccgcagctgccgaagcgcagcgcgcggtccccacgcacgccctgcctccgggcggccggcgggctggcccggcgaggagaggagggatgcgcgccctcctcccgctcctatctgcgggtgccaccgcctgcgtcagggacccctgg

SEQ ID NO: 117142 - DNA, 50 bp, Homo sapiens; identical to SEQ ID NO: 45814
  chr8:122653604-122653654
  hyper

SEQ ID NO: 117143 - DNA, 189 bp, Homo sapiens
  chr8:123792665-123792854
  hyper
ccctcgtccccgcccgggagctgcccaagagtccacaggccagcccagggggaaacaaggtacatctgggcaggaatgcgcggcgcagacaggttgccgcctgagatcccgaagtgtacccagatcccgaattccttagagctctttagccgagcactgtggcaggagcgcggcgcccggaatacaagt

SEQ ID NO: 117144 - DNA, 45 bp, Homo sapiens; identical to SEQ ID NO: 45816
  chr8:123793462-123793507
  hyper

SEQ ID NO: 117145 - DNA, 30 bp, Homo sapiens; identical to SEQ ID NO: 45817
  chr8:123793910-123793940
  hyper

SEQ ID NO: 117146 - DNA, 179 bp, Homo sapiens
  chr8:124054653-124054832
  hyper
ggagccaggtagagcgactacacgactggtgggaaaacagtggttgcctggatcaacggcaaacgctccggccagtggcgaggccaaatgccattcacctagttctcagagttttaatgcggctgggtccacctggagggtatttaaaggggacgaaggcaaacgaagtgtctagttcc

SEQ ID NO: 117147 - DNA, 30 bp, Homo sapiens; identical to SEQ ID NO: 6581
  chr8:124085345-124085375
  hyper

SEQ ID NO: 117148 - DNA, 30 bp, Homo sapiens; identical to SEQ ID NO: 45819
  chr8:124169236-124169266
  hyper

SEQ ID NO: 117149 - DNA, 30 bp, Homo sapiens; identical to SEQ ID NO: 45820
  chr8:124169804-124169834
  hyper

SEQ ID NO: 117150 - DNA, 109 bp, Homo sapiens
  chr8:124170645-124170754
  hyper
ctgggcaaggccaggcgtggggacccctggggagagtgtgtggacgcccgcgggtctgggtgcctcccagggaaaggacgagtgatggacagaccgacggaaggacagg

SEQ ID NO: 117151 - DNA, 620 bp, Homo sapiens
  chr8:124172788-124173408
  hyper
ggcccactctcccggcgacctcccggctcccagacctggctgagcccggcggccgccaggggacgctgtgcccaggggttgccgccgctgccccgcaggtttcggctttttccaaattagcctagggacacaccgcgccactagccggtacagggtaccaggcccgatccccacgccaaggtggccccatcacccagacctgcccagggaagggaggtagaacaggagttgggggtgggggcggtgcagatatttcgctccgtaaagtgtctccagcttttaaagatgtatgtccccaattttccaagaccttctgagccttcgagtggaatgaaactcgaacggcttcccagctgcggcgatgaggtcccgctcctgcagaatcccggcaggagcggagactcgggaggggaccgctggctgcaggcgccctgctggagtccggaacgagggtggtcagggtcgcctccccacggggtcgcagatgagggagtggggccgcgcagggaggctcctgcaggccgtgacccccaggcctggcccgtagagagtgactgatggcgaggacccgctggggacccgagggcctcagcctgcgcctgcgccggggctccccgacc

SEQ ID NO: 117152 - DNA, 30 bp, Homo sapiens
  chr8:124173620-124173650
  hyper
taagcgccttgccggcggtggctgatttac

SEQ ID NO: 117153 - DNA, 87 bp, Homo sapiens
  chr8:124253463-124253550
  hyper
tctcacctgcggctcgcagagcttggcgcagtaggacgcgggcggtcctgaccgccgctccggcctctcctcgaacaccgagtcctc

SEQ ID NO: 117154 - DNA, 30 bp, Homo sapiens
  chr8:124286555-124286585
  hyper
aacccggaaccgctcggcgggcccgcaaag

SEQ ID NO: 117155 - DNA, 30 bp, Homo sapiens; identical to SEQ ID NO: 45822
  chr8:124287096-124287126
  hyper

SEQ ID NO: 117156 - DNA, 200 bp, Homo sapiens; identical to SEQ ID NO: 45823
  chr8:124408728-124408928
  hyper

SEQ ID NO: 117157 - DNA, 260 bp, Homo sapiens
  chr8:124552597-124552857
  hyper
ggttactcatcctcccggccacttcgtggttgcccgtgcctgggcagggcctggaagcgctccaggcgggaccttcgtcggatcccgtcacctgtcgcgtccacagcgcttgggcgctgggagccgggccaccccgcggtgaaggggctcagcccacccgcccgcgcccccacatgggcaaagtgcgcgactccggtgtccttaaagcagggaccactaaagctgtgtgattaagtttgagcgaacgtttggggacacga

SEQ ID NO: 117158 - DNA, 30 bp, Homo sapiens
  chr8:124553674-124553704
  hyper
ctggcacctccgcgcgccctccccgccccc

SEQ ID NO: 117159 - DNA, 30 bp, Homo sapiens; identical to SEQ ID NO: 45824
  chr8:124757645-124757675
  hyper

SEQ ID NO: 117160 - DNA, 108 bp, Homo sapiens; identical to SEQ ID NO: 45825
  chr8:124778490-124778598
  hyper

SEQ ID NO: 117161 - DNA, 30 bp, Homo sapiens; identical to SEQ ID NO: 45826
  chr8:124780409-124780439
  hyper

SEQ ID NO: 117162 - DNA, 30 bp, Homo sapiens
  chr8:124780822-124780852
  hyper
tctgcagtgtgaggcgcggggcctcccgcg

SEQ ID NO: 117163 - DNA, 30 bp, Homo sapiens
  chr8:125384164-125384194
  hyper
gctgtagatgaagtcgcgcgcgccctgcgc

SEQ ID NO: 117164 - DNA, 30 bp, Homo sapiens
  chr8:125384774-125384804
  hyper
agtcagccacgcaccgccctcctccagcgc

SEQ ID NO: 117165 - DNA, 159 bp, Homo sapiens
  chr8:125385115-125385274
  hyper
ccaccctgtgctggcgttaaacctacagatcggaatagggaaaacgagctctggacccctcgcccgccagggtagtacagctgccacccggcccccaacctggggccacatctggagcttgttctgaaaggtgccccggcgtgcggccccgctctggac

SEQ ID NO: 117166 - DNA, 30 bp, Homo sapiens
  chr8:125486855-125486885
  hyper
gctgaggaggtgggcggaaaccatggcaac

SEQ ID NO: 117167 - DNA, 30 bp, Homo sapiens
  chr8:125487556-125487586
  hyper
ccgggacggctatgcgggccgagacgttcc

SEQ ID NO: 117168 - DNA, 228 bp, Homo sapiens; identical to SEQ ID NO: 45828
  chr8:125551278-125551506
  hyper

SEQ ID NO: 117169 - DNA, 30 bp, Homo sapiens; identical to SEQ ID NO: 45829
  chr8:125602743-125602773
  hyper

SEQ ID NO: 117170 - DNA, 335 bp, Homo sapiens
  chr8:125985496-125985831
  hyper
cggccccagcaaagccgccgggggagatgagggtaacttcctgtttctgccttccgggtttgagagtttaggaccctgggttggtggggtcagagggagagggggtaccttcctcccggaccgctgggggtgcagggcgccttgggtgtagcacccagaacagtgagttccttcttggggggaagggagccgagggttgcgggctagaggagtggaaacagccccgtccaggctgcagtggacgtccgggagagagttcccgctgctgccaggggcgaaggcccagcatctcccgccgacgggccaccgtcatccttgtccgcggggtcccttac

SEQ ID NO: 117171 - DNA, 76 bp, Homo sapiens; identical to SEQ ID NO: 6584
  chr8:126010221-126010297
  hyper

SEQ ID NO: 117172 - DNA, 656 bp, Homo sapiens
  chr8:126010859-126011515
  hyper
tcgggagccgccgccgccatctgagggaggtaccctggaaaccaccttttatcggtggggaagtgcagtcgcggtgggcggctctgggggccagcgaaacgggaggcctctaaatctttaggttggggctgcattgccctggagccgcactcttgagtccgaggccatcttttgttggagaaggcgtcggcgttggcgttttcccgaggttgggctgtacagtgtctccgtccgcggaaaaagaagcctctgaacccgcgccggcccgcagcccccgtgccttccggccgctgctcgccgtcgccagaggctaggccacgtttcccccagtgccgaggtgtttctgtgaccctccctccactcccattcccttctgaaagggcacctgctcttggtgagaaaagaaattatagcacgaagagccagtatcagaagagtatccatcacccgcagcaaccgctcagggaacaccatcaaaaaagaaaaaaagggaatatctggatttcctgggcgaggaggagcgagtctgctcgggagctgttccagcaggcgatttttaaatactgctttctacgccctatacaacttggcttcacatacttttacactaactttatatgatttttaaaaactggtctgatcggacttctcgtcct

SEQ ID NO: 117173 - DNA, 30 bp, Homo sapiens
  chr8:126103328-126103358
  hyper
cataatcctgattccgatcccaggaatcag

SEQ ID NO: 117174 - DNA, 140 bp, Homo sapiens
  chr8:126400836-126400976
  hyper
acagtctttcccaaacgaatagtggacagaacaaggctttgggggctggagtcccagactggagctccgcccgctcccctccccccaccccttccccgagccctgagaccgtgagactatgagaacgtaggattccatct

SEQ ID NO: 117175 - DNA, 68 bp, Homo sapiens
  chr8:126442419-126442487
  hyper
tgctcgctgggcggcggggccggagtcgtcgcagccacctcattgcacaacccggcttcccaactgtt

SEQ ID NO: 117176 - DNA, 30 bp, Homo sapiens
  chr8:126442732-126442762
  hyper
aagtgcatttgcttcgtggctccgccgagc

SEQ ID NO: 117177 - DNA, 30 bp, Homo sapiens
  chr8:126444726-126444756
  hyper
agatggtgacagcccgtgtgtcaccgtttc

SEQ ID NO: 117178 - DNA, 1497 bp, Homo sapiens
  chr8:127569426-127570923
  hyper
ggggcggcggcggcccgtccccaccgtcgggcaagccgccgccatctggcccctgaggcggcggctgcggctccacgtcctcatcgtcattggagaaaatgtaggagaccccaatgcggggcccgtcgtcccggtccacgccagtcgggtcggccgtgggaacttccttgtaacttaggtgggtcaatttctccacctggttgcccatcacgctgcggacacacgttcacaccgccgcaaggggagaaagcgaaaccaactccagggtcatttgcacaggtccccggacaggggctgaggctacctgttgggagaggaaggcaagaaagccatgcaggagcccctccgtgaaaagggcgttttgttccgaaaaagaatcggtgggggctcagcacctggagccattttagggggaagtctcgggtgtagcgagctttccctcgtttctccacctgtaaggtcacggtcacaggagactgggcaactcctgttctccctgtccccagcccttcgcctggccctggcaaaagcccattgcatcagcagcttctactgcttccgcctgcgccctacctgccaagcttgggcaggaagagggaaggaaagagaaactttacgccaatcccccccctcctctgctaacttcccctcccaccctcgggccctaactagccccggggacgcctcctccccaccaacgcatccatccccagaggaacaagcgaggatctcagagcgcgacctggacaggtgagtcaccctacctggctcacctgcagcgctacctcctcccggctcgcccgcccttcccccgcgcccgccctcaggctcgggttacctgcacaaactcacccgcggagaggtgaaggccgtggggcctggggaagggctccctgccgcgccccgagacttctagggcgagtttgaaggtgtaggctcggcagtccctcctctcccggcgcgggcggcagcgaggctgggcagagggcagcgcagcgggcagactaggggcatgtctttcccccgcggctgcgtagcgccccgatacttgaaggcggggggcaatccctgttcacaccgcgcttcctcccgccagctggggctgctgcccctcctcagccagctctcgggggaggtggggcgcgaggaggagaggacggcagcctcgcagcctggcggcaacagctcccgcttgggccgggcgagcaacaagcaccggagctggagggacgggattgtagatccggctccgggctcccgggcgggagcgcagcccgtggcatttaaagagacaggcgctcactccccgagctcgggtctttttcacattgcgccgagcggccgggagccccgcccccgccccgcccactcgggcctcgggactccgcccggccacgcccccgcgccggagcgggtttaaatccccctgtaaataatccacccgccgcctggggctggtgctgtgagctctgcttgccttccgagacaagttagaag

SEQ ID NO: 117179 - DNA, 30 bp, Homo sapiens; identical to SEQ ID NO: 45836
  chr8:127707255-127707285
  hyper

SEQ ID NO: 117180 - DNA, 30 bp, Homo sapiens; identical to SEQ ID NO: 45837
  chr8:128355602-128355632
  hyper

SEQ ID NO: 117181 - DNA, 30 bp, Homo sapiens; identical to SEQ ID NO: 45838
  chr8:128407427-128407457
  hyper

SEQ ID NO: 117182 - DNA, 30 bp, Homo sapiens; identical to SEQ ID NO: 45839
  chr8:128413289-128413319
  hyper

SEQ ID NO: 117183 - DNA, 30 bp, Homo sapiens; identical to SEQ ID NO: 45840
  chr8:128424776-128424806
  hyper

SEQ ID NO: 117184 - DNA, 30 bp, Homo sapiens; identical to SEQ ID NO: 45841
  chr8:128718052-128718082
  hyper

SEQ ID NO: 117185 - DNA, 30 bp, Homo sapiens; identical to SEQ ID NO: 45842
  chr8:128719868-128719898
  hyper

SEQ ID NO: 117186 - DNA, 30 bp, Homo sapiens
  chr8:128746251-128746281
  hyper
gcctgtccttcccccgctggaaaccttgca

SEQ ID NO: 117187 - DNA, 583 bp, Homo sapiens
  chr8:128747186-128747769
  hyper
tgactcccccggctcggtccacaagctctccacttgccccttttaggaagtccggtcccgcggttcgggtaccccctgcccctcccatattctcccgtctagcacctttgatttctcccaaacccggcagcccgagactgttgcaaaccggcgccacagggcgcaaaggggatttgtctcttctgaaacctggctgagaaattgggaactccgtgtgggaggcgtgggggtgggacggtggggtacagactggcagagagcaggcaacctccctctcgccctagcccagctctggaacaggcagacacatctcagggctaaacagacgcctcccgcacggggccccacggaagcctgagcaggcggggcaggaggggcggtatctgctgctttggcagcaaattgggggactcagtctgggtggaaggtatccaatccagatagctgtgcatacataatgcataatacatgactccccccaacaaatgcaatgggagtttattcataacgcgctctccaagtatacgtggcaatgcgttgctgggttattttaatcattctaggcatcgttttcctccttatg

SEQ ID NO: 117188 - DNA, 169 bp, Homo sapiens
  chr8:128747993-128748162
  hyper
acaggacaaggatgcggtttgtcaaacagtactgctacggaggagcagcagagaaagggagagggtttgagagggagcaaaagaaaatggtaggcgcgcgtagttaattcatgcggctctcttactctgtttacatcctagagctagagtgctcggctgcccggctgag

SEQ ID NO: 117189 - DNA, 127 bp, Homo sapiens
  chr8:128749399-128749526
  hyper
gcctgtccccgcggcgattccaacccgccctgatccttttaagaagttggcatttggctttttaaaaagcaataatacaatttaaaacctgggtctctagaggtgttaggacgtggtgttgggtagg

SEQ ID NO: 117190 - DNA, 30 bp, Homo sapiens; identical to SEQ ID NO: 45845
  chr8:128749836-128749866
  hyper

SEQ ID NO: 117191 - DNA, 307 bp, Homo sapiens
  chr8:128806646-128806953
  hyper
gacctggggaaggccgggagcgccgggaccgaggacgcacgcggcgggccgggccgcgcgcgcctcccccctcccccgaggcccgagcgcgagccgccgtgacgtcacgggcaacccgccagccccgcgctcctccgggcagagcgcgtgtggcggccgagcacatgggcccgcgggccgggcgggctcggggcggccgggacgaggaggggcgacgacgagctgcgagcaaagatgtgccccgggacccccggcaccttccagtggatttccttgcggaaaggatgttggcggtccctgtgacctg

SEQ ID NO: 117192 - DNA, 30 bp, Homo sapiens; identical to SEQ ID NO: 45847
  chr8:129194625-129194655
  hyper

SEQ ID NO: 117193 - DNA, 30 bp, Homo sapiens; identical to SEQ ID NO: 45848
  chr8:129541915-129541945
  hyper

SEQ ID NO: 117194 - DNA, 30 bp, Homo sapiens; identical to SEQ ID NO: 45849
  chr8:129543933-129543963
  hyper

SEQ ID NO: 117195 - DNA, 30 bp, Homo sapiens; identical to SEQ ID NO: 6589
  chr8:130647087-130647117
  hyper

SEQ ID NO: 117196 - DNA, 30 bp, Homo sapiens; identical to SEQ ID NO: 45851
  chr8:130952318-130952348
  hyper

SEQ ID NO: 117197 - DNA, 31 bp, Homo sapiens; identical to SEQ ID NO: 6590
  chr8:131081757-131081788
  hyper

SEQ ID NO: 117198 - DNA, 30 bp, Homo sapiens; identical to SEQ ID NO: 45853
  chr8:131370314-131370344
  hyper

SEQ ID NO: 117199 - DNA, 1222 bp, Homo sapiens; identical to SEQ ID NO: 45854
  chr8:131455077-131456299
  hyper

SEQ ID NO: 117200 - DNA, 350 bp, Homo sapiens
  chr8:132051949-132052299
  hyper
cgggtccatgggggccgaggccaggctcaagtgtaggaccaagagagtgagtttggtcagcacgtccagcacgttcatcaccacttccgatttgcgcctttggcccaagaaatagcgctggtagaggcgttccaaatcccgagatttgaaggagttgcgcagggtggggaaaatgacccctcggtagctatagcccccattaagaaagaaatccgagttgctaggggcacagtcaaggtgcaggaagcccaggtcgcccccgcctccgctgccgctggcactgccgctcccgctgcgttccgggaagactttggtgccgcaggtgctgtgcgctcgctctcccgggccca

SEQ ID NO: 117201 - DNA, 117 bp, Homo sapiens; identical to SEQ ID NO: 6593
  chr8:132052398-132052515
  hyper

SEQ ID NO: 117202 - DNA, 1994 bp, Homo sapiens; identical to SEQ ID NO: 6594
  chr8:132052589-132054583
  hyper

SEQ ID NO: 117203 - DNA, 212 bp, Homo sapiens; identical to SEQ ID NO: 6595
  chr8:132054593-132054805
  hyper

SEQ ID NO: 117204 - DNA, 30 bp, Homo sapiens
  chr8:132916151-132916181
  hyper
gagatcaaggaaaacgaatgccacgcaggt

SEQ ID NO: 117205 - DNA, 30 bp, Homo sapiens; identical to SEQ ID NO: 45859
  chr8:132916391-132916421
  hyper

SEQ ID NO: 117206 - DNA, 122 bp, Homo sapiens; identical to SEQ ID NO: 6596
  chr8:132917186-132917308
  hyper

SEQ ID NO: 117207 - DNA, 202 bp, Homo sapiens
  chr8:133491908-133492110
  hyper
ccactatgggtggtgcgcacccctcccatccccaactaaactcagtggcgatcccaacagaagggatccacccgaaacagaaacacagagctcacgggaggacccgctttatcctcttcaaccctcacattaattggaaaaacccacataattattttaagcttccaaaccaacacccctagaagatgtcataaatgtgcac

SEQ ID NO: 117208 - DNA, 503 bp, Homo sapiens; identical to SEQ ID NO: 6598
  chr8:133492127-133492630
  hyper

SEQ ID NO: 117209 - DNA, 1039 bp, Homo sapiens; identical to SEQ ID NO: 45863
  chr8:133492712-133493751
  hyper

SEQ ID NO: 117210 - DNA, 8 bp, Homo sapiens
  chr8:133493782-133493790
  hyper
cgtgactc

SEQ ID NO: 117211 - DNA, 607 bp, Homo sapiens; identical to SEQ ID NO: 45865
  chr8:133687387-133687994
  hyper

SEQ ID NO: 117212 - DNA, 30 bp, Homo sapiens
  chr8:133787523-133787553
  hyper
gccaatcggctgcgcggcccgggcccaacc

SEQ ID NO: 117213 - DNA, 365 bp, Homo sapiens
  chr8:134232708-134233073
  hyper
tgctgggagccatccccgggattggggcatggtccacatggagcccctataaaggcagctgggccagccaggggcaccaaggccactgggcctgaccggccacctgtgtttgcagaggtggtcggtgtgggctgcgtcctggatggggtgcgctacaacaacggccagtccttccagcctaactgcaagtacaactgcacgtgcatcgacggcgcggtgggctgcacaccactgtgcctccgagtgcgccccccgcgtctctggtgcccccacccgcggcgcgtgagcatacctggccactgctgtgagcagtgggtatgtgaggacgacgccaagaggccacgcaagaccgcaccccgtgacac

SEQ ID NO: 117214 - DNA, 678 bp, Homo sapiens; identical to SEQ ID NO: 45867
  chr8:134308717-134309395
  hyper

SEQ ID NO: 117215 - DNA, 30 bp, Homo sapiens
  chr8:134309923-134309953
  hyper
tcttctaagagtctcgttgcgccacgccct

SEQ ID NO: 117216 - DNA, 145 bp, Homo sapiens; identical to SEQ ID NO: 45868
  chr8:134465705-134465850
  hyper

SEQ ID NO: 117217 - DNA, 86 bp, Homo sapiens
  chr8:134581263-134581349
  hyper
gctgctgcagagcttcgaggaacagactccacactccctaagaaaccctcctctgccatcacttctagcaacgcttcctgtttttc

SEQ ID NO: 117218 - DNA, 2486 bp, Homo sapiens
  chr8:134581731-134584217
  hyper
atatagaaactgagacgccgagaggttaagtctggcgaccaaagagagacagagacagagagacgggagactagaagaggccccacgctgtacccagatattggcagaggctgaggggcacggagtggtgaactctagtcagtcatttcagccaaccatgggatttcagaaaacagccggcaggggtcctaatgtttggggcaggaaggggaggtgcgggaaggcactgagggacccccgcactgggcgccccttccccaccgcagagacaagcggcagtttccacagcagccggcagggggcagtgcaccttgccttttcgaagcctctgggcgcttgggcagcgcggggtaaagaaaatcaggaggctccgcccgcagcttctacgaacaggccaggagtagagcccccgcacgtagtaggtgctccaggcacgtctagaagcctaaagggcttggtcgatacatttgaactccattttagagactggaagggaagaagggggcgtccgggcccctgccagcaccttccaccttggggccttgtcaatgaacactgcgttagcacctacgacgtgccaggcgccctggcgactattggaaaacccggctcccctctcaccccgttttcctcgttggcgagtcggcctcgcctcctcctcccgtctcttcctctcaccacacacacccagccgcagagcgggggtgggcgctcgctgtctccctggagaaccagctcgtcgcaaacttgcggggcttggggacccgcgagggggagaagtcgggagaggccaggggtgcccggaaacaatcacgagaaagccgggcgaatgcctgatgcagggacgcggcgagccagtcactgccctcagggtcacggctgactccctctgcgggactcgcccagcccgcgagacgcagtgacctgcccaacccccacccccttgcgcgcttctgggtgcgcacgtgtcccctcgcccaacacaccaccgagccccgcgcatggtacggccgccgaggaccctagcgtaggagggaggagcgagtcagggctccagctgacgagcagagccagacgatccccacacgcttcctgggagacccggctgcaaggccaggctaatgcgcgctccgacgtctctgtgccaagccggggcgcaagctcaacccccatctcaagttcagccgcgcttcctcccgcaaggtcacgcttaaacactcgcgcagagaaaggaggagcggaaagttgcgccaccgtcccgattccaaactaactgtaccctcaccagagcgcctcgccccagggtcaccgctgtccgtccccgtgcgctcccagaaggggtggccctgcccccacgcaggtcacacacacgagagacacaggcaagttgctaacttttgtcagattatttcttgggagctgcgacgcctcacggggttggggcggattcagagtttcgagttgccactaacacgactccggccgtgctctccttggcccacccgcgtcccccactgtccgccacgccgcgttcagctctcttgtcccgggtgtcaacttcacccccagatccggagcagcgcgctctgacggcgtccccggggccgatagccacctcccggatctgcgcctgcttgcagcggattgggggactcgatccggatactgtcccacggccgctcgtccagaacactggcggcctccgcggtgtcccagcctgtgaccccaaatccgctcgagagcgcctgagcccggccacccagcgaggtctcctcccacgggcggccccagcggaggagatcccagcccggcgccgggtgcaatgtcactggggctgctttcgggaaccgctgcccgggacttggcgtaggttccccacagagctccaggcagctcctccagtgtcggccgaagacccctaagcccgaacctccaccccgaccttcttcctctcccaaagccctgggtggtcgccgctgccaaggaaggggtctcccttcgaatgtcttccactagaatcccggggtcttcagtcccagctccactgtcacaccctcctagtcccctccccaccccttcagttcccgggtccagacaatcaaccttccactccgagaatccacaggaaactgcccgagccccaactcaggcggacgcagcccccgcgcaccccgagcagggttcgcctccgcgcgcgcactcaccacggctggagacacgctggagtttccgggatttgggcatgaaggggttcggaggagaatacaggggtgtgggtgtcccggacacttgcccccttcccagctcacatcgcctcttccttctctctccgctcttcttcctcctcctcctccctccggtctagggctctttgtctttgcaaagtgtcgaaactgtctggcatagtgggctccgccggcggaggctggagccgaggaagcgaggaggcgggatgagggtgggagagggctcgggaacaccttccc

SEQ ID NO: 117219 - DNA, 642 bp, Homo sapiens
  chr8:134584528-134585170
  hyper
cggggacctgatcggcgccccgagaggagctccccgctctctggacgcggccctcaagctggcggggctaaggaagagcgcccgggaggcccgggagccactggggtccgtttcagcaggaagacgggcacgcaccgagaggatggcagtgcccagaagaactcgagtcgggggcacggtggggagaaggggccgatcccctgctggcgaccgggcagagccacccacttcctctaagggcgcgggactcgaggtgggatttagggagggggaagggaggagcgtgggctggacgactcttgcggccagaaccgcgttcagagccacagagccgggcactgcggccggccctggtcccggccccggccctggcccagcccttgccctggctcgcctgccgccgctttttccttccagatgcggaggctgcggctggagcttggggtttgcggattaggcttgcagttattcagccctccctcttttacagggaagcgggggcggtggagacttcttttgctgaaaggcagagtgcagcgctttgatgctaaatgcagtacacaagtcatgtaaatctggttttacggttcttaaccccttactgagactacctctttcgcaacttttcggaggaatgttaga

SEQ ID NO: 117220 - DNA, 30 bp, Homo sapiens; identical to SEQ ID NO: 6605
  chr8:135697752-135697782
  hyper

SEQ ID NO: 117221 - DNA, 31 bp, Homo sapiens; identical to SEQ ID NO: 6606
  chr8:135703767-135703798
  hyper

SEQ ID NO: 117222 - DNA, 30 bp, Homo sapiens
  chr8:135725081-135725111
  hyper
gctcacctgccgcccgcgtctccatggcaa

SEQ ID NO: 117223 - DNA, 30 bp, Homo sapiens; identical to SEQ ID NO: 45876
  chr8:135725522-135725552
  hyper

SEQ ID NO: 117224 - DNA, 65 bp, Homo sapiens
  chr8:135732839-135732904
  hyper
agccacagaagcaaacggtgccaaggaggacgatccagggcgggcctggccgcaagagggcacct

SEQ ID NO: 117225 - DNA, 30 bp, Homo sapiens; identical to SEQ ID NO: 6607
  chr8:135843827-135843857
  hyper

SEQ ID NO: 117226 - DNA, 38 bp, Homo sapiens
  chr8:135844537-135844575
  hyper
tgtctgagggagagcggctgtgcgcgcgcgtgtacatg

SEQ ID NO: 117227 - DNA, 1573 bp, Homo sapiens
  chr8:136468960-136470533
  hyper
gcctctccccaggagcggatgagctcagacgcggctcactcagctgtgtccaggcacagccggtttatgacctaagagaatgacaacccaggagcaagtcgggatgacaaagacgcccagaagggcacgcgcttttatgtaaccgacctctgagctggcggatctcaggaggttggcgctctgagctcaggcgcggagaaaggacggcgcccctgccttactctcttataagtacgaggggacagcaacgcgacataacttagagaagtccaggaagctttagagagcagggcggtcccgctgctattcctcagagcgcgactggggcgaactggggcgcccttcccagctccagctcggcccttgtcccctcttcccaggatcactcgctgggtgaccttgggcgagccacttgacttctctgagccccagtttcccagtccgtgcatctgaaaggctgtaatagcgtcgtggggctccccactcggccctcagggccaaaggtgggcgccggacacgcgggaggggcccttggacgcaccccctctcgcaaacgcccggttagtcccggcggactcgcagtggagagcggccccaggaggcggcgggcggcggggcggtgggcgccagtgcgcaggcgcggcgcggcagggcggggcggcgggcgcggggcggggcggggcggagccgggcggggcggggccggcggcaggcgctgggcgctcggcgcggtggctcagagtgcgcggggcggcgcgcggcgtgcaggtcgcagctgtggctcgggtgctggcaggtgctggcgggactggcggggatcgccgtggactgcctcaggggcgccgcagcccgctcggcccgagggcccgcctaaccgcgccgcccgcgcccgctcctcctcggcccgcgcccggagcgcgggggccgccggcgctgggtactcggcggccaccggggatcggggctgagcggtcggttcccgcccccgtgccgccgccgccgccttccggccgaccgcccggcttggccgctgctgccgcgtctggcccccgggtccccgccgctgggggcgcgggcggggtcgggggttgccgggcgccgccccccgtgcgcctggagtccacatcccgggcccggcggccggcgagcatggaggagaagtacctgcccgagctgatggcggagaaggactccctggacccctccttcacgcacgccctgcgcctggtgaaccaaggtgaggcgccggccgttaactgccggccggcggcggttgggggccgggtggaaacgcgggggcccagggggcccctccgtgccctctgctgtcagcggacgcggcggagacggaggcccgggtggcccccggggtcgtttgcacggggacctgggaggctgtgggacacctaggggaagaccctgatgtgaattttggggacttggaaggagaaggctggggcgcatgggtgagacttgaaggaaatctttggggactcgggcacacccaggggaaacttctgggtgggggacagcgaccatctgggggcttcgttgggaacgaggttgaattatg

SEQ ID NO: 117228 - DNA, 30 bp, Homo sapiens; identical to SEQ ID NO: 45880
  chr8:138741514-138741544
  hyper

SEQ ID NO: 117229 - DNA, 30 bp, Homo sapiens; identical to SEQ ID NO: 6609
  chr8:139301362-139301392
  hyper

SEQ ID NO: 117230 - DNA, 163 bp, Homo sapiens
  chr8:139508783-139508946
  hyper
aaccacattttgcggcggaatcgctgttccgtgacagaaagccatccaactggcaaccacgcttgcagaagcgtcactaccaccgacgagagagttttgcagctgccgaccccgaagcgctctcacctacctgtctccactgcagggctcccctctctctccc

SEQ ID NO: 117231 - DNA, 121 bp, Homo sapiens
  chr8:139509549-139509670
  hyper
cgcgaggccctgatgggagcccggggcgggccgcccggcggccaaaccccgcccgctcggccgcccgggtgcccagggcgcaggctgcggccccgcgtgcggccctcccagactgaccggc

SEQ ID NO: 117232 - DNA, 29 bp, Homo sapiens
  chr8:139509693-139509722
  hyper
cggggctcccctctcgagccaagacccca

SEQ ID NO: 117233 - DNA, 30 bp, Homo sapiens
  chr8:139739863-139739893
  hyper
cctctgggggcacccgtgagtcagaaaaca

SEQ ID NO: 117234 - DNA, 30 bp, Homo sapiens
  chr8:139790693-139790723
  hyper
aaaggcaagtgcagccgtacagctcagcca

SEQ ID NO: 117235 - DNA, 219 bp, Homo sapiens
  chr8:140643194-140643413
  hyper
aatggtccgctaggacggagagcctgtgcctcaggggctccgctccctgcaagaggggctctgcgcagcgccggccaccggagaggcaacggcgccctctggcgggcactcgggcgactgcagggacacggccccgggtgcggggtcggccgcccacgttttccggtgactgcgtccagaacgcaggaatcatctgggaaaagtcgctaatctttcttt

SEQ ID NO: 117236 - DNA, 530 bp, Homo sapiens; identical to SEQ ID NO: 6610
  chr8:140714564-140715094
  hyper

SEQ ID NO: 117237 - DNA, 368 bp, Homo sapiens; identical to SEQ ID NO: 6611
  chr8:140715219-140715587
  hyper

SEQ ID NO: 117238 - DNA, 322 bp, Homo sapiens; identical to SEQ ID NO: 6612
  chr8:140715699-140716021
  hyper

SEQ ID NO: 117239 - DNA, 837 bp, Homo sapiens
  chr8:140716339-140717176
  hyper
cgaatgtgtgtgtgcgcgtgtgtatgtgcgtgtgtgtgtgtgtgtgtgtgtgcgcttggcagccccgctccggcgggagggcctcggggagcgggggccgggctacgccgaggccgggcctccctccctccctccctcccgcagcctccagggcgcgccacctcccgcctggtccccagccagctggcgaggctgctgtggcagctcccgctgcagacccagcgcggcgcagggcgcacgcggagggagcccgggaggggcggcctgagccgccagggagggggcgggggcggagccgccggcgggttttggcgggggatgggaggataaacgcggcttcttgggtccttctagccccgctccccaagagcgcaagcagccctggcgggtggagagtttgagggactcggggttggaggaggaaaacgggattcagccagagatggcaggctgacagcttcaggcagattgggcagagagtggggagcagaaggggagggggccatgggcacacaggagagcggcagcagcggttcacgaagtcttccccaccccccaccccccacctagccacccggcgcgggagcgtgtcattggccagggacatggcctcgtggagtggtggggtcccgagggctgcctcggccccctcgcctcccagcggcacagcccgcttgggccagcacctgcagacccgagtcgtttccctggagagcgctaaggacagcatgggccgccacttttggagtcaggacagcggggaaagacatcgcaatcccccgacccagtaacctctctgttgctttactgaaggaaaaaaaaaaaatacacacacac

SEQ ID NO: 117240 - DNA, 152 bp, Homo sapiens; identical to SEQ ID NO: 6615
  chr8:140717235-140717387
  hyper

SEQ ID NO: 117241 - DNA, 189 bp, Homo sapiens
  chr8:141260486-141260675
  hyper
taaccataattaatgcgagtccatgcctgagaatcaaattggatccacacgtggtcccccattagatgtctctgagaatgttagactgtgagctacagggggtcgtctcccagttcccagaggccacaaatgagcctctgccactgagttcacagccacttcacataagggcgccgtgattgtctcgtg

SEQ ID NO: 117242 - DNA, 38 bp, Homo sapiens; identical to SEQ ID NO: 45889
  chr8:141400091-141400129
  hyper

SEQ ID NO: 117243 - DNA, 30 bp, Homo sapiens
  chr8:141467328-141467358
  hyper
gcggggggctccagcgccgcggacggcccg

SEQ ID NO: 117244 - DNA, 30 bp, Homo sapiens
  chr8:141521194-141521224
  hyper
acagcacccagccacgaggcccggagtcag

SEQ ID NO: 117245 - DNA, 82 bp, Homo sapiens; identical to SEQ ID NO: 6616
  chr8:141644413-141644495
  hyper

SEQ ID NO: 117246 - DNA, 11 bp, Homo sapiens
  chr8:141646330-141646341
  hyper
cggccccagaa

SEQ ID NO: 117247 - DNA, 146 bp, Homo sapiens
  chr8:141647527-141647673
  hyper
ttcagctcctttgagcgctgtgttggggaactttgttgcaaggatttcgttccagaaggcaagataatgtctctgagggcttcattgtgtcacttctctttggatggcggacaccgtggccctctgctggcggaggggtgccattg

SEQ ID NO: 117248 - DNA, 761 bp, Homo sapiens
  chr8:142010301-142011062
  hyper
ccaccgcggcagagtcgggggctgggggcggggaagaggagaaaacttgggaagcacaatgactccagtgaggacttcagtgagggctccagggctcccgccaagaagcccacggggctctaccaaacttgagggtttgcgttcggggacacggcgggcttggggctcgggcaccggcaggccgctcggagcccacccttggctgcccgcgaggccgcgcccgggggacggaggtcgggccgtcgcgagcctccctctcgcgtccgggcgaaccctgccgacgtccctgcgatttccctcttcctcctcctgcctctccccttttgtttttcaggcattgggtccgctccggcggaggccggcccgtcctccccgcgcctctgtccgccctgcgcgcccccagagccccggcctcctcgtcttcctcaggcccctcggcctctccgcgcgcccggccttttcgaaagccgccccccccttcctcctcacgtctcccggactccccacgtcccccagcctttctgtcttccccgaaccccttggcctccccgcgcgcccccaaaacccccgacctcctcgagctcccggcctccccacgtccctcagcctcccagtcttccccaagcctcccgaccacccagcgccccgaacccccgcctcccagcgcgccccctgacctccttaagcctctcggcctccgcgagggcccccaacctcctcacggccaccggcctcccctcctcccagaacccgggccgggg

SEQ ID NO: 117249 - DNA, 1210 bp, Homo sapiens; identical to SEQ ID NO: 45893
  chr8:142011091-142012301
  hyper

SEQ ID NO: 117250 - DNA, 1661 bp, Homo sapiens
  chr8:142138199-142139860
  hyper
tcctggaggcggcagcgggcggcgcgtccggcctttgtccccccacgctctccagggtaggtccagggactgccagatcaggggaccctttgcgtcctggagccttgggggctggatgacgtcgccgggcacctgaggaccccgcccattcctccctcggttccccagggagcgggcggccggcggggctgggcggggccgaaggaaggggccgcttgctccgacgccgcgcacgcgccagggcccgcaggcgggttaggaaatgacgaccgcgcgcgggtctccagcagcacccgccctaggaccggccccgcccccaagtcccggtccctagggccgggcacgccactccaggccccgcccagaacctccccgcccagtcaagccccgcccccaaactctgtctccccgcggtatcctctggggctctccaggccccgcctcggctcgggccccgcccctccaggccccgcctccagccccgccccgcagacggcgctcgcagcgcccccggcccccaggcggcgcggctggtccccaggggtctgcgggcgactgcgcggctgaggcgcccgagtgcggtactggcggcgggcggcgggcagccatggcggaggccgcgtcgccgcacttgtcgctgccctcggggctgctggagctctgcgcgctgctgggcgccccccgggacagtctccgaagtctcgagcaggtgaggggcggggaaactgaggcggacgtgggccacgagtcggcagccgggacagcagtcggagagcgggcgcccgggtgccctgtgggttggcgcggactttccgagggctgagtcccggtcccccggcggtgaccccgcgcgcctgtggccggggatcgcgcccgagctcaggcaggtgccctggagcagcgccctgctcccctcccctcttctctcctctccccgcccggggcccttggtgtgagacatgtcttttgagagctgcgaacttggtccgccggccgggaatctgggggtgccgcccctcggagagtctctggggcctctctcttcagtcgctcccatcttgggcaggtgcttctgaaggtggggtgcaccagacaacgggcggaagccgccggagcctcacggtctagcgggcccagccctcgctgctgaaatgatttcattctttatgctgggatgtgttgtcccctgagtagtgggttttgcaccaggcacagaataacgagagagcaatcttagagttagccgccggcctcgcgtattctgcatgaacccctttgcgatgaagcctatagctatttttctcccttgcggtaccacccccacccccaacccttcctccatctctgcaccctcgcagccaaagtgacaacttcatctcccttctgctgggaaagcggcagttttggaaattctcgttttcctttttcttccccagcttttcttaattctgtaacgctggctttccctggaatccatctgtgtctctggtttcctcctggtccgcctgtctgtgacaccgtgactgggtcatgttacctagagatcccggcgtcactggccagccgtctgcacaggtccgttcatctctttgcagacaacagcatagaaaggcagagaggcttctgagtatttaaatgacgctgggctatccagggaaaat

SEQ ID NO: 117251 - DNA, 58 bp, Homo sapiens
  chr8:142140081-142140139
  hyper
tctgtctcctcgcaacgtcatcgattgatttgtctccctacctcgaatttgccagatg

SEQ ID NO: 117252 - DNA, 43 bp, Homo sapiens
  chr8:142141061-142141104
  hyper
gtgtgagccaccgcacctggccgcttttaaataatttttacct

SEQ ID NO: 117253 - DNA, 31 bp, Homo sapiens; identical to SEQ ID NO: 6623
  chr8:142202197-142202228
  hyper

SEQ ID NO: 117254 - DNA, 189 bp, Homo sapiens
  chr8:142297568-142297757
  hyper
ctcgttaacccttcacggcaagtctggagtttcccatttccatggccaggacgctgggcttctggcctccttggctgactggacaattacagacagttgagtactgtcttttctgtgaacactagcatgtatttagcttaaaaggatcttctgtgcggcatcttttcagtctagcgagagaatgcttta

SEQ ID NO: 117255 - DNA, 891 bp, Homo sapiens; identical to SEQ ID NO: 45897
  chr8:142317706-142318597
  hyper

SEQ ID NO: 117256 - DNA, 30 bp, Homo sapiens
  chr8:142362443-142362473
  hyper
gggcggatgtggccacgtgggtcccctctc

SEQ ID NO: 117257 - DNA, 234 bp, Homo sapiens; identical to SEQ ID NO: 45898
  chr8:142425566-142425800
  hyper

SEQ ID NO: 117258 - DNA, 595 bp, Homo sapiens
  chr8:142427478-142428073
  hyper
ggaggagtgcccgggcggtggggctggtgggctgggcagggggtctgaactggagggactcgggcgccctcctcctcagggtgcaggacagcacctgcacggcggggccgcatttccatttccaaagctgggcgcgctctgtccaggcctccccaccaggagcgcggcccggcggctcctgccctccggacccccagcccacaggcccgtgcagccccatgagggggccagggggagctccgaggttctagggagggcgcgcaccgggagagggcgccgggccggccggcgggaggaaggaggggtcccgggcggcagcgcccccggccctcgccgcgccccgcacttccctttcctggctgggcttcctcttccccgcgcccgccctgcgcggcccctttgtttcccgggcagggcgcggctatatttaggcggcaggtgtgggagcccccggcagccgggtcgcccgccggtcacgccccccacgtgacgcccgggcgctataaatagccgcaggcggcggtggcggcagcgcctggagccggctccgcggcggaggggcggcgccccgacccagggccagcaccgtgggcac

SEQ ID NO: 117259 - DNA, 184 bp, Homo sapiens
  chr8:142528218-142528402
  hyper
acctctcttcgcgcccggcctcctggtctcccgcctgcgcgggccgctcccggccctccccgccctgccgggcgttcactgtcccctccgcccgcaggtcccgcggcgcccccggagcccgccttcccggacatctacggcggggacgcgcagctctgggaggcgcatttccgcggcatcgggc

SEQ ID NO: 117260 - DNA, 152 bp, Homo sapiens; identical to SEQ ID NO: 45900
  chr8:142528454-142528606
  hyper

SEQ ID NO: 117261 - DNA, 111 bp, Homo sapiens; identical to SEQ ID NO: 45901
  chr8:142528670-142528781
  hyper

SEQ ID NO: 117262 - DNA, 127 bp, Homo sapiens
  chr8:142528834-142528961
  hyper
cgcgcccggcgcttttctgcacacactccgacaggcctgggcggctgggcccggcggggaaggggggcggtgggacggtgggacggtggaccaggaacccaactgggacaccgggccaggccgggca

SEQ ID NO: 117263 - DNA, 30 bp, Homo sapiens; identical to SEQ ID NO: 45902
  chr8:142626802-142626832
  hyper

SEQ ID NO: 117264 - DNA, 37 bp, Homo sapiens; identical to SEQ ID NO: 6626
  chr8:143340515-143340552
  hyper

SEQ ID NO: 117265 - DNA, 42 bp, Homo sapiens; identical to SEQ ID NO: 45904
  chr8:143429132-143429174
  hyper

SEQ ID NO: 117266 - DNA, 98 bp, Homo sapiens; identical to SEQ ID NO: 45905
  chr8:143483644-143483742
  hyper

SEQ ID NO: 117267 - DNA, 1844 bp, Homo sapiens
  chr8:143530665-143532509
  hyper
ctcctaggtgtgcgcgcgtgtgtgcattttatccgcccccccttatctcgctcccctccccccacacccccgccccccgctagcgctccccctctaatgtgtgatctggaagctctataaagcctgatgtaatccgtaatgcagtctctggctcccgattcgggatccagtttcagagagcgagagattggggagcgccggcagccgggtggggggaagcagctctcgcctctctcctcctccttctcctcgtcctcggcctcctcctcctccccgcgccgccccgcccccggctcggcttggctcgcccccccccccccctcgccaggaaggggaaaaaaggcgagaagagccgggcaggcgagaggagcggagcggcggcggcggccggagagggagcggcgggcgcaggcggcggcggcgggcgcggcgttggcggcggccccggcggagcgagcgcggagccggagagccgggagcacaggcggccgcgccgcgtcctggcccggcccgggcccgcgcgccagcatcgtccgcagcgcgggcatccggaccctccgggcgcccggggggctccagcaggcgcgggggaacgggagggggcctgcgtgcgccggcgggtgctctccagggggcgtcccggcgaggcccagagcgggccgggggcggcggcggctggaggagccccccccacctccggtcgggcgcccggctcagccgccggcgacgcgaggcgctcgcggggatttgcaactcgccggatcgagtcctcgccggcggggccgctgctgctggggaaggtaaggaaggctccggcggggggctgggggcgcggcgggtgggggcgcagcgagggtgggagggggtcgggggaggggcgggcgcccagacttcctaacttcgccgtttggggcttcgcagctccgaggttttgcgctcagagctcaggagtttggacccccaccccctaccccctcagccccctgccttctccagcggtggcgatggaatgtggcaggtccccgcgagcccgcattgggcaggctgaggagggggcgaccctggacgcaggagaggctcctcggcgccgccgcctcctccccatccacacaccacagcctggcacccctcttcatcacatgcacagggcaggctggggagggcgttcccgctgtacccccagcacacacagacgctggcgggggtctaagggagccccccatggcccccaacagccacacatagacgcagcaggctccggagagcccccgagcgtgtccccctcctgctaatcacgtccagggccccctacagacattgtaagggcccgagacgtcctccccccacgcacagagctcggggcaggcaggagaaaaccccagactccttctcgaagccctcgctcgtagaagccctcgcctgtagacctggcattggcagtggagactccctggaggtactctcccccacttcgggcggagggctatttttgcgccccccacccccacgcgaacgcctggctcttccctccttgtctacctttccactgggtcggacaggccgcgcggataagccgctctcaactttgggccggccctatgccgtctccgctccaagcgccgagcactcccgggcgccgagcactcccgggtccgcgtcgccggtgagcagaggccgccggccctccaccgtcgccgcgctagcttggagccgcgcggagctgcctcgaggaacgagcacggcccccgccccctcctggggaggctgggagctctggacccggccaggagccctctccctaggtccccgcggccccctgggcgaggtagagagctcctccggcc

SEQ ID NO: 117268 - DNA, 1099 bp, Homo sapiens; identical to SEQ ID NO: 6630
  chr8:143532541-143533640
  hyper

SEQ ID NO: 117269 - DNA, 1049 bp, Homo sapiens; identical to SEQ ID NO: 45910
  chr8:143533708-143534757
  hyper

SEQ ID NO: 117270 - DNA, 30 bp, Homo sapiens; identical to SEQ ID NO: 45911
  chr8:143556218-143556248
  hyper

SEQ ID NO: 117271 - DNA, 296 bp, Homo sapiens
  chr8:143556722-143557018
  hyper
cggcccctccccacccgggccggcctcggcgggcttagcacccccatgacttacccgtccaggccacgagcccctgccctgccctgatccccgccctctggtttccccccaggcggctggaagctgtggtccctgtggggcgaatgcacgcgggactgcgggggaggcctccagacgcggacgcgcacctgcctgcccgcgccgggcgtggagggcggcggctgcgagggggtgctggaggagggtcgccagtgcaaccgcgaggcctgcggccgtgagtgcgggcggggcggggc

SEQ ID NO: 117272 - DNA, 30 bp, Homo sapiens
  chr8:143557294-143557324
  hyper
cagaggtgagggccccgaagagggtggtgc

SEQ ID NO: 117273 - DNA, 31 bp, Homo sapiens; identical to SEQ ID NO: 45913
  chr8:143577913-143577944
  hyper

SEQ ID NO: 117274 - DNA, 2 bp, Homo sapiens
  chr8:143591804-143591806
  hyper
ga

SEQ ID NO: 117275 - DNA, 177 bp, Homo sapiens
  chr8:143592101-143592278
  hyper
cggcatgggcgcccgggccgcggggcctggcggcggcgggcggacgggcgcgcggctgcgggcgcaggtgcggggcggcgggccggggccggggccggggcgcggagccgccgctcgggggccggggcgcccgcgtccccgccgccgctgacgctccgcctgtctccctcccgtgtc

SEQ ID NO: 117276 - DNA, 220 bp, Homo sapiens
  chr8:143592358-143592578
  hyper
cgacgccctccggacgcgctgcctctgtgaccggctctccaccttcgccatcttagcccagctcagcgccgacgcggtgagaccccggccgggccggcgggaggggcgccgggcaggggcgcgggcgggggctgccggcgggcctgcgggtggggagggcccgcacccgtcctgtcccggaggggtcgctgtggcccgcagccgccgtggcctggcccgg

SEQ ID NO: 117277 - DNA, 73 bp, Homo sapiens
  chr8:143592663-143592736
  hyper
cgggacccccggaaagtggctgatgggtgggtcccatctcccctggccttggaggcccgggatctccgaggga

SEQ ID NO: 117278 - DNA, 30 bp, Homo sapiens; identical to SEQ ID NO: 45917
  chr8:143690509-143690539
  hyper

SEQ ID NO: 117279 - DNA, 419 bp, Homo sapiens
  chr8:143695486-143695905
  hyper
aggtgccggtgcgtccgccgcacgtgctccagcatctcggcccggcacttcccgatctgcaggatcacgttgggcttggccacctgcccgccccgcggcccggggtaggcgtggagcccgccgctggtccggtggtccagctccatctgtgcgcaggtgctccggcaggcggcaaactcctcggggcggacagagggtggtccggcgctggggtccggcggcctgggtcccgtgcggagctgcggggagcgcctgtctgtcgctgcgggccggcggcggggccggcggagcacgcccggggaggcaggtccggctcggctgctgcggagggaggacgccgcgcccgagctctgcgctgagtcctggccgccggctctttatgcagccagcgaggcccgtgggcggccggctcgccgagc

SEQ ID NO: 117280 - DNA, 30 bp, Homo sapiens
  chr8:143696117-143696147
  hyper
gagccgggcactgggcgcccctcccacgcc

SEQ ID NO: 117281 - DNA, 30 bp, Homo sapiens; identical to SEQ ID NO: 45920
  chr8:143761915-143761945
  hyper

SEQ ID NO: 117282 - DNA, 30 bp, Homo sapiens
  chr8:143820465-143820495
  hyper
ctgcggaagactagcgctggctggtctgac

SEQ ID NO: 117283 - DNA, 30 bp, Homo sapiens; identical to SEQ ID NO: 45921
  chr8:143821025-143821055
  hyper

SEQ ID NO: 117284 - DNA, 209 bp, Homo sapiens
  chr8:143859071-143859280
  hyper
cggctcgccgggcaagcgctgggaccccgaggccagtccaggcatctggatctccgacacagaggcagccacgcagtgattccctggcgaccctcagactcacgtgttcagcccggacactccgcaggctatcttcaccgcgtcccgcggcagcccagccttccccgcagccgcctccgcccactcgcccgcgccgcgtcgtttgtcgg

SEQ ID NO: 117285 - DNA, 88 bp, Homo sapiens
  chr8:143859337-143859425
  hyper
cggaactggcgccctttggcgcacccgcctcgctgcccatggcctccgcctgcctcccctgcgctcagctcccgcttctggtccctgt

SEQ ID NO: 117286 - DNA, 1146 bp, Homo sapiens
  chr8:144099612-144100758
  hyper
ccaggtgtcagtgacggtcaccccgacctggtcccctgtccggcctcgccaggtcagcacccgccgcgcgcacagcagggccgggtggaaggaggccgggcctggccgtggctcaggcgccacctcactggggaaactgggaggtggtctcagcccccttctgggcctcagcttccccatctatcccaaggagccggggtaggcctgggcggcgcggggacccccaccgcgggctcgccgactccgcccgccggaggcccctcccgcgtcccgcccctgcccccgccccggggccgcgcggctgcctgggaggctccgggccagccgcggtccagagcgcgcgaggttcggggagctcggccaggctgctggtacctgcgtccgcccggcggtgagtccgcgggcccccggccgggacgcccccgccacctgcgcgcacgcgctcagacccggcggcctcggctgcggtgcacgcggccccggctcagccacgcgcggcggaaggcgccctgcgggggccggggcgggagagggtgggagagagcaagaggggcgcacggggaggcgcaggagaggggctggggctgccggtgggttggtccccagagagctgagcttctcctcccatcccccgcaggcctccccgaatgtttccaaagatctggggcgggagcgggcggagactgccgccaggagcctcccggccgccccagggctgcgcagccactggagcccatcacccaactccagacgctcctggctcctctacgtgggccgggagggacagccttgaggactaggggagggggcacgggaccttgcagagctcctggccggaaagggaggattgaccgcccccggcatatcaccccggagcactggaacccgcccccgcttcttgttttggcactggtggtgcttgcggtgaggtccaaggagcccagcctccctgagtggaccgccgggcccctccccgttccgggacacaggagaggctcccgccccttgctggctgggcagcccctagatacctggctcccaggggccagcttccctgagcctggggatgagccatgagcctgcagcctgggccccaggggcgccccccacggcctgccggctggctccctccgggctccatggccc

SEQ ID NO: 117287 - DNA, 241 bp, Homo sapiens
  chr8:144162346-144162587
  hyper
gtgggatggggggtgcgccctgagtaaagccccgtccgggagcaggaagctggggagggggctctctgggtgaagcctcccgcaacacccacctcaccccactcaggctgagccttctggcgtcatggagaggctcgtcctaaccctgtgcaccctcccgctggctgtggcgtctgctggctgcgccacgacgccaggtaaggcgcggcccgggctgggctgggggcgtcggggctggagc

SEQ ID NO: 117288 - DNA, 30 bp, Homo sapiens
  chr8:144162786-144162816
  hyper
aagggccggtgcccccgcctctcagcgact

SEQ ID NO: 117289 - DNA, 554 bp, Homo sapiens
  chr8:144240967-144241521
  hyper
acctgacccagcccgcgggccccctactcaccgggcgccgagcacagcaggacggccagcagcgccaggccgaggcccttcatggctgcaggcagcatgctccgggtgggcctgggggcggcgcgggggcttggggcgcgggtcctctggggcgcaagcctggaggggagaagcatcggtcaggagaccccaaagaccctctcctttcccagcctcaggatgcaaccttctccccggaatccaaggccggggtccgcccggagctcgcagagccccacccccagccccttctccagagcgtccgccgtcacagcatccccgccgggagacgtctggcctctggggcgaggtgacagctcgagacgcctccgccccgcgccggcacctgtgtgggggagcggatggggggcgtcctcttctccccggggagctgcaggtgcgtccggacaggaatgagcggcaggggcgggagcgggtgggacctgccactggggggaggggcgcgtgccaggtccccacccccacccctgggctggggggccgggaaccccggg

SEQ ID NO: 117290 - DNA, 119 bp, Homo sapiens
  chr8:144241583-144241702
  hyper
cgcgggcctcggggtcggggggctcactcacatcccgggggtgtccgcactccgggctcgggcggcgtgcgcggcgcggggagctgtgcccttcggtctccctgcggaccggaatccgg

SEQ ID NO: 117291 - DNA, 526 bp, Homo sapiens
  chr8:144241757-144242283
  hyper
cggggcggagccggggcgggggccgcgcggggggcgggggcggctgggagacgcgcggggcggggggcgcccggggctcgcggcccccacgcaggtagctggcccgggccctccgcgcccccttgctggcgcgcgcgctccctcgggttcccgctccctccctcgcggcgccccctgctcctccccagcctccgcggccccctacccaggcgtgggcaggatcccttccccctctgcttggctgagatccccttggaatttctcggaagaacgtttactgcgaaaggaagcaaaatgcacaaagacgcagagagggggaggtacccggcgcggcgccacgcgcaggtccgggttcgcagacccctggggtcagactcccgccctggggccccgccctccccctcctccccgcccctccccaacctcatacccgtttccccgtttccccgtttccagtggctccaggccgttctcctcccctgagcatccatgaagacccccaccagaagccgcagccccaggggct

SEQ ID NO: 117292 - DNA, 449 bp, Homo sapiens
  chr8:144328116-144328565
  hyper
cacgcggggctctggcgggcctggcggctcagtgcgatctgggcaggcaggaagtggagtgagcacagccagcggctgggagcacatcccggaggggctgcctgcggcgggaggagcggcaggggccacgtggtgggggacggctcgccagggcgcgcacgcggtggcggcggcggtggaggcgttgcccgcctagctaggggcccgcggcctggagaggcgtcggttctccttccgcgctgaaggcggagacagcgacttcccgtggaggcaagccgtgggcgccgcggaggcgggggctgggggtcggcggaggcgggagctgggggtcggcgggggctgggggttggcggggagcgtcctcagggacaagtctcccagcacgcggccgcgacctccccgttgggggtctggagccaggagcccacgcgcgtcggatccggagagtc

SEQ ID NO: 117293 - DNA, 30 bp, Homo sapiens
  chr8:144349883-144349913
  hyper
gtccgttcgcagggcgcctttcccaggcac

SEQ ID NO: 117294 - DNA, 30 bp, Homo sapiens
  chr8:144350164-144350194
  hyper
tgggggtgaaggggcgtccacgctgtgatg

SEQ ID NO: 117295 - DNA, 274 bp, Homo sapiens; identical to SEQ ID NO: 45928
  chr8:144373097-144373371
  hyper

SEQ ID NO: 117296 - DNA, 30 bp, Homo sapiens
  chr8:144373803-144373833
  hyper
tgcggggcttcctgcgagctgagtccccgc

SEQ ID NO: 117297 - DNA, 30 bp, Homo sapiens
  chr8:144416752-144416782
  hyper
ggccggtcacaccgcggcacgcatgctctc

SEQ ID NO: 117298 - DNA, 133 bp, Homo sapiens
  chr8:144417145-144417278
  hyper
atcccaaggctgggcggtctaagcctgcacggggctgcggcagcaggaccactgactgtcctgccggcctccccctggtttccctgccttcgtggtccagcgccccttcacgctgggcggggacccagatcca

SEQ ID NO: 117299 - DNA, 30 bp, Homo sapiens
  chr8:144450927-144450957
  hyper
cgaagcggcattgccgcctattgggcaatg

SEQ ID NO: 117300 - DNA, 136 bp, Homo sapiens
  chr8:144484159-144484295
  hyper
agccccacagtgctccgtttggcatcactgatcagccgcagggctcgcccgaagtctgcactgacaccggggctcaccccaggtgtgccacgtgggttctggtgcacactgctgtttccaccgtcgtggcaccaca

SEQ ID NO: 117301 - DNA, 14 bp, Homo sapiens
  chr8:144503210-144503224
  hyper
cctgcccccatttc

SEQ ID NO: 117302 - DNA, 538 bp, Homo sapiens
  chr8:144503284-144503822
  hyper
cgggcaggcgaggcctcctggaggcccggcgggctcttccccctccctccccgcccttttcctctcccgatttcctggccaccctctggcttagtctgcaattcatcttcccgtctctcttcccatacctgagcctcgtgccgcccgggattgcggcgcccgcgccaccacgctggggtaatggtcccagcaccgctgccctgcgtcctgccgcgccccagcccgcgcgtctcacacaccgcgactgcgtgtctacaggtgccgcctcttgacgcctctgctgcaccgccagtgccccgctcggcaaagcacagcccctccccagcactgcagcaaatgggcaggagacccccgcccggccgggggagcaggggcaacggcagggccccagtagagagggtggagctggagccgaggccgggccaggcgcctgcggggcctaacgcttctgagacaggcgagccgtgctccgtgctccgtgctccgggacgaagggggctgtggggtcggcagagggcttcccgtgaggaggagcaca

SEQ ID NO: 117303 - DNA, 1052 bp, Homo sapiens
  chr8:144508721-144509773
  hyper
aagcagggggacagacgaaagagagaaagagaaaggggagagaaaacagaaaacaggaaagtgaactgactccagcagcagcagctgctaaggtcccacagctcgggcccggccatgctgcggagaaagctggatccggtggcagccccggcacgtgccgcagtggggttcctctgagtcccaaacccagcaagcctccagcagcgcccgcaggccccgtgcaccaggaagcccagttctggcccctgagtgcagggctcccagacgcctggggtgggggtagggagcagggagggtgacacagctccctgcccgccgctcccaccccaaaaaggccgcctctgatccaggctgccagaagtcgctgggtcctgtactttctcggccagggaaaggctctgtgcaaagggctcctgggggcggcgatggtgaaaactaaggtgtcccatgtcctctgctctttacaacttcggactatgaaaaacgagccagcagattcccgtccaagaatgtgcccaaggctccccgcccctccttggggagagatggcctgtgtaagcgaaggcccgggccgggcggctgagccacccgtggctgcctggaacccgcctgtccctgccggcgtagtcttttcaactccatcttccgccccacatttctgtaattcccaccagcattctcctccacagagatgccttcacggccagctcccctgctgggattctgcttgaactcccgcagagacccaaaagcaaagggggaggcggcagggactgacggaggactcgccttcctctcttcctccaggtctctccgcttgaaacgataaaacaaactcaggagactcactcacagaggattccgtcccgtccccagaaagaacctccgcttacccccgatggaaaagcagcacagccccctcccaagaaaggcgagtttggaagcccttgcaggccagaagccctctctccaaatttgcaaaccacggaccctcgcctgcctctcttccggcagtgaagggagggaaccatcaacgacgtgtcctgcagccg

SEQ ID NO: 117304 - DNA, 622 bp, Homo sapiens; identical to SEQ ID NO: 45932
  chr8:144509987-144510609
  hyper

SEQ ID NO: 117305 - DNA, 528 bp, Homo sapiens
  chr8:144510871-144511399
  hyper
acctccaaggaacgccggtagcagggtcgggggcaagcggggagggggcaggcaggggccgggcccctcctggcgagcgactcatgctgtgactcgcgactgagggcggaccccggctggggaaagaaggggcttcctccaaggttttcttttctaatcaccaagcataataattataaatacttcgaaaataagaccgattttaaaacggggaggggaagttaaaaaaggcaaggaaagggaggctgagaagagaacgaaggagggcgggggcaggcaggggccacccgggaagggacggcagcgcggtccctctaggctggcagggcgaaggtgggaacggagaaccacgttcaacgtatgtacaagcggacgcttggaaagaagttagacctggctcaagtttccttagaaatcaccgttctccgctcaacctcaggacggcgacccgggccgacgcgcgcgaacggggaccgggagcgaaggggcctccagccccgcgcccgcagacttggcaccggggccagc

SEQ ID NO: 117306 - DNA, 1365 bp, Homo sapiens
  chr8:144511448-144512813
  hyper
cgaggccccgagaggcctgcgcgaacttgtccccggcgacggcggcgcgggctcggggtccggcgcctacaggaagaagtcggccgtgcccttggccccgccgggaccggcctgcggcggcgaaggctcccgcgggaaaccggccccgcccgcgctcccggggccgccccggcccgccagcttctcgtatttctccttgtacaggtcccgctctttggccaggcgccccacctccagcttcagctgctccacctggctctggagttggcacttctcgctctccagaatgtgccgctgctgcacccgcttgaagcggcaggactgcgcgtagccgcggttcttgagcgtgcgccgcttctgcttgagccggatgacctcctccttgctgaagccgcggagctgccggttcagctcgcgcaccgacatggacaccagctggtcgtcggagaagcgctcctccaggcgcacgtggtggcccgcgccaccgccgtgtcccgcgccgccatggtggtggtggtggtggtggtggtggtgggcggcgtggtgatggtgggcggcgtggtgcgcgccgtggtggtggccggcgcccatgtcgtccgctccgccgccgcccgcgaagcccgggccgcggaaagcctcgtaggctgcggcggccgccgggtggtgcgcgccgtggtgcgcgccgtggtggccgctgccgatgagcgcctccaccgcgtcctcgggcgtcaggttgagcgcctcggggttgaggtgatgctggtagccgctcatccagtacagatcctccagcgccggcttccccgaggtgcccccgacggcgccggggcccccgctcggcggcccgggggcgcccccggcctgagacgagccgccgccgccccccgcgccgccgccgccgccggtgcccgggctgggcgcgcagaagctgggcgaggagggcacggaggagcagggcgtgctgagcggcgtcgaggacagcgagcctggcggcaggcggtggcagaagcgctcggcctcgggaggctccttcttcacctcgaacttcatcaggtcgaagtcgttgacgtactcgatggccagcgggctgctgggcagctcggcgcccatcgccagctccgcggccatcgcccggggcccgcgcccggccgcgccccgacgggcggcgtgggagtggggggggagctgcaggcctctcccccccctgctccccgcgggcggcggtcccggcgggggcgggggggcgccggcgcggggcggcggcgccgaggggcgcagggaaaagtttcacgtggtcaactccggggcggcgcgctaggggcaccgctggccaggtgtctcgggcgaccccgggcccgcgtcgcc

SEQ ID NO: 117307 - DNA, 30 bp, Homo sapiens; identical to SEQ ID NO: 6642
  chr8:144513145-144513175
  hyper

SEQ ID NO: 117308 - DNA, 66 bp, Homo sapiens; identical to SEQ ID NO: 45936
  chr8:144594948-144595014
  hyper

SEQ ID NO: 117309 - DNA, 171 bp, Homo sapiens; identical to SEQ ID NO: 45937
  chr8:144614410-144614581
  hyper

SEQ ID NO: 117310 - DNA, 28 bp, Homo sapiens
  chr8:144623144-144623172
  hyper
ggaaggaacccgcgtgcgcccttagcct

SEQ ID NO: 117311 - DNA, 30 bp, Homo sapiens; identical to SEQ ID NO: 45938
  chr8:144635481-144635511
  hyper

SEQ ID NO: 117312 - DNA, 282 bp, Homo sapiens; identical to SEQ ID NO: 45939
  chr8:144635846-144636128
  hyper

SEQ ID NO: 117313 - DNA, 325 bp, Homo sapiens
  chr8:144636561-144636886
  hyper
gcacaaacgcgcacacgtacgtgtatgcacacgcgcacaaacatgcacaaaacacggacgtgcatgcacacgcgcacatgtacacaacacgcacgtgcatacacatacgcacaatacgcacgtgtgtgctcacgtgcacaaacgcacacaacacgcacgtgcatacacgcgcgcaaacgcacacaacacgcacgtgcatacacgcgcacaacgcgcacacaacactcaggtgcataaacgcgcgcaaacgcacaacacacacgtgcatacacacgtgcacaaacacgctcaacacgcacgtgcaagcacccgcatacaaacaggc

SEQ ID NO: 117314 - DNA, 450 bp, Homo sapiens
  chr8:144640320-144640770
  hyper
tcagagttttaagaaaaaccacaaagtgctatgaagtttgaggctaccaggatggggcgccaagccaaggttcctccggacgcgcgaggctggtgctccaggcgggctggcgggaagagggggcaggaagggggccggggcgggctctccgggacggttccgggagggcgtcctgggcgggccctgcgtcaggttgcagtttcacttttagctctgggcacctccagctcctgctcgccggacggctcccagggagagcagacgcgccagacgcgccaccctcggggcgccgacggtcacggtgagctgcgccccgccccctcccccggcctggctggagctcccgagtggggccggccgctggctcccgggtgggggatgctggccctgctgccccagcgttcgcccagaaggccccgcgccgcacacgggggcggaagctccaggctt

SEQ ID NO: 117315 - DNA, 121 bp, Homo sapiens; identical to SEQ ID NO: 6648
  chr8:144641058-144641179
  hyper

SEQ ID NO: 117316 - DNA, 43 bp, Homo sapiens
  chr8:144653947-144653990
  hyper
aggctgggcacctgcgccagcagcccacgcaccagagcatgca

SEQ ID NO: 117317 - DNA, 86 bp, Homo sapiens
  chr8:144680873-144680959
  hyper
ccggcgctggcggggcgaccgcgtaacggtgctgctggccgcaaacctgaccggcagccacaagctgaagccgctggtcatcgggc

SEQ ID NO: 117318 - DNA, 31 bp, Homo sapiens; identical to SEQ ID NO: 6649
  chr8:144681190-144681221
  hyper

SEQ ID NO: 117319 - DNA, 54 bp, Homo sapiens; identical to SEQ ID NO: 6650
  chr8:144691795-144691849
  hyper

SEQ ID NO: 117320 - DNA, 45 bp, Homo sapiens
  chr8:144692238-144692283
  hyper
acggaggggacagtcggggagggggtactcgtcacttttaatgac

SEQ ID NO: 117321 - DNA, 30 bp, Homo sapiens
  chr8:144700113-144700143
  hyper
ttggattccggccgcgatgaggagcccggg

SEQ ID NO: 117322 - DNA, 30 bp, Homo sapiens
  chr8:144718008-144718038
  hyper
gagcccgcgcttcccggcccgcaaccctcc

SEQ ID NO: 117323 - DNA, 30 bp, Homo sapiens; identical to SEQ ID NO: 45946
  chr8:144718726-144718756
  hyper

SEQ ID NO: 117324 - DNA, 201 bp, Homo sapiens
  chr8:145149553-145149754
  hyper
tgtcacgcgctgcctgcggccgagacccctgcccgcgccctctgccgggctgccctccaagccgccctttctctggaggtcctcagcctgcaggggcaccctccacccggccatcgcgcagcctgggaaggtggagaaaaggagcgtcggggtctcggaggcggcgtgggaaacgccgggcggagcgtggcgctgtcacgg

SEQ ID NO: 117325 - DNA, 30 bp, Homo sapiens; identical to SEQ ID NO: 6651
  chr8:145150007-145150037
  hyper

SEQ ID NO: 117326 - DNA, 30 bp, Homo sapiens
  chr8:145150737-145150767
  hyper
agtggccttgtcgtcgaagtctggcctttc

SEQ ID NO: 117327 - DNA, 30 bp, Homo sapiens
  chr8:145159936-145159966
  hyper
accgccctcctaggcgtctggagaaactag

SEQ ID NO: 117328 - DNA, 30 bp, Homo sapiens
  chr8:145669587-145669617
  hyper
ctggtggcacagcgcggcctcttcgcgccg

SEQ ID NO: 117329 - DNA, 62 bp, Homo sapiens; identical to SEQ ID NO: 6652
  chr8:145687373-145687435
  hyper

SEQ ID NO: 117330 - DNA, 30 bp, Homo sapiens; identical to SEQ ID NO: 45950
  chr8:145690571-145690601
  hyper

SEQ ID NO: 117331 - DNA, 117 bp, Homo sapiens; identical to SEQ ID NO: 45951
  chr8:145692489-145692606
  hyper

SEQ ID NO: 117332 - DNA, 238 bp, Homo sapiens; identical to SEQ ID NO: 45952
  chr8:145697348-145697586
  hyper

SEQ ID NO: 117333 - DNA, 124 bp, Homo sapiens; identical to SEQ ID NO: 6654
  chr8:145697858-145697982
  hyper

SEQ ID NO: 117334 - DNA, 85 bp, Homo sapiens; identical to SEQ ID NO: 6655
  chr8:145698667-145698752
  hyper

SEQ ID NO: 117335 - DNA, 625 bp, Homo sapiens; identical to SEQ ID NO: 45955
  chr8:145700217-145700842
  hyper

SEQ ID NO: 117336 - DNA, 478 bp, Homo sapiens
  chr8:145726120-145726598
  hyper
ccctgatggacgagacgccccttggtgagcttgcggggcccacctccacctgggggagaggacaggcggggagggcgcccctgacgcctgcgcccacttctcagatgtgtgcggggacgaggaggtgcgggccaagctgctggagctgaagcacaagcacgacgccctcctgcgcgcccagagccgccagcgctccttgctgcgccgccgcacctccagcgccggcagccgcgggtgagcgccgcccccagcaggccccgccccgggcttggccccgcggacgtcagccccgggcggagtgccagccgaactgggggcagagtccgagggggtgggcggggtcctccgggcactccccttcccctcactccctctcctctctcctccccaggaaggtggtgaggcgggtgagcctaacccagcgcaccgacctgtaccgcaagcagcacgcccaggaggccatcgtgtggcaacagcc

SEQ ID NO: 117337 - DNA, 434 bp, Homo sapiens
  chr8:145733643-145734077
  hyper
ccggacaccgaagggcgtcacgggcagtggctggcggtgtccttctgagctaagctgggtcctgacctttcacacttccctcctaacttccatggctctgtcaccgccttacggaggagctgaagccacagacacagcaaggttggggtccgcaccggaagtatccagtggtagacggcggaacccttaagaaacggacgccttcatgcgggcggctggagaagcgggggctgggcactgcagcaaccacgcttcggctgacaccaggaaggaagcacgcctggagcggatccgaaactactgagaggggccagggctggccgtgggcgcaggccgatccttacattcgaggccggcccagctctgtagcttccccctctgggcctctcacccgcgcaggacctcggtgggagcgcgcacgtggcggggcgggg

SEQ ID NO: 117338 - DNA, 30 bp, Homo sapiens; identical to SEQ ID NO: 45958
  chr8:145743810-145743840
  hyper

SEQ ID NO: 117339 - DNA, 211 bp, Homo sapiens; identical to SEQ ID NO: 45959
  chr8:145747531-145747742
  hyper

SEQ ID NO: 117340 - DNA, 34 bp, Homo sapiens; identical to SEQ ID NO: 6658
  chr8:145806237-145806271
  hyper

SEQ ID NO: 117341 - DNA, 5 bp, Homo sapiens
  chr8:145806619-145806624
  hyper
cgctc

SEQ ID NO: 117342 - DNA, 391 bp, Homo sapiens; identical to SEQ ID NO: 45962
  chr8:145909601-145909992
  hyper

SEQ ID NO: 117343 - DNA, 96 bp, Homo sapiens; identical to SEQ ID NO: 45963
  chr8:145910219-145910315
  hyper

SEQ ID NO: 117344 - DNA, 250 bp, Homo sapiens
  chr8:145910531-145910781
  hyper
actcacacctccctcgggcaggagcacactcacacccccctggggccggacacacccacactcccctcgggccgggcacactcatacccaccgtggacaggggcacactcacactcactctggacaggggcacacccacacccacattggggccgggcacactcacacccacctagggcagggacacaactcactctggacagggtacagtcacacccacttcgggccgggcacacgcgaactcacccac

SEQ ID NO: 117345 - DNA, 543 bp, Homo sapiens
  chr8:145910993-145911536
  hyper
ccacggggaccgcagcgccggcccctccgccatcttcttggcccgcgccgcccaccgcccgttgcccgcgctctcaccggccggctgcgcgcgggccgcgccgccacagtccctcatcccggcccgcgcgacgcgcgtgagccagccgccgctccccggcctctctgctgctccgccgctgctgccgcggcagcccgtgctgtcggcgtcctccgccgccgccgccggcccagtgcgcggcggccgcgcgtcctcccgtcaccaagcgcaaccccccgcctccggctccgcccccgcggcggtcactacccgccgccagggggcactgcctcgcgaggccgcatcacgcatgcgctggcgcgcggcatgccgggagccggagtcccgcggagggcgcgcgcggcatgctgggagccgcctggccccgccccgtcgccgcgccagaggcctcccgcgcggacctaccctgtgagttagcggtgtcttcccgtctctttcggtgcagagcagttaccatctgacacgtctcggtgtggtttggtg

SEQ ID NO: 117346 - DNA, 30 bp, Homo sapiens
  chr8:145925692-145925722
  hyper
gcgtcccagagcggccgggcgagtctcact

SEQ ID NO: 117347 - DNA, 30 bp, Homo sapiens
  chr8:145926024-145926054
  hyper
ggtgtggtcacagggcgggatctacgaagg

SEQ ID NO: 117348 - DNA, 30 bp, Homo sapiens
  chr8:145980612-145980642
  hyper
cagccttctagggccgcgccgcggtcgcct

SEQ ID NO: 117349 - DNA, 95 bp, Homo sapiens
  chr8:145981130-145981225
  hyper
catccgggccgcgccgcgctcgccccgaccctaaaccctcacctgaaccctaaccccgctgggctcccggctcccccgtcggtcaccatacatcg

SEQ ID NO: 117350 - DNA, 30 bp, Homo sapiens
  chr8:146012989-146013019
  hyper
tccctaatgatgcacgaaaggcgccgcaaa

SEQ ID NO: 117351 - DNA, 30 bp, Homo sapiens
  chr8:146024771-146024801
  hyper
accaacagtcatttcgtaaatagctgttgg

SEQ ID NO: 117352 - DNA, 185 bp, Homo sapiens; identical to SEQ ID NO: 45967
  chr8:146052021-146052206
  hyper

SEQ ID NO: 117353 - DNA, 37 bp, Homo sapiens; identical to SEQ ID NO: 6662
  chr8:146078070-146078107
  hyper

SEQ ID NO: 117354 - DNA, 30 bp, Homo sapiens
  chr8:146078709-146078739
  hyper
aaagcgggagaacgcgtcccgtggtctggg

SEQ ID NO: 117355 - DNA, 104 bp, Homo sapiens
  chr8:146125624-146125728
  hyper
acccttacccacttcgtagagaccaccggacagagaaacctatgtccagaagacaagttacgaactgaaaaatctgcgagtacccacccggcggaggacgagtg

SEQ ID NO: 117356 - DNA, 30 bp, Homo sapiens
  chr8:146127402-146127432
  hyper
tgtttgatgacttgcgtgaggttattcctc

SEQ ID NO: 117357 - DNA, 5 bp, Homo sapiens
  chr8:146127853-146127858
  hyper
cgggg

SEQ ID NO: 117358 - DNA, 30 bp, Homo sapiens
  chr8:146176072-146176102
  hyper
ctcgctgcccgccccgtctgagccctgaga

SEQ ID NO: 117359 - DNA, 30 bp, Homo sapiens; identical to SEQ ID NO: 45970
  chr8:146228325-146228355
  hyper

SEQ ID NO: 117360 - DNA, 30 bp, Homo sapiens
  chr8:146228639-146228669
  hyper
ctcagaatccagctcgcgcccgctgtgcac

SEQ ID NO: 117361 - DNA, 30 bp, Homo sapiens
  chr8:146277988-146278018
  hyper
tggggaggcagcggcggccccaggcccggg

SEQ ID NO: 117362 - DNA, 70 bp, Homo sapiens; identical to SEQ ID NO: 45971
  chr8:146278303-146278373
  hyper

SEQ ID NO: 117363 - DNA, 31 bp, Homo sapiens; identical to SEQ ID NO: 45972
  chr9:73486-73517
  hyper

SEQ ID NO: 117364 - DNA, 1 bp, Homo sapiens
  chr9:113511-113512
  hyper
t

SEQ ID NO: 117365 - DNA, 315 bp, Homo sapiens
  chr9:113549-113864
  hyper
ggagctgcccaactccgccgcctcgggaaggcggcttcgggcccgcagggagccccggggagggttcccggttccgccggcagcggcgtcgaggggtgcctgggctcctggggaccgcgagaggaaaaagaacggaaatcgcaccggggaggaaggacgcgcagaacgcccccgtgaagcggggtgctccggtcaggcgtgcgcgggagcgcggtccgggggagtccggcggcgccgtcgcgcgcactcggcagaggcttcgcgggagaacgcgcagcccggggcgtggggcggggaactgcccgcgcgaggctt

SEQ ID NO: 117366 - DNA, 2 bp, Homo sapiens
  chr9:113881-113883
  hyper
cg

SEQ ID NO: 117367 - DNA, 401 bp, Homo sapiens; identical to SEQ ID NO: 45974
  chr9:113897-114298
  hyper

SEQ ID NO: 117368 - DNA, 30 bp, Homo sapiens
  chr9:114805-114835
  hyper
ttgatcggagaataacgttcaatttactcc

SEQ ID NO: 117369 - DNA, 51 bp, Homo sapiens
  chr9:118139-118190
  hyper
cgcaggggatgtggcggccggatcacctggccccggcgggctgagctggaa

SEQ ID NO: 117370 - DNA, 23 bp, Homo sapiens
  chr9:174124-174147
  hyper
caacacagcgagactccatctca

SEQ ID NO: 117371 - DNA, 981 bp, Homo sapiens
  chr9:214544-215525
  hyper
tttgtggggctcccccgacttgcctacattccctggcagcctcgcagcttcgggcagatggagcttccggcctgcgcgcagtggtcgcctgtcgtccgcccgcgctcccttcggccggaggtcggcggccccgggcagagcgcgccgtctgccccagtatcgggaggccagttccgcgctgggcccacgccctcctcgcccgccgctgcctgcgcgccaggccgggtggcggagccggccgtcgctgctccgagctcggaccctcccccggggtgatttcggcttagaaggtggaaatgcggaagtttccagcgccgaccgacagacgaggtttgcgcttggctgggcatgttccgcggctactctgcggcgcgccaggcccccgctttccgcaccccgcgaccctagaagccaccgaaccgccggcgggccatggccactctgccgagcgcagagcgccgcgcgttcgcgctcaagatcaacaggtaagacgccccccgcggcgcgcaggttgcggccggacagcccagcgctggtgtgaagcggagcttcgctgcaggggccgaggccggacgagtccattcgcgtccgcggcggggcgcgcctgagacctggggcgcccggttcccgaggctgcggcggtggagccgctggacgcgcggcggctcctgcgctgggcccggcgaggtcctccccaagaatctcggtgctcctggatgtcctcagccgccggggatcccttccccgaacaacctcgcccgctccgccctccaggttcttacaggtggccgggtcccagaagggtgataggcgcctgggtaaccgtgttgggcgcgccacggagtgtctcataaacggctccttcctttgaggcaagtctgagcgcggggggaagaagtgaagtggctgaaattagagttgcgtttgaggcaggctgcaagccttctgtcgtcctgagcaaggctccgtcctcgcctgctt

SEQ ID NO: 117372 - DNA, 244 bp, Homo sapiens
  chr9:470094-470338
  hyper
gggcctagagagagcgagcactgccgggggcggcggcgaagggcagcagtggtgggacgggcggggtagggggagttactgagcatgcgcccgggtaggggcgtgggggagttactgagcatgcgcccaggtaggggcgtgggggagttactgagcatgcgcccgggtaggggcgtgggggagttactgagcatgcgcccgagggtgtttcggggcgtccgaagcgggcgtgctccagcctgct

SEQ ID NO: 117373 - DNA, 1827 bp, Homo sapiens; identical to SEQ ID NO: 45979
  chr9:503915-505742
  hyper

SEQ ID NO: 117374 - DNA, 30 bp, Homo sapiens
  chr9:613993-614023
  hyper
aggcgctgtgcatagcgctccaagcatctc

SEQ ID NO: 117375 - DNA, 138 bp, Homo sapiens; identical to SEQ ID NO: 45980
  chr9:706972-707110
  hyper

SEQ ID NO: 117376 - DNA, 239 bp, Homo sapiens; identical to SEQ ID NO: 45981
  chr9:707165-707404
  hyper

SEQ ID NO: 117377 - DNA, 31 bp, Homo sapiens; identical to SEQ ID NO: 45982
  chr9:757052-757083
  hyper

SEQ ID NO: 117378 - DNA, 80 bp, Homo sapiens; identical to SEQ ID NO: 6670
  chr9:841325-841405
  hyper

SEQ ID NO: 117379 - DNA, 582 bp, Homo sapiens; identical to SEQ ID NO: 6671
  chr9:841449-842031
  hyper

SEQ ID NO: 117380 - DNA, 30 bp, Homo sapiens; identical to SEQ ID NO: 6672
  chr9:842207-842237
  hyper

SEQ ID NO: 117381 - DNA, 137 bp, Homo sapiens; identical to SEQ ID NO: 6673
  chr9:842610-842747
  hyper

SEQ ID NO: 117382 - DNA, 766 bp, Homo sapiens; identical to SEQ ID NO: 45987
  chr9:842779-843545
  hyper

SEQ ID NO: 117383 - DNA, 116 bp, Homo sapiens; identical to SEQ ID NO: 45988
  chr9:968065-968181
  hyper

SEQ ID NO: 117384 - DNA, 82 bp, Homo sapiens
  chr9:969532-969614
  hyper
gtgcccttcggcgggcggctgtagctgtagctgttgtgacggctacggcggaggctgcggccgcgcggggaatggagccgga

SEQ ID NO: 117385 - DNA, 437 bp, Homo sapiens; identical to SEQ ID NO: 45990
  chr9:969667-970104
  hyper

SEQ ID NO: 117386 - DNA, 726 bp, Homo sapiens
  chr9:970185-970911
  hyper
cggggcccgggacctgcgctggccacgcagggtctcaagctgaccggaagacccggcttttggcctgtgtccaatagccccagaagagaggggtctggagccttcctcccacgcgtagtgacgctcaggtgtcctcgggttgttagtcttgacccaggagagtgcaagacaggcccaaggcctggggggattgcgttatgaatgtccaattctaaacacaaggtagagcacagacagtacatcctcacggctggattttaaccgtattttaataaacacattcgagggggtgtcagtttccccaagctctgcccccttccgcgggcgggatccatggtgtgtgcagtgtaagagtgcgcagaacgcgtgtgttcaagtgtgggcgtggcaggcgtcgtgtgctcgccccgcgcactgtgcggatcgcccagacagccttgacaggtttttgcagatgtttgggtgctacggtgtggggaaacccaggcaggagcgccaggcctaattctcctggactcttggtgagcggccgctactccacgaggggctagaagcaaagggggcacgcgcttttccccaggccgcctcttgctgccgcagtggctgagggcgctgatgacccctccccgcttccagcggacttgacccgcgggctgacaacccaccgcgacaagcaggcggctgggttcgcgccgccgccccggggcccttggctcaaatttcacc

SEQ ID NO: 117387 - DNA, 200 bp, Homo sapiens; identical to SEQ ID NO: 45993
  chr9:970992-971192
  hyper

SEQ ID NO: 117388 - DNA, 530 bp, Homo sapiens
  chr9:971638-972168
  hyper
cgtccgccgggcgggttagggtcgtggcagcctgcccgcgcgccgctgactctggaattttgtccgggaaactggcgtagggccctggctctcccttcgccctccgcgcacacgcggacgaggccttagatccacagccttttctaggccctgcgcctttgaagctgggccactgccaaccgctcgcgattctcaccttcaacagtcgcccccttacccctcccccacccgcctgccctcgggagcgggtcgcctccactccaccacctgtttaagttcctccccctcggcgcccctccagtccccaccccggccccggtccaaaaaaccagcaaacggaacttttccacagttgaaagccgcggcccgcgaggccgggctgggaggggaaagcggggcgtgtctggggggcggggccccgagcactccggaagttgccccgcccaggaggctcctgggaaagtgaggagagggcccgggcctactttcgtcctggtgtggcgcccctcagcctcccctcctcccagttc

SEQ ID NO: 117389 - DNA, 831 bp, Homo sapiens
  chr9:972189-973020
  hyper
cggcctggcctccaggcaaagttcgcgccccctgttcctggggtgtcggccgcgcgggccgtttcccttcattactcccgggcccctgaatccgaacgctttcccagaagcgcgcaaatccgcttgctttccccgcggctgggctttgttcagggacagcaaaggaggaggcgggaggctggtgaggttttctggaaaaggggcttgtcccgaggaggaagtgccccagatccctgagagccaacgctctggggagaagaaactttccttctcccttgaatgttgctcagattacctaaaattattttttcagcccttgtgttctaaagtcgcagggtaaaggttatcttaagacttaacatcagcgctgctcatttgtacgttggtggagacgtgccttttttcctttgcacttaaggtggacagggtctgcgacgctcccttccaggacggtgtggggaagcggccgacgtccccagccggactcacgccctcctactactgggcgtcggctccgccgcgggcgctcccgacagggagctggagtcggacgagcggctgcccccagggcctccaggaaccgcggcccagcggggagcgccccaggctagcgcttttccagttcccttcgaaagcgcggggctgaggtcgcggcgctgggccctcggatgaagccgtgctgtagctacacctgaaccccgcgaaaggctggcgcggtcgtgtatccaggctgggtctgaggaatccgcaagcgggagagcgctaactcctaggcgtgagccgctgctggcttcgagagttcgagaacatgaaggacctggcttctcccgc

SEQ ID NO: 117390 - DNA, 88 bp, Homo sapiens
  chr9:973183-973271
  hyper
cggtatccccgggccggtgaccccggggttcagtcgtctccccgaccccaagcggcctctgctttccacccctcgccccggagggcgg

SEQ ID NO: 117391 - DNA, 30 bp, Homo sapiens
  chr9:973543-973573
  hyper
tgacatcatcgtggtcgcgatgaaaacagt

SEQ ID NO: 117392 - DNA, 143 bp, Homo sapiens; identical to SEQ ID NO: 45997
  chr9:974426-974569
  hyper

SEQ ID NO: 117393 - DNA, 341 bp, Homo sapiens
  chr9:975070-975411
  hyper
ctcccggacgcgtatgaaacgggaacagctaagggcttcaagggaaacacacaactggggttcggttttcaaccctcctctccgcaaatcagccttctgggcagagggttggctgctagaacgcctggaggtgcttcccttgaattcatggcaaacaccagaggaaagttttcaggttgcttgcttacttccagggcagtacagagaaaagcggcctccccgaggggacaagggcctctgtgcccatgaggggtcggacattgcagcggacttgcctacgctctcatctagcatttgattccccaccaggagatgggcttggtgcacgctctcagaagcgc

SEQ ID NO: 117394 - DNA, 864 bp, Homo sapiens
  chr9:975825-976689
  hyper
gagggaagaggatatcggtaactttgggggcgccaatgtggcttctgtgtctgccccttgaaagtttatacccggcgcttaacaaatcctttacaggagcacgtacgtccctgacctttcaggatactgttttatattaaaacatggacaggagggtagaaaagtaaaattcgcctgcaaaatggcttgtcatccttgggccggcagatctccaaaaccattttcttctaaagcaacaaaagagaaaaaaatacgttctaaaaggaaattacgaaaagagcctaactttcctaaaccaacatcacttcactcccctatcctaaactccacccaggtccggggtgcaaccgcaacactcccgtaggttcgagttctcccggagctgagcttctgcggccaaatgtcgggataaaagcggccttgggctcggaaaaacgcggccagatctggactggagggaggagaagagagagaagcggagcggccacctcactcgcttacaggcacccccaccctcactcccgctggtcctccccttctccgccccgcgagcaccgccgcgttctggagcgccgcagtctccagccgcgggctggggtagcggagagggcttggaggagggggccgcgagcgcccccgcgagagtggcctggctgcaggtggcaaggaaggtgaagtgcaggcacccgaggggcgcaaaggaggaggaaggcgtggggcggggagtgcaaggagacagggaccccaggggcgggggtggcggtgggaaggaggaggggttgggggagggcggcggaggtgttgggtccggccggctcacgagggagctgcagaagagctggctcagaccttaatcagagctgt

SEQ ID NO: 117395 - DNA, 614 bp, Homo sapiens; identical to SEQ ID NO: 6682
  chr9:976911-977525
  hyper

SEQ ID NO: 117396 - DNA, 183 bp, Homo sapiens
  chr9:981618-981801
  hyper
cctggccggtttgcacgcagtgcagttgctgtgtgtgtgttgcggagggttgcggcagctggcccaggactgggaccctggccacagcgggttcaaagtaggggcaaagatagggggcagcggctccttgcggccgcaatggactgccgtctccttgcaccagggggtcggagctgcagctga

SEQ ID NO: 117397 - DNA, 74 bp, Homo sapiens; identical to SEQ ID NO: 46001
  chr9:1042426-1042500
  hyper

SEQ ID NO: 117398 - DNA, 369 bp, Homo sapiens; identical to SEQ ID NO: 46002
  chr9:1042615-1042984
  hyper

SEQ ID NO: 117399 - DNA, 263 bp, Homo sapiens; identical to SEQ ID NO: 46003
  chr9:1049909-1050172
  hyper

SEQ ID NO: 117400 - DNA, 283 bp, Homo sapiens; identical to SEQ ID NO: 46004
  chr9:1050390-1050673
  hyper

SEQ ID NO: 117401 - DNA, 81 bp, Homo sapiens; identical to SEQ ID NO: 46005
  chr9:1051557-1051638
  hyper

SEQ ID NO: 117402 - DNA, 421 bp, Homo sapiens; identical to SEQ ID NO: 46006
  chr9:1051904-1052325
  hyper

SEQ ID NO: 117403 - DNA, 30 bp, Homo sapiens; identical to SEQ ID NO: 6687
  chr9:1710358-1710388
  hyper

SEQ ID NO: 117404 - DNA, 30 bp, Homo sapiens; identical to SEQ ID NO: 6688
  chr9:1749159-1749189
  hyper

SEQ ID NO: 117405 - DNA, 162 bp, Homo sapiens
  chr9:2014342-2014504
  hyper
ctaacccgccagccccgcccccagggtttgtttttccatatttttgtatatattttagcgaagatggcaggtgagggaaggttatagtgctgtacctagtccacgaagtaaacagagaggttagggtgggtttacttatttataaggcgttcagcctctcag

SEQ ID NO: 117406 - DNA, 30 bp, Homo sapiens; identical to SEQ ID NO: 46009
  chr9:2015049-2015079
  hyper

SEQ ID NO: 117407 - DNA, 183 bp, Homo sapiens
  chr9:2015620-2015803
  hyper
gtggaatgctctaacgacagctcccaggcggcggtggaagaaacgagaaagtttcaaccgaaccttgctgttctaataataacagtaataattactacttcaagggggcaaaggaggaaaaaaatcccaacaagccacagccttgatcctgagtgggcagtcagaggcgctgccaactcaagg

SEQ ID NO: 117408 - DNA, 30 bp, Homo sapiens
  chr9:2016238-2016268
  hyper
ctgccagggggctgcgccccgggcgctgcg

SEQ ID NO: 117409 - DNA, 30 bp, Homo sapiens
  chr9:2017184-2017214
  hyper
gttgccgtttgctgcggatggtggtgagcg

SEQ ID NO: 117410 - DNA, 30 bp, Homo sapiens
  chr9:2017561-2017591
  hyper
gcgcgcgcgagcggcggagaatcaggaagt

SEQ ID NO: 117411 - DNA, 739 bp, Homo sapiens
  chr9:2621194-2621933
  hyper
tggatagaggaggcccgaagaagatgctacctaccagcctctctcaggggcgcaggagagggtggtagagagatgcttgttgcccctggaaactgcaagtaccccccaggtgcacgccccgtcagtggggaggcggtggcaacagcaacgatagttgcatcagcgctaactgctgctgctgctgcgtgttctgccggaggctgccgggagggtacagtaatgactgtagggagcgcacagccgctgcggcggcaggttccctggatcaggaaattaggacaggcacccgggattggaggcgagggcggcgcgcgagccaaccagcggtcgccccgggcccccgtgagccccaggcgaacgcgcggagcagccgggcccctagagcggtccgggtggcggcggcggcagccacgaccacgaccgcggtcactcacgcacgctcacactcgcacgctccccgcgcgggcacccggctgcccggcgcgtgcaagaggagcgcgtcgagggaaaggagggccgaagccgccgcgctcccgcccgcccgccgcgcctcccgttgaccacgccccctccggccccctccccgctgctcaccccgctctccggccgccgccggtgcgggtgctccgctaccggctcctctccgttctgtgctctcttctgctctcggctccccaccccctctcccttccctcctctccccttgcctcccctcctctgcagcgcctgcattattttc

SEQ ID NO: 117412 - DNA, 1277 bp, Homo sapiens; identical to SEQ ID NO: 46012
  chr9:2622185-2623462
  hyper

SEQ ID NO: 117413 - DNA, 30 bp, Homo sapiens; identical to SEQ ID NO: 46013
  chr9:2844379-2844409
  hyper

SEQ ID NO: 117414 - DNA, 921 bp, Homo sapiens; identical to SEQ ID NO: 46014
  chr9:3181023-3181944
  hyper

SEQ ID NO: 117415 - DNA, 30 bp, Homo sapiens; identical to SEQ ID NO: 46015
  chr9:3525873-3525903
  hyper

SEQ ID NO: 117416 - DNA, 404 bp, Homo sapiens
  chr9:4297350-4297754
  hyper
gggcaaaacctctaacgtctctggggctcggtttcctcatcaggtgaagccagggtccactctagctttaatagtctctcctcgagattcccggccccatactaaagggacctggtccactggggggagctgcagaacttccctcttctcacaaactccagggccctggggccccaactctcgggagatgctgaagtcttggaggaagttggttctgccggctcggggagagggtgcaagagcaaccctctttgtgaaacggggccgcgactccacgagtcctgtctctacggaccctactccctgtgattccggaagcacctccctaccccttccccaggtttacatgctccagagatgagggccaagcggataccggggcaaactagcgtggggctcaagga

SEQ ID NO: 117417 - DNA, 31 bp, Homo sapiens; identical to SEQ ID NO: 46017
  chr9:4298072-4298103
  hyper

SEQ ID NO: 117418 - DNA, 1404 bp, Homo sapiens
  chr9:4298791-4300195
  hyper
ccgggccggtacccgcgaggagtgtaggtaccctcagcccgaccacctcccgcaatcatggggacaccggcttggatgagacacaggcgtggaaaacagccttcgtgaaactccacaaacacgtggaacttgaaaagacaactacagccccgcgtgtgcgcgagagacctcacgtcaccccatcagttcccacttcgccaaagtttcccttcagtggggactccagagtggtgcgccccatgcccgtgcgtcctgtaacgtgccctgattgtgtacccctctgcccgctctacttgaaatgaaaacacaaaaactgttccgaattagcgcaactttaaagccccgttatctgtcttctacactgggcgctcttaggccactgacagaaacatggtttgaaccctaattgttgctatcagtctcagtcagcgcaggtctctcagtgacctgtgacgccgggagttgaggtgcgcgtatccttaaacccgcgcgaacgccaccggctcagcgtagaaaactatttgtaatccctagtttgcgtctctgagctttaactcccccacactctcaagcgcccggtttctcctcgtctctcgcctgcgagcaaagttcctatggcatccacttaccaggtaaccgggatttccacaacaaagcccggcgtgcgggtcccttcccccggccggccagcgcgagtgacagcgggcggccggcgctggcgaggagtaacttggggctccagcccttcagagcgctccgcgggctgtgcctccttcggaaatgaaaacccccatccaaacggggggacggagcgcggaaacccggcccaagtgccgtgtgtgcgcgcgcgtctgcgagggcagcggcggcagggggaggaggaggcagaggcggggtggctggaccctcggcatcagctcattctcccctgctacacacatacacacacaaataatgtttctaaaaagttcagttgcgactttgtgcctcgcctgtcctgttcatcctcgtcctgggccggggaatgcttctgggggccgaccccgggatgctggctaattgctgccggcgggttccgtcgccggtgtgaccctggacggcgcggacggcgtacagggggtcccgggaggggcagtggccgcggcactcgccgccggtgcccgtgcgcgccgcgctctgggctgcccgggcggcgcagtgtggacgcggctgcagggagaggggaagggggaagagggagggaggaaggcagccgggcgaggagtgtggatgtgtgtgcggccgcgagggccggcctgtagccagctgcttcctgagtgtgagcgccggagggggagggggaagagtgggggcgggctcgcgggtcactaggctggccaattcgaaggccgagcttgtgtctcc

SEQ ID NO: 117419 - DNA, 30 bp, Homo sapiens
  chr9:4490742-4490772
  hyper
ctgtccaccgtggccgcggtggtgctaggt

SEQ ID NO: 117420 - DNA, 321 bp, Homo sapiens
  chr9:4491099-4491420
  hyper
ttctttgttaatcccgcaccgtatctccccctatcaccgccaccttcctcaccccacacccccagcctcgctgcgcgggcagagattgagtgtggattacagttctcagtcgaattggaagaggcaccctggcctccgggatgggccggacccttaggggagggaggctgagaacgctgtcgccgctcatcctgggcagtgcgtggaaaggtgccttcccacgcggcgagcgccgactgcctgcacccgggctctgaaaagctgccagattcgtgcctgaattctgggatgtgccactgtggcccgcgggaggtcaccggg

SEQ ID NO: 117421 - DNA, 30 bp, Homo sapiens
  chr9:4666251-4666281
  hyper
gttccctgcgtgggcgaaaggactggaatg

SEQ ID NO: 117422 - DNA, 30 bp, Homo sapiens; identical to SEQ ID NO: 6693
  chr9:4679311-4679341
  hyper

SEQ ID NO: 117423 - DNA, 30 bp, Homo sapiens
  chr9:4741396-4741426
  hyper
cctgcgcctctccgcggcccctctccaccg

SEQ ID NO: 117424 - DNA, 30 bp, Homo sapiens
  chr9:4759501-4759531
  hyper
ccgcacagaagggggcgccattcctgcatt

SEQ ID NO: 117425 - DNA, 30 bp, Homo sapiens
  chr9:4792542-4792572
  hyper
taatgctaagaatccggcacgtcgtaggca

SEQ ID NO: 117426 - DNA, 30 bp, Homo sapiens
  chr9:4793163-4793193
  hyper
ctgagcgggcgccccgtcaaaatccgaaag

SEQ ID NO: 117427 - DNA, 30 bp, Homo sapiens
  chr9:4793443-4793473
  hyper
cggcgtctccggggcgctggtagtaaacag

SEQ ID NO: 117428 - DNA, 30 bp, Homo sapiens
  chr9:4985588-4985618
  hyper
cgggctcgagggcgcgctctggtcgcccga

SEQ ID NO: 117429 - DNA, 100 bp, Homo sapiens; identical to SEQ ID NO: 6694
  chr9:5022027-5022127
  hyper

SEQ ID NO: 117430 - DNA, 249 bp, Homo sapiens; identical to SEQ ID NO: 6695
  chr9:5054639-5054888
  hyper

SEQ ID NO: 117431 - DNA, 30 bp, Homo sapiens; identical to SEQ ID NO: 6696
  chr9:5064973-5065003
  hyper

SEQ ID NO: 117432 - DNA, 129 bp, Homo sapiens; identical to SEQ ID NO: 6697
  chr9:5069923-5070052
  hyper

SEQ ID NO: 117433 - DNA, 30 bp, Homo sapiens; identical to SEQ ID NO: 6698
  chr9:5072525-5072555
  hyper

SEQ ID NO: 117434 - DNA, 63 bp, Homo sapiens; identical to SEQ ID NO: 6699
  chr9:5073736-5073799
  hyper

SEQ ID NO: 117435 - DNA, 30 bp, Homo sapiens; identical to SEQ ID NO: 6700
  chr9:5078415-5078445
  hyper

SEQ ID NO: 117436 - DNA, 153 bp, Homo sapiens; identical to SEQ ID NO: 6701
  chr9:5080227-5080380
  hyper

SEQ ID NO: 117437 - DNA, 100 bp, Homo sapiens; identical to SEQ ID NO: 6702
  chr9:5081711-5081811
  hyper

SEQ ID NO: 117438 - DNA, 30 bp, Homo sapiens; identical to SEQ ID NO: 6703
  chr9:5090773-5090803
  hyper

SEQ ID NO: 117439 - DNA, 30 bp, Homo sapiens; identical to SEQ ID NO: 6704
  chr9:5123003-5123033
  hyper

SEQ ID NO: 117440 - DNA, 30 bp, Homo sapiens
  chr9:5437578-5437608
  hyper
gagtccacgccaggcgacaagaacgcgctc

SEQ ID NO: 117441 - DNA, 30 bp, Homo sapiens; identical to SEQ ID NO: 46031
  chr9:5437883-5437913
  hyper

SEQ ID NO: 117442 - DNA, 30 bp, Homo sapiens; identical to SEQ ID NO: 46032
  chr9:5832992-5833022
  hyper

SEQ ID NO: 117443 - DNA, 414 bp, Homo sapiens
  chr9:6412570-6412984
  hyper
ataggcctggagctgccgcctccgccaggcgacgggaaaccctcggaagtgggtttccgcgcgaaagtagcattgcggccaggcgggaaacgtgttcgcgaagcaggagggcccccggggcctttcccgggcgacccgacccgccaggccgcgtggcgggagctttcctgttgagcgcggtggagcgcacacatttccttcagttctttctcggaagtttaggccgcacccacccgcgccccctttccaggattatacaagtgcacgccagggtttcttatttttggtgtgtttttgagaccaaagaaccatatccgctaagcctgaggaggcacccgccccctcagctctgaaacgaggcctcaaaacggcaaccgatgtggtagccgcgcaatcttccgaaacccaaaggct

SEQ ID NO: 117444 - DNA, 30 bp, Homo sapiens; identical to SEQ ID NO: 46034
  chr9:6413529-6413559
  hyper

SEQ ID NO: 117445 - DNA, 249 bp, Homo sapiens; identical to SEQ ID NO: 46035
  chr9:6414081-6414330
  hyper

SEQ ID NO: 117446 - DNA, 30 bp, Homo sapiens; identical to SEQ ID NO: 6707
  chr9:6587038-6587068
  hyper

SEQ ID NO: 117447 - DNA, 29 bp, Homo sapiens
  chr9:6644338-6644367
  hyper
gaatctgctacaaaacgcaggggaagctc

SEQ ID NO: 117448 - DNA, 1612 bp, Homo sapiens
  chr9:6644539-6646151
  hyper
cgattttcagggaaccacaaaagacaaataggccagaataatctaagtccaagggagccctcccggccacttacaaacagggtcttccattttcaagggtcttttcaaacggatgttggcagggaccgtcttctcgatcaattcatcaatgctctaaaattaaaacgcaaggcagaggaaagtgcctctgagttaaaagagtcacctctgtgttttgcgactacaaagccttgtgggaacctcattgaaatcgcctaattagggttctttttaaaagaaaaggaaaactctgagcaagccagaatgatttggaggaaagaaaatcgtgaagtggggtggagattccgccactcggggttggatttcagttgcaaccggagctaaccggtaagcccactcttaatcagggggtcttcctcctcttgcaaagtttaggtccatccacagggccacttgggctgggggtggtttaaaaatgtacacttttgaggcacgaagactgggtgcaggagaaagtaagctgttaagaagtaagaaggcacgaggaccaaaggcacgaatttgcttccacgccacggcccgggacccagggtgcggggaccacgcggagcgcagcagagctcagggtaggagccgggaggccgcgcaggcagagcccgggcagggcggaggggaggccgcggagggccgggtggaggtccttaccgccagccccaaggtctgcagcatctctctctggtctttgtccccagggccgatgtgcctccgagcgaagtcgtcgtgtctgggcagaaggcgctccaggaggcgcgaggccccagccgcggcgctgtccccgccgccactgctgctgtcccggctccgcggcgcccagcacggccccgatcccccagccaggcggcggccgcccccgaccccgcggcccaggcgcagcccccacgccctggcacaggactgcatggccgcggccaccgtcccctgccccggcccgcaagggtcagccgcgctcttggcccctctcctggcctcggtcccccgggtggcggctgcgcccggcctggagcccctttcgctggacagtcggccggacagatggatggacgctcgcgggcaatgaatgggcgctgcgctcaaccaagacactcgcgcaaagttgtggctccacccaaggcacctgctccgcacactttaagcggcgccctggaggcgggaggtgggttggggccaggaagcccttggccaatgaaagtagacagagggggagggggcggaacagttcccgcccccgccccctcttcctaccctcttcccagcccttccgtggagtcccgcttcccctggaccggaggctgccatctccagtcctacccactccgacgctggctggtgccgggggccgggacgctccgtacgccgcccgccagggtgtggagccgcactggggcaagatcaggtgggacagcccaaagactccgggccaagttcctgggggactcggcggagatggaagatgattctcgaagctctccatttccttaattttgaggtatctttctctgtcacatttcatctcagggaaattaatatgggcagatggcggttcttttatctt

SEQ ID NO: 117449 - DNA, 30 bp, Homo sapiens
  chr9:6680908-6680938
  hyper
cccaataccctgcccggcaaggccgcctcg

SEQ ID NO: 117450 - DNA, 30 bp, Homo sapiens; identical to SEQ ID NO: 46039
  chr9:6681593-6681623
  hyper

SEQ ID NO: 117451 - DNA, 30 bp, Homo sapiens; identical to SEQ ID NO: 46040
  chr9:6757811-6757841
  hyper

SEQ ID NO: 117452 - DNA, 30 bp, Homo sapiens
  chr9:6758838-6758868
  hyper
tgccaggcacagaacgtggcgtggagtggg

SEQ ID NO: 117453 - DNA, 30 bp, Homo sapiens; identical to SEQ ID NO: 6710
  chr9:7076080-7076110
  hyper

SEQ ID NO: 117454 - DNA, 352 bp, Homo sapiens; identical to SEQ ID NO: 6711
  chr9:8856994-8857346
  hyper

SEQ ID NO: 117455 - DNA, 79 bp, Homo sapiens; identical to SEQ ID NO: 6712
  chr9:8857406-8857485
  hyper

SEQ ID NO: 117456 - DNA, 754 bp, Homo sapiens; identical to SEQ ID NO: 46044
  chr9:8857685-8858439
  hyper

SEQ ID NO: 117457 - DNA, 30 bp, Homo sapiens
  chr9:8858650-8858680
  hyper
gtgtgagtgtgggtgcgcccggacgcgggg

SEQ ID NO: 117458 - DNA, 356 bp, Homo sapiens
  chr9:10612634-10612990
  hyper
gcgcgctcggaaagccggcttgggtcctgctaattattctgaaggcaaagtacctgcactctccccgccgaggctggctggcggcgccgcgccggaggggaggaggctcgggaggaggaggagaaagagcagcgggaggactcgggctgggaggggagcgcagggttggggaggccgatgagcggctcccggctcctcggagaagcagccgagacggcaaggaggaggcgaggctctgtcggggcgaggcgctgcccccacgcgctccggccgccggctgcgggcgcggctgggcggggagccgaggcggccgctcccgcactcgctcgctcgctcgctggcgctccctcctcgtc

SEQ ID NO: 117459 - DNA, 410 bp, Homo sapiens; identical to SEQ ID NO: 46046
  chr9:10613046-10613456
  hyper

SEQ ID NO: 117460 - DNA, 156 bp, Homo sapiens
  chr9:12775117-12775273
  hyper
gtccatgcacacgaccgaactcctctttcactgaccagagattatttctgacaacccaggatatcccgaaagcttggaggcatatggctggaaaatgaaacgacccaggacatcgtttctggctgcatcattattttgtgtcgcgtagtaccagat

SEQ ID NO: 117461 - DNA, 1163 bp, Homo sapiens
  chr9:12775485-12776648
  hyper
tcggaggagtcgcagcggactgggaactgcagctgcgaccccccgcgtcctgtgcggatttcagggctgataccgcataggcggttatggaaaggacggtacaccggagcggcggaggatagagaccctggcccccggagaggtctgctgatttcgcagcagccttcgaagccgtggctgcctttcatctgctgcgttttattactattatcgccgttccggaaaagtcatggaagacagcccgctgccagacctcagagacatcgagctgaagctggggcgcaaagtacccgagagtctagtgcgctctctccgtggggaggagccggttcccagggaaagggacagggacccctgcggggggagcggtggtggtggcggcggcggcggcggctgcagtagcagcagcagctactgcagcttccctccctccttgtcgtcctcctcttcgtcctccccaacctctggctccccacgaggtagccactctagcgccctggagaggctagaaaccaagcttcacctcctcaggcaagagatggtgagtgtggtgcgccagccgcgggggctgggacctgggctgggccaaaagatggggcgatctgagaatggggctgggagagaggacggcaggggctgcagagcggagcgctgggcgcgtgggaaatgctgggtggaggaatgagcagggggcgctcatccggaggcagctgctgcgaggcttgtttaccgcggactttgctcggtcacggtttgcaaagacagcacagtcggctggctccactctgtgtactttcggacaacgcgactcactgcgccgggctctatttagctgccagcccgtagcctcttaggcaccagcccgttgagagtttgcagttattgcacccatctaaggcctgctgtgcgctgttaacacttcgggtaggttcaaaaggtggctcagtccaatgcacttactgcaaaaatacttcctggtttgccgggaggtggcgtggcagggtccttgcagcctttcctcctagctcacccttccaccagtaccgctccgccctcctgccctcccttcttggtgcagcagccgcagctgttccaaggccactgtcgagcagattctccacagctggttctgaaaacaatggcctactcgtccttgatgtact

SEQ ID NO: 117462 - DNA, 336 bp, Homo sapiens; identical to SEQ ID NO: 46050
  chr9:13034171-13034507
  hyper

SEQ ID NO: 117463 - DNA, 1141 bp, Homo sapiens
  chr9:13278634-13279775
  hyper
agacgcccatcagcgcggggggtgaggagactaagggagagacaagaccaacgtgctcccaccaacgggagcggcggttaaaagggcgccggtgccaggggtgagggacggggcaccggtaccaattagcggctcgcctcggggtccccgcggctaaggcgagaacgcaggaccaggagcattgctgcccactctctaccgcaacccgcacatcccgggaccacgtaacggcggatggggcgtccgggagcggcccctgcaggggagagcaacaggctcccgcgccctggaggcctggtctgcgctccgggcccccaggctaacaccccacccccagccccccgacaccaagactgtgcccctctgggtcaaggaaaaggaaaaacttttaaacctcttagtcagcgagagcaaaagaaaggggtggcgggggtgctgaaaggtctaggattatccaccgcggggctggggggagtggagacttgcgagtagcaaaggaaacttctagaccccatccttttaaaaaagccacagcagcggcttccgcgaagcgccgggccgcgcggggtggggcaagcgcaccgccccaccgccccacggcccgccgccacccctacccccacccccacccccacccccatccccgcccccacccccacccccaagcgccgagcccagggcgcccgcgcaccttccccgccggcgcgcgcgcagggcgcgggggcgcgcctcggcctctgggccggggctcaagcgccgcttacccggctcgcggcgcccgcccagggccgcgacgcgagggggcggaggactggggagcaggggtcgccggggcctctggatgcctcgcctcgcccacgctcactgtcttctcttctgaagtaacgacccggcgaggagcttcggatcaaaacgcacagacactcacgcgtgactgagaaacttaatcccgcggtggcccgacgccagcctagcgctccgccgcgccccctcccccagcgcgcgccgcacttgcgccgaccggggctgccgcggaggcggtggcggggcccaggctgctggggctgccgtgacgcctgcgaccggcggggcggcgggcgcgccttggccaatcaggggacgcggccgagcaggcctgtgc

SEQ ID NO: 117464 - DNA, 320 bp, Homo sapiens
  chr9:13568804-13569124
  hyper
tcctgctgtcacttacggtgggctcggggaacaatgttgcaggaacatagagcttttgagggaaatgtaaatcgccggcgacactgagtcccgtctgttttctcatcggaaagcagcatttcagagagctgaactggcgacactgcttggcgaagacacgccgagttcaggaatattccctgttcccaggccctggttgtgtcgaagtgggactttctgaagagggggcactctgggagagacgggagcaaaggggcactttcagaagcagatgctcctggcttcggaaggaaagctgctctaatcggagttcagccgtc

SEQ ID NO: 117465 - DNA, 30 bp, Homo sapiens; identical to SEQ ID NO: 6720
  chr9:13951234-13951264
  hyper

SEQ ID NO: 117466 - DNA, 2813 bp, Homo sapiens
  chr9:14312997-14315810
  hyper
agcgcagtccagcggcgcccacacagactcgtgctacagtcccctcgcccaagttcactggctgtttttaaaagcttagtcccccgtaaagtcctccaaagcccgagtccacctcaacgcgcgagctgctgagaggggctacgggcaccccgggcggggatgccgcaccacaacgggcacttgaggggccgcacggggcctcgcacttacaggtcccggccctgcccaccccccggcggccttgcccggcccagcgcccgcgctccgtgcccagggcgcggggctgggcgctcgcagtggccgtggcgaggggccgctcccggctcccacgccgccccgcgacgcccgctgcaactccgggccacttctccaagggacggggatgtgcggaggttaactcaagccgctaattgtccgcaacaaaacaaaacaaaggcatttcgggccagagagaaagctcgagaaagcgaccgagacatgtacctgagtgagacagatgggagaatacatcatgacttcgccttaaaacgcactttccgggagatgcccaagaaaatcttcgagaagcaagaatttcatctattcattttacagtcatctgagccccgcgatgcgatcaatcaggacggggctctgcgctggatcaccgcaacttcacaacaaacccagtcctccttaaatagccaaagattcaagttcactcggcgtgctagatttccaggggtgaaatccaatctacacttttaaccctcttgcagtccgagcgcgctggccgtgcttgccgaggccgccgccgccgccggtgttggctgcttttcgcctgggtttggggatttgttttctattttgcagttgttgttgttgttggggtgtagggggtgcgcgaaggttcggtgtgggttggattggggtggtggttggtggtaaaatgctttttcaaaaaaggcggggaggggggcgcgggagggcgcaggagggcgagcgggcgggcgggagggagagcggggagaatgtgtcaccgcgctgggaaagttcaaggttacagccccaagcactgcggcaggatcccggagtggtgatcgcaggcgaaactttgccgcgagccgaccatgtgtgtgcgcgaggggcagcgtgagcgagtgcgcgcgggtggcggggcgcgcgcgggagagggccggggtgggggcggggtgggatgggggagaagggagaggccggggtgagggagggggcgcgagcgctgatctctggggcggaagaggctcgcggcgcgtggtccccggcagcagcagccgccgccgcccgcgccgggtcttcggcgcccggccgcccgcccgcccgcctcgccccgcgtctgacccggccgagcgtggaggctgctgttgccgccgctgcccagagcccaggggtatcaaaacgatctcctgaaaaattccaaacgataaatcccgctctcccgctcggctccaaactcctctcttttctgctctaggctcttttttttccctccctctcttgctttctttcgttgcaaaacttggaagttgaaaaattcaccggttccaccctctggaccccgctcgagctctctccaaatcagacttaaggattgttttattatttaattacacaatcatcgctttactcctcctcctgcaaacgcgcattccttttgcaccagcctctccacaccccccgcccccccaccttcctcctcctcctccttctccttctctccccccacctctccctcatttgttaaaggtatcctaccggtgctacagaaccatgactttttttttttttccaaaatagctcttctttccgctgccctccccacaccagcacacacatacacacccccgaaaacccgccctggaagaggtatttcggtgctcgctgcggactcttttaagccgcgggaacatccgagtgggagaagcaccgaaaccgtctgagcccgagaaaggaacgagtggaaaattccctcacacccaggccgcccccaggccggggctggggcgcggacactcgcacccggggcgggctcagtccgcggagcctgcggctgccgggaaaagggggaggccgagcaggcggggacctgagcgaacttgggctcaagtagttggggcgcgccggcgtggaccaggggggtgcggcgcccagcccccgacggccccgcccggagcccgggttcgcggatagggagggggtgcgggttcgtcccgggtctgcccaccaggggcccgcacccgaggcagtcgcggcgcgcggcgcttcgccgcggtttgccgccctccccgggggtgccccgtgcacgtggcctcgctctgagcgggaggaccgggccgagccgccgccgccgcctcttgctccctccacctcctccccgcgcccggcttcgctctcctcctcctcctcctgcagccccgctggctggctcccaatccccaccccccggggcccggggcgccggcggaaagcgtctccctacccgcccgggtgcaggcggggcggggccgcggcgcgcccggggctgcggggcgggccggcgggcgcgcgcgcgccgctgcagccctccagaggctgcgggccctgagccgctcggcgcccgcgccggctccccaccgcggcgctgccccgcccccaccccgtcgcccgtgcaggctccgagtgaatgaacttgattccagggattttgaagaaggcggttcgccttgcaccctttctgcaccccccgcccacatacacacaccgccccccaaatccagttttctgcttggggtggatggggacgagggggaagcaaa

SEQ ID NO: 117467 - DNA, 846 bp, Homo sapiens; identical to SEQ ID NO: 6723
  chr9:14322292-14323138
  hyper

SEQ ID NO: 117468 - DNA, 78 bp, Homo sapiens
  chr9:14347273-14347351
  hyper
gtgggggatgagaaacgaactccgtcccctgcacagtcagtgccttcgggggctccaccaccgcgcgctcccaccctc

SEQ ID NO: 117469 - DNA, 1427 bp, Homo sapiens
  chr9:14347633-14349060
  hyper
agatccaagtctcttcggtcaggtccgcccaaggtcccagaggcactggggggtcgggtgactgtgcggagtgtaaaagacatttccttaggaaacagacaaggcagggccaggagttccgcggttttttttccgtgcagaaatcactacccggcgacggctcagggcggtagagggcaagtcttatctgccaaggcgggattagattctctcgccgagggtcccagtatcccgccgcccagcaagggccgagcgcgcgcgcgcgccagggagctttggagcgacgcgcgtagtttcgcgtcgcacgcggtgtctggtctccgcgcaccacgtgcgctcgcggtccttggcggggacgttggtgctagcgatccgacagagcacccaggactaggtttttgtgatgccctaacctgggcatttatgctgggggcggaacgaagtcgcccaacccaagttctccctgcaccctgggaaggaaatgtggtgcgccctctggggcgtgaggccgccgcggcccattctacacacctactggcattccgcttttccttactgtgcgccaggggaaggcataattcaattatatcatacaactgcagcgcacccttttccttttttgctttgaggggaattttccaattcccaaataaatacctatggctctaaagccgagttgggttctgtagtaactaccgggggtgaaaaaaaaaaaagaccccaaattggctgtgagtttacagcctgaagcagcttatttaggctcgctgagcgccgttccaaacggcagggctcacgctatttcgggagaagttggagggtggagagaaaacaaggttatttaaagtgactcccagaacgcagctttcgttcctagactctttaggtgtcagtgcttcggctccagtttagcacggcacaggcggcccagcctttgatatttaagccaggccagcgcccgggtgaaactacctgttgggggattctgccgcctggaacccttcttcttctgcgcaatactggcagcagtgggatggctctgggggtgccacgcgaagagagagggcggaagagccgggagcagcggacagtcagctgcatgtggcagtgcctagcgagctgctcccgcgcctctgctcgctctttgaaaactggaaacagccccctgtgctctgtgctgggcccctggctgcggagatgggcccaaactcggcacgattctctaagttcggaaaccacgaagcttgcgccttcatgcgtgtctaacattaaaaacaaaaaaacctcctggcggcttcctgggctcccgcccccaccttgcgctccaacacccggcacttttccctgtaccgaaattcactttactacttcttgaaattcggaaaactccaccgacgcttggactcgctgcaacccaggggctgcct

SEQ ID NO: 117470 - DNA, 30 bp, Homo sapiens; identical to SEQ ID NO: 46060
  chr9:14692916-14692946
  hyper

SEQ ID NO: 117471 - DNA, 30 bp, Homo sapiens; identical to SEQ ID NO: 46061
  chr9:14693523-14693553
  hyper

SEQ ID NO: 117472 - DNA, 31 bp, Homo sapiens; identical to SEQ ID NO: 6725
  chr9:15306090-15306121
  hyper

SEQ ID NO: 117473 - DNA, 623 bp, Homo sapiens
  chr9:15306322-15306945
  hyper
tgctcaggcccgggcgcgccacgactgaaggagtggctaattactcaaacacagttgaaaccaaaggaggccggagtcggttctcaaagtggtttccctccggccaccaccgactctgaggacctgctaggggaagtgtcccggccccgtggagggagagggaagcaccacagcctgggctgcggctctagccctccagccccagcccctggcagccctgccctgctgtcgcggcaggtacccctctactcattgttcctcaggctgccccctcttttcatcaatcgtaagcctttcggttctgccaccaggaaacttccatagaaggtgagattcccaggtcgagggatgattccacgaacacccagagagccagtgccaggacttcagggtcagacttcgtaaagcccaggcgtcgctgggccggcccggaacagctcagagctgcgggtcctatggtcccgcgccctcacgcccatccaagtgctggcaggacgtgggtcctccatccccacgactcgcggggccggcgctccgaacctcggcactgcgtccgctccgcgcgccgcagggaccctcctagctccagcggggacagacctaccaaggccgggcgcccccac

SEQ ID NO: 117474 - DNA, 393 bp, Homo sapiens
  chr9:15306998-15307391
  hyper
cgtcctagccgggctcactcttctctcccggactcctgtccagggcttcaggggccgggcccgcaatccccatcggatcgtacctcgtccgcttccagctccgctcggctgcctaagagcgccatattcctcctctggctgctgccacccaaaaaccaagcagggaactcagagccgactcctgctctcggctctgggctcagcccagcgcaaaggagggcaaaaggggacggcccggcgctccctccgggtctcgggcggggcctgagtgcagctactcgatttccccgcccccggagccggcaggccagcacagcatccatttcctccccggacgccgcgccgctggccgggccacttgcccggcccccagcgggcggcagccccgcccaa

SEQ ID NO: 117475 - DNA, 30 bp, Homo sapiens; identical to SEQ ID NO: 46067
  chr9:15422754-15422784
  hyper

SEQ ID NO: 117476 - DNA, 31 bp, Homo sapiens; identical to SEQ ID NO: 6728
  chr9:15423708-15423739
  hyper

SEQ ID NO: 117477 - DNA, 30 bp, Homo sapiens
  chr9:15511343-15511373
  hyper
ctctcccttggctgcgtgttagggagaaag

SEQ ID NO: 117478 - DNA, 30 bp, Homo sapiens; identical to SEQ ID NO: 46069
  chr9:15553045-15553075
  hyper

SEQ ID NO: 117479 - DNA, 239 bp, Homo sapiens; identical to SEQ ID NO: 46070
  chr9:16133901-16134140
  hyper

SEQ ID NO: 117480 - DNA, 20 bp, Homo sapiens
  chr9:16154650-16154670
  hyper
tgcagcaaagaaaaagctga

SEQ ID NO: 117481 - DNA, 102 bp, Homo sapiens; identical to SEQ ID NO: 6730
  chr9:16154745-16154847
  hyper

SEQ ID NO: 117482 - DNA, 162 bp, Homo sapiens
  chr9:16192254-16192416
  hyper
taaggaagcaaagaacgaggggtggagagagtcgtccccggaattgcatggcttggggcttggtccagattgcgtggcgaggagggtaagcaggcccagcagagggcgccaccgcgctggctctcttctcccgcgcagtgcaggcaacggggcggtgttcag

SEQ ID NO: 117483 - DNA, 30 bp, Homo sapiens; identical to SEQ ID NO: 46073
  chr9:16726845-16726875
  hyper

SEQ ID NO: 117484 - DNA, 2067 bp, Homo sapiens
  chr9:16870006-16872073
  hyper
gattttcctgccctgcgttctgcaccttctccgtaaagcctgcgggagcatttcctcccatctccatttaccacgggaagattccgaatgtgaagacaaggggagaggaagagtcaacgtgccgggcccgggcggctgcgccccagcgcacccggcacccacgcccagccgccggtccctcactcggcggcaagttgtaaaagttcccgtaggtcccagccgccttcctctcttccccgagctcctgccagcgctccattcatcccccactcccctccacctcgtccccccagcccgtccccaacgccctggagcctcccctagccagccgctcaccttcgcgcggaagccgcgagcggggccgaccttgagaagccccctctcacgtgcaccctcccacctagagctcgcctcagaaacttggggccaagtttaggggaggccactgggagcgcagcggggatcaggtcggaccggggttctggtccccggcccgccctcctcagcgccccttgcccctcacgccgcgggccggagggcggacacggcccccgggcggccccggtggcgctcgggcgcgggggtcatttctgaggaagtctagaataaaagaggaaggagggtggaaacttcttaccatctcggcatgctggttgtcaagtgcagcccccgcctcttggtctcctcttagcggccgcgcctggaccagcccctcggccgccgctggctccctccgtctcggcctttctctccctccccctccgagttcctccgggcctccgctctcgccgcctccgcctccccgcccgcccgcgcgcgccctcgccgcggcccctctgcgctcaggtgactgatttacactcgcgccggggtcgcgctcgcgccccgagtcccagccggcacggttccccggctcctcctcgggacaaaaaaaaaaaaaaagggaacggcttgtcccgggagggggctgccctgctcgcgggaggcgggggaccggcgggcgaggtgacctcggcggccgtgcaagccccacaagtttttcctctctctgcagaattgtcgtgactacaatgttgcttcccttttgcaaaataaaagtcggtcgttgtgttgtttgtcctcagaggtccaggggcttggggaaggaggatgtatgtttctccctccccccaccgccccgtgacttctttgggggcttgtttgttgtttgggttgttcttgctctctctttctggggatggaaaaaacaactttgtggggatggaaaaacaaccctggcgcccccccccccccccggggagctgcgggcgtggaggtagaggtggccgctagcgcccagctgtcacacacacacaaaaaaaaattgcggggcgggggtggggagcggagcaaggagaggaggctgcgaaacgccgaggaaagggcgcgaactttattccgactgcagcaaaccgcggcagctctttccttttcgggcactcgggcgtctctgtcccctttgaccagttcctcctccccagccccgcacgccccctcctcccctgccccttccccagcgtcccagccgcggccgacccggctccccgcgaccctctcagcccagctcctccgcgcgccgctggggagaaggcgagtgaggcggaggaaaacccagcggacagaaacctgggacgcgaacgtgctgggagaaaaggccaaaagttgcgcgcagctgggggaaaaaagtttttctggtggcggagcgttttgtgccggcccagacgccggcttgcggcgagggcttccttccctttcccgtggtctgggccgcgggcctcgggctggagaggaaggaggctgtcgcgcccgcgggggaaagaacagtcacatctgtgggtgacactcagccgacccaagtcaccctgccctggagactcagaaacgccgactacagcctaagcgcgcacacgcctgcagctgaacgatatttcttaaatacaggcaaaacacactccccggccgcaagaatggggcgggggtggggggggagcttaatcatcatcatctaactaacgtacactttgtgcc

SEQ ID NO: 117485 - DNA, 30 bp, Homo sapiens; identical to SEQ ID NO: 46077
  chr9:16915005-16915035
  hyper

SEQ ID NO: 117486 - DNA, 760 bp, Homo sapiens
  chr9:17134993-17135753
  hyper
gggctcgccgggttggggaaagggaggtggagtttccaacagggaacttgacccgttagcagccgcagccatggcggcgcgttcgcctccctcaccgcacccttcgcccccagcgcgacagctgggccccaggtccccacgtgttgggcggggagctgaagtacacgcaatgcgcagcgaggcctcgggttttgccggcgcagcgcgggaggtggtcgcggacgaaagtgataaaatctgggtgggtgaagaagggtcagggggccggcgagggcctgggggggcagctccggctcatgctcccctcctcagcgcgcccatggggtccagacggctagagggcatctcggtagaggaggcgatggtgacccggacgcagctgctggaggaagagctgagcagcctaaaggaggagttggccctgtgtcaggtatcgaggagtctcgcagtccccctttccccaccacagcggggccgggacccgtggggaggcgcgcctttctccctctgccttgggacctaccccgcccagcgacgctccctggcagatgcacaccctgcttcgctcgcggccgggggctggagggacgcggctgcgcccggctccccaaacccgggcccctgcccctttccgaactgcggccagacaggcttcgcctccgcgcccgggtttggttttggtcacttggatactcgcagtcgcatcctctccgcttcccccccaagcccaagttcttggtggtgacggtagctgatacct

SEQ ID NO: 117487 - DNA, 30 bp, Homo sapiens
  chr9:17135820-17135850
  hyper
tagagtaaaatccatcgatgaaggagcctg

SEQ ID NO: 117488 - DNA, 581 bp, Homo sapiens
  chr9:17578710-17579291
  hyper
ttttcaggctgcggcgcagagacgccaggctcaaagggcaggagggccgtctgcaggcagcgccgccgcggctacctggaagcccagcaagtcacctgagtcctgcgggtgcctgggctgccaatctgcagcgacccgtccgcagcccccgggggcaggaacaccaaccccgggacaggaggacgtcctcggcccgctgactagggatccgccagcgggtgccgctgagccacatccccgcagttggcgccagcatccaggtaccgcgcgccacagcacctgcctgggcgttcccgcgcttggggcggggcttcccgcgtcccctttaagaggccgcatcacccgcccttgacgtcagagtgtttctccgcaagagcccgtgtcccgctaggctccgcgccctcgcgcccatagccccggcggcggcacgaccagaggcggccaggggagcgcgccgccccgctcggccctccagtccccctccgcctcctccctcccgcacagcagccgccagcgcggcctcctgcaccatgtcggtggccggcctcaagaagcagttccataaagccactcaggtaagg

SEQ ID NO: 117489 - DNA, 408 bp, Homo sapiens
  chr9:17579402-17579810
  hyper
ggccgcgccccgcctcgcaagccaaggcggcggctcggggcatccccggtctgggcgtccaccctcggtcccccgcccccggcttggtgcgcgctgccttcccgcgggtccccggcgtcctgcctggtagcgctgctcgccgcccccgcatcatctcgcgcccgtgctgcaggaaggggaccgcggctgcactgctgccgcggcgcgcaggtgccttggcggcgcggtgggagattatgtaaagtcgcctcttcacgggtgaccttgcggagtcggtgcacccggctttcccgggatgtgttggcatgagcggtggccgcactgggggtggcggggcggaggccggcggtttgcgctcctctcccttaccctgttgtcagaaccctccttccccgccgcccgcaggct

SEQ ID NO: 117490 - DNA, 442 bp, Homo sapiens
  chr9:17905990-17906432
  hyper
tgcctacccagctgtcgtgggtccccgtcactcccgggcgcatgttgcaaaacaaatcaactccatgggaaaagctccatgagcgcccaggggacaagtccccacggacaaacatgtcataacgatttcagttttgtcccattacgtgaggttgtaagtttcttcatcattcccccctcccaacaagcacaaaatcgtccccagcccctggagcatcttgcggggctcccaggtcagcaacagcactcggagctccgagctccagggaaagcgctcagggaatggctcctaggactggttcctgggaaagcgccagcgtccagggagagatttccttctccaagggccggcagggtggcattccaagcgcgagcaaggtgggcagtgagcgatcctccctttaaaaaagaataaataaatagaagccagcgcgcagccccgc

SEQ ID NO: 117491 - DNA, 910 bp, Homo sapiens
  chr9:17906460-17907370
  hyper
cgctgccggggcggctggatgtctgcgctccccgcctccgctgggctgacacgggaggggaggagcaggagctggaggggtgttgggggtggggggagcgcgaaccatctcgagccaagacaagcagcacattcacaaataacgcccccacccccagcgcacgcgctcccattcaaagcagacccgctccgcggccgcactgaagctccaaagccgcgccgcctgccccagcgcagctctgtctcgtggggcgcacgcccgagcccgcctgccggccgccgccgcggagccaccgcaatcagcgcaggaggcggccacctcttcgagggaggggtctcgcctgagactccccttggtccccgccatggggaccatggcacgactggaggcgccccagtgccccgggttcctggcccgcctcctcggtggcacctggtgcctgctctgtatcgccggacaggtagggtagcctgtgcgtcttgcgtccctcccggggactctgcttctaaagcctgtgctacagcgaaaagcgctacagcgtgggaggtgctctcttccgcgaaggtccatcctggggctgcgctgccgcccaggctggggacaagtggcgcggggttggggctaaggcgtaccctggggtcgatcgggtcgatctctgcgtttaggcttgacccagcttcctgggaccctgtcctggcttttcgcccttacctgggtcctgcttccagccaggcagagccggggcgagaaggcggcgcctgagctggggagctgtcatccccaacagtcctctaccccccaccctttccgacagtccttcgcggagccccctctctcgttccaggctgaggcttgggcggcgccggggacactcgggtgctgggacactcctccacacttccgcccttct

SEQ ID NO: 117492 - DNA, 22 bp, Homo sapiens
  chr9:17907450-17907472
  hyper
cggacgccggaccaggtgggct

SEQ ID NO: 117493 - DNA, 302 bp, Homo sapiens
  chr9:18473915-18474217
  hyper
ctcgcctttctttttcgtccttttcccccttttttgctcgcaccgttacactttctctgtcctcctggctttgttattcagcatgtctgattagcaggagcctgattggctggctgcctgctccgagagagattccattcagcttaccccccacccatccacccacccacccctcggtcaggaaatgtgagaggggctgatggaagctgataggcaggactggagtgttagcaccagtactggatgtgacagcaggcagaggagcacttagcagcttattcagtgtccgattctgattccgg

SEQ ID NO: 117494 - DNA, 30 bp, Homo sapiens; identical to SEQ ID NO: 46083
  chr9:19049067-19049097
  hyper

SEQ ID NO: 117495 - DNA, 246 bp, Homo sapiens; identical to SEQ ID NO: 46084
  chr9:19127114-19127360
  hyper

SEQ ID NO: 117496 - DNA, 14 bp, Homo sapiens
  chr9:19127549-19127563
  hyper
gcagcacgtgaccc

SEQ ID NO: 117497 - DNA, 150 bp, Homo sapiens
  chr9:19229763-19229913
  hyper
aaacgactctgcaggcgtctgtgtcgataatgaggctacacttaggaggcgtgagggtactgactatgcaaatgagcgatttctccattaggaattcccatccccaaatctgggccgaaggagagacaccgagcgcggccagggactcac

SEQ ID NO: 117498 - DNA, 30 bp, Homo sapiens; identical to SEQ ID NO: 6734
  chr9:19380410-19380440
  hyper

SEQ ID NO: 117499 - DNA, 668 bp, Homo sapiens
  chr9:19788231-19788899
  hyper
attcccaggtggctgcgaacgtcaacgcttagcaggaacgattaagcgattcacagcactcaggggattgtgtaaatgcccggcccgggcgaccagcagggacagattcaactccccgggcgcaaagtcatctccagcccgatcctcgctccccctgaaaacccaccgctcgtctccccgggagctgcctccgtaggagaatgttcgcccccagccgcgccccaactttgccttgcgtggtcccaaactttccctggtggattaataggaaaataaatctaaaggacagacgccccacctgtgagcttggagctgggttgcatttggtgaggcgcttggcccgcatccccctgagtcgtttgtaggtggctggggaatggaagcgcccctctgcgcgtctcccccgacggcaggccctgccccacgccccccatcccaagccaaaagcaagggtaggagaggcgggggctccaaatccacgccccggagcacagagagttggctaactcctagcggggcctggggcgcccacatccacggcagagccacctgtgagcctgcagagcagcaacgggatgcgcgcaaccgggatgcggggacgaccgccacagcggctacagcggcaggcggggcgcagccgcccgcacttaccaggataagatgggagg

SEQ ID NO: 117500 - DNA, 306 bp, Homo sapiens
  chr9:19788934-19789240
  hyper
cgctccagtccgccggccctccgcctacccgctctgaggcccgggctctggctcgcactggctgccgctctcgccagccgggctgggttcgggaggagactgagccgctgtgagcccggcgctccgagtctggcgctgcccggcccccgccggcccctccctctgggctgtgcgctgtgcgctgggagcggggccgcagcgcgctcagctcccgagtcctttgctccacgcctcctgggcgcagaggcgacgctggcagccgtctcttaggagatttctccgcagtgtggacgggggtcaggattt

SEQ ID NO: 117501 - DNA, 2015 bp, Homo sapiens
  chr9:20620357-20622372
  hyper
cttccccacagaacccgcggctaaccccagaggactggtgagggctggcttgggatgaataaacactcgacacctgacggtcctttctctgcggtgactttcaccaagccgaagtggcgcgcgcgcgggcaggcgggagccgggacctggcccgcgcggcgccgcgcacccggatcccgaggctacgccggcgagcgcggcgcggggggcggggagcgggacagcgggaccgcccgggccaagcgattgtttcaaagacattttttatcaagacccttttgtattcgagccctacctctttttggcctaggaaagctttcgtgcaagtggaagacgactttctccacaaagtgctgtatgttactgtgctccggaccgcgtacgaacaccatccagtcgtgggtgaagccctccacggtgggttttttcctcacctgggcgcggtgccccagctccagcttcacctgcacggcacactgcgggcagggggaggagagacagccgtgaataacaggaaggcgaggtttcggcagtgaacgttgcgcctgacatttttttcctccttcttgaaacgcacataaaaggaaacggcggtgccctctgcatccacgtttcacgcgcgtgggcgcgcacactccacacccccaaatatacccgcccgcccggcccggcttggccccaggcgccccgggccccgcatctacatcggacaggattgtaacggaatgttatccccagtcgggaagggggtcggggaaaagagggagaacacactcagccacgacaagcacgacaacaaatgcatcggaaacaaatcagaaggcgatgccggggcggtttcccggcgtgggaggggaggtggctgggacccagggggaccgaagggctcctggcgagccccctccccgaaagtaccgcggcgacaggcacacgccgaggaagtctttgtgtacgtgtgtgtgcgtgcgtgtggagcgctgtgccaggcgaaatggaaactacaggcagcctctgctgatgggcacaaactcccgtgctcttgccacggggttcgtgcacaacaaaaatgagacgtcgtcatacacactgaaacacacacacacgcccgcaggaaaacacgccgaggcatccataacttagagcaccccgcaccccccagcgaaaagccccacgcgatcggcgaggccagtcgaaccgagcccccgcaacacactttcaagagcccaagtggctccaaagtatctcccacctccccccaaaaaatgaaattcagaaaggcagggcggcgggcggacagccgccgagcctcggctcgcgctcagcacctcccggcgctggggcaaagttgcgtgcggccccgccgctgtcagccccgcacacttcggctcacacacgcgcgccgcggagaacgcaccatcgtagcggccgcggcgctttgcggaggtgcggccgccgaggctgctcgccgcgtccccggactgtgcccgcagctcccggcggcggcggctgaaatatggctgagttattattcgcctccttccaccgtgtgtgtgtgtgtgtgtgagtgcgcgcgtgtgagcgagagggagtgtgtgagtgcgcttcttgtgactgcaaagaggcgaggagggagggaggcgcggggggtggaggggcgagtgtgagcgtgtgtgagtgtgtgtgtgtctgtgtgtctgtgtgcgcgccgggggggggtgggggaggaggggagcggaggctgagggagaggcggcagctccctgcaagccgtaccaacctttctctaattggaaccgcggagcgctggcgctgtctgggctgcggcggcgcagggcgaggaaggaaagtgggggagggcttttattattatttttgcgcgtacttaccgagctagccatgcctgggggcccggaggtttgctggggtgttgtgtggtacccccccctcctccgccccccctcagctgtaattcatgaagaggctgctatgaatgagagcgcgcccaggagcggagg

SEQ ID NO: 117502 - DNA, 387 bp, Homo sapiens; identical to SEQ ID NO: 46090
  chr9:21031411-21031798
  hyper

SEQ ID NO: 117503 - DNA, 36 bp, Homo sapiens
  chr9:21032002-21032038
  hyper
agccaggttcagacacgaagcttgtgccgggcgcag

SEQ ID NO: 117504 - DNA, 30 bp, Homo sapiens; identical to SEQ ID NO: 6740
  chr9:21335536-21335566
  hyper

SEQ ID NO: 117505 - DNA, 477 bp, Homo sapiens; identical to SEQ ID NO: 6741
  chr9:21395907-21396384
  hyper

SEQ ID NO: 117506 - DNA, 536 bp, Homo sapiens
  chr9:21402535-21403071
  hyper
gtccccagccccgggcgctcccaggacccgtccgctcgccccagggtccagcgtgtccccttccccaagacgtccccgccctgcgcccccacacaaacggaatccccaagattaaacccgtgcgatctcgagccctcaagtcccggaatcaacgggtccctctgtaaaaacaagtctcgctgaagtctctatgggaaataaaagccccaaacccaggggaaaatcccgaaaataaaaggtgccctgctggctacctgaggaagatgtctcaagggagaccacggcggagctgcctcctgagcagcaaaagagatttttttactcaggtcgaagctgcacaaagttggcgcgataagccgcgacgacgtttccctggggctgcgggacgccccgaaactcaaacccgcggttcccaaatcctgggcatcaggaaaacccattctggcgccttgctgcggccgtggtgcgcagcgctgggagctttgcgctctttgcgcagcgggcccgcgccccttcgaggccggctagtgaatctc

SEQ ID NO: 117507 - DNA, 978 bp, Homo sapiens; identical to SEQ ID NO: 46093
  chr9:21559112-21560090
  hyper

SEQ ID NO: 117508 - DNA, 69 bp, Homo sapiens
  chr9:21802583-21802652
  hyper
caatccagctgtcccggggaggaagaggaggagtcaaggcccgcccctggtctccgcactgctcactcc

SEQ ID NO: 117509 - DNA, 534 bp, Homo sapiens; identical to SEQ ID NO: 6743
  chr9:21964890-21965424
  hyper

SEQ ID NO: 117510 - DNA, 253 bp, Homo sapiens; identical to SEQ ID NO: 6744
  chr9:21965569-21965822
  hyper

SEQ ID NO: 117511 - DNA, 197 bp, Homo sapiens
  chr9:21967348-21967545
  hyper
ggggtctcagaacgccgaggcggggactgggagccgagtcggattccgagactatgggccagggttggctggattcagttacctggctgaggcctggtgagcaaaatatcccaaacctcgcgtgatctggaaggggaagccggataaatacggatctccagatgtgccagtctcgagtctatcgatatgaggtcccc

SEQ ID NO: 117512 - DNA, 274 bp, Homo sapiens; identical to SEQ ID NO: 46097
  chr9:21968159-21968433
  hyper

SEQ ID NO: 117513 - DNA, 261 bp, Homo sapiens
  chr9:21968456-21968717
  hyper
cgaccgctcaagcgctccaggtccacccggcggagggcagagaaagcgcgaccgcgcggcccgcagggttgcaagaagaaaacgagtgttatataatgagtctcagtggttgctcacaatgccaggcgcgaaggcgtgaagatgtggcctttcccttcccgcatccccaggcatcttttgcacctggtgcggagtgagccagccagcttgcgataaccaaagggcgcctcaggctctggcgctcctcggcggaatcccgta

SEQ ID NO: 117514 - DNA, 30 bp, Homo sapiens
  chr9:21969200-21969230
  hyper
acatggtgagaccttcgtctctattaaaca

SEQ ID NO: 117515 - DNA, 30 bp, Homo sapiens; identical to SEQ ID NO: 46099
  chr9:21969791-21969821
  hyper

SEQ ID NO: 117516 - DNA, 109 bp, Homo sapiens
  chr9:21971026-21971135
  hyper
cccaggcatcgcgcacgtccagccgcgccccggcccggtgcagcaccaccagcgtgtccaggaagccctcccgggcagcgtcgtgcacgggtcgggtgagagtggcggg

SEQ ID NO: 117517 - DNA, 63 bp, Homo sapiens; identical to SEQ ID NO: 46101
  chr9:21974181-21974244
  hyper

SEQ ID NO: 117518 - DNA, 618 bp, Homo sapiens; identical to SEQ ID NO: 6748
  chr9:21974498-21975116
  hyper

SEQ ID NO: 117519 - DNA, 446 bp, Homo sapiens
  chr9:21975190-21975636
  hyper
cgccctccggcctccctgctcccagccgcgctcccccgcctgccagcaaaggcgtgtttgagtgcgttcactctgttaaaaagaaatccgcccccgccccgtttccttcctccgcgatacaaccttcctaactgccaaattgaatcggggtgtttggtgtcatagggaaagtatggcttcttcttttaatcataagaaaaagcaaaactattctttcctagttgtgagagccccaccgagaatcgaaatcacctgtacgactagaaagtgtccccctaccccctcaacccttgattttcaggagcgcggggttcactaagtcagaaaccctagttcaaaggattccttttggagagtcggactgctctctccttcccctccccttcccctcctgcgtgtaaaacggctgtctggggcaagggtttctcagacgtgtacattgcctg

SEQ ID NO: 117520 - DNA, 242 bp, Homo sapiens
  chr9:21994208-21994450
  hyper
gcgggcgcccctggcgctgcccactcccccgtgagccgcgggatgtgaaccacgaaaaccctcactcgcggcgggccgcacgcgcgccgaatccggagggtcaccaagaacctgcgcaccatgttctcgccgcctccagggccgagctcggcagccgctgcgccgccctttggcaccagaggtgagcagcgccactcctgcccccttaactgcagactgggacccacgcaccgccccctgcc

SEQ ID NO: 117521 - DNA, 30 bp, Homo sapiens
  chr9:21995297-21995327
  hyper
accttcacgacagccgcggagcatctgagc

SEQ ID NO: 117522 - DNA, 192 bp, Homo sapiens
  chr9:21995718-21995910
  hyper
agccgggtcctgagcgcggtctaagcgaggctcggctctcgtccaggaactcggacgcgggctcgccggctctccgcgcgcgggaagtcgagcccaggacgccgccttcaggccggcgcgctgacccggtgccccgacccggagcctgcggtctgcctggatccgtcctaaacctcgcgggctggacccgcg

SEQ ID NO: 117523 - DNA, 135 bp, Homo sapiens
  chr9:22005968-22006103
  hyper
ggctggggaacctggcgtcagtcccccgtggctgtgcgcaggtaccctgcaacgtcgcggtggccccgctcctcggccaagtccacgggcagacgaccccaggcatcgcgcacgtccagccgcgccccggcccgg

SEQ ID NO: 117524 - DNA, 30 bp, Homo sapiens; identical to SEQ ID NO: 6751
  chr9:22008955-22008985
  hyper

SEQ ID NO: 117525 - DNA, 30 bp, Homo sapiens; identical to SEQ ID NO: 46106
  chr9:22062118-22062148
  hyper

SEQ ID NO: 117526 - DNA, 1031 bp, Homo sapiens; identical to SEQ ID NO: 46107
  chr9:22446678-22447709
  hyper

SEQ ID NO: 117527 - DNA, 682 bp, Homo sapiens
  chr9:23821051-23821733
  hyper
cgcgcgcgaaggcgccgtagcaagtgggcacacaccagacaccaccccggcgtgttccgcgggagaagccagtgcacacatcctcccgcaaggcggggttgccagtgcaacacaggaatcctgccctttttctagaaaagccccctcccccactttccctccaatacactcacctgcgtctcaacagtttccttcttgcgctacacgcggccgcacccgggcacgtccacgcccgtgcacgctgccaggcgcgactgtccccgctcggctcccgccgcccccaacctgcttgtgcccacgggaggggcggtgccacctcccgaggcgcccaattctctctactcccgccgcaacgggctgagctctaggaacttcgcgggcacaacctccgccgcccccaccagtgttcccgcccagagttcggactagggcgcaccacccctaccctgctagacgcagcgggggcgcgcacagaccttagcctcggcgtccaaaatggaccaggggcaaggcgcggacgccgtccccgcccccacgcccccagcacttgcctgctgtgactcgaagctgcagctactacggctcgtgccgctggccgtcagcactgccgcggaggagtcgctcggggcgagctccgcggagaggcggtggcggcggcggcggcgggaaaggggactggaag

SEQ ID NO: 117528 - DNA, 113 bp, Homo sapiens
  chr9:23822017-23822130
  hyper
cgagtctcaccaggcttccccgacaaggtttctctggactcggtggagagcgttgagcgcccagaggaggctgattccaggtgcaagtttgcaaatcccgaggcccggggcgc

SEQ ID NO: 117529 - DNA, 337 bp, Homo sapiens
  chr9:23824156-23824493
  hyper
gaaaatacccagtctcgccatcagttttgctaaccggtacttgaaaatgggaaacggggaacttatccaacctccaatttgtcacagttgtatagctttcgtattaattctgtacagacgtgaaataggtgggtacgtagcaacgtgctgggcataaattaagcaacaatggccacgcgaggtctcgtccgccgcggagctccagtggtgggcactgccaccttgccatccctagcccccaccgcccttcgcagagtccagtccgggaggctgacggtgcgctggctttcccagccggtagagtgggtggggtgaggagcaacgagacgttaacccc

SEQ ID NO: 117530 - DNA, 779 bp, Homo sapiens
  chr9:23825743-23826522
  hyper
ttctgggtttgccagcgcatcgctgcaactaatgattaaagaaaccaaaccgaaacttacctttctcccttaaggtttttgtgtatgtgtgtttttaaagtaacggtgcagttctcccaataaggatgagcaagaagctgctggatagttctcttaagacagcacgaaacctaaactgtgctcggcttaaaagaagcaaataaaaagaaacgctttcgaccccaaagtccaatgctaaaagaaatggcgaaaaaaaatatgaaaggggaggggaaacttaaaaaagagtttaaaaagacggagagactaccctcctattgccgttcaactaaacaaaaaggggcaagaaaaacaaaccaaggaacaaagaaaagagacgaaagaacgttttttcaaaaagacgatgtctttctccttgttgctttttagtaggtcgctacaggagtaagctgctgcatctctaactaagaacagaaataggggggaggacgtcttaaaagggaggtggactggaccacagatttatagcaccgtatcaccaaccccttctctgcctccgcactgccgtgtgtgcagctgctctgccaggctcctatcccgggcagcacgcgcggaagtatacgccgaatcgcgccacaacgtaacttgctcatcgccccaggatcctgattggtccacacgcttccattgaggccgcccaggcggggccgcgtgagacgattggctatgggcttgtgtcactctcgagagctcaatggagtcccgtttcaaggtaagtt

SEQ ID NO: 117531 - DNA, 38 bp, Homo sapiens
  chr9:23830864-23830902
  hyper
aagggaaaatctaggcgactaggcgagggtgaaggaaa

SEQ ID NO: 117532 - DNA, 253 bp, Homo sapiens
  chr9:23831117-23831370
  hyper
ggacctgggaagaaacggtttttatgcttccgatgctcggaggctctttcttatattgaagatttatgtttccacttgtgtgcgatgcacgtctaatttgaaataataaaaccgggctgagcaaccagtcaatcagagccatccagggcgctccgcacgccgccctgccccccacctccctccggtctctaactctttccctcctcctccccctctcactctcctggccctccccgtcttccttcctccctcc

SEQ ID NO: 117533 - DNA, 183 bp, Homo sapiens
  chr9:23831450-23831633
  hyper
cgggccacggtgacaaaggcggagtttgtatcagaagaagactgaggcccggggagacacagcggctagagaaacagctgtcttatcagcccgctgcagagatggagatggcttgagaggtcctcaacagataatcacttgaataggtttgcaatgcgccaaacttcacgcttgataaggcca

SEQ ID NO: 117534 - DNA, 128 bp, Homo sapiens
  chr9:23849751-23849879
  hyper
cactactggtttgtacgggtttctttttgttgttgtttaacgaccccctcctcccagcccccaaccctttgtgtgtgaggattccccttcaaaccacccacagaccgagcagacgagaagaaatggta

SEQ ID NO: 117535 - DNA, 254 bp, Homo sapiens
  chr9:23850240-23850494
  hyper
cgcccccagcacccccgcgattacccgagtgactgcacttgcctccagccagctcaactgcaggagaggaaagccccatctaagttcactagccctgccacagtcttccactgcctgatgggttccttcaggaaaacacttccagaggcattcatccacttgaggtctggggttggctgctgctgcgaggctgctgcagccgaggctcccgcgagcagctgctaggatccttgccgtctcgttcctgcctcttt

SEQ ID NO: 117536 - DNA, 565 bp, Homo sapiens
  chr9:23850910-23851475
  hyper
cgttcaaaaaaagtacgaaaaccatcgggtaatttccaactgaaccgattacggacggcgaatttatccaaacacttaagcaaggagaggatcctaaaatcgaaaaacgaaggcggaaggggcgagaagaacggggtggagttgggtggcggagcgagtgggacgttaactggccaatagtttgcaactgccggtcaacacgcgcagcctactcagcgctgctccggaggcgcgggacgccgcctccacgtgagccgcgctcctcccagtgcccgggacggtgtcgggggcgggctgcacggcgagaagggcaaaataaaaccagcccgagaggccctggctggggttgagactgcaggagtaacttctgcaccgaggcagcgcgcagccagtcggggaagaactctgcaacctgaccgaaagaaagtccgaccctctcgggagggctgccaggatgctggagcgagtgtcagggtccgagactcccaagtcgggcgagggctcctgcccctggccattgggtacccccctccgaccaacacccccgtcccgcttcagagcgtcg

SEQ ID NO: 117537 - DNA, 92 bp, Homo sapiens
  chr9:25677512-25677604
  hyper
tggccaagcgccacccggaagtgtccactggtgggggcgggaaggcaccgtagtccaaggtatccgcgggcagggagcgggccagggcgtgc

SEQ ID NO: 117538 - DNA, 990 bp, Homo sapiens
  chr9:25677627-25678617
  hyper
cggaggaggaggggcccgctcgaggctccgcctctcaccggctgcggcctcggctacagccagggcccagagggctccgagtcccgggagcggaggccggagtcgggttcctgtagaggctgctcctccttgtccccgctcggacgtggtccccgctgctcgaggtgcagctgcagcagggcccggcggtacatggcttccagcttctcaagtcgggccctcagggccctggggctgcccggctcgtcctctcggccgctgtctctagccctccggttcgtgctggcctcttcagggacccggcgtgcctccgcgggcgtcccgttgccgccttcgccggggagccgcaaagcctgacggaagaggctgcggttctcgcgcttcagccgccggttctcgagccgcagccgggcgttctcctgacgcagccgcgcgttctgccggtcccactcgtcccgcgcacggatggcctccaagtggctcgccgccaggtcggcaaaccgctcctccagctgctgtcgggcgccgtccgcgcggcctcgccagcccacgccgccgccgccgccgctggggctgcccccaccacgagcccggccggagcggcctggccctcggccgtccgcagcaccgtccccgccgcagcaactcccgcgcctagtggcgccaccacgcatgcgccacatcggtcccatcccaaccgcgccgccagccccgtgggctgaggggccgcgcggccaggcgcgggcaagttcggggctggcagggcggccggggtgacgacggaggaggagaggaggtcgcgggcggcggctgctggcttagagccaaaggaggccgggaatttgcccagactgaggcgtgtcctgtctcctgtggtggagctgccccctgggcctgctctctccaggctgcgctgacacacagttcccccggggagtgctttgctgttcagccctccggctgcgcgggaaaaagcgtgtatcctcagct

SEQ ID NO: 117539 - DNA, 689 bp, Homo sapiens; identical to SEQ ID NO: 46112
  chr9:26892267-26892956
  hyper

SEQ ID NO: 117540 - DNA, 30 bp, Homo sapiens; identical to SEQ ID NO: 46113
  chr9:26956221-26956251
  hyper

SEQ ID NO: 117541 - DNA, 64 bp, Homo sapiens; identical to SEQ ID NO: 46114
  chr9:26956460-26956524
  hyper

SEQ ID NO: 117542 - DNA, 30 bp, Homo sapiens; identical to SEQ ID NO: 46115
  chr9:26956754-26956784
  hyper

SEQ ID NO: 117543 - DNA, 567 bp, Homo sapiens; identical to SEQ ID NO: 46116
  chr9:27528536-27529103
  hyper

SEQ ID NO: 117544 - DNA, 764 bp, Homo sapiens; identical to SEQ ID NO: 6754
  chr9:27529157-27529921
  hyper

SEQ ID NO: 117545 - DNA, 340 bp, Homo sapiens
  chr9:29211830-29212170
  hyper
agaccaaccacccagcgttctccgcaaaaaacttcccttaaagcagccaaatattcaagggaggcgggggaaattgggcattagttcgaatacacatacaacagagcaccacggagcaacactgaaaggcaccttttttagatacagaccctatagactctctctcacccttcactccctcccaccctgagtatctgactgagaatttacagagaaccaagaggcgaaaggagagtggaggagaaagagggcattacctcccggggctgccctcagggtgcgggtcaggatctcatccccgaagtggctccagttcaaggcacagctttccagagctcag

SEQ ID NO: 117546 - DNA, 2837 bp, Homo sapiens
  chr9:29212210-29215047
  hyper
cggaagcgcgccgggactgccgctcacgtcccccgcccctgccgcgcgggctccgccaccccgcgagcacgctggctctccgcgctcaccccgccgcctcctggcgcccccacacccacccgctccgcggcgcccgctgggagcctctagcggaggcgaagggaacagcaggcgacctgcggcgcccaggttccgacgccggttgcagggagccggccaagcggcagcgtgggcttcgcgcgcccccgagtccgcaggccgggtgccgccgccgcccccacctgcccacctgcgccaggctcacctgccaccgcgtcctagttgcgttcaccggtgcccacagctctctatggcaattgggggtgggtctgcggtgctaataaaaatttaaaaaaaaaacctctctggtaaaaaaacgaaaacccaaaacccaaatccacgctgtatatcaacctccacagagaacccagtccgaaatcgttttccaataggtttcagaaagtgtgaggacaggacactcctctggcttcctgcctcgcagctgggcagcgccgcaccggctactccctgacttgccaggcgggtcgtgcgatcgcgtagcgacgcccggagagatcctcctaacttgacttaacccccaccccatccccaacatctattttaagttattgtctctggcaattcaagcagcagctttgctgcctcttaccttgaggcgctgttaattctccttcgtgtccttaaaatcccaagccaaggatgcgacgcacacaagtccaggggcttttcctggacttccccctcctcagctctgaaggctcctcctttccaagggatcaggaggggatggcggttcaaaagccctcaccatagaggcgcctccaagccttcgtaccagtggaaatggagaccgggaccaccttcccggcacccggaagcctcccagcccctcctgggccaacttggctgcctattcagttttcttccgtaaccccacagacacgtcagtcaattccctggcatcaggcaggatattctcagttgcggccgctcctcttgctttctctcgataatgcccctcccccctttctccccttaatttggaaaaatttctactccctgcccgaattaggtggggatgaggcggaaaggtgtaagaagagccactccaaggcacagcttcggaacaccgtctccctgggctgctgcagcgcgaaggtgtctacgctggggaaactttcaggggaggcagcgccggtgcggggctgggcgggcggcgggcggcggcgccaggtgaggaggctttgaggaggcggctgcaaggcgggacgcaggatagccggctggggcttggcagccgggctcagagctcgggctgcgcacacacacaggcgcgcacacccgcgcgcgcgcagctacacacgcacgcccagccctgcgcccgcggcccccggccagtggcgagcgaaaagtcgggagtcctgaggaggggtaggggttccaaggatgctgatgacagaaagagtcaatcaatcctcactagttagcggattgccggcaggcagttcctcgccgcacgccgttaagtccgttgggccacctctccgttctctgccctgtctggcatttcaactccctagctcttttcttgaagccagttacaccccctcgacacccagcgagaggccaccagactaaagatgagccccgttcccatcgccaccctccaggggccacctccgccccttctgtagtggagaattgaagtggctgcagcagctctcctgggagctgaggggctccccgaggtccttcgaatagaggagcctacacatcgcttcgtgaacataatcccctcgcatcccgtctttacctgcccactcccttcgtaacatttcccccaaggagctcccgaaagtcgcttagatgttttgaaaatgaatttcttagggaattgtagtgcctagcttttggaactgggttaatttaggtgctacgcttatattgtaaactggacggtagcaggtgaacggctcagctggagaaaggggagggattaggagtctggagacccaacccctttagcagccatttccaaggttttgcaccaggagtagctgtccgggtctctggctagctcctgtcccaacttctttttcttccctcgacggtcgggagggatcactgggtgctacaccgctggggcgtcccaggcaggagagacttcgctctcagaagcgcccccgtgtcatccacaactcccacgaaaggagcttcccaagaggagtttgttttacccggaatgggctgcaggaattaattgcttacagagagtaaacttttgcccgttgtttttttgttttttgtgctttttttaaccaaagcttgcatttgtgctccgcgtagtttctattgcaacagagcgctactctgccttttcaactgtgagacagaggattgctgaggatttctgccctctggggcttcgcgaatatctatggcttcggacctgctagcggaaaacgcaaagttgcccagcttggagatggcaccaggttcctttgctctggcgctggatgctccgctccgccacccaccgccgccgtctccatcgagaatctcctcaaaatcaagggagttcttgactgtccctctccaaattggaaggcggttgactttgccgggaaccgagttcctgagcggcaaacgtggagtcgcagagcgcagaagtgaagatttaatacaaaagatgaaacttgtaggatgacctctagcagcgctactcacagctctgaaatcgatccagagcattccacagtgagcgttgcggctcccag

SEQ ID NO: 117547 - DNA, 40 bp, Homo sapiens; identical to SEQ ID NO: 6757
  chr9:29780379-29780419
  hyper

SEQ ID NO: 117548 - DNA, 45 bp, Homo sapiens; identical to SEQ ID NO: 6758
  chr9:31254845-31254890
  hyper

SEQ ID NO: 117549 - DNA, 30 bp, Homo sapiens; identical to SEQ ID NO: 46123
  chr9:32384229-32384259
  hyper

SEQ ID NO: 117550 - DNA, 30 bp, Homo sapiens; identical to SEQ ID NO: 46124
  chr9:32384987-32385017
  hyper

SEQ ID NO: 117551 - DNA, 30 bp, Homo sapiens; identical to SEQ ID NO: 46125
  chr9:32551004-32551034
  hyper

SEQ ID NO: 117552 - DNA, 30 bp, Homo sapiens
  chr9:32552471-32552501
  hyper
tcagtggtaagtcccggggatcgcgggccc

SEQ ID NO: 117553 - DNA, 30 bp, Homo sapiens
  chr9:32573356-32573386
  hyper
agtgacagattagacgaaagtatgctaaat

SEQ ID NO: 117554 - DNA, 241 bp, Homo sapiens
  chr9:32782694-32782935
  hyper
tcgcccagagctgagcggcgtcgtagggtggtggtcctgaccggtcaaggccccttctcctcgtgaactgggggccagggagcccttctccctgtccccccggcaccacagcgctgtagaagtgaaatcccggctccaaggtcaccctctcccgagcctggagctggaaagccacggggactccggggactcccccaaggcccggactagcctggcacccacccctcaccactaacccact

SEQ ID NO: 117555 - DNA, 137 bp, Homo sapiens; identical to SEQ ID NO: 6760
  chr9:32783083-32783220
  hyper

SEQ ID NO: 117556 - DNA, 160 bp, Homo sapiens; identical to SEQ ID NO: 6761
  chr9:32783259-32783419
  hyper

SEQ ID NO: 117557 - DNA, 102 bp, Homo sapiens
  chr9:32783590-32783692
  hyper
cgccgggctccgcttgcacagcaccgggaccgacgggcactgctgggagagccgctctcccaggttccacctccccgatgcagagtccgtgggggaaaccag

SEQ ID NO: 117558 - DNA, 30 bp, Homo sapiens
  chr9:33001288-33001318
  hyper
ctctaatattttttcggcttgtgttgcgac

SEQ ID NO: 117559 - DNA, 30 bp, Homo sapiens
  chr9:33076759-33076789
  hyper
ggttcgcgtaggggcggagccctcaggggc

SEQ ID NO: 117560 - DNA, 226 bp, Homo sapiens; identical to SEQ ID NO: 46130
  chr9:33166526-33166752
  hyper

SEQ ID NO: 117561 - DNA, 86 bp, Homo sapiens
  chr9:33290496-33290582
  hyper
ggaagtccggggcacgtgacctggtgacagtgctgacttggctgtacagctcgatctaggttctgcggcacgggatggcggaggcg

SEQ ID NO: 117562 - DNA, 30 bp, Homo sapiens
  chr9:33447461-33447491
  hyper
ggagcagccggtagcggatgtggagcatct

SEQ ID NO: 117563 - DNA, 774 bp, Homo sapiens
  chr9:33524018-33524792
  hyper
tccctggagcggccccgatctctcttcggagaagaggggcgggagtcacggccaggcgggaagggatgcgcgcctgagattccggaacgtcccgcgccagcccaggagaacccgcaagccagcggcgcctgagcccgagctgcagtcaccctctgcgggccacgcgagctcgagggcgccttccggagtccgggctggcgctgagctgtaggcgcgcgcctaaccgctttactgggctcactctatcgagaggtcggaggctgcgagtgtcgctgctgaaggctgtagtggaccgggctggatcgcggattctgagctacatcgcgggtttgggggtgcatcttggatttaggggtggatcgctgggtggggagggggatctcgaatttggagctgggtgggggtggaaaggccacgaggagccgcggcgtctcaggagcgggtggtgggcatctgagaagtcgccaccatgaggaagctcctcagttttgggagacgcctgggccaggcgctcctgagctccatggaccaagagtatgcgggtcgggggtaccacattcgggactgggaactgcggaagatccacagggcggccatcaagggcgacgccgcagaggtggagcactgcctgacgcgcaggttccgggacttggacgtccgcgacagaaaagacaggtagcgggggctcagccctcggtgggagggggcccccaggcccggtttccccgcaccgcctgaggcggggtcgtcggagttcgccgggaccctgggagc

SEQ ID NO: 117564 - DNA, 686 bp, Homo sapiens
  chr9:33676777-33677463
  hyper
gctctggaccgcagccgggtaatggctgcggcagcagctgctggatggtggcagctactgggcctgcttctcctcagcagccagaggcctggcagcggcggcagcggaatggggagaagacgaataatcctccgaacggctgcctcctccagcggcctccggagcccgggccacggggggtgcggcggcggcggacgagaggtttaaaaccggcccgggtccctccatgtgccgccgccgccgccgccgccgccgccgtgttggaggcagtagaaggggagagaccaactctccggcgttcccagccctggaaatggtgacaggcgactcagaccccctccctggagctgcagccgccggggccaccgggggcgccgccgccgccgcttctccccccgctccaggagggggaggtgccgccgccgccgcgcctcagccggctcccgcccaagcccacggcttccaccttccctttcaggagaagccgaggaagaggctgcacagttagaaaagacgaagaagaagcgagaaacgccgccgctgccggcgccgcccccgcggatgctcacgggttgctgagaggggcttcaggccgggccgggccgggccgccgccgccgccgccgtctctgtctctcatctccctcgcctgagcccggcctcgcctcacagcggctcaacattcaa

SEQ ID NO: 117565 - DNA, 122 bp, Homo sapiens
  chr9:33816692-33816814
  hyper
ctaagtggagggaccgcagactgggtgtcacggggaggggcctgcagcgaccaggcccgtcccaggatggctgcggaggcccctggatccacagtggggagggccccgagagccgggagacc

SEQ ID NO: 117566 - DNA, 30 bp, Homo sapiens; identical to SEQ ID NO: 46133
  chr9:34048760-34048790
  hyper

SEQ ID NO: 117567 - DNA, 30 bp, Homo sapiens; identical to SEQ ID NO: 46134
  chr9:34049461-34049491
  hyper

SEQ ID NO: 117568 - DNA, 30 bp, Homo sapiens
  chr9:34126943-34126973
  hyper
tatccgcaggcacccggaagtgaggaccac

SEQ ID NO: 117569 - DNA, 192 bp, Homo sapiens
  chr9:34178910-34179102
  hyper
ccggagtagctcctcgctagaagagagattagttatgtcaccgtcggctcctcccattggtccgggcgtgtggagcgcggcgccatgacgtcagacgcccaaatgagtggggcggtgaggggaaggaggagggaagtaggacttcaacatggcggctgcggcactggcggtggctacggtgacggcctggcc

SEQ ID NO: 117570 - DNA, 30 bp, Homo sapiens; identical to SEQ ID NO: 46135
  chr9:34377053-34377083
  hyper

SEQ ID NO: 117571 - DNA, 52 bp, Homo sapiens; identical to SEQ ID NO: 6763
  chr9:34377387-34377439
  hyper

SEQ ID NO: 117572 - DNA, 206 bp, Homo sapiens; identical to SEQ ID NO: 46137
  chr9:34379699-34379905
  hyper

SEQ ID NO: 117573 - DNA, 491 bp, Homo sapiens
  chr9:34380722-34381213
  hyper
tcaggccttggagcccgagggcgggacacggcagggcctcgagagcgtgcagcgcggggctagagcaggctgggggcctgcacggaagctggccgggctggaagggggcggggttctggggcggggcttgtgtggggtggagcccggctgaggcgggcggagccctgcgaaccttacagtcggttgctcccggcaccaaggccgcaggcggcggtcggtgcagggcgccccgctggcgtagtagtccatcccgcgcagacagtagtggcggcccgagcaagcactttcgtaaccatggaagggcaggcggccgggcagcgggtccacgcacccgcatcggggcgtgatccgcggcagctgctggttccgcgacagtgagttcagcatgttcaccatcacttcgcgctctgctcccgcgggtccccagcgcaggagacccaaagacagatgcacagggatgggaagaggccgagtcacggacagagtgaggc

SEQ ID NO: 117574 - DNA, 156 bp, Homo sapiens; identical to SEQ ID NO: 46138
  chr9:34458518-34458674
  hyper

SEQ ID NO: 117575 - DNA, 1165 bp, Homo sapiens
  chr9:34589066-34590231
  hyper
gcgcgcgcgggcgcgcggattcacacggacacacatgcactggcagacgcgcaaccgtcggttcgcatccccgggcgctttgaagtccagatttctgcccgagaaagaagccacctttgggcgcgcaaaggccactacgaacctccccaaacccaggaatttttccagaccccgcgcgtgcagctgaggggtggggagaacagggacactaggacaaaccgccggagccacctccctctagtccacagtcggccccaccaccaccaccacgcccaacccccggagcgcccggacgtggggggccgctcctccagcgcccccgcccccgagtttgcaggcaaagtttctcgtgaactttcctgtcgcccccgtccgtgggcccacgggtgtcccctcactcttcccgcacgcatgagggccgccggtctgctggtcagcccgggctctgagggtccggccgcgcgcactccgccgcagggtactcaccgcgccctcgggccacccgggcttcgcgccgcgccttccgaccgcccccggcagcgagcgaggcagggagcgcggagctagcaccgcccgccggatcccaccgccgagcctcgcgccgcgccggctggagccgccgcctccgctgccgccgccgccgccgcccgctctgcaccggctcttcagcgctcggcggctttaacccccccatcctcctccctccctcgcgcgctccctccctccttctctcgcccatgtgaccgcgggcgcccgctcggccgcgcgcgccctcgctcccctccccctcttgccttgtctccccgcgcctccgcggccgcgcgccacgacccctccccgccacgggccccgcgcgcccccgccttggcacgctctcgctcctggcacacgcggtccgctcgccctgcgcgggcctgtgagcccccactcccactcgcccagcactggcacgcgctctgcccccccgctggcacactcgtccgcactggcacgcgtggccccctcgcgttcaccctttctcgggcgcgccctcaagacggctgtggtccccgtgcttcacgcgcagccccggccgcgggtctcgcaaacgcgcgcgcgcacacacacacacacacacacccactcggcccgctcccctagggcggctgggcgcgcactcaccccc

SEQ ID NO: 117576 - DNA, 519 bp, Homo sapiens
  chr9:34591176-34591695
  hyper
gctggagctcagagacggccagctaggacttcaggacacacagcaaactagctgcgccccgctgagggtcagcgcacagccgcccacacaaggtgtcctctccccgggctctctgggccgccggcctcctgcttcccgtgccgcagaccgggattagactgtggacgcggggaaggaagggggcgttgcgacgggatcttgaggggagcaggacttgcccctgcccctgcggcgaagctctaggccctggcaaggttcggtacaccgggggccgctcctccccagggggctgaccggcctcggcgctctaatccggccggggaggggcggacggggtgaaaattggcgagtggtttggggaacggacttgacctccagatgccctggtgtccctggctcagcctctttctgccaggttgggagcagtcgggaattctgtcccggtccaacgtccccctcggcccccggggacgcagaggctgctgtcggcagagcagcagtccacggctgcggggacaa

SEQ ID NO: 117577 - DNA, 30 bp, Homo sapiens
  chr9:34613028-34613058
  hyper
catgcttgccccagcgcccctacttcccaa

SEQ ID NO: 117578 - DNA, 78 bp, Homo sapiens
  chr9:34646924-34647002
  hyper
agcaggccaattggcgctgggaaagtccaatcctgggcctctagctcctgagcgggacagggccgagagggcgctccc

SEQ ID NO: 117579 - DNA, 83 bp, Homo sapiens; identical to SEQ ID NO: 46142
  chr9:34647224-34647307
  hyper

SEQ ID NO: 117580 - DNA, 347 bp, Homo sapiens; identical to SEQ ID NO: 46143
  chr9:34664958-34665305
  hyper

SEQ ID NO: 117581 - DNA, 963 bp, Homo sapiens
  chr9:34701362-34702325
  hyper
ggggctctgggcgaccggggcatgtgtgcggatgtgtgtccgcgcccgtgagcgtgcccatgcatctcccttcctgggcctgcagggggcgccccgagcctgggaagggaggctctggagtggggcgcggctgcggcagaggggtgggcgcatgcggctgtgaccctgcgagctcctcagagaggctgcggtgagcgggcgtccgaagtccctgggcctggaacagcctctggcgccctcccggctccctggccccgccgtccctggggtccccgcgcgcgggccgggcgtatggaggggaggctcgggctgtgggtggtgcccgcgcatccgatgacctgggccgacagttaccccgggccaggacaccgccgtccggccaaacccctgccacccaggcccccgagcctcgggggtcctctgcggggccggcccagcccggtggccgggggaaggcccgtgtttgtcggcgaatatgaagcatttatctttccctcccacgccccaaatagtcccgatttacccagagcccaaggtgcccaatgttgaagtcttgaaataattactgtttggcttaaaggctgaaggagggttcacatcacctctggcacttcgctcgcacccgatagatatcttacaccactcattacggggccaacgctaagaaaggtttccttattccaaggaaatatattaggcgcgaggctggggctggaggatgaagggctatagcctgacatgggcggaaaaggaacttgtcttgcccataagtggacacagggaaacgcgcaacctttggcctagaatgagacacatgtgagaacaaatcgtgaaaataattgaaaacaaattggtcctagaaagatgaaggaaatgagaatggaaaattcaacccccactcctgttttcctgtagcagacagaggactgctgcctcctggtggccgagcggggcagtgagcgc

SEQ ID NO: 117582 - DNA, 770 bp, Homo sapiens
  chr9:34957703-34958473
  hyper
ccagtgccaggggtcgtgagcccggagccctgcgggggacggctggtaggccctgctggatgagtcattctccccaccccgggcacgtgctggtggcggcatccacccggaccccgccttccccccacccaacccccggcgcggaacgcgagcggtgagcggccccagcgcccccaaggcgccccctccgggccgcctcctccgggcgggcactgtccttgccgcagtcggccgctggcgcagtccccgcgccgcagtgccgggcgctcgtggggggcgcccacgggcacctgggccgtctgctcatcggagccgtccgccgtcctcccgcattcccacggcgccccacgcccgcgcgcccgtcgccggtcacccgccgcccgcggagccgcgagggcgtctcctggaggcgcaagaggactgggcggggcggggcgcgcccaccggccggcccagggcacctcgcgcgggtgcacacgccgcagccccccggggcgggtgggtgtgctccggccgcgcgcgccgccgccgccgccgccgccgccgccgcctcctcagcctgccgctccgcccgcgccgcctgctgccggcgctcggcccagcacgccggctctcgggctgccgtgggctgcgcggggcccgcggtgtgtagagtccgccgccccggagccgcgtcccgcacccggacggtcccggtaagcgggggcgggggcggcggggaccgggccgtcacctgaggggcgggtctgcggccgcggacagtcctccgg

SEQ ID NO: 117583 - DNA, 37 bp, Homo sapiens
  chr9:34989006-34989043
  hyper
gggggctctgaaacccggcatccgtggggtctgttag

SEQ ID NO: 117584 - DNA, 31 bp, Homo sapiens; identical to SEQ ID NO: 6767
  chr9:34996682-34996713
  hyper

SEQ ID NO: 117585 - DNA, 30 bp, Homo sapiens
  chr9:35071951-35071981
  hyper
ggtggtaggccggacggcagactggcgccc

SEQ ID NO: 117586 - DNA, 34 bp, Homo sapiens; identical to SEQ ID NO: 6768
  chr9:35072283-35072317
  hyper

SEQ ID NO: 117587 - DNA, 30 bp, Homo sapiens; identical to SEQ ID NO: 46146
  chr9:35072622-35072652
  hyper

SEQ ID NO: 117588 - DNA, 30 bp, Homo sapiens
  chr9:35072869-35072899
  hyper
gaatagggcgagatcgattagtgaaaggag

SEQ ID NO: 117589 - DNA, 30 bp, Homo sapiens
  chr9:35079867-35079897
  hyper
ctgactggggcagtcgcacggccggcggtg

SEQ ID NO: 117590 - DNA, 229 bp, Homo sapiens
  chr9:35096043-35096272
  hyper
gtagagcataggaacgttcacatgtacaggcaggaaatgctaatgctgcctgtacatgtgaacagtcaggagggaaacttattccaattggtagtcaggctctcttacacgccgtttctgcgcctctcccctcgccaatctcaatacccagtggaaagggatcgaagccgcaggggaatccgggcccagccgacggcgccgcctggcgggcaccgaggggacgaagggg

SEQ ID NO: 117591 - DNA, 30 bp, Homo sapiens
  chr9:35096657-35096687
  hyper
atctgccggcacctcggtggaagtttggcc

SEQ ID NO: 117592 - DNA, 30 bp, Homo sapiens
  chr9:35111409-35111439
  hyper
tctgctaggctcttcgctgttcagcttcgt

SEQ ID NO: 117593 - DNA, 30 bp, Homo sapiens; identical to SEQ ID NO: 6769
  chr9:35111712-35111742
  hyper

SEQ ID NO: 117594 - DNA, 180 bp, Homo sapiens
  chr9:35116360-35116540
  hyper
tcccaccccggccacgtgcggcttctgtgatgacaagtctagaggggcggggcctcggccggcaggctgctagcctgagcggagcggatcagggcagaggtggggagatggagccagggccaaagccaccagcctgagggctctgagccgggttggggctatctcgctgctttcgcaccg

SEQ ID NO: 117595 - DNA, 923 bp, Homo sapiens
  chr9:35161756-35162679
  hyper
gagggcttccattctcgcgtcacacaactgagggtcaaccccttgctccctgcagtaagcctgattagtgggcggagcttccttcaggatcgcaagaaagaaaggaggaaggggaccccgcctcctacgtgctcgcgggggggggcggggtcggtggactgggcgtgagttaattggctggggggcggggcaccacgggttggctccgcccaggcgctcgcgcggatcccgggtggaatgacgggagggagtcccggcagctcctacctcccagcgatggcgtcgctgtgccgcgcccagtccccagcctgccggccggtactcaccgctacccggagttcgctcagacggtgagatttggggcgggtccgaggcagcggcgggacgctacctgcgaccgggaccatgaggagctgccagacccgtggggccggtaacgagagcagtcgcggcacctgctgagaggaaagagggagcggtccggcgcggctggggcgcggcagaggcttgcccgatcctcggccatgtcactgctctgcgtgcgcggtgagtgcgcggactgaggcggggaggcggggtgtcggcgtagaggtccccgcacccttccagtggacgtccggtgaccgtctcacccaaactttacatcccgtccgtgctttgggggtctattattttggcaatcacttaacaatcacttgagttctttccactttcttgttttcccccaagctcctgcaagggacgattagctctccattctggtagccatgtgacaatgttgttggactgcaggctcagatcctattaaacagtgactggggttctctagtgagagtggacgagttagaagaccgcggatggttggtgcctgtgaatggtgggcagcctctcattcttttcctcctcctcgcaccgtaacgcta

SEQ ID NO: 117596 - DNA, 132 bp, Homo sapiens; identical to SEQ ID NO: 46150
  chr9:35489688-35489820
  hyper

SEQ ID NO: 117597 - DNA, 47 bp, Homo sapiens; identical to SEQ ID NO: 46151
  chr9:35490106-35490153
  hyper

SEQ ID NO: 117598 - DNA, 30 bp, Homo sapiens
  chr9:35554117-35554147
  hyper
ggtgcgtgcttatagcgccatcttacgttt

SEQ ID NO: 117599 - DNA, 30 bp, Homo sapiens; identical to SEQ ID NO: 6773
  chr9:35604300-35604330
  hyper

SEQ ID NO: 117600 - DNA, 30 bp, Homo sapiens
  chr9:35605887-35605917
  hyper
tgaaactagggggccgggagtgcggggaag

SEQ ID NO: 117601 - DNA, 465 bp, Homo sapiens
  chr9:35616959-35617424
  hyper
ggtaggtgaattgggaccatccgcaggggggcggtgcacgtcggattcaggcgcaccggatgaaggtgaatgtggcacggcagcccgggcgtcggaaggactgcgcccgggtttatcccggaaggagctgcaccccgcggggcccagcgccatccgcagccgggacaggcgcgagcacttggccccgcggctgccccgcacaggcacactcacaggggagaatccgcccgacagctggtgacgtcacggctctccaggacgcagttggctgctccgacttgaccgctgtcgaggggagcatccagtgtgagaccggaagccccgagtgttgccccttctcctcctgcgcacccgcttcgccctcgccactgggaaactccagtctgccctacgttgcctgctagagctgctctgggacacagtgtcactctcctgagttcctcctctgcccgggactctctcggc

SEQ ID NO: 117602 - DNA, 30 bp, Homo sapiens
  chr9:35646310-35646340
  hyper
tctgtccctgggaacggggcgctaggacgg

SEQ ID NO: 117603 - DNA, 30 bp, Homo sapiens
  chr9:35646740-35646770
  hyper
gagccggtcagctgcgttccgcgaacttgg

SEQ ID NO: 117604 - DNA, 30 bp, Homo sapiens; identical to SEQ ID NO: 46154
  chr9:35657995-35658025
  hyper

SEQ ID NO: 117605 - DNA, 30 bp, Homo sapiens; identical to SEQ ID NO: 6774
  chr9:35658761-35658791
  hyper

SEQ ID NO: 117606 - DNA, 33 bp, Homo sapiens
  chr9:35675614-35675647
  hyper
gatctcccctacagccgtccctgaacactggtc

SEQ ID NO: 117607 - DNA, 494 bp, Homo sapiens
  chr9:35675837-35676331
  hyper
gccttctgcccggccctgcgccccctggaactcctgggcttccagctcccgccgctcccagaactgcgcctgcgcaacaatggccacagtggtgagggggtctccccgccgagacttggggatggggcggggcgcagggaagggaaccgtcgcggcagtgcctgcccgggggttgggctggccctaccgggcggggccggctcacttgcctctccctacgcagtgcaactgaccctgcctcctgggctagagatggctctgggtcccgggcgggagtaccgggctctgcagctgcatctgcactggggggctgcaggtcgtccgggctcggagcacactgtggaaggccaccgtttccctgccgaggtgagcgcggagctggccgagaaggggcaaaggagcggggcggagcggggccagagacgtggccctctcctaccctcgtgtccttttcagatccacgtggttcacctcagcaccgcctttgccagagt

SEQ ID NO: 117608 - DNA, 30 bp, Homo sapiens
  chr9:35690444-35690474
  hyper
gtttgcgttatcgacgtggtggtagtagcg

SEQ ID NO: 117609 - DNA, 31 bp, Homo sapiens; identical to SEQ ID NO: 6775
  chr9:35700411-35700442
  hyper

SEQ ID NO: 117610 - DNA, 30 bp, Homo sapiens; identical to SEQ ID NO: 6776
  chr9:35731623-35731653
  hyper

SEQ ID NO: 117611 - DNA, 30 bp, Homo sapiens
  chr9:35732273-35732303
  hyper
cgatgctcgggagccgccaaagcccggcag

SEQ ID NO: 117612 - DNA, 30 bp, Homo sapiens
  chr9:35732554-35732584
  hyper
cacggggtggggtgcgtcactttcgctgcg

SEQ ID NO: 117613 - DNA, 923 bp, Homo sapiens; identical to SEQ ID NO: 46160
  chr9:35756560-35757483
  hyper

SEQ ID NO: 117614 - DNA, 146 bp, Homo sapiens
  chr9:35814689-35814835
  hyper
cggcctgcgcagggcgggaatcagcaccagctcgttctccggagccaccagttcgacctcaccacacagccccggagcttgtgcctcggaggggcagaggccacaggcaggagctctgcgcggctctgcgcgccttcgggaccccc

SEQ ID NO: 117615 - DNA, 232 bp, Homo sapiens
  chr9:35815224-35815456
  hyper
ctagtccgtgtgaacgttcttttcccattggatccccttactagtttctctgtgagagaaacttccactccattggaaggattaatggagcctggaggtgggattttctcctagttgaatctgatacacaactctggcttctaggttgcggctcccgagtgggtggttcttttcgttcttggttcgtcctcttcaggtctggttcctattggtgcgcggggagaagggggcg

SEQ ID NO: 117616 - DNA, 893 bp, Homo sapiens; identical to SEQ ID NO: 46162
  chr9:36036747-36037640
  hyper

SEQ ID NO: 117617 - DNA, 999 bp, Homo sapiens
  chr9:36136265-36137264
  hyper
cctccccggaccagccgccctccggagcccagagtcaccggagatgggggcacaccccggggctgcgtgtgtcgtgtcaggccgcggcagggagaggccgtcccctggtggcgccggccggaacgcccctcgtgccgcgaccgcgcgcccctctgtcctcgccgcgcgtcggcgcagagcagccacccggggcccagcaggcgcgggcttccccacgcgccccgggaagggacagctcggtgtggggtccgggaggcttgagccccgcggccgcatccggggagccctcggcagtcgcggagctgcttcccaggggtgagctctccgggaggcccacggggtggccccgggcgcctccgccctcagctgtcgctccttataaggcgggggccgggcggcgccggaggaggggccgcggcatcagcccggtcctgggctctggggcggcgctgggccgggcgagcgcagtgcagcgcagccgcggggagcgaggagcgcgcggagccggccatgggcaagtcaggtgagcccgcgggctcgcccgctgcggaatggttcggaaccccgcgctcccggacctcgccgtctccctcgtccgccgcaagccaggtcctggggagtgcgggagcccggggtgcgggtggagggcgcgcgggcggagcgccccggcgcggtttccggggaacccggggggaaggcgagcccgagggaggcccccgccggagagccggggatcgcgccaagttgggcttcccgaccctgaggggctgcgcgccgcggcccgccaaggcgtggcttctgctttgtttcaggaggccagacttagagttggaaaagtcaccaaagtgtgacaacagctctcgctgcgaagcagtttgccccgctcggctgtcccgaggacagccctgagcatccccctcatccatttgttgttccttctctcctgagcgcccgcgccgtgccgggctccccctgtgctaggctcggtctggctccctt

SEQ ID NO: 117618 - DNA, 140 bp, Homo sapiens; identical to SEQ ID NO: 46165
  chr9:36257375-36257515
  hyper

SEQ ID NO: 117619 - DNA, 722 bp, Homo sapiens; identical to SEQ ID NO: 6783
  chr9:36257923-36258645
  hyper

SEQ ID NO: 117620 - DNA, 321 bp, Homo sapiens; identical to SEQ ID NO: 46167
  chr9:36258697-36259018
  hyper

SEQ ID NO: 117621 - DNA, 30 bp, Homo sapiens
  chr9:36400237-36400267
  hyper
tatccagaaacccacggaagcagaaggacg

SEQ ID NO: 117622 - DNA, 30 bp, Homo sapiens
  chr9:36487993-36488023
  hyper
gcccgcgagggggccggaactcggcccaga

SEQ ID NO: 117623 - DNA, 221 bp, Homo sapiens; identical to SEQ ID NO: 46168
  chr9:36572866-36573087
  hyper

SEQ ID NO: 117624 - DNA, 14 bp, Homo sapiens
  chr9:36739583-36739597
  hyper
cagggttggggggt

SEQ ID NO: 117625 - DNA, 189 bp, Homo sapiens
  chr9:36739811-36740000
  hyper
ggagcaggatttattagcagacaggatggggaagttgattagcctccgcggctgaacggacatcctgtcagacaggcctcttaatccaatcacttacctgtggaggggagccggctgcctcctcctggcccccttcctcctcccatggcacctgcggggccacgcggggtgctccggagccagggtaca

SEQ ID NO: 117626 - DNA, 90 bp, Homo sapiens; identical to SEQ ID NO: 6786
  chr9:36748472-36748562
  hyper

SEQ ID NO: 117627 - DNA, 5 bp, Homo sapiens
  chr9:37002512-37002517
  hyper
gcggg

SEQ ID NO: 117628 - DNA, 259 bp, Homo sapiens
  chr9:37002818-37003077
  hyper
cggcggaccggctgtcaccgcacgtgaggctgggggcggctgggagggagcgagcgcagggtgggcagggggcgctgaggaccctcgctctgcggaggcggccacacctgagccacgagcgcaggcctcgggcgggccgtgtgccccagttctctgcgatggggggagaaagggaagggtgggcactgagaaggactgacccctgcagaaaggaacacggggacacggggacaggaagggctttcgcttaaattccagc

SEQ ID NO: 117629 - DNA, 1072 bp, Homo sapiens; identical to SEQ ID NO: 46172
  chr9:37025279-37026351
  hyper

SEQ ID NO: 117630 - DNA, 838 bp, Homo sapiens; identical to SEQ ID NO: 6789
  chr9:37026433-37027271
  hyper

SEQ ID NO: 117631 - DNA, 772 bp, Homo sapiens; identical to SEQ ID NO: 6790
  chr9:37027324-37028096
  hyper

SEQ ID NO: 117632 - DNA, 238 bp, Homo sapiens
  chr9:37028479-37028717
  hyper
ctggggcgcaccagggcgcacctgggtggaggggctaaggctttgggccaggttgcccaagcagagtggctggccctctttcctgcctcagatcaggaactgccagaggctttgggagctggtgttgcgcttctgtccaccggagaaattccgcacccggctcaaggcttcttgagaaccgaatgagccaagtcgcgtccagggctaataagggtccctgaagcgggcgggtggacag

SEQ ID NO: 117633 - DNA, 228 bp, Homo sapiens
  chr9:37029407-37029635
  hyper
gaaaacggccccaggcgggactctggggacccaggaggctgcagtgcgcgccggggtggagtggcggcgttatctcttctttgtctggaaccccgcctgtccggatcttcccctttcacccccggccttggagcaggaagatcgcaacagcagagagggactgggatggaatagacttcctgcactggcttcacccgatggcgcccagtgggtcggaaataaccagaa

SEQ ID NO: 117634 - DNA, 923 bp, Homo sapiens
  chr9:37029917-37030840
  hyper
aacctttctcaaaagcgcctctccagagccgctctcgggatggtgggggaggggcgatgctgccaaatcgaagaactcggctggaatatgcccgcacacgcaggttttccttcggatacccgtgaggcttgcatagaatccccggggcacggcccgagcaggagtagcgccgattctccctttcacacagtaggtgttcggcttcgggacagtgttctgctgcgtggcacacacaggacccgtcttacctgtgcacccagagcagccccttcccgcaactctcggcgttcttgggggaaggagtttccctctggataggggtgattcatcaccgcccgagcgggcggcctctgggaagttccaaccccaaaaggcgcgaccggacctcataccgtgaccacctagcccagccttacaggtcaccaaacgacagcccagagaggttacgtgactagctcgaggctgcacagcaagtccatggtggagccgggctactgcgcctcagtcctgtctctgaacgcccacgagccgcagcctgggtccaggagagcgagactagcagctctcaccgcggctctcaacgcagtcgggcctcactctgatctacagtgatgcgctttctttctcccagtaacagggctttgggccgggccctgtgctaggcgctgggggcaggagaccgcgaaaggaaactatccaggaagaaactcaatttatgtgaaccgaattgcctttgaaagttttagtactgaaagacagcccattgagaataatgtgtgagaagccagagacctcgtttcactggggacacaccccctcccggcttccctttccacgcctcccagcgcactgcattaccgtggcttcaggatgtgggggctgctacagtgttctagtagcctgacatcgactctctcaaccca

SEQ ID NO: 117635 - DNA, 30 bp, Homo sapiens
  chr9:37033872-37033902
  hyper
tctacgaaaatgcggcgcgccccctcctcc

SEQ ID NO: 117636 - DNA, 750 bp, Homo sapiens
  chr9:37034114-37034864
  hyper
tttttttttggtgccaggggccgctcacaggtcggaataattcaagccttccgctcccccgccgagctggggtagctgatcactgagctgaaactaaacgttttaggtggaaaaaaagcgtccgaaggcaccgtgaaatgattaaggaactaaagagcttctcgccatgtgagatcatgtcctgttctcgccaacatcacaagatgtccccagacacgccgcgcccccagcgcgccgccccacactgccggcccggagcgaggaaagggtaggcgctgcgcggccgggcctgctcagcgcgccagacgtggcggacccggcccggccggagtagagcgggaagccgggagagcagcagtgctgctgccgcgccgccccagacttttataggggttggggggagggaaggaaggcttcagcctgcgccgggcgctagccagcgcacctacgggaaggggcagaccgaagcggagcccgggagcccgggtcttccagccgcaccttctattaagacatgcgcttgggggtcgcggccctctgcgctgtgcgcggggcctgtgacatctccatgtgcaaaccccgctgcttagacgagcgcaggccgggtttttgtttttgaagaaattaactgctcggccaagcaggtgcttttgaaaggggttgcaaaggctggcagtgttgccaggcaccgaggcgacgttccggtttactccgattcacccctagggcggcgcccgaccccagggttcc

SEQ ID NO: 117637 - DNA, 1741 bp, Homo sapiens
  chr9:37035396-37037137
  hyper
tccagggcgggggagcgctccgtaggaggactcctggcccgccggacaatggcagttttggagagtgaatcgtcctcagcaagagtgttgtttgttttttggagggggtggtcacgaggctgggtcgcaacctagggggaagagcctagagctcgaggaaaggggggcccccggcggcaactggacatcacatatccactgagcagatttcgccacaatcggaaatgtggctgtggattcccgggcggcccccccaccaagtggtctgcgcagttccccagcgccgcctcctccctgcagcctgcgggcccgtgtccctaccccgagatttgatttttggccatctccgagtgctcgactctttccctccgcagcccagccccagcccaggcttcccgccctcccgcctcgcccgcgccgggaggcagcgcctgggaggagcggcctgtccgcgcctggagatcaaaagccctcccggaattgacatttcaccccgggctgggggcggggggtgttggtgttttgttgttgttgttgtttccatttagagggcttgttttgtttttgtttgttttctgtgagttttcatttttccatgggatattcttttgtttcgggtgttttgcgtgttgttttttcgtgggattgattttagcgggttttgctctgtaagtcctggtctttggggtgagttttgattttgtgtaattttgtactttgtccttgtaggctgtctttttgtgtgtcgtttgtaaggcttttccttctccgcggtgtttagatgtgttttgatttggtgtgagtgggtgtcgtctgtgtgtgtgttgccttagggaatttcgtgttgtgtgtgttttgtttccttcgatttgaattttatttttttgaactgtacgttttggtgggggatcgggttatattttcatgtgttgtctttagtttttgtgtttgtgagatgcgctggtgagagtttgcgtgtgtattttggcttttgtggggctttgggattagggaggggacatcagccgctactccgttcctgcccgcacccatgaagggcagaggattaggccaagcatcacgaatcgtaggttcgccgtgctccgccgcttcgcgctctggacgctcgagaccagcgggaaacaaatgtggttcccgagggggcgcccgctggtcgtcaaaacctcgcgggcccggaggcgccgctgctgggtcagaatcgcagagcccccctcgcggggtaccgaggcccagccgccgtccccttgcccaccctctcccctgtgagtcggtctccccttgcgcctggccagcatgcttcggaccgtccggactcccgcagcgttggcccaaggggcggctcccctcggcggagcaggtgacgaaccacttcggaggacacggaattgacactgcggccctagagatacgggacaaggggccagaacgcggggagtctaggctcagatcggagtcgggatcccgggaaaatcccccatctcccttgcccgcagccctagaatcccagaaacccaactccgcgcagctttcggtttggagagcccgccctggtttgcaagcacagatacatgtgcccacacccgaacacacgcagacaccgccagagagcgagacagcgagcgggcgcctccgtagcagcggcctgcggggcggaaccggagctggcgccgcctcaaggggaaaccgaactgtagtgaccggaaatgtccccaggacagaa

SEQ ID NO: 117638 - DNA, 937 bp, Homo sapiens
  chr9:37037361-37038298
  hyper
ctccaggcccctgggcgctctggcattctgtgagaaggagaaagcagaagccgagaacagagagtgacaggaaaagaaaagagacgcagaaggggttggcctaggcacgctgcgagctgccctccagctaagacgctgcgggcaagggagggggaggccgacatcgccaggcgaggggccaaggtcgggctctttaactcagccaggaaacatcgttgggggctccagggctcgtggagcccgaactggggctcatttccggcccgatgcccctcttccccagacccctagcccggaatccagcaaaggctgggccatcgccgtccgccactgggcctccctctgtgcgagccctgggagaagcctcagggaacgactctggcactggggctcggccccggagctagcgcagagcgtgggtgggagtcgacatccaggcaggaggcaaagaagaggccccgccctaaagccgagggcccagttcttcgaaagcctgtggccggagctggactcacaggattcggggtccgtacagcgcgcacgtggtaccgcatcttcggcaggcggcgcccctaatgcccagccccgccctgcttcgtttgccgggcctgaactgtgtcagcattgagggtggacgccgagtcgcggcgagttggtcccttgcggtataaacttggggcttccctaggggcggtgccgggatggatgggggcgcctctccacctgcaactcccccagcgcagagcgcaaaaagtgcacatcgcgggccagccgtcgcctcggggtttcaggcggcgcccggggcaaaaaggagctgaggattggtttgggtcaaaacacccatttcagttggcagtggggtcctctgcgcctacagggcttcgagctccgggtgcgggctcactggggcaccatgtgccagcgactcgccacccgg

SEQ ID NO: 117639 - DNA, 25 bp, Homo sapiens
  chr9:37465008-37465033
  hyper
accggggacgcctgcgcagaagaac

SEQ ID NO: 117640 - DNA, 112 bp, Homo sapiens
  chr9:37465507-37465619
  hyper
agcaatgggaagggcggggccggggtaggagtgcagccagccggcgcgcggaacctggaggaatttacttagcccccggaaaaactgaccaatccacggtccctgaagtctg

SEQ ID NO: 117641 - DNA, 149 bp, Homo sapiens
  chr9:37466214-37466363
  hyper
cttggccccgcactcggctgcaggtcaaataagcctgtagtctgcatgcccagatttataatcacctgcactccccccacaaaaaaataggaagcgctaagctctcccactcctgtcccaaacgtggaagggtcgcggacttgtatggg

SEQ ID NO: 117642 - DNA, 105 bp, Homo sapiens
  chr9:37485787-37485892
  hyper
aaacccagagtgcacgcgagcgctgagccaatcaggtgctgcgcctcggccagtcaagcgggtgtgtggcaccttgtgggcggagaccacgcctctctacgcggg

SEQ ID NO: 117643 - DNA, 30 bp, Homo sapiens; identical to SEQ ID NO: 46182
  chr9:37486454-37486484
  hyper

SEQ ID NO: 117644 - DNA, 569 bp, Homo sapiens
  chr9:37576014-37576583
  hyper
ccgcggagccgcgggcggcctgagggtacgcctcatggtcctgccagacccctgatgcccgaagcccgaccagacgctcagcctcggccaggactgagcggcgcctcctgggtcggtcgcctggggaagcgccccgggtcccctcccccggccgcccaagttcgcccgcagcctctgcgcaccggccgcttacctcacagggcgctcgcccaccgcggagtccgggccgcggccgccggtgccctggaagccacccgccgcccccgctggagccgcagcagccggtaggattgcggcgtgcggccagccccgcccgggggcggacagctgcctggggatcgtgcggagccgccgccgtcatgtgacgcgcaaggcggcgaaggatgccgggagcagctggctggccggggctgggcttcccgaccaccgcgcataaaagctgtatctgcaggaggggcaccgggaggcgggaggaaggcagacgaggagggggcgcgtggggcttcgggtactgcaaaggcgagcttgcggaaggacgattcaggctcgtgttgcgtggccccagaagg

SEQ ID NO: 117645 - DNA, 30 bp, Homo sapiens; identical to SEQ ID NO: 6797
  chr9:37651060-37651090
  hyper

SEQ ID NO: 117646 - DNA, 30 bp, Homo sapiens
  chr9:37753933-37753963
  hyper
cgttgagaaagcagcgtttagcagtcatgt

SEQ ID NO: 117647 - DNA, 30 bp, Homo sapiens
  chr9:37784916-37784946
  hyper
gcgtcctcctgttccggcaggagcagctcc

SEQ ID NO: 117648 - DNA, 30 bp, Homo sapiens
  chr9:37801047-37801077
  hyper
tgtccccggccccgcgctccggagagctag

SEQ ID NO: 117649 - DNA, 46 bp, Homo sapiens; identical to SEQ ID NO: 46184
  chr9:37998719-37998765
  hyper

SEQ ID NO: 117650 - DNA, 1325 bp, Homo sapiens; identical to SEQ ID NO: 46185
  chr9:38067582-38068907
  hyper

SEQ ID NO: 117651 - DNA, 189 bp, Homo sapiens; identical to SEQ ID NO: 46186
  chr9:38069785-38069974
  hyper

SEQ ID NO: 117652 - DNA, 30 bp, Homo sapiens; identical to SEQ ID NO: 46187
  chr9:38392520-38392550
  hyper

SEQ ID NO: 117653 - DNA, 4 bp, Homo sapiens
  chr9:38393000-38393004
  hyper
cgcc

SEQ ID NO: 117654 - DNA, 40 bp, Homo sapiens
  chr9:38424025-38424065
  hyper
agcgcgcaggcgcagcgcgcagacgctggggtacgagcga

SEQ ID NO: 117655 - DNA, 600 bp, Homo sapiens
  chr9:38424081-38424681
  hyper
cggtgccgcgctgcgcgcacacgcagagcccggtgccctcgggcgctgccccagcggcctggctcgcgcataccaggccggggccacagcgcccgccggcgcggcccccgcagctcgcgccctcggctcccaggcagcgggcgcagcagccgcactcgtcgagcgccgagatcccgggcgccgggcagggcgcaggcgccgggcagccctctggccggcacggaccacacttggggcgccggccgcccacgtcgcggatcccaaggctcggggacagcggcggcagcagcggcagcagcagcagaagcagcagcggcaagagcagagacaagcgcggcatggcttgctccgggacagcggcggcgcctctgcttcgcgctccgctccgcgcccgccgagcagtcaccgctcccgccccgcggccgctgattggccgggcctgcaccgcggggcgcccgcagaccgctgctccagcccgggacccgcgcggtgcccgcggcccgggtctccgagctggagggtcgccccgagagcagctctccgacctccgattggactcttgagggaaccgagacccagtcggggcgacaacttgcccga

SEQ ID NO: 117656 - DNA, 1339 bp, Homo sapiens
  chr9:38619919-38621258
  hyper
gggaattgccagcgacggaaagcagctgaggctccatttggctccgctgctccgagggtgcccggcgccctccaaggtccccgccccaggggctgccgggctgcagggaagccgggcctgcggccccctcccaccgcgggctgagtccccgagctacctgtcttttctgtcgcgggcgtccaagtcccggaacctgcgcgtcaggcagcgctccacctccgcggcgtcgcccttgatggcagccctgtggatcttccgcagttcccagtcccgaatgtcgtaacccggacccgcatactcttggtccatggagctcaggagcgcctggcccaggcgtctcccgaagctgaagagcttcctcatggtggcgacttctcagacgcccaccacccgctcctgagccgcggcggctcctcgtggcctttccacccccactccgccccaaatccgcgatctcccccgcaacccgcgatcccccccgcaacccgcgatccacccccaaatccaagatccacccccaaacccgcaatgtagctcagaatccgcgatccagcccggtccaccacagccttcagcagcgacactcgcagactccgacctctcagaccgagtgagcccagctaagccgttaggcgcgcgcctgaacctcagcgctccgaactctcagaccgagtgagtccccgcgatgccagttaggcgcgcgcctacaactcagcgccagccgggactccggaagccgctcccaagccctcgtggccggcagggggcacctgcagcacgggcgcacgcgtcgctggcttgcgggttctcctgggctcccgcgggacgtcccggaatcccaggagtgcatcccttcccgcctgagggcctgcctggccctgactcccgacccgctcctcctccgaagagagatcggggccgctgacaggggccctccgcagccaccggggatgggactggggggtcggttcctgtcccggtgcagccgccgccgggtagaccgcctggcttggccgcagccagggcgacatgtagccccggttctgccaggctgggagcgccagccatcttgggagttgccaggcagctgtcgccagcaggtagagggcgcctgcagcttgggcgcccaggtggtggagcacggcctaggcggcctctggatcgcgagtgcacctggcctgagagcccgccaggccctgcccctgctcggctcctcgtctgctgaagctcgggacctctagccagtggccctctgcagccacggggaatggggctgagagccggttcccgctgcagggcagaccacctagctcagccgcagccacagggacatctggcc

SEQ ID NO: 117657 - DNA, 935 bp, Homo sapiens; identical to SEQ ID NO: 46190
  chr9:38621394-38622329
  hyper

SEQ ID NO: 117658 - DNA, 121 bp, Homo sapiens
  chr9:66455088-66455209
  hyper
acgtgaaaacgaacgagatgaacacaactgcgtgtgtgagactatcacggcaactgtgacacccaggcgttggcaatagagttggcagcctgatcctgggacaaaggtactgatggacatc

SEQ ID NO: 117659 - DNA, 205 bp, Homo sapiens
  chr9:66455724-66455929
  hyper
tgaaagttgtagagtgcgcccctcactgtggcaggagcagtggcgctgagcgtgcccacgggccgcggcttgggtctctctcattttccaggtggtatggccgtggacaatggcagtggcgcctggctggcccaagagcccagtccagctacgcctgcctgattccaggcgtcaccaccaacccgggggccgcgaggctgggatc

SEQ ID NO: 117660 - DNA, 471 bp, Homo sapiens
  chr9:66458085-66458556
  hyper
gcgcagttgggaagcacggagacaaaagggggaaagaaggagggagcgggaagccaaaagcctacggtaccgctattaccaggcggaatcccatccaagtactaaccagtcccgaccctgcttagcttcaacagatcagaggcgagccgggcgcgttcagggtggtgtggcctagacgccagcagcggcgcctggctgccccaagagcccggcccagccaagcccgcatgactccaggcgtcatcgccaccccggggccgcgggtctcggatccaggacccccagaggcgctcgcccgtgcccccgggcagctgtctccctctacacccgaggaccgccggcctcccagagagtcccgccgtctccggcggccaggcctggctcaggaccaatgtggcaccgccctgctgttgttggggggcgccgccggaggcctctgtcccctgcgcaggcttccggctctaggggcgg

SEQ ID NO: 117661 - DNA, 59 bp, Homo sapiens; identical to SEQ ID NO: 46192
  chr9:66494098-66494157
  hyper

SEQ ID NO: 117662 - DNA, 30 bp, Homo sapiens; identical to SEQ ID NO: 6803
  chr9:68433449-68433479
  hyper

SEQ ID NO: 117663 - DNA, 140 bp, Homo sapiens; identical to SEQ ID NO: 46194
  chr9:69197623-69197763
  hyper

SEQ ID NO: 117664 - DNA, 23 bp, Homo sapiens
  chr9:70152212-70152235
  hyper
caaaaagccgtggcagcgagggg

SEQ ID NO: 117665 - DNA, 478 bp, Homo sapiens
  chr9:71319340-71319818
  hyper
ttgcttcaattcagccgcgaaggatccgctaccttttggttcctattaagtgaatttagctttagctttcatgatagcattttcccaaaggagtcctttagatctgacccctaccctcttcgcagctagactgacatcaggtgacgttgcaagtgcccccagcccactaagcgctatcagtaggaattggccctcagccccgtcacagcgctttcccatgacatcccccagcttctctctcctaggacctcctcgccagcctacccctacctgttgggtaggtcttacttgctgggaacacctgctgtccttagaatgggagcaaccaacgccttggaatcctggcctgtcccttcctcgtgaagggggcgcctgcgctcaagtgccggcttcgccgcctcaggcagagtctagcaggcgggcgaccaggcgtagctgagttctgtggcctggggaaaggggacgccctatccccaca

SEQ ID NO: 117666 - DNA, 36 bp, Homo sapiens; identical to SEQ ID NO: 6806
  chr9:71320185-71320221
  hyper

SEQ ID NO: 117667 - DNA, 371 bp, Homo sapiens; identical to SEQ ID NO: 46197
  chr9:71320586-71320957
  hyper

SEQ ID NO: 117668 - DNA, 30 bp, Homo sapiens
  chr9:71394795-71394825
  hyper
tcaacgcgagcttgcgctcaatagctattt

SEQ ID NO: 117669 - DNA, 30 bp, Homo sapiens
  chr9:71651160-71651190
  hyper
ttccgaggggtgtgcggctgtctccatgct

SEQ ID NO: 117670 - DNA, 44 bp, Homo sapiens; identical to SEQ ID NO: 46198
  chr9:71735685-71735729
  hyper

SEQ ID NO: 117671 - DNA, 468 bp, Homo sapiens; identical to SEQ ID NO: 46199
  chr9:71735786-71736254
  hyper

SEQ ID NO: 117672 - DNA, 43 bp, Homo sapiens; identical to SEQ ID NO: 46200
  chr9:71736562-71736605
  hyper

SEQ ID NO: 117673 - DNA, 309 bp, Homo sapiens
  chr9:71736984-71737293
  hyper
ggtgtgcctgaacacgcacctgcggcagccacaggtgtctgggagccaccttttttcttctccctggcctggcaccctttcactcaagggatggaaactgtttcactttctgctgagcttctcttttacccgattaaaagggcctttgaatttctgttggcgcagccaactgcatcgggtgggggcaggagccggtgccttggagtgacgcgggcggagcgcggcgctggttattggaagctggtggggctgcttgagtgcccgctgagcctccgccgcggggcttgaaaactccgcactccagaaagc

SEQ ID NO: 117674 - DNA, 711 bp, Homo sapiens; identical to SEQ ID NO: 46202
  chr9:71788549-71789260
  hyper

SEQ ID NO: 117675 - DNA, 364 bp, Homo sapiens; identical to SEQ ID NO: 46203
  chr9:71789452-71789816
  hyper

SEQ ID NO: 117676 - DNA, 31 bp, Homo sapiens; identical to SEQ ID NO: 46204
  chr9:71881715-71881746
  hyper

SEQ ID NO: 117677 - DNA, 712 bp, Homo sapiens
  chr9:71939503-71940215
  hyper
ctcctaccgagatgccgggaaagcactcccgcgccgatgcgaggtaggcacgtcctgcgccctgtgagcggtaactgcgctcggcgtcgtccttcccgaagtccttggcttacacctcttcccatcgagtcgccccaaagcccctcctccaggcatccccctccttgggcaaaagtttaagggcgggcccccttctcactaaagcgcgccagggcctctctcgtggctggacagagaaggctcctcgctcttctctagccccagctcggcgggtggggacagacgctgagactctcggtggccggcgctgacgtgtcctggccgtgaggtgcctcccacctcgagggacttacttaaatatttggggcagggcaccctcccaggaccccaggaagccggcgcaggttcggcggggaccctgaggctgtggcgcacttgccccggcacagcgcgagcacggagtgcgcgtgggtgagagtgagggtgcgcccagggccagcgggaggcggacccgccaggcggcaggtgggtgcggccggctggagccagggcagcggcagcggcggcagcaagtggttgggccgtgcgcatttccttccctccccctcggcctcggagcccgtctgcagtgcccagtgtgctgcgccttcggctcggctccgctccgcgtcctctgcccgccgcagccggccgcacccggccgcacccttcc

SEQ ID NO: 117678 - DNA, 381 bp, Homo sapiens
  chr9:71940263-71940644
  hyper
cgtggctgggctttcgggtgggccgcaggccgggggcccgggcgccgctgccgccgccgctcaggagccgccgctgcccccgctgcggccgcgctggccccggggcgcgctgcagcccccgtcgcggcctcgctgcgcggccaccgctgctgccggggtgctggccgcgccgccggcgctctcctcccgccgggcagtcgccgccgctgccgccgcggccccgggctccgcgctgctgcccgcccgcccgctgctgtcacttgggctgcttcagctgatcttgggctgctgcatggtggcgctcagcttcggggcgctgtcgctgagcagctccccgcaggtgaagaactcgtgcccgttctgggccggctcctcggtgag

SEQ ID NO: 117679 - DNA, 53 bp, Homo sapiens
  chr9:72288141-72288194
  hyper
tagcacaggccatccgccctagatatggctcctaactcgagaggccacccttt

SEQ ID NO: 117680 - DNA, 30 bp, Homo sapiens; identical to SEQ ID NO: 46208
  chr9:72374473-72374503
  hyper

SEQ ID NO: 117681 - DNA, 31 bp, Homo sapiens; identical to SEQ ID NO: 6811
  chr9:72374873-72374904
  hyper

SEQ ID NO: 117682 - DNA, 190 bp, Homo sapiens
  chr9:72435609-72435799
  hyper
gtttcttatcagtaacgacaacgtctaggaaacgtttggccgtcaggttggagggatccgcccctccactggccccgccccaggttgcttaggagataagagacgccgaatcttggtacttacgttcctgccgggcaggacaggtgcatagggaactcctcagaggtctgtacctcgagggctcccatgg

SEQ ID NO: 117683 - DNA, 30 bp, Homo sapiens
  chr9:72873358-72873388
  hyper
ccttaacggagcgtcgggcacagagtcatt

SEQ ID NO: 117684 - DNA, 179 bp, Homo sapiens; identical to SEQ ID NO: 46210
  chr9:72874087-72874266
  hyper

SEQ ID NO: 117685 - DNA, 30 bp, Homo sapiens; identical to SEQ ID NO: 46211
  chr9:73027046-73027076
  hyper

SEQ ID NO: 117686 - DNA, 1696 bp, Homo sapiens; identical to SEQ ID NO: 46212
  chr9:73027342-73029038
  hyper

SEQ ID NO: 117687 - DNA, 255 bp, Homo sapiens
  chr9:73033409-73033664
  hyper
ctgggaggggtggaccgtgccgggcagaactgccagcctccaggcgggaaggaaggaggagaacagatggcccactgggggtagaggatcacgtgttggacctcattctgggctgcatccagacctctccctttcagggcccagcccctccagctccagcgaccccacctaggcacacggaacatatgtggaggaaaccagtgttcattttgttgaaagcaggggaattagagaaggaggcgagcttgaggaggg

SEQ ID NO: 117688 - DNA, 30 bp, Homo sapiens; identical to SEQ ID NO: 46213
  chr9:73035421-73035451
  hyper

SEQ ID NO: 117689 - DNA, 31 bp, Homo sapiens; identical to SEQ ID NO: 46214
  chr9:73035699-73035730
  hyper

SEQ ID NO: 117690 - DNA, 266 bp, Homo sapiens; identical to SEQ ID NO: 6813
  chr9:74061492-74061758
  hyper

SEQ ID NO: 117691 - DNA, 330 bp, Homo sapiens; identical to SEQ ID NO: 6814
  chr9:74061787-74062117
  hyper

SEQ ID NO: 117692 - DNA, 36 bp, Homo sapiens; identical to SEQ ID NO: 46217
  chr9:74382902-74382938
  hyper

SEQ ID NO: 117693 - DNA, 30 bp, Homo sapiens
  chr9:74525235-74525265
  hyper
ccttcttagagtgtcggtcggtcctccctc

SEQ ID NO: 117694 - DNA, 30 bp, Homo sapiens
  chr9:74526251-74526281
  hyper
cgctcagcaggaggcggggattgcggaaaa

SEQ ID NO: 117695 - DNA, 280 bp, Homo sapiens
  chr9:74639981-74640261
  hyper
tcaggaactctggtgtgagaccgaatgatgaaagccgtccaggggattccgatgctgctcagggttaaaaaccacagcttgatctgaagagctgcaggggacagcgccctctggaggccacgtgatcacagcagccatagaaaagcagctgcatccagagaaaggagcaagagtctaggtttccgagtcctgttgtcccttctcatgcaaagagacttctatggtggtcaactttagagatcctgacttgatttaattaaaggatattgctggttttttt

SEQ ID NO: 117696 - DNA, 695 bp, Homo sapiens
  chr9:74764247-74764942
  hyper
cgcggagccaactcgcgggagaaaaatcctattggcattgaggaggtagggagccagcccctgggcgcggcctgcagggtaccggcaaccgcccgggtaagcgggggcaggacaaggccggagcctgtgtccgcccggcagccgcccgcagctgcagagagtcccgctgcgtctccgccgcgtgcgccctcctcgaccagcagacccgcgctgcgctccgccgctgacatgtgtgccgctcagatgccgcccctggcgcacatcttccgagggacgttcgtccactccacctggacctgccccatggaggtgctgcgggatcacctcctcggcgtgagcgacagcggcaaagtaagcaggcgcggggtcgagcgcactccgacgggcgggaggataggtgcaaggaacctggcgcggtgcttcgcgtagcccggggttcgctcggtgcgcagtgagcgccgcggctccggagttgaacttgagtctttggctcttgggcaacgcagagagaaccctggcgctaggttcgtgggctggctggggagttcccagaagtcgggagcagtggcgtgctaacgccacaactggctcgacagcagtccgggctgcggtagagccgggagcaaggatgtcaccccccgctcccccgccccccgttccaatcctaagataccggcaataatcttcaatcttgc

SEQ ID NO: 117697 - DNA, 50 bp, Homo sapiens; identical to SEQ ID NO: 6816
  chr9:74979546-74979596
  hyper

SEQ ID NO: 117698 - DNA, 30 bp, Homo sapiens
  chr9:74980299-74980329
  hyper
ttgctgtgccttctcgcggagcccagccac

SEQ ID NO: 117699 - DNA, 33 bp, Homo sapiens
  chr9:74980722-74980755
  hyper
ggctgccaatgccccggcggcgctgttctgaac

SEQ ID NO: 117700 - DNA, 30 bp, Homo sapiens; identical to SEQ ID NO: 46221
  chr9:76736854-76736884
  hyper

SEQ ID NO: 117701 - DNA, 741 bp, Homo sapiens; identical to SEQ ID NO: 46222
  chr9:77111651-77112392
  hyper

SEQ ID NO: 117702 - DNA, 649 bp, Homo sapiens; identical to SEQ ID NO: 46223
  chr9:77112691-77113340
  hyper

SEQ ID NO: 117703 - DNA, 150 bp, Homo sapiens; identical to SEQ ID NO: 6820
  chr9:77113558-77113708
  hyper

SEQ ID NO: 117704 - DNA, 669 bp, Homo sapiens
  chr9:77113805-77114474
  hyper
cgttacgcttgctccggctggactctgggcctctcgaagggctggagggtgggtttcggggagtcacttggtctcctctcctgccttgccggagacctcaggtttccttcgcgctgtgctcggcctttcttcactcttttactgaagagccaggcgggtgtccgcttgacatggggatctgtgcaagctctgggcacccacccccactcccagtccctcttcctggccacacagcggttaatcgggggctcttctctatccttcgcacgtacccctgggtcttgacaacagaaagttagtaacggccagctccagaccttcttgcatcccagacccggagagaggtggtctaggcagggagcacttgggagagttgggatgcaatcactggtctcctccttccactgaaagtgatcctctcccacccagtccccctacgcccctagaggagcaccccaggaggcagcgggtctcactcccactccctcccgcacccggtgagccccgagcctggactcaagggtttgctggctggacgctgggatgtgtcaggaaagggaaggagaagaaggaacggagagagactgtccatgggggagggggttgactgtagataagaaacaaggacgtcctgatgggatggtcttgattggccggctcgctgggagt

SEQ ID NO: 117705 - DNA, 166 bp, Homo sapiens
  chr9:77114904-77115070
  hyper
ttgcagatgactgtcctggttcgccacggcggtcgctttgaggactccagaagctggaaggattgaaagccaggcgctggtcctcatgctcaccttgagaaaaccagtttaagcccacagacctatcaaagagggcgccagcctcgccaggcgccctaggacccct

SEQ ID NO: 117706 - DNA, 333 bp, Homo sapiens
  chr9:77115354-77115687
  hyper
aaaagaatcagctttcgctcgtgcagggctactaagcaccctatgttgggagaggggccatttttgacctgggctttacggtgggcccactgcatttccctcatccacacgcgcgcgctttccattcccaggtggtcctagttagcgcctgggctccacagtttgcagctgacaactgtcctgaatcagggcgctttgagcgacggaaaggtgatctgggattcagtggtctccctcggggccaatccggcaaacctattcccaccccctactcctcccccgcctagggcatttaagagactatccccagggaagctacggggaaagaaaggg

SEQ ID NO: 117707 - DNA, 788 bp, Homo sapiens; identical to SEQ ID NO: 46227
  chr9:77501916-77502704
  hyper

SEQ ID NO: 117708 - DNA, 30 bp, Homo sapiens; identical to SEQ ID NO: 6823
  chr9:77566826-77566856
  hyper

SEQ ID NO: 117709 - DNA, 78 bp, Homo sapiens; identical to SEQ ID NO: 46229
  chr9:77567959-77568037
  hyper

SEQ ID NO: 117710 - DNA, 30 bp, Homo sapiens
  chr9:77642955-77642985
  hyper
tccagaagtgctcacgctcaagcctctcct

SEQ ID NO: 117711 - DNA, 30 bp, Homo sapiens
  chr9:77643256-77643286
  hyper
atgcccccagctcgcggcgcgctccgcccc

SEQ ID NO: 117712 - DNA, 30 bp, Homo sapiens; identical to SEQ ID NO: 46230
  chr9:77702591-77702621
  hyper

SEQ ID NO: 117713 - DNA, 30 bp, Homo sapiens
  chr9:77702821-77702851
  hyper
gcgcaaccaagtcccgggctccagcacaga

SEQ ID NO: 117714 - DNA, 30 bp, Homo sapiens; identical to SEQ ID NO: 46231
  chr9:77703064-77703094
  hyper

SEQ ID NO: 117715 - DNA, 1472 bp, Homo sapiens
  chr9:78504962-78506434
  hyper
cctcacttccaaggccggaattgtactctcccgtggcgttgcctagtatcgcagatttcgaaagtgagcaggcaacagacttggctttcgagccaattctaggagtcgatgcgacttactgtcctgtgtggtagcttctcccgggagcagaaagtgtaaaataaacagctgctgaaaagcatgaagaattaacgaagtgaaaatctcgagttatttgttcggcaattgacacgtaagtgacctccttaaatgcctagttatttaaggacgtttagaacgaggatgaatgaatcttcagggcggttaattcgcaccggcgtgtaaatttctttagtctttcgggaagtggcggtaaattcatacaaatccagcagggagggaagagaagggagtaaaaccacgatctcggagcgctcttctcagtcctttggaaagacttgcctttactgcccggaaccctggaggttacagctgggcgaacccggaggcgctaggacctcgtcagcgcctggctgcggccgctttcaagagggcggaggagggagaggaggagggcgatgtgggaaaggaggggtgttaaggggggcgggggaagtcatttatgcagagcaggagctgctgccattgccactcagaatcctcgcgcgctgctcggagccggagggagcgctgggagcgagcaagcgagcgtttggagcccgggccagcagagggggcgcccggtcgctgcctgtaccgctcccgctggtcatctccgccgcgctcgggggccccgggaggagcgagaccgagtcggagagtccgggagccaagccgggcgaaacccaactgcggaggacgcccgccccactcagcctcctcctgcgtccgagccggggagcatcgccgagcgccccacgggccggagagctgggagcacaggtcccggcagccccagggatggtctaggagccggcgtaaggctcgctgctctgctccctgccggggctagccgcctcctgccgatcgcccggggctgcgagctgcggcggcccggggctgctcgccgggcggcgcaggccggagaagttagttgtgcgcgcccttagtgcgcggaaccagccagcgagcgagggagcagcgaggcgccgggaccatgggctgggggagccgctgctgctgcccgggacgtttggacctgctgtgcgtgctggcgctgctcgggggctgcctgctccccgtgtgtcggacgcgcgtctacaccaaccactgggcagtcaaaatcgccgggggcttcccggaggccaaccgtatcgccagcaagtacggattcatcaacataggacaggtaacgaactacaggctagcccagccctcggccctgaagccactgggggcttcttgtcccctctgcgtggaaccccctccccctcttccagatgtgctctagcagctgttgccctaactcttgggcgatgctctgtctcctgcgc

SEQ ID NO: 117716 - DNA, 1172 bp, Homo sapiens
  chr9:78506493-78507665
  hyper
ggtccgtgttttgtttacttgtcttttccaagccacgcgggactggtagggtctcgggaaaaatccagagtgcccccgtggtggcttcagagacggctggaccttttgacctgaaaagtcgagtagcactagtaatctgaggcagtctcagagagggtgatcgtggggagagggggaaattaggtcttttgggggatagggggtgagcgcgcctctgatgcctgcggggaagggaaagcctttcctgctcggacctgaatttagcccagaaagaagtttcctcttgggcgagagaacctctggcgctggagactccggaggcgcggggactggagctggaagggaggagaaaggagggggagggaagagggggccggccccggtgtgagtgcagatttaggggagacctctaggctttctcgccttaagcgaggtccgcgtgggggctcccggaagggagttgtagtggggaggtgggaaacttccgaaaccggctggctgggttccgctccgggaaaacgaggagtcttaccccgggacggaaggtgccgggccgggaggttgcgccgtggggcgagagttgggcaggcagcaggggcgcggggtttttgtggggtgccgctctcgggcttttggcagagctctcctgctagggagaaatgcccataaactaaggtgatgctatgaggatgattggaagcgtaacagatttggaagtactccgggttcagtggtcttggctttctggttctcttcccccgacacccctgcgagaaatgggggtagagagggctatgaaagtgggtcccagaaagtacccccctccacatacacaccgcaagcatctttggggttggccggaggggcgggccctggctgggctcaggcgagaatccgctggaatgggaggtgaggatgatggatggcgcctttccagcaggcgcgctttggggactgcccggggtgcacgcaccctgcgtgctctgccagggggaagggagagggaggtgctggctggtgccggcggagtgggagagtacggacagtttctgaggccattgcgttccacgcccaggaacccggggacaccccccgcccctcctccccgccgcctgggggatgcggcacctggagaggaggcagagctgctgtcgccgcgtttagaaggagct

SEQ ID NO: 117717 - DNA, 30 bp, Homo sapiens
  chr9:79009723-79009753
  hyper
accgctgggttgaacgtcaggcatcgctcg

SEQ ID NO: 117718 - DNA, 30 bp, Homo sapiens; identical to SEQ ID NO: 46235
  chr9:79074195-79074225
  hyper

SEQ ID NO: 117719 - DNA, 30 bp, Homo sapiens; identical to SEQ ID NO: 46236
  chr9:79074792-79074822
  hyper

SEQ ID NO: 117720 - DNA, 143 bp, Homo sapiens
  chr9:79306755-79306898
  hyper
gcggggacagcataacgaccacaagcttttctaggatgagtggatacggaataaaatgcagctggcagctgtcagttgcaaggggctgggcagaattcggcatcctctcatccccctcccgtctcccccgccaacttcccagc

SEQ ID NO: 117721 - DNA, 276 bp, Homo sapiens
  chr9:79319764-79320040
  hyper
ggagcctgctcctaccggcaaataaacggactcagggtcttcacgaatatgcagcacagccagctgggatccaggcagtctgtttttggtctcagcctggtttccctcacttcttcgatcaggaagtgcagaaagcactatctctgctgctctgcatcccagagattcatcctctggagacccagcttcctctattgtttcagcactctgggcaggttctgtgagataagacaaatcaaagggaggtgtgtacggtgccagcgactgcttcagaga

SEQ ID NO: 117722 - DNA, 728 bp, Homo sapiens; identical to SEQ ID NO: 46237
  chr9:79520836-79521564
  hyper

SEQ ID NO: 117723 - DNA, 554 bp, Homo sapiens; identical to SEQ ID NO: 6828
  chr9:79626870-79627424
  hyper

SEQ ID NO: 117724 - DNA, 30 bp, Homo sapiens
  chr9:79628313-79628343
  hyper
acgtgcccaaaggtgcggtatgtgatgtca

SEQ ID NO: 117725 - DNA, 229 bp, Homo sapiens
  chr9:79628711-79628940
  hyper
gtctttgttattagtcgtcggagggagcgcaagaaagttatttaatttttaatcgttggttatttatttggtggttatggttgtcagtggccgctacctaaacagacacggcccgtaggaaagcttctggatgttggccaagaggtgtgaggcgcgggtggactgtaaaggggaaattgctctgctagggtgacacaaacgcttcccatctccacgctgattgcgcgcc

SEQ ID NO: 117726 - DNA, 184 bp, Homo sapiens; identical to SEQ ID NO: 6830
  chr9:79629207-79629391
  hyper

SEQ ID NO: 117727 - DNA, 820 bp, Homo sapiens
  chr9:79629670-79630490
  hyper
acagccagtaggtggcgaagctggagctcgagtatcgtctcctaaattcaaggccagtgctttttttctccaagaaataaatgcccctgacctcaggcttttcccttctgccctccaccctcgggcattccgaaaagtcaaatcgagcttatgcactcaaatccaagtagggcggagccaaacctgtgtcctgggcgcctgccgggcaaggcgcggggactggacgggtcggaaacggggcagggatgcacttcgcagagatgtcaggtcgggttggtgacgctggaggcgacggattcctaaaacgttataaggggttgacgggtggcgctgctgccctgcagcgtccccagctgcgcagctcctgagctccccgctccgagcgcccagacccccagcgccactccaccgtcgagatcacagcttcaaacctcaactccttggagccttcgaaggcgcagttctgactactgagtatttcctggaaagaaaaagaagcccaaagcggtgaaatgatgcctccagggtcatccaggcctggactcgagctggaagccacgtttccgagtcctggggctggctttctcctaccctcttcaaatccactttaggagtttcgtctgggaaaagtatgcgccgagaagtcagccgaaggtcaggcaagtgccaggctagcgtgaccaggaaggctcctgggaggaccccaaacgtaactaacccaggcaaccttccgcacgtcagctaagtcagtgcgtaaagggagaacccatggaaattgagatgtgcgcctaaacctttgccttttttctagcgctgtacg

SEQ ID NO: 117728 - DNA, 1868 bp, Homo sapiens; identical to SEQ ID NO: 46242
  chr9:79630544-79632412
  hyper

SEQ ID NO: 117729 - DNA, 2557 bp, Homo sapiens
  chr9:79632891-79635448
  hyper
ggtggagcctccattcgccaagccctttagtgcctattctattaatttcttggttactgttcgtctcaccctctataccgcgatggtggagctcggatactgtctcctgtctccctgcacctggtgcctcacatgcagttggcgcgcaataaaactgagatgaatttggcatttggtgaaaacaccccatgctttcttccccatgagtttttccctccagccctctaatcatcggggtttcttgcagagaagaggccttgaggacacgatactctgaacttgacccagagtgtctagcccaggaaaaagggtttgtaaggagagagaagctcacagcgagtagatgaaaacagggaagggtaaaaggaagggggcggaagagggagatgccagagagaagagaagcaagaaggcagtgtcctgttccccctccaccgtgcttggtggcccgggtggggcgcagctgcgggaaatgcacccggagctgtgccccctcccggcgaacagcctgcgccacccgccgcaccgggaggtggctgggggctgccgagcgagtggtgaacgcgatgggtggagagcgcccgaaacgaggtggaaaagggggcgggggcgaggcacggcgccttcttgccccttcttcagctacagacgcggcggcggcggctgagtccctcagcctcggtcatgtgatagtctcgaagcgctagctgcgggggtctcggcgtctcggggaccattacaaaacgcagccaggagagcgcgtcgctgccactgccgtcgcctctcctcctcaagacaagcccgggagaaaggcggcagctgcggcgcggacggctgagcctccccggccagcactcacccagcattcgcagacgccctctccagcccgccgctcgctcccagagtcctgcgccccacactcctcagcagaacctgcgggcgctgccgcttcagaaaccaccaaagttttttctcctcagcgacagcctagggctgcgcgtctcttctaaccccggcgacgctgcgagcctcggagaaaagagaggcgccctagaagccaatcttctctctccttaccctgatttttcactccaggaaaaggagaactccagcgcggtctggctaagtgcctggccaggggcctgcgtccagggcactggaagtcctgctgtcactggcctccaggacagcaggcgcaaactcagatttaaagggccagagtctctactgcccagaccttcctcccagccatcttggtctgggtttccctcggacctagaaaaagcaaagaggccgggaggaaacacggccccttgccactctcctctgcagccagctccagcactcagtctttggccacccgggggaagacgcagagaaggcggcggtaaacctggtgcactccgcccgcgactgtgcgcgccagtcggcaaccgtcggggccagaagttgccagcttccgagagctgagtaggcccgaaaggccaaggtcggagacaccaggcaattcggagaaggcaggagagagaagcagagagggcctggagggcgagagggcaaagtggcgggactggaggggccgagtgggaattagtgggggcagccaggccccaggaacggagtgcggagagattctgtggtccagtgcgggccggagggcggtggaggagccgggggcgatgccgcggccggggaagagctcgtacagcgaccaaaaaccgccctactcttacatctcgctgaccgccatggcaatccagcactcggccgagaagatgctgccgctgagcgacatctacaagttcatcatggagcgcttcccctactaccgcgagcacacacagcgctggcagaacagcctgcgccacaacctctccttcaacgactgcttcatcaagattccgcggaggcccgaccagcctggcaagggtagcttctgggcgctgcaccccgactgcggggacatgttcgagaacggcagcttcctgcggcgtcgcaagcgcttcaaggtgctgcgcgccgaccatactcacttgcacgcgggaagcaccaagagcgcgccgggcgccggtccgggagggcaccttcacccccatcaccaccaccacccccaccaccaccatcatcaccacgctgccgcacaccaccaccatcaccaccacccaccccagccgccgccgccgccgcccccgccgccgccgcacatggtacactatttccatcagcaaccgcctactgctccgcagccgcctccgcacctcccgtcacagcccccgcagcaaccgccccagcagtcgcagcctcagcagccgtctcaccccggcaagatgcaggaggcggcggccgtggcggcggcggcggcggcggccgcggcagccgcggtgggcagcgtgggacgcctgtctcagttcccaccctacgggctgggctcggccgccgccgctgccgccgcggccgcggcgtccacgtcaggcttcaagcacccctttgccattgagaacattattggccgggactacaagggcgtgctgcaggctggagggctgcccttggcgtc

SEQ ID NO: 117730 - DNA, 305 bp, Homo sapiens; identical to SEQ ID NO: 6835
  chr9:79635745-79636050
  hyper

SEQ ID NO: 117731 - DNA, 200 bp, Homo sapiens; identical to SEQ ID NO: 6836
  chr9:79636290-79636490
  hyper

SEQ ID NO: 117732 - DNA, 402 bp, Homo sapiens; identical to SEQ ID NO: 46246
  chr9:79636830-79637232
  hyper

SEQ ID NO: 117733 - DNA, 220 bp, Homo sapiens; identical to SEQ ID NO: 6838
  chr9:79637668-79637888
  hyper

SEQ ID NO: 117734 - DNA, 53 bp, Homo sapiens; identical to SEQ ID NO: 6839
  chr9:79638136-79638189
  hyper

SEQ ID NO: 117735 - DNA, 30 bp, Homo sapiens
  chr9:79793312-79793342
  hyper
tcgcctgggttcggcggataacaaaaagga

SEQ ID NO: 117736 - DNA, 732 bp, Homo sapiens
  chr9:80263017-80263749
  hyper
ccgggaagatgcgcgcgccccttggcacaggagccggacagcagtcgggggcgcagacgagttggaacgtcggtgctcgggggagagtaggatctcctgggcctaggggtgtccccaggcgggaggtaggcgcggagtgggttggaggcaaaggacctggctggcctttgcctggaaagttctgaaaacctcagcagtgaccgcagactaagactgagtggaaaggttcccgctagcgtttgtggctctaagtggcaggaggaggcggagcatcttgaacctgcagccctggcgtctgctggacttgcccttctgggcaccccaagccgaaggcgcctggaagtgaaaggggacgagcagggggcgcggagctgggggtgggagctggcacctctaggagcagctcccacacttgcctccctggctggggcgtcccggccaaggtttgctgtaatctgcgcgtctggccgccaggcaccgggttccgacaggtgagtgagtttcgccaactcactcgctcggagaaggcggcagcaggctggaagaggagcggcgccaagcgtctgttgcgggacacaaagccccggacctgaagtggaagcttgcccaccagcttcaccaccacgcacacccggatttcctagactggctccttccgcttcccggacgccccggcccagctcgggcttggccaaagcccttggtcagctcggcaatttgcctgtaaagtgt

SEQ ID NO: 117737 - DNA, 2103 bp, Homo sapiens; identical to SEQ ID NO: 46250
  chr9:80645541-80647644
  hyper

SEQ ID NO: 117738 - DNA, 30 bp, Homo sapiens
  chr9:80650380-80650410
  hyper
agcctgaagagcatcgcagatcctacaaga

SEQ ID NO: 117739 - DNA, 30 bp, Homo sapiens; identical to SEQ ID NO: 46251
  chr9:80851418-80851448
  hyper

SEQ ID NO: 117740 - DNA, 1061 bp, Homo sapiens; identical to SEQ ID NO: 6842
  chr9:80911703-80912764
  hyper

SEQ ID NO: 117741 - DNA, 1499 bp, Homo sapiens
  chr9:82185178-82186677
  hyper
acgcatagaaataaacgtctaaaacccagcctgttacattagccaacactcttcttgactttttccgaattttttccctgtccccaagattagccgctcgctagaaaagactgcgagcctcagcagcctccccttgaactggggcgctgcctccagctggacacggactaaggatggaaaggcgcactgacggaggccgcccccatttcccaggcccctccctaggggtgcccctcctcagccatggctgcccctttctctcctcctccagcatctgcccctggggccacccccacctttccgccatctctcgggcccgcgtggcaccctgctctgtttttaacggggataaacttgacttgcttctccaaagagcgggaaaaagaggcgcagtcttggtactgatctgggggagggaacgtcccagggcgcgcaggggcgttttctacccgtgccccgtcggcctgctctgttcagtaccgaccgtgttcggggttcacgtggcccagtcggcaaagtttctttggaggtccagcgtctctgattcccggatcttcagccccacccggagcccccacggttactgccccccgcgacccccgatggagcgtcgggatgcgctttctctccgagtgcctccgggggtggagggagggaggcctgtttcggaactaaatggcaatcacagcccccgcggggcttggagggacgagctccccgcccaccccgcggccccggccccagccagcatctcgcgactccatttctggctctaaacaagaacggggaccgagtcgcgttcacacggaaaattatgccggctccagcggcgcgtaaaattgatgtgaaccgaacgaagtaagatcagcgtgatcctccccctcttgtctcaacaggggtttcggcgcgttacacaaggccgagcttgtctctttaaggagacattggaccctaattagtccgcattcctggcgcggctgcggagcgaggggccgaaggtgtctgggttgggagacgggtgggcgggaggacgagactcggaagaagatcttttgaccagcccccaggctcaccgctccctccaccctctttattttgccgccaccaccaccaccaccaccaacacctaattctgaagatgcagccagggcagcagcaacagcagcagccgccgattctcccagccccacgttactttgattgacagctgaacaaatgttttcccggttcgaacgctcgcgctaaggaacgtcagccaaggcgaagctccgccttgggcgggccatctccgccccgcctccgccaacctcattcctcttcgttaattggtcggagctacaggcgacgcccggcccccacgtgggtttcagctgggttggctcctccccgctggcttgccatttgtcagcagtgaaatgatgggcactaacacagaacggcgattaatgttcagccacctctgattggttggtggagacgcctaccgcaacgggggtggg

SEQ ID NO: 117742 - DNA, 493 bp, Homo sapiens
  chr9:82187754-82188247
  hyper
gtgcgggcggcggggcgcgggctcgccgggtgctgggggattccccgcgtcgccccctgcgcaccgagttgtgtcttttggccggaggggcgtggagagccgcccgaaatcggcgccccgcgccgggagcagcccgcccgccatcacccccaccccccggcgcggtggccctcggagggggtgcggagaggcaattgagttgtagccattttcttattgttgtctttgaagcccctggaagccgcgccgagccgtttgcggtccccgcgccgcgactcctcgagggggggtggcgagcgatgaaggaggcgcgactccgcgcccgggcggggagggcgccctcggcagcggcgctgctgggctggctgcggtttggaagtgcggggcgccggcccctcgcgccgcgggccgccggggcgagcgggcgaacgaacgagccgagagggtggcggccgcctccctcctcccccggcctgaccgcagcccgacgcca

SEQ ID NO: 117743 - DNA, 90 bp, Homo sapiens
  chr9:82188484-82188574
  hyper
ctctttgcttgcgtgcgcgatgaccctcaccccccgctaacgccgcatagtaggttttctccgtctccctgcttcgcctgtgatgtgggc

SEQ ID NO: 117744 - DNA, 30 bp, Homo sapiens; identical to SEQ ID NO: 6844
  chr9:82839233-82839263
  hyper

SEQ ID NO: 117745 - DNA, 30 bp, Homo sapiens
  chr9:83995005-83995035
  hyper
tcactgctcagagagcgaatggccctgggg

SEQ ID NO: 117746 - DNA, 30 bp, Homo sapiens
  chr9:83995056-83995086
  hyper
tgcccaaatagttcccggagatgtcaaggg

SEQ ID NO: 117747 - DNA, 1035 bp, Homo sapiens
  chr9:84302130-84303165
  hyper
gactccacacgccaccgcctggacgcaagaactaagtacaggcgccgccgccacccggctgggtgcaaggggcaccgggacgcccgcgaccactcgcatggcgcggccggacacgcacctgtgatactgcgcctgcaggaactggaattcctctttaatccggtccagggactccgggatagtgaacttgaagggctggcctgcagcctggtgcggcgtctgggggcgaccagcgagggggaccgagggacgggaatgcgggcggatgaataaagcagtaagtcagagaaggcaagaacgggtgggacataaacataaagttagaagtggctgaaaacgaggccccaaactcgagtttgcccttcactatggggagggggaaagcggaccctccccgggccccggcttctaaagaggctcggaagctcttcccagtctccagggcggattgcgctaagtgcgcccgggtcaccaggccaaagggaagggggctccccggcggccagggaagaccaggccagattgtcggtgtcgccgccccttcccccacggcggcgataatgaccccggggaccagaggagaaaaacaactcctttacgctccccattcccagagtcgccggggccacctccagacgcaccggaaccggggccgcattgacatgtaaataggcgagaggagaaacaaaggggggggcgccctgcccccactcggggaaggtagaggggatatggctgcaggagagaaaccccagccttccccagcgcccctgtccgctcggtatagacgtcaagtaggaaggagcccaaagggagggagaaaattaagagtttcggcccactccccaccccaggaagagagggccccagacctccccagccttacaccgctgagggcgagaaggtccgccgggcctcagaagccaccagtctccctaccgcccgggagaagcgcctccccaacgatcctggccccccaccaccacccagccgcgcctcaccgggtgccggctctgcgggaacatcgctctggcg

SEQ ID NO: 117748 - DNA, 672 bp, Homo sapiens; identical to SEQ ID NO: 46257
  chr9:84303267-84303939
  hyper

SEQ ID NO: 117749 - DNA, 197 bp, Homo sapiens; identical to SEQ ID NO: 46258
  chr9:84304432-84304629
  hyper

SEQ ID NO: 117750 - DNA, 1166 bp, Homo sapiens
  chr9:85677093-85678259
  hyper
ctcctgtaatgaacacgccgccctttgcaggctcaggattcagcacgtaaaactttctccccaaacgctgactctctgactcctttttcttaactctagcggatcttggaaaagtcaaagcgagtaggtgaaggaagacaagcaactcacagagaagactaggggggggggccattgggtctgcacacctgcaagtaagtgggaagaagcaagcaggaagcgccagaataacctcccgcccccagctcacactcgcacctgggaatgaacttggcttcgtccccaagtcgcgcctggaaatcctgccaagcccggccgggactcgccgggccgcacgaggtggccagcgccgccgccgcgtcctcgtcgccttcgtcctcctcgctgtcgtgtgtctccggccccgcctcagacacggcgggcgcgggatccagaggaccccagtcccggcgccgccccccgcggagggacccgaggaagccacgcgcgaactcctggaaggtgatggcgccgtcacggtcggcgtccagccgctggaatactgcctcggcgtcggccggccgcacccgcagctccgtgcacagtgcccggaactcctcgcgctccaggcgccccgagcggttcgcgtcgcaggcggcgaagactgagcgcagccgggccagctcctctccgtccccatccgcctccatcccgcctggcgggggcggccgagagggctccggagcgccgcggggcgcagggccctccctggaaggacggggccacctgctgccgccgggaggcccggcgagtttggctcgtccggctggttcggccacttgagggaacgtcgggcggggcgaggaacgtcgggggtggccgagcggctcccttcgacgacggttcgggccagcccccaacaggtcccgggagcggtggggtgcgcccgggctccaggcaccgccaaggagcgcctcctgcgactgagcgcccaagcgccgaggtggctctcgccactttcccggcgggtgcagctccgcccagccagggaggaggagcgcgcgccaccgcttctccagttcccacgccccggagtccaccgctgcttgccgcgcaggtgggggagacctggctggccggaactgggattcggggggagcattgcccttcggcgtaagcgctgctca

SEQ ID NO: 117751 - DNA, 31 bp, Homo sapiens; identical to SEQ ID NO: 6848
  chr9:85834937-85834968
  hyper

SEQ ID NO: 117752 - DNA, 68 bp, Homo sapiens; identical to SEQ ID NO: 46261
  chr9:86152303-86152371
  hyper

SEQ ID NO: 117753 - DNA, 1390 bp, Homo sapiens; identical to SEQ ID NO: 46262
  chr9:86152381-86153771
  hyper

SEQ ID NO: 117754 - DNA, 340 bp, Homo sapiens; identical to SEQ ID NO: 46263
  chr9:86238305-86238645
  hyper

SEQ ID NO: 117755 - DNA, 25 bp, Homo sapiens
  chr9:86536018-86536043
  hyper
cggaaggggcgctctgcctctagtc

SEQ ID NO: 117756 - DNA, 30 bp, Homo sapiens
  chr9:86536498-86536528
  hyper
gtccccaggaagtccgcaaagggccggccc

SEQ ID NO: 117757 - DNA, 30 bp, Homo sapiens; identical to SEQ ID NO: 46265
  chr9:86594874-86594904
  hyper

SEQ ID NO: 117758 - DNA, 30 bp, Homo sapiens; identical to SEQ ID NO: 46266
  chr9:86595136-86595166
  hyper

SEQ ID NO: 117759 - DNA, 594 bp, Homo sapiens; identical to SEQ ID NO: 46267
  chr9:86755526-86756120
  hyper

SEQ ID NO: 117760 - DNA, 196 bp, Homo sapiens
  chr9:86886564-86886760
  hyper
atgttccgcacgtctcgctggttcgaggacgcctcgtctgttgctatggaaacagagtagtcaaatcagactgcgacggaggactctactgagtccccgagaacaaattgtttccttctgtttggttccatttggtttaagtagcgggggagaccctcgctttctggataaactattttcccgggccggacactga

SEQ ID NO: 117761 - DNA, 1381 bp, Homo sapiens; identical to SEQ ID NO: 46269
  chr9:87282689-87284070
  hyper

SEQ ID NO: 117762 - DNA, 902 bp, Homo sapiens; identical to SEQ ID NO: 46270
  chr9:87284293-87285195
  hyper

SEQ ID NO: 117763 - DNA, 260 bp, Homo sapiens; identical to SEQ ID NO: 6857
  chr9:87285272-87285532
  hyper

SEQ ID NO: 117764 - DNA, 170 bp, Homo sapiens; identical to SEQ ID NO: 6858
  chr9:87285554-87285724
  hyper

SEQ ID NO: 117765 - DNA, 201 bp, Homo sapiens; identical to SEQ ID NO: 46273
  chr9:88137524-88137725
  hyper

SEQ ID NO: 117766 - DNA, 119 bp, Homo sapiens
  chr9:88137874-88137993
  hyper
cgcgcgatcgccctgtgcgcgcaggagtgacaggcgccccagctcgcgctctccagcccgccagggcccggctttggcagacccgaggctcctcacccgccctgagggacgggttgtac

SEQ ID NO: 117767 - DNA, 376 bp, Homo sapiens
  chr9:88355779-88356155
  hyper
taagctatgttaaaacgggaaatgggctttaaattatcaacattcacatcgattacactatgatgcatgaaaactccattctacaatgagtaaacgcccaagaaaggaacccaaccaactccaattgccctggtgctcgtaagaggtttataccgcacaaggggtaaaacaacggtagagtcgagcaagcctttgggttacaacagtccttgaacacttgcaattgagaacccgcaattcaggaaggaagacactaaggaaactctgcactgtcatccagggtgatctgattcaggttcaaaccaaacgctcaaggcgacaagttgtaaacagaagacacacttcagctcaaaccacccagcgagaggaagcaaac

SEQ ID NO: 117768 - DNA, 30 bp, Homo sapiens
  chr9:88356690-88356720
  hyper
ggctcaggatggggcgctggcggggaccgc

SEQ ID NO: 117769 - DNA, 16 bp, Homo sapiens
  chr9:88357128-88357144
  hyper
cgctgccggtcccttg

SEQ ID NO: 117770 - DNA, 30 bp, Homo sapiens; identical to SEQ ID NO: 46276
  chr9:88556670-88556700
  hyper

SEQ ID NO: 117771 - DNA, 225 bp, Homo sapiens; identical to SEQ ID NO: 46277
  chr9:88713661-88713886
  hyper

SEQ ID NO: 117772 - DNA, 268 bp, Homo sapiens
  chr9:88714739-88715007
  hyper
cgcggagcggggaagcggctgtggggaaagggtacctggggggagcccccatcccacgttccgccccgagggaatgttcccgaacagccaaccgcacccagcgccacactcacgttaccttctttataaaagtcgtcgggtcaaaactgcccagagaaggaagcgaacgaaaaacaggtttttagggggcttatactcacaaaattgtcttttttctcccacgaggcattccctgttgaccatcatctcgcctcggttgtcaccgctc

SEQ ID NO: 117773 - DNA, 30 bp, Homo sapiens
  chr9:89252549-89252579
  hyper
gggaccacaaggtggcgctcttgcccgtgg

SEQ ID NO: 117774 - DNA, 98 bp, Homo sapiens; identical to SEQ ID NO: 46279
  chr9:89517556-89517654
  hyper

SEQ ID NO: 117775 - DNA, 226 bp, Homo sapiens; identical to SEQ ID NO: 46280
  chr9:89517860-89518086
  hyper

SEQ ID NO: 117776 - DNA, 234 bp, Homo sapiens
  chr9:89560474-89560708
  hyper
ggaagtgcccagagtcgtggccggggaaccggctacaccaagttgacttggaaaaagttttgggaagtatccccaaccatcccttctatctgtcccaagccacaggtgcccggcgcggggtcgaggcgagcacgggagtgggacgcgggctctcccgcagccaacggcggggggcgcgagggctaaaagagcggcccaagcagcagcagcaagatggaggcgagtggggtccag

SEQ ID NO: 117777 - DNA, 1823 bp, Homo sapiens
  chr9:89560739-89562562
  hyper
cgctgctcctgcgcccaggcccatagggcaggtccccgcggccgcccgatgcagcagcgccgctgcccgggcgcggtgggtgcgggacgccgtcgtcgtcgtccagcggctgctcaccacccgcgcccccggtgcgctgctcgtcatcgtagtcctcatcgtagtagtcgtccaggcccccgtccgagccgctgctgccggggccgttgcccagctcggcgccgaagcacaggcgggccatgttctccttgaccgactcgcagatgggccgctcgaggccgtcgcacacgcagtcgttgagcagcgccgccttgggcatagccagcatgtcctcaatgacggtgcggcattcgtccgtgcagcgcagcccgttgaagactttgccgcagtaggtcaggtagcggctcagcgccaggttgcagcggctgtcgcggtcgcagcgccgccgggcctcggtgcagcccatgaccccgcccgcgccggggccgcccgcgccgccgccgctcgtccggggcaggcacggctcaatggcgcgcttggtggacttgcagttctcgtcctgcgcgcagtcacagtcctccagggcgggcccgcggcgcgtgtggttgagctgaatgagggccgagatgcagtgactcgggcagcgccagcgcgacgagaaagaggcggccgaggccgggaaagcggcggcggcggccccgggcgcgtcgcccccgccgtgctgcgccagcaccggcgcgcacgcctcggcgtactggttgtaggcgtagctgcactccggctccccctggcactgcagcagcgcctgccagcagatgaggcggcggccgtgcgccagccccgatccccgcggcgccgagcccagcagctgcagcagcgccatcaggcacagccaggcgcccggcactgtccccccgcgggcctcgccgccgccgcccagcagcgcggccaccatcgcgggcagcggcggccgccgggagaggaggggaaaggagacgaggcgcggggagcggcggacgcggagccggtggaaaagtttgtccaagtcctgcccacttcttgcatgagtgtcttcataaatccatgcgcgccgctggctgatgccccgctggtggcagaaggtcccctttcgctctggctgcggtggcttcctggaaatgaacagctgtcgagatctggtcccgctctcccacccgagagccctccgctcggcccccggtggtggcgggagaggctcactgtcgccccgggggggtgcgggccgcggggccgtggcggggctgcaggaccgcgcggcgcggcgggtgcattttgctccgcgcctgcagatccgttgtgcggccggctgtccccgtgccggctgctcgcgctgcggccgcggcggctccttcctcctgggctcagtgcctcgccgccgccaccgccgccgcggtctctcgcatcgcgccgcttcctggcccggcgtccgcgcgctgcccgccttcccgcggcccggccgccccgcgtcccctccccctccgcccgcggcaaccccggcctccgcagagctccggggagctctttccgggaagcgcggggagaacaagaaagtcggcgctgccggagagcggctccctggcttcactcggcggcagcttctcgggtgaccaagagcccggggagcggatccgctgagcccggctgcagactcgttagcagcgaggctttaaatacaaaagtgggccgggagcccccgcgtggtgccgcggtgccccctcattatgcatgcatggaaaagcaaacaaacaaaaacattagcaacgctcctccggctcgccgagccc

SEQ ID NO: 117778 - DNA, 30 bp, Homo sapiens
  chr9:89563588-89563618
  hyper
tttcctcccctttccgtggagagactatca

SEQ ID NO: 117779 - DNA, 92 bp, Homo sapiens; identical to SEQ ID NO: 46283
  chr9:89763355-89763447
  hyper

SEQ ID NO: 117780 - DNA, 177 bp, Homo sapiens
  chr9:90112253-90112430
  hyper
ctgtttcgtggtaaacgtaggactgatcctccaaaattaccttattaattagcttacatatttattatctatctgtcccaccagaatgcaggtttccggaaggcagggatttaaaaaaatctgttttgttctatgtgattttcccataccaagcaccgtgcccggcacaagctggga

SEQ ID NO: 117781 - DNA, 1254 bp, Homo sapiens; identical to SEQ ID NO: 6863
  chr9:90112493-90113747
  hyper

SEQ ID NO: 117782 - DNA, 30 bp, Homo sapiens; identical to SEQ ID NO: 6864
  chr9:90202143-90202173
  hyper

SEQ ID NO: 117783 - DNA, 30 bp, Homo sapiens; identical to SEQ ID NO: 6865
  chr9:90282276-90282306
  hyper

SEQ ID NO: 117784 - DNA, 934 bp, Homo sapiens
  chr9:90340628-90341562
  hyper
agtacacttgactctcggctctgcggaccaaaaattccaggactaaggaatagcaaggttaggctgaaacagtccacacagggcttgcggtaaacgtcttttcaggagccactcgcccagtgcagtaagtcgtgtacttagttgactcgagcgctccagggagacgcccgaccctactctgcgccgccccggggcaccagctctgcttcctccaggtccactgaggcaggcacgcccagctctgggacagtcagtaaacaagccacgaaccgcgccagggatcagagcacccagagtccccgcccagctgccggcacagccaatcgcagcgcagccaggcggcggggcggtgccggccgaacccagacccgaggttttagaagcagagtcaggcgaagctgggccagaaccgcgacctccgcaaccttgagcggcatccgtggagtgcgcctgcgcagctacgaccgcagcaggaaagcgccgccggccaggcccagctgtggccggacagggactggaagagaggacgcggtcgagtaggtgtgcaccagccctggcaacgagagcgtctaccccgaactctgctggccttgaggtggggaagccggggagggcagttgaggaccccgcggaggcgcgtgactggttgagcgggcaggccagcctccgagccgggtggacacaggtaccgcagccaggccgcgccgcgccgactcagggcctggcccggccagacagggaagctcagtccccgcacgccagacagcggtactcctgctggcgtcaccgcaaacatcctctgaccgctacagccagtgtgtggcgcaggcgtcatgtccccggccctgccacgcctggagccctggaagctggctgcagggcgctggcttcccgcgtgcggccatatgaccccgtccctgatttaggggagcag

SEQ ID NO: 117785 - DNA, 594 bp, Homo sapiens
  chr9:90589226-90589820
  hyper
ttagccggagggtggcgggggcacacccccgccaggctgccggccgcggtccagcctcacctccacgtgcttggccttgaagacgatgccgtgggcgccctccccgatgcggcccaggatgcagtactggtccatcccgctgcagtcgtgggcctgtgcccctgtgcccctgaacttccaaactccacttctcctccaccccacgctgatctgagctcgcacgctgttgcctagcaacagcgcggcagctgaccactggggcggttcctgtaggcgacgtcaccaggagaacggaagctgcgtcgagtcaggggtgacagctccgggccccactgcgccttttcctagccctccgctgtcacgcagcagcaagcttaatcccgcataaaaaacgcatgcgccgagagcgtgcccgcagcagggcccacggaacgatgacagcaggcacctcctatctgcccccgcccccggcgtcacgtgactagctgcgctggtgcacgcagccgggaggggcgggctccttcccctggcaagccggaagctccgcacctgtaagtagaggttcaggcttcgaccacgcgcaggtgctgtttt

SEQ ID NO: 117786 - DNA, 861 bp, Homo sapiens
  chr9:90691111-90691972
  hyper
aagcagacgtctgctcggtgtggccgtatttttgtgagcggagctgcttttgtgagcgctgcgtccctgcagcatctctgcactgacgcgtggagtcgccgagaagctgcctggcggctccagcagcctccacgcctagagggctgcgcgtccgggatcgcagcgccttagcgtctccttcccgcctccctccgccctcccgccagcgagcgcgtggcgccccggaggtgcagggttgaccagggtgcacccctctactcctaagccaacctaggcagggcccttccagtttctgccgcagcatttccagcccctcgagcccctgcagctcctgagggtagctcagcagccagcccagcgcaccctcttccggggctagcgcgcactccctcggctctgcttgcggtccctcggtgtccttctgcccctggcagaagctctcacaccaccctcccttcatttcccctgccgggcggggctcgctattcagctccctgtgctcagtctgacccctcagcctgctgtacccgcaggctctgcggaatgagcccgggccccagcccttgccctcccgcccgccaccacgtccctcctcccgcctggagcttccagggccctgccgcgggcccctgcatctcccgccaggccgtctctctctgcctccgtctcctgcagcccagctccgcctcattctccattcctcgcccagaaacctgtacattctgtccgcggtcgccgcctgcggttcctccacgtcacgcaggcagacgccaggctccgccagctcacagaactgctcttgccgaaccccgaaggcctccacctggttgaccttggcagccagcccggccttccttggca

SEQ ID NO: 117787 - DNA, 309 bp, Homo sapiens; identical to SEQ ID NO: 46291
  chr9:91002683-91002992
  hyper

SEQ ID NO: 117788 - DNA, 407 bp, Homo sapiens
  chr9:91149013-91149420
  hyper
aatgccctggggagacggctgcgggacacctgcggcggggcccggcagggagcgcgagactggaagagaggccaggagggaaggagagcgacgcggggttttgggggaggggctgcgtggggcgctgaaggggagcgcgaggagtgggaggaagtgaaggaggaggaagagcacggtgtgggggaagcgcaggaggcaataggtggggcgggacggagggcagggcgctgcgtcgggagaaagtgtagaagcgctggggagagtgcccacgacgggagagcccaggggcgcgagggcgcgggagtgtgggcggggcgcagtggggatgggggcgggggcgcgggatgtggtagggggcgtagtggggagagagtgcaggagtgtgggcagggcgcagtgtggggagg

SEQ ID NO: 117789 - DNA, 1002 bp, Homo sapiens
  chr9:91149637-91150639
  hyper
ggaatgtgggcgaggcgcagttggagaagagtgcggggatgtgggcggggcgcagtgaggggaaactgtggaatgtgggcgaggcgcagttggaggagagtgcggggatgtgggcggggtgcggtgggggagggtgcggagatgtgggcggggcgcagtgggtggagagtgtagggatgtgggcccagcgcagtgggggacagtgtggggatgcgggcgaggcgcagtgggggcgggggcggggatgtgggcggggcgcagtgggtggagagtgcgggatgtgggcggggcgcagtgggtggagagtgcggaatgtgggcggggcgcagttggggagcttgcggggaatgtgggcggggcgcagtggtgggagggcgcaggagtgtgggcggggcgcagttgggggagggtgcagagacctgagggcttgaggttgcctggctggccccgctcccagaggcgggtgccgcgctgtcgcccaggtatctggggtctctggtgtctgagtgtctcattgtcggcgcgaacacaattgctccagccacaggcgaggcctggccaaggtgtgggcgcatctggggcaggtcttgagaggtccagcgcccggtggtgcggacagaggcggggcaccgcggcgctcgccgccgcctccccgcaggtgatcatcctcctgcaggtgtcctcgggtctcaggtggctgcgtgtctgcgccatggttgacattctgggcgagcggcacctggtgacctgtaagggcgcgacggtggaggccgaggcggcgctgcagaacaaggtggtggcactgtacttcgcggcggcccggtgcgcgccgagccgcgacttcacgccgctgctctgcgacttctatacggcgctggtggccgaggcgcggcggcccgcgcccttcgaagtggtcttcgtgtcagccgacggcagctcccaggagatgctggacttcatgcgcgagctgcatggcgcctggctggcgctgcccttccacga

SEQ ID NO: 117790 - DNA, 1324 bp, Homo sapiens
  chr9:91792412-91793736
  hyper
aggagctgggaattcttgctgcggggggcaacaagatacccaccctcccgccggggaagacacagcaggagtagggccgccactccgtgcatctctcctcccgggggctgcccagctctccccagcgcgtttcctagatactaggcaggccggacccccgctgcccagggttgggcgcccatgacactggtcagacatctggtaagccaggtggcaaaggcgtgccaaaaaagtggagcctagggaaaaccgggacggagcgggccacccgagtggtaaaccttttcccaatggatgcgggaaaagcgcatttgtagttccctcctcaccgctgtcaagcgagctgattgctaaggagtgcgcatttgcttgcctctaacgtgacagtcgcgggagcgccccgcaccccgggcttcagggaatgaaggagtctgccccgaactggccccagaacccccagcccccagggcggcccgcgcccgcacccaccttgaccacgtaggtgactccgggccccagcacctggtcgctggcgtgcggcgccccccgagggggcctgggcagcggctcgtcgccgggccggcccttcctggcggcgctcatggccggggcgcggggcgccgagggcgcactgccgtccggggcggccaggctgggcgcgctgcagctgcccgagagccgcgcgcccgcccgctcccgggcggccgacgacaggccgcggaggcccgagctggagagtttcaggtgggacaccttgtggagcaggtggcccaggctgccgggcccatcgtcgggcgccttgcgcagcgcctcgccggacaccaagtagggagccgccgccggggtcgcgcgcgccgccgaaaccttgcctccgccgccgctcaccgacaggctgtggagaaggtcatcgaccgatgtcaccgagtcattcctgaagcggttatacttggtgcgtggaagcatgcccctccgtgggctcgctgcatccgcccgggcgctgctggtgccggccccggcgcgggctgccgcgcatagcaggcgagccactgtccccggagcgggacggagagtgggggccccgggacagccttctggagaacgagagcagagcaagaggatggtgccctcccaccgttaaaagccagcacagcggcggccgcgcagccccggcccgggagaccgctgcttggggttgcacgtttgctttgcaaaagtcatagttgcctctgatggagcgcccagctgcttggggctgctcacagcaaaagcatgactcactctgagaggagacccttctcaacaaaggctcggtgagcactgcaaa

SEQ ID NO: 117791 - DNA, 30 bp, Homo sapiens
  chr9:91794889-91794919
  hyper
gaacatgtggggcacgtgaggtcctgagtc

SEQ ID NO: 117792 - DNA, 222 bp, Homo sapiens
  chr9:91849547-91849769
  hyper
tatggaaacggagcccgatctgcatagggttaatctgccgagtagtgactacttctgtcaaattctccccaagggtaaaccctgcgggctgaggaggcagcggcggaggctgggcgcacgtgggtgctgcagtagccggcggacgcccagggcgcacgggggcgcaccgagagacctcaccgaacccaaagagcgtgcggttcgtctcgcccaaaaccacag

SEQ ID NO: 117793 - DNA, 30 bp, Homo sapiens; identical to SEQ ID NO: 6873
  chr9:91926234-91926264
  hyper

SEQ ID NO: 117794 - DNA, 30 bp, Homo sapiens
  chr9:91933891-91933921
  hyper
cattctccgctctacgtactcagcattacc

SEQ ID NO: 117795 - DNA, 31 bp, Homo sapiens; identical to SEQ ID NO: 6874
  chr9:92112685-92112716
  hyper

SEQ ID NO: 117796 - DNA, 30 bp, Homo sapiens
  chr9:92219980-92220010
  hyper
ccgcgtcccctccgcgctctccgcttgtgg

SEQ ID NO: 117797 - DNA, 184 bp, Homo sapiens
  chr9:92220602-92220786
  hyper
ctgtgtgctggctgcgggtgaggaggacgagggcgacatcgcgctgcagatccattttacgctgatccaggctttctgctgcgagaacgacatcgacatagtgcgcgtgggcgatgtgcagcggctggcggctatcgtgggcgccggcgaggaggcgggtgcgccgggcgacctgcactgcatc

SEQ ID NO: 117798 - DNA, 31 bp, Homo sapiens; identical to SEQ ID NO: 6875
  chr9:92762428-92762459
  hyper

SEQ ID NO: 117799 - DNA, 31 bp, Homo sapiens; identical to SEQ ID NO: 6876
  chr9:92859700-92859731
  hyper

SEQ ID NO: 117800 - DNA, 187 bp, Homo sapiens
  chr9:93404962-93405149
  hyper
aatcatgccaaagccgcccgtgccccaatgcggacgcagcgaagccacggcagaagggggaaatcggttacctggggaagaacacaactccgctcagagcttcttcagagctccactcgcgcaggacagggcagcgcagggtgtgtggatgcggctcctcccggaggcaggcgcagcgcactccctc

SEQ ID NO: 117801 - DNA, 32 bp, Homo sapiens; identical to SEQ ID NO: 46304
  chr9:93563761-93563793
  hyper

SEQ ID NO: 117802 - DNA, 337 bp, Homo sapiens
  chr9:93564134-93564471
  hyper
gtggccccgcgctgcgcccgccctcgcctcacctggcgcaggtaggtgtggccgcgtcccctacccggccgggactttctggtaaggagaggaggttacggggaacgacgcgctgctttcatgccctttcttgttctaccttcatcggccgaggtaaaagtgctgaaaccatgtgaataaaatacaggtgggttccgccagcttcgctcctgaacctacccgcgctcgggatccagaagctgcgccgggagagaggggctcaggcctgggcggaggggacggaggtcagaccgtgcggaaagtgacccgggcaccccagggcgcccaggcccccagg

SEQ ID NO: 117803 - DNA, 1194 bp, Homo sapiens; identical to SEQ ID NO: 46306
  chr9:93955382-93956576
  hyper

SEQ ID NO: 117804 - DNA, 516 bp, Homo sapiens; identical to SEQ ID NO: 46307
  chr9:94183473-94183989
  hyper

SEQ ID NO: 117805 - DNA, 30 bp, Homo sapiens
  chr9:94185683-94185713
  hyper
tgccggcgcgaaggcgctgcaatcaaagca

SEQ ID NO: 117806 - DNA, 30 bp, Homo sapiens; identical to SEQ ID NO: 46308
  chr9:94186541-94186571
  hyper

SEQ ID NO: 117807 - DNA, 486 bp, Homo sapiens
  chr9:94186867-94187353
  hyper
gagggaaagctccacgcacaaacaccgccccctgcacaattagggcgaagatgacggctgcaaagttgttgcgtaacacgactgggaaacgaggctcgctgaggtccatctacccacccccgccacgcgggtgcggcgttcctcggaggatgtgaaggtccgcgctcgggtgcccccgctgggacgcccactgtcgtttggtgctggggcttgagacgaccgcgcgggatctcttcctgtgattttgagctgatagctgcttagtgttatttctgcgtctaactggatacggtagtcttctctcccaaattcccgggctacggaagagacgtaaaaaaatggaaaaaagagcacctagccgcgacttcttaagtcgtcgcgctagactgtcaaggcacgtggcacactccctgcgtttaccgatacacggatagtggtcagtgctggccttggcgaagggagccatgttcccgacagtgactcaca

SEQ ID NO: 117808 - DNA, 39 bp, Homo sapiens; identical to SEQ ID NO: 6880
  chr9:94662836-94662875
  hyper

SEQ ID NO: 117809 - DNA, 880 bp, Homo sapiens; identical to SEQ ID NO: 46310
  chr9:94711199-94712079
  hyper

SEQ ID NO: 117810 - DNA, 501 bp, Homo sapiens
  chr9:94712294-94712795
  hyper
cggggtcgggcgccaccacccctttctacgatgcgtccgctcctccttctccctggcgcttcgcaaacgggtccacttcgaggacctcgtcgtcgtcctcttctccggcccggatgcgccgctcggctccggccacggcaagggctggctggggaggttccttggcgcgggctggggcgtcccgccggccgccaggacgagcgcggggggcggaccgcgggcgagcgcgcaggaggcagggtccccgctcgcccgccccgatgggcagagcgaggcttgcgccggcgccccctgccgggggaacgcgcgggcggcgggcgggacccaaggagctggggctgcagctggggccccggacctgcctcctgcgcccgccctcgggcctgcgcctcggaacgcttgaacacaaaggtggcgccttgggggcgtcagccggagttcggcgggtctgcccacgcaggagaggcgcccagagcgggtgcccccgactttcgggggcga

SEQ ID NO: 117811 - DNA, 30 bp, Homo sapiens
  chr9:94877419-94877449
  hyper
tccctacactcaaccgctgggactagaagc

SEQ ID NO: 117812 - DNA, 30 bp, Homo sapiens
  chr9:94877887-94877917
  hyper
aaagtagtaatgaacgggccttacacttgg

SEQ ID NO: 117813 - DNA, 30 bp, Homo sapiens; identical to SEQ ID NO: 46312
  chr9:94902738-94902768
  hyper

SEQ ID NO: 117814 - DNA, 131 bp, Homo sapiens
  chr9:95056115-95056246
  hyper
tggctcggatggtgcgacagtggtgcttgctggttttgcgcctccacgtggaaaacgaaccagcgctgagggcggcgctgtgcgtgctgcttgtatccgttgcagtagtgtagaccgaggtctcactcggg

SEQ ID NO: 117815 - DNA, 30 bp, Homo sapiens
  chr9:95087319-95087349
  hyper
agtatctctcatttcgtttagcacccggca

SEQ ID NO: 117816 - DNA, 30 bp, Homo sapiens
  chr9:95087575-95087605
  hyper
cccactcctcaccacgtcgttcacctaaag

SEQ ID NO: 117817 - DNA, 30 bp, Homo sapiens; identical to SEQ ID NO: 46313
  chr9:95088008-95088038
  hyper

SEQ ID NO: 117818 - DNA, 137 bp, Homo sapiens
  chr9:95088345-95088482
  hyper
tgaggacccaccggcgccctgggaagagaagtcccgagtccagtacgtgaccaccccaagtcccccagggcccgctggccagggttcccgggccaggcgggtgaatctccacagacatcctcggtctcctactccca

SEQ ID NO: 117819 - DNA, 30 bp, Homo sapiens
  chr9:95432161-95432191
  hyper
ggacctgcgccgcacgtccaccgctcacct

SEQ ID NO: 117820 - DNA, 30 bp, Homo sapiens; identical to SEQ ID NO: 46314
  chr9:95432445-95432475
  hyper

SEQ ID NO: 117821 - DNA, 1002 bp, Homo sapiens
  chr9:95569779-95570781
  hyper
ctggggagaaccgcccgtccgatgagctcggctgagcgtgcacgcagtgccgaaatcaaggacgcctggatgcttttcgttgcagagtgacaaaggttcaacaacaggaagaggatcaggggccaagacaagaagctgaagttcggcctgccaggaaccccgggccccagcatcccacccaaggcgctgctgcaggagttccagctgctgctgaaaggtgcggtgccgcagggccagagtgcgggatcctgagccctgcatgccagtccttgcgggggccgatcgctgtgagccttactcaggtccagccgcctccagggaggacaatgtagacgaggtgcggggcgtgagggcggtgctggccgcacccctggtcctgaggccacgggagccgcgcgaggaggccgccttccactgacgcctgcaccgggaccggttgctgcagcggtgccagctgcaggagctccgcgtctgctgcttctccgacgccagggcgccgccaggatgacaggtgcaggagactgtggctgtgggcagatgtggtttccagccccaggtccccgcggcccctggcttcccagcgcgctgtcctgtgagcaagaagatgaaaaaagccacccgatcaacaggtcagctgccccgcctggcagcccagccagacaaggcaaccgaagttcatcctctctgagttgacttcgtgcgggcagcgggccggcgcccaggatgctggggagccctgcgcgccggaggccgacaagccgtggggctcagaggcgcctcagggcgagaaggcacccgtctcccagcgctttcaccccctggcctgcccggcccgcgtggtgtcccagtggctgcggccacgccaggcattctgccccgcggcggctgcacagggacgagaactgagaacccctgctcaaccccatccggggtgactgccaaatgcctatgccagcggccccgatctccctccggtggaggagtggggggagacacggcctg

SEQ ID NO: 117822 - DNA, 788 bp, Homo sapiens; identical to SEQ ID NO: 6884
  chr9:95570893-95571681
  hyper

SEQ ID NO: 117823 - DNA, 339 bp, Homo sapiens; identical to SEQ ID NO: 46318
  chr9:95571740-95572079
  hyper

SEQ ID NO: 117824 - DNA, 236 bp, Homo sapiens; identical to SEQ ID NO: 46319
  chr9:95572086-95572322
  hyper

SEQ ID NO: 117825 - DNA, 143 bp, Homo sapiens
  chr9:95709627-95709770
  hyper
gtgcacccgagccggcgcccctagccctcccactggctctccgcaggcggctttgtcagggctcagcgtccctgcagctgccgggagaggaggagacagggcggctgcctgtgggtgccgcggaccttcggggcgggccaggg

SEQ ID NO: 117826 - DNA, 238 bp, Homo sapiens; identical to SEQ ID NO: 46320
  chr9:95820723-95820961
  hyper

SEQ ID NO: 117827 - DNA, 319 bp, Homo sapiens; identical to SEQ ID NO: 46321
  chr9:95821006-95821325
  hyper

SEQ ID NO: 117828 - DNA, 30 bp, Homo sapiens; identical to SEQ ID NO: 6887
  chr9:95857689-95857719
  hyper

SEQ ID NO: 117829 - DNA, 30 bp, Homo sapiens; identical to SEQ ID NO: 6888
  chr9:95897000-95897030
  hyper

SEQ ID NO: 117830 - DNA, 1453 bp, Homo sapiens
  chr9:95946018-95947471
  hyper
agggcaggaaaggacacgctgagccccaccaggcttagccccaggctgggctcccgagggcggcggtacccctggtccttttcttcctagcctgcccattctgtcctggcacagggccttgaggtctagcgcgccgggctgcggcgtgctgaggcgttgagcctgctgcctcctctcaggaagaaacggggtcctccgcagctgacagccctgcggggcgttccaaagaacttcagaggacaggagcgctacctcgagcaaagaaccgcgggtgggagcccaggtagccggcccgcaggtggccgcgcgcgcctgccagtcagccagcccgtccgcagccaggtgggcgtgccaggcccagccccctgcgccggtccggggcggggcgaacggagccccgccctccccgcgcgccgggtcggagccggtgcgggagcggagccgcgcgaagccggcaggagcacgcgggagcgcggccccgcagtggcccggcccgagagagcagcgcgcaggagctggagcggcgccacggcccccaccccagcgcggacctcgcccggaactcggaccccgtcctcgaagcgtgatctctcccgcctcgcacgccctggccgccgggccgcgggcatggacggcgtccgctcgccctgtgagtgccgagcctcccctcaacgccgctcgccgcctttgtgtgcgcgccgcggcgctgcagccccctccccgcgcgcccctcccgcgccccgggcccgcgtcctttgtggagccgccgccgggccactgccttcctcccacccccgggcttccctatcccctttacagctgcctccgggacagcctagcagaaccctcctgggccagggctgggcagggcgcgagatccctctgccggcctccggggccctcagggacaccctagcaggtcctctctcccagggttccagggacaccacaggcccgtccctctccgcagcctggggctgagcagggcacggacccctcctccccaacccaagcctctggtcccgtctgcagcccccctttcccagggcccccagagacggcccccgcaggctctctccgcggccggggctgggcaggttgcgggcttagggcggcgttgtctcatccggcggcctgggcaggtgcggcagggccggcgctcacgcgggcctgtgtgtccttggcccacagagatggacggcgatggcggccgccgagacgtccccggcacgctgatggagcccgggcgcggcgcggggcccgcgggcatggcggagcctcgggcgaaggcggcgcggccggggccccagcgctttctgcggcgcagcgtggtagagtcggaccaggaggagccgccgggcttggaggcagccgaggcgccgggcccgcagcccccgcagcccctgcagcgccgggtgcttctgctctgcaagacgcgccgcctcatcgcgga

SEQ ID NO: 117831 - DNA, 89 bp, Homo sapiens
  chr9:95947484-95947573
  hyper
cgccccgccgcccccgcgcccgcagcgctggtagcgcagccgggagcccccggagcccccgcggacgccggccccgagcccgtgggcac

SEQ ID NO: 117832 - DNA, 30 bp, Homo sapiens
  chr9:96213174-96213204
  hyper
cagtctagccattgcgcagtggtaacgcag

SEQ ID NO: 117833 - DNA, 30 bp, Homo sapiens
  chr9:96213489-96213519
  hyper
cgagccgacggcggcgttagaaaggcggcg

SEQ ID NO: 117834 - DNA, 30 bp, Homo sapiens; identical to SEQ ID NO: 6890
  chr9:96214528-96214558
  hyper

SEQ ID NO: 117835 - DNA, 30 bp, Homo sapiens
  chr9:96214919-96214949
  hyper
ctgggagagagccccggaccagaattcgga

SEQ ID NO: 117836 - DNA, 245 bp, Homo sapiens
  chr9:96215822-96216067
  hyper
ttgcccccactgcccgcgaggagatggtggtagttaagcctaaaatgatagcggaagtcccacccacgatccggttgcaattggtgagatggtgtttaagtcgtgggtggaggcggccggcagagtcccgattggcccctgcgcctggcagacacacagctgccattcctcagggaagttcgggtgagaggaagtgcctgccttttaatttctgaatcggagcctggggcgctcagggaagtaag

SEQ ID NO: 117837 - DNA, 30 bp, Homo sapiens
  chr9:96339723-96339753
  hyper
tccgccgtggccggcgagctcccttggacc

SEQ ID NO: 117838 - DNA, 1 bp, Homo sapiens
  chr9:96588738-96588739
  hyper
g

SEQ ID NO: 117839 - DNA, 45 bp, Homo sapiens; identical to SEQ ID NO: 6892
  chr9:96588857-96588902
  hyper

SEQ ID NO: 117840 - DNA, 30 bp, Homo sapiens
  chr9:96707716-96707746
  hyper
gaggaacagcatgtgcgagtgccctgggga

SEQ ID NO: 117841 - DNA, 30 bp, Homo sapiens; identical to SEQ ID NO: 46329
  chr9:96708209-96708239
  hyper

SEQ ID NO: 117842 - DNA, 158 bp, Homo sapiens; identical to SEQ ID NO: 6893
  chr9:96710135-96710293
  hyper

SEQ ID NO: 117843 - DNA, 650 bp, Homo sapiens
  chr9:96710796-96711446
  hyper
gggggagggatggggcgcccccgctcgcgactacgcctgcgactgtcctcgcgctgcgggggctgtgcgtggagcccgcggtaagctggaatatccaagccagctgcaagtggccttccgttccccacacgcctcctgcgtgctgggcccagctgggcgccgcccaaatcttctctctcccgagactctccagctccccttctactgaccaggagaacgtcttgctccggccaggatcacaccagtggagaagcgaccccctcccccatcccgggccggggcccttctgacaagcctccccaaggactccctcattccccaggccaccttgaacaaagcacactgagcgcaaacttcgcgcctctgggggaacgctgcggccaggctaatcccagccctctctcctcccccagcccttcgcgtccccagggtccaggcggtcgcaggcgctccccactcccgcagggccacagctctcgcgagactcctgagccctctccctcccctggctgcggcccccgggctccgggaagctcagccacctgggcccacgccatatctgggtttttttcccaggactttggggatgagaagagacttgtgcatagagcggaagaggaatgggatccaagggacctttccttcaagtc

SEQ ID NO: 117844 - DNA, 471 bp, Homo sapiens
  chr9:96711534-96712005
  hyper
cgggcgccaggtagctccggtcgggcacgcgcagtccgacagactgtgtcaccttggaagacaggatgcggccctttacctagagtggcagctttgtgggctaggtcagcacggggtctccgggccggcgggcaatcgtctgcctctgcgccttagctccctggagcgggcctggagcttccgttgggtctcaagggttccaccaagcaaggaagccctgagctgcccaaacacaatggcgtgcagccctctcctcttccccagtctcggggactcggtctgcctctgcgttccctgtcccggcaaggagcacagaggtgaaggcagtgacaacaactccacccctcccgcactgcagggcctggaatctggtctccctcatttgaggcccaacttccccactgacccacaggtgacccccggaccggagttcccgcatcaagttcccctctgtgccgggaggtggctgtt

SEQ ID NO: 117845 - DNA, 89 bp, Homo sapiens
  chr9:96712698-96712787
  hyper
cctctcctctccccacgccgccctccccccgccacccccccgcccacccctcattccttccgccttgaggtaccggcaggggaagtgca

SEQ ID NO: 117846 - DNA, 728 bp, Homo sapiens; identical to SEQ ID NO: 46335
  chr9:96713305-96714033
  hyper

SEQ ID NO: 117847 - DNA, 893 bp, Homo sapiens; identical to SEQ ID NO: 46336
  chr9:96714479-96715372
  hyper

SEQ ID NO: 117848 - DNA, 21 bp, Homo sapiens
  chr9:96715687-96715708
  hyper
gtgttctgtcctggagttccc

SEQ ID NO: 117849 - DNA, 86 bp, Homo sapiens
  chr9:96716244-96716330
  hyper
gaagggctggggtcccggctacagcgtaggagcctcccttccccgacaggcctgtcactgaggtgcgagtcctagcctggctggag

SEQ ID NO: 117850 - DNA, 15 bp, Homo sapiens
  chr9:96716426-96716441
  hyper
cgagggaggccgacc

SEQ ID NO: 117851 - DNA, 107 bp, Homo sapiens
  chr9:96716716-96716823
  hyper
ccggggactccgggccggcttgggcccgcgtcagcacccagccctcgggagcgcaggcctcctccccagaggtccgacttccctgggttgggcagccgcggccactc

SEQ ID NO: 117852 - DNA, 523 bp, Homo sapiens; identical to SEQ ID NO: 6902
  chr9:96716904-96717427
  hyper

SEQ ID NO: 117853 - DNA, 357 bp, Homo sapiens; identical to SEQ ID NO: 46339
  chr9:96717449-96717806
  hyper

SEQ ID NO: 117854 - DNA, 441 bp, Homo sapiens
  chr9:96717840-96718281
  hyper
cgcacgccctggaaggagagagccggagagttcgggaggcaagacccccagagacgagagtcggagggatcaaacgacacaggtgagagaaggggcagaggcagacggcgtgggccaaacaagattccagacagtgatgtgagggcaccagagacgccaccgagatgtgcgcagagagaccaaaagaggcgtgagagccagcgggctgtgacgtgacggagggcacagaggcaggcggggcagaggaagggggcggtaaagaaatgggaacagctagaaaaccggcggcttgatcggcttttaggtagccccggaaaggtcgggaggaggaggggcaaaggccgcgctcctcagctgggaaggaggtggtctcaagcagcctccagtcccgggctcaacaccgccaacccggcaagggtgaggcagcgttcagggatgcaa

SEQ ID NO: 117855 - DNA, 249 bp, Homo sapiens
  chr9:96720636-96720885
  hyper
attacacaaaaacggcggcggcggcggggcctcctctgctcaggcactgccgcgttggcggccgaaaaaagagggtcccagagaaggggaaccccctccctgtcgaggacaccgaggcccagagaggggaagcctcctccccagtggggtgcagtctgggattgcagtccccaccccaggggcgcagctgccagcccaacgcctgggacacaccccctcccgaggcctctagccgccgccgcgaaaatc

SEQ ID NO: 117856 - DNA, 365 bp, Homo sapiens; identical to SEQ ID NO: 6907
  chr9:96721102-96721467
  hyper

SEQ ID NO: 117857 - DNA, 209 bp, Homo sapiens; identical to SEQ ID NO: 6908
  chr9:96721688-96721897
  hyper

SEQ ID NO: 117858 - DNA, 44 bp, Homo sapiens; identical to SEQ ID NO: 6909
  chr9:96722503-96722547
  hyper

SEQ ID NO: 117859 - DNA, 297 bp, Homo sapiens; identical to SEQ ID NO: 6910
  chr9:96722862-96723159
  hyper

SEQ ID NO: 117860 - DNA, 39 bp, Homo sapiens; identical to SEQ ID NO: 6911
  chr9:96723170-96723209
  hyper

SEQ ID NO: 117861 - DNA, 256 bp, Homo sapiens
  chr9:96929091-96929347
  hyper
ctggttgtaggcgccgccaggtgcctctgacgtcacttccgctatcaagtttgtgggccggggagaccttggccttgggggttgggatgaaggagggaaggtaggaagtgcgaggggcggggggacagggcgggaaggcgcgggcggggagggcgggagagtcgtggctggctgcatgcccctgctccccgcggccaagtgcagcctcccttcctgaagcagctgctgcggctggaggtccgctgcggcagccgtc

SEQ ID NO: 117862 - DNA, 30 bp, Homo sapiens
  chr9:97136792-97136822
  hyper
gtggggaggcggggcggggcacagtctctt

SEQ ID NO: 117863 - DNA, 29 bp, Homo sapiens
  chr9:97287278-97287307
  hyper
caggcgtgagccaccgtgccctgccaatc

SEQ ID NO: 117864 - DNA, 286 bp, Homo sapiens
  chr9:97401983-97402269
  hyper
cccctagtcttcctgggctgtcgccccccacacacacccctccgtgccctccacccgcactgtggagcgggactcgggccatcggactctgccagagagaaagctatgactgtttcctccaaaatcataaaacggaagttcagaaaggttaagtaacttgctcaatgccaccagctaggcagcgaaacccgcagccagtccacatggcctggctttagctctgcagctcctgccccgtgtggctgcctgcccccgccccctgcccaagccccgtccactctgcctg

SEQ ID NO: 117865 - DNA, 444 bp, Homo sapiens
  chr9:97767418-97767862
  hyper
ctgtgtcctcttcccccgcagccgctgcagagggagcgtcgcgccggggcggagtgcgggcttgcgcggcaagtgcgcgccgaggtgagtgcgggcggcgcggtccctgcgccccggtggcgccggcgcgagaccgcggctggcgagaggccctggctctgcgctgcggcgcgcgggtgcggggactacccgccaggctccggctcgggcgcggggagcggccgtgacgaaggtcgcggcccctgcggtgaggcgcccggcgagttccgcgggcgggcgcgggtggcctcccgaggtgcggggaagaccaggtcgcgaggccgggggtctctgctttctcgcgctgggggatggccgtcaggaccctgtcgccttctttgaaatgctgtggtttttgaacctcaggtcacgaaatggattggagtgaaccggagaccccgaaaa

SEQ ID NO: 117866 - DNA, 30 bp, Homo sapiens
  chr9:97810602-97810632
  hyper
gccatttgaattgccggctgtgttggggct

SEQ ID NO: 117867 - DNA, 472 bp, Homo sapiens
  chr9:97810931-97811403
  hyper
acgcagggacgggagcggggctgctatgtccctcgggcgcgctttgggacgttgctgagtggctactgcttgtgctttcttgcttccaagctggcggtaaaccttttaaattcagagtgattcaagggcataggcgtcggaattgtgatttcgtgcgtgttttatttaccaggccttcaaatcaaaaaggccaggcaaacacacgttctggggctatcaagaaagttcacacgaaggacaaatccagcagggagaaagtgacataccttgcgggctcaggcttgggatttctgcagccacgcgcgcgttcacccgacgggacctcgcctgcactgccgccgggagaagcctgctctagactccggctccaggggagagggctgggctccacagagaggagcagcctgtgagttttcaaacatttctctgtcagagttagctcttacttgttaaattccgagatgagaatcta

SEQ ID NO: 117868 - DNA, 159 bp, Homo sapiens
  chr9:98111401-98111560
  hyper
acacacgctcgcagacgcacgcacggacaccccgctttccaccagcgcacgaagacgggacgcgcgctcacagccccagggctcggccctgcaccacgagctaacgcgcggtccccagggaggtggcgcagaaggcatggcgcctctgcccacggcgtc

SEQ ID NO: 117869 - DNA, 263 bp, Homo sapiens
  chr9:98111894-98112157
  hyper
cgctgggcgcagtggctcccggtcagggcgcagtcggcctgggcgctagagcccctctcagctcccggcctagggcggggaagcgccagctcccgcagcccctgtgaaaggtcccctgtgcctcctgcctaggtgcgcgctgtggcatctctggccagaagcacctttggcggcctgttgggcccctcgcagcctctggctgagactctgccgccggcgctaacgggctgcgcccgcgctcccgctctgtccccgcccgggtc

SEQ ID NO: 117870 - DNA, 30 bp, Homo sapiens
  chr9:98189067-98189097
  hyper
gcacccggcccggcccggccctgcctgcgc

SEQ ID NO: 117871 - DNA, 61 bp, Homo sapiens
  chr9:98189304-98189365
  hyper
ccggcacgaggcagccgcggggagaaggaatagagcgagcgagaggcgccggcccaagggg

SEQ ID NO: 117872 - DNA, 47 bp, Homo sapiens; identical to SEQ ID NO: 6916
  chr9:98268139-98268186
  hyper

SEQ ID NO: 117873 - DNA, 30 bp, Homo sapiens; identical to SEQ ID NO: 46356
  chr9:98268773-98268803
  hyper

SEQ ID NO: 117874 - DNA, 30 bp, Homo sapiens
  chr9:98270474-98270504
  hyper
cgcagtagctgggccggtgcagatagtccc

SEQ ID NO: 117875 - DNA, 1284 bp, Homo sapiens
  chr9:98272637-98273921
  hyper
actgtgcgcggatcgcgaggattcgtcccgacaccgcgtccagtgtcaccaaggcatcccggggattcgcttcccgcggagggggaaaacacgcgaccctttgaggtggattctggagccagacacgtctacacaactaggctttttatttaaaaaaatttttgttttcggaaagtggaatgtgtttttcttacgtttccaagttattacgttcctccctgcggtaggaacccgacccgcaaacccttgatttgcttcactttatttttttttttaaacggggttgaactgcagagggactggcagtagcgagaagtctagtgaagtcgtgaaatggggcggtgtggctttaagatgcgcacggtgtatgttcattgaaaaaaaaagaagaaagaaaggaaaggaaagaaagaaacccagatggagggaaagggggaggagcagggagaaggcggagctccggtggccacgtgaccccgcgccaggaggcccggtgcgcgcgcgcgcccggctcccggactccccgcgcccgcgcggccggggcagagtaggtagggaggcggatgcgccgggccggctccgggcctccagcgcggtctcccgagagcccaggcgaggcgcgcgcccagccggcgcggacggacgtgccggacgcgccgtagtacattcctgaaggcggaccggcccccttacgctgcccaatgcccgcgccgcctccccgcgaccggccaatggtcgcgctcacgagtccctgcccattcagcggccccgcgctggctgcccgggcgcgctgggggctgcggcggggcgcgccggccaccggggcggtccacgcggctcccgcagggggcccgtccgccggctctccccgcccccttccttcctccccggcggtttcccctccccgcttccttccttcggcctgcgccttctccttcctccctcgccccgctccctccctcaatctcccctcccccaccagcctggccaccttccctccagcctctcctcctccccggcttcagggggaggcccttcccccgaccccctaacccgcaaaccgtatgcggtgccggggtcagggcgggatgtcccgaggaagagagggagacggggtggaggtgtttgggggcgttcgcgggatccggagggggacctgagcaccgggccagcgcggaaattcaaaactcagaccgcttaaggagcacgtgattttgtgagtgcctcagggaagggctgcggaaactcggaaagcaggcgggcagcatgcgaggaaaatgacac

SEQ ID NO: 117876 - DNA, 835 bp, Homo sapiens
  chr9:98278352-98279187
  hyper
caccaggctgatgagcggaagccaaggtggcgaccctttcaggcgtgaaaatgggagctccggcgaccccctccgtgagaattccccccggagccgttcctcagccggggcccgccgcggccagccccctccccgccacgcggggctggcctcgggggcgggggcccgggcgtgcgagcgagcgtggaggcgcgggacccgcgctcccgcgcccaggcggcgcagcccacccggctccacggccccggcgcgcggcccgcccctcctgcccggcgctcggggctcgctcctccgtccgccgcgcggggcgtcccgcgtccccgtgtccccgcgccgcccgaggagcacggcgcgcgaggcgaggtggcgtcggcggccgccgcgctggctgcactcaccatagccggccgtcaacccctgctcggagcgcgggtgccgatggcgcggacgctgggcttggatttcacatcaattccttttttttccctggcccccctttcctcgtcctccgctcctccgtcttctcccagtcttccctcgtctcccccttgccttgtcgctgcgggtctctttgtctcccctgtcgtctttttcttctcctccgttttcttcttcttcttctcctcctcctccgtctttacaaaaggaacggaaagtgtaaaaaccccggcgcgctgggccgccggaggctttcggcggagtgcagcgcggactcacaattacaagcctgtttctattaagcagttccatggccctcggcgtgggtggtctgccgcgccataggcaggacctgtcagggtcacgtgacggatccgaaaactttacccctttacaa

SEQ ID NO: 117877 - DNA, 30 bp, Homo sapiens
  chr9:98279450-98279480
  hyper
tgtcccaacgccggtcgggggaggtgtggg

SEQ ID NO: 117878 - DNA, 30 bp, Homo sapiens
  chr9:98279700-98279730
  hyper
ggggaaatttcagcacgagatgtgtgcgga

SEQ ID NO: 117879 - DNA, 50 bp, Homo sapiens
  chr9:98315398-98315448
  hyper
cataggcccggccagcgcggagccaggagggtggcgtccaggggcagtgg

SEQ ID NO: 117880 - DNA, 18 bp, Homo sapiens
  chr9:98315536-98315554
  hyper
cggcggagccggagggga

SEQ ID NO: 117881 - DNA, 152 bp, Homo sapiens
  chr9:98637317-98637469
  hyper
tcgcgcgtgggcggcgctgccctgaagatgctcccgggctcagtgcagacggctcagcgttctctcgcgttcaacgaaccgccagaaacgtcagatggtacggaggaaaacactttacactttaacagtatttttacgtttatttgcagcaa

SEQ ID NO: 117882 - DNA, 30 bp, Homo sapiens; identical to SEQ ID NO: 6918
  chr9:98637869-98637899
  hyper

SEQ ID NO: 117883 - DNA, 1724 bp, Homo sapiens
  chr9:98783203-98784927
  hyper
ccaccctccaagacgcgcgggccggggagcggggagagggcggagggaacggcgcaccgggccccgtcggactgttggaccaaaagtcctcagtgtcgggggctcgcagcgccgccgcggcgaacccagctagggggcaccgcctgcgccgggcacagggaggccgttcggctttccccctcgcgcccattactctcaggcgtcccggggaaccccgcgggccaagtgtcgggctgcgtccgggcagaggcggcttcgcctggtgtcagcgcgtttccgaagggcacccgcggcggggcccacaactcgagctgggagccgccccaagcaacccgttcctccgaatcaggctgcttttctctgtaaagaaaagagaaagcaagcgattaactgatggcttggccggctggaaacgggaaagcgagttctccaggagccgcacacctcggggaagcccagtccctcccgggcagggagcgaggggcggtcctgggggctgcttcccgcggggagagaagggagggcggcgcagccctctgcggggtccgcccctcggttctccggacccccgcggcctgggggacacggggcaaattctcggatagcgacgggcaggaaggggacccgggctggcgatgggccgagtgcctcctttgctctcacccccgcgcgaagacgaggccagtgggcgggtggcgtggggcgaggcctccgcaggccgccgggggcccaggcacctggagccgggagggtccgctcccttccccgccctggatggcggcctatgggaaagcagtctccactggatcccgcgcgcgtcgcgccgaggtcgtgggaaaccgagggcgggagggcgggagggcggaggcgccggcagggtcggcgggactggggctcggacggaggacaggggcgaggaggaggcaggaaggacgccgggtactgcggggcgcctagggggttccgagcgcagcggctgcggggccgacccgcccaggatggaatcagggccccggcgcccccacgccgctcctccaggccgaacccctgcggccccaatcccccggcctcacgcccaccccgcaggtcggccctgcagctgccttcccttcctccacctccctcccgcctccgaagccggcgcccccggccaagtggccgctctcaacctgttaccaagtcctagagagaatttctccaaaatatttcctggatccccctgccaagggccctgtcccgcccttccagctcccaactggatgcctgcagacctctccccgggttccgaggctctggcctcctccctccctaatccattttccacaccgcttccccgggagcccgttaaaatacaccgggaccgcggcgggtgcaagcctcctgtatctccacatagcaggctaaggggaattgggtagggaataaaggctgcaggggacatcggctggcaggtatgaagcccgtattgtgtgtcgtttgttaaacacttccagtggattttctcgtttaatctgcccaacaacgcttctgggccggtattcgtattgttttatagagggagaaactgaggcacagaggggcactcggcttgtaagcaacggagtaattcagagcccgtcagccccacgccgagtttattcaccctggcaggggcttccgcgggagccatgacccttcctaactggggtggaaggacccgcagcgccagccgggtccgggccaga

SEQ ID NO: 117884 - DNA, 412 bp, Homo sapiens
  chr9:98789600-98790012
  hyper
ggctgcctggggaaccgggaaggctgaagtggacacaggaggagctggcagggagagcccaggccccgcgggctgcgggaaaggagagggcagcgactgggcgagggaggaaagaccctggccggggcagcccggcgcgggagaggctgcgtgtgcccggctcagtcacccgccctgggagaaggcggcccggttggaaagttgaggcggaaccgaaggcccccgcgtggaggctgcagcccctgcgccggccgggcgggtccggaaggagcccaggccgcacctccaggccggcgccgccgccgcccagcgcccacccgtccccccggcgccactccacatgcaccttctcccggggcgccgacggcctcggctgcccccgcagcgtttccctagcttccctccaaggccc

SEQ ID NO: 117885 - DNA, 625 bp, Homo sapiens
  chr9:99145528-99146153
  hyper
tcgcagcagggcaggcgcgctcaggaagagaacgactttctcaggttgtggcctgagtgtagaaagctgagcgagttctggagggcgcctgggaaactcgaccaatgtgcccagctgagactcgagggtccctgtccccacccgccctgtcccgggcgccgctgaagcgcacggaggacaggggcagccccgcactcccgcagaccccccggccccgggccccgcctcacccgtaggtggtcagcagcgccttgttgacaagcacgatgaggaaggagcaggtcccgtagaagagcgccgacagcagccgggccacccgcgagggcagccgcgccgcgccgggctccccgccagcgccctcggcctcggcctggccgccggccgtcatctcctgcggccccgcggaccccgccgcccgccagccccggctgcgcactggtcccgcccggccgggccggggaagagggcgcggcaggaacaggaagagcccggcgcaatcccaggtcccgacccgccccctgcgagcgcccgaggccggcgcgggaggaccctgcgcgctggacttcaccctggttccaggcacctccttcggtctccagggccggcaatgcgctggggagttgaa

SEQ ID NO: 117886 - DNA, 30 bp, Homo sapiens
  chr9:99179465-99179495
  hyper
atcttttaacagggcgagggcgatctgcag

SEQ ID NO: 117887 - DNA, 30 bp, Homo sapiens; identical to SEQ ID NO: 6920
  chr9:99179786-99179816
  hyper

SEQ ID NO: 117888 - DNA, 30 bp, Homo sapiens
  chr9:99180417-99180447
  hyper
tcatggcagactgacgtttcccggaatcct

SEQ ID NO: 117889 - DNA, 30 bp, Homo sapiens; identical to SEQ ID NO: 46365
  chr9:99180883-99180913
  hyper

SEQ ID NO: 117890 - DNA, 238 bp, Homo sapiens
  chr9:99181499-99181737
  hyper
cgctctaccgagcggctgctccgggagtcggggcagcgccctactttgctcggcccccacctgccccggccgcgtcctagtactcgcgccgggacgcgcggagccccaacgtcctctgcccgccccgccccagccccgcctggctggcgccgaccgcggcccgggtggggctcgcaggctgcagaggaaggaccgggcggaggggttgcccggcttcctacccgctagatgtggcctg

SEQ ID NO: 117891 - DNA, 30 bp, Homo sapiens
  chr9:99213095-99213125
  hyper
ggctccgggggaaacgctggcttggggtgg

SEQ ID NO: 117892 - DNA, 30 bp, Homo sapiens; identical to SEQ ID NO: 46367
  chr9:99328796-99328826
  hyper

SEQ ID NO: 117893 - DNA, 1472 bp, Homo sapiens
  chr9:99380837-99382309
  hyper
ctcgaatgccaccaacgtgacaccttccttctcgaggccccggcggggagcggaccccgggaggcggaggcgttcggggggcgcgctagggggcagggcgcgggaggcccaggagaggggctcgggcttacgcgccggacgggcaacgcggcgcccagggtcccaaggctacggagcagcgggggtttggccaacgccaaaaaggggcagctcccgtgccaggcgcgttcagcgcgctcggggaatcctcaggggctgattcagaggttgtgactcgcgcgagggccaaccgggctcgcaatccctgaaggcggaatccacaggaactcagaagcagcccgcggggaggagctgcaggttcgaggcgccgggctgacgcccgcaacttagaaaggtgaccctcggtccatcttgctggtggaggagggtgcacaagctaaagttaaagctcgcagcccacgcagctagaaactcggggcggggggcgctcctcaggagccaggctcctaaagggggtgtggcggccggggcgtttaagggggtgggggcgaaggcatttcggcccggccccggaggccccgggcagcccggtgggaggtgggccagggccccgcgccgggtgcggccgtccggggccctccgcgcgcccactggccggctcaccggtgatgtccaggtacacgtcgtcctgggggtcccggcggcgcgggtcttgctgcgtggagctgcggatcttcttcacacccggcgaggtcgacgagcagcgccgcgagcaggggggcgcggcggcccagctcgaccgccgctcgcttttccgcttcatggaggcggccgcggcccgtcagggggccacgaccatggccccgcgcgcccgcgcgcccgccgaggctcccgccagccccgcgcgggcgctcggggcggcgggcgcagagcggcgctgcggggacggcgggcgccggcagagcccggcgggaggcggtcgcgcaggagccggaggaggagcccggcccacagcgcctgccccgctgcctcccgcggccgccgcaggaccggcgccgcagccctcgctacagcgcctcctgccgcggccggcgcccccagcccgcccccaggtgcccgcagccggctggcgcggccgaggcgacggggctgcagctggcggccggagctgcccggggtaaccgtgcgtgcccaccgcggccgcggccgctgctgcgtaggcgccggggcacagcaggacgcggctcgtggggaccccaggagggctgttccgtggcgcttcattcacaaaaaagggcccacaaccctcctcggggcccgcagactgaggcctttcattggccaatgcggcgtgacgtcacggagacggggcctttctacaggcaggtactcggtgacgccataaagaaaactctgagggcttccgccaatcagagataaagtgtgctagcgaccttcgccagccccccaac

SEQ ID NO: 117894 - DNA, 241 bp, Homo sapiens; identical to SEQ ID NO: 46369
  chr9:99416949-99417190
  hyper

SEQ ID NO: 117895 - DNA, 410 bp, Homo sapiens; identical to SEQ ID NO: 46370
  chr9:99417396-99417806
  hyper

SEQ ID NO: 117896 - DNA, 346 bp, Homo sapiens
  chr9:99449020-99449366
  hyper
tctcctggcccaggccgagctgcagggggcgccaagctgcggctatgaggggaatgcaatggaaccaaatgctctgaggagccccagcaccgtgcctcgacctcaccggattctggtcctcactgccgcccgggcctttccgcttcttcaccaaggcggacaggctgacgcactaccacgccgcgcgacagcgaccgcgcgcaaagcgccaggaaccccccctactgcccgccccgcgctggcgaagcgcgacccgtcccgccccgccccgccctcggcacagcgtcagaggcggggacgcgcgctggtctatttttgggcatccggatggcgactgcgggaaatc

SEQ ID NO: 117897 - DNA, 879 bp, Homo sapiens; identical to SEQ ID NO: 46371
  chr9:99539773-99540652
  hyper

SEQ ID NO: 117898 - DNA, 179 bp, Homo sapiens
  chr9:99637707-99637886
  hyper
gagaaacctcttacccggttcccgccctcgccccccgcttacaggtaataaagctggaatttatgcagctctttcggtctccacagctcggggtcttgccacagacacagcgcccacgagttctggcactttggtcaacgtttataaacgggctctcctctgccgccgcgggcatgcgc

SEQ ID NO: 117899 - DNA, 339 bp, Homo sapiens
  chr9:99638088-99638427
  hyper
caccttccccgcccgcgacacccaagggccccgggaccacctctcagccttagctaggcgtgaagcagcgagctaagcttgcacatgcgcagacgtcatccagaagaccctttcctagagtgtggcgcgcgagccattcggatttaagactacgtttcccagaaacctccacgccacgacttacttcgcagcgttttctctattggatgattggaagatgttcctgactgcctcgcctggccaggttctgccagagcccctagaggttatgggttaaatttgaactttgctgccgaatacggtgcgtggtcctccatcaaatcccgattggaaaaaaca

SEQ ID NO: 117900 - DNA, 357 bp, Homo sapiens
  chr9:99639676-99640033
  hyper
gggcacccaggagcccggcttcggggtgcttagcggggcgaagccgcccccggacccgcgtggctccagcctcctgggggtacctggcagagggggctgcagcgagcgccctgccgcgccgcttcctccgcgcgtctcccgcctggctccgccaagactgggggcttccccataggcccgcgtccgagcgcgtcctcaggcttcgctccgcgagatctgggggccccgtgggctggggttcgggcggggtccgttccttgcggtccgcggtcttgaagcaatttcccggcaaagtcccgggacagcgggaaagaaactggtctccctgcctggggtcgttcccggtggatgtgcctc

SEQ ID NO: 117901 - DNA, 30 bp, Homo sapiens
  chr9:99775878-99775908
  hyper
gcagttaccggcggcgtcaggggcgggctg

SEQ ID NO: 117902 - DNA, 451 bp, Homo sapiens; identical to SEQ ID NO: 46374
  chr9:99801106-99801557
  hyper

SEQ ID NO: 117903 - DNA, 503 bp, Homo sapiens
  chr9:99983229-99983732
  hyper
gacctccaaggcccccgcctcaggcgctgcgggcaaacagggcctgggggccccctcccaccgcgggctgagcccccgctacctgtcctttctgtcgcgggcatccaagtcccggaacctgcgagtcaggcagcgctccacctccgcggcgtcgcccttgatggccaccctgtggatcttccgcagttcccagtccccgatgtggtacccccgacccgcgtactcttggtccatggagctcaggagcgcctggcccaggcgtctcccgaaactgaagagtttcctcatggtggcgacttctcagacgccaaccacccgctactgagccgccgcggctcctcgtggcctttccaccccgaccaagttccaaatccgcgatccccctccccaccccgctatccacccctaaatccaagatccaccaccaaaccagcaatccacccccaaacccaagatccacccccaaccccgcgatgtagctcagaatccgcgatccagcccgg

SEQ ID NO: 117904 - DNA, 221 bp, Homo sapiens; identical to SEQ ID NO: 6928
  chr9:99983767-99983988
  hyper

SEQ ID NO: 117905 - DNA, 16 bp, Homo sapiens
  chr9:99984041-99984057
  hyper
cgcctggccgtgactc

SEQ ID NO: 117906 - DNA, 45 bp, Homo sapiens; identical to SEQ ID NO: 6930
  chr9:99984107-99984152
  hyper

SEQ ID NO: 117907 - DNA, 667 bp, Homo sapiens
  chr9:100000456-100001123
  hyper
cttggtccgagtgaccgcagcagtgggcgcggtggaagagaaggagaacgtgttggcccgggcctccataaccatggctgctaggggcggggactgggagcgcgggtcccgggactgggagcgcgggtcccaggccagggtgcgggctgggaagactcggtcctccactgccccagcaggccacgcgcccgcgcgtagcctcccgccccgctagcagcacgctgcgtggctgctcgttggctacttacgacggaagctcggttggggtttctgcagaagtttcccccttgggcggtggcggagctgataagcgcgctagtagcagctctggcagaagcaacggtggcttcgagggatggcggcggctgcaacaggacctgcagcatcccagaggtgcgtgtttttccttccctttgctatttattttatcccctttccttggctagtgggtcctgctgaagtcgttgttttcctgagaggttttttccagagcttctcagatgctctaatccactgcggcgttagaggtgagagagccttttctgcttcctccacccctggctgacgcgcctcctcccagcagcacctgattgggacccagggtcctgtggttactgcgtgtccgccccagtattgagattctcagtctcctcgcgttacctcagac

SEQ ID NO: 117908 - DNA, 30 bp, Homo sapiens
  chr9:100174128-100174158
  hyper
cccgcgcgtacctgcgttgtccaccaggag

SEQ ID NO: 117909 - DNA, 30 bp, Homo sapiens
  chr9:100174756-100174786
  hyper
aagggaccctgctccgggccgggcgttcac

SEQ ID NO: 117910 - DNA, 114 bp, Homo sapiens; identical to SEQ ID NO: 6931
  chr9:100263428-100263542
  hyper

SEQ ID NO: 117911 - DNA, 402 bp, Homo sapiens
  chr9:100264591-100264993
  hyper
tggatcccaggttcgcgctgagagtgtttggggcaggtgaagtttcccaaactgggagagacaaggtttaaagcaccacgacacgcgctacgcggccaagtggagctggaaagagcttggaggcgggagccccaggttgtcgccggctctcggcatggccttggcaatccccctcttgtttctggatctcagtctcccatttgtaggggcgaggtttggtagccgcgatggagctgggagcccaagccctgagagctgcagggcgcgctcttggccgcctgcgctccccacacctgttcaccctctccgggcctgggacgctggggtcccagccgcgcacatgcggagacgctgcagaaatcggagactgactgccccagactcgatcgtatcctgggactc

SEQ ID NO: 117912 - DNA, 30 bp, Homo sapiens
  chr9:100396398-100396428
  hyper
caagggccgatcctcgggaaagaaggcctg

SEQ ID NO: 117913 - DNA, 30 bp, Homo sapiens; identical to SEQ ID NO: 46380
  chr9:100396762-100396792
  hyper

SEQ ID NO: 117914 - DNA, 30 bp, Homo sapiens; identical to SEQ ID NO: 46381
  chr9:100459082-100459112
  hyper

SEQ ID NO: 117915 - DNA, 230 bp, Homo sapiens; identical to SEQ ID NO: 46382
  chr9:100459619-100459849
  hyper

SEQ ID NO: 117916 - DNA, 670 bp, Homo sapiens; identical to SEQ ID NO: 6932
  chr9:100503319-100503989
  hyper

SEQ ID NO: 117917 - DNA, 304 bp, Homo sapiens; identical to SEQ ID NO: 6933
  chr9:100565761-100566065
  hyper

SEQ ID NO: 117918 - DNA, 101 bp, Homo sapiens; identical to SEQ ID NO: 46385
  chr9:100610033-100610134
  hyper

SEQ ID NO: 117919 - DNA, 616 bp, Homo sapiens; identical to SEQ ID NO: 46386
  chr9:100610200-100610816
  hyper

SEQ ID NO: 117920 - DNA, 539 bp, Homo sapiens
  chr9:100611124-100611663
  hyper
gggcccgcgcagactgggttgggagagggctctgtgggagggcttgcggggagcggggtaagaaaggctaggtgcttcttacctacgtaagaaacgttggtggcgggatctaagcaaacggggaggtgggaagcagaaggttccccttcctgggccccagttcctccatcctgtcccctgggtgacagtgattcgctgttcatagtgtttaagtggaccaacttaaagggagagagcgcttgccgagctctgggaaaccgaaagggtccacgcccgcgggagcctcggagactcaaaatcccccgctagaccgcagaaaatgttacactttaatcaaccgctacttcttccgtggagaggggcggtgggtgggggtgtgcgcatctcatcgcggcctgtgagtggaacaggctagaattatccccagcgtcttttttccatgtccaagtttcgccttaaaacaatttaaaagaggaagaagaggaccgcgcgtctgtaaggcgctccactttatcaccttgactcggtggaagagaaag

SEQ ID NO: 117921 - DNA, 30 bp, Homo sapiens
  chr9:100613647-100613677
  hyper
gcaggatcgcaggatcgcattctttagatt

SEQ ID NO: 117922 - DNA, 105 bp, Homo sapiens; identical to SEQ ID NO: 6938
  chr9:100613894-100613999
  hyper

SEQ ID NO: 117923 - DNA, 229 bp, Homo sapiens; identical to SEQ ID NO: 6939
  chr9:100614192-100614421
  hyper

SEQ ID NO: 117924 - DNA, 1594 bp, Homo sapiens; identical to SEQ ID NO: 46390
  chr9:100614441-100616035
  hyper

SEQ ID NO: 117925 - DNA, 198 bp, Homo sapiens; identical to SEQ ID NO: 6942
  chr9:100616270-100616468
  hyper

SEQ ID NO: 117926 - DNA, 427 bp, Homo sapiens
  chr9:100617285-100617712
  hyper
ggtgggatagatcggttcgtgtccgccatgtgagccagcgtagggacgaaaactcatagacacatcggctgttcacacgttccccgcaatctgagaacgaacaggaatggagagaggactcaactgggacccacgtggaaaagaccgagcaggccacagaggctcggtctccccgcgcacagcgtaggcacccggtgtactctgtaaacgggaggaggtggggcgaggcagccagagcccttggactggcacagggaccctcgatggagcgaagccctcaaacgggatgctttctggtattctatcggggagggtccttggcggtaaccagagggcagcgtagtgtcaacaccagagaccaggatccaaattgtggggaatcagtttcagccttccatgtgctgccggaactcgggcctttttacgc

SEQ ID NO: 117927 - DNA, 30 bp, Homo sapiens; identical to SEQ ID NO: 6944
  chr9:100618025-100618055
  hyper

SEQ ID NO: 117928 - DNA, 906 bp, Homo sapiens; identical to SEQ ID NO: 46394
  chr9:100619832-100620738
  hyper

SEQ ID NO: 117929 - DNA, 30 bp, Homo sapiens
  chr9:100684756-100684786
  hyper
actcctccaagccgcgcatggctactggtt

SEQ ID NO: 117930 - DNA, 30 bp, Homo sapiens
  chr9:100745960-100745990
  hyper
ccgggctgagggttcgccggccccggcgcg

SEQ ID NO: 117931 - DNA, 30 bp, Homo sapiens; identical to SEQ ID NO: 6946
  chr9:100746554-100746584
  hyper

SEQ ID NO: 117932 - DNA, 195 bp, Homo sapiens
  chr9:100818669-100818864
  hyper
attacaccatagggcgcgctctccccatgctcctgagagcaggacatagactatgccctgcgcaggcagccgtccgcctcctgcagggaatgcttgctcctgggtgcacgcacggataccgcgatggtccgagaccacgctctgggacagcaagcctcaagcctcgcacaggagagggccgcggagcttcctcga

SEQ ID NO: 117933 - DNA, 30 bp, Homo sapiens; identical to SEQ ID NO: 46397
  chr9:101017406-101017436
  hyper

SEQ ID NO: 117934 - DNA, 30 bp, Homo sapiens
  chr9:101018098-101018128
  hyper
cggctttttctccgcgccagtcagccatct

SEQ ID NO: 117935 - DNA, 30 bp, Homo sapiens; identical to SEQ ID NO: 46398
  chr9:101019027-101019057
  hyper

SEQ ID NO: 117936 - DNA, 1097 bp, Homo sapiens; identical to SEQ ID NO: 46399
  chr9:101469270-101470367
  hyper

SEQ ID NO: 117937 - DNA, 1060 bp, Homo sapiens
  chr9:101470648-101471708
  hyper
caccccaatgccccccgaagccccgacggcaggggcagccggacactcacctccgtgtcatagagccgcaggtcgaggaagtaggggcgcaggagtgactcgttgcggatctgctcgatggccagttccacggcggggagcacaccgcgcccgatgctgcccttggccacctccttggtgagcggcatgaggcccatgatggagagcggcgggctgctgggcggcggccggggggcgccccgcgcccagccccaggccccgggcgccagaggcagcagcagcggcagcagcagtagcagtagcaggcgcgcgggcggcggtggcggcggcggcggcggcccgggctgcccggagctccgcggggaagccatgccgcgccgcgggctgcgggcgccggctcactcggcccgcatggcctggcccggcccgccgccccgcgccaaggtcttcccgcggcgcccgcgcaatggcgccggcccgggccccggctccgtctcgggctagggttccggctcggctcagaacggccgcggcggcggcggcggcagcggcggcgcccgtgacggatcaatcacgccgggaaggggtgggagcgagcggagtgcgggaggcggggagcaagcgagcaaacgcggagaggggggccggcgtctccgcgcgcgcctctctccagcgcggccgccccgcaccgggccgcctccgcccgcccccgtgcgcgctctgaaccgctctcccgccgggagctgctaggcggcagcccctggagctcggccgggggagggcggacggcaggaaacgcgggaggcgaaggcgaggctgctcaggggcggctcgggccgcctccagggacggggacgagccgtgcgcgccgggggagggggaggcgctggcgctgcggcggccgcggggagggccaccttcccagcacacgcacacacgcgcccccggccctccgctgcgccagctgccgctgcccgccgaccgctgacctccaggcaccagagcgcccggggacagcgatctgggaaccgggaccgcgcgctggcacacgcagtggccg

SEQ ID NO: 117938 - DNA, 363 bp, Homo sapiens
  chr9:101471724-101472087
  hyper
cgctgcctgtagcacctgcacggtggtttggaaccgcttctcggaggtctggccgggaaggtctgggcaggagaatgttccacgaaggcgtcccagaggcatctgcagcctacgctctcccgttcttttctggcgcccacgagcccctgaccgagtcccgggggtcgctgaagacgcccacgggtgctcgaacgcccgttggtgccaggctgcccggcctttagggccttggctgaggacacccctttcctccccaccagacggagcgaccgccctttgccaaccccaagcaaagctggggtcccaaccttacgtgcgctaccgccccctccaggcatttgacctccccgcgtccccattctt

SEQ ID NO: 117939 - DNA, 31 bp, Homo sapiens; identical to SEQ ID NO: 6950
  chr9:101558159-101558190
  hyper

SEQ ID NO: 117940 - DNA, 53 bp, Homo sapiens; identical to SEQ ID NO: 6951
  chr9:101558600-101558653
  hyper

SEQ ID NO: 117941 - DNA, 65 bp, Homo sapiens; identical to SEQ ID NO: 6952
  chr9:101558885-101558950
  hyper

SEQ ID NO: 117942 - DNA, 112 bp, Homo sapiens
  chr9:101559157-101559269
  hyper
ctgagtccgcagctgcgtgggccttgactttactagcgggctccgctgaccccaccgcagcccctggcactgaacctgcccttctagaataaggaagcggctgaattaagga

SEQ ID NO: 117943 - DNA, 726 bp, Homo sapiens
  chr9:101569828-101570554
  hyper
tgcgcttgggctggcgcggggctggacggaaagggggcggcgcgcaggtggggcgggccgggggcggggcggcacggcggttccgggatccgggtcctggcctccaccgccgccttggggcgcgcagatcgctggctgcagttggcgggcgcatgtgggggcgcacggcgcggcggcgctgcccgcgggaactgcggcgcggccgggaggcgctgttggtgctcctggcgctactggcgttggccgggctgggctcggtgctgcgggcgcagcgtggggccggggccggggctgccgagccgggacccccgcgcaccccgcgccccgggcggcgcgagccggtcatgccgcggccgccggtgccggcgaacgcgctgggcgcgcggggcgaggcggtgcggctgcagctgcagggcgaggagctgcggctgcaggaggagagcgtgcggctgcaccagattaacatctacctcagcgaccgcatctcactgcaccgccgcctgcccgagcgctggaacccgctgtgagtgcacagctctggggaggaagcccgccctcagagccccgggcctcagtttctccatcagagcagtggcagggcggggagctggggtctccaggatggcgcgtcttattgagtctttctccgaagacgatagtgtaagagctcacatgggggcggggaggcaagaaagtaaaaaagacgaaagtagaaaaaaaattacc

SEQ ID NO: 117944 - DNA, 249 bp, Homo sapiens; identical to SEQ ID NO: 6954
  chr9:101705946-101706195
  hyper

SEQ ID NO: 117945 - DNA, 637 bp, Homo sapiens; identical to SEQ ID NO: 46407
  chr9:101706314-101706951
  hyper

SEQ ID NO: 117946 - DNA, 97 bp, Homo sapiens; identical to SEQ ID NO: 6956
  chr9:101866821-101866918
  hyper

SEQ ID NO: 117947 - DNA, 30 bp, Homo sapiens
  chr9:101867975-101868005
  hyper
ccccctgggcacggcgtgaccttgttctgg

SEQ ID NO: 117948 - DNA, 30 bp, Homo sapiens
  chr9:101984293-101984323
  hyper
ttaggccacatcagcgcaaatctgtgaggg

SEQ ID NO: 117949 - DNA, 30 bp, Homo sapiens
  chr9:102583371-102583401
  hyper
agtttctgctgcagcgcgcgtgtgcatgat

SEQ ID NO: 117950 - DNA, 148 bp, Homo sapiens
  chr9:102585800-102585948
  hyper
gccgtcattccatcgcgagtccagtgccggatctccttttcccacgaccgggaaatattttatagaatcaagttagggaaagaaaaagctgcctaacgtggctgatgggcacaatgaatgaagttactttattcgagttattttcgct

SEQ ID NO: 117951 - DNA, 1029 bp, Homo sapiens
  chr9:102586188-102587217
  hyper
cagggttggaaactccgcagaggagccccggtcacaatggtgcgtttcacggtttcctccacacacttcaccaccgggaggggaacacgggggtgttcctttcgtctgcccacgagaaagaaaggggctttgacagaggtagttatttcttcctaatttacaaccccaaggctctgtgctcccggccccggcggccgcaagcaggagcggcggaacgtgtttccaggcactgaggctttgcctaggtaaccggccgcttgtggggtggagagagcggcggggcgctgggctgggctggaggaaaggctgtgtgggtccctcccgcgaacgctgggcgctcgaggggaactccttcgttggggagaggcggtccccgcccacccgagttctgaggcctcctctcagagaacgactccgcttgaaaggccctcagggaatgcgggacgggaatgcgggcacccactgaaggggcgggtgggggattgctggagacccccattgaagatgcggggagacgggaagcacgtgctacagccgtgggaagatccgcttctacccgcgctacatcgagcgcaagctttccgtccgagcagctccagctggggctgggggtggcaagggaatcccccatttcctggtcgtcgagggtttcctggacctgggagccccgagtccctttctctcttcctgcaggcaagccccgggctcaggggcgccaggagatgaccctcgtggccccgcgcacctcggaggtttttggtttggtttgatttggggtttttcggtccctgttcccactcttcgagctgcgcccaccccgggcaaagggggcgctataggccggagtttgggcacccagttccttccctgaggcctgctgagctgcgctttcagctacaaagtttcgctgaggctgtgggctgagacgctggtcccggagctgcgctcggcgccctcaggaatgtgcccccgctaggccgctgggtggccaggagcctccaagccgcccaccctcgaagacaccgccct

SEQ ID NO: 117952 - DNA, 30 bp, Homo sapiens
  chr9:102668710-102668740
  hyper
gcagacctaaagagcgtttgtgcgtctctc

SEQ ID NO: 117953 - DNA, 30 bp, Homo sapiens
  chr9:102861138-102861168
  hyper
gtgacagggacaggcgctggcggctgggac

SEQ ID NO: 117954 - DNA, 30 bp, Homo sapiens
  chr9:103114654-103114684
  hyper
ccccactccgtattcggtcctgcatccatc

SEQ ID NO: 117955 - DNA, 30 bp, Homo sapiens
  chr9:103115143-103115173
  hyper
caggctctagctcccggagcgtgttttcaa

SEQ ID NO: 117956 - DNA, 30 bp, Homo sapiens; identical to SEQ ID NO: 6958
  chr9:103190004-103190034
  hyper

SEQ ID NO: 117957 - DNA, 173 bp, Homo sapiens
  chr9:103190035-103190208
  hyper
gatcactgtgctcggcgcttttccatacttgtctcctttaagacctccagtgccccgcccgtccagagtgtaacgggagggatccctcacttgcaggatgaaggccgagcatcacatccttgcttgactgaccttgggaaagctcctttactccgagccggggctactgtttc

SEQ ID NO: 117958 - DNA, 917 bp, Homo sapiens
  chr9:103235425-103236342
  hyper
ccggggtctttgtgacgcggtggcaacggccacggacacaaagggaaggcgaggaggcgagcaagaggctgggcctgcctccggcccgcgacccccgcccgccgcgcgcgcgcccgcccgctcccctcgccgcggtgtcccccacgccggctcgcaccctcgcgcgcacccttgcgcgcccgcgaccctcgcacgcgcccggacccgccgactccgtcccgagcgccgcgggcccgggcctggcggacgctgcgggtggggcggggatgctgacgggctgctccccggctcagcggcgcggctgctaggaggcaccgaggcagcggcggggctctgggcgcgcggctggatgcccccggcctgcggctccctgcgcttcccgccgtccaggggcaccagtcatgggcgccgcagccgctgaggcgccgctccggctgcctgccgcgcctccgctcgccttctgctgctacacgtcggtgcttctgctcttcgccttctctctgcccgggagccgcgcgtccaaccagcccccgggtggtggcggcggcagcggcggggactgtcccggcggcaaaggcaagagcatcaactgctcaggtaggaccggtcggagccggccctaggtcttcccacccctccgttgccgcctccctcgtggtccctgcggtcggccgggctgggaaagaccccgtcgtgggggtcccaggggtgggcccgagggtgagcgagggcggagggcagggcgcgagcgtgcggtgtggctttgggaccggcgctggggatgggagtggccgtgggtgcgtccgagtgtgtcgagtggctgggcgagggcggcccggcgtgtggggaggcggtggggccggggccggggccggcgaggctgagcggccggccggggctcccggtgtggtcgtggg

SEQ ID NO: 117959 - DNA, 1143 bp, Homo sapiens
  chr9:103790597-103791740
  hyper
ggacctctggggagacgcatctcggttgcccgcagggtagaaagcaagagaatggcccacaggaacgcccgcgccagcgctaaaaccacaccgggagaggacagccccacgttaccgaggactcgaggcagaagcggtctccaaggatgggtggggatcccaccactggcttccagctctgcatgcgccgcggagtccccgcgcagggcgcacctttgcggcggggtttccccgctgccttctgggaaccccgcggagcgactgccgctggacgcaatctggctggcttgcctctaccccgagctcactctctctgctctgtctgggctctggagccagagctgagtctctcttgagcatgcgcagcccggcaccctccccgcctctcccctcctccgccccctccgcgccagccttttgctctttcctttcattaaacaaacaggagatcctgaaacctggaccctgtgcaagctgcagcgccaggaggaggcagcggaggaagcagagcgcgggatgggcgcccagcggcatctgtgatcccgcgcacctccgccccacgggcgcgcgcacaaacacggacacacacatacacacactcgcgcacacactcgcacaaacacacactcgtacacgcccgcgccgctcgctcgccggcttgctctcccacgcaagcggaatgcagcagcgcctggagagcgtgtctcggaccgccgcctgaatgtacctcgctcccgggagccggacggcccagtagggcgcactggaggacgctccgctgcgggaggtgagtgcggcgcccgcagccgggccgctggggaagtctctgcaccggggcagtagggcagcgcggggcaagctcctggccggacccggcggcgcaggtgtcccatgccttgcttgtgggtgtcgaggtgcagatgaaggcggcgctggggctgtgcagaggagaggacgaacccagggagggtcgcctcctgcgaggtgtcagattgacccagcagaaagctaccacctccctgctcataaactttccttccatgtcatctgggaaacgtggagacaaagggggcgtggaggctccctccgtcccgttccaccctcctgactgcattccgggctgcaacgcgagcctgcacgcgt

SEQ ID NO: 117960 - DNA, 266 bp, Homo sapiens
  chr9:103791970-103792236
  hyper
cggtgccaaaggcgccggggtgaggctcgggtcagtgcggggataaatgatgagttactgacaggcttgccataatcacctcctagaacggaggacgctaggatctctcctcctcagggaaggtgctgtcttcacgcacaccatcgcggcagcgctgggagctgaacaggggctgctgctgcggcggcggcagtgggaagacggggctttatcctctcccaacccatttcccaagggttttatgacacgcacgtgtggaatatgtg

SEQ ID NO: 117961 - DNA, 30 bp, Homo sapiens
  chr9:104160885-104160915
  hyper
tccacgggcctgagcgcagccttcagccag

SEQ ID NO: 117962 - DNA, 228 bp, Homo sapiens
  chr9:104161276-104161504
  hyper
gttggggtcgtgaccgtctgggggccgaggcaggcactggccagacccagccagggatcctcgtattcgtcgagcctaatttccagcagccgggtaggcctcaccagaggctcctttccgtgaggccgcccccaattcctgcccctattctctgcctgggagatggcttccccgagccccccgccggagtcgaaggtaagtaagcacccccccggggatcccggttgt

SEQ ID NO: 117963 - DNA, 327 bp, Homo sapiens
  chr9:104248322-104248649
  hyper
ggagagagcctgggccgagcagaggatgcgggtcacaacgaccctgcaggagctcacgccccaagacaccgcgagcgcagtgcgacactagcgacgccggagccaagggccagaaagagggcgagacacacccaggtggatctaattaaccctccctcttggaaaaagaatgggggacgatgtccagggccctggatctagtgtctgtcgctgaccttgggcagtccctgccacgcttgagcctcagtttcccacccgtaggccgagctgaccgtctccatcgctgcgctccttcccttctgctggtttttcctggtcctgggaggg

SEQ ID NO: 117964 - DNA, 872 bp, Homo sapiens; identical to SEQ ID NO: 6961
  chr9:104248697-104249569
  hyper

SEQ ID NO: 117965 - DNA, 205 bp, Homo sapiens
  chr9:104499976-104500181
  hyper
tgcgcccggcgagggcgccggggaccgcctagtccctggctccggctcatccctctgggctcctgctcggctgtcgtccggagcgcggctggccgcgcggggggcggtggtccagggctgcaagtgcaccgcgcccaccctcaccgcgtgcccgatgcgcttgaggatctggcagggctgcgggtgcgaggaggagctgggcacc

SEQ ID NO: 117966 - DNA, 971 bp, Homo sapiens; identical to SEQ ID NO: 46416
  chr9:104500207-104501178
  hyper

SEQ ID NO: 117967 - DNA, 30 bp, Homo sapiens; identical to SEQ ID NO: 6963
  chr9:105037092-105037122
  hyper

SEQ ID NO: 117968 - DNA, 30 bp, Homo sapiens
  chr9:107509806-107509836
  hyper
tcagttaatcctaacgtcacctctaacgtt

SEQ ID NO: 117969 - DNA, 30 bp, Homo sapiens
  chr9:107510752-107510782
  hyper
cctatcaaaccggacgatgacagacagact

SEQ ID NO: 117970 - DNA, 111 bp, Homo sapiens
  chr9:107526187-107526298
  hyper
aatctacacaactgcgcatcggagcgaatgaggtcagggcccagaaaggtggggcaggaacgatcccagccttcagctaattctgtcacctctaacgtctggggcaagaac

SEQ ID NO: 117971 - DNA, 30 bp, Homo sapiens; identical to SEQ ID NO: 46419
  chr9:107690470-107690500
  hyper

SEQ ID NO: 117972 - DNA, 30 bp, Homo sapiens; identical to SEQ ID NO: 46420
  chr9:107730724-107730754
  hyper

SEQ ID NO: 117973 - DNA, 30 bp, Homo sapiens; identical to SEQ ID NO: 46421
  chr9:107753539-107753569
  hyper

SEQ ID NO: 117974 - DNA, 30 bp, Homo sapiens
  chr9:108006596-108006626
  hyper
gctgcctcagaccgcgttgccctccagcct

SEQ ID NO: 117975 - DNA, 30 bp, Homo sapiens; identical to SEQ ID NO: 46422
  chr9:108007109-108007139
  hyper

SEQ ID NO: 117976 - DNA, 30 bp, Homo sapiens
  chr9:108320492-108320522
  hyper
cttcagacaggtaccgctggcgactcgggt

SEQ ID NO: 117977 - DNA, 750 bp, Homo sapiens
  chr9:108418382-108419132
  hyper
gcacaagagagagttggtctccggaagccagggcgcggagagtggggaggaaacggtgggagtccccgtcgggaaggggcccccgggccccgcgagacaaagggcggtgtcctataaaggcggcggcggcggcggcgcggtgtccaggcgagggcgcacacggccggcgagggcgacggctacggcgacgacgcgggctctttgcgaggaggtgcgtggactccggggggacatgggcgcaaccagggccgggctcgtgggcctgcgggtctctcgctgagccatactcacccgggagagcaggaatgcggcggagacttggtagcggccaccgagccaattcggtgggaagaccgggggactttccgcggggcaggggcggtggctcagctccgggggtgctaggccgactctctagcgtgttggcgggcccgcgtcgcttttatgcgtgatgccggggacccccttgtaccgctctcggcggcgcatctcccagagcccttcaaggagctcgcgcgtccccgagcgactcccggacacctggcagattcgaaacttcagccactagatgctttcctggactccctaaatacttaatcattaggcaaggcaatggtttgcaagggggagcaaaagttataaaaagaaaaagggaaaggcctggaagcgaagcgggcaagggaagaagcttgggcagagtattcgagatgcgtccaggctgcacggtgcaggggtcgggtgcatcttaga

SEQ ID NO: 117978 - DNA, 331 bp, Homo sapiens; identical to SEQ ID NO: 46424
  chr9:108455718-108456049
  hyper

SEQ ID NO: 117979 - DNA, 904 bp, Homo sapiens
  chr9:109622312-109623216
  hyper
tttgtcccttctagacgtggaggcttggagaggaggtttggtttccaaggattggagcgctgtgaagggcggggccattccaagtccatctcccctttttgtcctcttctcccgggacgggagggtggagccaagtccccccgcggccggttcgggagctttctctatctcggtcgctcgaggtgagtgtgaaagggcggcagcccgtttaattgcagcgcaggttaatttcttgagttcaccgcagtcggtccgccagccgcttccccggtctttgccaagtgggtttacgaggtctgaggcgtgttggggcgcgctcacgttctcgcaaaaggctcctccccagggctcaattccccgactgcgggaagccctttggtgccccaggagccttggaaacccaaggtttcctctgacctcgtcgctcctttctccctccccaccgcctggttccctacgtccctgcccccagggaaggacggcccccatcttaggacttacgacccaagccaacccagaaggtaccttcacgtcgatgaagattttatcgcagcctccaaaacccagcagtaataggagctttcaacctgaaatacgattgttattttcccggtgcagagcttgacagaaaaagtcagctttttattaaagacaaagaggtaaattatcagccgggacagtggagggacggcggagacctggcgcgcttcctccggttgccacgaggaatttatggggtggcggcggccagcgctcagacaccccccgggtcccggtggggaggagctcggggcaggaggacttccctaggtccctccgggcactcggaagggggagtcctcccaaagccgcacaaagccgggatcatttcaatccggaacagcctcagcgtcctcctcctctc

SEQ ID NO: 117980 - DNA, 242 bp, Homo sapiens
  chr9:109623556-109623798
  hyper
atgaagccccgctatcggatgggaaccaactccgcgcgcgtctcctcctcttcctttattgtatggatttataggtatatatcttctcggactgttgcttggggggagggaggagaaagggcgagtatttaaagaggacagacttgcccaggatccttaacaccgcgccttcaccggatgcgcgctcctcaatgcaaaggaatccagcaacatccccaattcagacgcggacaaaagaaact

SEQ ID NO: 117981 - DNA, 616 bp, Homo sapiens
  chr9:109624112-109624728
  hyper
agcttcatcttggctcgcgtgtcttcaacaccatgacaccttatcattaagagcgctgattgttactttccgagcctttagatgatcagccagaaagtgcaaacaacgcggggctggagggtgtaaagttatttaagcaggcgttctttttttcttttggtgcgcagtcaaaacatttcacaagttaggaaaagaaagtggtggttccgaagctcggaatgatgggctcttttcctcctccacccccccaccttccatatcaggaaagaaataaaacgcacaatgagcctttatttcaggagagaagacttcaaaatacgtgccagtaatggacaatttgagcttttcactggaaatactcacaccgcaagctggaaagggattaaaaagccccacgtggttgatctgggtttatacttgcaacctccagttccccacgtatgttctttgcaaaggttggcctctagatggatgcaagtaagggaccctctggggctcgggctcggcgcctcgggcagggctgacgttgggagcgctatgagctgccgggcagggtcctcaccgggggcttcctctgcgggccagggctgccgggcgccaccgggacgcgagcgcg

SEQ ID NO: 117982 - DNA, 30 bp, Homo sapiens; identical to SEQ ID NO: 6967
  chr9:109625164-109625194
  hyper

SEQ ID NO: 117983 - DNA, 30 bp, Homo sapiens
  chr9:110045114-110045144
  hyper
cagcaagcgccccgcgggtgctggccccca

SEQ ID NO: 117984 - DNA, 30 bp, Homo sapiens; identical to SEQ ID NO: 46429
  chr9:110045348-110045378
  hyper

SEQ ID NO: 117985 - DNA, 317 bp, Homo sapiens
  chr9:110187424-110187741
  hyper
cccagctctccttcccggcggaggcttcttccctccccccagagtctggttcagaggaagccaacgcctgtgcacgtgggaaagcagcgtggctggccctgggcctggagccacctcccgggcccactctgccaggccccattctagatgccagcaggccggccccgccccttggacacggttttggttttcgggtgcaaacagtctacattcctctgaagaggcccgctccggcctcatcagagctggcgaaatcaacgagagaaacaggggacgtcggcccgcagttcccgcgagcgccacgaggggcgcacgca

SEQ ID NO: 117986 - DNA, 767 bp, Homo sapiens
  chr9:110227803-110228570
  hyper
tacatgaccttgtcccgtctattttcacgttagccaaagggaagcctagaagtccacagtccccgggagctggaagccaggcagtgacagcgccagcgtattctccttgacttgattgtaaatttcacaactttggtagcttcaacagggaggaagaggaggggcgccggctccctccagcaaaggcggcgcggagcgggtagccaggtccggagccgtcctgtgccgggccgtccggtggggggcactgcagaccgcgcgggcgctgcgcccgcctctagctccgggcgcagaggggtggccacgctctcctgagtccctcgcgcccctagccgcgcctgggagagcggactggcctcccagagaggatgcgggggaagccgcacaggggcccactgggactgggtaagggcgcgggatgggatcggctctggatatgggtgccccccgagccgcgccccaccccgcgagcgctcccatttgcacctccacttgagcacggagcttcaagaacgagctattctggggtgcgggttccgacactaggccccacacggatctggggactggtttggctacgacctggcggaaggggggaaacctggcctgagaacggaaactgcgggacgatccggcggcgcacttaaatctggctccgctgcttcctcgccccgcccccgctgtcaccttcctctgcttctgcgcagcgattccacaccccactccaccccatcccacccagaccgctcacccgattctgactttga

SEQ ID NO: 117987 - DNA, 59 bp, Homo sapiens
  chr9:110249879-110249938
  hyper
gggcgccaccaccaccgggtggctgccgtcagggctgcctttgctgacgctgatgaccg

SEQ ID NO: 117988 - DNA, 121 bp, Homo sapiens; identical to SEQ ID NO: 6969
  chr9:110250497-110250618
  hyper

SEQ ID NO: 117989 - DNA, 2155 bp, Homo sapiens; identical to SEQ ID NO: 46433
  chr9:110250630-110252785
  hyper

SEQ ID NO: 117990 - DNA, 30 bp, Homo sapiens; identical to SEQ ID NO: 46434
  chr9:110306099-110306129
  hyper

SEQ ID NO: 117991 - DNA, 503 bp, Homo sapiens
  chr9:110399859-110400362
  hyper
tcccgaggtcaaggtcggggtcagggtcggggtccggtcgtacgccctagcactgcctgcggtggggcgcgcacagtcgagcgcggggcctccccgcaggctgcgctgcctgccgggcggcctcgggaactgaccaggccgcgtgtgagcgccgggattcctgatcctgccttaaatatgccggttatttttatctccctacgtcaggcagcgaaggccatcccaccggtggcccaggcggctgctacacaatgtttccctttagtcgggaggggaaatggagggaggccagacttcctgatcacatggtgctgaagtcaatgaaaaaaaattaagggggacccctccctttttcttcaatgcctgatccagattcccccctccccgctcccccgacccaccccctctgggctccgcgcgtcggagggaagcgcagcctcccaggcggagggccagcgaggcaggagagcgcgcgcaaacataaacacgagactgttgcagta

SEQ ID NO: 117992 - DNA, 30 bp, Homo sapiens; identical to SEQ ID NO: 46436
  chr9:110888462-110888492
  hyper

SEQ ID NO: 117993 - DNA, 30 bp, Homo sapiens
  chr9:111696576-111696606
  hyper
ctctgttttgatgtcgaaccccaaagcact

SEQ ID NO: 117994 - DNA, 190 bp, Homo sapiens
  chr9:111696911-111697101
  hyper
cagatcataagccacgcgcgctctccctggctctccgtccccacgtcagaaggcactggacttctgtgttccgtctagccccagggaatggcatttgcaaagacctggtggcctgaaatacttcagggcgcattctggggccggcgattgcagtgcgagctctagggtgttgctcgcagtaagatgagta

SEQ ID NO: 117995 - DNA, 30 bp, Homo sapiens
  chr9:111775042-111775072
  hyper
gaactgacctacggcggggagggacaaagg

SEQ ID NO: 117996 - DNA, 30 bp, Homo sapiens
  chr9:111775549-111775579
  hyper
gagaagaggggccgcgccaggcgccacttt

SEQ ID NO: 117997 - DNA, 30 bp, Homo sapiens
  chr9:111881698-111881728
  hyper
gaggcagtagaggccgtacaggagcgggcc

SEQ ID NO: 117998 - DNA, 30 bp, Homo sapiens; identical to SEQ ID NO: 46437
  chr9:111882374-111882404
  hyper

SEQ ID NO: 117999 - DNA, 80 bp, Homo sapiens; identical to SEQ ID NO: 6971
  chr9:112081253-112081333
  hyper

SEQ ID NO: 118000 - DNA, 1939 bp, Homo sapiens
  chr9:112081563-112083502
  hyper
gggggtgcaaccacctgtgggcgggtgcccgggacgcaggcccaggcgccgccgccctgaggtgccccgccgaccccacgcacggtgcccaagggagaaagtcaggcgcgcctggccccccgggcaccccggggtcgactcccagcgccccagcaaagggctctgccggtgcaaggcaggcaggtctgagacagccgactctagagttagctcccaagtcaccctacccgctgcgaggaggctgcggggcagatggggctcagggaatgggaatggggtgtatccagaagggatcagcagagagcagaaatggtctaacccccgcctcccaaacttggggcgcctgccgagcagcaagcgaggggatctcctctctgctgtctcatcaaggcctgatggcgagtttgaggggggacaagctggacaccccaggacggcctcacattgatttgagattttctacccaataacccagtatcaggaagacccctgctggaagctagggacggaaggggagcgccggccacccacaccagggggggcggggtctcgggacttggggaccgtgtgtactggggagggggcgaggccccaaggactaggtgggcgccagagaaatcgcaaccccgcggcgcaatgtgccaaggagggggcacgggccaaaggtggggccccggaagagaccgggacggggtggcccaagaagaaaaagggttgaggagtgctcggagaagaggatgggggaggggatccccagggaggtgcaagggaagcgcccccgatgcaagcactgggggagggggagctgcctccaggggcgcgaggtgccagtgccccagactggccccgtcactcaccggcaggtccacgctcacttcggtcccgtcgagcaggaagacgcggcagtagagggtggccttggcggcgccggcggcggagatgtgcacggccgcgccgccggtgagcaggggcccgccgcccgccgggaacacgctgcccccgggcgcggcgggcagcgccgaggaggaggcggcggcggccgggcccccccgtggccccccatcgcgctcgtcccccagcccggcggccccgcgccccgccgcgccccgcgcgtagcgctgcatggagcggcggccaaaggtccggcgcaggaaccgcagcatcctggctgggggcgccccctgcctccgccccctgcgctgccgctgccgctgccgctgccgctgcgccgccgcccgggagcgtcccgcgacgccgtcagtgccctcggccgcccgcgccgcctctcgcgggctacggcccggggcaagcccgcgccgaggccgaggccgcgctctagccgcctgcggggcgcgccggcccggccagcgccggctgcgagtggccgcaggcgggagggcgcgctcggggccgtcccgccgccgccgccgccgcgcgctctcccgggccggcggcctgcgcgggctgccgaggggctgctccggacgggcggctgcgggctgccagggggctgccgggggcgcgggaggcgggctgcgggctgctcccgcgccgcgcgccggccgagggccagccggagcagggcgcctgcgtggtcctggcgcgctcgctcccactcgccgcgccgcgcccggggcccgaggaggccccgccgagcgcccgctcccaaggcgccttttcctgcgcccgcagcccccgcctcccacctgggaggctgcacctccagccgccgccgccgccgccgccgccgctgccgccgggactgcagcacgccctcctccctcggggctgcgccgggtaattgcaagccgggtctgtgctgccccctgccggcccgagcgccccctgctgctgtaggtgtgctcacgtgtgtacacgtaggtgagcacacacgtgtttccggcgcccagagccctggaggcgccgagtgcccctttgc

SEQ ID NO: 118001 - DNA, 859 bp, Homo sapiens
  chr9:112259824-112260683
  hyper
gaatttttaaggcaaccgcaacttctcagtaagtttaggtagctgaaaatgggaatttcgggggggctgggcactctcacatacactcccccatctgcagctgtctcaccgcaggtacctgataaatcattccatatcgtccgcggaacggggaggatttattggctctggagtttcgtgccaggcccaggaaatgccatctttgaaagccgagaggcggattcgccctgggagccgagcgctggcagccgctctcggctagctccccgcgggctgtgtgccccctcggagccccgagccggggtcgcggcggcacggggtcctccggaggtgccggacgcacgggctccgcgggttgcgcccgcccctgcccggctggagcgcacgcccacgctccggcgccgcgtcccggccgccagcccgccccggccgagccccacccggcgccccgcccgcgccctcccgccccggccccgccaggtgagcgcagcggggcgccccctccccgccccgacgtggtgcggggatcccggtgcagccgcacccgccagcccgcccgcgcgtccgccgcgcgccccagggacgggtgggggcggggtggcgccgagcgcgaccccggcccccggcagccccgcaccctgcccccggcccgctggggtcgcacgggcccgtacctgcagcatccgggggcgcggagcgcccaggtaggtcgcgcgtgcgggcggcgcggaagctcgctcgcggcgcgacctggccgccgtctgagcatgcccagtgccgcccgcgggcggttcccgccggccgggctggccgcgacgggcccgcgcgccgggcggggggcgggcgtccgggctggcct

SEQ ID NO: 118002 - DNA, 293 bp, Homo sapiens
  chr9:112262007-112262300
  hyper
tttcggtccttgtcccggagtcgcacgtcccgggatagcgccgctgcagcgggtgccgcccgtgcatcgcgtcggggggatttccgacggagcccggagtccaggggcaggaccgcccgcgccccgcccggcccggcccggcctcgagtcgccagcaaaacctggagccgcggcgcccgctcagcaccactcggacgggcggggagcgcactgggcatgctcggagccgggcggggccggagcccccggaaggaggagccccctggaggggcaggcgacgccccccgcagagc

SEQ ID NO: 118003 - DNA, 926 bp, Homo sapiens; identical to SEQ ID NO: 46443
  chr9:112402425-112403351
  hyper

SEQ ID NO: 118004 - DNA, 668 bp, Homo sapiens
  chr9:112542126-112542794
  hyper
ccccacgtaacagcacgtgctcgggtcccacattcggtcagacgcccctctccactggcatctgcccggtggaggcgccactgcgctctgcctccgccccagcaagcgcgtgtccacgcgggcgcgccacgccagccgtgcgccccagcggctcgccgtgcgcccgcgccccaggtgcccactggctcgcgcgccctccgtctgcgccttggagacccgcggcggcgatcgctcggagccgccttggaccgcggcctcgggtccatcacactccaggggcggagcgaggcaccgagacgtcagggcggagaactagcgccgggctagcgcgccctcccggcggctgccggcgtcccacgtcctcggctggcgcggccggcggcggcggcgaccgggagatgcagtgagcggcggcgctggggcgcagccaggcggccgggagggcgggggccagaggctgagcccgggcgagcccgccgtgcgcacagctctgcccgccgcccctggagcggatccccagccgtccctgggcgttctcccgggttctagcaaagccccccggggtgcccatcagtttccttgggtgactacagcgtgtgttttttctttcctctttcccctgcctgtgtgcccttctccaggatggcagaggcggaattgcacaagga

SEQ ID NO: 118005 - DNA, 305 bp, Homo sapiens
  chr9:113017455-113017760
  hyper
tcagggcacccgaggcgggcgaggacccgccctcctctgcttcccgcaggtagggaggggtaatcgcagggtaggcgctggcgaggggtcttctaccgttcgagcagtatcaatttcctccactcacttttctgacgctgcatttaacaaatatttctggagtggctacattggactagacactgcgcgttaggctctgggtttcccagtctacaaggttttaggcttgcaataactttcaaacatgggaaggctgtttcgccttgggcatttttaagaggacaaaacaacgatcgggataccga

SEQ ID NO: 118006 - DNA, 102 bp, Homo sapiens
  chr9:113017834-113017936
  hyper
gggtgaatcatggacgggcagggcagccgaggcccccgggcccaaccttggggactcagtcattccaaagccactgctgccggaaacgcgccctgcgccaca

SEQ ID NO: 118007 - DNA, 30 bp, Homo sapiens; identical to SEQ ID NO: 46446
  chr9:113018381-113018411
  hyper

SEQ ID NO: 118008 - DNA, 30 bp, Homo sapiens; identical to SEQ ID NO: 46447
  chr9:113018779-113018809
  hyper

SEQ ID NO: 118009 - DNA, 30 bp, Homo sapiens; identical to SEQ ID NO: 46448
  chr9:113019239-113019269
  hyper

SEQ ID NO: 118010 - DNA, 492 bp, Homo sapiens; identical to SEQ ID NO: 6978
  chr9:113341129-113341621
  hyper

SEQ ID NO: 118011 - DNA, 168 bp, Homo sapiens; identical to SEQ ID NO: 6979
  chr9:113341679-113341847
  hyper

SEQ ID NO: 118012 - DNA, 116 bp, Homo sapiens
  chr9:113341926-113342042
  hyper
cggggcagcggccaagagcctcagcgccctttcatctgacactggggacagacacaatccagactcctcagcagctcgggaactccggagggaacggcgcgcgctctctacccctc

SEQ ID NO: 118013 - DNA, 42 bp, Homo sapiens
  chr9:113342299-113342341
  hyper
cattcccgcagcaagcgcaccagcgccgaagccctgattgat

SEQ ID NO: 118014 - DNA, 1631 bp, Homo sapiens
  chr9:113799863-113801494
  hyper
agcacgtttgttaggcggctggacagaaacttagttaaaagtcctcagcccggtggtgggggacaaccgagtcgtcagtgggaagcgagaggtgcggagccccaggggcgcagggacccctcggaggtgcaagtccagcgggacgaggttttgggagaatttcgagggcccctcgcaagccctcccgcgcacccaccccgacccaggtaaccggaggccacctacgtgtcactgggcgggccccggggcgcactgacctggcgcgggacaggagggccggcggcccgggcggctgcggcaacttccctccaggggctcggtccgccgctgggtgcgggaggccaggggagcctcgcctcctgcaggccggctcgcaagaacgcacggccacccacccgcgccgcggcccacagcgcgcacccacactctcactggcactcgcacgcgcgcccccaaccacaaagcccgtccgcggcgggacagtgtgagcccagcgcgccgtgtggcgggccgagcagtcgccgcggcctctggcttcgcgcccagggggcgccgtccccacacgccgcgccggcccccttacctgcgctcgctgccgccgcgcgtccctctcctgccgcccccgggctggcttcaggccgcgcgcccagtcccggcggcccccgccccaccgccagccgagcccggccctccgcccgcccctcggcagtcgcccagagcggggccgccccctgcgcccaccccgccggggtcccgtgctcggccgggcggcggggagggctccgcggctccgggccctggccgccccagatccggcccgcgctccgcagcggggctggagacggagtcgccactcagggagcgtcagccgccagtcggcccctactgcccggctttggcgcgctggcaggaggagggggcgcagagggagggccagaggagcagcgccgacgccagcctcctctcttcctccgccttccttcttttctgcttgttccacgtagcacaagtcagcaacacccgaacccccagagtccgccctccccgctcccaagctggaccccttacctggtgtggcgcccccagcgcccctgacctctgcgccccctcctccattcattggctcgacagcccacggtggtggcagggccggggctggggggtggccttagcctcccattcattatctcagcagcctcccccgccccgcccccgagtcgacacacccgcagcgggagacccgtggccgccagctcgggtcccacccccgcccctcctgcgcttaccccagcgccggacagctggcaggactccggtggacgccccggcacggggcattttcacgttgtcgctctcctcttcccactcgaaaagctctggaaaacatcgcggggcccgcaaaaccccggaaatgtggcctctctttcgtggctcactttctaaactttccagaaggcgcaaagtttctcccagcgccgccctgcactggaggctgcgaagaacgcagaagcggctttgctgctaggaaggtgcatacgtttctagttctgatttttcacttcactggatctgtaaacgaaagcaagtgtgtctgctcccctagttctccatatccacgattataaatttct

SEQ ID NO: 118015 - DNA, 30 bp, Homo sapiens; identical to SEQ ID NO: 46455
  chr9:114245038-114245068
  hyper

SEQ ID NO: 118016 - DNA, 30 bp, Homo sapiens
  chr9:114246143-114246173
  hyper
gctcgcccaactcacgccggttttatattt

SEQ ID NO: 118017 - DNA, 270 bp, Homo sapiens; identical to SEQ ID NO: 6983
  chr9:114360504-114360774
  hyper

SEQ ID NO: 118018 - DNA, 1021 bp, Homo sapiens
  chr9:114361073-114362094
  hyper
cctacgtatcatttttacggtgagacatttgcagtttactctgttatttcgaaatacacattattggctctagtcactctgctgtgcaacagatctcagaacctactcctctcgtctctgaacttcgtaccctttggccaacaagcccccattcccccccgaacccgctcccagcctctggcaaccatcattctagtcgttatttctatgagttcaacttctttagagttcacacatctttgtccctttccccaaaaaagcaaccgctgggcttccaaactcgctacaagtccagaagccctcctggaaagggtctggccgcagaggggccaggtcccgggaaagtctcgcccgcccgaggagggggcctggcgcggcgcccggcctttgcccgctcgccctttgctcccaccctcgcctcccgccgcccgccgcccgcttgcccattcccgaatccccaccccgatctttcttcttctaccctcccccagttgtgcagtccagcaagttccctggccagccccctcccgggtgcaggaagctaccgggtgtcccgggttgtaaccaagctttcctattccctccggcgcgcggctccaagctctccaaggaactgcgggggcgggaggcgtcgggacgtcggctcccaagatcctccgagtgcaagacccagcggtcatttcgacgtaaggggaggaggtctaagagcaaacctcctccactggggcgtctagaaacttggcaggaagaaagcaagggggttagaggagggagaaaagggaaggaaagaaagcaggaggtctacttacaggagcccgaaggttccactgcctggggaaggcggctgggactgcgcagccgggcgcccggggtccgacttatgacaggtcccaagagagggtggggccaccccagggcggggctgcttctttagggtgagagcccggccccgaaagggtcacaggaggaaaaccagggtccgggaaatctgagtgcgtttgtgtgtgtgtgtgcgcgtatc

SEQ ID NO: 118019 - DNA, 30 bp, Homo sapiens
  chr9:114362153-114362183
  hyper
gcgcgcccgcgcgcccgtgtgtgtgcgtgt

SEQ ID NO: 118020 - DNA, 30 bp, Homo sapiens
  chr9:114659578-114659608
  hyper
ggctatcatctacacgtgagtgagggaccg

SEQ ID NO: 118021 - DNA, 30 bp, Homo sapiens
  chr9:114937006-114937036
  hyper
catgcaaaagccaccgcagagccggaagcg

SEQ ID NO: 118022 - DNA, 31 bp, Homo sapiens; identical to SEQ ID NO: 6985
  chr9:114937351-114937382
  hyper

SEQ ID NO: 118023 - DNA, 193 bp, Homo sapiens
  chr9:114937754-114937947
  hyper
ctcgccgctcacattcgcaaagggggacagacactcatcggataatgacacagctggacgcagagccccggagagtgctggggaggaaatgttgcggaggattcaagccactcgagggctcagggaggcacccccggggagaggggtgaggggagcaaggggcggaaatcttccaggacgtgaaagggagctg

SEQ ID NO: 118024 - DNA, 44 bp, Homo sapiens
  chr9:115095505-115095549
  hyper
taggaagcagcggacgtgtccggggcgccgcgtggggaaaggag

SEQ ID NO: 118025 - DNA, 30 bp, Homo sapiens
  chr9:115096466-115096496
  hyper
aggtgtggctgggacgatgaatgaggtgaa

SEQ ID NO: 118026 - DNA, 30 bp, Homo sapiens
  chr9:115141840-115141870
  hyper
cttgggtccagattcggcgggagagtggaa

SEQ ID NO: 118027 - DNA, 30 bp, Homo sapiens; identical to SEQ ID NO: 6986
  chr9:115142770-115142800
  hyper

SEQ ID NO: 118028 - DNA, 30 bp, Homo sapiens
  chr9:115480309-115480339
  hyper
gctcttaaagggggcgcgaccacttaggca

SEQ ID NO: 118029 - DNA, 35 bp, Homo sapiens
  chr9:115480610-115480645
  hyper
ctgccaggcaggggcgggacggagaacacctgggt

SEQ ID NO: 118030 - DNA, 30 bp, Homo sapiens; identical to SEQ ID NO: 46462
  chr9:115513510-115513540
  hyper

SEQ ID NO: 118031 - DNA, 30 bp, Homo sapiens
  chr9:115513741-115513771
  hyper
ctcggatggggttccgagttcctccaggtg

SEQ ID NO: 118032 - DNA, 69 bp, Homo sapiens; identical to SEQ ID NO: 46463
  chr9:115607126-115607195
  hyper

SEQ ID NO: 118033 - DNA, 533 bp, Homo sapiens
  chr9:115652920-115653453
  hyper
ggcaggtggcccctccgcgggcaggtgacctcggggctcatgtgacctctctgatggggatcgaagggctttctggctgcagtgacaaggatatgctcccaaattcggctgctacggctgctcaggtttcagtcccggagcgcgagtgtgctccgtgcgccgggagcgcgagtgtgctccgtgcgccgggagcgcgccggccagtggcgagcagagccagggcacgcagcgcctgtgacagcagcccgcccagcagccgagtgacctcccgagtgactcctcctcaggccagaaaaggccgcgctccaccctgccctcgccacctcaggcagagtaggactggcgacagtccagggaagccaggcgcgggggagcgcaccgcgagtgctggctcctggcgccagcacccccggggccgacgggtcacgctgctcctgtgagcgcggccgcctgacggggccgaatttccccacagccaggcgtgcgtgcccggacctcccgcggatctctgcggaccccccaccaccggggca

SEQ ID NO: 118034 - DNA, 297 bp, Homo sapiens
  chr9:115774338-115774635
  hyper
ctctcccgacccgcccgaatggttgtgtttgaaggggacctctctccccacctcccacacgagtgcaagggtcgggaaagaaaaagctcacctgctccaccgaaaaataaagagcacggtcgggcgatgtggttcccaagccaggaagtacgcctgcgcacgcggccgccaggaactacatttcccagcatcttctgcaaagcgccctcttgagctgcgtctttcaccggtgtctttctaatgctttgcgggttgcgaacgtgcgtcgtttccatcgttgtttacatgaaaagaaga

SEQ ID NO: 118035 - DNA, 569 bp, Homo sapiens
  chr9:115818680-115819249
  hyper
cccacagataactcagaacaccgacctcccaaaagaccatctagcatcgattccaccaattcccaaatcacctatcgtcacagactactccaatcactgccccgcaagtacaccatctctgaccgccaaaacaccctgtctcatcacagctctcaccgcggcgctggcctcgggctcggacacagccatctccagtggtcgcccggcctctttggtcgtttccgcacttctcctccggtccacggtctctggctttgtcagaatctggacgccgctggagaccgacatggcggctacccggagggcggccttagcgggtccggcagccgcgatggcggcgcccttcggtaatagcgcacgggcgcggccatcttggcaaacactcagccgtacagcggaagtgcggggacttctgggacaattagatcgggaggtggaagctggcgagggcgttacttgcaggatgcaggagtgatgcgatcagagccagccggaaccgagttccgttacgcactacaggactgacctgggcctgacaacccactgccggagttcggatcgcatcactg

SEQ ID NO: 118036 - DNA, 30 bp, Homo sapiens
  chr9:115873916-115873946
  hyper
atcgctgacattctccgtcccttgctctct

SEQ ID NO: 118037 - DNA, 216 bp, Homo sapiens
  chr9:116102324-116102540
  hyper
tttttatgtgtatgtggaaagcggggagaagagtccccgaagatgggaacctagcgccacccagcccaaggttggccctcataaccgctctccgcttcgaccaaagggcgagggttgcccgctcctagtctgccgctatgcccctttctcccacctcaggctcagtacccaccggtgggctgcggggctggagctggggccggcgggaacgcggag

SEQ ID NO: 118038 - DNA, 402 bp, Homo sapiens; identical to SEQ ID NO: 46467
  chr9:116111660-116112062
  hyper

SEQ ID NO: 118039 - DNA, 138 bp, Homo sapiens
  chr9:116163724-116163862
  hyper
ctggagggcccgcccgtccccgctccgggccctgcgcttgtgcagcgaactgcaggagggaggccacgagggggcgcaggaaccgcttgggagggtccctgggtgtgagccggcctcggaggcggttacagcccaggt

SEQ ID NO: 118040 - DNA, 11 bp, Homo sapiens
  chr9:116173059-116173070
  hyper
cgttaatctca

SEQ ID NO: 118041 - DNA, 1 bp, Homo sapiens
  chr9:116173088-116173089
  hyper
c

SEQ ID NO: 118042 - DNA, 36 bp, Homo sapiens; identical to SEQ ID NO: 46469
  chr9:116450195-116450231
  hyper

SEQ ID NO: 118043 - DNA, 98 bp, Homo sapiens; identical to SEQ ID NO: 46470
  chr9:116450327-116450425
  hyper

SEQ ID NO: 118044 - DNA, 243 bp, Homo sapiens
  chr9:116638745-116638988
  hyper
ggcccggggcgctgcgccacttcattgcaagatttgcaaaatgcaaagtgcctgggcacgtttgcgggctttttgtgggcgcaatcgggagggtcggggtccggagagcacccccccgggcgctgcggggtgcgaggagggtgggggtgacgagggggtcttttggggcccccacccagcgccccctccggccccgggctcggaccggagcccagaaaacaaagcggcgagagaacagagcag

SEQ ID NO: 118045 - DNA, 55 bp, Homo sapiens; identical to SEQ ID NO: 6991
  chr9:116639070-116639125
  hyper

SEQ ID NO: 118046 - DNA, 103 bp, Homo sapiens; identical to SEQ ID NO: 46473
  chr9:116756509-116756612
  hyper

SEQ ID NO: 118047 - DNA, 95 bp, Homo sapiens; identical to SEQ ID NO: 6992
  chr9:116860420-116860515
  hyper

SEQ ID NO: 118048 - DNA, 30 bp, Homo sapiens; identical to SEQ ID NO: 46475
  chr9:116870350-116870380
  hyper

SEQ ID NO: 118049 - DNA, 935 bp, Homo sapiens
  chr9:116916213-116917148
  hyper
cctacctcccctctctcggcttgggacttttcctaaagtttgttgaaaccagacaccttgctcgaccgagcccgcgtgcagccagggtttaaaaggccgccttcagcgccccctccccgcccccagcggagacttcaaaaggcccggcgggcgccgccgccccagcacctatgagccgcccccagctctcggagcccgcgccggagcccgtggacgcagagctgccgaagttcgagcgcaggcggaccgggtcggcggcgcagtcccgcgcgcccatgcccctcccggtgccgctgcgctccgcgcgcccgcgccccgtttagggaaggggacctcgccccccgcccccgcgcccacggctgcggggacccatgaatacaaatgccgttaggcgccggaggaaggaccgaccggccagcctcgcacgtagggacccagtaagtgcttgggggctcctggagcggtgcgaagtgttatatgcctgtgtgtgcgcgcgcctaaaggtgtgcgcgtatggggaggtgggtacacgcgtgaggagtgaatgcgtgtgtgcacatgtgcggtgggcactctcggagaactgtgtgcaagtgagggtgtgcgcgcgtgtgtccacccggggtgtgtacatgtgtgggggcgatatggccaggatagcgtgcatttgtgcctgtgtaagcatccgtgtgcatgcttctgcgagtgtagagtatcagcgtgcgcctgagcccagatatctgaggatgcgtttcgtgtgaacctaggaagggtgcgtggctgtcccagaatgggaccgtgtgtgagcgtgtgtctgagtttggggaaagggtggatacgtgtgggagtgtgtgtgtgcaccggtgaataagtgtaactttgctcgtgaacgagtggcaagaggtggtagaggcggagggagctgtggtcccagg

SEQ ID NO: 118050 - DNA, 451 bp, Homo sapiens
  chr9:116918462-116918913
  hyper
cgggcgagagttggcgaacgctgcccgccctgccgcgcctggcccggctgcccgatcccgttggggcgggggcagagccagcccgggggtcgggggtgggggtgggtggtggcgcctggagcggccggcggggtgcggaggggggctttttggatgcttgggggaggaggggggtctccgtttggggccgtctcggtgtgttccggtgtctcagtgtctgcaggtcccaagcctgtacgtctccgtttctatctgttcttgtgaaattgtccgcaagtttctaggtcaccaggtctcgggttctgctcctgtctccgtgtctgtgtggctctgcacgtccccgcgtttctggaaatctccgcgtgtttgtgttagtcggcctgggtctgtgtgtctgtgtttcctgcttctcggttcctgtccctttcacgtgtgtaagagagaaaaagtg

SEQ ID NO: 118051 - DNA, 31 bp, Homo sapiens; identical to SEQ ID NO: 6994
  chr9:117160507-117160538
  hyper

SEQ ID NO: 118052 - DNA, 30 bp, Homo sapiens; identical to SEQ ID NO: 46479
  chr9:117160993-117161023
  hyper

SEQ ID NO: 118053 - DNA, 316 bp, Homo sapiens
  chr9:117267161-117267477
  hyper
ctggatccccgggagcgcggagacgacggctggagcctgggtttggggagcacgggtacagtggctggatcctagggggtcgcggagaccgctgctagagtcccggaggcgcgaagacggcgggggtcgcgaacctggaatccgggggacgcggagacgtcggcgggttcctgagagacacaagagttggctgctggagcccggaggtggcggagactgctgctggagtccggggggcgcggggtcagcagctacattctggagggcacggagacgacgggtggctggagtttgggggcgccgcaaagctgacctg

SEQ ID NO: 118054 - DNA, 158 bp, Homo sapiens; identical to SEQ ID NO: 46481
  chr9:117268029-117268187
  hyper

SEQ ID NO: 118055 - DNA, 30 bp, Homo sapiens
  chr9:117349978-117350008
  hyper
acgctgtgcggtcacgtgacaacgggggcg

SEQ ID NO: 118056 - DNA, 30 bp, Homo sapiens
  chr9:117350219-117350249
  hyper
tgcccggcgtggcgcgagtcgaagaaagac

SEQ ID NO: 118057 - DNA, 30 bp, Homo sapiens
  chr9:117501314-117501344
  hyper
ggcgatatgccccacgtgttggtcctgccc

SEQ ID NO: 118058 - DNA, 256 bp, Homo sapiens
  chr9:117880315-117880571
  hyper
tgcggcggttcccacgtgcgcgttcccccgagttccccagcagcgctgcctttgtgcccacggaggcgggggcgtgtatctgcgcgcgggagaggcgggtgacagtaggcaggctgtggccggtgcagccaactttggctggcttatatagcgagctccttcctctgtaatgggacgcctcgcctccagacatcctttcccactttttcagttggcgaattaaaggaacagccctcccagcggaacagggttagct

SEQ ID NO: 118059 - DNA, 826 bp, Homo sapiens
  chr9:118916362-118917188
  hyper
cgaagaaagtcgaggcgccgaggctcccaaagctggcagctccgggtggcggtgcaggggcgaagggggggcggggggaaccgtcggacatgcggctctggagttgggtgctgcacctggggctgctgagcgccgcgctgggctgcgggctggccgagcgtccccgccgggcccggagagacccgcgggccggccgacccccgcgccccgccgccggcccggccacctgcgccacccgggcggcccgcggccgccgcgcctcgccgccgccgccgccgccgccgggcggtgcctgggaagccgtgcgcgtcccccggcggcggcagcagcgggaggcgaggggcgccaccgaggagccgagcccgccgagccgggcgctctatttcagcgggcgaggcgagcagctgcgcctccgggccgacctcgagctgccccgggacgcgttcacgctgcaagtgtggctgcgagcggaggggggccagaggtctccggcagtgatcacaggtaggtgagggcgcctcggcgggcgctgcaccgtccctgcggccccagaggctcgcgggtgtctgggcgcgggtggcgggcgggtcgggggcttgcgggcgtgtctgtgcgagagctgccccgcgagcggcgcagagacatccgggcgagctgagagcctcactttgctccatcggtggaatgggcacactcggaaggcgtagctgctccatccctgggaggaacctggggagccctcctggcggccccgcggaccctcggccagtgagggctggttcccggagcctagggcacgtaacccgtgctccgaatggtcagatgc

SEQ ID NO: 118060 - DNA, 30 bp, Homo sapiens; identical to SEQ ID NO: 46485
  chr9:118917635-118917665
  hyper

SEQ ID NO: 118061 - DNA, 30 bp, Homo sapiens; identical to SEQ ID NO: 6997
  chr9:118918145-118918175
  hyper

SEQ ID NO: 118062 - DNA, 30 bp, Homo sapiens
  chr9:118919191-118919221
  hyper
gaaggctcaccctctcgcggcgacctcagg

SEQ ID NO: 118063 - DNA, 2314 bp, Homo sapiens
  chr9:120175189-120177503
  hyper
agccccacaggtgcacgtgggaagagctactggtttgtgtgtgtctgtgtgtgtgtgcttggtgcgtcgcaccccagaagcgccgccgcggggagtccccgaggaacctgcaggacgctccgctgcctctcctcccggaacgctcggcacgctcaggttacagcctgcgagggtgggtacaggggctcgacccccgaggttcaagctcagagcgggagaaccactggcactcgctcaaatccccagaggtggtagcatgaaaggatggggagtgggtcacaaaaatacttttaacaatatcagggctaccaggagagtggagcgtagtccgctgattattctgtgggtcttttcaggcgagcaaggagttaacctcggaagttcagggatcgtaaaggttctcacctggaaggcccctcacctgcggtgcccgaggcggatcccgccgaggaaaagacccggggaagaagagctccgggtctgggcgagcccctggcgcctcacgggcgctgttgttggccagactccgacaaccaataaggccccgcgcccccaagaggggaggggagagcgagcaagcagcgagcgcgggagagctaaggggaacaacatttttgtaaacgctctccgagataattaagctatcaattacccgggtgggaaatcagctgcgcttcccacagctccactgaagggccgactcctccgggattcgcgcagggaaccagcaggcagcaagctgctggcgaacttttctgattaacttttccgttggagccccccacccacacccatctcctctcctctcctttttcttgcctttaagtaattattattagcccagggagtgagctgcaaggacaaaccggctctctgcctggaggtgggtagaaagggaaggcggtaacgggggtagagggaggctctaaacgtggagacctcggagtcggaatcccagttctcagcaaccactcaagtctctccagccctatttcacagatggccagaactgaggctcagagaagggaagcgacttggccaaggtcactcagcccatgcggaagccacgcttttgcgggttgagcgattccacacggaactactccattcctactctcatgaaaatccatctggaagggcagaacccgcaactccgaggcgagagcgagggggcggtgacggcgggtggccagtgacggtacccggagaagtgggaggctcgacctgaaactggcttaggatctgggatgctccggcccctagccagagcaccttcagtgaatggggtctccggcttccgggatggatcaagcagagctccaggtcgggactgagaggcagaggggcaggttcccactgcgggagggttggcacgcccccaggctcccgccgcgcgctctccaggacctcctcccacatgctcgtttccaaccacctgtgcgacctctgggcccctcctctaccctctgccaaccccactcggggcagccccgggcagggatccccagggcgcccccacccgtccggcatgacgcaggggctcggggttccttgggatctagcgcgtgccggcgcccagccttacccagggtgaagaagggcagctcggtgttgtccaggtcgtcctgcaccgcgatgcgccccggcagctcgttacgcacaaagagcaggaggcgcgactcggcggcggtgccggcagagccaggagagcccggggacgcggcggcggcggcggctccggccccggtcccagccccggccccggcgcgggcgccgctccagccgatgtcgctctcccgcagggcgggcagtgtggacaccgtgacggtcttcagccggcacgggctgtcgggctcccgcgaggcagcggcggtggcgccggccagcagcggcggcggcggcagcaggagcaggaacagcagcagcagcggcagcagtggcggcggccccgggtggaagcagagcctcggccgcccccggagccccgagccggggccggggctgagccgggcgccggcggcggccatggcgggaggggctgcggtgctgcgggcggcggcggcggtggcggcggtggcgaaggaggaagaggaggcagctgcggagacggcggacgccgaagcgaaccaggacgcccgagctaaggagcggagagagccgctcgccagcagcccccagctccgggctccgcctcccgatcggccctggaccgcccccccgcgccgcctcccggggcccagccgcccgtccccgatctccggctccccccgcagaccccgagcgtttcggaggctccgcccggcctcgtgcaagt

SEQ ID NO: 118064 - DNA, 53 bp, Homo sapiens; identical to SEQ ID NO: 46489
  chr9:120177963-120178016
  hyper

SEQ ID NO: 118065 - DNA, 162 bp, Homo sapiens
  chr9:120249907-120250069
  hyper
cacattcccagccatcgtccttggcccggggagcttgggtggggtgtgatgactgtgctgccccagcagagggcagtgttgccatgcctgccaaggcggagggctacaggaaacgggagggagcctgggctacgcaggcctggtggccggtgccgcgtccct

SEQ ID NO: 118066 - DNA, 628 bp, Homo sapiens
  chr9:122130810-122131438
  hyper
gtttcccggtgactacgtgatcctatagtaagggtcccattccgtgtaagctggagagacctaattaaaaagacacacgagggcacacatacaaacacatacgtacaaacatgcacacacacatcgcgccgtaagtaggttataggacctctctctcttcacccctcccttacacacacggacacacacacacaccacgaacacacgcatcaaacgcaaacgacgccgcacacgcaaacacactagcaccacatcaagttcccaccatggtgcacacgtcgggagcgcgcggggacacacacgccactcactcaaacccgcaattagccctttgagccccaggcacaggaaccccctccctagaactggagaagacttggaggcggcggggcggccaggtgaagagcggacaagggtgccggtagggggaggggcagaggagcgcggggacgccccgaatgcggcccggggccgggtccaagggcagcggggctgcggggcgctgcacccggcgccgccttacctggagtcaatgtccgtctttggcggagagctgcgggaggacgctttttattcggctcggtgggaacttgggagagccctgcgtgcagctcgcattccgggcacg

SEQ ID NO: 118067 - DNA, 529 bp, Homo sapiens
  chr9:122131496-122132025
  hyper
cgtaaagtccccttcgctggtcccgaggacaggcatgaatcccggctccggaaggcggtcactactccctctgcctcccggctctctcgctctcgctctcgctgttgctcgctcgctctctccctctctcgcgggttcgctcgcctgcgctctcctcctccccgcgcgccagatcagtttgcagccgtggggtccgggagcgaggcggctggcgaatggagagggaagtccaagtgcgccgcggtctccgggcggggagcggcggaggccgggctacgccgggggagggacttagccggcgacggccgaaaatgaatgggggagcggcggccggggggcggggagggaggagctgaacgccggggttgcttccgaggagtgttttgtacatctttaggcggaggaggaggagaagcgagaggaggagagacgggaggccgcctcgagggaagggcggcccgggtgggctggggctgagccgtagggagtttcgtgggtctggggcgtgtagggtgttgtgtctatgcgc

SEQ ID NO: 118068 - DNA, 152 bp, Homo sapiens
  chr9:122132051-122132203
  hyper
cgcgcaaacccggaatcctggtgcccttaagcgtgactgtactgtgtgtgtcgcgagtacctgagtgtttctggggcggcaggtgtttccacggccgcgtggatccatcgagtgtgggttttgtctcgggagttgcccgtgtgggtccgttt

SEQ ID NO: 118069 - DNA, 406 bp, Homo sapiens
  chr9:122318421-122318827
  hyper
cggctgtggccaacacgcgtctccaggcccacaggctctgaggcggaaaccacagttccaggtccccaggctccagccgccaatgcggctaccgaccagcagagggcagctgcgggaagccgtccaaaggcggcctccacccccattagtgccaattaagccgcgagatgcaagaggcgagcgcgtggtgaaagaaaacacatctacttctgggttgagctaggctgggtgatctgctgggagggacgttgacctgcttccaaaaagccggctggatggtgccgtggtggctgcctgcaaaggaacaccggcctatgggaaccagaccctggggcttcccgcgagcttctcttcctccagccagcaaaacaggaaaagcctggcccagggacggagggagatgttg

SEQ ID NO: 118070 - DNA, 30 bp, Homo sapiens
  chr9:123342122-123342152
  hyper
aggccgcgttagaacgaaatcccaccagct

SEQ ID NO: 118071 - DNA, 30 bp, Homo sapiens
  chr9:123555878-123555908
  hyper
acggaggttcctttcgtaccgtacatccag

SEQ ID NO: 118072 - DNA, 30 bp, Homo sapiens; identical to SEQ ID NO: 7000
  chr9:123639920-123639950
  hyper

SEQ ID NO: 118073 - DNA, 31 bp, Homo sapiens
  chr9:123690902-123690933
  hyper
gtccccatctcccactcgtcctttggggcgc

SEQ ID NO: 118074 - DNA, 30 bp, Homo sapiens; identical to SEQ ID NO: 46494
  chr9:123698950-123698980
  hyper

SEQ ID NO: 118075 - DNA, 30 bp, Homo sapiens; identical to SEQ ID NO: 46495
  chr9:123836688-123836718
  hyper

SEQ ID NO: 118076 - DNA, 335 bp, Homo sapiens; identical to SEQ ID NO: 46496
  chr9:123883881-123884216
  hyper

SEQ ID NO: 118077 - DNA, 30 bp, Homo sapiens
  chr9:123963439-123963469
  hyper
tactcagagccagacgcggcctacgggacg

SEQ ID NO: 118078 - DNA, 30 bp, Homo sapiens; identical to SEQ ID NO: 46497
  chr9:124030729-124030759
  hyper

SEQ ID NO: 118079 - DNA, 31 bp, Homo sapiens; identical to SEQ ID NO: 7001
  chr9:124041370-124041401
  hyper

SEQ ID NO: 118080 - DNA, 193 bp, Homo sapiens
  chr9:124062288-124062481
  hyper
tgcccggggggccccggggctcccggagtaactctctattgtaagttcttgcagatacagcgctaggaaaaggggagtaattcaggtctagaatggaaaaactgttttgttgctttgtaagtatctcttgctgcttccggggctctggctcgcagacgagggtgggagcctcggggccctggctgttccttcc

SEQ ID NO: 118081 - DNA, 1033 bp, Homo sapiens
  chr9:124131787-124132820
  hyper
gcgaggaacaaaagccgggaaggagagttctccaaaacgcagaggaaagcggagggggaaaaatggggcagaaagtggagctagaaagagaggtaagaagaaagccagagagacttcttccttctgcaaatcggtctaagtttcgggaggtgggattgggggaggagggggttcaccctggggccaggccagggctgggtggaggaggcggccttcgagagagtgagtcgggaaagaaggggagtgggcaaagggtgagatgtggggtcccggtccccgcctcgctggctgccagttccctctgcgtttcctagtccgcgtgcgtgacacgagatagtgcagccctggcatggggcttggcatctggcggccgcgagataaccagggcccgtgcgatgggaaacgtgccgttggcagcccgccacccctccatcgtgacctcagtctgccaaacagggttcgtgatgctcagtttactagggaggagccgcggctttgagatctcgcccagcccgaagcagcggagactggccaggagcccggctgtcagacctcggagcgcacgctgcgggcgggggctcggtccacgggggagggtcaggggacgcgggactcacccttgaaggagtcggggagccgctgggcttcggagtcccgtgtgtgccgcttctcggccatgctgcccgagacgcagtcgcactcccccgtcctcgttgccaaacccggagccgccgggaatgccctgaggagccagaggcacaagacccagattgccgccccgcccccaatcgaggtcccgccctcgtgagagttggccaatcaacgcccaggatcgaggaggacccacctcccaatccccgccctcctgtccctccacggcgcgactgcttcgcagtcacttcccgctagttctgtgggctgaggggcgtggcctgaggggcgtggcctgaggggcgagagcccccaaggctgtgggtatgaggccggggccctgcaccggaagggagggcggaagccacgggacgtggagcag

SEQ ID NO: 118082 - DNA, 30 bp, Homo sapiens; identical to SEQ ID NO: 7003
  chr9:124261231-124261261
  hyper

SEQ ID NO: 118083 - DNA, 92 bp, Homo sapiens; identical to SEQ ID NO: 46501
  chr9:124262329-124262421
  hyper

SEQ ID NO: 118084 - DNA, 869 bp, Homo sapiens; identical to SEQ ID NO: 7005
  chr9:124361490-124362359
  hyper

SEQ ID NO: 118085 - DNA, 144 bp, Homo sapiens
  chr9:124461190-124461334
  hyper
gcggcagggaggtgagcggggcggccggccctggcggtccccgggggtctccgcccctccgcagccccgccccctcgtcccggtactccccctcgccccggcgcccggggggctcgggcagcctcggccgcggtcggcgcggct

SEQ ID NO: 118086 - DNA, 182 bp, Homo sapiens; identical to SEQ ID NO: 46504
  chr9:124622035-124622217
  hyper

SEQ ID NO: 118087 - DNA, 30 bp, Homo sapiens; identical to SEQ ID NO: 46505
  chr9:124855794-124855824
  hyper

SEQ ID NO: 118088 - DNA, 297 bp, Homo sapiens; identical to SEQ ID NO: 46506
  chr9:124857514-124857811
  hyper

SEQ ID NO: 118089 - DNA, 63 bp, Homo sapiens
  chr9:124981570-124981633
  hyper
ggttccctcaggaggcgcagagcaccttcgttgaatccaccgctcccctaagcacaggcggtt

SEQ ID NO: 118090 - DNA, 140 bp, Homo sapiens
  chr9:124981877-124982017
  hyper
cgtagagaccttactacgggccggggtcctgggcctcaacgttgcgccacctcggcttcgtcgcaacccggtgaggtggggactctggcatccggttttcataggaggaatcgaaggttcagagccggcgagtgatttgc

SEQ ID NO: 118091 - DNA, 368 bp, Homo sapiens; identical to SEQ ID NO: 46507
  chr9:124990417-124990785
  hyper

SEQ ID NO: 118092 - DNA, 334 bp, Homo sapiens
  chr9:124990828-124991162
  hyper
cgtacccctccttcctgcaaccgcccgccaccctgctcggcccggctgggtcccggaccctgcccgaccccggcccgggccgctcacccagtcgttcgccggctcacctggtcggtggcggggccgccctcggccggcagccggcagccctcgggcaacgccggggcggcgttctcatgcttccagtacatgggccggggaacctcgggctcagcgggcgcgcagcgcggagagctgcgccgagggggaccacagccgcagtgggagcagaggctgctgcaggagcaggaggagagccgaggcgccggccccgccgccccgggcccggcctcag

SEQ ID NO: 118093 - DNA, 30 bp, Homo sapiens; identical to SEQ ID NO: 46509
  chr9:125026964-125026994
  hyper

SEQ ID NO: 118094 - DNA, 31 bp, Homo sapiens; identical to SEQ ID NO: 7008
  chr9:125587779-125587810
  hyper

SEQ ID NO: 118095 - DNA, 30 bp, Homo sapiens
  chr9:125590908-125590938
  hyper
cgtcgtggcggacgcgcattgtccaatcag

SEQ ID NO: 118096 - DNA, 13 bp, Homo sapiens
  chr9:125675545-125675558
  hyper
agtcaaggattcc

SEQ ID NO: 118097 - DNA, 30 bp, Homo sapiens; identical to SEQ ID NO: 46511
  chr9:125693662-125693692
  hyper

SEQ ID NO: 118098 - DNA, 30 bp, Homo sapiens
  chr9:125703647-125703677
  hyper
tcttctgagtcttgcgtttttggccctccc

SEQ ID NO: 118099 - DNA, 125 bp, Homo sapiens
  chr9:126135484-126135609
  hyper
tgctcggcggcctgtcgctggcctttcgcacgcgcgactccgaggcctggctgctgcgtgccgcggcgggcgccctggaaggcgtgtggctggcggtgcgcaatggctcgctggcggggggcgtg

SEQ ID NO: 118100 - DNA, 247 bp, Homo sapiens; identical to SEQ ID NO: 7009
  chr9:126759126-126759373
  hyper

SEQ ID NO: 118101 - DNA, 145 bp, Homo sapiens
  chr9:126760301-126760446
  hyper
agagcagtttctgtgcgctgaggccgggacttcccagcacagcctacaagacactgcctgcccacgcctggccccgcccacctctgcagcctcatcccgctccccaccccacaccggccactccggctttcgcgctggccttgct

SEQ ID NO: 118102 - DNA, 203 bp, Homo sapiens
  chr9:126761348-126761551
  hyper
ctgcatttgaggaggcgtgaacttcaacaggggaccacaggcacggggcacctcctgcgtcccccatcgccaccccacctagagctgctcatcaactccttttagagacaggaaactgcagccctggcggggagtgacttgtccgaggtctcagagcagggaaatggcttcagttgcattttgggggccgctgttccaaggag

SEQ ID NO: 118103 - DNA, 165 bp, Homo sapiens
  chr9:126762043-126762208
  hyper
cggcagctggcaacgcggggcgagcggggagccgcgcgccgcagcccgggtggccgctcccggcgcccggctggccctgattgatttgtcagccgaggcaagaaaaacggcccctctgatccgcgcgcccagtcctcggctccccgggcgccgggcctccctccc

SEQ ID NO: 118104 - DNA, 442 bp, Homo sapiens
  chr9:126762231-126762673
  hyper
cggccccgcaggctggagcaccccgcccgcctcaggagggagccctccgccctccggcccgggccccggcgcccctccccggccccgcgcgccgcgcacctcctccggctcggcccggcccgcccgagggccctggggctgccaacggccccctcacccccgctgggcaccgtgcccgcgcccccagccctcaccctgccgctcccccctagcccggcacccccgccccccgccccccggccctggcccggggccgcccgcagagccggccacacccgctgcggaggactcaccaaggtaaggaagcgcctcggcgcgccccgggggcctggagggctgcgcgtggtgcggggagggccacggcaggcacccgcggacccggaccgggaaccgccgctgccactgagccgggagcacgggagggccccgtcgggccgggagg

SEQ ID NO: 118105 - DNA, 30 bp, Homo sapiens
  chr9:126763343-126763373
  hyper
ctgtcccagcctcttcgacggcagaggaat

SEQ ID NO: 118106 - DNA, 30 bp, Homo sapiens
  chr9:126763618-126763648
  hyper
tagatcgctttagaccggttaatcctgagt

SEQ ID NO: 118107 - DNA, 30 bp, Homo sapiens
  chr9:126763917-126763947
  hyper
tgtgcggggcacggtcgggaatacagagca

SEQ ID NO: 118108 - DNA, 252 bp, Homo sapiens; identical to SEQ ID NO: 46515
  chr9:126769111-126769363
  hyper

SEQ ID NO: 118109 - DNA, 1942 bp, Homo sapiens
  chr9:126770234-126772176
  hyper
ggctcccaaatccggcgttttctctgccgcctctccctcgggggagactcggaaaggctgcaaaaatctgggcgcccgttcgctcgcttgtcaagaagcaaactgtcttcacattctccaagagcaacatccctgcctaggaagaggaaggaagaggcaaaataaataaaaccagttaatgttgtagttaacttgcaaatcaagtaaatctgttggtgccgtatttgagaaataaaccatcacagcgtcacagcaaacacacacttctgaacgtcttcattttgatttaatggtatatcagcgtcaactatcgcttcctctgctggtacacacggcctgatgccgcgggaggagggtgcccatgtttatcaccgagtgagatgactaattacaccttgtcaatcaccggctatgaagacataaaaccagcgcgcacaatgaagtagttgcctgcagcgtcaattagttggcgattctgaggttattgcgtggccctgctttggccgcctctaataacgggacagagcgccgggcaccgcgcactgatcaatcaccctccttccgcggccgcccggctccctcccctctcccccgccgggtctggcctcactttctccgggcggcttgcgcttcctccctccgcggccccggctccgtggcgccggcagccccgggagccccgggaagtttgcgcgcggcagctccgcagccggcagccgggagccccgcagccttcggggagcgccggggctggtggcccctttgttggaggaggcgtggagggagcgcttttgttctgagttagtcacggtggccggctggaggctgctacctcattatgcgccgggtctgcttgtctgcgaggaagcagatggtggggaggtaggcagcggcgagagtggccagacctgaattccgttcacctgtcacctcccacaaaaggcaggttcgggggacttaggcattcgttgccactttctgggggagggggaggtcgaggggccgccgtttccggcgcctgcgaaggttccgtacctgtcggtgcccgctccccccaccccttgcctttcccttggctgcagcttctcgcaccgcgtaaatgtcactcacgtgtcaggatgtgtgtttacagcctgttcctctgcttgtttagtctcggcggacagggctcagcggttgcgcgacgttccccgccgctgggggagattagcaaagttacccgcctctggaccccggggcctgggcccctagatcccgccccgcggcgggagatgcgtttgagccttttacagacggagcgcgtcccagcctgacgcagagggatgaatagacaagcgcaccgggcgggaatcccgactgcctgtgtatctggggtcggcccagcgttggacgtgggctgctggtccgagaggtggcgacggaatcgcgtgcctatatgtatgggggagtggaaagtcgcagggtgtgtttccacgtttcttgagcagcccgcggcaagagttgctgagtaccccaccccccgcccccagatcctaaggcagcccctcgagctttccaaacgtattgtatccagccctcccgagagtggagttgcaccaaggacaaacactctagcgtcattacaaattttttctgccccttgggcgacctccagatgaaccctggtgactctcagattggattttcattccttactttctttgaaagaaagtgccccagatgcgtcaataaaacatgcctatgtattcgtgtaggcgtccgcatgcctgcgcgccggccgtgtgcaggcgccgaagcacacgtctgtgtgaacacacgggcacgcgcgtctttgggtttagtggtccttccctcgcgttggggcatctgtacacatgcagaatatacacatatgattgtaacttcaagttttttcaattatgcaaaacgacctcgtaggagc

SEQ ID NO: 118110 - DNA, 620 bp, Homo sapiens; identical to SEQ ID NO: 46517
  chr9:126773159-126773779
  hyper

SEQ ID NO: 118111 - DNA, 338 bp, Homo sapiens; identical to SEQ ID NO: 46518
  chr9:126773939-126774277
  hyper

SEQ ID NO: 118112 - DNA, 160 bp, Homo sapiens; identical to SEQ ID NO: 46519
  chr9:126774459-126774619
  hyper

SEQ ID NO: 118113 - DNA, 30 bp, Homo sapiens
  chr9:126775434-126775464
  hyper
acactgcccgaccagcgggcccagaagtga

SEQ ID NO: 118114 - DNA, 182 bp, Homo sapiens; identical to SEQ ID NO: 46520
  chr9:126775916-126776098
  hyper

SEQ ID NO: 118115 - DNA, 161 bp, Homo sapiens; identical to SEQ ID NO: 46521
  chr9:126776270-126776431
  hyper

SEQ ID NO: 118116 - DNA, 445 bp, Homo sapiens
  chr9:126777301-126777746
  hyper
gaggggattgccccccgcagcagcagcggcacctggaggaggaaaaggggggtacccaaccgtgtgttcccacagcccctccctccatggtccctacaggcgcttctctgtgcagcgctgcgcccgctgccacctgggcatctcggcctcggagatggtgatgcgcgctcgggacttggtttatcacctcaactgcttcacgtgcaccacgtgtaacaagatgctgaccacgggcgaccacttcggcatgaaggacagcctggtctactgccgcttgcacttcgaggcgctgctgcagggcgagtaccccgcacacttcaaccatgccgacgtggcagcggcggccgctgcagccgcggcggccaagagcgcggggctgggcgcagcaggggccaaccctctgggtcttccctactacaatggcgtgggcactgtgcagaagggg

SEQ ID NO: 118117 - DNA, 133 bp, Homo sapiens; identical to SEQ ID NO: 46523
  chr9:126778105-126778238
  hyper

SEQ ID NO: 118118 - DNA, 411 bp, Homo sapiens; identical to SEQ ID NO: 46524
  chr9:126778358-126778769
  hyper

SEQ ID NO: 118119 - DNA, 138 bp, Homo sapiens
  chr9:126779023-126779161
  hyper
taaatggtgaagcagcggtaggccggtcggtggcgcggatttaagatttgctgaaggcactaccacagatgtagctctctggaacttccatccctcctctcctaccaccccccaaaaaaagacaaaaccgagttcaga

SEQ ID NO: 118120 - DNA, 512 bp, Homo sapiens
  chr9:126779531-126780043
  hyper
tgtcgtgtttgttcccgtgccctcctctccgaccttggccggggctcctagtcctgagagaaacggcgttcggtgcgccggcggtggctatgcggctggctctttcggggctcccgggactaggttggggaaagagggcatctccccggcctctcggggcccagcccagtcttcctagatctggcgtccgcccttccctcccctcccgcactggcaggagagaaatggccgcagtgtgggccgcggggcagctaggactggaaagcggggaccctggagggtgcgatcgcggacggggtgtgcgggcgcgggtcgtgtgcgtgtgcgtgcagggttccgaccacggggacacgagcttgtttgtggcagtgtcccacatcctgtggcccagccacgacgaccccttgcaaagcctcttgctctggggacagtccctccgaggcgcggcggcaccttactgaagggcggcgagctgggggccgagtggggagggggcgccgtcggggcgccgg

SEQ ID NO: 118121 - DNA, 689 bp, Homo sapiens
  chr9:126780284-126780973
  hyper
ggaccggccggacgcccggcctcccccagccccagctttttgtgtgtgtgtgcctggcggcgtaattactgatttgattccaatccattatttagacaattgaacctacaatctcgtctttagtaaaatgaggcgaagtcagatttgattacaggttcagtcccagcgacaagagctcgaaacccgatgggttaataacagatcacgagtaaattattcatgattttacgagctctttagctccattgaatcggcctaattgagaggaaaaaaaaaaaaaaggagagagaaagcccgggtcctccccctcccctcggcccctcgctcctccccggatccgatcctggggaatctcgacccgcccccgggcactgggggcgggagtgagggggttcggggcgccggccaaacctgggccccacggctgcctcccccgccgccgccccctgcccttgcctctggccggcctcggcctcgctacttagggccggctcctttccctttttctccactccccttctttccccttttctctactcccccgccaataacggcttcggaaaaggcctcccccgcagggaccgggtctcccggagccccgggattcagctcggccaccggaccctcgccacaagctgcgcctgtttccgggactcgctttcccctccgctctccctatttcttgctgt

SEQ ID NO: 118122 - DNA, 30 bp, Homo sapiens; identical to SEQ ID NO: 46527
  chr9:126781414-126781444
  hyper

SEQ ID NO: 118123 - DNA, 278 bp, Homo sapiens
  chr9:126782415-126782693
  hyper
cttcatttcccttagcgttagtttccacatctctaaaatgggaatagtcatagccacctctctgagaggtaatgatgtacagtgacatttgtaaagccaaacacacaccataggtgtctactacatgtttatttctgcctcggacttccttccccgtccactctgccgctctctgtggactgccgcagatctctgaacttccccgagcctaatttgctccacttgttcacggagaaacaatcatcttacagggtagcgatgaggattaaactgcaaaa

SEQ ID NO: 118124 - DNA, 304 bp, Homo sapiens; identical to SEQ ID NO: 7014
  chr9:126783289-126783593
  hyper

SEQ ID NO: 118125 - DNA, 554 bp, Homo sapiens
  chr9:126784839-126785393
  hyper
ggaggtggtgggattcgagtccaggccagtctgacccaccctccagccccaggtctctgggattgagggctgggaggtgacacagagggatgacggagacggagggctgcgcagctgccctgagaaagttcttgtgagtttgtcagaaacaaaaaacaaacaaaaaaatgccctctgtggggcgggtggaggctgtgacgcggcgcaactgcagctgcagctgcggggggagccgggagttggggcccctaggctcccgaggcgcccccttgagcagcgctgcccacggggagcgggcgaggggctgcgggagagggaggactgggtgacgtagccgagggagggagcgtcggccaatgggatgccgatgcgcccctctgggcccgcccctccctcatggtctgttttgctttggagtcccagtggcctgagctcctggtggatggagaacgtgactacactggctggggtagcaggtccctctcgtctgtttccttcgttgtttgccttcttggggttaggtcaaggaccctctttggcgtcccctcccttca

SEQ ID NO: 118126 - DNA, 117 bp, Homo sapiens
  chr9:126794678-126794795
  hyper
ttccctgtcgtcccccgcaggtctggttccagaacgcccgagccaagttcaggcgcaacctcttacggcaggaaaacacgggcgtggacaagtcgacagacgcggcgctgcagacag

SEQ ID NO: 118127 - DNA, 86 bp, Homo sapiens; identical to SEQ ID NO: 7016
  chr9:126872693-126872779
  hyper

SEQ ID NO: 118128 - DNA, 172 bp, Homo sapiens; identical to SEQ ID NO: 7017
  chr9:127005137-127005309
  hyper

SEQ ID NO: 118129 - DNA, 31 bp, Homo sapiens; identical to SEQ ID NO: 7018
  chr9:127061459-127061490
  hyper

SEQ ID NO: 118130 - DNA, 30 bp, Homo sapiens
  chr9:127177245-127177275
  hyper
gggcaggaccacatcgcacagcactggcat

SEQ ID NO: 118131 - DNA, 30 bp, Homo sapiens; identical to SEQ ID NO: 46534
  chr9:127177802-127177832
  hyper

SEQ ID NO: 118132 - DNA, 340 bp, Homo sapiens
  chr9:127212693-127213033
  hyper
gtatctgccagagcccgccgctgcctccccgacttcagtccccgcagatgcctcgcagacggtgaacggccacaggcgccaggccagccatagcgggtgaggaactggagctgggaacaggggagggaccagcggatgaaggggaggcccctgactcaggcccattggcgcctcgcggaggagggacgcgcagtggtgggcaaacttcgcatctccctctcgggcctcaacgagtgtttggagagcaagaaaagtgggcgccagggggcttgagggcgcgaatccaggcagacgtgaacgagggagtgcttttcagaatccaaaacgcgggagcctccca

SEQ ID NO: 118133 - DNA, 278 bp, Homo sapiens
  chr9:127215311-127215589
  hyper
aggtgcgcgcaccaccgccgtgctggtgttcgacgagaggacggctgaccgggcggcgcggctgcggagccctctgcctgagctggcagcgctgaccgcgtgtactcacgtgcagtgggactgtgcctcgcccgaccccgcagcgctcttctccgttgccgcgcccgcgctgcccaacgcgctgcagctgcgcgccttcgccgagccggggggcgtcgtgcgcgctgcgctggtggtgcgtgggcagcacgcgcccttcctcgcagccttccgcgccg

SEQ ID NO: 118134 - DNA, 344 bp, Homo sapiens
  chr9:127215678-127216022
  hyper
cgggggctgggcgccggccacccggtgccgtccggcggcatcctggtgctgggccaggatcaggactctctgggcggtggcttctcggtgcgtcacgccctcagcggcaacctcaccgacttccacctgtgggcgcgggcgctgagccccgctcagctgcaccgggcacgggcctgcgcgccgccctcagagggcctgctcttccgctgggacccgggcgccctggacgtcacgccctcgctgctgcccactgtgtgggtgcgccttctctgtcccggtacgacccgccccgccccggccccaccccatggccccgaatccttcccttccgaccctggaactcg

SEQ ID NO: 118135 - DNA, 109 bp, Homo sapiens; identical to SEQ ID NO: 46536
  chr9:127265974-127266083
  hyper

SEQ ID NO: 118136 - DNA, 148 bp, Homo sapiens; identical to SEQ ID NO: 46537
  chr9:127266439-127266587
  hyper

SEQ ID NO: 118137 - DNA, 218 bp, Homo sapiens; identical to SEQ ID NO: 46538
  chr9:127266628-127266846
  hyper

SEQ ID NO: 118138 - DNA, 525 bp, Homo sapiens
  chr9:127266865-127267390
  hyper
cggagaggcgaagtccggaggagggaagcgcgaagagccagggcccgggacgcgagagggggcgcgacggcggctgcggtcggcccggcgcccacctggtcgctcctgcgagcagcgccccgcgtcccgcccgcgcggagcccgcacctctcggccgcgccgccgccgccggcgaggagccgcacccgggcgcagcgccgcccgcccgcgatgacggccgctcgggccggggacggggaggcgggggcgcggggctggcggcgcgggggcctcggctcccccctcccgcctccccgccccccatcctgcctccctgttcccccccgcaccgccgccggggccgctccgaggcgcacctgggacccgggcccctcagccgccaccccgccctgcgccaacccgccgcgccggggccgggggccggcccctctatatcggcgcgtgcggtatccgggggcggaggcccggtcgtgtcctccccccaagcccggcccgcgccggcaccctctccgcagtccagctcga

SEQ ID NO: 118139 - DNA, 199 bp, Homo sapiens
  chr9:127421470-127421669
  hyper
acatggacaaaggcacgagccaaaaccagacagtcctggccgttcgataggccagcagtgggtgagacaggtcagccagctgcaggggcgggagcgggggggcgggtagggacatggatgtgtgaggtgctcatgcgtgcgatcgtgactagattctgaaactgccagccattttcccagctccgctttgtgcaatcta

SEQ ID NO: 118140 - DNA, 428 bp, Homo sapiens; identical to SEQ ID NO: 46541
  chr9:127531977-127532405
  hyper

SEQ ID NO: 118141 - DNA, 30 bp, Homo sapiens; identical to SEQ ID NO: 46542
  chr9:127532689-127532719
  hyper

SEQ ID NO: 118142 - DNA, 93 bp, Homo sapiens
  chr9:127533783-127533876
  hyper
gtctatgtagtaagcggatacttccgggccttgtcttgattgtgatttctacctgatcaaagttccctaagagtcctcgtaaccccccacccc

SEQ ID NO: 118143 - DNA, 128 bp, Homo sapiens
  chr9:127534415-127534543
  hyper
tccggaagcaaaatcccgaattttgcagcggctcccggccgaatccacccgctgcggccaccaggtggcgcgcggccaccggtcactaggcccgccggggtgtccgtcttcggcgaccccatcgggaa

SEQ ID NO: 118144 - DNA, 30 bp, Homo sapiens; identical to SEQ ID NO: 46545
  chr9:127624470-127624500
  hyper

SEQ ID NO: 118145 - DNA, 30 bp, Homo sapiens; identical to SEQ ID NO: 46546
  chr9:127630674-127630704
  hyper

SEQ ID NO: 118146 - DNA, 30 bp, Homo sapiens
  chr9:127630962-127630992
  hyper
actaagtgtggtggcgttcaaggctccgag

SEQ ID NO: 118147 - DNA, 30 bp, Homo sapiens; identical to SEQ ID NO: 46547
  chr9:127631260-127631290
  hyper

SEQ ID NO: 118148 - DNA, 97 bp, Homo sapiens
  chr9:127905902-127905999
  hyper
ggaaatctgtcagtcgattggacgctcggcccgtcacatcccgcgctgcccacccagaggtttggttgagactgcaggtggcggcggaggtgcctta

SEQ ID NO: 118149 - DNA, 249 bp, Homo sapiens
  chr9:127962947-127963196
  hyper
gagtgggcccaagccgggtgcaaagaacggggaagggccttccctggctccgtcccggccactttgaccgaatcagcctgttctttcccgaccccgtctcctatcccctagaactgccacgtggggatgagatttgctgggctggtagcggcggctgctgcgggaggtcccgcccacgtgaagccagcctaactgagctctggactttggggacagctgtcagtggcctaggccgcaggtgagatttat

SEQ ID NO: 118150 - DNA, 30 bp, Homo sapiens
  chr9:128023988-128024018
  hyper
agggctgcctaaggcggaagtgggagcccc

SEQ ID NO: 118151 - DNA, 31 bp, Homo sapiens; identical to SEQ ID NO: 7023
  chr9:128024544-128024575
  hyper

SEQ ID NO: 118152 - DNA, 31 bp, Homo sapiens; identical to SEQ ID NO: 7024
  chr9:128096836-128096867
  hyper

SEQ ID NO: 118153 - DNA, 31 bp, Homo sapiens; identical to SEQ ID NO: 7025
  chr9:128138375-128138406
  hyper

SEQ ID NO: 118154 - DNA, 30 bp, Homo sapiens
  chr9:128170417-128170447
  hyper
cggtcggtaggtggcgccgcgaggctgcag

SEQ ID NO: 118155 - DNA, 30 bp, Homo sapiens; identical to SEQ ID NO: 46553
  chr9:128509855-128509885
  hyper

SEQ ID NO: 118156 - DNA, 225 bp, Homo sapiens
  chr9:128510755-128510980
  hyper
taacttaaaggaaggcgccatattattccataggtgatgctaatacctttgtgtttcgttatttgttttttaggaaacatgccctgaactgtcacagaatgaaaccagcgctcttcagcgtcctgtgtgagatcaaagagaaaacaggtaagacgctgcgccccgcagtgggcctggagacccccgaggtgggggtcggagctactccttcgactctccagttga

SEQ ID NO: 118157 - DNA, 468 bp, Homo sapiens; identical to SEQ ID NO: 46554
  chr9:128651895-128652363
  hyper

SEQ ID NO: 118158 - DNA, 519 bp, Homo sapiens
  chr9:128984884-128985403
  hyper
tgtaggaggcgtggccgcagccccaccctagaccccagggccgggcaggaagatgcgtctgcgcgtgcgggcaggtgtagggggcgaggaggtggggagcggtaggaaggggaagcagcgaggggagaggctgccgagccgagcctccgcggacccgctcgcccctaaatcacgcagccgcatgaataataaataaggaccgctcggatccttaacagtagtcgcatgtcttattaaactaatatttcacaaacttttattctccctgtggttggaggtcgggagcgaagccccccgccccctaccccgctggctctgcacagcctggggcggaccctggatgggaggagctcagcgcgcccggcagggccctggagggggacacctctcgcccccgtctcccctgtgggttccttctttcaactcacgtggccctggttcctcccctgtgccaggccctgcccagaggatacagatgggtccaccccgctccctctcaaggagccccctgggcccggg

SEQ ID NO: 118159 - DNA, 220 bp, Homo sapiens
  chr9:129276712-129276932
  hyper
cggccgcgcactggggatgctcggaccccagcacacacgaggcggagctccgcggactggaggcaaatcaatccctcggcaccgcgctacggacgtgtgtttggaaggaggctagcccgccgcgcaagtccccgcagcgccccgccggcctcccaccccctgcggcgtccggacctcgtggacctggggtggctcccatagactgcggggccgggcccag

SEQ ID NO: 118160 - DNA, 31 bp, Homo sapiens; identical to SEQ ID NO: 7027
  chr9:129296527-129296558
  hyper

SEQ ID NO: 118161 - DNA, 636 bp, Homo sapiens; identical to SEQ ID NO: 46556
  chr9:129372401-129373037
  hyper

SEQ ID NO: 118162 - DNA, 75 bp, Homo sapiens; identical to SEQ ID NO: 7029
  chr9:129373250-129373325
  hyper

SEQ ID NO: 118163 - DNA, 323 bp, Homo sapiens; identical to SEQ ID NO: 46558
  chr9:129373384-129373707
  hyper

SEQ ID NO: 118164 - DNA, 30 bp, Homo sapiens
  chr9:129374126-129374156
  hyper
ccctgcagcagccgcgcccccgccccagat

SEQ ID NO: 118165 - DNA, 142 bp, Homo sapiens; identical to SEQ ID NO: 46559
  chr9:129375184-129375326
  hyper

SEQ ID NO: 118166 - DNA, 1291 bp, Homo sapiens
  chr9:129375662-129376953
  hyper
cggaccaagcggccccgagcaggcgccgccgcccgggggactccgactcagcccccgcgacctacctcggccgacagtcgggggttcccaagcggccactcccggccggcgccgtcccctggcggagccgccgcgctccctgccgtccgcgcagtctggcctcgctcggggccactcctcgtagcgctggagctttacaaaatattaataataaagaaggcagaggagaaaaaagaaagccttcgctccccaactcccaaatcaatttttcaagggggtggagcagagggatttgtttcgaagacgatcaaaacttctgcgaggggcccgcggggcggccgggccggggagccggggcctgagctcggggccaggcgcggcgcggggcgcgggccaggggcgcggagccccggggcgcgcgggggggcgggacggcactatttgacgtggagccggcggcgcatcccggcgcagggataccggccgcggggttcaaatgtcaggaagtttcgggaggtgaggcggcccgtatccctccgccgccagccccagctctaaacccggcggctcagcgggcgcaccatggcactggagtagcgcggggagcgcgcccggagccccgcggcccgctgcgccccgcccgggaccccgctgcgccgcgcgccccccccgcggcccgcggggccgcccctgcacccccaccccctcccccgcctgccgccgccgccaccgccaccgccgccgccgcctcctccccgcggctccgtctgcagcagccgccgccgccgggttccgggactgacaagcaggtgacagaggagccggcgcgcgtggctgcaagtgtccgggagagcgcggcgcgggctgcagccgccccggcccgcccgcacgacgccggggcccggggccagcgcgtcgccgctccacgatcgccgggggccggcgcaacccctgccctgcgggggccgcgcctccccggttccagggccgcggcggcggagagcgggtggacgggccggcgggcgagcagcccggccggcggggtccgcagcgcgccccgcgtcccatggatatagcaacaggtcccgagtcgctggagaggtgcttccctcgcgggcagacggactgcgccaagatgttggacggcatcaagatggaggagcacgccctgcgccccgggcccgccactctgggggtgctgctgggtgagtgcggggtcggaacgcccgagtggtctcgggcgtgggatggggcgtcgtccggctgtggacacgggcgttggggccaacgg

SEQ ID NO: 118167 - DNA, 143 bp, Homo sapiens; identical to SEQ ID NO: 46562
  chr9:129377208-129377351
  hyper

SEQ ID NO: 118168 - DNA, 43 bp, Homo sapiens; identical to SEQ ID NO: 46563
  chr9:129377592-129377635
  hyper

SEQ ID NO: 118169 - DNA, 187 bp, Homo sapiens; identical to SEQ ID NO: 46564
  chr9:129377772-129377959
  hyper

SEQ ID NO: 118170 - DNA, 47 bp, Homo sapiens
  chr9:129378024-129378071
  hyper
cgggcactgatggggtcctgggagcctccggacggcccccagttgcc

SEQ ID NO: 118171 - DNA, 30 bp, Homo sapiens
  chr9:129381053-129381083
  hyper
tcctggaggaggctccggaaggggggaggg

SEQ ID NO: 118172 - DNA, 167 bp, Homo sapiens; identical to SEQ ID NO: 46565
  chr9:129384572-129384739
  hyper

SEQ ID NO: 118173 - DNA, 387 bp, Homo sapiens; identical to SEQ ID NO: 46566
  chr9:129385809-129386196
  hyper

SEQ ID NO: 118174 - DNA, 1319 bp, Homo sapiens; identical to SEQ ID NO: 46567
  chr9:129386429-129387748
  hyper

SEQ ID NO: 118175 - DNA, 906 bp, Homo sapiens; identical to SEQ ID NO: 7035
  chr9:129387847-129388753
  hyper

SEQ ID NO: 118176 - DNA, 419 bp, Homo sapiens
  chr9:129388816-129389235
  hyper
cgtcctctcctggagccccctctgcaatcccggctcagtcggcaaccggcccttccttccaggtcaggggtgggggagagactttctccctcgaaacacttgataccaactttgtttttttggcaagaaaaataagccttgtttggaaaggggtgggtggggggcgtcgagcgagcgagggaaggagcaaggaggcggcggcggagcaaactctgcggattaggtttcagcgcctccgccccacccccagccccgcggcggtgatttgtgtgcgggggtctgtgaccctgcaagcatcaaacggcccgcgggaaccggccgagttcagagggacagtgggccgaagggcggcctaagacaacgcagatggttcctatcagcccggccgggcccgcagcgtccgccggtccgtccgggct

SEQ ID NO: 118177 - DNA, 260 bp, Homo sapiens
  chr9:129393155-129393415
  hyper
gtgccttcctggctccgggctgccggtgcagcaattcagggcaggcgttgtctggcctttgaagggacggctgtctgagtgtgtcactttgaactgcaaaggggcctgtggtgagggctcggccccctcccacgtgcccccgcctgcccacccctccagctctggttctagtcggcaggcctggagccaaaggggcgggcagggcagtggcccccctgtgggatgtcagcctgataagtgagcagcgacagacccctgga

SEQ ID NO: 118178 - DNA, 574 bp, Homo sapiens; identical to SEQ ID NO: 46570
  chr9:129400692-129401266
  hyper

SEQ ID NO: 118179 - DNA, 31 bp, Homo sapiens; identical to SEQ ID NO: 7038
  chr9:129413244-129413275
  hyper

SEQ ID NO: 118180 - DNA, 362 bp, Homo sapiens
  chr9:129439098-129439460
  hyper
ctgggagaactgctgcgggcgaggggaaagggttaaagctaggcgctttttaattgtcaaatgactgcgggcgattagcactggcagcttcctcaataatcgctcttctctgtacctgctgggagcttaattaaaaaacaaagaggctcaatttaaaggccattactatgctaatgcggccgggcgggcggtgattaagcggctcaggcaggcagcgggcggctggggcggggcatggggcgatcagttacccactaaatgggcgggctgcgtgccctgcctgtcccgaaggccgagccctgacctgcctcgcctgccctttgcccgtccccagccagagcgcaggagacccagggatgtgg

SEQ ID NO: 118181 - DNA, 528 bp, Homo sapiens; identical to SEQ ID NO: 46573
  chr9:129445249-129445777
  hyper

SEQ ID NO: 118182 - DNA, 279 bp, Homo sapiens; identical to SEQ ID NO: 46574
  chr9:129485492-129485771
  hyper

SEQ ID NO: 118183 - DNA, 30 bp, Homo sapiens; identical to SEQ ID NO: 7040
  chr9:129567403-129567433
  hyper

SEQ ID NO: 118184 - DNA, 30 bp, Homo sapiens; identical to SEQ ID NO: 46576
  chr9:129567787-129567817
  hyper

SEQ ID NO: 118185 - DNA, 30 bp, Homo sapiens; identical to SEQ ID NO: 46577
  chr9:129676699-129676729
  hyper

SEQ ID NO: 118186 - DNA, 30 bp, Homo sapiens; identical to SEQ ID NO: 46578
  chr9:129986558-129986588
  hyper

SEQ ID NO: 118187 - DNA, 30 bp, Homo sapiens
  chr9:130007422-130007452
  hyper
ggagttaaagtacccgcagtggagctggcc

SEQ ID NO: 118188 - DNA, 659 bp, Homo sapiens
  chr9:130158817-130159476
  hyper
gcgtctgaccagtctcgccctccgagaggagagagaggcggcccaggacggtctgcttagaggctctctcccctgcagagctgggcccaggcataggtcagacgcctccaatacagtccccagggcagcgattaaagcggagcaggaactgcagacccgaccgggcaggacaggtgcagcttctcggagttgggggcgggaagtctcgggctgaggcccacgtgcttcgccttcgccccgcctctaccctcattggttgaagccagattgagaggaggtgccagaaaaaaaactcctccctccaacctcattggccagctcagttctgaggcagctctctggccccgtctatgggctcgcactacactccaattgggtggttgttctcccagacggaaactccgccccacctgtaccttggaccgctccgccctaggggcggttccagcgcgcttcgctaatcggttctatgctcccattggtctgctttaatgtgaagggcgggtcctagctgattcgctagccccgccttgcgttcctattggctgctcctgctctgcggttccgatcccgcccagcaccgtcccccaccccccgccgcccattggctgcgagaggccggtgcgggccgcactcgcagggcccgtggcggttcaggc

SEQ ID NO: 118189 - DNA, 30 bp, Homo sapiens
  chr9:130159714-130159744
  hyper
cttcggcttcgcgctcggctacagctcccc

SEQ ID NO: 118190 - DNA, 30 bp, Homo sapiens
  chr9:130213294-130213324
  hyper
ccaatggggcgaaacgcccggagacaagcc

SEQ ID NO: 118191 - DNA, 255 bp, Homo sapiens
  chr9:130213933-130214188
  hyper
ccatattcctttatcgtgagtgtcaccccggtccccgtcacccaatcccagagccccgcccctcccctgaggggtccgtagtcccattccgagaccccagtaccgcggcgacccctgctccctcgagcacttgttgtgtgcactttagttatcaaaacagtctatgtggaaatccagtcccgctcttcattcggagagtccgcgattcctagagcctcagacttcgtcatcccggtctgcgtgactttatgagat

SEQ ID NO: 118192 - DNA, 210 bp, Homo sapiens
  chr9:130308065-130308275
  hyper
tttacacctcgaggccgcctggtgggaggaagtccattcccatcttgacacaaacagaaggaaacaaaagccctctcatcccctcctgccccccaccccgcctgcctggcagcggccccagcccacagcccacagtggcagcttgttctgggagcccaggatgaggcatgcctgccgtctgggaacacagatcctcgctgggagggcagc

SEQ ID NO: 118193 - DNA, 31 bp, Homo sapiens; identical to SEQ ID NO: 7042
  chr9:130320411-130320442
  hyper

SEQ ID NO: 118194 - DNA, 474 bp, Homo sapiens; identical to SEQ ID NO: 46581
  chr9:130330785-130331259
  hyper

SEQ ID NO: 118195 - DNA, 30 bp, Homo sapiens; identical to SEQ ID NO: 7044
  chr9:130331661-130331691
  hyper

SEQ ID NO: 118196 - DNA, 30 bp, Homo sapiens
  chr9:130370962-130370992
  hyper
cgggggcgcggacccgcctgggtccaaact

SEQ ID NO: 118197 - DNA, 159 bp, Homo sapiens; identical to SEQ ID NO: 46583
  chr9:130374195-130374354
  hyper

SEQ ID NO: 118198 - DNA, 37 bp, Homo sapiens; identical to SEQ ID NO: 46584
  chr9:130374656-130374693
  hyper

SEQ ID NO: 118199 - DNA, 30 bp, Homo sapiens; identical to SEQ ID NO: 7045
  chr9:130375598-130375628
  hyper

SEQ ID NO: 118200 - DNA, 252 bp, Homo sapiens; identical to SEQ ID NO: 7046
  chr9:130461686-130461938
  hyper

SEQ ID NO: 118201 - DNA, 204 bp, Homo sapiens
  chr9:130477656-130477860
  hyper
ccctagtgcaggaacggagcttcaagaagtttggagcccgtcgagcactgaactcaccagttaagaaaacagagcagcaatttgggggcactcggctcccgggacataatggccgaactgaagctagggaccgggagcccctacgtcgccgccccacgccactcaccatccaccgcttccccggggggcgaggctccaaaacac

SEQ ID NO: 118202 - DNA, 30 bp, Homo sapiens
  chr9:130478363-130478393
  hyper
gtcagggccagggccgcgaggtagttggca

SEQ ID NO: 118203 - DNA, 30 bp, Homo sapiens; identical to SEQ ID NO: 46587
  chr9:130548634-130548664
  hyper

SEQ ID NO: 118204 - DNA, 8 bp, Homo sapiens
  chr9:130564941-130564949
  hyper
gggacgcc

SEQ ID NO: 118205 - DNA, 30 bp, Homo sapiens
  chr9:130565361-130565391
  hyper
ccagcgggcctgggcgcgacgacacgtggg

SEQ ID NO: 118206 - DNA, 141 bp, Homo sapiens
  chr9:130616611-130616752
  hyper
agagggagcgtgccgcggtccatgctgtccacgtgggggcctgtgcgctgggccttatcctgtgtccagtggcagggctgcgggcgggcaccggggccggcgtgggctcgcacggggacccgaggggagcaggcggccgga

SEQ ID NO: 118207 - DNA, 369 bp, Homo sapiens
  chr9:130639767-130640136
  hyper
cacggatcacaaccacggatacacagccgcacagcccccagggagccccgcaccagcacgcccccgccctcccccggtgccgctgcccctccccgcagaggcgcccccccagacacgcgcgggcacgcactgacctggggaggggtgcgggtgggcgccggggccagtgcgtgccctgcccgtcctcgcggcggccggcaaaggcgactatttataaggctgtcagcgcgcggcatgccgggagccggcgttcccgaaggcagggagggcgggaaggagggagggagagcggaccagggaccgggaagcggggcgggaccgagcccgagcccgggtgcgcggcgacaccgcacccggcaccgtgtgccc

SEQ ID NO: 118208 - DNA, 140 bp, Homo sapiens; identical to SEQ ID NO: 46590
  chr9:130661050-130661190
  hyper

SEQ ID NO: 118209 - DNA, 498 bp, Homo sapiens; identical to SEQ ID NO: 46591
  chr9:130674525-130675023
  hyper

SEQ ID NO: 118210 - DNA, 30 bp, Homo sapiens; identical to SEQ ID NO: 46592
  chr9:130679123-130679153
  hyper

SEQ ID NO: 118211 - DNA, 377 bp, Homo sapiens; identical to SEQ ID NO: 7051
  chr9:130679367-130679744
  hyper

SEQ ID NO: 118212 - DNA, 79 bp, Homo sapiens; identical to SEQ ID NO: 46594
  chr9:130689370-130689449
  hyper

SEQ ID NO: 118213 - DNA, 37 bp, Homo sapiens; identical to SEQ ID NO: 46595
  chr9:130689630-130689667
  hyper

SEQ ID NO: 118214 - DNA, 425 bp, Homo sapiens; identical to SEQ ID NO: 46596
  chr9:130689741-130690166
  hyper

SEQ ID NO: 118215 - DNA, 16 bp, Homo sapiens
  chr9:130690197-130690213
  hyper
cgatctgtccaccatc

SEQ ID NO: 118216 - DNA, 30 bp, Homo sapiens; identical to SEQ ID NO: 46598
  chr9:130692623-130692653
  hyper

SEQ ID NO: 118217 - DNA, 30 bp, Homo sapiens; identical to SEQ ID NO: 46599
  chr9:130699870-130699900
  hyper

SEQ ID NO: 118218 - DNA, 30 bp, Homo sapiens
  chr9:130742333-130742363
  hyper
ttcacgaagggaaccgcagtcagctcctcc

SEQ ID NO: 118219 - DNA, 30 bp, Homo sapiens
  chr9:130829971-130830001
  hyper
ttagtgctttcggccgtgacccatgggtca

SEQ ID NO: 118220 - DNA, 30 bp, Homo sapiens
  chr9:130830933-130830963
  hyper
ccccttgggctgggcggaacccccactgtc

SEQ ID NO: 118221 - DNA, 31 bp, Homo sapiens; identical to SEQ ID NO: 7052
  chr9:130865695-130865726
  hyper

SEQ ID NO: 118222 - DNA, 30 bp, Homo sapiens; identical to SEQ ID NO: 46601
  chr9:130889793-130889823
  hyper

SEQ ID NO: 118223 - DNA, 30 bp, Homo sapiens; identical to SEQ ID NO: 46602
  chr9:130890187-130890217
  hyper

SEQ ID NO: 118224 - DNA, 30 bp, Homo sapiens
  chr9:130923118-130923148
  hyper
tggggacgcgggggcgtcgctctgccgatt

SEQ ID NO: 118225 - DNA, 30 bp, Homo sapiens; identical to SEQ ID NO: 7053
  chr9:131038312-131038342
  hyper

SEQ ID NO: 118226 - DNA, 30 bp, Homo sapiens
  chr9:131038587-131038617
  hyper
tgcacctgagaggtcgctctccgactcccg

SEQ ID NO: 118227 - DNA, 30 bp, Homo sapiens; identical to SEQ ID NO: 46604
  chr9:131084782-131084812
  hyper

SEQ ID NO: 118228 - DNA, 30 bp, Homo sapiens
  chr9:131103195-131103225
  hyper
ccaggtggggggcgcgccctgcggcgctat

SEQ ID NO: 118229 - DNA, 30 bp, Homo sapiens; identical to SEQ ID NO: 46605
  chr9:131124557-131124587
  hyper

SEQ ID NO: 118230 - DNA, 274 bp, Homo sapiens
  chr9:131127213-131127487
  hyper
cttgaaatgcgtagccggcccctccccccgaggagggggccctgcttcctcccggcctaatgatattctgggctcagccctcgtctttggcggcagtttaacccgagccggggcggatttctttctcactgatctcagcttgacacccaattagcacaagaatgggaggaggaagcctgcgagaggcgcctcccagcctcccggggcgcgcgaggggagcaggcgggaagacaaaggacagcaggcaggggggcacccgcgccctcgcctcccc

SEQ ID NO: 118231 - DNA, 84 bp, Homo sapiens; identical to SEQ ID NO: 46607
  chr9:131132509-131132593
  hyper

SEQ ID NO: 118232 - DNA, 183 bp, Homo sapiens
  chr9:131133702-131133885
  hyper
cagagctggggcgccgtggggatggattgaagtcgtcgggcccagaattcctttccttctgccgtggggcctgacacggccgaatcactgggtgtcccagtgcccgctgtgagctacgctacccgcctaggagagtctgagaggccagtctctcttggcagtgaggccgtctgtccggaaata

SEQ ID NO: 118233 - DNA, 221 bp, Homo sapiens
  chr9:131183033-131183254
  hyper
tgagggtgcactgccccgccctctccgggtctgcctcggccccgcccgggccccaggccccgccccctcccctcggccggcccgagagctccgggggccgctgcagccgcccaagcgcccgccatgcgcgctgcccgcgccgcgccgctgctccagctgctgctcctgctggggccgtggctggaggctgcgggcgttgcggagtcgccgctgcccgccgt

SEQ ID NO: 118234 - DNA, 90 bp, Homo sapiens; identical to SEQ ID NO: 46609
  chr9:131219287-131219377
  hyper

SEQ ID NO: 118235 - DNA, 30 bp, Homo sapiens; identical to SEQ ID NO: 46610
  chr9:131267042-131267072
  hyper

SEQ ID NO: 118236 - DNA, 30 bp, Homo sapiens
  chr9:131314527-131314557
  hyper
aggtgaggcgggagcgtctctaccgccagg

SEQ ID NO: 118237 - DNA, 87 bp, Homo sapiens
  chr9:131419085-131419172
  hyper
tgtgaggctgacggcgccatgtttgaattggtcgcagcgcctcctgcaagacctggaagaaagaaaagtaacgattcttctcggcca

SEQ ID NO: 118238 - DNA, 30 bp, Homo sapiens
  chr9:131450958-131450988
  hyper
caggaatggccctgcgcgcggattacacag

SEQ ID NO: 118239 - DNA, 30 bp, Homo sapiens; identical to SEQ ID NO: 46611
  chr9:131452619-131452649
  hyper

SEQ ID NO: 118240 - DNA, 30 bp, Homo sapiens
  chr9:131465131-131465161
  hyper
gggtctgcggcttccgggaccggagtggct

SEQ ID NO: 118241 - DNA, 252 bp, Homo sapiens
  chr9:131486505-131486757
  hyper
ttggatggcatctgcggccgaatggaccctcaagccaacaggtgcctgaagaggctgagggtggggccggcgcgcgcgcagctggtaactccctcaactccagccccacccgccaggtaacttttgaaagcgccggagcgcgcgcgcacctcccccgcgctccgctgtgccctcccccgcgttcccctgtgcccgccctcgcagcctcgcgcatgcgcgtagctccctgggcgcttcgaagatccagcggct

SEQ ID NO: 118242 - DNA, 30 bp, Homo sapiens
  chr9:131533963-131533993
  hyper
gaggttggggatctcgtcaggctagagccg

SEQ ID NO: 118243 - DNA, 30 bp, Homo sapiens
  chr9:131534381-131534411
  hyper
cacccgagagaacgcgtcattcagggctct

SEQ ID NO: 118244 - DNA, 30 bp, Homo sapiens; identical to SEQ ID NO: 46612
  chr9:131580576-131580606
  hyper

SEQ ID NO: 118245 - DNA, 399 bp, Homo sapiens
  chr9:131709400-131709799
  hyper
tcccacttgtattggacgtagaaggcctgcactgcgagggccacggcgcaccacgagtatcggtcccatacggttgcgtggatgctcagcaccactgcaaacactactgccgcctctgccagcaccgatccactcagcggagccccaggccccggggccggagatgggcactctcgggtcatatctctagacctggggcttcacggaggccggggcgactacggacgccctagacttcgggcccctcagccccgtcaagcagagggaggcactttcacccggccagcaaccttctccctccgttctccagcagcgaggagggaactccaccgcaggtcacttctgcggcctgggagctggcgcccggccaccccccacagcctccaacctacggcgtag

SEQ ID NO: 118246 - DNA, 30 bp, Homo sapiens; identical to SEQ ID NO: 46614
  chr9:131710179-131710209
  hyper

SEQ ID NO: 118247 - DNA, 30 bp, Homo sapiens; identical to SEQ ID NO: 46615
  chr9:131710499-131710529
  hyper

SEQ ID NO: 118248 - DNA, 30 bp, Homo sapiens
  chr9:131790233-131790263
  hyper
gggcagaggtgtgccgcggcggggacgagg

SEQ ID NO: 118249 - DNA, 874 bp, Homo sapiens
  chr9:131842774-131843648
  hyper
ttttgacaaaaaggtcgcctgctctgtgtgacttgccctttcgccggccagtatggggcagagggaaataagccccctctgctctctggtctcagtttactcgtaactgaaagtgggtcggttcaaaccccctggagctgaggttgcctctcctcttcgagcacgcgctatcggacgcgcaggtccccaagaccgcggatcggcagggggtaccagggaagccttcattcagggcgcaggtcccagccgaaccaaagctcccaccaaagttcaacacgcccccaaagccagcgcctgattggcccgccctgcccacaagctgaggcagcctcaccttctgattggctgttatgctccctgttcggtgctggaaccctccccttctctgattggccagatgcctacctgcgctcgccccagattgggcgccagctggggcggctcgttggctcccaggggccccgctctctgattcgccgctcgggccagcccccacggcctgcacgctgaatggctgcgccgctacctatattggcctccgattgggtgcacggcgcctccccggcgtgataggtcaggaccaccgcccccctggctccccattggctgctcgaagaagcccggtctccgggtaagatggcagcggacggacagtgctcgctccccgcttcatggcggccggtgaccctcacccacgtcgaatatcctgcaggtaaaaggcggtcccggctccaaggacgccttcccagggacggcctctcagtcccgggcgctccggcctgctcgagcccgcggagggggcgccgggggaccggggtgggaactgtcaaatagtgaaccacggaggggctcggccggcgcgcgcgccgcgcag

SEQ ID NO: 118250 - DNA, 324 bp, Homo sapiens; identical to SEQ ID NO: 7059
  chr9:131872520-131872844
  hyper

SEQ ID NO: 118251 - DNA, 79 bp, Homo sapiens; identical to SEQ ID NO: 46618
  chr9:131872856-131872935
  hyper

SEQ ID NO: 118252 - DNA, 30 bp, Homo sapiens; identical to SEQ ID NO: 46619
  chr9:131873499-131873529
  hyper

SEQ ID NO: 118253 - DNA, 30 bp, Homo sapiens
  chr9:131937544-131937574
  hyper
ctggaggctggctccgcttcccgctggaga

SEQ ID NO: 118254 - DNA, 30 bp, Homo sapiens; identical to SEQ ID NO: 7061
  chr9:131938203-131938233
  hyper

SEQ ID NO: 118255 - DNA, 30 bp, Homo sapiens
  chr9:131938566-131938596
  hyper
ccaaacgtccctttcggagatagagtttgc

SEQ ID NO: 118256 - DNA, 30 bp, Homo sapiens; identical to SEQ ID NO: 46621
  chr9:131938800-131938830
  hyper

SEQ ID NO: 118257 - DNA, 277 bp, Homo sapiens; identical to SEQ ID NO: 46622
  chr9:131940268-131940545
  hyper

SEQ ID NO: 118258 - DNA, 390 bp, Homo sapiens; identical to SEQ ID NO: 46623
  chr9:131940585-131940975
  hyper

SEQ ID NO: 118259 - DNA, 119 bp, Homo sapiens
  chr9:131965404-131965523
  hyper
caggacagttctgtcgcgtactcccgggaccctttaaggggcggggctgggatcctgccccacccttgactcccccaccctcctctctcaaacatcaccccgggcgctttaaaacgctt

SEQ ID NO: 118260 - DNA, 31 bp, Homo sapiens; identical to SEQ ID NO: 7062
  chr9:131997502-131997533
  hyper

SEQ ID NO: 118261 - DNA, 537 bp, Homo sapiens
  chr9:132020644-132021181
  hyper
aagatgtcaaaaatacgcggtaagacgtcagcccggtgagcatcctccgcactgcggaccgcccggggtcggggtcacccgggccccgccccgagcttgctgtcgtatcggccccgccccacccacgccctcccggcccctcctgctccgggcgcgctcggctccgcccccacgggcaacacggcctcccattggccgcggtttccatggttacgcgggccggcggagctgcgggctcccagacacgtgtccccgggagccgcccagaatttgacaggggaccatgtgcgcggcagcgcgggagcgagacaaaggaccgggggaggcggggaacgaagccgggcggaggggtccgcgtggcccgggcggggatgggccccgcgcttctcctgcgagcagggcaccccctcttcctttttattttgaaggaaagggaaaaaaggaattgctacggaaagagaggtgggagaggaacccagtcaatttcacctgctccccttcctccaggaagaatcgggtacgcgggcatctgagaac

SEQ ID NO: 118262 - DNA, 293 bp, Homo sapiens; identical to SEQ ID NO: 46627
  chr9:132145468-132145761
  hyper

SEQ ID NO: 118263 - DNA, 181 bp, Homo sapiens; identical to SEQ ID NO: 7064
  chr9:132176627-132176808
  hyper

SEQ ID NO: 118264 - DNA, 81 bp, Homo sapiens; identical to SEQ ID NO: 46629
  chr9:132200924-132201005
  hyper

SEQ ID NO: 118265 - DNA, 35 bp, Homo sapiens; identical to SEQ ID NO: 46630
  chr9:132222863-132222898
  hyper

SEQ ID NO: 118266 - DNA, 1577 bp, Homo sapiens
  chr9:132244498-132246075
  hyper
tcctcaggttcccccgcgctcctcccggaccccaccccgaggcagctttctcacaacgggatcctccccgggcggcgtggggacgcctcccgaccccgaggcccggcaggagagccgccaccgcggccgggtggtctccgcgtcgcatggcccctgccggcccccccgcccatggcagctacataattaattcgcccataaataactgattggggtcgcgcacgcgcccggtgtccctaggactgggatccccgttagggttaggggcgtggggggtcgggggccgcggggctgtgcgtgccggggcgcacggttttgctccgcgggcctctctcgctccctcgcgccggctttttccctttttctctttcctttttttctttcctggagcggagcccggcgccaggagtctggaaccagcttgacaggcttttgagttatggaggggggagggggagaggcgggcggcggggagggggaagggagggcgccgccgcggcgtgggggcggggccggctccccggtttggagactcgccccgactttggggtccgccagcggcggccgggcggagggcgggggaccgcaatcgtggggggagtcaccccgcggggcccggcgggcgaaacgggccgggcttcagagccgcagtaaatgaggcccggggcgggcgggggtggacacggcctcggggccacggcctcccccgccgagcaaggcattcctttccgctgaactgggcgcccgggcccgcgccgcgccctgcacgcctcgcgcccggcgatcgggcccagggcgggggagcagggaggcggccccagccggtcgccggcgcccccaggcgctgcttcccaggagctcggctccccgggatggaagggactgatacccagttaatgggcgtggagcctgagcccctgagggtcgtcgctaacgggggtcgctcagcagggccggcctccgctgcctgcccggggtgtctaatcacctctccgatcctttgcccggatctgagcttcgtcattcacgcccctcctccctggcgactttgggcctggtgacagtcccccgaccctcgcagagccaggggcacagtaggcgccttagccactggcagaatttcaccggcgctctgcccgacgcccccagccccagggccgggcgtgggtggaagtgtctggaagggtgggttcaccagggctgggcacgtcagcggccccgtacagagaatccggtgcctggggtctctggagggggtactcagagtatccgaggaggagactcctggatgctaacagagcccccagttaggagcagtccgcgagacagttggtaacagtgctggccttgcccgggcgccggaaggttccgtgaggcccagcaagtcctgacttggcacagggcccagcacacggtaagcgctcggtacttggtcactgttgcttgattttaccatttcggaggggctcatctacgcctagcaaagcccccctcccggtgacccaaggggagctccagaatgttgagcggctgagcggcctggctcctcctctcgaccccatcgagccaagtgtcga

SEQ ID NO: 118267 - DNA, 30 bp, Homo sapiens
  chr9:132246603-132246633
  hyper
ttggccacaagagtacgagcccctctgtca

SEQ ID NO: 118268 - DNA, 57 bp, Homo sapiens; identical to SEQ ID NO: 46633
  chr9:132250697-132250754
  hyper

SEQ ID NO: 118269 - DNA, 708 bp, Homo sapiens
  chr9:132258222-132258930
  hyper
ccagcgcctgaaagccgcttgggggccgcggaggcaggtggcatggccagggcagagtccgcggggcggaaagggttaacgggctccgccgcattgggctgtccttcaaggggggagccagccaatgagcgcgcgccgcgatgaggtaatgccgggaccacgcggagtgggcggggctgacggggaccccgcagagctcagcgcttcttctctccccacctacccctcacctttgaccttgatgtacaccctcccctcccccaaccttacccctgcagaggcgcccgaactgaaagtcggctgcagggccgcgggcctcccttagtctgggacaggaactgagagacgtcccggcctcagtcacaccctctgggcctcagtttccctttctgcaagaagcagagtgggtgatcgctaaagaccctaccagctgtggacgtccttggatcccaggacagttttcagcccttccctgcccttggcccgaactttaacggtcccagccccggcttcccctcaggcggtgcccagtgccaggacctaggagtccctcgggccacggggagagagcctcaccggcccagccacgccctccatgtgaccccgacccatcccttgggtgtcgcacctggcgcgcccaccgaggccactaagctctgctagctgcaccagcagcaggacctgccggcgtggcggtcagaagtcaac

SEQ ID NO: 118270 - DNA, 30 bp, Homo sapiens
  chr9:132259626-132259656
  hyper
caacctaggcccgggcgggggcggggaggg

SEQ ID NO: 118271 - DNA, 197 bp, Homo sapiens
  chr9:132312370-132312567
  hyper
cccccaagagagccccggccgggacgcgcggaccccagaagctcgggcgggggcgcccctcggaggaatgtttccggggcccggaccgcgccgccgccgcagcctttcctccctctccccgcccggctcgccggccgccctcgcgccccctccagggccccctatcttcccccacccgaaccccacatcactgccct

SEQ ID NO: 118272 - DNA, 178 bp, Homo sapiens
  chr9:132312620-132312798
  hyper
cgcctccgccgggaagccgcgcgcggttgccaggaacgcggcaggcgatcggagctggacggcggcccgggcatctcggcactggcggcgctcggccctcctgggcggccctggcccggccctctccccactggcgccgctgcgcttgctccgattccctccgcggggctgagcctct

SEQ ID NO: 118273 - DNA, 31 bp, Homo sapiens; identical to SEQ ID NO: 7069
  chr9:132318706-132318737
  hyper

SEQ ID NO: 118274 - DNA, 1168 bp, Homo sapiens
  chr9:132330489-132331657
  hyper
gacctcccaaacttccgcacccccgcaggctgacagggctgcaggtgccagcgctgacctcccgctgctcctgttcctctccttccgcaggcacccctcgccccccaccgccacctccagccgggttctggggtcctcctgggccacctgcttactgtgtgtccctggacacggcgtctcccctcgctgagttagtttcctcatttgtaaaacggggatatggcccgtctcctagagtgaccgggaagatcggtggtatcaacgcaaactacagcccggcagcttccaggcgaactcacttctcaggacgcctctcctgctgtcctctcaaagcgggggacgaagccaccaccacccagtttacagatggggaaactgaggctcagggagatctggaaaccttcccgggcagctgggctccgaacccagggctgcgagcacaagggctggctcccgcccccggccctggtccctccttccccggggcatggcccggccgtgccaggcgctcggtgacagcccccgcgggggaggccgggctgggaaaggagagggcagcgggcgggggcgcctggccgcgcggggtcggccgcgggtcgatacggcggcaggatgaatgggagaggggagcgcgggcgggaggaggagggaggaggagggggaggagggagaggccggagcagggggagggcccgcccccgccgccccccaggcccccgccccgcccagcgggcttggccgggtctgcagccctcagcgccaagcgcggccccgcggccccaccgagggatcgataactaatttcaccgcggcagccgccccagttttttcccgataattgcgcgccggcagctgcgagcaaggcccccagcccggcgcgcagccccgcccgcgcgcgatcaattgacaccgccaccgggcggcaggaaaactcatttttctctccctccccggctccgggtgggcgcgggctgagctctgccaagggccgggggctacgcggggccggggccggggccggggccggggccaggccagggagggagggcagggcccgaggagggggcgggggcgcgggcgcgggtgtgggaaggaggcttgcaaggaatccgaggaggcggggtgcctcagtttcttcactctaccacaggggcgtggccgaaggcgt

SEQ ID NO: 118275 - DNA, 175 bp, Homo sapiens; identical to SEQ ID NO: 7071
  chr9:132373578-132373753
  hyper

SEQ ID NO: 118276 - DNA, 100 bp, Homo sapiens; identical to SEQ ID NO: 7072
  chr9:132382254-132382354
  hyper

SEQ ID NO: 118277 - DNA, 227 bp, Homo sapiens; identical to SEQ ID NO: 46640
  chr9:132382811-132383038
  hyper

SEQ ID NO: 118278 - DNA, 163 bp, Homo sapiens
  chr9:132387302-132387465
  hyper
tgagctgaaggtctgacgtgcaatgtcccacaagtttaaccctctcagagcatcagaagttgagtaattattacgttgctcaacttcctcttctgacaggagactgaagctcggaaatgttaacaggctctacccacctgcaagctcccgtttccatcaccgc

SEQ ID NO: 118279 - DNA, 30 bp, Homo sapiens
  chr9:132388410-132388440
  hyper
acgcccggaagtgacgttggcggacaaagg

SEQ ID NO: 118280 - DNA, 100 bp, Homo sapiens
  chr9:132427555-132427655
  hyper
gctctgtcggccagcgcgggcgggcggggccgttgttgggggcgctgaggcgagtgaggctggagctgggagtggggggctcgtcgccttcgtctctggg

SEQ ID NO: 118281 - DNA, 411 bp, Homo sapiens
  chr9:132427909-132428320
  hyper
gtgtggccggcgcagcgcgtgcaccagcggctccggagcgagcggccgtggctgagaaggggagggcggaaagtttgtttccccgacgtcagcgccgggcgggccgcgaggctaggaggcggcgggagctgggcagagcgcggggcggccggggctctcgctccgacccgcgcccgcgacccttcctgggacccgagcccgagacccccgccggcccccccggggccgctcgcgggcatggacagcgcggccgccgccttcgccctggacaagccggcgctgggcccggggccgccgccgcctccacccgcgctggggcccggcgactgcgcccaggcgcgcaagaacttctcggtgagccacctcctggacctggaagaggtggcggcggccgggcggctggcggcgcgc

SEQ ID NO: 118282 - DNA, 30 bp, Homo sapiens
  chr9:132428545-132428575
  hyper
agtgacggtggacggcggttgaccagcact

SEQ ID NO: 118283 - DNA, 35 bp, Homo sapiens; identical to SEQ ID NO: 46641
  chr9:132459654-132459689
  hyper

SEQ ID NO: 118284 - DNA, 476 bp, Homo sapiens; identical to SEQ ID NO: 46642
  chr9:132499947-132500423
  hyper

SEQ ID NO: 118285 - DNA, 30 bp, Homo sapiens
  chr9:132597205-132597235
  hyper
agtcagagccactgcgcatcccggaggcat

SEQ ID NO: 118286 - DNA, 665 bp, Homo sapiens
  chr9:132647779-132648444
  hyper
ctggcagccttcacacgctcatcccgggtctcagagggcgctggcaacacagatccctgcctcccctatcgggaaagcgttttaggaccagggaaaaggaggcctcccccaggcgagtgcgcagagccagggaacccgtctggatggtggctctttcccaccatccttctctggcagcagcagttcaaagtggagcttccaggctgtcccatacatttcacgatttctgagtctttcgcttcaatttaaaaaaagctgggggcacgaccgaatcctgcctctgtccaccgccatctcgttcctcatcgcagggggcccttcttgctccctccactgctgcgctctgccgtctgctcccgccaggggtccccaccacctctgcggacggaggagccgcctcccaggcccgggcgtgcccagggcgggtggagggcgtggggcgggccggtatttcctgacccgctggaggagccggccccacaggcttgtggcctccccggagccggtgagtcaggaacttcctacttcaagaggcttccccagtgcagcagaaaacaaactagtcgcccccaatgctcccgacctctgtgatgtccacacccgcggaaatgggggccccaaaccagcaggctctgttctaggcttctcagcgctggtgcggctct

SEQ ID NO: 118287 - DNA, 378 bp, Homo sapiens; identical to SEQ ID NO: 7074
  chr9:132804283-132804661
  hyper

SEQ ID NO: 118288 - DNA, 285 bp, Homo sapiens; identical to SEQ ID NO: 7075
  chr9:132804693-132804978
  hyper

SEQ ID NO: 118289 - DNA, 920 bp, Homo sapiens; identical to SEQ ID NO: 46646
  chr9:132805028-132805948
  hyper

SEQ ID NO: 118290 - DNA, 30 bp, Homo sapiens
  chr9:132806177-132806207
  hyper
cccgcacgtgctggccgggcggaggcggac

SEQ ID NO: 118291 - DNA, 31 bp, Homo sapiens; identical to SEQ ID NO: 7077
  chr9:132809114-132809145
  hyper

SEQ ID NO: 118292 - DNA, 30 bp, Homo sapiens
  chr9:132816214-132816244
  hyper
gccgctctggcgcccgtcggctcccccgcc

SEQ ID NO: 118293 - DNA, 136 bp, Homo sapiens; identical to SEQ ID NO: 46648
  chr9:133308610-133308746
  hyper

SEQ ID NO: 118294 - DNA, 490 bp, Homo sapiens
  chr9:133308769-133309259
  hyper
cgggcggcccctctacgctgcagtaccggctgctgccgctgcccctgggcgtgcgcgcccaccacgacgtggcccgcctcaccgccttctccgaggtcggcgtccccgccaaccgcaccgagctcagcatgctggagcccgacccccgcagccccttcgcgctgcgtccgctgcgcgcgggccttggcgcggtctacacccgtcgcgcgctcacccgcgccggcctctaccggctcaccgtgcgtgctgcggcaccgcgccaccaaagcgtcttcgtcttgctcatcgccgtgtccccctacccctactaaacgggagagggcattggcggccgccctggcgtgacccccgaggaaggggtcgaggagaagcttggtccacgccacctgctgtggcaagcggagcgtcatcgtctcccgccccgtgcgtcagcgagaccttgggtcaacacgaccctgcgcacagccttgacccccgacagcgaggacct

SEQ ID NO: 118295 - DNA, 273 bp, Homo sapiens
  chr9:133319784-133320057
  hyper
ttttctcatccttactcggctaccagaggctatggttggggagggagggggctctgggggctgcagaaggcccaggctgccggcaccggatagaagtgagcacgaagctccctgcgccagtggaacttttatcccggctcccaccgcgaagcgtttaaattgcttccccagggccaggaggcaagtctctcgaaggacggctgcggccaccctccgcccctgagttacatgggtcgcagccactgccgccctccttggcgcctccagcccgcg

SEQ ID NO: 118296 - DNA, 329 bp, Homo sapiens
  chr9:133320467-133320796
  hyper
gcccgccccggggcccgcggaggcagagggcggaccccgatcgccactcgccggggactgggaccgaggcaggagggaaggggctcccgatgctcaaacgcctggcaccggattccaggtttctggagcgtgggggacgcggcgggggcgcgagtccccgggggcgcgagtccccgggtccgaagagcggctcgggttatttgttccctgcgcagccgggtcctttctggactccttgtcggatccggcttcctctgtgtcgtgaagcccccacatggagacctggggagtccggagcgtgtgggggggctcccgattctctctccctc

SEQ ID NO: 118297 - DNA, 30 bp, Homo sapiens
  chr9:133455384-133455414
  hyper
gggtttgcttagagcgtctggccccatcgt

SEQ ID NO: 118298 - DNA, 211 bp, Homo sapiens
  chr9:133534646-133534857
  hyper
tgcctcagtctcccccgacccctgtctcgccccctctgcttccagaagcctgcgcctctgtctctcccaccgcccggtctcctggtgtccccggcgtctctcccgtcgttcccgccgccttgatcagcctgggctgtggcgctggcatcgctggcctggggaccggggtgtgggcgatggaagggggttcgagaggcgcaggggaggggct

SEQ ID NO: 118299 - DNA, 503 bp, Homo sapiens
  chr9:133535057-133535560
  hyper
aggccgccactccgccggcagccccgcgcaggcctggccccgagtcacgtctgttgaaaccgtttttttcggcctcgcccccacccgccttggcagccagccgcgcctttgtacgcgccggcgggggcgccctggaaccctgaaccgtcttacggggaacgggggtggggggaggggagcggcgcgggccccacgcgaggaaggaatttcctgggccactgcgaaagattgaggctcagaaagccagagagagacgtgcgaggaggaagcggagagggtgtgcgaagctggagagggagtcggagcgccagcgaaagaggggagcgctggggaaggaggaagagaaggagagggggagaagagagacgcggatgctgggcgcgcgacggcagcgggcggaggaggggagcggccgggaacctgcgcgcaggggaagccaggacggagcgcagcaccggcaggggagggttgccgaggggctgtgccgaggagcccgggtgggg

SEQ ID NO: 118300 - DNA, 227 bp, Homo sapiens; identical to SEQ ID NO: 7079
  chr9:133535706-133535933
  hyper

SEQ ID NO: 118301 - DNA, 148 bp, Homo sapiens; identical to SEQ ID NO: 7080
  chr9:133535971-133536119
  hyper

SEQ ID NO: 118302 - DNA, 341 bp, Homo sapiens; identical to SEQ ID NO: 7081
  chr9:133536149-133536490
  hyper

SEQ ID NO: 118303 - DNA, 100 bp, Homo sapiens; identical to SEQ ID NO: 7082
  chr9:133536515-133536615
  hyper

SEQ ID NO: 118304 - DNA, 626 bp, Homo sapiens
  chr9:133536699-133537325
  hyper
cggagcgggaagcggggccattcactcctggcccggcccctcgggaagccgcgccgaagaaagggggccgaggcctattcaagtcctacgagccgcccacaatggaccgatatactgagggcctctctattaacgcccatgaatattaaagagatcgccaagtggcggccagcgggcgaggggggcgacggagcctgagagctccggcccggccgaggggagggggcttttgcgcgagcacattccgcgcctgggccccgcggaaaatgacaaaataacacgggtcatccgctgggaaagcccggaatgtttcccctcgaaatctcctcccggggagatgtgagcacagggtcttgctccctatttcaatgcaccttgagactgggcgctacctacgggctcctttttccccgggcgggggtccaggtgggttttgccgctagactagaagcacaaaatgtgagcgcggtggagatttgggcgcaccagctgggaggacgttctgcgctccgcttctgcccggctcccagtactgctctccgggcttgcgggtccggaggagaggaatgggactccctggccgcagtccgagcccgtggtcactgcgccagcggaatccaagcctc

SEQ ID NO: 118305 - DNA, 829 bp, Homo sapiens
  chr9:133537658-133538487
  hyper
agcgctccccgacgtcgtctccctcgctcctagcactttgtcctctccacctaggtcttcccagaagccaagaagtaggccccggtgaggctcccctgcaggagccatcggactccatacgccccctcagactcgagctctggccagggagccgatgcgacccacaagctgcgtcgaaaaatgagtggagggttcggcgaccctaacccacctccctcctcagcagcgctgccctctgctggcgccctgcccaacggtcctgccttctgccaggtgtgcccttccttgggctccagcctcgggcggacccggacgcagggtctgaaggccagctaccgccgccttcctccctttgcgtcccaacggggacgggggatgccggagactactggcaggaactggggaccaggggtctggagtctggacgccaggtgtgagaccctcttagccaaggcgcgtccgggtggtggaggggcgtctatgccaacaggcgtttggacagggtctcgctcatgggaggtcagctcgctgttcttccacccaagtcctccgcgctgaggagaaggtctagggagtccacacagtccagcggagactaatccgtgagcctgacccacgccgagagggtccaggcacctctgttagcggcatctgaaattgtaggctggtgatgggagccagaagtgcggcaggtggggtgagctccctcacccagcatgtcagggcctggggtccgaggcttgaggctgacactggggagccgcgaagcctgcaggaagcggggccttccgctgggctcagcagctacctgcttcgggagaggggatcg

SEQ ID NO: 118306 - DNA, 304 bp, Homo sapiens
  chr9:133538727-133539031
  hyper
gtttctgagggacttcgctctcaggcacgcctgctcccacctaggaagggtctcgggacccctttcaatccccctatatcccgtaggaaattcttttcccagagacaggctgccagggcgattcctgtccgcccatctcgacccccgacctggccccgcaagggccgggagcctggccttccatgaagctgtctcaggccgggaccagccccagccccgacggccgctgcggccccgcctcggcagccccgtgagcccgcggaggagtttcgcacccgaccgtgcacagcgaccgagttggcgc

SEQ ID NO: 118307 - DNA, 141 bp, Homo sapiens
  chr9:133539568-133539709
  hyper
agtctgtcctccgacgtcagggggtcattaataaccaattaggagggtcactgcggctcctataaaggcgctgagattttgccaaggggaagacggccccggccgagtgtgcgagaggctagcgcgcgcctgagccccttg

SEQ ID NO: 118308 - DNA, 117 bp, Homo sapiens
  chr9:133540114-133540231
  hyper
cgaggttatcacctccgacatcctgcacagcttcctgtacggccgctggcgcaacgtgctcggggagcagctcttcgaggacaagagccaccacgccagccccaagacagccttcac

SEQ ID NO: 118309 - DNA, 1702 bp, Homo sapiens
  chr9:133540727-133542429
  hyper
aagccgcggggagagcgagggagagaaagagagagcgagaaaagtttcttttctttaagatgtctcaagttcttattcctcattcatcaacccgcaaacaatatctttccctggctctggcatctctgcgcgtcgccctcttttccccctttacgatttctgttcctctcttaatttaccgtgaagactaattccacttccattcacgctatgtcaaccatctaatcccccttttttgtaaggggaattcctcggccccttttaaacaagtcccctccgcattgagctacaatttactgctacagcattcttccagggctaatgaatttagaattagcaatttctttcgaatggagccgaatgaatgcgatcactttaacagcgtgacaaattgcccgccgcgccgcaatggacaccgtttaacccccccctttcagccggcccgctcgccgggtattttcccaggtagcttagaggggaaccttgtaagacatggaggccgcccttgtgcgcctcgccgcttccagccctgccgcagatgcccgacaggggaaccctcggggagctgggggccgccgcggctcctccccgcccagagagatgacatcggggtttgtctgagcccgggcgccgccctccctggcaccccagggcctgggagcagagagggactcgggcgcgcccggggtcacacagcgagcgcagagcctggccagctgctgccggtgcttctttggcacctccaacacctgccagcccgaggtctgtccccagcgctgatcacggcccggctcctctgccagtgcccagagcctggacacacagtgggctcccggaagccgactaggcgaaagagtctccggttggccttcacctccttgcaggacctggcctcagtttccctgtgcataaaaccgctcgctgccgttggctcattaattcttaaacttatccggggcagaggatggaagaagttgcgaatgctttgagaattcgcggagagactaaaaacccacttctaaaaatgatccccaacgcaccactcgctttccagggcacggagggtctccaggttgcaaacagaggagaggtcgttgagcctccgcacatccgacttcctccacacccgggtggcttctctggatttggggccgacttgggtttggctggtctgggcaggaccgaagccggggtcccggcggggaaggaagggccgggcctcggctgcctcgggctctgaccggttttcctggccccgccgccgcagaagtgcagaagctgtccagcctggtgctgcctgcggaggtgatcatcgctcagagctccatccctggcgagggcctcggcatcttctccaagacgtggatcaaggcgggaaccgagatgggccccttcaccggccgcgtgatcgccccggagcacgtggacatctgcaagaacaacaacctcatgtgggaggtacgcgcgggctggggcagaggggcgcaagggccggcgaggggcgctggtcgcgggtaggactcgggcgtccggccgtcgccgcttccacccgggctgagagcggcggacactcctggcctggacgccccctgagccgggactctaagccgcccgagcctggagctcaccccgcctctaggctcctcccaacccgtgccgaaaatccgaccctccttcccccggacaccctggcagagcaaga

SEQ ID NO: 118310 - DNA, 30 bp, Homo sapiens; identical to SEQ ID NO: 46663
  chr9:133556826-133556856
  hyper

SEQ ID NO: 118311 - DNA, 275 bp, Homo sapiens
  chr9:133568976-133569251
  hyper
tagacatggcagctcggctcccttcccttcgggttcgccttattgttgccaattgtaaacatggcctctaggccgtgagttctcattggcagctgctctgagtccccgcccttccccgcccctccgaacgcggcctggagttgtggagtcggatatcgcagctcccgactgagctgcgcctgcgcaactcattggcgccaagatggcgatggagatgaggcttccagtggctcgcaagcctcttagcgagagactgggccgcgacactaagaaac

SEQ ID NO: 118312 - DNA, 30 bp, Homo sapiens
  chr9:133588073-133588103
  hyper
cacaactcccggcacgcaccgcggactgcg

SEQ ID NO: 118313 - DNA, 30 bp, Homo sapiens; identical to SEQ ID NO: 46665
  chr9:133588786-133588816
  hyper

SEQ ID NO: 118314 - DNA, 30 bp, Homo sapiens; identical to SEQ ID NO: 7088
  chr9:133660745-133660775
  hyper

SEQ ID NO: 118315 - DNA, 1393 bp, Homo sapiens
  chr9:133710034-133711427
  hyper
ctctcactctgaactcacacccgtctgttcgcagcctgacctcatatcctggtctggatgtgcggcctcaccggggtgtcgtgcgcacgtgtggttgtcctgtgggtgccagctctgacttcctccccagacacccactgcctcagccttaatcacaggacgcgcgttgagtagaaatgagaccagttagtattggtaactgcagaggaatatgcattttcaccagcgttctcgggtcagagggtttgcctggcaccgcgtactgggaaactcgccaaaagcggtgcaggttggagacgccccaggccgcggtggagttgcgcgcggcttctaaagtggagtggagcaggcctgcaccctccccgccggggctgggacggcgcttccaggcggagaaagacctccgcgggccgcgcgcggccttccccctgcgaggatcgccattggcccgggttggctttggaaagcggcggtggctttgggccgggctcggcctcgggaacgccaggggcccctgggtgcggacgggcgcggccaggagggggttaaggcgcaggcggcggcggggcgggggcgggcctggcgggcgccctctccgggccctttgttaacaggcgcgtcccggccaggcggagacgcggccgcggccatgggcgggcgcgggcgcgcggggcggcggtgagggcggctggcggggccgggggcgccgggggggcgcgcgggccgagccgggcctgagccgggcccgcggaccgagctgggagaggggttccggcccccgacgtgctggcgcgggaaaatgttggagatctgcctgaagctggtgggctgcaaatccaagaaggggctgtcctcgtcctccagctgttatctggaaggtaagcccgggccgcacgggttgggctgagtagccgcgcgccctcccgctgctgctgggcccttcctaggcctcgccgcccgcgcgctcccgcctgcgccctccccgggtcttgtcttttttttctttcttccctcttctcttctcttctcttcagttctcttatattctgtctctctttctttctctctgtgtctgtctcttttctcttctcttgtctctctctttttctctctctctgtctctttctctttctcgcgatggcccctaggcgccgccggcggagcgtggcccccagccccggcaccagccccggtagagccacgccggatggtgacggcggcgtccggggccccacagtgcgggctcccccgaaaaagtttgagaaagccaactcgccaggccttaacatccctgggatcccacgttgtggaatttccaccgttaattgggactgtgtgttaaaaagatcgacccgtgtttgtgaaaacatgcgatttccattaagcatcatgt

SEQ ID NO: 118316 - DNA, 30 bp, Homo sapiens; identical to SEQ ID NO: 46668
  chr9:133813796-133813826
  hyper

SEQ ID NO: 118317 - DNA, 430 bp, Homo sapiens
  chr9:133814205-133814635
  hyper
cgccagcccaacgcccgccgctcgcgctgcgcgccgtccccgctcccggctccggcgcctccccggcgcgctcctctctctcctccctcgtccctcctccctccttctcaatctccgcatcttttctggtctcggactctctttgctttttattgctcccctcggcctcccccgacacactcacacacacgcgcgcgctcacacccgcggacttggatactaaactccgcctccgaaaagacctagggaaaggaggccgaactggcccccagataacgcggccggccggagggcagcaaacagccgcgggcggcccggctcctgctggctcccggaggggcctgagagccccccggcggcgcctctgcacaaacttcctcccggaccggactcacacaagtcaccatgcgcggggcgggccccgagggcg

SEQ ID NO: 118318 - DNA, 601 bp, Homo sapiens
  chr9:133814875-133815476
  hyper
gtgggcgtcccagtccgcgtccgcagacccgtgccctcgcgcccgcggtcggaaagcccacacgacgcccccttgcccgggcggcccgtgggcgaaatgggggtccccaccactgccacagccgccggcgctgtggtcgcgagtaccagccgctccgcgctcggccgcgctcccggccgatcgcccgcgctccccggcgcgccccgcgtggtcccagcccccgccttctcctccgccgggaggggatttgtgccaggagggggcttcttagttgccccttcccaccagcagcacttttaaaagcatttaatccgcccggagcggccttcggaggtaattgacaaagtccttaatctgcgcggcgaacgagctgctattgtggcttctgaccgggaggcgcccacactgcccgacgccgcgctcccctcccgccgccccgccgagcccgccggccgcccctcctccgcccctttctgcgtccccatctttttctgctcccccagctccagacagacccccgttccccgcccccgcttctccccaaagctgttttccggctcccggggcgccttggccgccgcgctgttccctggcaccgtct

SEQ ID NO: 118319 - DNA, 142 bp, Homo sapiens
  chr9:133815528-133815670
  hyper
cgatccctctacgcgtccggcactggcggggcagactggttgggggtgggggccgcgtccagcctgggctggggcactccctggaccccggagcgggggaccctgtggcccggtgccatccgaggagactgccacccgccag

SEQ ID NO: 118320 - DNA, 15 bp, Homo sapiens
  chr9:133815730-133815745
  hyper
cgctggcctcaccta

SEQ ID NO: 118321 - DNA, 30 bp, Homo sapiens; identical to SEQ ID NO: 46669
  chr9:133884369-133884399
  hyper

SEQ ID NO: 118322 - DNA, 31 bp, Homo sapiens; identical to SEQ ID NO: 46670
  chr9:133971401-133971432
  hyper

SEQ ID NO: 118323 - DNA, 30 bp, Homo sapiens
  chr9:133971666-133971696
  hyper
ggtgcggccgccccgcgctttgcactttcc

SEQ ID NO: 118324 - DNA, 703 bp, Homo sapiens
  chr9:133971931-133972634
  hyper
ggagcccggaccaggcgcctgtgcctcctcctcgtccctcgccgcgtccgcgaagcctggagccggcgggagccccgcgctcgccatgtcgggcgagctcagcaacaggttccaaggtaggcgccgccgtccccgagcagccacctgtgcgcgccgggcggaccgcggggtccaccgcgcgcgggaagcgggcggggacgggggcgcgtggcccgaagaggaccccgcttcccaggccgcctctttgtctcctccaggagggaaggcgttcggcttgctcaaagcccggcaggagaggaggctggccgagatcaaccgggtaagccccgcgcccagggcagcacgcgagtcccgagccgcgcgctgcgcgggtgccacctctccttccgcgaggccgtgcccgcctccagatctaccctcttccttcccttcccctgggcttccctcaggtgcctccctccgcccccagccccgtcgcctccgactccaggtaggtccgcctccgcctcccgcctccggtctcgggttgcaagttgttactcttgcaactggggactggggaggtggggccgggtcaggagctcggatgccagccggctcgtggctccccgcaagcccgcttgggagcagcccaaggatttggcgcgggaagggccctaggccagtgatctctccagctcagaacacaggctccgggtcattt

SEQ ID NO: 118325 - DNA, 30 bp, Homo sapiens
  chr9:134001290-134001320
  hyper
cgtgatagccccaccgaatgcagtttccca

SEQ ID NO: 118326 - DNA, 3 bp, Homo sapiens
  chr9:134131734-134131737
  hyper
gag

SEQ ID NO: 118327 - DNA, 109 bp, Homo sapiens
  chr9:134131797-134131906
  hyper
cgtggagctcggccagcaatgcctgttatgcaatttcctgctttggtgtctcagccccaggaggcaggatgtgagcgccgttggtttgctgcaacgtggagaacccaca

SEQ ID NO: 118328 - DNA, 753 bp, Homo sapiens
  chr9:134151923-134152676
  hyper
aaataaggaaggctctgtccccgcgcggccgcgccaccctcgcggcagaagcctgacttcctgccctccggccttccgcacgcgctccctccgggccccgcacccgcacccgcccggcgcggtcgaatcaattgcagagcagtttgtgttcacccggccgaggtcccggcgccctcggggcgagcgccgacccgcggcttccaggaggcgagctcagggctccggccgctcgccggtgacgggggagcgcggcgcgggtccccgtcggcgcccactcgcgggcgcgggccggacgtccccacgcaggggcgccgcgtcccttcgccgctgtcgctgccggccgccgtgcagggtcccggggctgcgctccggccgccgccgcctgcttcgccgcggccgccgaggacctggtgggaggtggaagggacagcgcgtcaaggccagcctcaaagttaagccgaactttgctgcggggggcgcgcgggggcggcgacgcgtgtgcgctgggcgcgggctgcggagctgacggcgcagctctgggcggtctccccggaggcggtggcccccgccccccgcgcccgccccgtcagtggcggccgcacgaccgcgcgcaccagcgaataatagccgcccgtgacatctccgctgataccgtcccggacgggcggggtggggggcgagcggctgccgctgcagggggcggcgagcacttgccctgctctgtccccaccgccgcgccgccagcgccaggtg

SEQ ID NO: 118329 - DNA, 173 bp, Homo sapiens; identical to SEQ ID NO: 7092
  chr9:134158022-134158195
  hyper

SEQ ID NO: 118330 - DNA, 47 bp, Homo sapiens; identical to SEQ ID NO: 7093
  chr9:134158229-134158276
  hyper

SEQ ID NO: 118331 - DNA, 30 bp, Homo sapiens
  chr9:134158488-134158518
  hyper
cctgggatcgggtgcgggactgggagttct

SEQ ID NO: 118332 - DNA, 56 bp, Homo sapiens; identical to SEQ ID NO: 46675
  chr9:134307437-134307493
  hyper

SEQ ID NO: 118333 - DNA, 30 bp, Homo sapiens; identical to SEQ ID NO: 46676
  chr9:134378113-134378143
  hyper

SEQ ID NO: 118334 - DNA, 30 bp, Homo sapiens; identical to SEQ ID NO: 46677
  chr9:134378705-134378735
  hyper

SEQ ID NO: 118335 - DNA, 1011 bp, Homo sapiens
  chr9:134421319-134422330
  hyper
tggtgccccggaggccggcggtagcaagatgggggagaatgcccggcccaggacaccccatccggagccagggtggggagagccaggaagctgctgtggaaagttcaggagctctgggggcgcccctgcgggcaagccagggagggggcagcggcggttcattctctgagcattttgcccactcccgccccgtgtcccgcctctggcagctcagctcaccgccccggccaggctgaagtccttgcagcaggggagtgggcgaccctggccagggcggggtggagacagagcctgcagtagggagcacgacctgggaagagaccccacgggctaattcggggacggagagctggagacagggaccgagagaggtggggtgggggcagagctggagagaggcgcggacgcgggtgggatccggccaaggctgcgaccaactcgacgtcgcccacccccaggcgtcaggcgctggaaggggcggggggcaaggaaccgagacctcgtccttgccctggggagtctctggctggctggaagcagtggggcggtggcagtgggacccctgcagagtctcgcgcactccccgccccctcatcccccagcgcgactgatcttgagagcccggggatggggcgcaccagtcccatctgcaagcagctccgggagatgctggagcgctggcccctccccgccgccccgccctccaggactcccccccagaccctcaagcacttgcccagcggggagcccggaccccccttcccagctggaatgcctggcggaggctccggtgtcaagagcctgagaacctgagaacccacccgaggcccccgccaggcagcgccgccagcagatttatttactctggggccctatctccgcgccatcgggccagatatttgccctggcgggatccagggaaactgcggtttttgttatgatagctggggcagggacaccatcccggagagacctgtttagagtggagagctgactcgctgagacccacgt

SEQ ID NO: 118336 - DNA, 30 bp, Homo sapiens
  chr9:134674752-134674782
  hyper
gtctggggagctgtccgtggtgctgaagca

SEQ ID NO: 118337 - DNA, 30 bp, Homo sapiens
  chr9:134954972-134955002
  hyper
gggcagggtcggagcggggccggtccccga

SEQ ID NO: 118338 - DNA, 81 bp, Homo sapiens; identical to SEQ ID NO: 46679
  chr9:134989615-134989696
  hyper

SEQ ID NO: 118339 - DNA, 595 bp, Homo sapiens; identical to SEQ ID NO: 7095
  chr9:135036692-135037287
  hyper

SEQ ID NO: 118340 - DNA, 227 bp, Homo sapiens
  chr9:135037333-135037560
  hyper
cgctcagcccgggcgggcgatgcgggcggcgcgggcggccccctcccccggcccgcgtctccgggacggctgcgggcggcccccccggcggccggagggctccctggccccgatctgacggcggcggcggcggcggccacagcggcgggagcggcgcggggaaggagcagcggctcgcagccctcggcccgcgcccccacccagcgccagcccgaggggggaggcgc

SEQ ID NO: 118341 - DNA, 30 bp, Homo sapiens
  chr9:135037776-135037806
  hyper
aaagttgtttggtggcggctgctacgagct

SEQ ID NO: 118342 - DNA, 31 bp, Homo sapiens; identical to SEQ ID NO: 7097
  chr9:135077790-135077821
  hyper

SEQ ID NO: 118343 - DNA, 30 bp, Homo sapiens; identical to SEQ ID NO: 46683
  chr9:135116373-135116403
  hyper

SEQ ID NO: 118344 - DNA, 30 bp, Homo sapiens
  chr9:135117101-135117131
  hyper
ccctccgaggggggacgtttcgcacccagc

SEQ ID NO: 118345 - DNA, 30 bp, Homo sapiens
  chr9:135117425-135117455
  hyper
ggccgccccgcgccccgccaccctgctcgg

SEQ ID NO: 118346 - DNA, 392 bp, Homo sapiens
  chr9:135117798-135118190
  hyper
ggtgagccagagggtcgggagaaacgctgctcgccccacaccccgtcctgcctcccaccacacttacacacacgggactgtggccgacaccccctggcctgtgccaggctcacgggcggcggcggaccccgacctccagttgcctacaattccagtcgctgacttggtcctgttttctattctttatttttcctgcaacccaccagaccccaggcctcaccggaggcccggtgaccacggaactcaccgtctgggggaggaggagagaaggaaggggtggggggcctggaaacttcgttctgtagagaactatttttgtttgtattcactgtcccctgcaagggggacggggcgggagcactggtcaccgcgggggccgatggtggagaatc

SEQ ID NO: 118347 - DNA, 30 bp, Homo sapiens
  chr9:135230241-135230271
  hyper
acaagccgcgcctgcgctcacgcccgcccg

SEQ ID NO: 118348 - DNA, 551 bp, Homo sapiens
  chr9:135285313-135285864
  hyper
gccgggctctgttggcgtcccgtcgccaaggagacgggccgttgcattcgtcctccaggggtggtcttggttttctttcctctcccagtctgcaacgcggggcccaggagacgccctgaggatcccgcggggctcctgcattgctccggggctctttgcgatgaggggccggcgcgagcggggcgcgcctggctccggaggggtcctggcatctgagtttccccctcaggatcccggtggtgcggcccgggccgcccggcaggcccttcggagctccaggctgtgcccgacgtggggaagcgcgcccaaaccagcccgcgggccggctccccggcgacctcaaggatgccagaggccaggagctccggcccggacctcacgcgatggaggaagcagcagcagcctgtgcgccgcacggtcagccaggtctgcccgcccccgcggcggcccctgaccgtggcggacatccgttccggcatggagaacgagcggctgggggtcgtgcgggactccatgtttcagaaccctctcatcgtcaaggtgagcacccc

SEQ ID NO: 118349 - DNA, 106 bp, Homo sapiens
  chr9:135285880-135285986
  hyper
cgctgtcgccggctccgggcacctgcgccgccgggggtccccacccgcagcgccctggccccgcggcccggggtccgagcgcagcgtgggaagctccagctctggt

SEQ ID NO: 118350 - DNA, 770 bp, Homo sapiens; identical to SEQ ID NO: 7099
  chr9:135286198-135286968
  hyper

SEQ ID NO: 118351 - DNA, 162 bp, Homo sapiens; identical to SEQ ID NO: 46688
  chr9:135395348-135395510
  hyper

SEQ ID NO: 118352 - DNA, 30 bp, Homo sapiens; identical to SEQ ID NO: 46689
  chr9:135421704-135421734
  hyper

SEQ ID NO: 118353 - DNA, 10 bp, Homo sapiens
  chr9:135455233-135455243
  hyper
accctcactc

SEQ ID NO: 118354 - DNA, 174 bp, Homo sapiens
  chr9:135455287-135455461
  hyper
cgctttcgctgggtccgggatccaaatcccaacccaagagccaaaggccagaaaaggccctggcgttgccagctgcttgtcgccctggggaggggcggctccggacccgcccggggcagaggaggacagagcggacgctctggggaccaggcggtcccgcgcatgcttggccag

SEQ ID NO: 118355 - DNA, 264 bp, Homo sapiens
  chr9:135455759-135456023
  hyper
cactgcagtggccgccgccgatccagagcctgggcccccgccctcccgcctccccgacagcttgcagccgagccgggccactgtcccccgggagccgcccgtcctcacccccagcccggccggcggcggggccgcttccaatctgccggcgggcacagggggagagcgccgggagccgggcgcggggccaccgccgacctagcccgagggaggagaaagtttttgctcctcccgaccacgccaggctgcccccgggagaattct

SEQ ID NO: 118356 - DNA, 125 bp, Homo sapiens
  chr9:135456079-135456204
  hyper
cgacgtaggagccggggtagtttcctgggggctgggggtggtggcaggggcgtgcaggccgggctggaaaggcctggcttcccgagcctgcggggggtaaaaggacgcctctgacccgcccgacc

SEQ ID NO: 118357 - DNA, 347 bp, Homo sapiens
  chr9:135456234-135456581
  hyper
cgccctttccgccgcagacccgggttgcgatccctggggctgtgcagagaggatccaggcccgggacacagttcggatctgcccgcggtcctgggccccaacgccgggggctgaccctagaaaggcgctggactggagcccgtgacggggtgggaagggcgagggggcgcatgattcacaatgaaaaggccacgtttccagagttgccttgaaaatgcatccctggacgagctctggctctgcgtggaataagaagccgttagcaggcgtctacactcgcactcggaagctcttgcgtgggtcctgttcagaggtacaacagcaccggccccccaagaggtgcccat

SEQ ID NO: 118358 - DNA, 501 bp, Homo sapiens
  chr9:135456900-135457401
  hyper
aaaaggggttctcgacgcgcgcgcgcacacacacacacacacacacacacacacacacacacacacacaccacacttcttcctccgctggttttagtccctttctgctgctggaggaagaaaaacgggggaaggaaaaaggatctacaatagacctgccgacgaataatttgaataactgtgggaaagggtcggggaacgctaaaaaaaaaaaaaaaaagcccagcgcacatcccagcccaccgcagcgcagtcggctcggccccctcccctccagccgtaccccccttggctaatcaccctcattaggagcttcgtcaccggcctaatgaaagcaaaccgtgtggaaatcgccggtaaacagttgggtctgtgctgtaattaattcggtgtctcttttaatcaaactgaaagggaatcgggcagcggcttgcggagccgtgacatcacccccaaaatcggccagagccaatcagcgtcatcactccggggacacgtgggc

SEQ ID NO: 118359 - DNA, 336 bp, Homo sapiens
  chr9:135457643-135457979
  hyper
gccgcgggcagccgccgccgctctccgcggtgctgatgccgccaggtgcgctcctttccgcccgctgctagcgcggcccgggcccgcagctatctgcggtgctgacctggccaccctcagccaccacttgcctggaagaagcgtgcggtttggatttttaaaacgccattctttatttagattccaacatcctcgcgtttcttctgtgccaagggggccctcgggccgtccgtctccccctttgctctccccaacttggcgcgccctccctcccattcctccctgacactcccaccaccccccctcggctcggcggctcggcgcgatgctgcagaa

SEQ ID NO: 118360 - DNA, 174 bp, Homo sapiens
  chr9:135458265-135458439
  hyper
ttgctcggggactgccgttcgcccctggagctgagtccacgctcagagagcagcagcgactgctcttcgccagcctctccaggaagggactgtttggagacggggaccccacggcctggcggggcatccggcccaggtttggactcccacctgcagcccgggcagctctcagcc

SEQ ID NO: 118361 - DNA, 10 bp, Homo sapiens
  chr9:135458456-135458466
  hyper
cgtcacctcc

SEQ ID NO: 118362 - DNA, 747 bp, Homo sapiens
  chr9:135459996-135460743
  hyper
caaaccgaaattcatcggtccgactgcacatcccattttcttgatttcccccacacaaatggccgagcctccttcagccaggctgtgccgaccatgcctggaaagtaggcaggtttaacggagcggccaggaggagatccagaggcatgcgggtgtccccaggcccgggcccagtggtccttgctcctcccccggggggcctgcttagagaggcaaagaaaacttgcgctggagagagactggcatggagaagggggaggaggaaggagggggaagtcaatgtaaatatatattcataacatcatggttattatttaccatttgcaacaagaacggccccgctttagttagagcaaagagcacgaatcttccaccgcccatgctaatggctggaactggagatagtgaggcccttgcctccttttatttatttgcccccaggaaggattttgaggacaggtttcgtttaagataattagaatatcaattttcttctcctgtctctgaggatatctgatcgggaggtgacgagggccggctgtctacatatcgcttaaataggtttggagcgaagggggtagaaggtcttgcccaacccccaccccaggtgttgctgcctttgcccctagtgaaaaaaggagcagggtcaggcagcgaggccttgtctggagcgtttctcaaacgtggaggggaccttttcagagctgagaaacagacaccctgagccagtccgtggagcatttaagc

SEQ ID NO: 118363 - DNA, 572 bp, Homo sapiens
  chr9:135461505-135462077
  hyper
gatgccaggccctccttgcagcgaagcgctgccttttcagttgaaaagtctcgatccctaacggctcaattaaccggattattgtttcctacagagagaaatcaccttgcattcagctgaaccccgtcactgcaaacgccacgcacaatgaaactccaccataaaagaaaacagagaaaaaagggagtaggttgggggaaagccccagtctgagccgccaattttggggaagtggtctagctggttatataatcgctttagagggagaaggagggtgagcattgagcttgttcgattaagtgttttctgtgcagtcaaagccgaacgaaagtgtctgggataaagaaactacctgtgccaggtctatccttcgacctcaggagctgggcccccggtgtaattctgtcccgactgtggggtgtaaacacacgatgccacgcaggtgtagcaggagccatcgttagcgggcaatgtaatgacaacggaacgcagacctgggcaatgcgcgctgcgcccaaggggcaagcgagtggcagggtcgcttattctcccagtgctcggcgctcgcagac

SEQ ID NO: 118364 - DNA, 275 bp, Homo sapiens
  chr9:135462647-135462922
  hyper
cgggcaggagcgggagggcaccggcggcggctgcgaggccgggccctgacatgccgctgtgtccgcagtgaaggaggagggcgaccgcgagatctccagctccagggacagtcccccggtgcgcctgaaaaagccacgcaaggcgcgcacggccttcaccgaccatcagctggcgcagctggagcgcagcttcgagcggcagaagtacctgagcgtgcaggaccgcatggagctcgccgcctcgctcaacctcaccgacacgcaggtcaagacct

SEQ ID NO: 118365 - DNA, 267 bp, Homo sapiens
  chr9:135464626-135464893
  hyper
gcgacagacggccgtcgggttggagctgctggcggaggcaggcaattactcagcgctccagcggatgttcccgtcgccttatttctacccgcagagtctggtttccaacctggaccccggcgcggcgctctacctgtaccgcggccccagcgcgccgccgcctgctctccagagacctctggtgccccgcatcctcatccacggactccagggcgccagcgagccgcccccgccgctgccccccctggccggcgtcctcccacgcgc

SEQ ID NO: 118366 - DNA, 929 bp, Homo sapiens
  chr9:135465125-135466054
  hyper
cgcggccgctctgtccgggagccatccccacccgccgggtgtacatacgcgtctctgccactccccacccccagcctctgccggctcccctaggcaacccctttctccccaggagcgggtgcggctgattcccaggcttcgctctctcccacgccccttctacgctccaggtggagaacagcccctctccccgcgcccccgccagggagagaaggggagtgcggagccccgtctccctacccctcgagcacctgggccagcggctgagctgtacataccgtgtgcaaagtgtatatgaagttatttattcgtgacccatgagcccgtgaccgtgtccgtggattagtgagtctgtggcctgtgccctccccactcccaggcggggcaggaaggggccaagggggcttgcccacccaccccgaccccagcccccagcctcagccccggtccgggggcagccaggcctctcgggttctctcttttttaaatgtcgaaataaacttcttacaaatgaccaggcgcctgtccgcgctcgcgtcgctgggtccgcactcaacccctctcccatccctctcctggggactcggtttccttccatcctcaataacgaaacatttttgtcccccttctcttccccggtgctgtggacatgcgcgggggccccgacgggactcgctggggcccgggtctcccctccctggcctcagtcttcccatctctacagcgaggccagctcgttgttcccctcctcctcctctgtctccatctggttcctagcggctcccagacggtcccgagggccggggcgggggtccgtgccggaacaggcgggggtcagcgcggggcctcggtcggctgcgggccgggctgcggggccctcgccgagccgactcatctggccgcgacaagggccccggcagctggtgacc

SEQ ID NO: 118367 - DNA, 10 bp, Homo sapiens
  chr9:135545616-135545626
  hyper
gaagcgagat

SEQ ID NO: 118368 - DNA, 2 bp, Homo sapiens
  chr9:135545644-135545646
  hyper
cg

SEQ ID NO: 118369 - DNA, 30 bp, Homo sapiens
  chr9:135546305-135546335
  hyper
ctcggtgcccgcaccgctcaacagctgtct

SEQ ID NO: 118370 - DNA, 30 bp, Homo sapiens
  chr9:135546624-135546654
  hyper
ccctccgtcgggcccgcacatggagcgggt

SEQ ID NO: 118371 - DNA, 739 bp, Homo sapiens; identical to SEQ ID NO: 7103
  chr9:135644984-135645723
  hyper

SEQ ID NO: 118372 - DNA, 181 bp, Homo sapiens
  chr9:135906375-135906556
  hyper
cgggccctgccagacgcacagggatggcggcggaggcggccgatttggggctgggggccgccgtccccgtggagctgaggcgggagcgacgcatggtgtgcgtggagtacccgggagtggtgcgtgatgtggctaagatgctgccgactctgggcggcgaggaaggcgtctcccgggtaag

SEQ ID NO: 118373 - DNA, 30 bp, Homo sapiens
  chr9:135996406-135996436
  hyper
caccgggcagctgtcggggacgcccacctc

SEQ ID NO: 118374 - DNA, 30 bp, Homo sapiens; identical to SEQ ID NO: 46698
  chr9:136024326-136024356
  hyper

SEQ ID NO: 118375 - DNA, 30 bp, Homo sapiens; identical to SEQ ID NO: 46699
  chr9:136137090-136137120
  hyper

SEQ ID NO: 118376 - DNA, 30 bp, Homo sapiens; identical to SEQ ID NO: 46700
  chr9:136149213-136149243
  hyper

SEQ ID NO: 118377 - DNA, 30 bp, Homo sapiens; identical to SEQ ID NO: 46701
  chr9:136374549-136374579
  hyper

SEQ ID NO: 118378 - DNA, 627 bp, Homo sapiens; identical to SEQ ID NO: 46702
  chr9:136399586-136400213
  hyper

SEQ ID NO: 118379 - DNA, 30 bp, Homo sapiens
  chr9:136405789-136405819
  hyper
catggtccccgcccgcgacggcacatcctg

SEQ ID NO: 118380 - DNA, 8 bp, Homo sapiens
  chr9:136474215-136474223
  hyper
gcgctgcc

SEQ ID NO: 118381 - DNA, 130 bp, Homo sapiens
  chr9:136474260-136474390
  hyper
cgggcgtccgacccgggcagggcgcagctagcggcggccgctcatgcccaggccacggcggtggcgcctggtgtggctgggcgggcgaggcgggcgctgagaagcccgggaggcccccggggaggcgact

SEQ ID NO: 118382 - DNA, 160 bp, Homo sapiens
  chr9:136474431-136474591
  hyper
cgcgactccggacgccccggctggctccctgcgagctgcacgcgcggctccagcctggtcccgagcgcagggcgcgcgctggcggggagggcgcgcgcccgagcctggcggggagcgcgcgtcaccggcccgcgcgcgcagtcgtcgggggatgccggga

SEQ ID NO: 118383 - DNA, 44 bp, Homo sapiens; identical to SEQ ID NO: 46704
  chr9:136474724-136474768
  hyper

SEQ ID NO: 118384 - DNA, 225 bp, Homo sapiens
  chr9:136603450-136603675
  hyper
aagcagtggcctggccggaactccaggcctcccccgccccccaccctcgctgccagccccatgtctccgcccaggatctgggcggagcgtaccgcccaccactgcggcttctaggccagcttagttggggcttctaggccagccctgtgggcagctccctctgagggcggcagagcagggttgtgaaccccatgccccattacccgtaggcgacctggcagtcac

SEQ ID NO: 118385 - DNA, 30 bp, Homo sapiens; identical to SEQ ID NO: 46705
  chr9:136658239-136658269
  hyper

SEQ ID NO: 118386 - DNA, 116 bp, Homo sapiens; identical to SEQ ID NO: 46706
  chr9:136856334-136856450
  hyper

SEQ ID NO: 118387 - DNA, 31 bp, Homo sapiens; identical to SEQ ID NO: 46707
  chr9:136856910-136856941
  hyper

SEQ ID NO: 118388 - DNA, 30 bp, Homo sapiens; identical to SEQ ID NO: 7108
  chr9:136857229-136857259
  hyper

SEQ ID NO: 118389 - DNA, 30 bp, Homo sapiens
  chr9:136858148-136858178
  hyper
tctccctgggggagcgacctcgcccgtgga

SEQ ID NO: 118390 - DNA, 30 bp, Homo sapiens; identical to SEQ ID NO: 46709
  chr9:136858665-136858695
  hyper

SEQ ID NO: 118391 - DNA, 160 bp, Homo sapiens
  chr9:136890933-136891093
  hyper
ttttctcctgacatcgtttttgtttgggtccaggggcctcacgggagctggatgctcggagcagcaaggcggccctgggggccccttccggtcccggggctgacgcctggcggcgtctccgggaacccgcgccctttcaagcgccgctggctcctgtttc

SEQ ID NO: 118392 - DNA, 30 bp, Homo sapiens
  chr9:136932007-136932037
  hyper
acccacacgatggacgccgggtccctgccc

SEQ ID NO: 118393 - DNA, 30 bp, Homo sapiens
  chr9:137000925-137000955
  hyper
gctgtctgtggaaacgcgagggcacactag

SEQ ID NO: 118394 - DNA, 166 bp, Homo sapiens; identical to SEQ ID NO: 7109
  chr9:137255488-137255654
  hyper

SEQ ID NO: 118395 - DNA, 220 bp, Homo sapiens
  chr9:137273877-137274097
  hyper
tttgggagaggccagcgggccagctgggcactttggtctctgtaatgaggaccctcccaccccaccaagatgcacacatgccctgccaggatgtgggggggcgcagggcagtgggctgagccaaggtgtagatgctgggaggtaaggttaccctccccctgggctggcgtctgcctccccgcctgctgctgcccctgtggccggccgcatgtggggagga

SEQ ID NO: 118396 - DNA, 31 bp, Homo sapiens; identical to SEQ ID NO: 46712
  chr9:137295660-137295691
  hyper

SEQ ID NO: 118397 - DNA, 520 bp, Homo sapiens; identical to SEQ ID NO: 46713
  chr9:137298989-137299509
  hyper

SEQ ID NO: 118398 - DNA, 31 bp, Homo sapiens; identical to SEQ ID NO: 46714
  chr9:137442506-137442537
  hyper

SEQ ID NO: 118399 - DNA, 840 bp, Homo sapiens
  chr9:137533126-137533966
  hyper
gccacagtcttgggcgccctgatctggctggatgggaagtttagtctccacccagaagaggagctctgaactcctccacgttaaagaaaaagttaggcggggtaaactgcaactttctttttaacccgaagtgatcaaacctcggggcccctctgcactggttcttggagcatggccaggtgcgggcacctggggtgggaacagtggggggaccagggtgggcccctgggctccgaggccgccccaggcccgcccgcctaccggctctcagagaaagaacagggggccgcgcccgccccacgtccgctccgccccgggccagccccttcctcgctgcgactcgcccgctgtccccaccccctcgcccgcggcgcccagtgggaggcgggggctggcctcgccgagcccagcgccgggctctgatttgctgcgggcgttggggatcgacagcctccgcggctgccttccaggagagagggagggaggaaaagggggaaaaaagtgctccgcgccgaaggcgaggtccgcactctccgtccccgcggctggcgcaggacctcactcgagcggagcgcccacggggagcgggtcgcggggcggcggcggcgaggaggaggcgagaaggagttggaggaggaggaggaggaggcgagggcgagctagcccagcggggtcccggccgccccgcgggccaaagtcgagccctcccgcccgtgggcgagcgcgccagccgccccttccagaacagccgccgccacaaagaagaacggggggtgccgaggtccccatgacctcctaaagtggtgcggtccctgctgagtgcgctgcccgggccgtgac

SEQ ID NO: 118400 - DNA, 388 bp, Homo sapiens; identical to SEQ ID NO: 46717
  chr9:137534065-137534453
  hyper

SEQ ID NO: 118401 - DNA, 31 bp, Homo sapiens; identical to SEQ ID NO: 7113
  chr9:137580399-137580430
  hyper

SEQ ID NO: 118402 - DNA, 30 bp, Homo sapiens; identical to SEQ ID NO: 7114
  chr9:137835238-137835268
  hyper

SEQ ID NO: 118403 - DNA, 17 bp, Homo sapiens
  chr9:137967095-137967112
  hyper
cccagcctgcttccccg

SEQ ID NO: 118404 - DNA, 231 bp, Homo sapiens
  chr9:137967132-137967363
  hyper
cgggagagagcgaggcgcgcgggtccctctgcgccacccccgcccccgccccttccgagcaaacttttggcacccaccgcagcccagcgcgcgttcgtgctccgcagggcgcgcctctctccgccaatgccaggcgcgcgggggagccattaggaggcgaggagagaggagggcgcagctcccgcccagcccagccctgcccagccctgcccggaggcagacgcgccggaa

SEQ ID NO: 118405 - DNA, 178 bp, Homo sapiens; identical to SEQ ID NO: 46721
  chr9:137967472-137967650
  hyper

SEQ ID NO: 118406 - DNA, 174 bp, Homo sapiens
  chr9:137967688-137967862
  hyper
cggcccggcccctcgggagccccacaaagtccgggaacggctctggctccgcgccgccccgcgcccccggcctgggcgcccgaagtgccggggttggggagggggccagggcgctaggctggacctgggtgggagggaggggtgcaggctgaccggagacggcgctcctccagc

SEQ ID NO: 118407 - DNA, 162 bp, Homo sapiens
  chr9:137979099-137979261
  hyper
accctcgaatcaccgcggaaaagggctccagtaggcaggacggcgccgtctctctgccggcaacctttgccccaaagcggaccctctgcggggatcggagagggatgccccggcgtgaggatgggagaagccccgggacgggagggccgcgggccgtgcccc

SEQ ID NO: 118408 - DNA, 34 bp, Homo sapiens
  chr9:137979544-137979578
  hyper
aggagcccggagggacgcagccgggcaaggcagg

SEQ ID NO: 118409 - DNA, 553 bp, Homo sapiens
  chr9:137979590-137980143
  hyper
cggcgcgaggcgcagggcgcggcgggcagaggccacctggccaccttccctggcgcccggggaaggcgcggcgatggccggggcgcgcggggcggcggcggcggcgggcgggcggcggcgggccgagggggcgcggggacacagccaggcgcccctgcccgccgcggtgcccgccgcctgaaggccgcctgggcgcgggagccggtgccagctcggagcgggcgctggaggcagctcgaggcgcgatgtcggtgccgctgctcaagatcggggtcgtgctgagcaccatggccatgatcactaactggatgtcccagacgctgccctcgctggtgggcctcaacaccaccaagctctcggcggccggcggcgggacgctggaccgcagcaccggcgtaagtgcgcccgccggccgccttggcgcggctcctcctcctcctcctcctccccctcctcggtccggagccccgggctgggcgggcgccgcgcgggacccgagtcgcccagggaggcggcggggagcagggcgggcaagggcaggcgtcgcgggccg

SEQ ID NO: 118410 - DNA, 694 bp, Homo sapiens
  chr9:137980216-137980910
  hyper
cggcgtttccttcgtctgggcccctcgccgcggggccgggggagcttggtgggttctcggaggcttggagtcctgggtcagtaatcatgagccccccattgaaaaggttaggaaactaaggctggggacttggggacttgtccaaggtcacactcagcgagtgaggggtggagccgccgctagaccctagtctgggctcggtccagcggggactgagcccgccctagtttgtaaaagccagactggccggaccgggctgggagtggggccccagccggtgggctccggagctcctgcccgcgcctgcattcccaaagtcccaaggcgccctttcctccccagtccataggagggtttgttccttctcctccgaggacggtgccgaggggcttgggtggggcccctgggagcctgcccttgggcgctcaccccctcgcctttgccttcgtcttctgcgcgcacccctccctcctggcctctgaaattgaaatcgcgtctccctctcgagcctagcgggaggggaaccgtggccggggctgcttctgggcagagctgacttagatggctgagcgaggctgagctgaaaccgccacccggagggccgcgcggggaaggggccgctgccgggaaggcgcgccccagaccactggccctttaggctgaaaggagaggtgaaggacgtgagtctccctcc

SEQ ID NO: 118411 - DNA, 42 bp, Homo sapiens; identical to SEQ ID NO: 7117
  chr9:138024135-138024177
  hyper

SEQ ID NO: 118412 - DNA, 31 bp, Homo sapiens; identical to SEQ ID NO: 7118
  chr9:138120293-138120324
  hyper

SEQ ID NO: 118413 - DNA, 31 bp, Homo sapiens; identical to SEQ ID NO: 7119
  chr9:138169316-138169347
  hyper

SEQ ID NO: 118414 - DNA, 30 bp, Homo sapiens
  chr9:138304668-138304698
  hyper
agccaggtggacgccggaaaacccaggcac

SEQ ID NO: 118415 - DNA, 152 bp, Homo sapiens
  chr9:138372137-138372289
  hyper
ggggagctttggcccggcccggggcggccgctgccctccgagaatggccgcggcccggccggcctggagactgcggttcacgccctgcgccaggcggagcttccgggagggtggccgctctcccgggccccaagctcgctagtcctcggatc

SEQ ID NO: 118416 - DNA, 30 bp, Homo sapiens
  chr9:138391235-138391265
  hyper
ctgtgctcacgccccgcagcggagtttcag

SEQ ID NO: 118417 - DNA, 30 bp, Homo sapiens
  chr9:138392036-138392066
  hyper
cactcggcaggcaacgattggacttttgct

SEQ ID NO: 118418 - DNA, 30 bp, Homo sapiens; identical to SEQ ID NO: 46727
  chr9:138392733-138392763
  hyper

SEQ ID NO: 118419 - DNA, 30 bp, Homo sapiens
  chr9:138593800-138593830
  hyper
tttctagccattgacgaaccccgtcctgtt

SEQ ID NO: 118420 - DNA, 88 bp, Homo sapiens; identical to SEQ ID NO: 46728
  chr9:138606160-138606248
  hyper

SEQ ID NO: 118421 - DNA, 250 bp, Homo sapiens; identical to SEQ ID NO: 46729
  chr9:138606523-138606773
  hyper

SEQ ID NO: 118422 - DNA, 23 bp, Homo sapiens
  chr9:138606820-138606843
  hyper
cgcggaggcggagggcggcctgg

SEQ ID NO: 118423 - DNA, 31 bp, Homo sapiens; identical to SEQ ID NO: 7120
  chr9:138613913-138613944
  hyper

SEQ ID NO: 118424 - DNA, 367 bp, Homo sapiens
  chr9:138628362-138628729
  hyper
ggccgttccactgcgcggcggcgtggggagggcgcggcgcgagctgagatggttccgcccggcgccgcccccgctgcccgccgcccgccgcccgccgcgccgagcgctcccgcaggatggcgcgggccaagctgccgcgctcgccgtccgagggcaaggcgggcccggggggcgccccagccggcgccgcagcccccgaggagcctcacgggctcagcccgctgctgccggcccgcggcgggggctccgtgggcagcgacgtgggccagaggtaggggcgcgcgggcctgggaccccgcttgtcaaatcgcgcttgcatcctgctcgggctgcgctggctgggctgcacctgcgttgcctgcagccc

SEQ ID NO: 118425 - DNA, 30 bp, Homo sapiens
  chr9:138798448-138798478
  hyper
ggtccagcactggacgatgcccggcgcgcc

SEQ ID NO: 118426 - DNA, 93 bp, Homo sapiens; identical to SEQ ID NO: 7121
  chr9:138800245-138800338
  hyper

SEQ ID NO: 118427 - DNA, 13 bp, Homo sapiens
  chr9:138852869-138852882
  hyper
cgtgcttgaggca

SEQ ID NO: 118428 - DNA, 998 bp, Homo sapiens
  chr9:138986158-138987156
  hyper
acccacaggtttaagcggctccacgacgagagtccaagaccaaacttcccccagagcctggcagaggggctgggaggtgacctctgacctccgaccccacacgatcccagcaagagaagcaggaaactccgtcggaaggcctcggtccgccctggccgtgcggggtgcgcggcgggccccgggctccgctgagtttcttagagaaggagctggggccccccgacctcagctccgcagaggcacagaagctggcaagaggcagagccccctccccctgcggccggaccccagtttctccccaggctggggcccgagtgggggaggcgcgggaggcggtgacgacccacgaacgggcccacctggaccgggagggcgaggcgcgggcccggctgggccaggcagctgcgcagatgcgccgggaggggtgggtacctccgccctggccccgggccagtcctgccccggcttccccacccggagggctggatcggccagtcgggtccctggggaggccgcgcgggtccccagaaatccagggaaacccagcaggcggcggggagcgccccgggacgcccggagccggggtctccccgaacgcgcggcgcggcgtcccggcccggggtcgcgggcgcctccgccgggaccccccggccccgcccggcccccctccgcgggctcccgaggccggttcccgcgcgcacgcccgggccggcgcggaactcggccgcacccgccccgcgcggccggcactgcggcagggggctcgcgccaagttgggcggccgcggagtttgcgggaagtgcgggcccggcccgtgggacgaccccgcccggcggcgtaacccgggggcggccgcgcgcgccaagttggcggtacctgcgggcgcccggcccggtccggcctgggcagctgcggcgcgccgcccgcggcaggaagtgcttggcgtcccggcgctccggctcccatggactttctccgacctcgcccagcaccggcgg

SEQ ID NO: 118429 - DNA, 560 bp, Homo sapiens; identical to SEQ ID NO: 46735
  chr9:138987167-138987727
  hyper

SEQ ID NO: 118430 - DNA, 41 bp, Homo sapiens; identical to SEQ ID NO: 7123
  chr9:139001728-139001769
  hyper

SEQ ID NO: 118431 - DNA, 30 bp, Homo sapiens
  chr9:139009848-139009878
  hyper
ggacctggccagggcggaggagggaggggc

SEQ ID NO: 118432 - DNA, 95 bp, Homo sapiens
  chr9:139024425-139024520
  hyper
gatggagctgggaaacgcccgctgcggggtgcctgggacccccgaaggcgtcgggagttgggggcaaacggccgccgccggcccgcgtcaggcgc

SEQ ID NO: 118433 - DNA, 138 bp, Homo sapiens; identical to SEQ ID NO: 46738
  chr9:139024749-139024887
  hyper

SEQ ID NO: 118434 - DNA, 30 bp, Homo sapiens
  chr9:139025266-139025296
  hyper
ccccgcgtgctgggtcggggagaccgcccg

SEQ ID NO: 118435 - DNA, 30 bp, Homo sapiens; identical to SEQ ID NO: 46739
  chr9:139025696-139025726
  hyper

SEQ ID NO: 118436 - DNA, 31 bp, Homo sapiens; identical to SEQ ID NO: 46740
  chr9:139029042-139029073
  hyper

SEQ ID NO: 118437 - DNA, 30 bp, Homo sapiens
  chr9:139030634-139030664
  hyper
tcccaggaacgccagcgccctctgcaggac

SEQ ID NO: 118438 - DNA, 835 bp, Homo sapiens
  chr9:139084515-139085350
  hyper
tcccgccaaggggacgccacccagagccctgtgccacccccagccccgcccccgctgcaagggggatggggtcctgggcaagggtcggtcctctctggtcagcgaccccgctgcctctcgggtcgggaccccaacgagcgggaaaaaaaaaaaaagacagaacgcgtgccggggagtatgaccccggccccggctccctgcaccccgggctgcgcagagccctcgccctccgggttccctctgccagcgacgccagcagagccgggcaggtcccatctcggggtctccccgcgcccggacgacccctctcccactgcggccccggccctgcctcacccgccgccccaccagggtccgagaccgggagaccccagccgcggggggggggggacatcagccttcgacctgcccccgcacctcccgctccgcggggagactgggcgccaggaaccccgaattcggggctgacaacccgcaggcgcgcggctaaagcttccaccgtccgcgagaaggcgtctccaccctggaaggaagggggctcggacccagggaggatgaggggtccgccttctccttcccctcacctcgctgcagcccagagcccgcagacagccccgcggcccaaggtctctctccgcccgaggtctgcagctctggctgggcgtcccccggcctggcgggggtccgggtgggggccgcggcccgaagtctgattctgggttcgccctcgcgggtacggagcaggagccggaggaggtcggagcccgcgtttctgtccctggggcgcggggaggtcacagggctccccccaggcccgcgcggggcggaaccgggt

SEQ ID NO: 118439 - DNA, 455 bp, Homo sapiens; identical to SEQ ID NO: 46742
  chr9:139085372-139085827
  hyper

SEQ ID NO: 118440 - DNA, 175 bp, Homo sapiens; identical to SEQ ID NO: 46743
  chr9:139085985-139086160
  hyper

SEQ ID NO: 118441 - DNA, 30 bp, Homo sapiens
  chr9:139088726-139088756
  hyper
ggagcctcggggtgacggctccaagacaca

SEQ ID NO: 118442 - DNA, 482 bp, Homo sapiens
  chr9:139089077-139089559
  hyper
ctggccccacttcctcggaaaccccagcagccccgagccgcccacccaggggcagctccctcgtgtgaggtgcagggtggagccgggcctgggtcagaactgagcgtggtctacctcatccagccaggaggcggggctggcagggaagtcggggtaacccccgctgctccccgtggataggtcagaactgggtccgttccctgccagcaccctcatgggtgggggcccgccgggggctcccgagggcacaaggcccaagctggtgtctgggtacaccaggctggagaggaggggctgggggccagggaggctctgcggggcggcgggggatggggggacaccgtaggggctgccgggacgcagctctcggtactgctctgggcctgccaggcctccatgctccagggagaagttgcccagggctcccgagggccggcccaaggcctgggtgggttcccccaagctcccgtagaggccattgg

SEQ ID NO: 118443 - DNA, 152 bp, Homo sapiens; identical to SEQ ID NO: 7127
  chr9:139090399-139090551
  hyper

SEQ ID NO: 118444 - DNA, 155 bp, Homo sapiens; identical to SEQ ID NO: 7128
  chr9:139090586-139090741
  hyper

SEQ ID NO: 118445 - DNA, 453 bp, Homo sapiens; identical to SEQ ID NO: 46746
  chr9:139091071-139091524
  hyper

SEQ ID NO: 118446 - DNA, 27 bp, Homo sapiens
  chr9:139091706-139091733
  hyper
cgcacttggtcccgaagcgcctgcggg

SEQ ID NO: 118447 - DNA, 150 bp, Homo sapiens
  chr9:139093772-139093922
  hyper
ggacagcgcctcggccgcagctcgccgccggcgcccgcgtcgggcaaaagccgccccagcccaccccgcgccgcgcccgcgaccccagccttacgctgcatggcgactccagccctggcgggggctcctgtgtcagggatggcggggtcg

SEQ ID NO: 118448 - DNA, 68 bp, Homo sapiens
  chr9:139094021-139094089
  hyper
cggccaacccctcccaggaaccgtcgaaaaataaataaataagtagggaaccgcgagcccccacagcc

SEQ ID NO: 118449 - DNA, 30 bp, Homo sapiens
  chr9:139094343-139094373
  hyper
tgacttcggggagaccgacggtcggagttc

SEQ ID NO: 118450 - DNA, 312 bp, Homo sapiens
  chr9:139096713-139097025
  hyper
gcacccccttcctcgcgcctctgccgcccttgccgtttctgtcctcagtgtcctgctggggcttaccccgagtcccgcccaaggtgcagacggcggcggccccgggcctcgctcggtcgcgctcgagccccgtttccagcagcatcgcggccaccaggccgagtggcgcgagacgcgctcctcctaggtcagcgtcccctggagggttcggggctcccaagtcccgccgcgtcgtgcggggcagggagcccgggagccactgggcctggcgctgtccgcggtgctgaaggaggcgcccgctgcccgccccgc

SEQ ID NO: 118451 - DNA, 30 bp, Homo sapiens
  chr9:139258387-139258417
  hyper
cgcgagtgtccgagcgggaatgcgggtcac

SEQ ID NO: 118452 - DNA, 57 bp, Homo sapiens
  chr9:139294770-139294827
  hyper
gggggccgcctccgcgcgctctggaggggcgcgggtggacgcgggacctcaaggcag

SEQ ID NO: 118453 - DNA, 30 bp, Homo sapiens
  chr9:139304476-139304506
  hyper
gcggaggtgccacacgtggcgcgggaactg

SEQ ID NO: 118454 - DNA, 30 bp, Homo sapiens
  chr9:139333668-139333698
  hyper
gctgctcgggctggcgggtcctcgccgctg

SEQ ID NO: 118455 - DNA, 248 bp, Homo sapiens
  chr9:139334258-139334506
  hyper
gcggagtcagcccggccgggacccagcaaccgccgccgcggggccgcgcccggtccccgccccgcgccccggccccgcccacagcggcccctggcggccggaggactgcgccgcaccggacccggacgggtctcccacgcccctcccaacccggcagccccgcagtccggcaggtcccagcgaggcaggtgcaggtccccggagaggacctgggtgcggtccaggacagcgccgaggcctgcggacac

SEQ ID NO: 118456 - DNA, 120 bp, Homo sapiens
  chr9:139377006-139377126
  hyper
ctcttcaccagcatcgctaaggaagccttctagccggtgaggacaagacacgctcatttgaaaagttaagagtcttacgaggggtgcctgggggtccagcctcccgccccgggaaccggc

SEQ ID NO: 118457 - DNA, 30 bp, Homo sapiens; identical to SEQ ID NO: 46752
  chr9:139377435-139377465
  hyper

SEQ ID NO: 118458 - DNA, 30 bp, Homo sapiens
  chr9:139379641-139379671
  hyper
acctgcagggggcgcggctgtctttcttcc

SEQ ID NO: 118459 - DNA, 383 bp, Homo sapiens
  chr9:139401221-139401604
  hyper
tctgggtgccacgggcgtcgcagggattggacaggcactcgttgacatccccctcacagcgctcacccacgaagcccggcgggcaggtgcagctgtagccgcccacctggtccacgcaggtgccgttgttaaagcacttggggctccgggacacggggtcaacggggggattgcagtcgtccacgttgatctcacagtgcacacctgcggggccaggtttcgtcagtggcccaagcccgccacaccccggccctgccgtgccgcgtgtccgtcccggaagacgagcgctcaggtctggggctgcacggacactcgggagaggcaggtgtcaagggtgccgtggagacgcccttcccactgggacccccgctctgggccctttc

SEQ ID NO: 118460 - DNA, 216 bp, Homo sapiens; identical to SEQ ID NO: 46753
  chr9:139440689-139440905
  hyper

SEQ ID NO: 118461 - DNA, 105 bp, Homo sapiens; identical to SEQ ID NO: 7135
  chr9:139519835-139519940
  hyper

SEQ ID NO: 118462 - DNA, 597 bp, Homo sapiens
  chr9:139580673-139581270
  hyper
actgcccctggaaccacggggaagggggcctctggggccacaatgcccccaccccaggccattgcaaaagccactggctgggcagtccaaacagggcagggagaaatgtagcaacagcctggggacggctaacagggagagggggcaggcaagagccttctccagcagccaccccgcccaggagcaggcagcccccgccgtctttggcagcccagtctgacctctggcccccaaccccagcctggcaaaaccaagctcccaccttctggaaggcgtccaggggaaaatttcagccccgccgaaccctagtcctaactcttccttcccttcgcttggaagctgggcccccggagctgtaggccaggggcgcgctccccagcacggaagcaggtcccctccgggtcccccacctccctgcgaagaggaaagggagagaaaggggaacccgccccacaggtgcgcccatcaccgggcggacagtcaggagggggtcggagggaggccgaggggtgcccccacgccgtcgtgcgccctgatcaatagccctggggcaagtccccgccgccccggcctcggtttccccgctcaggaagcagg

SEQ ID NO: 118463 - DNA, 145 bp, Homo sapiens
  chr9:139581730-139581875
  hyper
agaactcggccgcgcggctcagctgcaccagcagcagcagcaacagcagcgccgcggccagacacggccacagctccatggcccggcccggcgcccgacggcgccgccagctcgctcccgctcccgctcccgcttctcccccgcg

SEQ ID NO: 118464 - DNA, 1174 bp, Homo sapiens
  chr9:139606528-139607702
  hyper
ggaagggtcggaccccggggcgggctgcaggctcggccagcccagggctccgcgcgtctgaccccatcctgaggacccaggggaaggaccagccctggctctgcggcctcgaaccgggggcgcgcgtggggagccctgaaccccgcagcctgcgtagcgcacggggcctctctccagcgtgggaagagcccccgagacgcccaggagcccgacaggcgcgcccccggccccggctccgcctcccggcccatcccgcgcgcccccagcccctcccgcagcaccgttgcatgaggggcggggtctgcgggtgggcggggcctcggtgcccgccccctcctcagccgagccgggggtcgaaggcgggccgcgcgccaagccccgcccccgcgcgcctccgccgcgaccctcccccgcgcgcccccgccgcgccgccgtcggccgacagaaaggcgcgcgccctcgcctttaacgcgggcccgggggcgcgcggcccgcatggcgagggagcggcggccgctgcgggccgggccgggccggggctgaggccgagcgagccgcggggcccgcgcagccccggccggagcccaccatgcggcggctgcggcgcctggcgcacctggtgctcttctgccccttctccaagcgcctgcaggtaagcgcggtgcgcgcccgccgcccccggccgcctctgcctggggaggccgagctccagccccggagtgggccgagtacggagcggggccccgggttcggacacgaagggttcatgagcccggggtgggcagcggggagggggcgagtggctccggaaggacgggacgctgggggaggggcggtggcggcgacaggagggtccgggcgcggggatgctgcggcctggaggccctcgccccgacctgcaggcggtccctgccccccaggcccagaaaccacaccgaagtcctttcttcttttctccacttaaaaaatgaggtgtgttattctgcggtagaaaacttgggacgcacagaaacgccctggcaaggacatgacctccccgccccctgccccttcatcccatcagccagccgtagcgcggggaccctgccctgaccccgggatgaccttgaaccaccgtcccctccaggggcctggccgggtccgcaggggaggcccgggccgccttgggttccag

SEQ ID NO: 118465 - DNA, 30 bp, Homo sapiens
  chr9:139620970-139621000
  hyper
tacggcatgatccagcgcgtacctcacctg

SEQ ID NO: 118466 - DNA, 103 bp, Homo sapiens
  chr9:139621209-139621312
  hyper
tatcaaacattcaaacgttcacggggcagaacgctgagcgtagacatagcctctctaatctctgccacctaatgacacagatgtgacacggcagccacagctg

SEQ ID NO: 118467 - DNA, 30 bp, Homo sapiens
  chr9:139622453-139622483
  hyper
aggacgccccaggtcggagcctgcccccac

SEQ ID NO: 118468 - DNA, 30 bp, Homo sapiens; identical to SEQ ID NO: 46759
  chr9:139685236-139685266
  hyper

SEQ ID NO: 118469 - DNA, 30 bp, Homo sapiens
  chr9:139686004-139686034
  hyper
gggctcagggcgtccgggtgggcatagggg

SEQ ID NO: 118470 - DNA, 239 bp, Homo sapiens
  chr9:139694852-139695091
  hyper
ctggagaacaacatcgagaagacaatgatcaagatcatcaccagccagaacatccacctgctgtatttggacctgctggattatctgaagacagtgagcccagcggcccgggaagggcgggggtcaggggctgggatctgggaggggcgggagcgtcctggggcggagccgccccgcacccgccagggagagggagctctgcctgaccaccggctacgcaggacgccgaggcatgtgga

SEQ ID NO: 118471 - DNA, 149 bp, Homo sapiens
  chr9:139703272-139703421
  hyper
tacgccacacattctcgcctttttttttaaaagaagcgtttgtaagagacgtatctagaaaagctccagaaggcacgggctgacttgcgactgtaggagacatcccatttctcgtaggaaggaggagtcatttacggactcctgagtgc

SEQ ID NO: 118472 - DNA, 47 bp, Homo sapiens
  chr9:139739085-139739132
  hyper
gagtccgctgtgccgcgcgcccggacccgcgaagccgagccacgccg

SEQ ID NO: 118473 - DNA, 138 bp, Homo sapiens
  chr9:139740877-139741015
  hyper
ggcgcaccgagaccatgttcaacgcctgcctctacttcaagtcctgccacagctgctacacctactactgctcgcgcctgtgccgccgcgaggactgggacgcccacaaggcgcgctgcgtgtacggccgcgtgggca

SEQ ID NO: 118474 - DNA, 241 bp, Homo sapiens; identical to SEQ ID NO: 46761
  chr9:139741046-139741287
  hyper

SEQ ID NO: 118475 - DNA, 101 bp, Homo sapiens; identical to SEQ ID NO: 46762
  chr9:139741690-139741791
  hyper

SEQ ID NO: 118476 - DNA, 30 bp, Homo sapiens; identical to SEQ ID NO: 46763
  chr9:139742564-139742594
  hyper

SEQ ID NO: 118477 - DNA, 30 bp, Homo sapiens
  chr9:139743170-139743200
  hyper
gggccggccgggaacgcccctggaccggaa

SEQ ID NO: 118478 - DNA, 30 bp, Homo sapiens
  chr9:139743595-139743625
  hyper
gtgccaccggaccccgctggagaggaactt

SEQ ID NO: 118479 - DNA, 30 bp, Homo sapiens
  chr9:139780402-139780432
  hyper
gaggcgccgctctgcgcccggcaccggggg

SEQ ID NO: 118480 - DNA, 30 bp, Homo sapiens
  chr9:139780684-139780714
  hyper
ccaacgccccggcgcgctctttgaggaaaa

SEQ ID NO: 118481 - DNA, 30 bp, Homo sapiens
  chr9:139781615-139781645
  hyper
gcaaggagccagtgcggggatgggctgcgg

SEQ ID NO: 118482 - DNA, 156 bp, Homo sapiens
  chr9:139838240-139838396
  hyper
acgcggggccgcggggcgggcccccagccaggctgacccccaagcgcaggggcccggggccctggctgcagaacgtgggtaggggccccacacgccactgacctgggtgtcggggcacgtcgcgggccacctggtagtagcggtagaactgctccc

SEQ ID NO: 118483 - DNA, 41 bp, Homo sapiens; identical to SEQ ID NO: 46765
  chr9:139872822-139872863
  hyper

SEQ ID NO: 118484 - DNA, 30 bp, Homo sapiens; identical to SEQ ID NO: 46766
  chr9:139887202-139887232
  hyper

SEQ ID NO: 118485 - DNA, 30 bp, Homo sapiens
  chr9:139922580-139922610
  hyper
caggaagcccatggcggggccacgctccgc

SEQ ID NO: 118486 - DNA, 195 bp, Homo sapiens; identical to SEQ ID NO: 7139
  chr9:139923387-139923582
  hyper

SEQ ID NO: 118487 - DNA, 60 bp, Homo sapiens; identical to SEQ ID NO: 46768
  chr9:139940158-139940218
  hyper

SEQ ID NO: 118488 - DNA, 30 bp, Homo sapiens
  chr9:139940852-139940882
  hyper
gcttctccaggatgcgctcccttctggcct

SEQ ID NO: 118489 - DNA, 158 bp, Homo sapiens
  chr9:139943293-139943451
  hyper
ccactgcagtgtccgcggcctgcggggaagggcgtggcctcagctcccgagaggccccgccccgcaaggtcggccccgccccgccccgccccagcccaccttcttctggaagatcacgccgccgaaggcgcgctcgtcgaagccgtagccgcgactca

SEQ ID NO: 118490 - DNA, 532 bp, Homo sapiens; identical to SEQ ID NO: 46769
  chr9:139948372-139948904
  hyper

SEQ ID NO: 118491 - DNA, 31 bp, Homo sapiens; identical to SEQ ID NO: 7141
  chr9:139964409-139964440
  hyper

SEQ ID NO: 118492 - DNA, 16 bp, Homo sapiens
  chr9:139964698-139964714
  hyper
agccctccagcacccc

SEQ ID NO: 118493 - DNA, 360 bp, Homo sapiens; identical to SEQ ID NO: 46772
  chr9:139964731-139965091
  hyper

SEQ ID NO: 118494 - DNA, 30 bp, Homo sapiens
  chr9:139972394-139972424
  hyper
cgcgttccggcccccgagtcctggcgcccc

SEQ ID NO: 118495 - DNA, 30 bp, Homo sapiens
  chr9:139980661-139980691
  hyper
cgagggctgggagccgggtctgaaagcccc

SEQ ID NO: 118496 - DNA, 30 bp, Homo sapiens
  chr9:139981310-139981340
  hyper
ttgtctgacgcagtcgccgtaggacgcagc

SEQ ID NO: 118497 - DNA, 869 bp, Homo sapiens
  chr9:140023901-140024770
  hyper
cgcaggctgggagggcggcgggcgcagcgaccccgggcctcggtccgcccggcgcggtcctcaccctgcagcacaagagccgccggcagttcttgctgttgccgtagctctcgccaaagctctgcgtcaccgaaatgaagtcctgatgaagcagcggcggcggatgcgtggaagggggcctcgaggaaccaccggcggcatcaggagacccggtcctgtaaaagactgagagctccgcctctccgatactcgcgggcagccattgcggcgcacagaaccgtccgcgtgtgagcagcgcgcacgcgcacgcaatgcgcctcaaccccgcagcctatgcgcctgcactgagagctcacggcttgcggcgcctgcgtctaccccgcgcgcagtcgccacggcaacagggcgggccttggttctgcttcgggcgtggtcggtgcatggtcctccagcactgttcgccccgcgggtctggtcctgggttcctttcgcctcctgtcgtcggacggcaccggctttgcccacggcctcgcggggagacgcagacacccgggacccggggaggcgcccgggcgccgccgccatgttgtcagggagcgcccgctcccagctcttcggttccgggacccgcggcgcggggatggggctgggccgcccttggtagccgtcctgggctgggggccaccctggccgcgtggtcaccggcaagaagcccagggcctcacccgggcgcggcgtcgcgggggccgagggaaggaccggaccctcccgaggtcgcggacccggccggctggggcgaggctggggtggcccctaccccgagctaagctggccgcgccgcatctcaccgtcgccggggcccgagcgct

SEQ ID NO: 118498 - DNA, 132 bp, Homo sapiens; identical to SEQ ID NO: 46775
  chr9:140024786-140024918
  hyper

SEQ ID NO: 118499 - DNA, 116 bp, Homo sapiens
  chr9:140024956-140025072
  hyper
cggcgtccgtggccgccggaggcctgtgttctcccctgccgaacctcacgcgcggcccctccctcattttcttctggccaggctgccccctgccccttgggcgattctgctgcgtc

SEQ ID NO: 118500 - DNA, 30 bp, Homo sapiens
  chr9:140032671-140032701
  hyper
tgtcccattgggggcgtttgctgttaggtc

SEQ ID NO: 118501 - DNA, 30 bp, Homo sapiens
  chr9:140032934-140032964
  hyper
cccgaacacacctcgcggcgctccagtgat

SEQ ID NO: 118502 - DNA, 206 bp, Homo sapiens
  chr9:140033284-140033490
  hyper
caagcgggcacgacgcgttcggtcctattaaaaggcacgcaagggtgcgggctgcacgcggtgacacggacccctctaacgtttccaaactgagctccctgcaggtccccgacagcacaggcccctgtcccaggacccctccaggcacgcgctcacacgcacacgcgcgctccccggctcacgcgcgctccgacacacacgctcac

SEQ ID NO: 118503 - DNA, 8 bp, Homo sapiens
  chr9:140033618-140033626
  hyper
cgtccgga

SEQ ID NO: 118504 - DNA, 317 bp, Homo sapiens
  chr9:140033762-140034079
  hyper
cgcacgcttcagcgccccttccctcggccgacgtcccgggaccgccgctccgggggagacgtggcgtccgcagcccgcggggccgggcgagcgcaggacggcccggaagccccgcgggggatgcgccgagggccccgcgttcgcgccgcgcagagccaggcccgcggcccgagcccatgagcaccatgcgcctgctgacgctcgccctgctgttctcctgctccgtcgcccgtgccgcgtgcgaccccaagatcgtcaacattggcgcggtgctgagcacgcggaagcacgagcagatgttccgcgaggccgtgaac

SEQ ID NO: 118505 - DNA, 41 bp, Homo sapiens; identical to SEQ ID NO: 46780
  chr9:140051055-140051096
  hyper

SEQ ID NO: 118506 - DNA, 230 bp, Homo sapiens; identical to SEQ ID NO: 46781
  chr9:140051219-140051449
  hyper

SEQ ID NO: 118507 - DNA, 30 bp, Homo sapiens; identical to SEQ ID NO: 7145
  chr9:140063190-140063220
  hyper

SEQ ID NO: 118508 - DNA, 30 bp, Homo sapiens
  chr9:140082871-140082901
  hyper
cccagcgcagccggcggcaccaggccggtg

SEQ ID NO: 118509 - DNA, 30 bp, Homo sapiens
  chr9:140083769-140083799
  hyper
ttgccacggcaaggcgtcaggaccggctgg

SEQ ID NO: 118510 - DNA, 144 bp, Homo sapiens
  chr9:140095336-140095480
  hyper
tcaagtgaccctaccgattggacaacactcgcctcaaccccgcctcccaagggacttcattggacaacgcctatcaccggagctggcctccattggggacggccccccggacacaccccggtgcctcgcgccgctcactggcag

SEQ ID NO: 118511 - DNA, 30 bp, Homo sapiens
  chr9:140099707-140099737
  hyper
gaaaggcacgaacacgttccaccaggagag

SEQ ID NO: 118512 - DNA, 99 bp, Homo sapiens
  chr9:140100290-140100389
  hyper
cggagagactgggtcgcgaggcccggcgccggcggcttggctgccgggtgcaggccctggactcctacccggtggtgagggctcgctagggcctcggcg

SEQ ID NO: 118513 - DNA, 30 bp, Homo sapiens
  chr9:140116854-140116884
  hyper
caggacccccgcgtcgcccccagttctctc

SEQ ID NO: 118514 - DNA, 30 bp, Homo sapiens; identical to SEQ ID NO: 46784
  chr9:140118450-140118480
  hyper

SEQ ID NO: 118515 - DNA, 30 bp, Homo sapiens
  chr9:140134692-140134722
  hyper
tgtttcagccccagcgcgctgacctgtggt

SEQ ID NO: 118516 - DNA, 30 bp, Homo sapiens
  chr9:140136190-140136220
  hyper
gatgagcacggcatcgaccccacgggcacc

SEQ ID NO: 118517 - DNA, 30 bp, Homo sapiens
  chr9:140136519-140136549
  hyper
tgctccaagggcaccgccgtgggaactgcg

SEQ ID NO: 118518 - DNA, 91 bp, Homo sapiens
  chr9:140172875-140172966
  hyper
cgagagatttgcatcggggccctgcggaggggcggaggggcggaggggcggaggggtcgcttgccggtctgaggggcgaggccgcgaccag

SEQ ID NO: 118519 - DNA, 99 bp, Homo sapiens; identical to SEQ ID NO: 7146
  chr9:140195120-140195219
  hyper

SEQ ID NO: 118520 - DNA, 1866 bp, Homo sapiens
  chr9:140195551-140197417
  hyper
cctcggggctgctcctcggctgcagccggcatcggcgcgtcccgggcctgcgggcgggtcctgaaggcggcggcggagcgctccgagtccgccttcggctcccgccgcccgcctttcaccttcgggagaaaacattttgcgcagaggatccggtatctcgggattccgaacttgctggttgcgagactcaaatttcaaaaggggctggagcccgcgccccgcccccacccgcgaggcggcgggcaggcgagcgggtgggggccgtgggaagctgctccggcccggccgggcccggctaggccgcagggaggcgctcggccggcggggctgccggaccctggggccgggacgcacgcgccgtattcgccgtggccacgggccttctggcggggcctgcgagccgggcgcgcaccgaggtagttggcgggaaggtacagcagagacgacgcgggcgcagggccggggtccggggtcccggcgggcatcaccggccgctggccgcgtacttcgccttggtgatgagatagagcacgatgtcctggtggccaccgaacgcggcgatgtgcagcgcgctccagccgtcgcggttggccaggcggatgtcggcgccgaacttgaccagcagcttcacgagctccaggttgccgtcgatgaccgactggtgcagcgccgtctggccctcgggcccgaacgagttcacgttgaactcgcagttggtcatgttctgcagcagcgactgcagctcctgcgtgttgcccttgcgcacagcctcctggaagatgcgctgcgtctgcggcgcggagcaggtggacagctcggcctggctcatgctgccgccgggcgcgggccgcgggccgggccggggctcagcgcgggcggcggctgcggcgcgggcccccggctgtctcggggcgcgcctcggcgcatggagggcgcggcgtccccgggccccgcacgccgcctctgggcgctccgggcgctcggggccgggggtcgccgccgcggggaccccgccgcatccagccgcgcccgggtgggcgacgggggcgcgcgctcggctcgcgggggccgggcccggccggggacggcggcgccgcgcggtcccggtccctactcggttcggctgcggctcccacgcggtcccaaggcgcctccccacgcgccgcagcactagctcgcccgccgcgccggggcgccttttaccttctttatatttgcataacaatggcagcccgtgacgcgcgcgccggcggccccgggattgggccgcgcccacatgggggcggggcgtgggcggtgccgtgcgcaggggtccgggggcgggtcccggcggcggcgcgcttcgcggcagggggcgctggtcgccggcagcgcctgggcgggggaggccaggtggccgccgggggggtccagctccgtcgccgccgccgtccgcgcgccccccgggcgctccgcgtctctttgcggtcgtcccgccccttctccctccggccacccggggaattccaagctccctcagcagccagacccaggccttgcccggtacccgagcgcgaccgccaggtggccccgagggcggcctctcccgggcagggggttcgcgggcatctcaggcccgtggcgaaggagagacccctctgagcggagaggcgcgcggcgaccccggccagcccgcgcctccgggctcaccgtccacgcgggtggcaactccaggccctgacgtggggccttcagccacgcgggtccttcccgcgcgcgggcagcctcatggccgccggctcagcctatgtgtgccccaaccgtactgatgcgaggggcctccggccggccaccgcggcttctatcgcctggcggtgaagggggttc

SEQ ID NO: 118521 - DNA, 9 bp, Homo sapiens
  chr9:140210899-140210908
  hyper
ccgcgcgcc

SEQ ID NO: 118522 - DNA, 30 bp, Homo sapiens; identical to SEQ ID NO: 7150
  chr9:140238902-140238932
  hyper

SEQ ID NO: 118523 - DNA, 30 bp, Homo sapiens
  chr9:140284036-140284066
  hyper
ggggcatgaggcggacgccactcagagaca

SEQ ID NO: 118524 - DNA, 30 bp, Homo sapiens
  chr9:140317146-140317176
  hyper
cccctgcagggaggcgcccgtcccttctcc

SEQ ID NO: 118525 - DNA, 30 bp, Homo sapiens
  chr9:140343763-140343793
  hyper
ccggggagcacgaggcggcccagccccagg

SEQ ID NO: 118526 - DNA, 30 bp, Homo sapiens
  chr9:140353946-140353976
  hyper
gcggcctggctccgcgccctctcgtccagg

SEQ ID NO: 118527 - DNA, 730 bp, Homo sapiens
  chr9:140445745-140446475
  hyper
attaatttgggcaccgcgagggctcgagtccccccacaccactgcccggcctgcgggggagcacagacagcccgggccctcccggctgcaggtcccgggctttccccgcgcggttgccggctccgcccagaggagccgcgcccggcggaggggtaagaaaggcagggtcgcggcgtcaacgcggcggccgtctcgagtccagggcccgcgtcctccccgacctcccgacgccacctcacggcctcagggggactgggctcccgggaaaccgccggccacctggcggacgaacacaggcagtggcgggcagtggagacgccagggaccaccgcgctgagagcgatcactcatccgccagccccgccccgcgagccccgccccgcgagccccgccccgcgagccccgccccgcgagccccgccccgcgagccccgccccgcgagccccgcaccgccggccccgcaccgccagccccgcgagccccgccccgccccgcgcgctcctcgcattggccgagtccccgcggccacaccccctaccagattggggccgctattggacgcggcggccgcggccaatcggagccgctcttgctgcgacgcagcggtcggaagcggagcaaggtcgaggccgggttggcgccggagccggggccgcttggagctcgtgtggggtctccggtccaggtgagtctgtcggattggggcgggcgccgcgcgcggccaggggcg

SEQ ID NO: 118528 - DNA, 123 bp, Homo sapiens; identical to SEQ ID NO: 46791
  chr9:140473436-140473559
  hyper

SEQ ID NO: 118529 - DNA, 30 bp, Homo sapiens
  chr9:140499608-140499638
  hyper
ccagtctcagagctcgcctcggccccgccc

SEQ ID NO: 118530 - DNA, 163 bp, Homo sapiens
  chr9:140500665-140500828
  hyper
gcgtgcggtcccggcggggtgcagacacctgctgcggctccctgcgccccctgccacccgccagcaggcctcgccggccccccgccgaggtggacgcctgggcctcggggactgggtatcgggttgctgcagtggccgctggcagggcgccctggaggtgagg

SEQ ID NO: 118531 - DNA, 30 bp, Homo sapiens
  chr9:140514001-140514031
  hyper
ggcaccatctttaacgaaaagttggccagt

SEQ ID NO: 118532 - DNA, 622 bp, Homo sapiens; identical to SEQ ID NO: 46793
  chr9:140703837-140704459
  hyper

SEQ ID NO: 118533 - DNA, 30 bp, Homo sapiens; identical to SEQ ID NO: 46794
  chr9:140704853-140704883
  hyper

SEQ ID NO: 118534 - DNA, 14 bp, Homo sapiens
  chr9:140771893-140771907
  hyper
ggctggtggcgcct

SEQ ID NO: 118535 - DNA, 337 bp, Homo sapiens
  chr9:140771965-140772302
  hyper
cggtgcggccggcagagtgggctccggggacggcccgggctggcgctgagcggccgtcgaggacccacaggctcgtccgctcctgggcccggcccagccccggggtgggaggcgcggggcgagggaggcgcagccggaggggccggggcggggcgggggcggccgcggggcggggccggcgcggcagggtgggcggggccggcgcggattggccgggccccgccacgtgaccggccccttatagggcgtggcgcggggccgcggagtcgggtgaggcggcggcggctgcggcggtggggccgggcgaggtccgctgcggtcccggcggctccgtggc

SEQ ID NO: 118536 - DNA, 709 bp, Homo sapiens
  chr9:140772756-140773465
  hyper
cgcgacctggggaggcgtcgggagacgggcgaggggggtacggagcgccccagggcccctcggagcggcgggtgcgggagcatttccgtgagtgcggcgggcgcggggcggagcccctctgctccggactcgtccctccgcacgccgggtcctggggatcctggtcggtgcacagtgcgcggctagcctggagggcaccgagggcgaagccgcgtccgtgcaggtgcgagcgctgtggggacgcggccgtgcgcgcgcctggctgcaggtgcctgcgtgtgcgggctgagctggagcctggcgctgcgcgtgcgtgcgctcgcgatgcgggctacatgcatgttcacgtgcctgtgtaggtacatgtggctgcgtgtctggagggagcagcgtgcgcctgcgcggggtctccctccagcctcgcctgggggcgctcggccccctcccctcggggccctggagtcgggcggagccgggccggaggcgctgtccgcggtgctgacggccgcccgggtgtgccgaggggctggcggcccagactgcggaggccccgcctcgcggccgcccctagggatgggggcagggagtgagggagaccaggccgcttccgccaggagaggggctccggacccagttgtctcagcccctccggagacggcctagcggtggctgctgcactgggctctgctggcgtcggcctcgtgtttcc

SEQ ID NO: 118537 - DNA, 30 bp, Homo sapiens; identical to SEQ ID NO: 7156
  chr9:140876711-140876741
  hyper

SEQ ID NO: 118538 - DNA, 30 bp, Homo sapiens
  chr10:344355-344385
  hyper
cacttagctgggtcacgtttgcaggttttc

SEQ ID NO: 118539 - DNA, 500 bp, Homo sapiens
  chr10:734723-735223
  hyper
ccacaaaccctcctacgagaggaccaggacggcaaggccggagcccggcccggggggaggttgacgattccgcccagccctccccgcgcagcgcccgcgaacaatgggggtgggatcccccgggccgcgccaggaccgctgcacggcctgagccaccagagatcgaacccggggtccaacgacaagtttcgcattgaaatctggccgggcgttccaggccgaacccgccagcgaggaggtggcgcgcaccgcgctgctgcaccaaggacgccgcggctccagcgcagagcgcacgggaaggccgatcccgccgggcccgctgcatcctgcgtccccgcgcggcgcccaggccccacagacacccccagggcgcggggggatcgcggccccacaaacatcccagggcgcgggggatcgcggccccacaaacacccccagagcgcgaggggatcccaggccccacagacacccccagggcgcggggaatcgcggccccacaa

SEQ ID NO: 118540 - DNA, 882 bp, Homo sapiens
  chr10:735245-736127
  hyper
cgcggcctcacaaacgtccctagggcgcggggtctgggggtccgggggacgcgcacgctccgggctggggtcgcacctccccctccgggcccggcccccgccccgccgcaggccccgcgcccccagccctccgcgcgcggccctccccggtgacagcgcggcccggcccggggcgggggcccggttaccttccgacagctccagctccagctcggccaggcgcgcccgcacctccaggggcagcgccatgccctccaggctgcggtccgccatgctccgcgggcgccgcgccccgcacggcctcctctttgttcgcaggcggaggtctcggcggctcctcgcgcccggcggaaccgcaccgaggaggaggcggcggcgcgggcgcgggaggcgggcggcgggcgcgcagggacctccctcccctcggcgcctcctcagcgcggccccgccacggccgcctcgcgcgcccccgcgccccacggtccccggcccgccccgcgcgcgctcggcccctccccgcaggcgctgcggacccggacccggccctgctgctctcggccccggcccggcgggagcgtctctgcgcgcgcgcgtcacggggccgcgggggcagggcgcgcgcgcgcggggcgcgaggacgcgcaggagcgggagcgcgcgggggggcgcgcggccgcgtcggcgaagcgcgcgctcccgggggcgcgctcgggggcgggttgggggctcggggcccgcggggcggggcggggcggggcggtcttgtctgtcctgggctctgcgcgtccagcggagcctgcgggcccggccccagagcctggtccacccggctccctgcgaaaatcacgtcctggagccgcagcttgacgtctgcgcgaaaac

SEQ ID NO: 118541 - DNA, 106 bp, Homo sapiens
  chr10:830673-830779
  hyper
agaagccaggacctacgcacacccctggccggctccccgctggcccctctgcgcgtgggagcttccagcctcccgggtctaggggactgggggatgcgtcttcctc

SEQ ID NO: 118542 - DNA, 263 bp, Homo sapiens; identical to SEQ ID NO: 46800
  chr10:830815-831078
  hyper

SEQ ID NO: 118543 - DNA, 30 bp, Homo sapiens
  chr10:1034015-1034045
  hyper
ggactcctaagccccgcaactcccaaatcc

SEQ ID NO: 118544 - DNA, 102 bp, Homo sapiens
  chr10:1034386-1034488
  hyper
gtgccaagtacccgcgtgcatacggctgccggcatggcacattacaacttcaagaaaattacggtggtgccgtccgccaaggtaggcggccccgggagggcc

SEQ ID NO: 118545 - DNA, 153 bp, Homo sapiens
  chr10:1094291-1094444
  hyper
attcccaggagaagcgccttgagtgtgttgctgtcaccctcttgcacggacgcaggtgtatgcacccgcgtcacacgcgtggactcggcacggggaggccggtgtcgtcacgctcgtgtttctgacgatgctgtctacgcttgtttctgaatt

SEQ ID NO: 118546 - DNA, 13 bp, Homo sapiens
  chr10:1094961-1094974
  hyper
ccgtacgcgcttg

SEQ ID NO: 118547 - DNA, 66 bp, Homo sapiens
  chr10:1095030-1095096
  hyper
cggcagacgcgcgaagcaccgggaacctgagccgtgaccgcgggctctggcgcctttaagggggtc

SEQ ID NO: 118548 - DNA, 30 bp, Homo sapiens
  chr10:1095431-1095461
  hyper
cgctgggactacagcgtttggctgcacggg

SEQ ID NO: 118549 - DNA, 90 bp, Homo sapiens; identical to SEQ ID NO: 46803
  chr10:1102298-1102388
  hyper

SEQ ID NO: 118550 - DNA, 30 bp, Homo sapiens
  chr10:1102596-1102626
  hyper
aggggtcttcagcgcgcccagacccctcgg

SEQ ID NO: 118551 - DNA, 232 bp, Homo sapiens
  chr10:1462891-1463123
  hyper
gagccgctgcctgccgctgagaacacaggctctgcacccagggcacagaagcaggagaagatgtaattctcgaggaccacattgattaacgcccgcccagggctagccacaaattagagccccgtcctgaaagaagcagtgctatgtcttgtaaggcatgcttccaaaggagcttgcattgcacacaccccggagcaaaccggcaagtagagaagacggacacttcccaatg

SEQ ID NO: 118552 - DNA, 31 bp, Homo sapiens; identical to SEQ ID NO: 7157
  chr10:1627517-1627548
  hyper

SEQ ID NO: 118553 - DNA, 244 bp, Homo sapiens; identical to SEQ ID NO: 46805
  chr10:1651053-1651297
  hyper

SEQ ID NO: 118554 - DNA, 359 bp, Homo sapiens
  chr10:1778723-1779082
  hyper
ccaatgtttacaaatcgacgggcaccacattgagtaaaaactgccagccaatttggagaggcgatcgcagggcttcgcctatcccttcctccgggacagtttggatgggagtagctggcgcgagggctcgttcccccgtttttgggtaattcctttggcactgggagacgagatggcctccggagggtggaaggcagtgccagcccggccggccactggggactgcggggcccggagacgcgcggggtccccggggagctcctcgccgccctcgccccacttcgtccgggtccctcaaacatgtcgcagcgtggctgctcactgtcccctctgggcaagaggaggccccagacatttcc

SEQ ID NO: 118555 - DNA, 1055 bp, Homo sapiens; identical to SEQ ID NO: 7159
  chr10:1779111-1780166
  hyper

SEQ ID NO: 118556 - DNA, 2351 bp, Homo sapiens
  chr10:3109009-3111360
  hyper
cctgggggcgggggtcgaggaagccgagccccgaggctcccagcgccgccccaggaggaatcttgcgggccactagaagctgtgcgcgcggccgggctcggcccccacaacggcccgagcggccgggcctgccgcgagcctccgcgtccaggtggggtctccgcgcccccattccacccctccccgccatcggcgctccccgcaactgcggggtttccacccgccccggcgctcgcgcccactcacggtctccctcgcccccccgggagatgctcccggcgttctatcccgccccgccctggcgcgccccgcaaacgatgtgaccccggccccctgcggtctcccctcctccggacgctgcccctgccccacctgtggcgctcccgtcatctctagagcccccaaccagagtcctccagcccacccgcgaggctcgcgcacctgcgatgcggccccactagcagggacccgcccacctgtggcgctacccctgcctctgccgcctcccgcaccgctagcgcggcccccacctacgacgacccccgcgtagatgctcctgcccacacccgccccagccccggcccctgcccctagccgcgcccgcgccccctcccccgcagcccctcccatacgctcgggccccgcccgtcaccgcccattggcgctggggccgggcgggggcgcgggcggggcggcggttccgagtcaggcgcgcgcgggcagggtccccattgcctgctgcgcacccggacgtgcggctcccctcggcctcctcgccatggacgcggacgactcccgggcccccaagggctccttgcggaagttcctggagcacctctccggggccggcaaggccatcggcgtgctgaccagcggcggggatgctcaaggtgcgcgcccccctcccggcggcgagggagggacggacggacggagctggggagaaccgggcgaaggcgatggggtgaccggagagaagaggggggaagcgatgggggggacccggggaaaggtggcgaagcgatggggagaaccggggagaagagcggggaagcgatggggagaaccgggaagaagcccgcgcccggaagcggcaggggtacctgcggggcggcatgagccggcgaggcagccccggggtccttgcccggtggggcgggggaggaagggacatggcggtaggaacctccatccggaagatcagtgagttttccaccttcggttttgttttaaatggaacctggcagagggagtcgcctgaagcgccctcgggggtcgttctgcctctgagctgtaggacggggccgggcgtcccctccgaagcgtgggtacagcgcgatcacttcctaagtgcccccccgccccccaactccgccgcacgccaccccctagaatgtcgaggaagaaacggctgggtccccgcgcgcctcctgtcgcctcgtgccctgcgcggcgtgggcggggtcctggctgctgcaatgcgggacgcggcgggggtgcgcggggttcccgcctggcgtctccagggcggtccggcagcccctcgcgtttccgctgggagatttttaaaaagggtttcctgcgctcgcatgtgctgtcgccttccggctcgtgacaaaaacgaaaaccaaaatgggtcccaggccctccccgccagcctccgcagacgggaaggatcaggaagcggggactccgggatgtcagcggcgccgcggcgcgggctccgggcttccctgccctgcaatgtggaagctgctctctaggaggggcccgaggctgggcccacggacgcgggcgcgccgggaggatatttaacattgaagagcggaaggtggcggagactcggcgcgccccaggccccgggtgcacgtgggggcgccggtgcccggatgatggagtgtcccgatccgtgcaatccctggcgggtagatcggcgcttcccaggcgaacgcaacctgggagccttagcgatcgcgcaggctggagacgcggcgcgccccgagctgggttttgatttttgttttcccggttcctcctgccgcagatgcgtggaaaggcccggatggcggatttcctcccgtttcggggccgcgcactgcacagggttggagcggggatgcaccccctgcccactgcgcgggtgaccttcccttcgcccttgagcgcgcggggcgggcgcgggtgccgcaggttgaggcgctgtgggcgccgccccgcccgccacgagcgcctacgtgatgcccggcccgtcgtctccacgagccccggccccgacacccgtgcgccgcgcgctccccaggcccgcagcgcagcctccccaggcccagcgccccccgcgggagacccgggtg

SEQ ID NO: 118557 - DNA, 115 bp, Homo sapiens; identical to SEQ ID NO: 7163
  chr10:3214966-3215081
  hyper

SEQ ID NO: 118558 - DNA, 173 bp, Homo sapiens; identical to SEQ ID NO: 7164
  chr10:3239421-3239594
  hyper

SEQ ID NO: 118559 - DNA, 30 bp, Homo sapiens
  chr10:3281969-3281999
  hyper
gcaccgcgagggaacggtcactaggtgtcg

SEQ ID NO: 118560 - DNA, 30 bp, Homo sapiens
  chr10:3709338-3709368
  hyper
ggctcttctgccccgcgtcgagggctgagc

SEQ ID NO: 118561 - DNA, 30 bp, Homo sapiens; identical to SEQ ID NO: 46812
  chr10:3827306-3827336
  hyper

SEQ ID NO: 118562 - DNA, 79 bp, Homo sapiens; identical to SEQ ID NO: 46813
  chr10:3827580-3827659
  hyper

SEQ ID NO: 118563 - DNA, 31 bp, Homo sapiens; identical to SEQ ID NO: 7166
  chr10:3862627-3862658
  hyper

SEQ ID NO: 118564 - DNA, 256 bp, Homo sapiens
  chr10:3862674-3862930
  hyper
ccagatggtgacggccgggcatcagaggccacaccttcaactggagctccaaccccacagcgtcagcacctttctgtcggggagagagtgtgaccgtgatgagaacaacagtgcttccacacggtcttcccttgcagaaggagaacgtcagacagagttctagttatacctcgacatagcttttcagctgaaaaattccattttaccagctgagcatgtggcttggtctgggatatttggtcgcaaaacaaaacaa

SEQ ID NO: 118565 - DNA, 239 bp, Homo sapiens
  chr10:5454340-5454579
  hyper
aatgaaggaggtaccgggccttagggactcagggatgcgctcaggagttaagggcaaattttcctaggttctttcctaggcaagtagatcccgggagcggtggaggggcgggactccacgtctcctaggaaccgctgcgcgctcactgattggctgatcgctgctcagccgccattttcaaatccccggatgacggcggtggcggctgcagtccgctgacaggcgctttctgcctggca

SEQ ID NO: 118566 - DNA, 158 bp, Homo sapiens
  chr10:5488420-5488578
  hyper
cactctcctcctgggcgaaagctgagaggcctaggtgtgcccagctctcagttaactgaagtcacgtggtggtggaccccgcccccagggcccggttggctgtggccccgcccccgagccctggggtcggtgcttgctgcctgcggctctcagaagcc

SEQ ID NO: 118567 - DNA, 30 bp, Homo sapiens; identical to SEQ ID NO: 7168
  chr10:5615942-5615972
  hyper

SEQ ID NO: 118568 - DNA, 856 bp, Homo sapiens
  chr10:5707984-5708840
  hyper
gtcggggtcacgcggacgcctctgcaggatgctcggacactgcgccacggcctcacccgcgccagtggaggggggtttagctcttaccgtgggctcgcgcctggcttccccgagagggagcaccgtgggcgtttcccaggctctcccccgccactgggcaacggccccgcacgcgtcccgcaccttccccagggcgcgcggcgctcggtgggtttgcggttgcgaaaccccacacctggcgagccgcacggactgcaaccccgcagtgcgctggcctgggacaaggcaccagacatgagagcccgtctgggatgcgcggcaccactgggaccctgctttcaccgcggcccaccccgccaaacgcccccgcccacggagccagcgcggggcgcgccaccacctccccggcgcaggccatcggatacgcggccggcctcaggagccggcgccgctgcctcgctctgacctccgcggcgcccgcacgtacccacgtcgcccaggaagcagccgtccgccgcccggggctccatgcggctcaccggcggccgcgcggcgactctgggcgccgggacctgggccgggccgcgcggggccgctgggcggggccagtctgcgctgggccgcgcgtcgtcccgaggcgaccgagccgggagttgtagttcccgccgccttggcgaggttcccggaggcgctgtccctgggtccggactccgctgtcgctgcccaccccgcttcgcccgtcgcgccgaggagtgtgtgtgcttgcatctgcaaaccgtgcgtcccgtgcacagaatacgtccggtgcaaaacgtgtcctgtgcacttgtcctatgtaaacgtgtgtgtccgtgtg

SEQ ID NO: 118569 - DNA, 30 bp, Homo sapiens
  chr10:5855460-5855490
  hyper
gcggggcctgcaggcgccgggagggccgcc

SEQ ID NO: 118570 - DNA, 30 bp, Homo sapiens
  chr10:5932028-5932058
  hyper
gcccccaccgattgcgcatttcgattggcg

SEQ ID NO: 118571 - DNA, 31 bp, Homo sapiens; identical to SEQ ID NO: 7170
  chr10:6018342-6018373
  hyper

SEQ ID NO: 118572 - DNA, 374 bp, Homo sapiens
  chr10:6018595-6018969
  hyper
cttcctctggctgccgggacaaaacccctaggaatcgctcattccgtcctccctgccgagatcagagctccgcgacccgctttcttctcgaatacaccaagcgatcacagatctcttccccctttttctgcgagtgtagactccaggctggcccccactccccacccccatccggtcccgaccgcctctgctggtttcctgatcgcttaagaattggaagttgtttccaggtccccaggtgtgcaacttgcccgacgcgtttccccctgggacacagctcctccccaccctcccagctcccactgacataatttacttttgcctgggagtcgggaggagtagtttctcccggacccctccgaggaccgcgtgct

SEQ ID NO: 118573 - DNA, 31 bp, Homo sapiens; identical to SEQ ID NO: 7172
  chr10:6019532-6019563
  hyper

SEQ ID NO: 118574 - DNA, 107 bp, Homo sapiens
  chr10:6130772-6130879
  hyper
tcaccatctgggggcgctgccgcgctccccaagccttgtggaatttcgaaaatgtgcgccagggcgacacctcttgatggtaagaagacgccggcggaggggagcgt

SEQ ID NO: 118575 - DNA, 30 bp, Homo sapiens; identical to SEQ ID NO: 46822
  chr10:6186632-6186662
  hyper

SEQ ID NO: 118576 - DNA, 30 bp, Homo sapiens
  chr10:6186944-6186974
  hyper
gagcgcccccggcgcgatgcccttcaggaa

SEQ ID NO: 118577 - DNA, 30 bp, Homo sapiens
  chr10:6187269-6187299
  hyper
cctttccggccccgcgtctcctctgcagcc

SEQ ID NO: 118578 - DNA, 200 bp, Homo sapiens
  chr10:6244499-6244699
  hyper
cttcccaagggattcggctgcggggtccacggtctacactgggcaggactgcgtctctgctctcctcccggccagcacagttgaggtgaggggccggaattagtcggggaagctgtgccagacgtcccgaggggacaacgggacgaggggataacagcagccaggacccttcagcagggctgggcgcgctccaggcccgg

SEQ ID NO: 118579 - DNA, 283 bp, Homo sapiens
  chr10:6245256-6245539
  hyper
aagatctgggtgcccgtggaccacaggccctcgttgcccagatgtgagtgcagctgcgcggagccgggttgcagggcgggctgcgccgggccgggccattgtgtggggcggctttgtgccgacgcccctctgcggggggcgcgcccgtgcgggtcgcgccggcggggcggggcggaggcgcgggctgcgcgtccttggccgggcggcgggggcgctgtggcccttgtcccggtggctgccccgccggcccggaaacggcgagtgcgcccggccgggctgcgta

SEQ ID NO: 118580 - DNA, 146 bp, Homo sapiens
  chr10:6246026-6246172
  hyper
ggcgcacgcaccccccggtgctcggaattggctggcagtaccctgccccgccccgccggtcgccgcccccgccaccagcgatcgcttgggagagggttacctcgagctccacctcagctgcggagcgccgccgcggaaaagggcgg

SEQ ID NO: 118581 - DNA, 968 bp, Homo sapiens
  chr10:6621839-6622807
  hyper
accttcttccctccccgcaggccccctttcgttcaggtgagaaggaaaagggagaagaaaggaggaagcgcccccaggccggcggcccccacccggctaaggtcgccagcatcccgcatcccgtgcgacctgcgtcccagaaacccagcggggaaattcttcccggtgcgctcttgcgcccgcttggttccatttcctactccgcctgctcacccggcagccctcaccccttcccggaggctctccgaggggcccgggtagcccttctcgccacgggtctcggcccctccagcccgctccctcccggcggcggcgcggggcgcggggccctacctggagcgagcacggcgccgctgctgcccggtggcgctgggactgcgcggggactgcgcggggactgcgcggggactggcggggctggcggggctggcggggctggcggggctggcgggcccggcgcactgcgggtgcgcctagaaggcggtgcccgccagggggcgctcgccagcctccccgccagcccggcctcccgggacccggcacctctagccagggacgcgcgctcggtcccccgccgtgcgcccccggtcccgcgcccaggctcccgcccctggcctccttaccagccacttgtcgcccagctgcgaactggagcgggaggcggcggccggagggcccaggacagccccgggagggcggcgaggcggagcaggagcgccccggctccggccacattctcagagtcaggaaaaggggcgagaggccacatgtctccctctcgcccaactgaaaacgaaacggcgctccagcagattgggtggaaagagctgggtctcttttctctgtttttcacgctagaaagggcttgtaaacattgttccttttaaaatgacctaccccaggcatttgtttgggcacacttctgtcctggggtcatcgttcctaggtggcttcggacctgggacttt

SEQ ID NO: 118582 - DNA, 30 bp, Homo sapiens
  chr10:6962170-6962200
  hyper
ggaggtaacgtgggcgttcgccttaggagc

SEQ ID NO: 118583 - DNA, 301 bp, Homo sapiens; identical to SEQ ID NO: 7174
  chr10:7449888-7450189
  hyper

SEQ ID NO: 118584 - DNA, 3166 bp, Homo sapiens; identical to SEQ ID NO: 7175
  chr10:7450490-7453656
  hyper

SEQ ID NO: 118585 - DNA, 410 bp, Homo sapiens
  chr10:7453902-7454312
  hyper
cgcagagcccaaacgaaatgtccccagtgcggaaaagccggtgacgccctggtagcaagaccaagagcttccgaagaacgctgcgcccttaactagggggcctcgcagagatgcctgtgtgggcctgcattgtatatttctgcgaaatagcgaatggacacgtttgctcagggtttttatggttgccaaagggggtaaaattacccagtcccccaaatctgtgtcccatgaatccctctcatagtacccctctccagggggccaagaggtcctccaggtccccgtgggttcgcagctccacccgcccttcctcgccctgcatccctaaggagaggtgtccgctctgaagggctaggggccagccatggagtgaggggaccggggctgaccacgcgcggcacagacagagg

SEQ ID NO: 118586 - DNA, 288 bp, Homo sapiens; identical to SEQ ID NO: 46830
  chr10:7708264-7708552
  hyper

SEQ ID NO: 118587 - DNA, 260 bp, Homo sapiens; identical to SEQ ID NO: 7177
  chr10:7708596-7708856
  hyper

SEQ ID NO: 118588 - DNA, 30 bp, Homo sapiens; identical to SEQ ID NO: 46832
  chr10:7709833-7709863
  hyper

SEQ ID NO: 118589 - DNA, 72 bp, Homo sapiens; identical to SEQ ID NO: 7178
  chr10:7729412-7729484
  hyper

SEQ ID NO: 118590 - DNA, 203 bp, Homo sapiens
  chr10:7829456-7829659
  hyper
tggcattgcccgggcgtctagtattgcagtatccccgcccctgtgaggggtgcaaaaccttttctgatttcatttctttggtggtggggatcggactggggaggaatgaggggtcgcagaacacaggctgcccgctgggcccgggggctgcggggagggacggctctcgtgcgctgagtagttgactcgcccactgcagacct

SEQ ID NO: 118591 - DNA, 42 bp, Homo sapiens
  chr10:7829884-7829926
  hyper
cgacttccccatggcgaccacggcagcgatcactttctggac

SEQ ID NO: 118592 - DNA, 30 bp, Homo sapiens
  chr10:7830405-7830435
  hyper
ggtgtgcgcagggccgggctccggcggagc

SEQ ID NO: 118593 - DNA, 30 bp, Homo sapiens; identical to SEQ ID NO: 7179
  chr10:7830833-7830863
  hyper

SEQ ID NO: 118594 - DNA, 30 bp, Homo sapiens; identical to SEQ ID NO: 46836
  chr10:7859997-7860027
  hyper

SEQ ID NO: 118595 - DNA, 30 bp, Homo sapiens
  chr10:7860498-7860528
  hyper
ctctcaggctggcgcgctccgtgctgctgg

SEQ ID NO: 118596 - DNA, 30 bp, Homo sapiens; identical to SEQ ID NO: 46837
  chr10:7860731-7860761
  hyper

SEQ ID NO: 118597 - DNA, 146 bp, Homo sapiens; identical to SEQ ID NO: 46838
  chr10:8075798-8075944
  hyper

SEQ ID NO: 118598 - DNA, 123 bp, Homo sapiens; identical to SEQ ID NO: 46839
  chr10:8076053-8076176
  hyper

SEQ ID NO: 118599 - DNA, 222 bp, Homo sapiens
  chr10:8076340-8076562
  hyper
cggtccctgggggcggggctctggcacgagggggaccctcccgggtcaagttcacagaggcggaggggcctgggctgcgccccagagccccagggggtcctctgctcccataaaaaacaaagacgggggcggcggagggtgtggaaggaaagaaattgaaaagggagtgcgggcgactgagggaagctggaggggaaataggggcctcggccaccagtggcc

SEQ ID NO: 118600 - DNA, 334 bp, Homo sapiens
  chr10:8078023-8078357
  hyper
ggacagtgaggggccggtcctgggcccggaggactcagcagccgccttggcagcaaatcctgtaggctgtcccctgccttggttgtctcgatgttccgctcagcgctggggaaataaatcgaacctggtgcacacccctcccccaggttgtaacacaactgcccccccagccaacacacacgcccaagcacgcagactttgcacacgtgacatgggggtctcaacaataaagaaaaaaaagaagaccttacagcgcgaagaagcgggctttagttaatcgatttcaaacacgcctgtggtgcggctcagtgaccccctccgctcggctgagtcc

SEQ ID NO: 118601 - DNA, 134 bp, Homo sapiens
  chr10:8079255-8079389
  hyper
agctcgcagcggtaacgtagacattggacaagtccagcctgaaaccgaagcctcttgaaaggggggagacggggagaacctgatagctggaaactcgttttctccaaaggctttcgggacattttagcccggct

SEQ ID NO: 118602 - DNA, 98 bp, Homo sapiens
  chr10:8079654-8079752
  hyper
cagtgacaatccggccggggccggggccgcggggaaggggcaatggggggaacctcttctggttttgctccactcctggaggcgacaccattcatctg

SEQ ID NO: 118603 - DNA, 63 bp, Homo sapiens; identical to SEQ ID NO: 46844
  chr10:8079997-8080060
  hyper

SEQ ID NO: 118604 - DNA, 382 bp, Homo sapiens
  chr10:8082850-8083232
  hyper
agataaggaaagagtcgtttataattctccacctcgtctaatattttaaaataaagtcagaggcaagaaaacgccataaaacactggtgagcaggcaagcgccgaatgaaaaatcacttccatgttattatatccacagtaagatttaattaaaattctccacgtccacgtgctttattttcagataggattttttcccatcacgtaataattgataggaatttgcaaacggggctatttatttagggcgcctgggtggaataggtctgatttttttttttaattttcagtcattgcttttgaaactttcatttgcgatatccatagtttcagaccacctaggcccccatcacccacccgccccacccgggctacagttctt

SEQ ID NO: 118605 - DNA, 30 bp, Homo sapiens
  chr10:8084168-8084198
  hyper
ccagcagtgggtgttcgtgtctgtgtgtgg

SEQ ID NO: 118606 - DNA, 30 bp, Homo sapiens
  chr10:8084511-8084541
  hyper
ttaaaattcaggaagcgaattggggcttca

SEQ ID NO: 118607 - DNA, 594 bp, Homo sapiens; identical to SEQ ID NO: 46845
  chr10:8085599-8086193
  hyper

SEQ ID NO: 118608 - DNA, 178 bp, Homo sapiens
  chr10:8086679-8086857
  hyper
caaatattcttatgcctactccgaggagggtcagagggtagcagcccgtcacccagcatcctgcacctcctaacttttacggggcaactacggctcaggagagatgaaagtagaatgggggcgttttggaggcatcagcatagacagaaacaggagaaatagtcggaagggagaggga

SEQ ID NO: 118609 - DNA, 30 bp, Homo sapiens; identical to SEQ ID NO: 46847
  chr10:8087411-8087441
  hyper

SEQ ID NO: 118610 - DNA, 2665 bp, Homo sapiens
  chr10:8090493-8093158
  hyper
taagatgtccaaagcccgggagacccagggacgccggctgggctgcctccaccccttcttttcctcccgtggcacccacctgtccccccacctgccaaggccaggagggagggagagagctgaaaagggcacttttcctccagggtgactccaattcctttccactcaccctcaaggcgagttccttctctcccacccaacccggggctccccccaactgccactcgcctcacgtgtgagttgttaaacccgaaagcagaaatcccctgccctctcccttcctgtctccccctttccgctgcacccctacctacccaatttttatctcgctacaatcaggggttttctcaaccggggaaaaggtggtagtggcggtgggagggtcaggatccctcgaagtggaggccggggccgggctgggggcggagtgcgggggcggggggaatctcccagcgcatctcctcttttttgactctccccacggctcgcggctctcctggcctgggcgggtttccttccgagttttaaacggtgatcgatgaataagcaaaacaaacaaacaaacagaaaaaaaaagaaaaaagaaaaagaaaaaagaactaaaggaaggaaaagaaaaaagggtaaatcaaatcacataccatccccaaaacgatagctcatttcacggggaaggtagactcctggcccggggcgcgtgggcgtgggagccgcgaggagagttgccccttggacgcacccgcctccatcatcttcccattgccagtgagttttagggtccctctttctctgctttcccccaagttccctgctctctgggttttgtttgaagagagccagccttgctgggccgggatcctcaaccagtattgcccactgcccgactgccttttcttcccgtttaggtcttgctccccgctctccgcatttcagctcgcaagggaaagaaaacgggggcccgagtggcagagacagagataatatgtatttaacctgcgcggtccggggcgccctgccgcagcgggctccccgcggtgtggcccgcgcagccggggccagcggcggcgcctggagccgtgtccccggcataaccctcccgcccggcagccggcgagctgtttatacagctttacctgtgctatagtcctatccagtagaaacccttgcgcggccagggtaacctaatccaggggccgaggcggaggagggggcggtgaggctggctgggttggagacggaggtgtgcgcgctccaatacccgggatctctcctttgcccctcctcccaccatagggaaggaaatatggacatggttcgggtgacagaaatggggacccggggctaaggaggaaggaggccagttttcacggcccggtcctccggcttctctcctttgaacaggcgctggggacctccgcggcggccacagctggacgcgcgccgcgaaaggcgcggcggtcccgcgggcgcccggcgtgggctagagaggccggccctggcctggctcaggtcgccctcgccccgctttcatcttgccccagtcgccctttacaattcccacaccgaaggcaaagcaagcaaggaaagaagccggcgcctccccaagcggaccctcccttccgcgcagcctcggccactcttccagagcgccccggtgcgtactgcggcgggcgcagggaatcgaattaaacgtctctgggcggttattgtctttctctaattgctccaacaatggcctctattaaaatggagacacccaattaaaggccccgccgggccgctctcggctgccggcaaagctctggcccccggcctgcgacgtgcagaccgcggggccgcggacccggctggtgcggggtactggcgccggcctcgacacctttggcctccacttcctccccagactcacagcgacagcggccgcttcacaccgtttttattgaccgatcgcagcccagcaagattgatcgagctggaatgggaagggacttctcctcccccaggcccagctcgccagggcctcgggccgtgctgcagtttctggcctttggtgtcgctccccgccccccagccccgcagattcccggcttcttttctgtctgcgcggccgggaccgcccaggcaggcgccggggctccggggctccggggggagggactcggcggctcggctcggctccgcttctttcttctgcctgcaaatatttgctgcctcgctggaaatccgacgatttcgcgcgcgctctgcttgcaaagtctttaagtaaacacgctcaaatgaccgccccgggcggcccgaggcacgctctctccccctccgcgggattagtaactttaggacttcgaccccggggctccgctttgcctgttacccaggtcgggcagcgcgcgggcgcccggggccgcttctcccggcacctcggccccgcggagctcgcctggaagcgccggttgcctggctctggtgggtggcccggccgcgagcatctccgcgccctgggtctgtagccctagggctgagccccagaaagccgcgcctccgctctgcgccatggcctctgctttctgtacccgactgggtttccccacttccactgggacagggtctcttcgcccctgggagggcgggtgggagggacttgcacgtgggcatgtgtttgggggtg

SEQ ID NO: 118611 - DNA, 76 bp, Homo sapiens
  chr10:8093387-8093463
  hyper
tcccaaggtcccaggcgtccaggttgatcgccagccccttaccctggtgagggaggccttgcgccctgcagaagcc

SEQ ID NO: 118612 - DNA, 302 bp, Homo sapiens
  chr10:8093522-8093824
  hyper
cgagctccgccggctgctccttgggaggaaggggactcgctagaccaggccgaggcccaggtacctgggagggggtcgcgtcaggtctgcgggaaggcgctcaggcttctccgcaggaggccaggatcagctttgtggcggtggcacagggagaatcaggaccacctttcccccttacccccggccaggatccccctttccctcccccgcccgccaagggaggaggaagcccggcctgctcttgccggcgaggcgggtcaggccggcgcctggcctggcccggacccccgcagcccggctct

SEQ ID NO: 118613 - DNA, 104 bp, Homo sapiens; identical to SEQ ID NO: 7185
  chr10:8093859-8093963
  hyper

SEQ ID NO: 118614 - DNA, 116 bp, Homo sapiens; identical to SEQ ID NO: 46852
  chr10:8094141-8094257
  hyper

SEQ ID NO: 118615 - DNA, 345 bp, Homo sapiens; identical to SEQ ID NO: 46853
  chr10:8094327-8094672
  hyper

SEQ ID NO: 118616 - DNA, 352 bp, Homo sapiens; identical to SEQ ID NO: 7187
  chr10:8095106-8095458
  hyper

SEQ ID NO: 118617 - DNA, 2095 bp, Homo sapiens; identical to SEQ ID NO: 46855
  chr10:8095492-8097587
  hyper

SEQ ID NO: 118618 - DNA, 457 bp, Homo sapiens
  chr10:8374271-8374728
  hyper
ggaactgttgagaagggcttacgatgatctttgtaaaaagaaacatctcgtaagagtcaggactctgggcggcagcggcagagggaggtgctgggggcggtggcatagcgcccacaccgcgtggtccccgcgcgcggctgggctggcagcgccccaggcagcgcgcacggtaagcaggaagctgcggccgagctgagtcgctcaaaagctactggagctaatagattgtggtcatgaggagagcggcagcatctcggtagtgatgggaacactcaaaagcatcatcaaaacagttgcagaaacatgctgagctctgcactcccgagcccgtgcctgctgcagccggcttggagtttgctggtagccactgcagccccggccccgcgcgtccagcctgggggtgcgatgagcaagagaaatgaggtgcaaaatgttgcatccgcggagctgcttgcaa

SEQ ID NO: 118619 - DNA, 30 bp, Homo sapiens; identical to SEQ ID NO: 46856
  chr10:8701203-8701233
  hyper

SEQ ID NO: 118620 - DNA, 30 bp, Homo sapiens; identical to SEQ ID NO: 46857
  chr10:8739564-8739594
  hyper

SEQ ID NO: 118621 - DNA, 30 bp, Homo sapiens; identical to SEQ ID NO: 7190
  chr10:9423701-9423731
  hyper

SEQ ID NO: 118622 - DNA, 30 bp, Homo sapiens; identical to SEQ ID NO: 7191
  chr10:10043570-10043600
  hyper

SEQ ID NO: 118623 - DNA, 242 bp, Homo sapiens; identical to SEQ ID NO: 46860
  chr10:11059421-11059663
  hyper

SEQ ID NO: 118624 - DNA, 225 bp, Homo sapiens; identical to SEQ ID NO: 7193
  chr10:11059932-11060157
  hyper

SEQ ID NO: 118625 - DNA, 120 bp, Homo sapiens; identical to SEQ ID NO: 7194
  chr10:11060314-11060434
  hyper

SEQ ID NO: 118626 - DNA, 116 bp, Homo sapiens; identical to SEQ ID NO: 7195
  chr10:11060512-11060628
  hyper

SEQ ID NO: 118627 - DNA, 68 bp, Homo sapiens; identical to SEQ ID NO: 46864
  chr10:11060741-11060809
  hyper

SEQ ID NO: 118628 - DNA, 407 bp, Homo sapiens; identical to SEQ ID NO: 7197
  chr10:11207022-11207429
  hyper

SEQ ID NO: 118629 - DNA, 169 bp, Homo sapiens; identical to SEQ ID NO: 46866
  chr10:11207709-11207878
  hyper

SEQ ID NO: 118630 - DNA, 31 bp, Homo sapiens; identical to SEQ ID NO: 7198
  chr10:11282875-11282906
  hyper

SEQ ID NO: 118631 - DNA, 106 bp, Homo sapiens; identical to SEQ ID NO: 46868
  chr10:11652859-11652965
  hyper

SEQ ID NO: 118632 - DNA, 169 bp, Homo sapiens
  chr10:11653474-11653643
  hyper
gcggacagagctggcggtcccgggcggccgagcagatccggcgcggcgcggcgcggcggcggcggcggctaccgcagtgccctccgccccattgtttcccttccaagaggatcccggcgaagccgagcccgggaaccaggaagttccccggcgcgacacctcctgccgc

SEQ ID NO: 118633 - DNA, 871 bp, Homo sapiens
  chr10:11865126-11865997
  hyper
gcgtgggtcgctcggcgatggggttggggattttcacggtgctgtcccccaactcgaacttcacaccttgaccgaggacccccgggaggcggccgcgaggtcccccagcgcggcggggcccggccctttaagcgccgcgggcgcgcgcagtgcgtgcctaaggagtgcgagttcgggcggcgcgagcgcgcggcggcagtagagcgcgcgcgggtgggcgcgcacagggagagcgcgcggcggggcgtcccggaacagtctgcgccagacgggcggcggcgtgagggctccgggtcgctggcggcgtggacacctgagtcccggggtaggggtctcccgcgaggtgagtggggccctaggactccgggcagggctggagcgacgggagggcgtcctggcggcggtggcggcgctgggctctggctgggacgccggcgggtcgggcagagagggggcgccggaccctgccttggcgcgctcctcgctctgactaggggagcccggcgccgccgccgcagaggccacccggtgcccgacccccgaccccggggcgtcgctgcctcctcggggacctcggagtcggggcgcggcggggagcgcgctgggttccgagtctggggctatcctgggggctcaggggtggaggcgggtttcccagccttgggcgcagagggtccccgctgtccccaccgtccgtcccccaacccgggacccctgtcctttgcgccgtgggaccccatgcggcctcggggagagggtgcgggtccgacacggcgggcggagccacctgttccacccgggcccccaggtcctggaatcacgcggggatgtgcagggtctgcccagcccagcgcggcgggagggactaaaa

SEQ ID NO: 118634 - DNA, 19 bp, Homo sapiens
  chr10:11909253-11909272
  hyper
actccgtctcaaaaaaaaa

SEQ ID NO: 118635 - DNA, 30 bp, Homo sapiens; identical to SEQ ID NO: 46871
  chr10:12084741-12084771
  hyper

SEQ ID NO: 118636 - DNA, 30 bp, Homo sapiens; identical to SEQ ID NO: 46872
  chr10:12085037-12085067
  hyper

SEQ ID NO: 118637 - DNA, 48 bp, Homo sapiens
  chr10:12110721-12110769
  hyper
gctacatcctgtttcgtactgggagcaggtgccgccccgcggaacact

SEQ ID NO: 118638 - DNA, 30 bp, Homo sapiens; identical to SEQ ID NO: 7201
  chr10:12111249-12111279
  hyper

SEQ ID NO: 118639 - DNA, 30 bp, Homo sapiens
  chr10:12171439-12171469
  hyper
ctgcgcggcttccacgccccacggctgccc

SEQ ID NO: 118640 - DNA, 30 bp, Homo sapiens; identical to SEQ ID NO: 46874
  chr10:12171790-12171820
  hyper

SEQ ID NO: 118641 - DNA, 195 bp, Homo sapiens
  chr10:12237743-12237938
  hyper
tgactggcttgccccggttacttactccaaggtgtaggggtgaagaacggaagaggacgaaataactagctggaggcagcagtgtcagccgatgccggtgccacggctcgaaacaccggcgcctctcgcggtgctaaaaggatgggcgcgcaccctccttccggcatccgtagaacccccgcctttgacctagct

SEQ ID NO: 118642 - DNA, 54 bp, Homo sapiens
  chr10:12238326-12238380
  hyper
ggagggggttcgcccggtcgaccggcaaaagggaactgcgacttctgagcgaat

SEQ ID NO: 118643 - DNA, 1968 bp, Homo sapiens
  chr10:12390697-12392665
  hyper
ccttcgaggggactgcggggcagacgatcacttctttccactgagtctctgggaggagacagggagatgccagaaggggccaagcgtgagccagggcaaccaggccggccaggcccgccggccgctccagcccagcaccagggcgcccgcgcggctgccaaacacccccgggagttttgctcgcaaagggaccacgaggcagctgctggcgcgtcctgcgcgtacccgcccagaggctccccggcttgctcctcgcgggtctgtcccgaaactgacgtgaaaccgatttggtgcaatgcgaatgagctcccgcccgcctccgcctccatcccagccgccgccgccgcccgtcgccataacaaccggcccccaccccccccaccccacgccttgcccctcgggtcccccgggccacaggccacagcgcgggaaggcgccccgccctcggcgccccgcatccggccgccgcgcacccccgcccgcccggcgcttccgagccacgcagaggcgccccctcccgccggagacgggaaagccccggcgcccccagactgggctccgtttccagctcccggaggggctggggctctcccgcgtgcgccccgcacctgccgggggcccgtacccgccctcgccggggctccagggggcacgacggccgtggcccggcgctcttgggaggggagcgggacatccccgaaggcggcgcgctggaggcggggagcggccggggcgcacggagagggcggggagcccgcgggagggggaggagggggaggagggggaggaggcgcgaggtgggggggagcgcggcgggcggcagggagggagcgggagggaggcaagaaagtagcagaaagtgaggctggcaggcggcggcaaaggagccggcgcgcggcggcggcaggaagtctgtgcccgagaacagcagaaataagagccagggagggaccgcggccgcggcggcggcggcgagagcgaaagaggaaactgcagaggaggaagctgcgccgcagcccgagccgcccggcatccccgccgcctctgcgcccgcgccgcgcccccggcgccccctccccagcgcgcccccggccgctcctccgcgccgcgctcgtcggccatggcccgggagaacggcgagagcagctcctcctggaaaaagcaagctgaagacatcaagaagatcttcgagttcaaagagaccctcggaacgtaagtggggaccggggaggcgagggtggaggtggccgcggcaggggctgcacgggcagctccagctgccgccgccgccactaccgcggcagaaacccagcctgtcaccgcgtcctcattgtcccgttctcggcgctgcggagcccccccgagcgcgcccgacgcgtgggcctgcgacccccgggtgggcgccgttcccgggagggggagggggcagcgccgggctgtcagggagcagcccacgcgggcgcgcgacttcccacttctcctgccaccgccgccctctccgctgccttctccccacgcgtgactgtgggctgagcatggtggggatggctgtttaccggctgtgtgcgtttactcgccgtgtgcatgggcgcaccgcgttggcgagacgtggtcacgagaagatcagcctccagtcgttcccatttctgtccttacatcatgtatttctatggaattggcatctgcacgtacgaggtgtaggcaagactttgggtggccacgcgaggatggaagggaagggcttcgcagtgctcagggtcacacgtgggcagagcctcaccggagggtctgtgcatttcacgcgggctcggccgcacgcgccggggagcgcgtctccaagggagggtctgtgcgcgtcgctgcgcgggcggtgctctctccgggctgcatcgagtcccatgctgatggctgtgtctcaagaaagcagaaataatccgaagtcgatggcaggaacgctccaagcatgtg

SEQ ID NO: 118644 - DNA, 826 bp, Homo sapiens
  chr10:13043175-13044001
  hyper
cggcggcgccgccgggctcacctgaggaagaagaaataggagtagtcctggaccacggtgtgggagtggcacgagaagtagcccaggccggtgaggttgagcctggagccggcgggcacctccagcatgctgccccacgcctggtcgcacagcatctcgacctcggccgagtagaagaggcccccctggccggcgtggtactgccagggcaggtggttgtagaggccgggcgcctcggggtgcagcgccagcaccctggcgtacacgatggtctcggccagctcggcgcggcagccctcgctcaggggcctccactcggagggcagctggcaggcgcgcgcgggcgctgggggacccgccaggcagagcgcggcgagcagcagctggcgcagcatgccgggccctcccggggcgcacggggcggcggcggggagcccggggagcccgccggcccgggaagggcagccctgggcgctcggctgctcgggccgctcccgggagctgagcgcaccgctgtctccgccacggggctcggcatgcccggccctggcgcgccacgctttaaaagggtcccggggactggacgcgccgggcgcccgcctcccgccctgccccctgcggctggggcgtgggcgggggaggggcggggagtcgggcgggtcccggcgccggctggggcggggaccagggactcggagaacgcggggacgccgggacccagccctgaattggggacagtggcccagcaatctcctggcgccccacgatggacgtggtccgagcttgccaggcgtaaagcctgtttgcaaacgcaaggcattcatta

SEQ ID NO: 118645 - DNA, 83 bp, Homo sapiens
  chr10:13141817-13141900
  hyper
tctgcgggaagacacggggaagacgaactccgcacactgcatttgattaatgatttattttgattaacgccgtcacagtgacg

SEQ ID NO: 118646 - DNA, 23 bp, Homo sapiens
  chr10:13142117-13142140
  hyper
gcgctgggcggggtcgccaggcc

SEQ ID NO: 118647 - DNA, 31 bp, Homo sapiens; identical to SEQ ID NO: 7204
  chr10:13142553-13142584
  hyper

SEQ ID NO: 118648 - DNA, 30 bp, Homo sapiens; identical to SEQ ID NO: 46880
  chr10:13203422-13203452
  hyper

SEQ ID NO: 118649 - DNA, 242 bp, Homo sapiens
  chr10:13341386-13341628
  hyper
aggcaaggcgtgtgccgccgcgccagtcctcacccgctgtccttccccaaatagtgtctttatataactcagtggcaatgccgtagtccagcagggaggccgccctgggcagcgcctgcctggccagctcctgcccgggagggcaccgtcctctcccctccggagaggtcccggtcactgcctgcctgggccggttccaggcagccctgcgcgcctgtgcaccgtgcgcctgtgattggaca

SEQ ID NO: 118650 - DNA, 30 bp, Homo sapiens; identical to SEQ ID NO: 46882
  chr10:13342192-13342222
  hyper

SEQ ID NO: 118651 - DNA, 30 bp, Homo sapiens
  chr10:13344326-13344356
  hyper
ttcggcatcccgcgcgggaatatgaccatg

SEQ ID NO: 118652 - DNA, 30 bp, Homo sapiens
  chr10:13390447-13390477
  hyper
ccgcccttggcgcccgggccacctttttcc

SEQ ID NO: 118653 - DNA, 30 bp, Homo sapiens
  chr10:13391179-13391209
  hyper
ttcgttaacatttccgcttgccagttgctc

SEQ ID NO: 118654 - DNA, 30 bp, Homo sapiens
  chr10:13391520-13391550
  hyper
ggaagacagggtcacggttctcattaagag

SEQ ID NO: 118655 - DNA, 55 bp, Homo sapiens; identical to SEQ ID NO: 7206
  chr10:13515865-13515920
  hyper

SEQ ID NO: 118656 - DNA, 146 bp, Homo sapiens; identical to SEQ ID NO: 46884
  chr10:13570122-13570268
  hyper

SEQ ID NO: 118657 - DNA, 34 bp, Homo sapiens; identical to SEQ ID NO: 46885
  chr10:13629000-13629034
  hyper

SEQ ID NO: 118658 - DNA, 128 bp, Homo sapiens
  chr10:13933005-13933133
  hyper
cttttctgaattcaacgtgcaccaacatttgagcagctgcctccaatatagaagcactgcatttagccaattttaaatgagcacgtactaaagggggttcccttctgttctcctccccttccgagcgt

SEQ ID NO: 118659 - DNA, 292 bp, Homo sapiens; identical to SEQ ID NO: 46887
  chr10:13933246-13933538
  hyper

SEQ ID NO: 118660 - DNA, 338 bp, Homo sapiens; identical to SEQ ID NO: 7209
  chr10:13933596-13933934
  hyper

SEQ ID NO: 118661 - DNA, 143 bp, Homo sapiens; identical to SEQ ID NO: 7210
  chr10:13933982-13934125
  hyper

SEQ ID NO: 118662 - DNA, 145 bp, Homo sapiens; identical to SEQ ID NO: 46890
  chr10:13934168-13934313
  hyper

SEQ ID NO: 118663 - DNA, 578 bp, Homo sapiens
  chr10:14215642-14216220
  hyper
tgctaaacagcaatacgatctgagaaattggtacttcctgcaaacgaacagctccgagggctgcacggccccaaagcaagagtgactggaaatcctgctaaaatatggctgtctaatcaaccgagaggcgaactcatttactgaggttcccattgtccacgctgacagatggctcgctcccctctctgctctccccttcccctcagatcgcgctgccgtgcaggcaagcctattctttgagagatccagttgcaatcgccagcctagttctgaaatgagacaaaagctccgtgagcctcctcccatgcacagagccttttctgtccctccaagcagaaggaaaagaaatccagatccactccccttaccttcgtcctcatcggagacaggagcccttccatggtggcagaatcctcatgccagtttctgtctcctgcaagttactctctctgtgtgccgtgcttaagcatcccacatgaaaagagccatgtcgggagccgtggtggctcccctctcccgggtggcgcctctgcaccgccacccggtctaacttgaatccccagcgcctgcaaagcgcc

SEQ ID NO: 118664 - DNA, 30 bp, Homo sapiens
  chr10:14541169-14541199
  hyper
atagccctggccctcggctagggctgggtt

SEQ ID NO: 118665 - DNA, 72 bp, Homo sapiens; identical to SEQ ID NO: 46891
  chr10:14646261-14646333
  hyper

SEQ ID NO: 118666 - DNA, 101 bp, Homo sapiens; identical to SEQ ID NO: 46892
  chr10:14646653-14646754
  hyper

SEQ ID NO: 118667 - DNA, 115 bp, Homo sapiens
  chr10:14879966-14880081
  hyper
gcctccgccacccgcgcccaccgcccaccaagctgccaaagcgagctgagcagaattcgaggttggaaagaatctgccagtagttgccaggacaaatgacgcaactgaacacaga

SEQ ID NO: 118668 - DNA, 30 bp, Homo sapiens; identical to SEQ ID NO: 7212
  chr10:14880317-14880347
  hyper

SEQ ID NO: 118669 - DNA, 30 bp, Homo sapiens
  chr10:14880923-14880953
  hyper
gggaaagttgtggccgcgaggtacttggag

SEQ ID NO: 118670 - DNA, 30 bp, Homo sapiens
  chr10:14920317-14920347
  hyper
agtcggaatcccggcgactgccccaagcca

SEQ ID NO: 118671 - DNA, 30 bp, Homo sapiens
  chr10:14920817-14920847
  hyper
caggggcggggcgtcgggccagctgagcta

SEQ ID NO: 118672 - DNA, 774 bp, Homo sapiens
  chr10:14995670-14996444
  hyper
caagccggcccggggcgcaactggcaggcgccgttacgccgcgttgaccacatccgaaaatagatgaagcctttgagaggctgaagagcccgactgggacaaggcgtgtgctggccgccccctcgctggcttcccacaggctgcagctccttgctccagggccggccccctcctgtcctctctccagcccccagcgccccgggagcgggcgacgcgcagccctcactcacctttgtggcagtgggacaggaagtaggcgcgggccctcaggttctccctatcgaagcggtctatggagatagttggatactcggccatctgcccctcgaaagaactcatagcgccgccgatcccagagtccgggaccccaaaaccgcagctgaagccaaggccagccctgaccgcgccgccacttccgggaagccgcgcgctgcctcgccattgggcggccgaacgcagccacgtccaatcagaggagtccggagaccgggggcaaagtcaaggagcatccggtcgggttctaggcgcccgctgcttgggtttaaatcacccgcgcttcgctgcacgcgatgggccctgagccctgcccagtgcaaggctcattcccgcccaacaaacacaggtgttgctctggtaaggcgttgcccatgtctgtggaggtgcagtcgcgggaagggaaatcgaaactcccagagcaggtggccccagccgacgaggtgagtgggctgcggaactgcgcttagaaatcattcttcgttccgcttcctgcttgtc

SEQ ID NO: 118673 - DNA, 30 bp, Homo sapiens
  chr10:15001261-15001291
  hyper
gtaagatgggccggcgcccaccccagccct

SEQ ID NO: 118674 - DNA, 30 bp, Homo sapiens; identical to SEQ ID NO: 46895
  chr10:15001824-15001854
  hyper

SEQ ID NO: 118675 - DNA, 40 bp, Homo sapiens
  chr10:15130884-15130924
  hyper
ggctgggcggtgagcggtactgcacgccgggttccccagg

SEQ ID NO: 118676 - DNA, 30 bp, Homo sapiens
  chr10:15138778-15138808
  hyper
tttatcttgattttcgcggtgctggggagt

SEQ ID NO: 118677 - DNA, 30 bp, Homo sapiens; identical to SEQ ID NO: 7214
  chr10:15139132-15139162
  hyper

SEQ ID NO: 118678 - DNA, 30 bp, Homo sapiens; identical to SEQ ID NO: 46897
  chr10:15139770-15139800
  hyper

SEQ ID NO: 118679 - DNA, 30 bp, Homo sapiens
  chr10:15209810-15209840
  hyper
ttgcaaacaggatacggccaggtcagcggg

SEQ ID NO: 118680 - DNA, 30 bp, Homo sapiens
  chr10:15210534-15210564
  hyper
ccgtctatcccgcacgtgtcctggtcgtcc

SEQ ID NO: 118681 - DNA, 30 bp, Homo sapiens
  chr10:15412968-15412998
  hyper
ccgggctcccgcagcgtcttggtcaccgcc

SEQ ID NO: 118682 - DNA, 30 bp, Homo sapiens
  chr10:15413446-15413476
  hyper
catccccgcagccccgcagaagagccagac

SEQ ID NO: 118683 - DNA, 343 bp, Homo sapiens
  chr10:15481460-15481803
  hyper
ccccttcccttcaccacgggaaatgcaggcaaagcccacaccggtttgttttttttctcactgatggcagaggaattcctatcccttggggtttacactcattttgtgtgctctccaaatctccccacttatctttagacagactcccaacaaccctctggacacaactccaaaggaaagagttcgcgggcccacgtcgtgctggggaatgacgcagctcactttttcacaggacggaaatctgggaagtgtttagtcagtttcacggtgacaggcaggatatcagcgggaaccaggtcatgacagaatccacaccctgctctcctcccgtacacagtaagaa

SEQ ID NO: 118684 - DNA, 1336 bp, Homo sapiens
  chr10:15760996-15762332
  hyper
cgtggagggcatgaacgtatttatgatgaggaccgactgtcaaacttgatttcctcttggaaacgggggtccgcaacctggtttgcaagaatgcaaacggtcctgcttctctaggtggagctctgtgggtacagtgagatgagagaagggggtggggtaggaggaagccaaggacagagcccagctgctggtagccgacagctcttgcgcccagacgcaatggttacagactctgcataaacagacctcgctgtggtggcggttttaactggcttgggtcttctgggtcctgttctctcctttgtaggatgcgtgcgtcttggtacctggaacacccaggacttgcgtgttctatgcaagtggcatgtctctagctcaaaattcacaaggcacatctagcatggcaggggagagaaggggctggtggcggggagagggacgggaccccgggcaggcggcaggacggggatcccaggctgcggggggactccgcggcagagccgctgggacctgacccgggagcgccttcgtccccgcgcgcacctccccgggtcgggcgacttacgtgcgggcgtcgggtatgtggaagtccacggcgtagccgaagtagctgcccttggggccgctgtacactgtgagcttttccacgtccaggttgaacgcctgacaggcgggggaccacagcaacatccccagcgcggccgcggcgcagcagaggggcgcgatcagcggcgcctggcttccccggggaccgcggctggccccgggcgacatctccctccgccccggtgggtggctgctacccaggagcgcgagccgaggacccctgcggggcaaggggggctggtggaatctggcggtccccagctgcccgtgtcccgggtcggtgcgctcggcgcacccgtggtgacagtgcccggcgtctgctcccacccgcccgcccgcccagccggctcggggggctggcccaggggctctagccctcctccggccgcgggcagggaccagctctctcgcggcgcctcctcgcggctggtctagagccagggactcccgggcggcccagctggtggctggagcgctgggtgcctcttcgggctgcccggatttctattgcagtcccatctcaaggacaatcagtttcgtctctgtcacctcaagctatttattgctttagaagcaatgccccaggtggagcgagagcttgctccagttgtgtcaaaggcgcagcttggatggagaatgtgaaaaccaaccccaccaccaggaggggcaaagcaattatctcttcatcacctctgcagcctgacctcagcgttcacggctttgcacgtct

SEQ ID NO: 118685 - DNA, 30 bp, Homo sapiens
  chr10:15901878-15901908
  hyper
gtgacaccggggcacggggcgcatcttccg

SEQ ID NO: 118686 - DNA, 30 bp, Homo sapiens
  chr10:15902316-15902346
  hyper
ggatcttcgctttgcggactcctgccccgg

SEQ ID NO: 118687 - DNA, 42 bp, Homo sapiens
  chr10:15902578-15902620
  hyper
agtgaaattggaggcggaaacaggcacggaaagcggtggaag

SEQ ID NO: 118688 - DNA, 330 bp, Homo sapiens
  chr10:16478539-16478869
  hyper
aaaccaaagttctccgtatgcagcatgaggatccagaacccactgtgacatcaaattgccagagcaccacctccgatttattcttggggaaaaccaaaagagctacggaatgctcccttgttccagactgttctatggagaactgggatctggggaaaatgcaacagtttctttccgtttggggatctagccccgaatttttttcattcagccaaactaccgacagtcagacagcgcctgcaggagggtgtggccaggcaaaaacgcggggaacggccccggaccagggtggggcgtggcaagggtttgaagggcgtgtcctacgaagag

SEQ ID NO: 118689 - DNA, 31 bp, Homo sapiens; identical to SEQ ID NO: 7217
  chr10:16536238-16536269
  hyper

SEQ ID NO: 118690 - DNA, 304 bp, Homo sapiens; identical to SEQ ID NO: 7218
  chr10:16562368-16562672
  hyper

SEQ ID NO: 118691 - DNA, 955 bp, Homo sapiens; identical to SEQ ID NO: 7219
  chr10:16562709-16563664
  hyper

SEQ ID NO: 118692 - DNA, 212 bp, Homo sapiens; identical to SEQ ID NO: 46905
  chr10:16563690-16563902
  hyper

SEQ ID NO: 118693 - DNA, 179 bp, Homo sapiens; identical to SEQ ID NO: 7221
  chr10:16870062-16870241
  hyper

SEQ ID NO: 118694 - DNA, 30 bp, Homo sapiens; identical to SEQ ID NO: 7222
  chr10:17243251-17243281
  hyper

SEQ ID NO: 118695 - DNA, 84 bp, Homo sapiens
  chr10:17243811-17243895
  hyper
aggggaacaaaggacggaaaacaataaggcttcccgaatgaatggcagccactctgtagcctgatttacgctccatttccttct

SEQ ID NO: 118696 - DNA, 1182 bp, Homo sapiens; identical to SEQ ID NO: 7224
  chr10:17270072-17271254
  hyper

SEQ ID NO: 118697 - DNA, 1188 bp, Homo sapiens
  chr10:17271443-17272631
  hyper
cgtcctcctaccgcaggatgttcggcggcccgggcaccgcgagccggccgagctccagccggagctacgtgactacgtccacccgcacctacagcctgggcagcgcgctgcgccccagcaccagccgcagcctctacgcctcgtccccgggcggcgtgtatgccacgcgctcctctgccgtgcgcctgcggagcagcgtgcccggggtgcggctcctgcaggactcggtggacttctcgctggccgacgccatcaacaccgagttcaagaacacccgcaccaacgagaaggtggagctgcaggagctgaatgaccgcttcgccaactacatcgacaaggtgcgcttcctggagcagcagaataagatcctgctggccgagctcgagcagctcaagggccaaggcaagtcgcgcctgggggacctctacgaggaggagatgcgggagctgcgccggcaggtggaccagctaaccaacgacaaagcccgcgtcgaggtggagcgcgacaacctggccgaggacatcatgcgcctccgggagaagtaaggctgcgcccatgcaagtagctgggcctcgggagggggctggagggagaggggaacgcccccccggcccccgcgagagctgccacgcccttggggatgtggccggggggaggcctgccagggagacagcggagagcggggctgtggctgtggtggcgcagccccgcccagaacccagaccttgcagttcgcatttcctcctctgtccccacacattgcccaaggacgctccgtttcaagttacagatttcttaaaactaccactttgtgtgcagttgaaggcccttgggcacaatgagagccagtcctccaaactttcagaaagtttcctgccccttctggcaggctgccaatcaccgggcgggagaaggaaggaggggaaggcggtggagggagcgagacaaagggatggtccctcgggggcggggatggcggggctgtcctgtaggtctgtgcggccaccgtgattgcccctctgcgcggtgcccgaagtcccgctgaaacctgccgagggcagcaggtctgaaagctgcaggcgctagttgcgcggaggtggcgcagctgctctggaggcgcagagcgaatacgtggtgtttgggtgtggccgccccgcccctggcggtttcctcgttcccctttggtta

SEQ ID NO: 118698 - DNA, 326 bp, Homo sapiens; identical to SEQ ID NO: 46912
  chr10:17495119-17495445
  hyper

SEQ ID NO: 118699 - DNA, 621 bp, Homo sapiens; identical to SEQ ID NO: 7228
  chr10:17495474-17496095
  hyper

SEQ ID NO: 118700 - DNA, 307 bp, Homo sapiens; identical to SEQ ID NO: 7229
  chr10:17496544-17496851
  hyper

SEQ ID NO: 118701 - DNA, 126 bp, Homo sapiens; identical to SEQ ID NO: 46915
  chr10:18429022-18429148
  hyper

SEQ ID NO: 118702 - DNA, 633 bp, Homo sapiens; identical to SEQ ID NO: 7231
  chr10:18429517-18430150
  hyper

SEQ ID NO: 118703 - DNA, 127 bp, Homo sapiens; identical to SEQ ID NO: 46917
  chr10:18430183-18430310
  hyper

SEQ ID NO: 118704 - DNA, 30 bp, Homo sapiens
  chr10:18940591-18940621
  hyper
cacccctccctttccggtcccccaatccac

SEQ ID NO: 118705 - DNA, 30 bp, Homo sapiens
  chr10:18947944-18947974
  hyper
agagcagcaaacggcggctgctcacttaga

SEQ ID NO: 118706 - DNA, 396 bp, Homo sapiens; identical to SEQ ID NO: 46918
  chr10:20104308-20104704
  hyper

SEQ ID NO: 118707 - DNA, 2197 bp, Homo sapiens
  chr10:20104724-20106921
  hyper
cgaaggcggcccgggagccaggtgggtgtggggcgcagttggcggagctgcccagggcgtgcgagcaggctgcgaggatggcgccccggcggcgcggaggtaccgccccgcgctcccccgatagctccccggcctgtcccctctccccgcgctctggggcagccggctgcctggggcgcacggggctggagtggccctctccctccccttcgctaggctcccccggcttaatctgttggccgcgactcctcagccagccccgaggaaagtgcagccattggacaggtctgtgcgggctgccggtttcagggaggaaggtgggagaagcctggaggagcgaaggggagggcggagggaggagggaggagggtgcggcggcagatctggcaaattgcgagctgccttccctcctcaaagtgtggagaaggagcgcgggggagcgtggcgacggcagcgcctcctccgccaccaaactcctggggctccgcgggggcttggggccacctcctcctgagcccggaggaaccctctcccgataggttccagcgtgactccctcccactccacccttttcctttcttcttcctcttttttttttttttttttaaacacatttttttcctggcttcggacctcagactgctgcagccctaaccttcccagggctcagctctttggagctgcccattcctccggctgcgagaaaggacgcgcgccctgcgtcgggcgaagaaaagaagcaaaacttgtcgggagggtttcgtcatcaacctccttcccgcaaacctaaacctcctgccggggccatccctagacagaggaaagttcctgcagagccgaccagccctagtggatctggggcaggcagcggcgctggctgtggaattagatctgttttgaacccagtggagcgcatcgctggggctcggaagtcaccgtccgcgggcaccgggttggcgctgcccgagtggaaccgacagtttgcgagcctcggctgcaagtggcctctcctccccgcggttgttgttcagtgtcgggtgagggctgcgagtgtggcaagttgcaaagagagcctcagaggtccgaagagcgctgcgctcctactcgcgttcgcttcttcctcttctcggttccctactgtgaaatcgcagcgacatttacaaaggcctccgggtcctaccgagaccgatccgcagcgtttggcccggtcgtgcctattgcatcgggagcccccgagcaccggcgaaggactggcgggtggggtagggaggtggcggcggcggcatggcgaggttcccgaaggccgacctggccgctgcaggagttatgttactttgccacttcttcacggaccagtttcagttcgccgatgggaaacccggagaccaaatccttggtaagtaagatgcactttagcttgctgattttgtgcgcagctgaagacctctctggcactctcgtgctccctaccctctccccccaacatcacctatctgcccttgggaaacttattgcagttgcttttcggctaaacttaggcttcccaaatggggaaagagggttatcaagagaaggacgccggggactaggggttttcttgaggctttcgggcttacttcacctgggcggcagggggtggtactgtctccccaaagtagcccagggagggcttcagtgtgagagcaaagcttcttccgtggatacatctcctaggacctggcatctccaggctgtgtgctctccggctcctcctccttcctcgctgctggttaaactaagcgtgtgtggtatggggtgggtgggggacgttgtgaaagccagggattgcaggtctcccctctgcacgagaaaattccctgtggcagcaccttccttcccctggcgatccccactagctccgtctagtgacctgggccaagcgggcgctggaaggggggcggggtaaatgcggccggcgcagaggtggggagcaggtgggaaaggtggaggcgggctcgcctctggagacctacccctgctcccattgtcctccgcctgccagcttcacagacaggcctgaacgcgcagagagttccttggagtgccctgattttgtccccgagagggcccccaacctccgcatcctcttagtggctgtcctggcaggtgcgcgtcctgcggggagttgcgccccgggggctatcgccgagcgggagct

SEQ ID NO: 118708 - DNA, 1618 bp, Homo sapiens; identical to SEQ ID NO: 46920
  chr10:21461963-21463581
  hyper

SEQ ID NO: 118709 - DNA, 885 bp, Homo sapiens
  chr10:21783695-21784580
  hyper
gcgcgcggactcggcttccccaggtcaggacccactaggtgggccgctcggccccaagcctggcagggcggagcctaggccgcgcgccccggggttggaggttcccacggagccgggaaactgcgcgccccaggtccgcaggccgcctcccttccctcgcgccctcgcacccgccctctgctctgccgctcccggtcctgggtgtgcgggagtcccgggggtccctctcctggacgcagaggaggaatttggagcaaaaggaagggaatttactgcggatggcaccggaacctgaattgacttgtgcgtttcctgctctgggcacgtaggtttcccctaggaatctggagttcgctgaggacacttaattccaagagatgatgggttcacataaacataccatttagttaagaaaaatatttaaaataaagaaaaaagaaaaactgaacttcgatcttcttctccacgttccctggtgtcaccaaataaacaaagcattcggacgagagtgggctgctgggggctcgggaggtgcgcgagacaaggttaccctgcgggtccgccactgcccccggcctccagcactgcactgcccacgagtttgcggggtgtgagcgccgaaggagaaccccggaccgcccagtctcagcctaaaaacttggatccaagagtcctacggttgtggatgtgccagtcctccgcgaccctttcctgctggccttctgctttttataaacgaaaataaaagtttgatttaggcttaaagaaatgtcattctggtcgttcctccctgaagcgggacttactcaacctcatatactcgcccggaattttcaatctcgcctgtcgaaatcgctagctgcgcatccgcggaagaagtcctgg

SEQ ID NO: 118710 - DNA, 204 bp, Homo sapiens
  chr10:21785546-21785750
  hyper
agcaaggcaaggtgcggcctctcagcgccaggacccgagacccccagctggagagaaggggacaccgtggtccgcgccctggggaggctaattgcacacgaacgcccccctcttccccgccccccaccgtaccctctgcagcgccacccgcgtcgcctctccgccgtgcgccaccctgagggctcccgcgattgcatcttcttg

SEQ ID NO: 118711 - DNA, 191 bp, Homo sapiens
  chr10:21785785-21785976
  hyper
ctcggatggagacatcgcggagggaagcgaggggacagggatgcggtagtaggggaaaggtggggcgggaaaccgagcagagaggtgggagacttggctgaggcaatggcaccaggcagggccgcccggagtcccgagtccaggtccgcgaggcaggccccggtgcagccgcgccccggccgaaccctaca

SEQ ID NO: 118712 - DNA, 179 bp, Homo sapiens
  chr10:21805238-21805417
  hyper
gtctgccggcatcctcgaaagcagcgggtttggttgcagcggcggcggaggccagatggtacaagaagttggcctgcgcctgcacgctgggaggcttgcagaagctggtgcgcctgaatcggatgctctgcactgacacttggctggagccggagctggagtccgactcggtggacgag

SEQ ID NO: 118713 - DNA, 154 bp, Homo sapiens; identical to SEQ ID NO: 46925
  chr10:21805906-21806060
  hyper

SEQ ID NO: 118714 - DNA, 319 bp, Homo sapiens
  chr10:21814234-21814553
  hyper
gaaaggagagggattcgtattgaaatgcatttgctttggggtacgctggttatccgcaagtctggctttgtgggtctgcgtggctgaataagtgaccaagtgccttcggcattatataaacggatcgatgtgtgcgggagtccccaaagccgtcgagcacgtgaaacgcgactttttactgccctccaagcggcgaccaagccccgctccaccccaccccgcctcaaaatccgtatattacctgccctgttacagtgacacatgtttatgtttatagtcctggtttgtagtagtgtcaagaaccgcagcaagaggaagg

SEQ ID NO: 118715 - DNA, 887 bp, Homo sapiens
  chr10:21815633-21816520
  hyper
cccagtcccaggaggcgtaagataaaacctctgatttgctgcgtgctgccgggcacattctctgccctctcgtccgaaggacgagtttaaaatggagagtttaaaataatagcatttacaggaggaaataaagagcgaggagatggttctttggccggttttaagacatacatgctttttttttcttttaatacaagatgtcttaagggttaaaagcgttctagggtttgctgtatttccttctagatttggggtttcctgaggaaatcttttccggagggaaatagcaaatcaacattaagatggaagcgagacttctcagccacttttggaaatgaagggggaaattgtaaaaatacattcagaaaagggcgcgaaggcggcggctgaggggaagaagctggagtcttgggaggaagcgcagtgggttggaatcgggggaaggagggcccgctaggtccgggcggggaagaaggcgtgcgggcggcggggcgtgcgccgggccgggcagctggaggaaggcgcggcgggactggcgagcgcgaagaggcaggcggggaaggcctcggggggcgggggccgggcgcggggccggcgcgccggaggaagcgggacctggctcctcgcgcccgccgggccgcccccattgttctgccctagcaccgctgttagccgagcacgtcctgaccgagggaggggccccgcgggccaacccgacccccgtcggcgcctccccgggctcctgagctccggccgggtcgggtcgggccggcgcggcaagttttgatggtcagactcagccagcgaggggttcccagctgaagacctcggaggaaggagcctttacagcgtgctgcgaaattgaaggaagccgggcgagcctgcaa

SEQ ID NO: 118716 - DNA, 130 bp, Homo sapiens
  chr10:21822288-21822418
  hyper
ccatcaaaactggacgccactgtctgatggcgttaattatgttttagcgactgactaggagggctagagttccttcttccttttggtgtaatacaactgcattttccggatcatcgtattatattgctaa

SEQ ID NO: 118717 - DNA, 68 bp, Homo sapiens
  chr10:21823422-21823490
  hyper
cgtgagtgactgagcggcaaagcccgagtgagcgagcggtgggctgccgggccgggcggggggcgccg

SEQ ID NO: 118718 - DNA, 143 bp, Homo sapiens; identical to SEQ ID NO: 46930
  chr10:21824263-21824406
  hyper

SEQ ID NO: 118719 - DNA, 31 bp, Homo sapiens; identical to SEQ ID NO: 46931
  chr10:21878818-21878849
  hyper

SEQ ID NO: 118720 - DNA, 30 bp, Homo sapiens; identical to SEQ ID NO: 46932
  chr10:21915603-21915633
  hyper

SEQ ID NO: 118721 - DNA, 241 bp, Homo sapiens
  chr10:22032715-22032956
  hyper
ctgtaaagcactgtgcggtacaaacccacctcgggctcagagatcttggatcatcctcagatgagacggagagagaagagggaaacagccttggtggagataaaaggaaaacaaagtccttttagatgagataattagagcccgttgataaagcagtactcacacttggtagagagagattcttcttctttatacagttagctttaactagaggcatatccatgaaagagaagcccaatct

SEQ ID NO: 118722 - DNA, 30 bp, Homo sapiens; identical to SEQ ID NO: 46934
  chr10:22291997-22292027
  hyper

SEQ ID NO: 118723 - DNA, 214 bp, Homo sapiens
  chr10:22292568-22292782
  hyper
ggggccgcagccagcgctacgttccgaagaccctcgcccccaggcctacacacagctgtagaggcagcgcccggcgcctgggctgcacagtgggtgaggcttcccttcgcctcagcctatcccaggcctcgcttccggtgacatcatgtctcctagcaaccgcgggaagggggcgtggccggaagcctggacgcctggcgccccagatctgggc

SEQ ID NO: 118724 - DNA, 30 bp, Homo sapiens; identical to SEQ ID NO: 46936
  chr10:22315827-22315857
  hyper

SEQ ID NO: 118725 - DNA, 608 bp, Homo sapiens; identical to SEQ ID NO: 7239
  chr10:22517900-22518508
  hyper

SEQ ID NO: 118726 - DNA, 34 bp, Homo sapiens
  chr10:22518858-22518892
  hyper
atttgcccagtgcttcgttcgctcatctctcgtg

SEQ ID NO: 118727 - DNA, 30 bp, Homo sapiens; identical to SEQ ID NO: 7241
  chr10:22519104-22519134
  hyper

SEQ ID NO: 118728 - DNA, 267 bp, Homo sapiens
  chr10:22519354-22519621
  hyper
ggtacacttctaagttccaaacgctctttttctcccttcttctctcctcaaataattgcgagtttccacttgagaacgtgaacgtgtttaaatttttaacagtcactaaaccgctctgtacagaatccctccaaaaacaatcgctatcatgatttatagacgttgtaagcgacgcgtcttggtccaatcagcattttgagttcccgttgcatggtaagacaacttaaattggctttggaaccaattagaagccgagttccctgaaag

SEQ ID NO: 118729 - DNA, 77 bp, Homo sapiens
  chr10:22540629-22540706
  hyper
cacctgtttaaaatcacgccacagcaacgaatcactgcaaaagcaaggttctaacttaaaacaaaaagagaaagtat

SEQ ID NO: 118730 - DNA, 1110 bp, Homo sapiens; identical to SEQ ID NO: 7243
  chr10:22540740-22541850
  hyper

SEQ ID NO: 118731 - DNA, 225 bp, Homo sapiens; identical to SEQ ID NO: 7244
  chr10:22542024-22542249
  hyper

SEQ ID NO: 118732 - DNA, 30 bp, Homo sapiens
  chr10:22604903-22604933
  hyper
agatcggagcttcccgcaggattcgcgcag

SEQ ID NO: 118733 - DNA, 31 bp, Homo sapiens; identical to SEQ ID NO: 46944
  chr10:22605455-22605486
  hyper

SEQ ID NO: 118734 - DNA, 30 bp, Homo sapiens
  chr10:22609251-22609281
  hyper
tttggatctgagttcgtgtgttattacttt

SEQ ID NO: 118735 - DNA, 45 bp, Homo sapiens
  chr10:22609888-22609933
  hyper
ggagggggcggccacgggcctgactacaccgacactaattcccag

SEQ ID NO: 118736 - DNA, 30 bp, Homo sapiens; identical to SEQ ID NO: 7245
  chr10:22610492-22610522
  hyper

SEQ ID NO: 118737 - DNA, 967 bp, Homo sapiens
  chr10:22614078-22615045
  hyper
agcctttccaaaactttgtatcgctcatttaatctacaggagagcgtcacattagagaaggaagttttaaagaggttcggttcaataaacatctctgcaatttgagccctgacggtttcgggctaagtgcacagttggcaattctcaaaaaatcccttcgtgaaatttctgaccgagtgattgcagacaggacagaccgagagagtcgagatctgaaaccagctctgcgcaccaagtcgacgtgaaaagaggcccccggagtgtccgaaatggccgggagtgcggtttgcattttcctttcgcgggcgctgccgcaggctccggggtccccgccgcccaggactgggtccctggtccccgatccccgctccccgctccccagcgctgtggcctcgtggggctgccccgcccccccggcgtcgccgcacccaccccgcccccgcgccggccccgcccccgcggcgcgccgcccctcccccgcccgcccgcccgcccgccgccccgcacgcccgccgaggctcggggctcgggccgggctccgcgcggagttgcagcggtggccggatgccaagtgtaagtgtaagttgctatggaaaccccgaccgaggcgagttccgaatccggagcgagacggagccccgggcgccgccggatccgcccctcgcatcccggcccccgggcgtccgccgcgctcaggccccggcccaggccgactggaggtgctcctcctgcggccccagcacccggctccggaaatgccagggatgcagggagggcagaattgttttccctgcgcgtcgcgtaaaaacgtgccaggttctgcttgctggaaccgtctaaaacaaccggaaccccggattttcacttgcagattcttgaggaagttttataataaattcggagacctggaacaagccctagtggttggtaaatatccgcggggattgtgtggcgtctgcagcagcct

SEQ ID NO: 118738 - DNA, 256 bp, Homo sapiens; identical to SEQ ID NO: 7247
  chr10:22624049-22624305
  hyper

SEQ ID NO: 118739 - DNA, 559 bp, Homo sapiens; identical to SEQ ID NO: 7248
  chr10:22624561-22625120
  hyper

SEQ ID NO: 118740 - DNA, 400 bp, Homo sapiens; identical to SEQ ID NO: 7249
  chr10:22625382-22625782
  hyper

SEQ ID NO: 118741 - DNA, 338 bp, Homo sapiens
  chr10:22625811-22626149
  hyper
cgggcacctgagcccccaaatccgggcgcgtcgctgagtctcagccccaggtgccctcttcgcggagttgatcagcaattctttttcagtggccaattagaaagcttttcttgacatcagaaataagggtggtgccaaagaaagaagtcaaacgcccactccctttctaataacatcgacacaaagaagagctcatggttgcgtctgcgcttggtaacagtggctttcctctgggttagagccacaggcacaagcacccgctgctatctttcttcttcgcctaccatgaatattttgcatgaaatccagaatgtaaccatttgcgttgacttaactgt

SEQ ID NO: 118742 - DNA, 30 bp, Homo sapiens
  chr10:22629346-22629376
  hyper
ttggctcctatccccgcctctgggatccgg

SEQ ID NO: 118743 - DNA, 30 bp, Homo sapiens
  chr10:22630312-22630342
  hyper
gcgtgacccggacgcgggcttggtgggctc

SEQ ID NO: 118744 - DNA, 83 bp, Homo sapiens; identical to SEQ ID NO: 7251
  chr10:22634091-22634174
  hyper

SEQ ID NO: 118745 - DNA, 330 bp, Homo sapiens; identical to SEQ ID NO: 46953
  chr10:22634324-22634654
  hyper

SEQ ID NO: 118746 - DNA, 185 bp, Homo sapiens
  chr10:22726715-22726900
  hyper
ggacgcctcagacacgggccctgacggcatcgccggcctgggggaggcgtggagagaggggaggaaggcgggagggctgtggggctgctagctgatttggggatcccatcatcttcgaatttttatgcagagcccatggaagcgcctggtcagagaagcgggaggaaaccgaacctaagaaaggg

SEQ ID NO: 118747 - DNA, 902 bp, Homo sapiens; identical to SEQ ID NO: 46955
  chr10:22764687-22765589
  hyper

SEQ ID NO: 118748 - DNA, 42 bp, Homo sapiens; identical to SEQ ID NO: 46956
  chr10:23001786-23001828
  hyper

SEQ ID NO: 118749 - DNA, 642 bp, Homo sapiens; identical to SEQ ID NO: 46957
  chr10:23001887-23002529
  hyper

SEQ ID NO: 118750 - DNA, 30 bp, Homo sapiens; identical to SEQ ID NO: 46958
  chr10:23003235-23003265
  hyper

SEQ ID NO: 118751 - DNA, 305 bp, Homo sapiens; identical to SEQ ID NO: 46959
  chr10:23216819-23217124
  hyper

SEQ ID NO: 118752 - DNA, 30 bp, Homo sapiens
  chr10:23385062-23385092
  hyper
tcttcgtagttccgcgggcttccttccagc

SEQ ID NO: 118753 - DNA, 283 bp, Homo sapiens; identical to SEQ ID NO: 46960
  chr10:23460284-23460567
  hyper

SEQ ID NO: 118754 - DNA, 433 bp, Homo sapiens
  chr10:23461222-23461655
  hyper
aaatgagatggaggtcggcaggggtgtgaggccacggatggctgctgcttccttgcttccttcttttgaagccagaatcgactctgctcttgctcgatgacagcccctcgccggaggcgcggctcctggcctctgcgggggtccgcgcaatccgggcgcctccagctgcccccctcctccgagggtcgcagccacagagcgcaggcccaagctggggcagaccaagggcggctggggtgctcatgccggtgccggcatcactgccggagccgccctgggcgcactgcacccagcgctgcttctctcgctggttctgtgccgctgctcctcccgatgcttgggggaccgcagggaggccgaatgacaaccggggagcctcggggccgcgcctgaggcccagagtctgggctgtgcagagcgcagagccccagct

SEQ ID NO: 118755 - DNA, 559 bp, Homo sapiens; identical to SEQ ID NO: 7257
  chr10:23461903-23462462
  hyper

SEQ ID NO: 118756 - DNA, 129 bp, Homo sapiens; identical to SEQ ID NO: 7258
  chr10:23462485-23462614
  hyper

SEQ ID NO: 118757 - DNA, 439 bp, Homo sapiens; identical to SEQ ID NO: 46964
  chr10:23462634-23463073
  hyper

SEQ ID NO: 118758 - DNA, 577 bp, Homo sapiens
  chr10:23463266-23463843
  hyper
cgagccgggcctttggctgcgccagggcccaggccgagtcatcccgccgctcgcgtcgccgcgaggcgggacaccgtgtgatacctttgccgtgggctgggcgtcggccgcggggcggagagcgggtgtcccacctcgcctcatcatttgatttccgccagcgtctgaggacggcgcacccaattcgttccactcgctgcgctctgtgaaccagcggcgggcagggcgggggaggccgggctgggggagggcagggtggtcccaatcccccgcccccgccccgccggcctcgcggagcacaagtgttgggattcccacgggcaggcgtgctctgcggctggaggcccgagcgcccagggcccaggagacgtggcggacacagaggggtttgtaggcacggtgacctccgtgctcctgctctgaaagggcctgaaaggagcggtttatggtgcattaccagtcaagggctcaggtaccagcgccttgtgtcgggaacccgggcggccgcccgtgctgcaggtgtctgctatacaaacgccccgggagggggagggcaggccgccggattgggggccgg

SEQ ID NO: 118759 - DNA, 754 bp, Homo sapiens
  chr10:23479942-23480696
  hyper
agcggcccaggaggacgactcctttcagtcctctgtagagagaatacgcacgatggctgcgcttctgaactctcccggggtggaagctgcagcctggcttttaaccggaattgcccagaccttgaaagtgtttctttgttgctcttaaaaagaggaattcacgttgcatcgcagtctgtgataaagtctgtcttggggcagagctgcatacgttttgtgttttttttttttttcagaaaagaaaggtcgagaaagaaaaaaacaagtcattcagggatggtccctgtggccagtcggaaaggtgagagactcgggctttgaaaacgattcacattctgccctttaacttcaatgccttccctccggactgcgccggagcagacgattcaatggactccttttgtatccagtttattgctcagaatccctagggtctagatttgctctcagaagaaacgcgccccgctgagctgctctgggggctgcccctcccgtctccccattcctttctccgggccggggagggcaggggaggcagccactgagccgatgtcgctggggacccgcaccaggcaccacagccaggctccagagcggagtcccataggtgcgctcccagcccccgtgttgcgtctggaacgcagtgggagtgggcccggatcaccttccaatgacacccgcatatactctgcaaactgtgcaaaagcccttgaaaagtccagagatgggacagaagcccccagcagaacccagg

SEQ ID NO: 118760 - DNA, 146 bp, Homo sapiens
  chr10:23480903-23481049
  hyper
ggaaggagccggcgctgctcagcgcgcgcgggtacgcagcgggcaccgcgggacgcaggtgcccctggagccgcacgcggggcaggtacagaatccagtatgcagaggcagaggagagggaagagagcggtgcgaggagccccggg

SEQ ID NO: 118761 - DNA, 929 bp, Homo sapiens
  chr10:23481303-23482232
  hyper
gggcactccagggaggcccgggggcgggcagcccggcggccgcctagctgcccccagccagggccccgggagggaggggctcggacgggccttagaaactcaccaagaactaacacgcgcagcccggcagtcccgctgcccactgcggcggcgagcatggacgcggtgttgctggagcacttccccgggggcctagacgcctttccttcttcgtacttcgacgaggacgacttcttcaccgaccagtcttcacgggaccccctggaggacggcgatgagctgctggcggacgagcaggccgaggtggagttccttagccaccagctccacgagtactgctaccgcgacggggcgtgcctgctgctgcagcccgcgcccccggccgccccgctagcgctcgccccgccgtcctcggggggcctcggtgagccagacgacggcggcggcggcggctactgctgcgagacgggggcgcccccaggcggcttcccctactcgcccggctcgccgccctcgtgcctggcctacccgtgcgccggggcggcagtactgtctcccggggcgcggctgcgcggcctgagcggagcggcggctgcggcggcgcggcgccggcggcgggtgcgctccgaggcggagctgcagcagctgcggcaggcggccaacgtgcgcgagcggcggcgcatgcagtccatcaacgacgccttcgaggggctgcgctcgcacatccccacgctgccctacgagaagcgcctctccaaggtggacacgctgcgcctggccatcggctacatcaacttcctcagcgagctcgtgcaggccgacctgcccttgcgcggcggtggcgcgggcggctgcggggggccgggcggcggcgggcgcctgggcggggacagcccgggcagccaggcccagaaggtcatcatctgcca

SEQ ID NO: 118762 - DNA, 174 bp, Homo sapiens
  chr10:23482288-23482462
  hyper
cgaaggctccggaggggctgggggagctgactgccaagcagacagtcggaccgacggattgtcggtgggcacggaaaaacttgaatgcgagctcgcgtttctcgtttttttttttttttttatttttctgccacgttgaccgcggctctcaagggcgcgcgtccccgccagact

SEQ ID NO: 118763 - DNA, 671 bp, Homo sapiens
  chr10:23483900-23484571
  hyper
gcctgaggcggggggcgtagggtagccccctagcgaaggggagaagagcgagggcgcggccgaggtcgcttagccagaaagcctgggagtccaggcttgggtttgtctcctttgtggccaagagcgcctcccgggctctcggggcgtcctcccctgcccgccagagccggggcgccggcactgggccctgaggcctggcgcgcgcgcagatggcgttggcgcgagcgcggactggagacgcgctcattgacgtggcaccgtagccccgtgcggcgcaggcctggcccaggcggggtgtggttccgtgggccgcagcggcctggtgggcgaaggtacaattgcggatagcctctaatactcacggccctgccgcaggacaatatgttggcagcatgctaattgctttaacctagtttcagacccaccgaggggttccccgcgcgccgcgggtgccatggacctcgtccaagagcaattaaagcgaggccgcgagcccgaccccgcagcgcggcctggccagacacgcggagattctgggtcgcaaggctcccgggagccccttggccgtggaccctctcaccccttttaagccttcgcgccctctccctccactcctcctaaaagaagatttcacactggagacagaatttcagaacgagagaaaataattc

SEQ ID NO: 118764 - DNA, 476 bp, Homo sapiens
  chr10:23487782-23488258
  hyper
ggcgggggaagggctcggctgtaatgaagcgcctctaaggcggaggtgctgccgtggaggctgaggcggcggcggagcgcgctgctgcgtttgtgcgcaagtgactctcctgtgccacacacaaaaggcctccctcttcccaccttctgccgcctttcagccctccggctcctgccgagcccgctcctgggactctgggggggatcctggctgcatccccagggcagcctgacctttgggacatccgccgctgccagggcaaacctcgccaaactttccccaaactccgcaggccggggagggaccctggccggaggcgcgcatgcgccccgcccgctgctccgcgttcccagggttccggagagccggggtggagtcggacgagtgtccccggaggcccgcctagcccttgctcccaggggcattcgggactcctgtgctgcctgtcttcgcttgaggctggaagtggctgcccg

SEQ ID NO: 118765 - DNA, 1097 bp, Homo sapiens
  chr10:23488342-23489439
  hyper
cgaacggccaaaaggagatccggggatgggaccccaggcttcttcggaggaggcccggggcaactacgccccgcggccgggagggaagccctcgggcggccgcctgtagagggccccgtggcccggggcgcaggttgtggcgagctggtttttgcctctgggccgaggcgccagcgctagcagcgacagcagcggggggcgcaggtttctagccagtccccactttcggacctctgggggtctgcccttgcttctcggggagtcttggcccttgactgatccccgcaacttaaggccaatcccatccctagctggccggcacctgttccaaacaacctgttgcgctgacatcgctttggagaggcgccggcgctttgctggtggaggcgggttgtgtggaggccccaagccttcaggaaatagtttagggttccgttgtggtgagaggcaccccctccccgcttcctgtggcatgtggggtgtttcacctctgcctgtgtcccaggaacccaaggcgtcctgggcacctctgcacctcgcccactctagggacttctcatgtagagctcggcagtttgggtggattagacaaagatgaggattagagacacaccgccggctaattaaatgggctcttctcctctcctcgtcccctccccgcaacccgcagccagataggactcttcggttccctacccccactcctaggccctatgtaagtgcggatggagaaagctagttacattagcccttctgtcttagaggtaccggcacctcggggcattctcgctcttaaagatgcgttttctgaattatttctagttttacaatttctcttcggtgactgcacaggatcccttctagctcttttcctgttggagtcgctggacgtctcccaaacagctagttagtcgcctatctctggagcgcaggccttcggaattggattcagggtatgagtctagctaggggatgtttctagaagttttataaaatccatttgggcaagcgttggcattcggattttaaaaatatagacgtgcactggcattgggcaactcaaaaaaaaatgtgtctcctggcgcttgtcagtgaca

SEQ ID NO: 118766 - DNA, 368 bp, Homo sapiens
  chr10:23489687-23490055
  hyper
aagagttcttcttgcgtgcagcgctttcatccagggcttgaattgtgttgtcaaagtttagcagacaagaggagggggcatgagaacgggagggtgtcttgaaaagtcttggaaatcggtgtattttgcaggtgtagaagtgcctaataaccatggctagtgcgcgctccccaatggcgagggtatgacagggacagctggctcagttttcagtgtgaaaacaccccctcggtggaccaaacacaacgacactgacctttcttcggggggaaccagggatgtgcctttgactgaattagccataaagacgtcttgctatgacttttgttccccacgaaagcaaagaaatattgcgtttaatatgagaa

SEQ ID NO: 118767 - DNA, 240 bp, Homo sapiens
  chr10:23491089-23491329
  hyper
tcctccaaactatttcgatacaatatgtttccatgatgcacttaatgtgctagggacatagaactcattacaacctagctagttctgcggacctctttgttccgcggcagaaagtcaaagaaaaaaggaaaagcgctgccagttgccagctttctgaaatgctaaagcatgcgtcatttttcaccaggtctcgtcttgatatcctcaaaagacaaactatgaaaccggcctcagcccttt

SEQ ID NO: 118768 - DNA, 3 bp, Homo sapiens
  chr10:23633503-23633506
  hyper
gac

SEQ ID NO: 118769 - DNA, 30 bp, Homo sapiens
  chr10:23728361-23728391
  hyper
aaggggccgagcggcgggcagggacatgca

SEQ ID NO: 118770 - DNA, 231 bp, Homo sapiens
  chr10:23982371-23982602
  hyper
aggaagcaagacgctcgcagttaaaaaccgttgccactcgacggtggcaaaattgctggctgcactggagatcactgcagagcgctcctgatgcctcgatgctgacggcggatctggcgcgggctggggcgcattgcacattctgctccagccgggaggcggcgggcgggcaactccgggttggtcactcggcagccggcagaggtgcgcagaaggcgcacagaaccaggc

SEQ ID NO: 118771 - DNA, 485 bp, Homo sapiens
  chr10:23982856-23983341
  hyper
tgcttggagttgtcacccctacgactgacctcagacccaggacccaagggcggggccctcttgcatctggaatccagcctcggccttgacccctttcgcttgttcggagtgctttcgcccagcttctggcggaggttcacgcagggaggggactcaggtggaaaaggctggcccctttgatctctttgcaggaacttagtagacaggggccccgggctggagatttgcttcgagtaggctagaggcgcccttggcgcaccgaagctggctgccttgctggaacctgccgcgggggtggaggttgaaaggactctgagctcttcttccccaagccgaactccctcctacaggagcgtggaaaccaactctcccacaccgtctatcccactcttcccccctaaacctctagcgcagctttttaaaggcatcctgtgcagcctccaactttggggaaagagaatgcccaactcccgctctccaactac

SEQ ID NO: 118772 - DNA, 1157 bp, Homo sapiens
  chr10:23983617-23984774
  hyper
cgcggggtggggggtggtgggggtgacgtcaggactgcagtccagaagagagcggctggagagggctgcgcgcttctcgccaagcaagcgggaggcgcactggggccgccgccgttcccgcgctcctccctctcctctgcacccactgtcacgctacccgcccgcgggggagcctcgagagcctccaggtgaattgaaagtcgtttccgggggaggacggagagggtgctgcagtcctggcatgccctgaaactgcaagtcgggcagaaacgacccggcggaggagcagggcgcgcagcgccctgcgcagcatccccgggctgccagaagaggccaccactcggctggcagccgcgagcggcggccgaacctcggccccagactcgggcccccggcacgctcgcccgggagataccccttccccctcttgcgcatttcgcagctgcgctggtgtggggcatgagagcgaggtggctccaggtctccgcggagcagctgccagtgggagagcgaggagaggcgagggggcggcagcctcggcccgaagtaagtgcagcagaagtttgcgtcggttgccccgccgctcccccagcgcgagtgggaggcacatctcccctccttggataaggaaaccgaggggagacttacaagggagccttgcgcgggagagcaagtgagcgtttcgagagagggcaaggacccccccaggagggccaggccgggaggggtcccggtgcggtgatggggtgccaaaaggagaagacccccaactgggaggagggactggagaggaaccggaccccggggatctcagaaagggaaggatgtggggagagtgaaggtggaggcagtcacacctatcctggtgaccttggcgtgcccccctggagtggcgagccaggggcttatataggtgcgactaggatgttgcctcgtttttcactcggggctgcgaagagggcattgctctttctgatggctggaagacaggggcaaggagagagagaaccggccccgagacgggctggagggtggggacactggggagtttggagctgggggttcggagtgggaggtttgggtcttctgagacgctccagactctccggaggcggcagaggtcgaggcaggaggcgaatgtgacgcttagggtcgct

SEQ ID NO: 118773 - DNA, 151 bp, Homo sapiens
  chr10:23984841-23984992
  hyper
cgacagcgcccgggagcagggtgacccccacagcggccggccttccggctggctgccctccccgctcgccgctctccccgcgccgctgcgggtcctccgagaccccggactgtcctgagctgcttcgagggcgggcgagaccctgtctgtt

SEQ ID NO: 118774 - DNA, 190 bp, Homo sapiens
  chr10:24497857-24498047
  hyper
gcgcctgaggacggacggacggacggacggacagacctagggacggagggccaggggcaggggagatccaagaggccccgcgctggaatgcagttttctcgggcgagggagactttgcaccggagtggaaaatagtttggggtggggtttcgcaccgtcccctcctccccagccccgggccccctcccag

SEQ ID NO: 118775 - DNA, 242 bp, Homo sapiens
  chr10:25011169-25011411
  hyper
tgggtcgtgaaggttcgagtgtcagctcctagagagatcctaggaaaacgagaagttaaaggtcatgaactttctccaggcgcctatcactgtcttgcccacatgtccacaccaagttcgcgtttcctcccgagcaaaacaaacaaaaaaaaattttaacgtaaacaaacaaaaagcctataaattcgagggggtgtttaaaaaagagaaatctcgaaactgcccagcggttgcgtcaaaca

SEQ ID NO: 118776 - DNA, 240 bp, Homo sapiens
  chr10:25011794-25012034
  hyper
gggtgggacgccggcgccgctcccgctccagggcatgattctggagctacacccgagcaactctgaagtcgcggcttttcccccaactaccactcgacacggcttcccttcccctgtggccacctagggggaaaaaacgagaaaaagcaaaccaccacccacctccccacgattcccccgccccttcctgaggcgggtcggggacctcgagctcccgaggagagcggccccaatatggac

SEQ ID NO: 118777 - DNA, 165 bp, Homo sapiens; identical to SEQ ID NO: 7267
  chr10:25012545-25012710
  hyper

SEQ ID NO: 118778 - DNA, 13 bp, Homo sapiens
  chr10:25012949-25012962
  hyper
tgtcttgaataac

SEQ ID NO: 118779 - DNA, 30 bp, Homo sapiens
  chr10:25013456-25013486
  hyper
ctgagcgaatttggcgcggctagcggaact

SEQ ID NO: 118780 - DNA, 30 bp, Homo sapiens
  chr10:25013864-25013894
  hyper
gtcaccctcatcctcgccccctcccataca

SEQ ID NO: 118781 - DNA, 745 bp, Homo sapiens
  chr10:25241259-25242004
  hyper
cgggactcagagtttcgtcagattgggggcggggagaggaggcccgggtccgaggatggaagcgatccccgccgggagggagaacaaagcggtggccctctctctcccccgacgcacggcaagcatttaatctacaagcagggtgccagggagggaggggagcgggccgagccccaaaatagggagtttgcatttaccacgacgcctcgcccgtagtctggcgcctcctcgctgctcccggccatgtttctcccggggaacgcgggaagggaagacggcgcgggaaggagcagggagggcgaaggctgcgtgggggatgggacgtggggatggggacggggacggggacggggacggggacggggacgggtccgccccgccccgggcccgccggcgggaagcagcggcctgacgcggatccatggccccggcgctgcgccccctcccctggctaggccgcgggggcgcggggagcagctgccaagccgctaccgctccccctgagcgcgggccccggacgcgtcccttgcggccgccgctgtcgccgccgccccctgccggatggtcgcgtgcagcccccggccccgccgccaagccccgcggggactctggagcaggaagcccgcggcaggaagagaacgtgtcccccaggcccctgattcccagatccaccgtcccagccctcgggctaacaatctccttgactcctccctgccagatttcatgcacgcgattgtcccaagca

SEQ ID NO: 118782 - DNA, 30 bp, Homo sapiens
  chr10:25304987-25305017
  hyper
tctctccttcacatcgtccccctttaaccc

SEQ ID NO: 118783 - DNA, 50 bp, Homo sapiens; identical to SEQ ID NO: 46984
  chr10:25305302-25305352
  hyper

SEQ ID NO: 118784 - DNA, 30 bp, Homo sapiens
  chr10:25306350-25306380
  hyper
gaaataaagcttcccggagaggagagaaaa

SEQ ID NO: 118785 - DNA, 2026 bp, Homo sapiens
  chr10:25463328-25465354
  hyper
gatttaactaagcatgcaagacgccaacaccctccccctcagtacgtccaagtttccttcgctctgagccaccgaatctctgcttctcccccctctgccgcccaccctacgccacccacgcaggtttccgagtcatccggaacgcgagtgggtgcgaggactcggcaggctgcctcccgcgcccccgccgcccgcgggccgcctcgggttcagcactggacagctccctccccggccccacaaatggcagtcggctgattgacagaggagccgaccaaacagggaacaagacgacttgcagccgccctacaagggtttggttgcggccaagctgcctctttaaactggctttcctcccccgaggagggagcagggagagagggtggagtgtggtttgcggccaaacctaaaggctgcaattaaccagccgcccggccttcgctactccggacagacgaacgtcttaaaggacgtcttcgctcctcgggagtcgcggctgcgctcgcggtgcgggtctgggcgcgcgccccgcgcctccgggcgaagcggtcgaggaggagccagtgccgggaggcgggaacgacctgcggcgggtgagactatggagcagcgtcttcggcggccgcggcggcagcagcagcagcagcttctgaacgcgcctcaatgagagcggcggtggcggcagccgggccgagagacggactcgggctgactccagccgctgggagcgcgaggccatgtaacccgctcggctccaggctgcgaggtgcgtaatccccagccggcccctcgcgcagcgggcacggccagcgctgccacaggtgacttgatttctgcgacggtagcttagccacccggggccaatctcgaaacattcttattttcaagtcctttggactgggtgccatctggagaagggggaagactcctcgaaaaagtctgactgttgagaaactgacgatccaaatttaaaaagtgattcccccccctcccgttccctcctcttctctctgggaggcagatgggagccatggcttaccccttactcctctgcctcctgcttgctcagctgggattgggagctgttggcgccagccgcgacccccaaggacggccggattcccctcgagagaggaccccgaaggggaagccgcacgcccagcagccgggtcgagcctctgcctcggactcctcggctccctggagccgctccaccgatggcaccatcttggcgcagaaactcgccgaggaggtgcccatggacgtggcctcttacctctacaccggggactcccaccagctgaagcgagccaactgctccggccgctacgagttggcgggcctgccggggaagtggccagccctggccagcgcgcacccctccttgcaccgggcgctggacacactgacacacgccaccaacttcctcaacgtgatgctgcagagcaataagtcgcgggagcagaacttgcaggacgacctggattggtaccaggcgctggtgtggagccttctggagggcgagcccagcatctcccgggcggccatcaccttcagcaccgattcgctgtccgcaccggccccacaggtcttcctccaggccacgcgcgaggagagccgcatcctgctccaagacctgtcctcctccgcaccccacctggccaacgccactctggagaccgagtggttccacggcctccggcgcaagtggaggccccacttacaccgccgcggccccaatcaggggccccggggcctgggccacagctggcggcgcaaggacgggctcggcggggacaagagccacttcaagtggtctccgccttatctggagtgcgagaacgggagttacaagcccgggtggctggttactctttcctctgccatctacgggttgcagcctaacctggtcccggaattcaggtagggagggccggggggcaggggggaaggcaaaagcgaagctttccttccggtcttgtgggtgggtgcacgtgtgaggaaggaacccttggctgtgacgcga

SEQ ID NO: 118786 - DNA, 277 bp, Homo sapiens; identical to SEQ ID NO: 46988
  chr10:25465408-25465685
  hyper

SEQ ID NO: 118787 - DNA, 254 bp, Homo sapiens; identical to SEQ ID NO: 46989
  chr10:26055805-26056059
  hyper

SEQ ID NO: 118788 - DNA, 256 bp, Homo sapiens; identical to SEQ ID NO: 46990
  chr10:26222949-26223205
  hyper

SEQ ID NO: 118789 - DNA, 679 bp, Homo sapiens; identical to SEQ ID NO: 46991
  chr10:26223425-26224104
  hyper

SEQ ID NO: 118790 - DNA, 182 bp, Homo sapiens
  chr10:26500688-26500870
  hyper
aggacccgcctaactcggggtaggtggggacgcgctgctcactgtggtgaggttgacacttgggccctgggtttcacttgcaggtgctgggcggcggagagccccgagaaggaggaggagagagagccagcagccaacccctacgacttcaggaggctcctgcgcaaaacctcccagcgccg

SEQ ID NO: 118791 - DNA, 143 bp, Homo sapiens; identical to SEQ ID NO: 46993
  chr10:26501026-26501169
  hyper

SEQ ID NO: 118792 - DNA, 169 bp, Homo sapiens
  chr10:26501559-26501728
  hyper
aggtgccttcatcagcgaactcccagcaccacccagccacttcagacaaacacaatctaagctaaaaccccttgccacacaaacgcagaggcctccaatgtctaaatccccaacacaccacacgtgctcgcctgcacgatgccttcccaatctgcgtgactgtctttgg

SEQ ID NO: 118793 - DNA, 30 bp, Homo sapiens
  chr10:26501965-26501995
  hyper
gacaggtgatgaggtcgttgcatggaattg

SEQ ID NO: 118794 - DNA, 528 bp, Homo sapiens; identical to SEQ ID NO: 46994
  chr10:26503615-26504143
  hyper

SEQ ID NO: 118795 - DNA, 693 bp, Homo sapiens; identical to SEQ ID NO: 7277
  chr10:26504190-26504883
  hyper

SEQ ID NO: 118796 - DNA, 227 bp, Homo sapiens; identical to SEQ ID NO: 46996
  chr10:26505008-26505235
  hyper

SEQ ID NO: 118797 - DNA, 176 bp, Homo sapiens; identical to SEQ ID NO: 46997
  chr10:26505441-26505617
  hyper

SEQ ID NO: 118798 - DNA, 905 bp, Homo sapiens; identical to SEQ ID NO: 46998
  chr10:26505713-26506618
  hyper

SEQ ID NO: 118799 - DNA, 493 bp, Homo sapiens
  chr10:26506902-26507395
  hyper
cgtttctccatgcaacaggtaaagactcagcggggagccccggggcgcccctgcccctctctctgccccgcccaccgcggccggtgcgggtccggcgctgagagccggacaggggcgtcgaggtggcagcggaggcgggacctgccagaatcttcagataaaagcgagaaatgcgggacctgcccgctgggtccaagcccccgaacctggcctcggagctccaagagggctctgaggccgtggcgctcttcccccagcgcggcccttgggatggcgggtggccgacgatccaggcgctcgtgcgctcactgaatcgatgacggctggcttccctaggccgctggggcctcgggtgggactcagtttccaaataccgtgcccgagaattcagaattgcattttttttaggtctttagatcacgagagtgatttgtagctgcaattgcacaagagaacgattccattcacatgaaacccgcgcgccgagttttac

SEQ ID NO: 118800 - DNA, 44 bp, Homo sapiens
  chr10:26680960-26681004
  hyper
gggcagactgtacccgggcaacggctccccgcagctccggcttt

SEQ ID NO: 118801 - DNA, 833 bp, Homo sapiens; identical to SEQ ID NO: 47000
  chr10:26726983-26727816
  hyper

SEQ ID NO: 118802 - DNA, 320 bp, Homo sapiens
  chr10:26727867-26728187
  hyper
cgggtccgacgccgggggcagctccaggatctggcctcgtgaacgcgtgcccccaggcgtggccctcgagcgcagcgggtccccagggtcccctccgctgatctccactctggacccggctcgcgagggtgggggtgtgagggtttggggttcgggtttgctttttcccgagctattgcaacagatttgacagatttcctgcccaggaaattgctgcaaggtcaaacggggaactgctatgaacccttgcacgtccagcaggtcagcaggtcagcaggtcagcaggtccgggagccccagtctcccggaacctggaggga

SEQ ID NO: 118803 - DNA, 240 bp, Homo sapiens
  chr10:26986365-26986605
  hyper
cccggggaaggttacgctcggggtccccagaccaggtctccgcacgcccctgccccgtcgcctcccgggagcggctgcagtccccgttggctgcagacgggcagacacccgaagtgtccgcgccggcagccggaccgcaagcgaggaagagcgaaccgcgctcccgggcctggccgaagcgcttcctgtgccaggtttccggctccgggtcccgggaggaggatcgcgggccagaggcgg

SEQ ID NO: 118804 - DNA, 30 bp, Homo sapiens
  chr10:27149645-27149675
  hyper
cagcgcccgccggccgccagagcgcctcac

SEQ ID NO: 118805 - DNA, 30 bp, Homo sapiens
  chr10:27150097-27150127
  hyper
gtccaaagcgcatgcgcccagacacctccg

SEQ ID NO: 118806 - DNA, 30 bp, Homo sapiens
  chr10:27443315-27443345
  hyper
tccgccccggaaggcgaggcgctaactcaa

SEQ ID NO: 118807 - DNA, 242 bp, Homo sapiens; identical to SEQ ID NO: 47003
  chr10:27444472-27444714
  hyper

SEQ ID NO: 118808 - DNA, 70 bp, Homo sapiens
  chr10:27529643-27529713
  hyper
ggcatcggtggccgcggagccgctctcccaccctggggaccctggcggagcagccacaccccccattccg

SEQ ID NO: 118809 - DNA, 19 bp, Homo sapiens
  chr10:27529787-27529806
  hyper
cgccgccgcagcagcagtg

SEQ ID NO: 118810 - DNA, 30 bp, Homo sapiens
  chr10:27530076-27530106
  hyper
caaaaatgactctgcggtccccagcgcctg

SEQ ID NO: 118811 - DNA, 30 bp, Homo sapiens; identical to SEQ ID NO: 47004
  chr10:27792993-27793023
  hyper

SEQ ID NO: 118812 - DNA, 30 bp, Homo sapiens; identical to SEQ ID NO: 7284
  chr10:27928208-27928238
  hyper

SEQ ID NO: 118813 - DNA, 34 bp, Homo sapiens
  chr10:28030465-28030499
  hyper
agcgacgcgtttgcccgcccggacgctccacgcc

SEQ ID NO: 118814 - DNA, 2915 bp, Homo sapiens
  chr10:28030731-28033646
  hyper
cgcgtatctgggcagcggggctaactgctacccttccctcacccgctggcgccgcaccctcgagtggccctggcctggcaggcctggcagggtatgcggctggctctcgaaacttccctcggggatctcttgtctgctcccagaggctttccgtcgcttgtggtcaggggaaaggtcgccgactggacatagggaataaagcaaaggagcattgccgccccggctctctttaagctatttcctttgatcttttaggaaaagggggaaactttctaaaggagttggtggtttgtggaggaaagctgcagaacccaaaaacaccgtcgggccgtttcccgactaagggagggttaaaagtacggcaagctctgtcccatcatgtaaggtaaaaagacctcaggaaaagcacattcaaagggggaggaggcagaggcagccaggagcctggagcgtggcctggggcgctgcgctccctcacgggtccgggaggtgtcgcgcgcggccgccagcgagcccagccgctccccgaggcttgcgcgcctgcgccggagcctcctgggtttctgcctctttaaacactttgaaatgcaattccacccgaaacgactggtagtaacattttgacgaaaccgaatctctgttttactaagcagcgacgccgcagaacaagcagctgatgcaatcgttcaggtggaggcggctaggacggccgcccctccccggcggggcgcccggggagccgccggatcgggccaggcagagcctgccctccactcaccggcagtctgagcagctggcccacccgcaagctaccgccccccccagcatacccctcaccccgctaaactcaaacccggccccgcaggcccggggcctccccctccgggttcgccgcgggcccagccgagccgcgctcacgcccgggactccctggcgggaggcgaccttcccgactccttgggccaggcgagccgcggggctctggcgaggggctcgagtgaccgaagagaagtccgcggagcctgagcctggactccccgactgctcggcttcgcctgtttctctgcaccgagctcagtcctttttcctcgccctcagccgcgcaccggcacccacagtccggagaggggcaaataacccccaactccgaggtccaggcagcggagggccgaggggcagctcctggcgcccttagtctccaccaagctctttggagctgccccgacgaattgatccctcatgttttaagataggagccccttaacatgagaatgcgcgagccctggaggggcagacctgcactcccagggaactccgggccctttcccgtccacccgcccgcgttgccacgggaccccgtcacagctcaccacccccacccctccgggccgcaggcgggcagggcccccaggggagtgcgcatacccggtcctccggtgtctcaggccgaggttgtccttgaggggcgggccgtcgggaatgcccacctcggggcgggcgtgaggactgtccaggacaccgctgtagggccggccaccccgctcccgctccgaggcgcctccgtcctcaaacagcaccgcaccgctgagcttgttgaagacgatggtgttcatggtgtcggttggtagggacgcgcggcgcggccgcagagcctcggggctgggccgccgggagctccgcagcggggctcggcttctaggagaggaaggtgcatctcgttacttactggctgagagtgctcagacccctgcaggttcagggccttgaacttggccgggtcgccgggctgcggagccgaggggaggagcggcgccgccgcaactggcagggaccctgcggctctccccagttggctacacgcccccgcccctgcaggttccccggacaggtacctgccctcttccttgcctgggcgatcgatccccccaatcccttcactccccagaactacaaccgggaatcattcacccgcagaggcaaaggaaacgaattcccaaacgagcctctgggtttcagtttgaatctgggagaggcatactccggactgcggagcgcgaccggcgtgaggccgcgcgtggttcttcaatcacagcagaagactaaagcctctaggaaccccaactcggggcgtcaggaggggttggatggaagggaagatttggggtaatgtgccaaccgtatccacaagaccccccagctcatgagtcccaggccataccgggatttgggggattttcgtgttttctagatcgtggatggtttggttgaaacccccgcatcttctgtccgccaaggtcccccggggtgaggttgggttcaaggacaggaaaaagttaagtggcgtcaggacgaaagcaccacttctcccccttctctcccagaatcttcctatcatcccccaacgcgccccgggaagtgcatggtcctaaggtccaaggcgccaggacccaggtccccagagccctcaatcagtgccattctcttccgcagcgcgggtgtcagccgcgagctcgtagcccctcgacacccgcctctctctggggtctccggggaccctttcagaggctgtaaaggtgtcagaagcccaaggcaggaggcagcttggtcggcgcacctcccgggccactgctgccactgtcggggagagccagcagctcacctctggggtcgcggaggccctgagcctctgcctgccgcgcaccggcgtcaggagcaagtccgcgcggccgcggagccgcagagttacagccccaaggcgcgcggcggacttcgcccgccccatctcctcgcctcgcgcctcgggacagctcccgtttcctccgagcggcctcagcttcgctgccagcgccccctttgcccgtccagccgcggcatgggctgctactccactaacacacgcgcgcgcgcatacacac

SEQ ID NO: 118815 - DNA, 498 bp, Homo sapiens; identical to SEQ ID NO: 7287
  chr10:28033688-28034186
  hyper

SEQ ID NO: 118816 - DNA, 229 bp, Homo sapiens; identical to SEQ ID NO: 7288
  chr10:28034326-28034555
  hyper

SEQ ID NO: 118817 - DNA, 872 bp, Homo sapiens
  chr10:28034873-28035745
  hyper
ggtatccacgttcccgggcgggtggagaggaagcgtccgcgcccgcccggccgcgggggctgctgttaacccctagcagaggagccgctgccggggagccccgggcccgccgagtcctccggagccgggcgcggctcccagatccgccggccttgcagtcgtggagcagacggggcttttcccttcgcactttaggagagaaattggagaagctgccgggagcgctcggctccggctccagaagctgagaggctgcggtgcaaatcccgtgtcttagctggcccgattgccggaaatttcactgcgcgtggctaggcgggagaggccactgtgacgcgccctgtattttcctctcgattagctggagggaagttagagctccgttttgcacctacagccctggagcgtattgcgggaagtgctagtgcccaggagcctcttttctgatgtcactgggcttctggggtcctagttgtctcagtcaaagccaggcacacattcacctccggggcaagggctggtgaggctgccctcgccgctgggtatagggatgggggaaagcaaggatgggatgagttcagcccaggtggccaacccgcggtggcccaagtgcagaagaggaagcgcgcccaaagccaaggatctgcacgcagcaaaggagatggaacttagaagaatcacaagctgggacacagggcaaagagagagaatggctaccagattctctgattgatgatactttgcttcctaacattaccgcaaatataagtagcgaaagcggcggtttaggtgcaactgcaagctcagagcttctggcagcccagaagatccccaaggtgccaacacgaagctgcctgcgctctcgccgaagg

SEQ ID NO: 118818 - DNA, 149 bp, Homo sapiens
  chr10:28287168-28287317
  hyper
agaccgacagaaaatcgaacttttagacatgacatgaacagggccctaagtaaaaccaaagctaagcctagtgtgggatgacggcccccaccagactcgttacaagaagggggcgtcagagctgagaccctaagtttccaggaatggat

SEQ ID NO: 118819 - DNA, 791 bp, Homo sapiens
  chr10:28287365-28288156
  hyper
cgggaggcagagctgcaaagggcggaggagaaagacgggctgggggaaggagaggcagggaagcggcgggagaagtggagagcggatccgggaggtgatggggccgaggtagtgcagagaggggcgcagggactgaggagcagacggtccccaacctagggccgaggcagggtctcgcggggaggaaggagtgagatggggctgggagagagaagggaagggggcgggtcttggtccccgggagggaaaggggagcaggcgagagcggcagcggcggggccagagagccgcctctgtttcccgatccacgcgggcggctgcagaacccctgcgggggtgagcgtggagacccccagccgcactcacctgcagcaccctgccccccgcagtcggcgcccgcctgttgctaggacgcgggtcaacactgcgcgccctgcggccgcgcacgccggcgcccttgtgggaggcctacagggcccgtgccctcccccgggcgccgccgccgccgccttccgctcccagcctcacccggccgcgaccgcagcccagtccgttaccctggtctcgggacctccgcgcatccaagattcccgcggacccgttgcaccgtatgcccgcgccagagacgctctgcgcccgcgctgggttccacccgccccggccacctgctgctttccgctcggcccctcccgggaaacacttttattcaactttgcatctccctttctcaaacacttttatgcaactcccgagtgtgcaccctaactcactccacgcggtgggaaaggttg

SEQ ID NO: 118820 - DNA, 161 bp, Homo sapiens
  chr10:28591946-28592107
  hyper
gcccagtgggagcccggcccccgcctccagcccggctagtaaccaacacggcccccaccctcggaggggcgggaccgcggttggaggggcggggcggggctgcaccgcccgcgggtaagaggggcctgctgataggctgcgaaggcgataggcgtctcaga

SEQ ID NO: 118821 - DNA, 167 bp, Homo sapiens
  chr10:28821229-28821396
  hyper
cgtgcacgcatctccgctgagggccgccctgacgcacggccttctgccttgaacacagaacccctcagcccttcctattagccgtttctggccgggactgcacgcgctccttcctgcctcggggcgcagggtgagacttacgtctaaagggcgcccggcgagctcgc

SEQ ID NO: 118822 - DNA, 30 bp, Homo sapiens
  chr10:28821739-28821769
  hyper
cctcttccggaaggcggctccctccctgcg

SEQ ID NO: 118823 - DNA, 30 bp, Homo sapiens; identical to SEQ ID NO: 47014
  chr10:28822467-28822497
  hyper

SEQ ID NO: 118824 - DNA, 607 bp, Homo sapiens; identical to SEQ ID NO: 47015
  chr10:28957387-28957994
  hyper

SEQ ID NO: 118825 - DNA, 73 bp, Homo sapiens
  chr10:28958043-28958116
  hyper
cgatctttttggatgttctccctgcctaaaacggatgctaatatctcttcgattgaaccgaaatggcgctgcg

SEQ ID NO: 118826 - DNA, 30 bp, Homo sapiens; identical to SEQ ID NO: 47017
  chr10:28965569-28965599
  hyper

SEQ ID NO: 118827 - DNA, 458 bp, Homo sapiens
  chr10:28965843-28966301
  hyper
tattgatcccatggcgggcagctcgaggcggacacgctgagggggtggggggcgaaggctgaatgcagaccccagcgctgggccgcctcccccgggctcccacccgaaccctcctccgccacctgcacaggccggggcattgtcactcgcccctgggggttccagaaaacgcagtgcggccggggaggacgaccacacggaccccctgcgtgtttcggggggcacccaaaagaagccccgcgctggggaacgctgaccacccgaggctgagccgtcagggtctcggaggcgggttcccgagccggtcccggggctgggctcccccggcgcctcgcgaaggtcactgacgcgcaggcctccgcaagggggagcgcgggagacggcagcgcaccagccgggcgccccagccgggcgccccagacgccggcgccgctcggagccgccgggcaggtccccca

SEQ ID NO: 118828 - DNA, 240 bp, Homo sapiens; identical to SEQ ID NO: 47019
  chr10:28966597-28966837
  hyper

SEQ ID NO: 118829 - DNA, 309 bp, Homo sapiens; identical to SEQ ID NO: 7294
  chr10:28968984-28969293
  hyper

SEQ ID NO: 118830 - DNA, 591 bp, Homo sapiens
  chr10:29010986-29011577
  hyper
gggctgtctgtttgcgtggggctgtctccctgtaatgagaaccaccgctgagagctgtttagacaaacgggctcagcgctccggagccgcgcgggcctccaaatgcaagggtttgttctgctggggcagcgtctgtcgcgaaagcagcggcggggaggaagcgcagagctgtgttttgaattaatgggttcagcttcatgttgagcacaagtgggaggctattttagagaaaccttcccaggccagccgtcactgatgtggcaaactcagcctctgggcagaccggctggaaatagaaacgtctccgcttcacgatggcgcacgcccggacgtccccttccgagagcgggtcccctttgtcccccgaggccccgccgccctgtgtcacgtccccacctcgctctgggtccactgatctcttgatgcacgcgtcccatcagcagcagccgaaagagggtgctcgggcgggagtgaaatccctgtgaaatgtgatcaagaacacaaaatgctgaggcagctccagctaacatcagcgctcagtctccccgcccaggtgggatcctccaagcgcctcaacgcaccgcccatccc

SEQ ID NO: 118831 - DNA, 31 bp, Homo sapiens; identical to SEQ ID NO: 7295
  chr10:29737771-29737802
  hyper

SEQ ID NO: 118832 - DNA, 79 bp, Homo sapiens; identical to SEQ ID NO: 7296
  chr10:29738054-29738133
  hyper

SEQ ID NO: 118833 - DNA, 30 bp, Homo sapiens
  chr10:29738146-29738176
  hyper
agcgcggctgcccctcgccagatgcaaagg

SEQ ID NO: 118834 - DNA, 92 bp, Homo sapiens
  chr10:30023988-30024080
  hyper
ctgtaatgcaattaccgccttctggagctccactcggggtgccagggactgctggctgtcacccggggactaaaccactcccttcggggagc

SEQ ID NO: 118835 - DNA, 759 bp, Homo sapiens; identical to SEQ ID NO: 7297
  chr10:30024793-30025552
  hyper

SEQ ID NO: 118836 - DNA, 81 bp, Homo sapiens; identical to SEQ ID NO: 47026
  chr10:30026076-30026157
  hyper

SEQ ID NO: 118837 - DNA, 608 bp, Homo sapiens
  chr10:30348116-30348724
  hyper
gccccgggacccccgcgctccgagcggggcacctgaggggaggggacgcccctcccgggctggcaggcgccctccaccccgaggctgccgggctaggcaccgcgcggggggcccaggcggggctgcgactgggggtgcagacatcccccaccgccagggtggctggaaccggagcgacgtcccagctggagaagttggggggagtgcgggaggctgcgggtgaggcccgcgaagcgccgtgggagcggccctaatggacggtgggagccaggagggttagacgccgggacttaccgagcggctccctcatgccgcctcgcgccgccaccgccgccgctccggccggccggggaccagcgcgacccgccccgcctgcagccgccgaggccgagcatgcccggagaaccgccgtccgccccgcccaccgcccgggcccgccccgcccaccgcccggggctgcctcctctgcgctgagggcggtatccaggccacgagcttcctaggcttttggggtccgcctgcgtgggtcgcgcagaaggcacaagtgagctgaccaccattccctcttttcttgtcacttgggtttgggccacgtcaaccctgtggaa

SEQ ID NO: 118838 - DNA, 169 bp, Homo sapiens
  chr10:30509062-30509231
  hyper
tacaaaagcaatgggcgctcttcccgggcagccccatgttccagggagccaaagcttgcagcgtgagagggtctctttttggaacaaaggtcggtgagtgaagtcaagtccaggcttggttttgagagatcacatgtcagttgcacaaacaggacgagaaggcagcaga

SEQ ID NO: 118839 - DNA, 30 bp, Homo sapiens
  chr10:30638024-30638054
  hyper
acagggcaaaccggcgccatcacctgtctc

SEQ ID NO: 118840 - DNA, 71 bp, Homo sapiens
  chr10:30722680-30722751
  hyper
ccttccctggggaccgggaagggcacaaccacctcttgcaactccgccactaagacgccttgggtcaccag

SEQ ID NO: 118841 - DNA, 30 bp, Homo sapiens
  chr10:30723081-30723111
  hyper
gcggtctgagcgtgcgggcgacgcgggtct

SEQ ID NO: 118842 - DNA, 30 bp, Homo sapiens
  chr10:30723352-30723382
  hyper
ccgcctgggtgccccggggattcccatgca

SEQ ID NO: 118843 - DNA, 127 bp, Homo sapiens
  chr10:30723837-30723964
  hyper
ttcaagtttgtaacccggactctatcccatgactaaagaggtcatagcagaacacgaaggctgggcttttggtctaagaaagaatactaggagaaaaaaaaagttattttcacggaagttgttttcg

SEQ ID NO: 118844 - DNA, 30 bp, Homo sapiens
  chr10:30724235-30724265
  hyper
cccagctctctgcgacggattgaggtttgt

SEQ ID NO: 118845 - DNA, 542 bp, Homo sapiens
  chr10:31072972-31073514
  hyper
tgctattgcccacggcggtctagttggcctccgaactgggggtggagggtgggaagtggttagaaccatccccagcaaagagagaagagagtgctgacttcaactcagtggcaaccagggggcatagatgaaaaaaacaaattgcaaattcttccacctcggcctcaatctctgtgataaaaccctgcggttctctgatgatttctggggtgatggggtggggctgggttaagaagagacttatactgtgattcctgggttgggggacggcgctacgactctaaggttttaagcagtgatcccagcaggttaactggggcagtaagtgctgtctttctcggggagggagggagttcagctccaaaggcggcctggttcgcaggctcctttccctaagatcctttagaaatcgttcccatcccagaaaggaagctggggcgcagctgtgagcgcccccctctccccccgcctgcccccaccccctctgagctccccgctttgctctgaaaaaaaccaaaagcatctctcgatgctggggtttc

SEQ ID NO: 118846 - DNA, 352 bp, Homo sapiens; identical to SEQ ID NO: 47030
  chr10:31073814-31074166
  hyper

SEQ ID NO: 118847 - DNA, 31 bp, Homo sapiens; identical to SEQ ID NO: 7299
  chr10:31388316-31388347
  hyper

SEQ ID NO: 118848 - DNA, 598 bp, Homo sapiens
  chr10:31422647-31423245
  hyper
cggggagaagggcctcgtgggccagcgcagcttgctcctctgcagacccagaagcatttgtgcgtcccgggcgtggcaggcccggcgcccactccgccctcccgcccctcccccgcgccacgtcacccgggtcacgtgagtgaccaggctcctcaccccaacccccctccctactcccgccagactcagctgctctccccgggagctggggagccgggggcgggcagccgcgtctgtcctgcccctcctcgccccctcccccgcagcctgaggagggcgttaagcaaggggcttcggagaaattagaaccagcgttctaaattaaggggagcagatgtccttgttttgctcgcgaggcctgggtggcctgctgttcagacagaaatcgttgaggcgctgaccttccgggactgctgtcaatctccgcgtgcagatggccagcccggagcctcgccgctcccctgcattggaaatgcggcagccgggggtgccggcagcttgagagaaaagtctgcgtggagggggggtgggggggatgaggggaggcccggggagacagagggcaggagaaaaaggccggccccgctcacaatggagc

SEQ ID NO: 118849 - DNA, 186 bp, Homo sapiens; identical to SEQ ID NO: 7302
  chr10:31607135-31607321
  hyper

SEQ ID NO: 118850 - DNA, 2174 bp, Homo sapiens; identical to SEQ ID NO: 47034
  chr10:31607940-31610114
  hyper

SEQ ID NO: 118851 - DNA, 30 bp, Homo sapiens; identical to SEQ ID NO: 7304
  chr10:31892175-31892205
  hyper

SEQ ID NO: 118852 - DNA, 100 bp, Homo sapiens
  chr10:32049024-32049124
  hyper
atggcaaatcatgccaagcttcggggtggagctgagggggccctgactccgcctcgcagcccgggcttcggggtggggcgcctaattagtgtttgcgcat

SEQ ID NO: 118853 - DNA, 30 bp, Homo sapiens
  chr10:32216895-32216925
  hyper
ggggagcgaatgcacgtccatccagcaggg

SEQ ID NO: 118854 - DNA, 30 bp, Homo sapiens
  chr10:32217532-32217562
  hyper
gcccggccccggcgcgcctttgtgcagcgc

SEQ ID NO: 118855 - DNA, 70 bp, Homo sapiens
  chr10:32217898-32217968
  hyper
gcccggcggggatccgaatagggggcagccagcgtacggtgtgggaactcgggccggcgcgggagcctgc

SEQ ID NO: 118856 - DNA, 107 bp, Homo sapiens
  chr10:32345461-32345568
  hyper
caccactcctggcccggggtcgcagattcaaattttactgcactgcccctgtcgcagaagttcctggggaggcagggcggcagctcccacccgccatcccaagccgc

SEQ ID NO: 118857 - DNA, 30 bp, Homo sapiens; identical to SEQ ID NO: 47038
  chr10:32667690-32667720
  hyper

SEQ ID NO: 118858 - DNA, 30 bp, Homo sapiens
  chr10:33246298-33246328
  hyper
cgggctctcaggctcgcggaccgggtctga

SEQ ID NO: 118859 - DNA, 30 bp, Homo sapiens; identical to SEQ ID NO: 7306
  chr10:33247469-33247499
  hyper

SEQ ID NO: 118860 - DNA, 3113 bp, Homo sapiens
  chr10:33623013-33626126
  hyper
acagcccaaggatcaacgtcaggagggagcccaaagacctgaaatcctcctgctctaaaccgcctgatctcatttcttcttctctcctcccagataaaagtttccttcgcccgggagtcggttgttcccggctgatcccgggaagccccgcctgagccccggtccggggcgggcagctgggagccggggcgccgctgtcacccgcgcctctgcctgtcacttaccgttgcgaaaagcgccggccggggcgaggacgagggcgagcacggcgcagaggagcggcagccccctctccattctcccttctccgggtccgcaggcagacgcgggagaacgaggacgtggggggaaatgcagcaaagaggagaatctaagcgatccgaagagccccaactccgcctagagctgtacaatcctcagcccgtcttggagaaaagaaagcagcgaggcaatgcctggatccgagaggaacgcttctctttttgtgtctcaagtcgcctgcatcctgtcatttagctccggcttcctctcccttttcccacacttgttcctcttccaggagccactgcccgggccatgtctcaaaaaaaaaaaaaaaaaaaaaaaaggccgggggggggctgtgggtgggagggggaggagggaggtagggcaacacacaccaaagccaatttccaggaagaaaaaaaaaaaatccggcttgtttctggacccgttggagccgcggagctggcgcccaggggaggtccgggtgtctgcgggaaggaggggaacgagcaatgaaaagatgagcgggagacagaggagtttcaccaactgcacccccgcctcccctcctgcggcctccccccactccggagcccttccctcgcttcctcccgcccctctccccgcttgggctcgcctgtaattgcctgacaggagactgggaggaacaactttccctccgagtgctctccccgtccgtctgtctgtctttcccagagaccctgcagggatctccgcgggaaggaaggcgctgggagtctgcgccccggtcgcgtgggtgcgggcgtcggaggaaggggcgcggaggtcagtgccagccgcagggtctggccagcccacctcgcgtgctcgctctgcacccctagagggagagctgggcagctcctgcaggcgcagatcccgccgccgcgcagtgcggagcgcccgggaggtggcggctgcttctcgcaacttcaaatcccggggcccgcgccctcggcggcgaggaacgcagggtcaccccctgccactcctcatcgcgccatcctgagacctgtggcggggagcagcggggcacccctggacgcccctgcccagagctggagggcgaggaggggaaagccgggctggagtgggagccgcaccgcgaagccgggcgaggggcagcagtgtcgctgtggtgtgaagcgaagacagaccgcctgggcgggcgaggccgggctgcagccccacgcggcctccctggcccgcatcagggcgcgcggctgggtgccctctgcgcgccgcggaggcttcattgtttcccgagatttggtgcccgttcctctggggcagagggaacaccggagggtgggaggtgctgcgccttccaagcaggggggcaatcgccgcccgaccccgcccaaccttgtctgggagcccaggtgctagggaggggtgtggaaatcaggggtcgggcggcccccgtttctctgtgcatcccgagggagggaaagagtggcgggggaggggtgctcttcgctgcgccctctcagtgtccgctcccggccacagacaacgtgcacgccggccctggagctcctgccacccccacttcccacagcggctcgtgcccccagcccgctggatgccccccaggcccgtccccgagggttttccgagaagtgctgcaggaagcgtttgtagatgcgaaaagcaaggacatttctgggaagaaacaggttgcggtcaccgatcaggccccggagaagggtcagtgcccacggggcacctcccagggagtttgtgggtaaggtgaaaaggtcacacgcctcctggggattggcgtctacacacacagccaaagtacagcctgattcctacctggcacaaatagctggccaaagggaggtaggaatgctggcaaggagactctggtcaaaggttttggcggaagaaaaaggggcgggcagggagaaagcccaaggcgcgcgggccccaggccaggactgcgcgctcgcgactcgggctgggagcagtgacgtgcgcccctcggggtgcaggccgttcccgggccagtgggaggtgcacccacggagcccgcactcgccactctcttgccccgggtcaagcctgtcttctcctccccacgcgcctcgggattcccagtcgccaagttggaaactcggcccccccgagcgcctctttcctctgccagtttcctccttcttctcagctgtcggacccctgggaggcgcggggtgggaagtgggcaccgaagggctgggagttaaatgcctaagttgagcggaaggagcactgtcgaagccatgggcagccctgcgcccgggcaggcgggcaggcgggaggcgaggcgggggcgccgaccgcgcccagcgcagaccccgggggagtgagcgccgcagaggcagcctgggctctcggctactacccgcgcgcggtcgccgcctccccaggtgcagccccgccagtcccagcccccggctgcgccgggcgagcggcatcatcagatttagggtgacccggagcgacctcggtccaggctcggagggagaggcgcctctcaggacctggcaggttgacagggaaggggaaccgggagggagcggcggccggggcggcctggagtctcggaggcccgcctgcgtcctggggggacccgacctccgcgctcgctccggagcgcccgtttggatagctctgagcctcggcggggtgagcgagggggcacacgagggagacttgagctgtgttgtttttagaaaactgccgccaatctctcttcccctttccctgctgagtgtgcattttccagcctagacccgccaggccagcaaataaagccaccggatcgtgcactccggagc

SEQ ID NO: 118861 - DNA, 30 bp, Homo sapiens
  chr10:34939227-34939257
  hyper
aggtcgacactacgacgtcactagacaata

SEQ ID NO: 118862 - DNA, 2584 bp, Homo sapiens; identical to SEQ ID NO: 47041
  chr10:35102969-35105553
  hyper

SEQ ID NO: 118863 - DNA, 30 bp, Homo sapiens; identical to SEQ ID NO: 47042
  chr10:35378911-35378941
  hyper

SEQ ID NO: 118864 - DNA, 335 bp, Homo sapiens; identical to SEQ ID NO: 47043
  chr10:35415500-35415835
  hyper

SEQ ID NO: 118865 - DNA, 31 bp, Homo sapiens; identical to SEQ ID NO: 47044
  chr10:35626505-35626536
  hyper

SEQ ID NO: 118866 - DNA, 2901 bp, Homo sapiens
  chr10:35929333-35932234
  hyper
cgctgcacgccaccttctcgtggcccgccaccaggcgcactaggtagcccaccgacacgaagaggtagcaggccgagaggaagataatgggccgctccgggtacttgaagcgctccatgtcgataaggaaggtggagacggtggcgaaggtggacacgaagcagagcaccgaccacaggccgatccagaagacggtgaaggcgcgctcgtcctggctgaaaaaggggttgtggcagggcagcgcgcagttagcgatctggcctgtcttgacgcggttgtagagcgggtggcgctcgctggacacgctcaccataggcgcgcggcactggcacccgggctcgcagggagccgcgccgccgccagggggccgcgccttcccgccaccgccgccgccgcgagctgggggcgccgccgcgtccccgccgccaccgcccctgccgccgccgcggtgcgggggcctggcccccggcgggcggccgtggccgctgcccgaaggcggctgctcgccgggcggcggcggcggcaggcggcgcggcgggctgggcgcggcggtggttaggtcggtgcggttgtagtccatgcacagcgtgtcagggttgccttgctcgggcagccggtcgcagcgcatgcggtcgggccaggcgaagccgtactggcgcatgagcggcgcgcagccggccttggcgcgctcgcacaccgagcggcagggcggcagcggcttcttgtagtcctctaggcagatgggcgtgtacatgctgcacaggaagaacttgagatcgggcgagcactggatctccaccagcggccagaactggtgcacctccaggcccgcctcgtcttgcgtgtcgtggttgaactgattgggcatgtaggtgtagttgtagccgatgcccttacacagcggcacggtgatctcttggcatgccagctccttggccgaggcggccgcagcgccgctagagcgctgcagcagcgccaaggcggccagcagcgaggtcacttccaacaggtaaccccactccatgctgtgcgcctcggcccggtgccctcgccctccaggcggcgcgcagaggggtgccggggggggggcccacgagagagccgcagacgggtacagcgggtgatctggggtctcccttatgcttcgcccgggaggggggtctgccgataatctaaccccttctaggggcgcgtccgcagcggcgcggcccgcagcctgggcagggcccttccgcactcctttccgccgctccgggggtttgaaggcggctgcaggcgcgcgccacagtccgtaggtccgctctgctggccccgggtcgcgctcagccctcgcggcgcagagcggccgggcctcggctcatcgtcccgcgctcgctcgcctcctctccgcgcgcccgaccacttctccccgccgcgccgggcggcggtgactccgccggacagagagggcggaggcgccgcaagtttcctctggggccgcggtgcgcagtcaagatggctgggccgggccgcttgccgcgccgggtcagccctggcggccaccactcggcccccgggggctcatgcccgcccccaaggccaagccgccgccgccgccgccggagttggggacccgcctcggcccaggccgccgccctctttctccggcgtccgtccttcgtccgtccgccgccgggacagacggacccccgccgcctggaaaagtcagcgccgcgctccggccgcagtcgggcgaggtgcacacagtctccttcctgctggacacccaggagcaaatccagaccggaaggcggagcggacacctgagtggcgcggcccgcgcccagccgccgcctcctcctcggcgggagcagcgcccttagcccaacttcccggctccagccccgctcgcgccgcgctgccggctcatgaatatttatacagcgcggactcggtctccgcccccagccccgcgagccaatcgccgggcggtagggcggagtccacgcgctcccagggctcagccttccttaaggcagtccccgagtgtccgcactgctgtgcgcgctctctgcggatggagagttttggtaaccttgggattgaccgcagagacagagtgttggccatggctgtccccatggcgctgagtgcgtcggaggtcttggtccccttaccccgagtctgcccttggggacagggacggggtttggtgcagcgcgcgcctccccggcgcgtttcaaaccagccaagcccctgctgccaccctccgcaaatgtgggtgatctgcaggcggctggggtctcgtgctcctcggggcggcaggaaggtctcgcagcaggcgagcgccggggaggcctgccggggctcggcgctgcagaagacccgggaaagggtgtcctccttggggttctcagaacgatggtttctgagacttggagatgtggggggtgtggagtcattctaaactggggctggacccgggacggcccgggtgagatgccccggagcccagccttgggcgcgcgaggggcgcgggggacaaatgcccgccagagactctcctcccgcctccgctgcgtgacctgggggagcctcagtttccccacctagagagttgggtgatcatagcacagatctccaagggggctttgataattaggtgagataaaatataggaagccccgagccgccgtgctttcttaggaaaaatcattcaatttctttctaaaattcaaaacaaacctcgaaacttataaataggacaggctggaaactctggggctggattccctgtcttcccttcgttctttcaggacgtctattcatccatcccaagttcacaggcttttgccagagcctccttttctctggtgggaggcggcgctgcgctctggcgtggactccgcgacacgtatctgc

SEQ ID NO: 118867 - DNA, 30 bp, Homo sapiens
  chr10:35932834-35932864
  hyper
aaaagttgcagagggcgtggggacagagca

SEQ ID NO: 118868 - DNA, 112 bp, Homo sapiens
  chr10:38146149-38146261
  hyper
cacacagactccgacggcttcaggatactgtgccatgattacacataatacataagcgaacgcgaaacgtgtaaataattacttgggataggagggcggtcagagccagcag

SEQ ID NO: 118869 - DNA, 102 bp, Homo sapiens
  chr10:38146490-38146592
  hyper
taattcatttgtcgcggacctggcgcagtcgctctcccccgcagccccgcctcctccccgcgggctcagggcacaaaaagcgcacacgcacacatcaaacgc

SEQ ID NO: 118870 - DNA, 30 bp, Homo sapiens; identical to SEQ ID NO: 7316
  chr10:38146944-38146974
  hyper

SEQ ID NO: 118871 - DNA, 428 bp, Homo sapiens
  chr10:38265524-38265952
  hyper
tccccaccctagggcgtaagaccaaaaaaacgccaatgccagaaagaagacactgcacatgcgcagaacgtttccctagccctactccagaactacgcttcccagaaggcccggctgcgactccatcttggatgacgtcgtgaggcgcggccgcctccagcggcctgagtgattgctgtcgggtttccgggagagggcgctgtccttgctcagtgatggccggagagctgcaccctgcacgtctgggcttgaagacagaaatccaccgtgaggtgctccaaggaacactgatgggcagttttgttaaagtgattgaactccgtgggtacaggagtacgtggagtaatgaaggataatgccctgtaaccgcttcctcttaggaatgctagctttcacaattgtgcaaacggtacgcgaaacgtaataaa

SEQ ID NO: 118872 - DNA, 225 bp, Homo sapiens
  chr10:38299276-38299501
  hyper
ttaaactgtatggacgagatctatttcctaacatttaaacggaaaatgacacgcagcggtcctttccttgagcgtctgcgtctaaactgcccacagacctcccccgcagtatatccctttggagtgccccggggaaagccagggctgcaggcagttccagcaccaactcagaccgcatctgcccactgcctagcggggcacttctctaccaatccgaagggctgc

SEQ ID NO: 118873 - DNA, 16 bp, Homo sapiens
  chr10:38299539-38299555
  hyper
cgccaacagcatcaag

SEQ ID NO: 118874 - DNA, 30 bp, Homo sapiens
  chr10:38300018-38300048
  hyper
cgcgtgtgctagggcgccgcggtacgtggg

SEQ ID NO: 118875 - DNA, 30 bp, Homo sapiens; identical to SEQ ID NO: 7317
  chr10:38654417-38654447
  hyper

SEQ ID NO: 118876 - DNA, 30 bp, Homo sapiens; identical to SEQ ID NO: 47054
  chr10:43047769-43047799
  hyper

SEQ ID NO: 118877 - DNA, 30 bp, Homo sapiens
  chr10:43048327-43048357
  hyper
acaagtcctcgcgccgctcccttagaaagt

SEQ ID NO: 118878 - DNA, 308 bp, Homo sapiens; identical to SEQ ID NO: 47055
  chr10:43133482-43133790
  hyper

SEQ ID NO: 118879 - DNA, 164 bp, Homo sapiens; identical to SEQ ID NO: 47056
  chr10:43134085-43134249
  hyper

SEQ ID NO: 118880 - DNA, 1481 bp, Homo sapiens
  chr10:43248637-43250118
  hyper
tgagcccacctcctgcgccccgcccaacctcgggtccccaggcccagcctctgacacgccgctcccagcgcggccacgccacagctccgggctgcgctcccccaggcaaaggcgccgccggcgcgtccagcgcggcctcctcctccaggcggcgcttgtgagtcaatggaaaagtccttggcgaactgagcagccgcctagtatatctctgaagcctcctgcggagacttcacggcttgtcccaggagcttctacaacagcctggcattgagagtagagttgtaatattttccgccagtttttcccagcccggccccgaagcgtctgatcttaaagtccacgtatcagactccggggggcgtccctgcaagagcgccaggtccccgacacccaccagggaatgaatctgcgcccaggtccccgacacccgccagggaatgaatctccgtcccaggagaagggcgtggcgaggggagaagcaacaaccacaggacccgtgacagtggccaagccttagaggccccgcatgcctgccaggcgcccgagcccacgcagtccaggtttccccatccgggcgggaaccagctgtttcccctgcacgggcgagggcgctggggtcacctccgccgacgccaggcgtgagctccagaacccgctcccaaccgcccggtcccgtgagcgcggggagcctggctctcgcctgacaataaagaaatcatcacggacagaaggaaagaggagcgaggctgggaagggagcggctttaatccggggtccgcccccttcaattctccagcgcagcggccccgaaagtggggtggggacggggattgaggctgagctcgcttcttccttgttttccgggtctcgcgcctctgaagcgaactgggcctggaggggtgctggggatcgagggagcggcgttggtgggtgaccgagggaaaggtggggccagcccctgggcaccggtcggaggaggattacgaggcggagccgctgcctgcccgcgcctcacccgcttggtccacccaatagctccgctgtagactcgcggcggcaggagcggcgggccagatggtgattacaacccggggcgctatccctttggaacctgacccccaactccgctcagtaaccggatttccggaagccgcgacctcgaagcccccagcgtttctccaccgacggcggggccggggctcctggaagcctcggagccgcagctccagcctgcagcgcacgccttggcccccagggagcagagaggcagagtacccccctgcatccggagcatagcaagcatgccccaggctgaggacctgcgacttggtgggacttcggtgcccgcccctccgccactacagggagcagaggcggctctggaagtcggtttagtgcggagaccgcgaccggaggagcgcagaacgctcctcccagcgtcctgggctccgcaggcacaatttttaaaccagaggcgaaat

SEQ ID NO: 118881 - DNA, 643 bp, Homo sapiens; identical to SEQ ID NO: 47058
  chr10:43250136-43250779
  hyper

SEQ ID NO: 118882 - DNA, 78 bp, Homo sapiens; identical to SEQ ID NO: 47059
  chr10:43250854-43250932
  hyper

SEQ ID NO: 118883 - DNA, 30 bp, Homo sapiens; identical to SEQ ID NO: 47060
  chr10:43361300-43361330
  hyper

SEQ ID NO: 118884 - DNA, 725 bp, Homo sapiens
  chr10:43361589-43362314
  hyper
ggtgtatgcccgccccgaggctccaccgcgcctgtgtgccgggaagcctggctccacaggaccctcaggcactgggcgcgccgtcgctgcagctgccaggagctcctgaggaagtggctcgaggccccggggcgggtcaggcgtagggtgggcccgctgccctcacacccgccccggccgcacacaggaggcgcgatcagcagagtcgttggacaggtttggacaccggctgtctctttcgggcctcggttttcgcgtctgaaataaaagcgcgcatcctggccctggcgcggtgcctctgccgcggtagaggtttccaccatgagcccagtgcgccttccaggctcgagggagagggagtgtgcgtgcgtgtgaacgcgtcacactcttgtgtgaacgcgtcatacgcttgtgaaagacggtgcttgtgcacacgcgtgtgcgtgcgtgtgaacgcgtcagggtacccgaggatgcacacacgcacgtgtgagtgtgcgcgagtgcgtgctcagaggacagctctcagcaggctggggacctccttcctctcacccctgagggttttgggggaccagcccccgtatccgggtgctgcgggatcccctgaggcgagcgcgcaccgctgtgctcgggctccggctttgtggggacccggccttcccggcccgcaccacgaggagttccacgcagtagccacgaggtggcaccgcagactcgctacc

SEQ ID NO: 118885 - DNA, 213 bp, Homo sapiens; identical to SEQ ID NO: 47062
  chr10:43428363-43428576
  hyper

SEQ ID NO: 118886 - DNA, 340 bp, Homo sapiens; identical to SEQ ID NO: 47063
  chr10:43428636-43428976
  hyper

SEQ ID NO: 118887 - DNA, 130 bp, Homo sapiens; identical to SEQ ID NO: 7322
  chr10:43429066-43429196
  hyper

SEQ ID NO: 118888 - DNA, 259 bp, Homo sapiens; identical to SEQ ID NO: 7323
  chr10:43429215-43429474
  hyper

SEQ ID NO: 118889 - DNA, 378 bp, Homo sapiens; identical to SEQ ID NO: 47066
  chr10:43571918-43572296
  hyper

SEQ ID NO: 118890 - DNA, 743 bp, Homo sapiens
  chr10:43572558-43573301
  hyper
ccggaacgtgcgtcgcgcccccagtgtccgtcgcgtccgccgcgccccgggcggggatggggcggccagactgagcgccgcacccgccatccagacccgccggccctagccgcagtccctccagccgtggccccagcgcgcacgggcgatggcgaaggcgacgtccggtgccgcggggctgcgtctgctgttgctgctgctgctgccgctgctaggcaaaggtgagttctgccggccgccggctcccgcaggggccagggcgaagttggcgccgagcagcggagcgggcgcgttcagaagcgcctttctgtttgccgtgggcagcgggctgtgcggtcgccggccacccggcctcggctgggagcgcagtggctgcggcgggcggcgggcgaagggcaggacgcctcgggccgggcgcctcgggccggggctgggcgggtctcgggcgggagcggagcgcgggccgggccgcgggggtcggtgctcagaaccctagccatagccgcaggtctcaatctggccgcgccctgcgccaaagccgcgtcctggagcaaacgggacagccgtttcggggccgacctggcggacgggtcagggagccccgaaagcccgcgattcgtgcggagagttctgtttcggcaggagacggctccgtcctggtttccttttcccgctcagcgtccgtgcgttcctcccccagctctgccgtcctggccagccgagggattcggaggctcttttga

SEQ ID NO: 118891 - DNA, 30 bp, Homo sapiens; identical to SEQ ID NO: 47068
  chr10:43593497-43593527
  hyper

SEQ ID NO: 118892 - DNA, 75 bp, Homo sapiens
  chr10:43600281-43600356
  hyper
ggcctggggccgcggcggtgtgcgccccgctctgaccgcagagcccccttcccgaggaaagcggctggcccggtc

SEQ ID NO: 118893 - DNA, 171 bp, Homo sapiens; identical to SEQ ID NO: 47069
  chr10:43600550-43600721
  hyper

SEQ ID NO: 118894 - DNA, 30 bp, Homo sapiens; identical to SEQ ID NO: 47070
  chr10:43633243-43633273
  hyper

SEQ ID NO: 118895 - DNA, 30 bp, Homo sapiens
  chr10:43633832-43633862
  hyper
ttcctgggcggggccgcgggcgcgcggcgg

SEQ ID NO: 118896 - DNA, 30 bp, Homo sapiens; identical to SEQ ID NO: 47071
  chr10:43634197-43634227
  hyper

SEQ ID NO: 118897 - DNA, 350 bp, Homo sapiens; identical to SEQ ID NO: 47072
  chr10:43697736-43698086
  hyper

SEQ ID NO: 118898 - DNA, 179 bp, Homo sapiens; identical to SEQ ID NO: 7326
  chr10:43698114-43698293
  hyper

SEQ ID NO: 118899 - DNA, 455 bp, Homo sapiens
  chr10:43724712-43725167
  hyper
acacagaccacacaccgcggaccacccctcgcccggcacatcctcctcagagcaacaggtggttctgcgcccctcaagtcgtccgggctcctacacgcccgtccccaccccttccaggctcgcaggagccactgtgctctcggcgtccgcgggccgcgccgcgaagggcagggcaggagcagaggcaggctgggcgccgcccaccgggcagtaggtgctccagcggggacgcacagagggcggcgcgcgggtcctcagggcgggcaccctcccgcacgggtcgggatgcaggggaccgtcgcacccctcccgagcccgacagcgcaagaaccctgccccgcggccttgcgcctgggcccgccgcagccctacctggggctccaggaacattctggccgccggctccccgcgccgtcctgcccggtccggcgtccagcgagcggcggctcctctgc

SEQ ID NO: 118900 - DNA, 149 bp, Homo sapiens
  chr10:43725396-43725545
  hyper
ggagctgcctgggccgggcgcgcgcctggcgctaggtgtgggggcgccgtaggtgccggggtgtgaggctggacggggcgtccgggatcggccgtgccgggggtcggtgctggcgcgcggggccggcgagggggcgcagcgtgggtcgg

SEQ ID NO: 118901 - DNA, 604 bp, Homo sapiens
  chr10:43761672-43762276
  hyper
ccccgttcctggggccggcaaggcctggggcaaagagagcgtggtccttcaaatgacccttgcccagcagggagagggagacacctggcatggccctggacctctcccccaaatgcagagctcaagccccaattcctcgccaaacagcaagggcgtgagataccacggcggggcccagaatgcagaagagcaaatggaaacttccaactgcgcagccctgagctcctccgattccccagcccccacccccacgccaggccccgggcagcgaacctgcccgcagtgcccacgcccgcccgccgcgtgcgctcctgccacgcccggcccggcccggcccggcccgccaggtgccctgaaggggcggagggtgcagggggtcctggcgccgtccagcccggggcggagttctcagcaactccgcgcgccgggatcccggccgccctccccgcgcgcgtcccccgccccgcgcccggagcccgcgccccggccccacgacggccgcgccgggagggaccccgggcccgcgcacgccgcgccctgcccgcgccggcgaccggagggcacggccccaggcgcgggcgggggccccgaggcactgagggtc

SEQ ID NO: 118902 - DNA, 30 bp, Homo sapiens; identical to SEQ ID NO: 47076
  chr10:43762655-43762685
  hyper

SEQ ID NO: 118903 - DNA, 257 bp, Homo sapiens
  chr10:43800184-43800441
  hyper
ggagagctgaggaggcgggtcctggggcagcggcagcgttaccgcttgcaaaggcgccccttttttctgtgctgattttcgcctgtgagacttcctcccacgggcgccgctggctagtcagactttcccgcgtgcctcctgccccgccctaacaggctaacttttccgcgccgggcctggctctttgctgcagctgccgccctcggtgcagagttcccgggagcacttgctggcttcggtttcgcgaacttcctggc

SEQ ID NO: 118904 - DNA, 228 bp, Homo sapiens
  chr10:43818307-43818535
  hyper
ctactcagaccaagccggtttaccgtcaccatggcaacagcgcgtcctgggctggggcggggccagactgccagtgcctttgtggcgcattaggagctaagccagtgattggccatctgggcgcggggcgggctgagtcagttggagggggcggggctgaggctccggtgaacgccgtaggcccgggctgggccgagggagatgatggatgccgcttcttgccactcc

SEQ ID NO: 118905 - DNA, 302 bp, Homo sapiens; identical to SEQ ID NO: 47078
  chr10:43857617-43857919
  hyper

SEQ ID NO: 118906 - DNA, 1109 bp, Homo sapiens; identical to SEQ ID NO: 47079
  chr10:43892053-43893162
  hyper

SEQ ID NO: 118907 - DNA, 30 bp, Homo sapiens
  chr10:43903255-43903285
  hyper
ctacgggaaccgggcgtgggaggagggcgg

SEQ ID NO: 118908 - DNA, 74 bp, Homo sapiens
  chr10:43904391-43904465
  hyper
gcccgtcgagcgcacgcggctttgccggaagccctcctgctcccggcgagccaggccccgactaggccctactg

SEQ ID NO: 118909 - DNA, 30 bp, Homo sapiens; identical to SEQ ID NO: 7329
  chr10:43915820-43915850
  hyper

SEQ ID NO: 118910 - DNA, 256 bp, Homo sapiens
  chr10:43932225-43932481
  hyper
ggcctgccctccagcgcccggggtcctcggcccagccctgctccgagcgcgtcacaatggcgtcgcggccccgcccccggacgcccagccgcggtcccagcgaccttcgctttcgtggggaagccggactgcgccgtgtcttcctgaagaaggctggggtaagagtccggccagcggacaagagggcagctggtagcagggtgggatgcccgtggcatagggccgagcccccgctaggcacgcgggagcagcaagg

SEQ ID NO: 118911 - DNA, 31 bp, Homo sapiens; identical to SEQ ID NO: 7330
  chr10:43932786-43932817
  hyper

SEQ ID NO: 118912 - DNA, 30 bp, Homo sapiens
  chr10:43950870-43950900
  hyper
gctgctttgctttccgggagaatccctgcg

SEQ ID NO: 118913 - DNA, 30 bp, Homo sapiens
  chr10:43951421-43951451
  hyper
cggcggaagtccagcgttgcatggttacag

SEQ ID NO: 118914 - DNA, 55 bp, Homo sapiens; identical to SEQ ID NO: 7331
  chr10:44069623-44069678
  hyper

SEQ ID NO: 118915 - DNA, 31 bp, Homo sapiens; identical to SEQ ID NO: 47084
  chr10:44069989-44070020
  hyper

SEQ ID NO: 118916 - DNA, 30 bp, Homo sapiens; identical to SEQ ID NO: 47085
  chr10:44144412-44144442
  hyper

SEQ ID NO: 118917 - DNA, 1017 bp, Homo sapiens
  chr10:44185103-44186120
  hyper
gtcttggtgaccactgtgagccggcgaggtccactgggccagaccctggcccgaggtggccccggagctgtgagcgggaggaagagggaagggcggagtctggagccctcacgccttccgccttgtgcgcggtgcaggctgccgagagcccggccgggcaagcctttccgccgtggtcagtgactcgtttgcacaaggactttttagggaagagagaagccaggccttcgctgtgggcctagcccctcaaaccgcaagctctcccccttggggtcctcgtcgtgaacgcccttctcgtctcccgccgggctcactctttcgcattttgctgcgaaagtttactggaaataggtccattcactggtcgattcagagggacactagaaacgcgatgcccatatctaacacatcctggccttttgaagagggataaaaaataatacccactagagccccgtgcctccggagagtggggcttcgcatttgcgcgtccgaggcccggcagggagagcttctgggtcctgggggcgcgcacatccggcgcgcgctgtgtcggggagcggcgctctgggctgggccggcagagggcgctgcggggcggccgtggaacaagcaggggagagcgtcaggggacccagcacagcctgcctgctgcgccctgctgccggccgcgccctcctccgtgctgcgttctcctgctcgacgctgcgtcctcatccaacactggcaccgcgcgctccttccagggtcggaggcccacagacccctcacgttcgcttctgtcaggagtagcggcagaatttcgataatttatgtctttgatggagactgggaaggtagcctggccgctgcgcaggagagctgcgcggggtccaggaggggagcgcggagtgggagcagtcgactcgggctgcgcagtgcgtgtcggctgtcacgggacaccggtgaggaccctgcacccagagtcgggggtccaggctgttgctggaacaggaggcagctcggtgtccacggttc

SEQ ID NO: 118918 - DNA, 31 bp, Homo sapiens; identical to SEQ ID NO: 7333
  chr10:44420042-44420073
  hyper

SEQ ID NO: 118919 - DNA, 387 bp, Homo sapiens; identical to SEQ ID NO: 7334
  chr10:44806415-44806802
  hyper

SEQ ID NO: 118920 - DNA, 30 bp, Homo sapiens
  chr10:44807197-44807227
  hyper
agaggtcacagcagtcgatgtgccagaatc

SEQ ID NO: 118921 - DNA, 30 bp, Homo sapiens; identical to SEQ ID NO: 7335
  chr10:44848905-44848935
  hyper

SEQ ID NO: 118922 - DNA, 1182 bp, Homo sapiens
  chr10:44879272-44880454
  hyper
acccagccaagggctcgaggcgcgctgggcctgcacagcccgcggctgcaagagcactcagagtgtccttcaactctttgcaggaaacttcacagccaaggaagctcagcggcctgagccacagggttttgttttgtgtgttcagaggcaacagtttattttggtttgcatcggtgtcctgtgacagcgcagcgagtttctcttcagcgaaagaaaagaaaaaagccctctcccagtgaaacgggacaccacggttcccagtggcccagggccttggagattgaactttgctgcagctctcattctggggcaaagcgcttggccagctggtgacaaaagagcctgtctgcaggtgtgtttggggagctggggagggggcgtgtgaggctcggagggtccctgggcctctctcaggtgaacccgagaagagacaggaagacagcggctggacgcgcgcccaggtccgcgtcgctgcggaccgcggagctgtgcagaagcgcggcctggcgggtggcacaagcccgacagctgcgccgcgcagcccgcccgcgcctggccaagagccccgcgagggtgtggggagaggatcggcttcgcagggagcggaggctgcgcggctgcatcggacctcacagcctcaagtcgcggcatgaggcgaactttgcaaagcgcgctctcgccatgcaccgcccgacctccagcactgtgcgcagcaggacctcggagcccattcgcctgtggaaaccgagcccgcagcgggaaggcagtgggtggagggtgggcaggcaggggtctggggtccgcggctccccaccctcgcgccttcccgcgccagtcccgaacgctctcttggggcgttcctgcccagttgtcccggctgacctcgctctgcagccagcttgaggtcaggcggtcgctctctgcaggtcacaaaccctcggcgcaaaagtagggctttgaacgcgacaccgcaccagagcgcccagctaagcgagctgcctccacccccactgtgtcgggcggcgcaaactgcgggcgcaggcagaggagccgcggctctgcgccgggcgggagccgaagcccagagcctcgccagggcctccccgccgagcgcacttaccgtcgctgaggcagagcgcggtcagcacgaggaccagcacgaccacgaccttggcgttcatg

SEQ ID NO: 118923 - DNA, 125 bp, Homo sapiens; identical to SEQ ID NO: 7337
  chr10:44880519-44880644
  hyper

SEQ ID NO: 118924 - DNA, 322 bp, Homo sapiens
  chr10:44880673-44880995
  hyper
cggcaccccccacccatccccttcgcccctcctccgctccctctgtgctcccgaggcgcagtgcgctccggcctttgaccttctcaggctccgctgggccccgcaccgctggcccggtctgcagtgaggtccgcagcctgagcgacgccggctggagggccgcttattgtccctgtgacagggccccactggagagactgaggaccttaggcgtaaagtggggcgcgcgtggaaagctgcgggacggggcctttcgatggcgggaactgaatgagaaccaatgaaaagcaaacaagttagtcccgggcggagggcctgctgg

SEQ ID NO: 118925 - DNA, 305 bp, Homo sapiens
  chr10:44882092-44882397
  hyper
aaggcagccgtcgggcgtccccaggcctttgctgggctgggccggggagcctggccgctcaccggccgcagcgctggggctccggcgccctctggtggcggcgcctccctccccgctcccagagctctggccagctccattcctgcgcagctgatgaaacccgggagggcgaaggggtccgcgggaaatctacacccgggtggaggggcgccctggagctcggagatccgaccctgcgggagccgcgcgcagcctcgcttgcccttaaatctggccaaagcaaacgccatcgcctctcgcttctt

SEQ ID NO: 118926 - DNA, 282 bp, Homo sapiens
  chr10:45470471-45470753
  hyper
gacaagcaagtgagccccaggcggcaggaccttttctggggactgtgtgccggccccgcccgcctggggcgcggcgccgaggctccggggcgccccctggtgaccgcgggcgcgctccacatccagtcccgctcctcggcccagggacccctcagcaatgagagaaacggaaggggcttcccctggtccgggggctccgtctctcccaggggtgcggaaaaccagcatcccgccttgagagagttgccccgtcccctctccgaaggcctggcagaccactgg

SEQ ID NO: 118927 - DNA, 30 bp, Homo sapiens; identical to SEQ ID NO: 47094
  chr10:45496437-45496467
  hyper

SEQ ID NO: 118928 - DNA, 30 bp, Homo sapiens
  chr10:46090226-46090256
  hyper
ctctgagctggcggcgctaccgccctggcc

SEQ ID NO: 118929 - DNA, 51 bp, Homo sapiens; identical to SEQ ID NO: 7340
  chr10:49514478-49514529
  hyper

SEQ ID NO: 118930 - DNA, 30 bp, Homo sapiens; identical to SEQ ID NO: 7341
  chr10:49515359-49515389
  hyper

SEQ ID NO: 118931 - DNA, 727 bp, Homo sapiens
  chr10:49731360-49732087
  hyper
gtgagtttagggagcgctgcagtaaagggatgcaccactatgttcccaacgatcaacagggatcatttcagtcagtcaagggttaagtcggccgggccccagcccccgggaggccggacctccggcggccgccaacgtcctaagcgtgtttctgggctttgggccctctccaagactgctgcattcctcaagcagctctgctcgcaggttgccgccgcgagttttggaaaactctgagtcagggccccaccgtccaagtttgtgacagaggcgggcgagaatgaatggtccctctcccggcagttaagccgcaggggcggcgcagggcgcgcgccgggctcgcggtgcagagacctgcgagcgggtctgggcgccgggggttcctccgtcccggccgtggacttggcggacctgcagccggcgccgcggccagccccgggccctggagggcggaccctcccctccgctctacccactcccgcccaggggccggaccccacccccactcccacatggggaccgaggagccccaggatgcgcccccgcgccccgagtgaaggggagcctccccttccaaagttaggagactcagaggagcagcagccgcacctgagccctttccaaagctgaggcaggtgcgggcggccctggacaccccgtggcgagtccccgaggcggggctggcagcctctggcggcggccgcagggagcggggcgcacgtgcgcg

SEQ ID NO: 118932 - DNA, 382 bp, Homo sapiens; identical to SEQ ID NO: 47098
  chr10:49732155-49732537
  hyper

SEQ ID NO: 118933 - DNA, 30 bp, Homo sapiens; identical to SEQ ID NO: 7343
  chr10:49813140-49813170
  hyper

SEQ ID NO: 118934 - DNA, 31 bp, Homo sapiens; identical to SEQ ID NO: 7344
  chr10:49892636-49892667
  hyper

SEQ ID NO: 118935 - DNA, 538 bp, Homo sapiens
  chr10:50323148-50323686
  hyper
caccaacttgggctgcgctcctgctgcatctcccctcggggcctgccgctgggaagatctcggctgctgcgagagtacccagccccaggcgaggtcgggacggggaccgcgctcacgggaggcgtcctctgaaccttggggaggcgccgctgcgcccgccagaccctcggcgagcccaccggagcgcgctggcgacagtgacagcgccgccccccgcccgcgcccggaggtggcagggcctccccaccaggcccggagccccggcctccccggcgcggccgcccggcccccacccttcccgctcccgcctggccccgccgcgcttacccggagccggagcccgcgccagcagcgcggccgccgccagtgccagcagccgcatctccccgccgccgcccggcgctgtgacgcgggagagcgccgccgcctggcccggccgccgccagcccgccccgggcccgcgctcgcgcccgcccccggcccgccccttgggccgcctgccacgcggggccggggctgctgggtcccgaggcccgca

SEQ ID NO: 118936 - DNA, 1145 bp, Homo sapiens
  chr10:50603006-50604151
  hyper
agagcagcccagcgacgggcccttgtaggctcgtgcagctcgtgatctgggccaggacgcggcgggtccactcgcctttgctttctgggatgtttgcagaagcaccgtgaaagattgatgcggccccctgggttgcggagccccaattagaggcgtgacaccagcatctgtgctgggaggattcggccggtccccgcggcacgcctagcccggggcgtcctggcccaggcggggagggagctgggaggcaggtggcgacggggcggggagctggagcgggcctggagtggggtgtagggaggggtccagggaggcccctactcaccggcaggcggctgcgccccccgcagggcggggacccagccacccaccagccctgctgccgctccggccctttctggccggctctggcttcatggagaccctggggcgcagcgcttacttaccctctagctgtggcgggcagtggaaataaaacatcgccggctgtcagatcggctggacggccgagacctgggagggtggcagcagaacggacccgcgcgcgttgctcctgcctggctgcaaagcaaacagcgatagagcttcaagtctccctctgccagcgctcccgcccagccctagggcgcacccggcgctcccctcctggaaagtccctcccaacgccctcatctcactgcgggggacaggagggaaggcggcagccccgtcgcaagcagcaaccccacagggcagtccttcgggtgtgtccacctcccggacggccgtgccctcaccctggccccagcaccaaaccccgcagcgtagtttctggctctctggggtcccagccagaagccctgcacccgggccaccgcagccaggtccggctagcgcgcaaggccatctgcgagctgcagctcaggccaggaaggcagccgagccccaaggcccggcgctcggggcccggcgagtgggtcaggagccgagcatacctcggcgggcggcggtcgaggaggtcggagcgtgaccgcctccgatccgcaagccctgctcggctggcggcgggcggggctcggcgcggctggcgcccgcaggaccaaagaagtgactcgggaagtggccagatgtcttgctgtctgtctgcagcgcgcgccgccgctcag

SEQ ID NO: 118937 - DNA, 170 bp, Homo sapiens
  chr10:50604554-50604724
  hyper
cctttccaaacgatcgtacaaaaggaaagtttgattttgttctcagcaaggggtccctgaatttatgttcgcttctcgatgcaaatgatatgcggtgggaccctttgcaattacttttaaaatgcatccgaggcagacactcaacggagagagaccgcccttctctctgc

SEQ ID NO: 118938 - DNA, 1734 bp, Homo sapiens
  chr10:50605143-50606877
  hyper
acattctaatgctgcgttagggagccttggcgaggtggtgggtcgggtccctgcacggcccgggatacagccttgatcttaaagacgcagcgctttggaaacaaaaggcctggcaggcccgccgctggacaccagcgctgggcaaggagcatcgagctgcaggacagagcgctgggtcccggccgccgttgacgcccctccgaaaacagccgggaggaagaccagtcccgctccggtcgaggcaagtcaggatctattccagtgaagcggcccttcctgggctcagtcgctccagagcagagtctgctctgcctcggggaaagaatcacaggaaacttccgctcgtttcagagcggagagagctcggggcgccatttccgccagggccaccgactccgagagtccaggcagccggcccgggaggagcggctagcaggtcccgaaggcgggtgaggtggcaggcaggggccggcagggcagccgagggcctttcctacgtcatgccaagagggctgggagcccctagagctgatcctcccttagcccaggtcaagagactggctcgcgcgcgctgtctctctccctgtctccctcagagggcccctgctctctggagctcttgacaagagcccgaggctcctcttgccgcctaggtctgccgaaagtcccctcgggttccctcctgccctaggcagcagttccctgcctgtgcgctttgggaacccggtggccgtgaagtgaggtgcggacagcttctgggccgcctcggccaagatgctcaggcgcacctgggggtgtgtgcgggaaccctcagcggcagcagcccagcccggggtgcagtgttggccccagaaaccaatgaggtccaaacgccagtctcagttccccatccctgacatcgaccgaggcaagttcctattaaggcccagagatgaccccgggacgagacaggctcatccggcgcggatgagacaggctcagacctgcgcggtctgaggacggcgcgctcgccgagcaacccggcaggtcagaaccctggacagcggcgccggtttccgcacccccacccacccccggctgctgcggagaaagaagccgtaccgggggcccagccggggcccctcgctgctcaggggtgggatccgcccggccggaccccaggcgtccggggaccgaccccaatcctctcccagtccaaacctgcgaaagttactccggacatgcgctcagcgctggcaacagagacaaaactcccttctccgcagtaccacgcgccgctcctacccggccgctgcagccggaaaccatctcgcggcccccgaggagagtccggccgcctcactgactagataaccagccgagctccctcaacacacccacctcgcgggggctctaagccggcttgggaccctcggcctcgcctcgcccggcgctcctctcccggagccgctaggctgggctccttcccgttggcaaaacagcgagtaaacaaacaaccaaacaaccttagaaacgaaaggctgcaccaaactttgatgacgccagccccctttttttccgaatgtctcgacacccgggagaaggtgactaataggtgttcgctacggtccccctccccctaaaaaagggcgttagtaacgaaaaggttatttttccttaatttttgtgcggtaaaatgtattttccaattaaccaaattcgccgatctgtctcgcttggacactctgataattt

SEQ ID NO: 118939 - DNA, 30 bp, Homo sapiens
  chr10:50746553-50746583
  hyper
ctgcgtggaagtcacgtaacagcagcattt

SEQ ID NO: 118940 - DNA, 30 bp, Homo sapiens; identical to SEQ ID NO: 47107
  chr10:50747313-50747343
  hyper

SEQ ID NO: 118941 - DNA, 511 bp, Homo sapiens
  chr10:50814998-50815509
  hyper
gagagaaaaatgcttccgttttctcctacaggattggacaggaagttctctgttgcctgcaagttatgctcagatagaggagtccggaaaggaatttaccaagcgttcaagtgaagaggaagccagaggggcggggcctccgtgggaggcttcttggttgcggtggggccggggccagcaccctggacagctcccggcggctggcggggagaagaggctttgccaggtcccatctcggctcagaccctcccgtagccttttgctgcaggggcctgacgcctccttgcaaccccggcactcccgtatttggagccacgatggattgggggggcgttgccctctgatctgaaagttagagaatgagggagtttagtgtctttggagcctccttagggagccagcccaggaccttcctcctcccatgggtcttgatctgctcctcacccctacactgccagcgtgcggccaccttggagatggagcagcaggagcacgacgccgtgccgggaat

SEQ ID NO: 118942 - DNA, 783 bp, Homo sapiens
  chr10:50817089-50817872
  hyper
ctctcccgccagtccgcccactggaacacgggttccatgtgccatccagggtcaacgccgctctggggacgcgtcaggcccagcgcacagcctgggcagctcagcctgtcagctgagcacgggcgcctcaaggggtgcggccctctcagaaggaaggtgagtctccctggagcccctgacgacagcgaagcggctgggcgctctccggggagtgggcgcggcacccaagaagggtttcttacagttccaagagaggaccccagccacagtcactccagagcccacccggggcttggaggaggctctggaaaatgagggatgggggagtgtgcagaacagggggcggaggctggcaggagccgagggagggcttggtcgggtgcgaagagtgcctgggaggagttagagtggggagggggtgcggcggcggggagagaagaggcggagctgggggaccagaccgctaaaggagaaagggggattccaggcaaggggaatgtggccaggcagtgcgggagggcggcagcggccaggctaatattcgcgaccccgactggggcgcggcaacttctgccctcagtccccacaagctcccggccgcgattcgcggccgagaaattctgcggaggggccggtgggtcagagccaggccaggcagttgctgagccttcccctcccctcctggcgggagtgtgtgtgcaaggggccagggggcggagtcggagaaagggttgggggtgtccgtgtccagcgctcctccggacgcggctccacaatccagct

SEQ ID NO: 118943 - DNA, 479 bp, Homo sapiens; identical to SEQ ID NO: 47111
  chr10:50818152-50818631
  hyper

SEQ ID NO: 118944 - DNA, 421 bp, Homo sapiens; identical to SEQ ID NO: 47112
  chr10:50818986-50819407
  hyper

SEQ ID NO: 118945 - DNA, 193 bp, Homo sapiens
  chr10:50819747-50819940
  hyper
cggcttccgagtgggagatgggcatggcctggctgccggccttcgtgcctcatgtgctgggcgtctacctcaccgtgcgcctggcggcgcgctacccacacctgcagtggctgtacggcgcgcttgggctggctgtgatcggcgccagctcgtgcatcgtgcccgcctgccgctccttcgcgccgctagtggt

SEQ ID NO: 118946 - DNA, 30 bp, Homo sapiens
  chr10:50820707-50820737
  hyper
cttgggccgctgcaccgcggcgcctccgcc

SEQ ID NO: 118947 - DNA, 214 bp, Homo sapiens
  chr10:50821016-50821230
  hyper
gagcccggggatgccgcccgggggagcctgaggacccgctccagctaggcacgccaggccccgccctttgaggacacgccccacaccagcctcagagctctgaggtgcctgggctgagcttcccttcagaccagaatcccgccccgttgaggctttgagaaaggagtaggagccgagcattccggcagaggaagaaaaacggcccatcttttag

SEQ ID NO: 118948 - DNA, 242 bp, Homo sapiens; identical to SEQ ID NO: 47114
  chr10:50821466-50821708
  hyper

SEQ ID NO: 118949 - DNA, 712 bp, Homo sapiens
  chr10:50822143-50822855
  hyper
ctaaatttgttgcccgagttcctccgggaagcgctccgggtagattctgggggccgggagctgagatccctgggcggggagctggggaagggatggggctgaggacagcgaagaagagggggcttgggggaggggggaaatggaagagagaggagggaggaggtacaagaggaaggagagaagtgcggccagcttgctttctccagtcgggtggccgcggggacccgggcgacgtcggaggccctgccgggaacccaggctgcagcccccacccccgcgctgcgacacgccccccaccccttccggctcacacccccgcccacactcctgagtggtgcggtgcagcgtcggccgaggcagcagagccgaggagagcaggtgagaagaagggctgggctgggctggcggagcgcggtgccgggagcaagggcggcggtcgggggctctatccagggacagcaccggggccgagaggccccaggactcgtggagtcctctgagtcctgcgcagcagcggccgtcgggggtcagctaggaagctgcaggattgcgttgcttcggtgcctgggcttggggaggcttaaccatcagggcttcgggactccaagcgcatgttctcacttcacttggcccagcatctgctaagtgaccaggtccgcgctttctgtgtctagtcggagggtccttgggtctgacccgactcgcctgaatt

SEQ ID NO: 118950 - DNA, 187 bp, Homo sapiens
  chr10:50887552-50887739
  hyper
acaccagctcaaacgcgcgtatttgcggaccaggcgctgagggtcacgtgagcagcttggggccgggaggatcccctagcgccaccccggccccgcccggcgcgtagcgacgcccacgcgcccgggccggaagagaggttgcttagcagcgtgtgtttctcccttgcctctgcggcggcggaggcct

SEQ ID NO: 118951 - DNA, 935 bp, Homo sapiens
  chr10:50969671-50970606
  hyper
agggtctctccggttcggcgaatgcgtactgcagcctgctgtggcctcgggattaccccgtccccctcccacatctcccggggggcggaagaagcgcatcccatgcaagcagcgacctcaggccatgccgccctctctcaggcctcagttttctcatctgtaatcggagaccgcggttaaaaccgtctattaggctccttggtagtccgaagctgcctatgggtcccgccaggtgcacagcgctgaccctccccatcccccgcacagccctcgcagctccgggccctcccctggccacggaaggcgcggggcagtctgaagtcctcgggctggagaaacccaccgcgagcacccgctcctctgcgcaggaccctggactagccgggtggtacgcgcgcgatgggctgggggtcccgggggaggccacggccagccaaggtcagagccaaggtcacagtctgttcctcctccccctccccccggcggggccagactcagggctgcgggcagcggcgccccaggacccaggagagaggagctgtggggccggtccccaggacggcaggagaagcagcggcgcagggaccgggagggggcgggccgccgcgctcaccgggcgggcgggccgggtccgcgctgcagcgaggtccggaggctgcaggtcagggggctgcgcggaaggggtgcgcgcgcgccgtgccaattacctgggtcacgtgacgcagccgcccacgggcgcgcgcccctgagactccgcgcgtcgtgacgtctccatggatgccccgccccgctcctggcgctgtccacggtgctggcggcccaggcccgaggtcgcccacggccgaaggggggactcctctctgagaccgcagaacggggctgaggccctgaaccccgtgtgctcgtcctaaaactaggacgaatgtaccagacga

SEQ ID NO: 118952 - DNA, 118 bp, Homo sapiens
  chr10:50976496-50976614
  hyper
aaggggcggggagcccgcgcctgcctagcccggctctcaggacacctctgtctgcgtctccttcgtcgccactccgggtttcgactccgcgtggccaggcaccccgggtcaccacctc

SEQ ID NO: 118953 - DNA, 39 bp, Homo sapiens
  chr10:50977033-50977072
  hyper
cgctgagcctgtgggccaggcccgcgcccaccacaggaa

SEQ ID NO: 118954 - DNA, 119 bp, Homo sapiens; identical to SEQ ID NO: 7357
  chr10:52177703-52177822
  hyper

SEQ ID NO: 118955 - DNA, 313 bp, Homo sapiens; identical to SEQ ID NO: 47118
  chr10:52178170-52178483
  hyper

SEQ ID NO: 118956 - DNA, 30 bp, Homo sapiens; identical to SEQ ID NO: 7359
  chr10:52382203-52382233
  hyper

SEQ ID NO: 118957 - DNA, 30 bp, Homo sapiens; identical to SEQ ID NO: 47120
  chr10:52382502-52382532
  hyper

SEQ ID NO: 118958 - DNA, 30 bp, Homo sapiens; identical to SEQ ID NO: 47121
  chr10:52383423-52383453
  hyper

SEQ ID NO: 118959 - DNA, 54 bp, Homo sapiens
  chr10:52383838-52383892
  hyper
ctcccgggaccgagcgggaccccgaaccaagggacagtcgcagtttgggcccct

SEQ ID NO: 118960 - DNA, 1305 bp, Homo sapiens
  chr10:52750720-52752025
  hyper
cctctgctagcaactcggctgtcggtggggtggcgcgcgcgtattctcacggagtgactaggagagggggacgagggagggggtctcaggggaggaagggcagctctaattggtttctcaatgaaagataatcacctactccccagagaggctggagattagcactctgcctctcctctccatcgcttttagacttctcatcctcccctcggtgcttttagtccattcagcagaagcggatcgaagcaggaggctccccgcgccgcattaggggcgcactccgccgcgctcgagtacttagcgcccattcactcgctcacccgcgctctccgctgccggctgccgtcccagccgccgccgccgccgccgccgccgccgccgcccgagaaaaagtttcgcggaggggctcagtgaaaaaatgagcgagctagaggaagactttgccaagattctcatgctcaaggaggagaggatcaaagagctggagaagcggctgtcagagaaggaggaagaaattcaggagctgaagaggaaactccacaaatgccagtcggtgctcccagtgccctcgacccacatcggcccccggaccacccgggcgcagggcatctcggccgagccgcagacgtacaggtccttccacgacctccgacaggcattccggaagttcaccaagtccgaaaggtaggcgcggaggccgtgggcccgggcgctcgtcccggcccgcggcgcagaggctgggggctctggccgcggcggcgggggcgggtcggcccagggcgccccctgctcgctgcggcgcgcggagtgggggtggccccgcggcccgggaatgggaagtgtttatttttatttctgcccatcacgtgctgtgcttgtctccgccgggctgggaaaggcgagctgcacggggagacgcgcccctgtggcgtgggggtggggaggaggaccgcggaaagtttactcgcgcgggctaacttgtgccctccacacatggctgcagtcgcgcggctgtccttcgtgcgccccgctgggagcgtccacgcagggacccaaccctgcccatccaggggcctggagagcttcccagcggcgaccccccggactcaggccactggacatgctcagtggggctgtccgagcctcctagggaggggcgactggaggctggacagggttgggctcaacttagggactgaacttgcccagaacccgagctctgctggcggatgcggggacagggagaggcgggacaggggcttgtctctagggcagggatccagcctggagcgtgggggcgaggag

SEQ ID NO: 118961 - DNA, 1437 bp, Homo sapiens
  chr10:52833428-52834865
  hyper
actatctggagcaggcgaagagtagcaacgcctcgggtgctaaaatcggaaaccccaccccctaccccacaaccctttcccaaaggtagtaggctgaaagggggaattcctcgcgggcgccgactcgctcgcatctcctgagaggcaagtttcttcgcaagcgttagccacctgtgtgaggcgctctgggtgggaaaggtggcgtgggagaagcgacagctcggccacaccgctcgggagctttccttagtgaggccggccgtcaaaatacctccagaactcagagctttgatgatgcagagtcccctatgcctcgtacgtcgctaggatcgtagctcaacattctccaggctggtctgctctggagtcagctgaggcctcccgagtttgcccggggtcctccctgtcccctccctcccacctccccacccccgaagtagcgctcccgcctcgctccacccgcacacccccggcgcgcctcggaggcttatcaggctccccgcacgccccgcaagcttccttgggcgcccggcgcgagggactctgagagcccagccgctgcctcggagcccccattcacgtcccctcctcccgctcccccgccaccgcgcctccgactcttctcccccgcgccgcggcgcccaccgcgtctcaggtttaatcccgggttggacctgctggtttgctctccccgctctgagcctcacagccagcccagagaagtggaatctgcactgaaactctgggtggctggagccggcggactgggcatgctcagaagccagggctggctttggtctcaagtaggaagctttggcactcgggaggcagcggcgactttggggaaagttgatcggagaggggaggaagcctcaagacgcggagcagcggcaggaaggagcccccggcagcccggaggagcatgggcaccttgcgggatttacagtacgcgctccaggagaagatcgaggagctgaggcagcgggatgctctcatcgacgagctggagctggagttggatcagaaggacgaactgatccagaagctgcagaacgagctggacaagtaccgctcggtgatccgaccagccacccagcaggcgcagaagcagagcgcgagcaccttgcagggcgagccgcgcaccaagcggcaggcgatctccgccgagcccaccgccttcgacatccaggatctcagccatgtgaccctgcccttctaccccaagagcccacagtaagcaggggtgacgcgccgggtccatgtggcgccctggcgatggggagctgcgggtctctgtattgtctgtcggcccccgcccctcccgcttgccatgtctgtcctcatcctcagaaatgtttcattttaacgggcacttcttgcggggctgtgcacgtttctcagagccagactcactgcacatacgttgccttcgtgtct

SEQ ID NO: 118962 - DNA, 451 bp, Homo sapiens
  chr10:53459322-53459773
  hyper
cagacagccgatagcggattcttcgaggcgtctgtcctcttgcgaccgacacttccgctgagcaacggaagcggctttcaagatccgggcagaaactttactaattcgcttgaatcgttccgcttgcctgtggaacctgcatcccactaacaacttatctaatgctttcagtccctgatccttcatggttctgtcagcttcttattacagagtcgcatgattcctttcccatttcacgttccgctgactttctgtggggccccaacagccccactacgacacgcttggtacgagatgaccacagtaaagatggccgcatagacttcaccgtagtaactgggaggggactcttcccttgacgtcaaaggcggttttgcttccgttccgctggcgggaaaccgccaaccgaaagcggatttaaggcggcgtgtttttcgttctgacaaagtat

SEQ ID NO: 118963 - DNA, 445 bp, Homo sapiens
  chr10:54068164-54068609
  hyper
acgccggagacaccgcggagcctgatgtccctcagagctttaatcttcccctcagtcgcctttcccctcacccgcctctaattaagtcagaaaggccctgtatttatttgcccatgaactgacacagcaaaccaacagcagccattgtagtgtgaatggatttgcgaccaggcaaggggcttcagccgggattacccgccccgcagccggatgaatgtgctgagcacaaagtctgctcaaagccgagcaaacggactatttgtgaaaatgccatcctggctcaagtctgattaagaccgggggtccccaggccgtttgatcttcgctcatcaaagagagtctttaaacaagcttcattttacactactgtatgctagcgacgggttgtgacacccaagtgcagccaccgtgagcacccggcactgggagcgcgtgaacaataatg

SEQ ID NO: 118964 - DNA, 1839 bp, Homo sapiens
  chr10:54072981-54074820
  hyper
cctagaaagggtattgcgtggtcccgtgcaaggtaagacttgggagcaaaccctgcattcggaagcgttgcgatgtgatatactaatgaggaagtcaggcgctaagccctaagggtttcttatttctccacattagcccaccactgagaagggagaaccggggaaaggcgactgacctggcacgttggaccctgtccgctttggtcccggccactttgatctcacgcgtctgcctaatcaagttcatctaccgccgcgattgccctgattcaaagaacaacattaaatggtttgattatcggatggtcatttccctcttccctccacccctgatctaatttctaaacgccagtctctcgcctccctctctaaacttcccatcaaaagagaattagctcttcttccttcttaccctcgtttgatgtgcaaatttccttctctttgcacatttttctcgcagtggcggggggaggtgggggaggagggcaactgaaggacctcaaagccggggatctaactcagatctgcaaactgcgactctaaagggttaatgagcaacttgcacccgccacctggccctctcagaggcgtcttgctagagccattgaattacagaccggtttgtatttaatactgaatatgacttgtgtgcacagtcagcgagtattggcataaaggagaggggcaaaaagtgcttttgcagagcctatcacccctcggctctgtaaagtatttcagatccggataattcaacccttactgccaggcaagggcacccaagttcccagagttcctgctgccgcctgcatttattaaagtcgtctgctataacgctcgctggtagccttcaccccgaaggtgagccgggccagccgagcgactaagcaagggaggggcggggtgaagagtgtcaaaggccccccttcatgtacacaaacacaccccctcccagcccctcccagcgctttgaaatcccatcccggctttgttgtctccctcccaaggggccggaatgctccgggcccgcggtataaaggcagccgcggtggcggtggcggcgcagagctctgtgctccctgcagtcaggactctgggaccgcagggggctcccggaccctgactctgcagccgaaccggcacggtttcgtggggacccaggcttgcaaagtgacggtcattttctctttctttctccctcttgagtccttctgagatgatggctctgggcgcagcgggagctacccgggtctttgtcgcgatggtagcggcggctctcggcggccaccctctgctgggagtgagcgccaccttgaactcggttctcaattccaacgctatcaagaacctgcccccaccgctgggcggcgctgcggggcacccaggctctgcagtcagcgccgcgccgggaatcctgtacccgggcgggaataagtaccagaccattgacaactaccaggtgagaggggtcgggcactcagaggatgctctgaccttgaaagggtcctatctggagacgagggagtagaacgtgctgaatgtgtgcggttcagggagcatttggtaaccctgcatttgggagcagtgggcagtaacaggttttggagaggtggacagataaggactgtgatcagcgcccgggtccaagagggcgggtacctggacgtctgggtgcctcaccctctccccgaacccttcccacagccgtacccgtgcgcagaggacgaggagtgcggcactgatgagtactgcgctagtcccacccgcggaggggacgcaggcgtgcaaatctgtctcgcctgcaggaagcgccgaaaacgctgcatgcgtcacgctatgtgc

SEQ ID NO: 118965 - DNA, 1114 bp, Homo sapiens
  chr10:57387396-57388510
  hyper
gtaagcaaccgctggcgtcctcccctctgctccttcagcagcagcggacgtagggatcccgagcagccacggagcttaggtcccgcagagagctcctgccaagcgcttctctctcgactagttaccaattgagaaaaaaaagggtcagagacacacaaggatggtgatcaaaatccagtgtcaggcaccagggtcccagaaggttccggctcctcttctgcgccttacccagctcttttcgtctggcaaagggtcacccagcgagcccccagcagcagatccttcccttttgctcctcctgatagcgccaatcttcgccgccactgccacactgcgcgcccgctatccactcaccgcacagcgagaaggcctggcggagatagcgcggggggaggagggtggattaaaaggatagatttttggaagggtaagggagaaaaactttgatgttgtaaccacacacaggactgagaagaaaccaaaacaagttgcagcttcaggagcggggaggacgcttttcggggtaaaaaaaaaatcaccccctaccaaaatcagggggaggaagctccctgctccttgagcgatcacccagagcacctcgcaatctctgatcttcgaacccactgaaaaagcacagggcatggggagtcctgttggttcatgcccagggtacgaataccaaaagcgcctcccgctggagaggctgcggggaactcgaggcaaagacagaggcaaacgcaacgctgggaagagtgaggggagtccgagctgccgcctgcaaaagcagagacgcgtcgcccttcgggcaaagtgactgctacaaagtccgttccctcctgcgcagggacagagacatttaaaggcctgaatggacgtcagcaccagtcgagctcgctgggtgagcgccaggtctccccgccccacggattgtagcgcgcacagggcgatctgctgctcgcgaggtagagtggcttacttggggagaaaacagagctggtggcgctgcggagtgtcaaaccctggagcccatcgtcaagacgttatactggtggcagttctgctgtgagtgcacttgccgaattaaaaagagccagagctgcgtggagaggggtct

SEQ ID NO: 118966 - DNA, 1508 bp, Homo sapiens; identical to SEQ ID NO: 47131
  chr10:57389859-57391367
  hyper

SEQ ID NO: 118967 - DNA, 58 bp, Homo sapiens
  chr10:58121110-58121168
  hyper
caaggaccattgtgcgctctaattggcaggcgcggattcgctcgttggcgggcctcgc

SEQ ID NO: 118968 - DNA, 48 bp, Homo sapiens
  chr10:60026208-60026256
  hyper
acgtgacttcaggcacgtcattcttaaccagggttggccttagtcacc

SEQ ID NO: 118969 - DNA, 15 bp, Homo sapiens
  chr10:60026303-60026318
  hyper
cggcataaactaaat

SEQ ID NO: 118970 - DNA, 313 bp, Homo sapiens; identical to SEQ ID NO: 47134
  chr10:60028786-60029099
  hyper

SEQ ID NO: 118971 - DNA, 30 bp, Homo sapiens; identical to SEQ ID NO: 47135
  chr10:60029346-60029376
  hyper

SEQ ID NO: 118972 - DNA, 30 bp, Homo sapiens
  chr10:60094610-60094640
  hyper
aagttacctggcagcgtccgggggcctgca

SEQ ID NO: 118973 - DNA, 30 bp, Homo sapiens; identical to SEQ ID NO: 47136
  chr10:60094843-60094873
  hyper

SEQ ID NO: 118974 - DNA, 30 bp, Homo sapiens
  chr10:60145254-60145284
  hyper
gccaggaggctctccgagattggggtcggg

SEQ ID NO: 118975 - DNA, 30 bp, Homo sapiens; identical to SEQ ID NO: 7371
  chr10:60262026-60262056
  hyper

SEQ ID NO: 118976 - DNA, 102 bp, Homo sapiens
  chr10:60272045-60272147
  hyper
actacatgcgagccacgtccatggcgatgcctgcgaaagacgggcatgatttcttctccaagccttctttttcctcttcctcacgttcgagcttgtggaacc

SEQ ID NO: 118977 - DNA, 469 bp, Homo sapiens
  chr10:60272364-60272833
  hyper
tggatactccatgtgcgttcaggagtgtgtgtgtttgaggagctatgaaagtgcatgtatggaaaggatttatacgtgtaagtgcagaaagtggcagtgtgtacgtggtgtgtgtgtgcgcgcgcgagtgtgtgagcgccaggggccgcccgcccgccgcggctccccgtgggctggccgggccaatgagcgcgcggctgtaggggcggcgggcggggagggggcgccgagccctgcggatggaggcgcgggcagcgcggcgcgctcattccgcgcgggcgttgctggcggggggcggcgcagccactggacccggaccggggccgcgacccggggtggcgggtggcgtgggcggcgcccggggctgggatgcgccgggggctcagtggcggcggcggcgttggcggtggcgtcggcggctgcagggggacgagctagcgccgcggcgctgggagccagttgagcccgg

SEQ ID NO: 118978 - DNA, 383 bp, Homo sapiens; identical to SEQ ID NO: 7374
  chr10:60272895-60273278
  hyper

SEQ ID NO: 118979 - DNA, 277 bp, Homo sapiens; identical to SEQ ID NO: 7375
  chr10:60273346-60273623
  hyper

SEQ ID NO: 118980 - DNA, 30 bp, Homo sapiens; identical to SEQ ID NO: 47142
  chr10:60401090-60401120
  hyper

SEQ ID NO: 118981 - DNA, 851 bp, Homo sapiens
  chr10:60935878-60936729
  hyper
atgtccggccgagcccgcagggtgcgggcagcgagtatcctgggaccttcaggggaggaggtggctcccacaccccaataccgtacagagagtccgaagagtccgggcccttatttttccaattcttggtaaacaacaaacatgctcgccctcgcctccccgtgcagacgcctcagggccaactcgggcttcgccaggcaccgagagcagacagaagacgccaaatggctatcaccaggagagagggcgaggcagccgcgcggcgtatagcgctcgcccttcccgcgcgctcggtcgcccgacgcctcacgcgcgaggttgccttggcagtggctggagggcaggtgggggcgcgtgcgcgcagaagggcgggggagggaccaccgcgcgccagcaggtgggcgcgttctcccgcgcgcgtgcgcgcgtcgaagccctatacatcacgttccccgagagcagcgtcccctccccgccgggagcgcgcgcctcccatcctcgcgccgggtcctgctcggtctctcagagccgcacactccgcggagctcctgccacagccgtcgccttcgcggcggctctccagccccgcgcctcagcctcggcgccgcatcaccgcgtcccaggcctccttccctccctctgccactccccctccctttcccgctcttcttgcccacccggccggcagagagagcctggatacgaagcaggcgggcttcagagtgggttggaaaaatggaggtgccgcgcctggatcatgccctcaacagccccaccagcccctgtgaggaggtgatcaaaaacctcagcctggaggccattcagctgtgcgaccgggacggtaagagcgg

SEQ ID NO: 118982 - DNA, 69 bp, Homo sapiens
  chr10:60937041-60937110
  hyper
gcagtccggatttcctgggtctctgggcactgaaggggaaatgccctcgggatgtttctagcaaccccc

SEQ ID NO: 118983 - DNA, 738 bp, Homo sapiens
  chr10:61121993-61122731
  hyper
tctgggccccaccagtcagcacgtctcacggtcttcacagccccagattccgggagacaatgcatctaaaacgaacagcggctgggaacggtggaggataccttcacgatagttgcttccagagaaaggcatgcaagtctaattttaatggtaagaatcacttactctgttacagtggtgctgctgaaggaattatcctgaaggctgaaacagaaacaagaaaacatcagccaagtctggccggggagccgtctccctgattgctctccgggagtgagcacatacacaaacatggcattgcaaggcaagtctccgggctcgcccggcacgctcgctctaccttgggctgctgtctgcacatgctcgtaacgacacccccagcaggggcccagcggcacgggcgaaccacaaagcccggcagcccgcgaggctgcggggacagagctgggcggggcgcggcggcggggctgggaccccgggatccagcgaggagcacctggagagttaccacacgaccccgacctcgccagcccaggcgccgcgtttaatcttgggctctttgtgccagccaccccccgaggctggcaatgagaatgccccagtgtttctgccgaagtgctgaaatacccgggagacttgctttcttccacatgtctcctaccaattttacagagctcaccccaaccccccacactcccaccccacccccagggatggaggctcgcagagattcatcca

SEQ ID NO: 118984 - DNA, 30 bp, Homo sapiens; identical to SEQ ID NO: 7380
  chr10:61164087-61164117
  hyper

SEQ ID NO: 118985 - DNA, 314 bp, Homo sapiens
  chr10:61468533-61468847
  hyper
caggttacctagggcgaaccaaagatggggcattaagcaccaagtcctcccaagtgctggctgagggtccaggtgggcgcggtgccggtgcctcctgcggcggtggcgaaggctgggctcccgcgctcgcccagggctgccgggtggtgctgaacctggcgccaacgtgcagaatccgccggccctgcgcgctgcgctccacgtaggtcaggagtacccgcggcgccccattcccaaccctccgggggcacctggttgctcgcgctccggaccaaggcagttggaggcctttcggtcctctgggaaatggaggc

SEQ ID NO: 118986 - DNA, 167 bp, Homo sapiens
  chr10:61469828-61469995
  hyper
ggtgcgcacacacgcgcgtccccaggcgccgctgtgcccccgccgcccaccacgtgccctggccaagcccgccaagggccgtgcgcgtttggggggagccggggtgtacaaatgaatgcgagtgttccttggtctccctggctcccggggccgctggcgccctcctg

SEQ ID NO: 118987 - DNA, 270 bp, Homo sapiens
  chr10:62492574-62492844
  hyper
gcagcctgcttcagtcgtgtccttaggaaaggttcagcctggcacggagttggaggggcgagccaagagcagagaagccccaagacgagagaccgaggtgagggcgtcctgagcccggggcccgcttttctttttccagacgaatgtttccaagcagaagccccaagtcctcgggcccccctctctcctggggatgctccagcactgggaccgagttcgagctctcgcctctgtcccgggccgcaacttccaggcgcaactggactccca

SEQ ID NO: 118988 - DNA, 30 bp, Homo sapiens; identical to SEQ ID NO: 47150
  chr10:62493050-62493080
  hyper

SEQ ID NO: 118989 - DNA, 86 bp, Homo sapiens; identical to SEQ ID NO: 47151
  chr10:62538164-62538250
  hyper

SEQ ID NO: 118990 - DNA, 30 bp, Homo sapiens
  chr10:62702656-62702686
  hyper
gtacaccaccgcagcggttgggggtggggg

SEQ ID NO: 118991 - DNA, 974 bp, Homo sapiens
  chr10:62703330-62704304
  hyper
cctgtccgggtcctccggtccccgcccggcctccccatactggccttcgaaggggaagcgccttctcgtcggcgcggcaccaccccctccctggcgcagccagcctgctaagggtgcctgttgtacattttctcagctccaagttaggggtgcggctgtgcgggcgctcctagaaatctcttgtgcttgcctctgatgggagggtccccggcctctcagagaggcgagggaggcccccctagcggctcggtcccacaactctctctcggggcgctgctggcctcgtggcacggcccagggcccccacttgccacccgctggggccggggcggtgggggctccgcagcggctgctcggagaagtttcatagcatagagcactcacgacacagaacctaccctgaagccgagcgagacgcgagctctctccgccttcaagggccggggggagcgggggggcccccgccactcagcagcagccacggctgcgcgcggtcgcgggtgtgcggggcccctgcgcgcggcgcgccgcccgccgcccaactttgcacaaaggcagcatggcactgcctcgccctgccgcctcgcccggcgccgtggccgctcttcccagtcccgggcgagaggggctcgcccctttccacccgcagccctccccttcgcctgcccccaccccgctcccaggcggggcagccaggcggaacggagcacccggcacctcgctccgccgccgtggcggccgccgctcgcactgtgacgttagcagccttcgcggctatttatatccacacgattggatttcattcatgaaaccggggcctggtgtgtctgtgctctgggacacgggtggcaaaggttcctcggctctacgcagacccgacgggcccgggcacggaggcggatcgcccgggacaaaccgacacagagcatgggagaccccggccctttccccgcgctgccgggaggggagagtct

SEQ ID NO: 118992 - DNA, 436 bp, Homo sapiens
  chr10:62761012-62761448
  hyper
atgctccaagctctcgcgtccccatgagcctgcggatgtggggactgcgggtgggcagagagaccccccataatcccgcccaccctggcgcggctcctcccgggcgcgctcccgccccgccacgccccgcgacgcccgcgctacctggggacgctggaagctcccgcggcggctctgggtcccgccgggcggccgaggctggcgcgggctttgtaaagccgccgggacagcgccgaccccgccccgccccgccgaccccgccctctcccacctcggccgcctcccccgcctgcatcccgggccacagtccccgttccgccacctcgctcccggcccggcagccgccgccctgcggggcggggaccacgggtccctccacatcctcgcggcctgccggacagtcctgcgggcggggccccaacgcctaggcggtccc

SEQ ID NO: 118993 - DNA, 1359 bp, Homo sapiens
  chr10:63211994-63213353
  hyper
tggtcccttcaccagcgttacaacccgttccttgcaagataggcaggccgttagccaagccccaaagccagcaaacccagacacctgaagctggcgctgtgctagagaacgcgcgacgcgcgcggctggagggaagggaagcggatgaaaccacagacgtgcagcgagggtcttctcgtcttaggagggtggccagtgtgctcagctcttgcgaaggtcgctgatgcccagcgaaggacattcccacatgtgcacgcacgcagagtaacccgcgcacactcacacaccccagtttcagaaggcacactacatggcaacctccttgtcccaagactcccctatttgcgggcacattcagcaaaatagaccagcgcttcctctctttactcatcttccaagtttccaaacctgagactgggtgactcttgcctaggctcacagatcgagccttcccagtgttgcactgggaccctagggtggccctggggtgcccaagagatgcgcaagcatctcgcgccttccaagcgatcagcgaggaaaaacggggtccaaattcgagtagaatctgcgggttgcgggaagatggcctgcgagtgcggtgggggacaataccctagggccccgtgcgccctcgctttcccggggcactctcaccatttgtagcctctgccgcgcttgaacttgagggtgagcgcagtctccaggaagagcaagaggttgagcagcgcaagcagccagtaccgcggctccttcttcacctcggtcactcgccagaccccgaccagcgagtgcagcaggaacagcaaccgagtggccagggcgttaaggaagaccagtccctccatgctggccggagcactctgcctacgtccccttgcctgcgcccccaggaccctgccgggcgtgcccggagcccaccggtgagcaggaatatgacaagcactgagacctgctgctgcttgtggtcccttctcaccctcagcgcccgatgccggtagaactggtgcgcggctcgcccctcccccaaacttcctgagaactcttcaaagaggggtgagtccaaacccagcttttccagactgctgggttttccagggagtctggggctgcgctgccctgtctccagggcgttattctccagcgctgcccatccccctcccaatctcggggccagtctccatccctgtccggtatccccgcccccgggcctctgtgaggttcccaagaacttccccatcacgagggggcggaaagaggagggaggaggactgaaggtcaaggtgcagcacagccagaaaggcggaggaggagagcatctctggcagctccgccttacttttccaccgaagtactttaatt

SEQ ID NO: 118994 - DNA, 248 bp, Homo sapiens
  chr10:63656686-63656934
  hyper
ggggatcacttgctccgagttccctgtgtctctcttggctccggctccaagttcatgagaaatctgtccccatacccatccttctgaagcttccagcctttaccacctggacctgggctggagtcccacccccaccacagctcttgagacaggcgacgaatagacccaaatttgagatgtagctcaacctttgaccactagaggtctcctggaaagcaatgacccgtataacccggttgatcctcctt

SEQ ID NO: 118995 - DNA, 30 bp, Homo sapiens
  chr10:63661308-63661338
  hyper
atcatttcggtgcccgaagggaggcaagag

SEQ ID NO: 118996 - DNA, 30 bp, Homo sapiens
  chr10:63662872-63662902
  hyper
ttgcaattactccacgcaaagtggacgtcc

SEQ ID NO: 118997 - DNA, 207 bp, Homo sapiens
  chr10:64028002-64028209
  hyper
cctgcaaaaagacaggcgtccaaagcctggggagggcagcggacaggtgcgcccgcaaacgcgcgcctggaccccggcaccgccttcccaatccggacctcagctgcctgagaaactcgggggttccgatgtccaggccctttagagccccaagagcgcagtctcctaatccctccctttgtttctggccaccgctgaaatagagga

SEQ ID NO: 118998 - DNA, 30 bp, Homo sapiens
  chr10:64028506-64028536
  hyper
gagccgggccgaagcgcacgcgcagtgggc

SEQ ID NO: 118999 - DNA, 625 bp, Homo sapiens; identical to SEQ ID NO: 47158
  chr10:64133780-64134405
  hyper

SEQ ID NO: 119000 - DNA, 30 bp, Homo sapiens; identical to SEQ ID NO: 47159
  chr10:64278666-64278696
  hyper

SEQ ID NO: 119001 - DNA, 44 bp, Homo sapiens
  chr10:64564429-64564473
  hyper
ctcaagcggaaggccggactacaagtcccggcatgctccgcagg

SEQ ID NO: 119002 - DNA, 27 bp, Homo sapiens
  chr10:64565472-64565499
  hyper
ggactgccactattaccgggtgctgga

SEQ ID NO: 119003 - DNA, 376 bp, Homo sapiens; identical to SEQ ID NO: 7386
  chr10:64574691-64575067
  hyper

SEQ ID NO: 119004 - DNA, 685 bp, Homo sapiens
  chr10:64575127-64575812
  hyper
cgcaagaagggagcgctccgagattttcccggggtcggctctgcccaggagggagctaccgacgctttcccctggcgcttctccgccgctcggctctccaggcgcgcagctctccccgagagccccgaactttaccgtcactttgcccctgccccgggagaggggaggtcgaagtgctgccggccagagggcctacgcaagcctcgaaacccggggggacgcctcttccacccccatccctgcgctcgcccggggctgggcgcgccggggcgcacgcacgccggtttgctggcgacctggcgcatctgcccgcgcgccctggtctcagctgtcgcaggttcctcctgcacccacttccagtcttcaaagccagtgcagtcagcaccgtccacctggagccccaatcctctcctgcgattcccgcacacccactgcaccccatccaccacctccgggccgcgcaggtccgggcctgcgaagacacgcggcttacctccggccactccgttcatctggtcaaaggggcctcccagttcggcattgggaaagatggtcaccgacgtggcggcgaggtcctccaccgggtagatgttgtcagacagctggtgcacaaaaccactgagagttactgggattttgtctacggccttggcggtcatcatttgctcctcgcacaacctggaga

SEQ ID NO: 119005 - DNA, 239 bp, Homo sapiens
  chr10:64576164-64576403
  hyper
ttcaatacccgtgacgtcgctgcccatatatggactgaggaacagggctgggccaggcggcttttgccgtcacatggctgatttgcatacacgggctcggccgcgcggactccgccgggctcgcgacttccagctcgcaggcggcggggatcgctggggtcccgggcgcgcggccctagctgcagcctgggtccggggcgcagggatcgcgggggagagggcgcgccatggacccagtc

SEQ ID NO: 119006 - DNA, 358 bp, Homo sapiens; identical to SEQ ID NO: 7388
  chr10:64578270-64578628
  hyper

SEQ ID NO: 119007 - DNA, 115 bp, Homo sapiens; identical to SEQ ID NO: 47164
  chr10:64578651-64578766
  hyper

SEQ ID NO: 119008 - DNA, 83 bp, Homo sapiens; identical to SEQ ID NO: 47165
  chr10:65029100-65029183
  hyper

SEQ ID NO: 119009 - DNA, 30 bp, Homo sapiens
  chr10:65224679-65224709
  hyper
ggagaggatgaatccgggcacagccaccac

SEQ ID NO: 119010 - DNA, 116 bp, Homo sapiens
  chr10:65225529-65225645
  hyper
cggacccgaaagagcgcagactcgggacgaaccggccgctctgccccggacacagcgacctcgggccctccccgcaaacactcctttggactcccagattcgcagccttgtgctgc

SEQ ID NO: 119011 - DNA, 445 bp, Homo sapiens
  chr10:65225895-65226340
  hyper
cagaggcggcggcggcggcggcagcgggagacgaaaaaatgaagagggccgcgggaaagtaggcgacagctattcaaagcttttgggggtctacctttgtattcgttgctccctcagaggtggaggtgaggggaaagtgaagtgtagtggttccactctgatcacaaaataaactcctgggttgacgcctcacccgcggtttgatgttcagagcacacagcgcccgccgcctgagttagcctgaattagcagtcccgcagtaacagcagcagagcaggacaacacttctactgaaaactaagccccaaagtcacagcagaaccaaccgttcatgacttcaagggaaaacgagggggaaaatgtgatcctttcattcttctcatttgtggtgatactaattacatgtttaagctattcacagatttaaattcgtcactgctttatt

SEQ ID NO: 119012 - DNA, 30 bp, Homo sapiens
  chr10:65626225-65626255
  hyper
cccctcttggacggcgtgcagactgtcaat

SEQ ID NO: 119013 - DNA, 71 bp, Homo sapiens; identical to SEQ ID NO: 47167
  chr10:68685827-68685898
  hyper

SEQ ID NO: 119014 - DNA, 397 bp, Homo sapiens; identical to SEQ ID NO: 47168
  chr10:68687785-68688182
  hyper

SEQ ID NO: 119015 - DNA, 458 bp, Homo sapiens
  chr10:69523829-69524287
  hyper
aagtgttctgaaggcgacgcccccagtcttggcgggaaacgccgcggaagacgcttctctcgcagaaatgccaaattttcgggagcgcgggctcgcagcacgtaacagaacagatctttttgtttcacggccctctcgtagacctaataagcgcgagggcgaaaaccaggtcagcgaccagaagccaggcaaggttgcgattttcggagcacagcgaaggggagagtttctaagttctgaatgtacctctatttagggtggtttctattatttcttcgcgtctaccctgtagttgccgcaccctgagccctcagccccgccgcttcgcacggagcggagctcagagggtgcgcgctccgccctttcgcgggcctggcatgagcgcagtggttgttacactaaagtgtctccgcctgtcgaatattctcgtggcagcgatggccgagtggttaaggcgt

SEQ ID NO: 119016 - DNA, 30 bp, Homo sapiens
  chr10:69643890-69643920
  hyper
gaggagctgtcagaacggtgtgaggagagt

SEQ ID NO: 119017 - DNA, 30 bp, Homo sapiens
  chr10:69644390-69644420
  hyper
cccgcagccggagccgcgggggcgccagtg

SEQ ID NO: 119018 - DNA, 30 bp, Homo sapiens
  chr10:69644997-69645027
  hyper
ctcggggcaggctccgcggcgttcccctcc

SEQ ID NO: 119019 - DNA, 168 bp, Homo sapiens
  chr10:69834338-69834506
  hyper
cgtctttccctgaacgtgcacccagatcagctcatggggactgggaaagagaaatcatctgcacacacccaacctcgcagccaagcagacgactaccgcaaccggccgctcgcaacagcttcagaggccggcggccgaggcttggcagtgcgcggcctcaacctgaga

SEQ ID NO: 119020 - DNA, 81 bp, Homo sapiens
  chr10:69834886-69834967
  hyper
ctgggaaactttaccgggttccttagagaaaagcggacgccactgctgtccagtccagagacagccgtcagcgacccggat

SEQ ID NO: 119021 - DNA, 121 bp, Homo sapiens
  chr10:69835217-69835338
  hyper
agtgtgccgctttgcgttgctttaagagggaaaagccaaatacagaaagttggagtttgcgaagacaaacgaagaagatgtcaactgtttttgagaatgcttcggcgtgcacaaagccttt

SEQ ID NO: 119022 - DNA, 30 bp, Homo sapiens
  chr10:69991182-69991212
  hyper
catctgcagggtctcgtacttggacagctt

SEQ ID NO: 119023 - DNA, 72 bp, Homo sapiens
  chr10:69991507-69991579
  hyper
gagccgcttcccaacgtgcctcttctgagcaaataagtcataaacaaagcaactcacgtgcaatcaaatagt

SEQ ID NO: 119024 - DNA, 19 bp, Homo sapiens
  chr10:70091403-70091422
  hyper
tggggccctttccgcgccg

SEQ ID NO: 119025 - DNA, 152 bp, Homo sapiens
  chr10:70091480-70091632
  hyper
cggagaacttctccagagcgctacggcacggttccttctacacactggcagaactgccattgccatcgccccgaggcggcagaatggtacgctctgaaaactggatggttctaacgtaagcaagaaaaacggtgcgcgctgcagctctttaa

SEQ ID NO: 119026 - DNA, 437 bp, Homo sapiens; identical to SEQ ID NO: 47173
  chr10:70092801-70093238
  hyper

SEQ ID NO: 119027 - DNA, 140 bp, Homo sapiens
  chr10:70166192-70166332
  hyper
atcataattcctaacgtgcgatgcgacaaccacacaaagggtgttttgcagctgctgggaggcagatcggtgctgggcaccggcagttcccacgccgaggggcgttcacaccgcggccacgccccggctgcgctacagga

SEQ ID NO: 119028 - DNA, 33 bp, Homo sapiens
  chr10:70167000-70167033
  hyper
tccttccaggcgctcggcggccaccaccgcatc

SEQ ID NO: 119029 - DNA, 36 bp, Homo sapiens
  chr10:70167243-70167279
  hyper
gagtgctgggccctcggtcccgtgtcccgggggctt

SEQ ID NO: 119030 - DNA, 30 bp, Homo sapiens
  chr10:70287423-70287453
  hyper
cccttctgttcggacggaaaaaggaaacgg

SEQ ID NO: 119031 - DNA, 66 bp, Homo sapiens; identical to SEQ ID NO: 47176
  chr10:70320022-70320088
  hyper

SEQ ID NO: 119032 - DNA, 30 bp, Homo sapiens
  chr10:70320455-70320485
  hyper
agctgggggccgtgcgctgccctgggaatg

SEQ ID NO: 119033 - DNA, 30 bp, Homo sapiens; identical to SEQ ID NO: 47177
  chr10:70320719-70320749
  hyper

SEQ ID NO: 119034 - DNA, 30 bp, Homo sapiens; identical to SEQ ID NO: 47178
  chr10:70481041-70481071
  hyper

SEQ ID NO: 119035 - DNA, 30 bp, Homo sapiens
  chr10:70587116-70587146
  hyper
ggccgagttgggcccgggtgtggagaacga

SEQ ID NO: 119036 - DNA, 30 bp, Homo sapiens
  chr10:70660637-70660667
  hyper
ggcgaggcggcgcgcggcgttgcccactgg

SEQ ID NO: 119037 - DNA, 494 bp, Homo sapiens
  chr10:70660993-70661487
  hyper
ttatttttccccgccgtgcggtgcgtgtcccggaagtgacgcatggccaaggccgggcggccgccttgcccccgcttcctttcacgctgtcgctgcccgtaggtggttgtggccactgtgcccggagggaggcggcggtggccagtaatgcctgggaaactcctctggggggacattatggagctggaagcacccttggaggagtccgagagccagaagaaggagaggcaaaaggtgcgctgagcatgggccgcgcctccttttgggctgcgccggcttgggcggggaggggaactgtctgtccctgatgatggcctgtcagaaccgggccggagcatccgagggcctcccttcgcgccgccctcggccctctggggtcgctcagggaccgtttccacctccaccctcccgacctggagaaagatggccctgggctttgggcctctcctccgcgtggcccctcagcccttcccgttggcgcctgaatctcagat

SEQ ID NO: 119038 - DNA, 232 bp, Homo sapiens
  chr10:70715514-70715746
  hyper
ctcctgagtctggtcgacactttcagagtagacgtttccaagagatgattaaggacacacatccgcgcgtctgtacgtgcaaactcgagcaatacaacataaagcactgaagatggcgccactcaaaagcaactagaagccttcatttatcaggctggggctagggaaaatctggccagtgttgaagaatacaaagctaacctttgcaattccttgcggttctaccgttccg

SEQ ID NO: 119039 - DNA, 30 bp, Homo sapiens; identical to SEQ ID NO: 47180
  chr10:70716847-70716877
  hyper

SEQ ID NO: 119040 - DNA, 353 bp, Homo sapiens; identical to SEQ ID NO: 47181
  chr10:70748246-70748599
  hyper

SEQ ID NO: 119041 - DNA, 325 bp, Homo sapiens
  chr10:70748845-70749170
  hyper
cgtcgcccagcgagcggtgaggctggcagtcatcgagttccacctcggggtgaaccacatcgacacggaggagctgtcggcgggggaggagcacctggtgaaatgcctgcggctgctgcgcaggtaccggctctcgcacgactgcatctctctctgcatccaggcgcaggtgagagcgagcccggccaggccggcccctgttggcaaatggcgagggatggggaggagcccctgccaaggccaagggcagacgttgtaaggcgcaattcgtccccacgtttttgtagctctggactgagtcccaaagagcgtctgtggtcttcaa

SEQ ID NO: 119042 - DNA, 58 bp, Homo sapiens; identical to SEQ ID NO: 47183
  chr10:70883515-70883573
  hyper

SEQ ID NO: 119043 - DNA, 30 bp, Homo sapiens; identical to SEQ ID NO: 7397
  chr10:70884405-70884435
  hyper

SEQ ID NO: 119044 - DNA, 30 bp, Homo sapiens
  chr10:70939713-70939743
  hyper
tgcatcacgtgacacgactagcaggccccc

SEQ ID NO: 119045 - DNA, 147 bp, Homo sapiens
  chr10:70939961-70940108
  hyper
ttctggacagcaggcgctggaggtgcgcgtcactgtccgccgccgtgtccgcggctgcgccagacagtgtagaacctgcggcctcgatgtccttctcccgtgccctattgtgggctcggctcccggcggggcgccaggctggccacc

SEQ ID NO: 119046 - DNA, 1258 bp, Homo sapiens; identical to SEQ ID NO: 47186
  chr10:71078139-71079397
  hyper

SEQ ID NO: 119047 - DNA, 30 bp, Homo sapiens; identical to SEQ ID NO: 7399
  chr10:71122697-71122727
  hyper

SEQ ID NO: 119048 - DNA, 30 bp, Homo sapiens; identical to SEQ ID NO: 47188
  chr10:71168722-71168752
  hyper

SEQ ID NO: 119049 - DNA, 113 bp, Homo sapiens; identical to SEQ ID NO: 47189
  chr10:71211453-71211566
  hyper

SEQ ID NO: 119050 - DNA, 30 bp, Homo sapiens
  chr10:71251062-71251092
  hyper
tggcttggctccaggcgcaaatgaaggagg

SEQ ID NO: 119051 - DNA, 187 bp, Homo sapiens; identical to SEQ ID NO: 7401
  chr10:71267677-71267864
  hyper

SEQ ID NO: 119052 - DNA, 141 bp, Homo sapiens
  chr10:71327734-71327875
  hyper
cccagacgcatctctcgcgctggatctacgtggtcatttcagcaccatggtcaggggcgcgcagctgcatttcgggatctcagagcaactgctagacagccttagctggacaggcgtccgctccgtcggccttggcccaca

SEQ ID NO: 119053 - DNA, 303 bp, Homo sapiens
  chr10:71328698-71329001
  hyper
gcgcctgtggggtcgcgtgcgccccgggccccgcctacctttgtgccagcccagcggcctggctcccagacattagcattccaatggccccgggacgcttttgtcctccgactgaggccggctgggggtggggtgggatgggggcagggcaccataaatctacctgcttgtgtgccagcgcggcttgactggaaggaggagcaagattcatgtgcggtttttctggaagccagtcttgggctcagacaaaagcagaagaaggggggagagccattcgacgagagggtctttcctgcccgggtt

SEQ ID NO: 119054 - DNA, 516 bp, Homo sapiens
  chr10:71329076-71329592
  hyper
cgggctccgggcagagaccgctagcagcgcggtttaaaaagccccaggactcaaaacgccgcaagaagtggaaggcggggacggtggtgcagagctagttggacaggccacccctagaaatgtttccgagcccttcttgctcaggggttctttggaaagaggcatggacgaggtttcccactccagcgtgattccacacacttagacggagctcatccagcacggaaccctaaactttgcctccgtgattcaaagaaaccctaaaccctcctccgccttctcctgacttggagagtggggctgactgctccgggggtctaatccgccccaacccaaggtggcggcctagcagccgagttggttaacccgtacgtgtgtgttttaatttgtggggcggaggaccagtctgtgtgtgttgggtgactaatggctccttaatgagcgccctcaaaagcaggagagggactgggctgtgggggagaacgcagctcacccggttgccgcctggagaacgtt

SEQ ID NO: 119055 - DNA, 438 bp, Homo sapiens
  chr10:71331466-71331904
  hyper
ctgcagcgcagctcacgtttcaggcgcagttcgcagggaggctggggagatgctccctggccgggctagcgctttcccagttcacagcctggtcttccgccccgggagggcaatggctccgaaaagtgcacgaggagaaggcagagggtcgccttcgtggctttaaggcagagtgaggcgccctgaaatcccggacctgattgggagtagagcagatcggcagcgtctttggagcaaggcaaggggagtaagcgctgagagaccaaacattggattgaatcacattggaggaggggtggtaagagactgagaggcagacagacttgagtgagggtagggcgacccaagacggtgggcggctccggccgggtagtgctaccattctagtattctttgaatgagattatggggtggtggcagagaggaggcctaaaatga

SEQ ID NO: 119056 - DNA, 1282 bp, Homo sapiens
  chr10:71331949-71333231
  hyper
cgtgcgttggcgcggctcggagggccggggaatgaacccagcctgccgcccccgtggaggcctgggccggccaggggtcagccagggagaagcagaaggaacaagtgcttttgagggccgccgccgtcggccaccctctacggctcccggctccctccctctcccttacccttagcacccacagcccagcgacagacaggtcctttcacagaaaatctgagaaagccagactgcctgggctcaagcaggcggaaaaggtggcccccagcagcccgggtcgctcctccagcgacgcggcgggactcaggctgccagcctgggagactggggagtagagggacccccagtccccgggggaaccgcctgggctgcccagctccccgcagtgcggcgccggcggctccagcgcgtacaagctgtggtccgctatgcgcagcgtttgagtcagcgcccagatgtagttgtgggcgaagcgcagcgtctcgatcttggtgagcttcgcgtcgtctgggaaggtgggcaggacaccgcgcagggcgtccagtgccgagttgaggttgtgcattcgattgcgctcgcggtcgttggccttctttcgccgactccgtcgctgcttgctcagtgccaactcgctcttaggccggctgcgtcccccgcgccgtgcccggagcttcctcggggcccctcggcagcctccctcttccgcctctgcgcagttcccccgtgtgcgagtggggctgggcggggcggacgtggggcaggtcacttcgtcttccgaggctctggggaaggaccgctccgtctcacgggtcacttggacagtgggcgcacccgagggttgaggcgtcatcctacggcggggtcagagggaagggtaagtttgagtccgtcactgggcgcagtccgcgattccgaggctaggtgggaaaaaacaaaaacagccatcctcccagcccccgctgggtcagaggatccctctttcccctgcccgtccctcggaggcctccaaatattacctttctaccggcgcaaaagaatagagagcgatgagcagcgagggccgtggggagctcagcgggcttctggtcgccaagttcagctgagctgcaggcgcccccgcctgggagttgccccagccccaaaggagaaaagaagagagaatggggtccgaggcctctgtcacgctctctctcgaggcgcggcggtgagaccgcagggatttcctgagcagcaagtcgtgtgccccttggcacgctttatctgcttcgcccgggccaggagc

SEQ ID NO: 119057 - DNA, 30 bp, Homo sapiens
  chr10:71333951-71333981
  hyper
tagatagtatcccagcgttctggccaggaa

SEQ ID NO: 119058 - DNA, 19 bp, Homo sapiens
  chr10:71334338-71334357
  hyper
aaggcgctgggaagcagag

SEQ ID NO: 119059 - DNA, 404 bp, Homo sapiens
  chr10:71334638-71335042
  hyper
ccctcctcttgtccccgcctgggacatcccgtggtcttctgcttccggtcactcagagtgaggggttgcagcttccgcttctctctcttgacccggtcgtgcctggaggaagacgccgaggcgggaggtttaagtatcccggtttaagtctccttaggcgaggaaggcttctctttctagcaggtccagatatcctgagtctcccggaaactgcaggaggggacaggacccgacttcgagactgtagggtggggtgaggggatgaggtaggtctgtgagtctgccctagtgatagcctcttaccgcctaggctgcttgggggcaaattttcctccaaggaagagggtggtatgctcaggaaccagcgagaggggggctctaggactgggcgggggtgtggcgcg

SEQ ID NO: 119060 - DNA, 818 bp, Homo sapiens
  chr10:71336166-71336984
  hyper
gtggctgggggcagccgccttcttgagggatgcaaggatttcccgcagtcctcttccagccaggaggccagggccggaggtcaaggagtcttaggcgattagagattgaggatccatgccctctgtctcagctgcaggggacacatagacccctctccaaagttaattcctgtgcctttggctgcggaggcgcaggcggtaatgactccgtgcgcaccggcagtgtttgtgaaatggctcttcccgcagacagcagagtctgttcctgcagctcctggtcatccaccgcccctaagacctccaggactcccgcacccctacacctcctgagacctaagtttgcctggaggctgaggggtcccggagagaggcggtagccagacgcctggagaccgcgggcacattggaaaagaaggaaggcagcggcccgccttcctgccttcttgtcggcgggggtagttttagcattgcctgggggctctttgagaattgtgcagggagggaggggggccatgggaagctgaatagctaatggcttgccagaggagggggattctttctctcgccttcagctcagcagtgaaagaggggaagacaaaaatctggcgagcgagctgcccgggccgagactggccacttcaaacagcccttcaaacaaaaggagacgacgaaaagaaagccccacctgtctccagtgtttgctaaaataataataaatagatttcgtttaataaataattacaagagattgtaaagtggagtgctttggaaaacatctaccgcgggagtccgtgcagccagccgtcacctgctcctaa

SEQ ID NO: 119061 - DNA, 291 bp, Homo sapiens; identical to SEQ ID NO: 47200
  chr10:71337421-71337712
  hyper

SEQ ID NO: 119062 - DNA, 963 bp, Homo sapiens
  chr10:71337726-71338689
  hyper
cggcgcctggaaacaaagtgtccacattatcctcgccggcggctgagaccgtcaatgcgtgaaaaggtgcattgcgcaccaagacacctgttgaagcggctcctcttctcagcgcccctctctgctctgcgctcggtcaggagccgcgcagggagcggggggtgggaggagggagagacactgtgatttgtggcgacatatgttgagcagatcgttgtgtactcttcacagggacacatgcaccctcgctcccatacacaccccgcgagaaggagcagctgctctcctcaccttctcccaacataatacctgggccaggcgctttggcctcgccttttgagagtttagctctcctccaccccccaccccccgtcttccacccccacctaccgccccaatcttagcagcttcgctgtaggactttattgtcaaatttaacacatgcacatttgttcccagcgcttggccccaaatacacacacacgtacaaacacgcaggcatccacagaaaacgcgactgatgacacagatgcggagcgcgagatgcccatatgtccggctctgcgcccatcccggctggggaaacgaataggctgtgtgattttccctccccaggaagaaataaacaacggaacccggcgggggaggggaggccacctccaggcggctccagtttggagctcttgccctttggcgcgttgcgccacctcacagtgctggcagccaggagagcgcagggcagcggaggaagagcgcggcttgccaaaaggcggctgggacaggggccgctggacggagcggagagggttggaaagtctgggggtgctcgctgggcatcgcctgacccctgggctcttgaactctcggatggtgaagactctcccgtcctcctgggattcccaggagttggcgtccacctgaggcgcactaggggcgggcgggtacaccgggaggattctgctt

SEQ ID NO: 119063 - DNA, 402 bp, Homo sapiens
  chr10:71389861-71390263
  hyper
acgccccatctccccgacccccagcaccccgcgccgcccccaaccctgggccgggcaggtgcaattcctcaggcggcctacagagggcgatgtgcgccgccactgggccgcgcccctccggcgcgcgcttcctgtgaggtcaggtgggaggaaaccgcctggagccgccgggagtggacgccgccgaggcccggagtcgcgcctgcaggtgagtcgccgcgccggggagggagcgcatccctcgctgcagcccgggccgggacttggagccggtgtcgggctccagaggctggggctggcggccggggcagcgtccctcccgcccccggcccggaatgtcaggtgcgccgcgggccgggcgcgcgggtggcccaccgggcgggggcgcgatgacaaagcaca

SEQ ID NO: 119064 - DNA, 30 bp, Homo sapiens; identical to SEQ ID NO: 47205
  chr10:71561196-71561226
  hyper

SEQ ID NO: 119065 - DNA, 1392 bp, Homo sapiens
  chr10:71561444-71562836
  hyper
cacttcaaagaggacggggagcgcggcagaggggctcccgggccggcgggctggggccgccggacctgctcaccacgccccccaccctgggcgagtttgcataaataaacaaatccaagccgtcggccccgcgggaggtggaggaggagtgacgaggaggaggaggaggagggaggggggagggagagattagtttgggaagtagcacggattgctcatccgatccgtgccgccgcagggagtgtgtcaagttacagaggcgccggaatcggcccctgcgctcctcgccagccgccacgacccacctctgcccatggggccctccgtgtgcgccccttcgcccggggactgaaactgactggcccgggagacacgaggcgcccagaaggactgacagcgcggcaccaactgctctgcagacacttgaagggaaagactgggcggagagaaggagagccggtcagattcccctaactttcctggacttggaacgttcttcgaaataacttttttctcacctaggtgtaccccaattaccgctggttgtgctttttcggcacttcctctcctactgctaatttttccgtcctctttgccgggagcagcggaaagggacgttttccagcgatacaagccctttccccctgccccgcagtttggatagagccttttggcagcggctgtcgcctttatttattctatttatttatttattggttctcaagacgcgagaggatggtagcggagcgcacccacaaagcggcagccaccggtgcccgcggccctggggagttgggcgcgcccgggacggtggctctggtggcggcgcgggcggagcgcggcgcacggctgccgagtccagggtcgtgcgggctgctgacgctggccctctgctcgctggcactcagcctgctcgcccactttcggacggccgagctgcaggcccgggtgctgcgcctggaagcggagcgcggggagcagcaaatggagacggctattttgggacgagtcaatcaactgctggacgaggtctgtgctctttgttgctggcttttatccctccccgcggcgccccctcgcgcagcctccagactgttcagccggtgtccgcgggcgctcgctctctgcgagccccaggttcgcgcgagttgcctgcgggaggggtcggggacacggacagacgctgccctaccagggattcggaggacctggtgggcaagagcatgacccagcgactcccgcctcgggcaagcgcccccggcttccagcgctgggagcgccctgggcacgccgggcaggtggaggaaggctgggcgcgcggaggctcgcggaggcgggcaagctccactcctccctttcgggacccggccagggtggtgtgacagccgcccc

SEQ ID NO: 119066 - DNA, 1485 bp, Homo sapiens
  chr10:71812305-71813790
  hyper
caggagactggatcgcgaccatagcgcgtttgtgcccagttctggggaaagcctcatgttagcgagtggccctcggctcgtctcgcagatcggccaagtacgcggaggccgcgcggtttcaccattaatactcctgaaggacaatagctcatcaagccccaccgaaagccccggacccgtcgcggagcctgggctggcgggggatgaggctgagcaactcctcctagaggtggttatgtggagaaggagcaatcccttctccctcctcctcctccccccgctactatccgcggcccagagaactgccgcttgccgccattgacacgcacagatagaacccaaagaaaggcaaagagtcctgcccggcaccggcgccgcgtgggccaaacctgcgcccgtggaggggcgcgcagagggcaccgggcgccgggagcaggcggcgcagcaccaggtgagcccgccatggcgatggcattattgtttagggtgctccggggtctggaaacaaaacgcgccgccggggcagtgcaggggccggagagaaccacctctgcctctcccccgagcccctgcgggcgcaccctcgatagccgacccaccctctgcaaaaacaaattcttaaatccagctgcccaacttgcttccttgggcgataaagggggggctgctaaagaagtggtcaaattcctgcggccagcgaggggccgggggcgtcgagggtactgagaggggaaggaggagggatgcgaggttcagcagcgggccccaggcgaggctggacccggaggaagcggaggtctcctgggaatgcggagtttcgggcgcaggagcgggaggacggaggcgcccggccgccgatgggcacggggcgatgggtggggggctgcgcagggcccgagggagcccggggagggccgctcgggggcctctgaaggtgcccgggcagggcgccggcggctccaggctgacaatggagggggcgcggagcagccgggcggaggttagggacccgagtccgggggcgggccgcgccggggaaggtcaggtcggggacgccgggtggcggggcgagggctgggggttgctgcgcggacacccgggcgccgcgggcgggcgtgcgccccggggccggcgcggaagagggcgcgaggccgggcactccccttcggttccctttccggggcgcccggtgccgacgcgcgctgcgctttcaccgggaaatggcggcccggccgtggctcgcctgggcagtctggctcccgctttgcgcgggaaaaaataataataataaaaatatcgaaaaagggaataaaagtaaactggctgcggcgcaggaaagggctctgccgggcgccggacgccgtgcgtatcgctcgcggggcgcggcggttggggaccagccctgcctcccccggctcccagcctccagccccggcgcacctcagccccagcccggccagccccccggatcgcccgtgggtgtcc

SEQ ID NO: 119067 - DNA, 700 bp, Homo sapiens
  chr10:71892159-71892859
  hyper
gtgttccctcttccccggttcgcccttcccggcctaagcccatcttccttaggaaaacttagcagggatttaggggccaaaccaggagggtggagttttctttgccctcggccaggagcacatctccctgttgcgttttttgggggagacagagaggggcgggcctgagtcgagtatccctctcctcgcagcgccacaactgcgcgcaccgacctccccacgccagacgcggcgtgagccaggcctctaatccgctcgcccctcttccgggtcccggtcccgcccggggcgcccggggtctcgagagcccgcctggcggcgcgatctcacctgtcggccgcgcccgcgcgctctcgctccggctcccgctcccgctcccgctcccgcttggtcgtcttcccgagttactgacccgaggcgctcccgggcggggcgtgactcagcactcgtgctggtccccgaccccgcggcaacgccccggccaggccccggaaacggtcctggcacgctggggctggtctccgaacggcccgccggactaaccttgaccctgagcgaacggccttgaactttgaaacaaatgctcccatggccagatgtcgcctctccggctcctgccagcacccgcgccccagtcctgccgagccattcagacttggtttaaagtgtcctttcagcatactttaaagcaaaaaagaga

SEQ ID NO: 119068 - DNA, 129 bp, Homo sapiens
  chr10:71892895-71893024
  hyper
gagagagagagagagagaaggaaggaaggaaaacaagcatccccctgttcctctgattttctcgaggacacctttaaagccactggaaccttggagagtggggttcccctcacacgttgggcgcactgc

SEQ ID NO: 119069 - DNA, 389 bp, Homo sapiens
  chr10:71906295-71906684
  hyper
cccgcctgctcggccgccctcatggcagacccccactgccttctcatggcctctaggccggacactcgggagcttctccgagaaacagcaagctagcgagcgaggacccctacccggtccggctgaagctgcctagcgccacccacagctggaagcgagaggcgcaagctctgactcacgtcttcctcatcgagcccgattggctaagccccaattgacccgacccgattggctgggcttgtaccgagctctgattggcttcctattctgattttttttttcctttccccgccctcgttagtttgtccaaccggtgggacataatctgccccattcccccggatgagccccggggagagtaagaggagtgcggcgtcacgaggaatcag

SEQ ID NO: 119070 - DNA, 30 bp, Homo sapiens
  chr10:71992264-71992294
  hyper
ctaggtgcaggacccggggtaggtaccccc

SEQ ID NO: 119071 - DNA, 196 bp, Homo sapiens
  chr10:71993192-71993388
  hyper
ggcggggcggggagcgcctttaacgcggctctgctagtgttcccacccccgccgggccaaccccgtgcgcaggcgcactccgccaggcccgggtgtccgcactccccagccccgcccctcgggcccagcctccgcgatggcagctagggctcagaggctgggccacgtggctgccgccggcgctggttctgttcct

SEQ ID NO: 119072 - DNA, 30 bp, Homo sapiens; identical to SEQ ID NO: 7409
  chr10:71993589-71993619
  hyper

SEQ ID NO: 119073 - DNA, 314 bp, Homo sapiens
  chr10:72015068-72015382
  hyper
aggggaaggcgtagacggtgaccaggtgcagctgcggcgcgctgagctgcccgtagtcgatgagcagcagcagcgcccagagcggcagccaggacagcgtgaagaacagcgccaccatgaccagcatgtgcaccacgcgcgctctgcgccgcgatgctcgcgggtccgcagcctcctcgcccccgggggccgggcccggggcctggcagagcttgcgcgcgatgcgggcgtacatgaccacgatgagcgccagcggcgccaggtagatgtgcgagaagagcacagtggtgtagaccctgcgcatgcccttctcg

SEQ ID NO: 119074 - DNA, 41 bp, Homo sapiens; identical to SEQ ID NO: 47210
  chr10:72043778-72043819
  hyper

SEQ ID NO: 119075 - DNA, 30 bp, Homo sapiens
  chr10:72141610-72141640
  hyper
ttcgggaagctcagcgcgtgctccctcgct

SEQ ID NO: 119076 - DNA, 30 bp, Homo sapiens
  chr10:72142261-72142291
  hyper
gaagcgtgtggtcccgctccgggccgcttt

SEQ ID NO: 119077 - DNA, 150 bp, Homo sapiens
  chr10:72142501-72142651
  hyper
cagtgggggagcggcgcgcgcgggggtggcgcgcggaagggcagcccgcgcgctcccggccgcagggagtaaccgctttgtgtgctgcttctagagggagaacgcctgagggggcggagatacagagtgggacgcgcagtacatcccagg

SEQ ID NO: 119078 - DNA, 30 bp, Homo sapiens; identical to SEQ ID NO: 47211
  chr10:72163703-72163733
  hyper

SEQ ID NO: 119079 - DNA, 543 bp, Homo sapiens
  chr10:72200228-72200771
  hyper
caaggggcgggcaggcggcaggtcggatcagattagcgtttgtggattgcgccccggccccagggagggccgtctggcccccgcaggcggagggaggcgtgggcggccgcggctgcccaggcggcagaatgtggattgaggcgcggaaggggctccctctccgcagcacccacctgctcgccgcgctgggtgcccagaacgcgctgccaggtcctcgagggcgataccctcagatccctgccgtccttgacacccactcccctgcaaatcatggccccgaacccggggttaagcgagacacttgacacttccccggcgcggctggaggacccaaggctgccacagttcgcgacttcgggacagcccatccctgatctccgggccgtgagcccgaatccccgatgttaccagctcagctgccgatactcccgacgtcacaccccgggacccattcaccctcactcgcagaaagaaaaaaaaatcgccaagaccaaaccattacagtaataccaacgaccgttgactgtggctgtgccgggtact

SEQ ID NO: 119080 - DNA, 607 bp, Homo sapiens
  chr10:72200824-72201431
  hyper
cgaggtgttatttattacacctatcctacagatgcgcagacccaggctccgggataagcaacttcacaagactggagattagaagctcccacccttccgcgctgcgctccgcgcaatcccaaaccaaaacccagagacaatggtccccgtcgaggacacaccctgaacgctagaatcccttcccgactcggccgtggatacgcccccagccaccaacgctgcaccccgagcctgctgacgcggagacacccgcagagctaggccctgggctcgggacgcccgggcggctgcaaacccggctcggagccgcagcccccaacccacagcacttcccgagtccgctggctggacgcggcggaggcgccccgggggtgcccagcagggcgcggcacgcggcactgcctaccttctgcctgtaggctgcggatgatgtctgccctcggcagcgggtcgcggtagaggctcagcatgtacgccagaggggatggcgacgagggctgcccccgcgtacgcaggagcgcagtggccaccgtcgcagcacccgcctggagtagggcccaccaggcgtgcagaaggaagggcaggcagtgggcgtgcatggtgggct

SEQ ID NO: 119081 - DNA, 30 bp, Homo sapiens; identical to SEQ ID NO: 7410
  chr10:72237986-72238016
  hyper

SEQ ID NO: 119082 - DNA, 651 bp, Homo sapiens
  chr10:72238257-72238908
  hyper
gagccgcactagcgacgagggaagaggaactggcttcccgggcagtctcccccgccccaaacttttcctcctcgcggagggtgggcgggcggagggaggaagcgcagccggggaacgtggcgcccgcgttcctcccgcccgggggctgcggctgggctgagtgtgtctttaaatctgagccccccgcccctcgcggtggggccgggactcgcggtccgggcgggggcgggcgcggtgattggcggccgggtcgggtccgcccctcggcgttgggtagcggggcgctggggagcagcgcggcgcgcacgggccggggcgcgcaggtcccgtcgccggtgagcacgggctccctctcgcgtggcctcgccgggtccgcctggcctgcccacctccggagccacctctgcccccgcatgggctggcgaagttgggaggagcgagctggagccagagcgcgcgccgggcgcgccccgtcgctgcctgactcggcgcccgcagttcgggcgcagcacgccggccgcaggagcacggatgccccccggagccgcgggctggcaggtaccgaagtgtcctgccctggggctggcgaggggagggcaaatctggaatcccccgggcaccccccagcccgaggctgctccagacaccaac

SEQ ID NO: 119083 - DNA, 121 bp, Homo sapiens; identical to SEQ ID NO: 47216
  chr10:72432467-72432588
  hyper

SEQ ID NO: 119084 - DNA, 30 bp, Homo sapiens
  chr10:72575578-72575608
  hyper
gcccgctgcctggccggtaggcggcgcgca

SEQ ID NO: 119085 - DNA, 30 bp, Homo sapiens
  chr10:72648552-72648582
  hyper
tgggtggccctgggcgccagaatacctatt

SEQ ID NO: 119086 - DNA, 30 bp, Homo sapiens; identical to SEQ ID NO: 47217
  chr10:72738258-72738288
  hyper

SEQ ID NO: 119087 - DNA, 1255 bp, Homo sapiens
  chr10:72972344-72973599
  hyper
ggccggctagggcgccggagccgcacgcagccgcggggctccgagaggcgcgcactggggctgggactgcgcggcgccgccgctgcgagcgccactgagcggtcgcgcaacttcggaggcacagcgccggagccaggcgagcgctcagagacccggagccagaggggcgcgccggagcctcgttcgagagccggcgccaggcacccaccgcgctccgagtgccaggcggccctccgcgcagcgtggcttccgctgcccccacggaaggcacgggctggcgctgccgggcgccggggaggacggcgaggaggaggcggcggcggcggagacggcggcggcgagactggggccagggagacagccctgggggagaggcgcccgaaccaggccgcgggagcatgggggcccggagcggagctcggggcgcgctgctgctggcactgctgctctgctgggacccgaggctgagccaagcaggtaggaagcgatcgggtctgggggcgcggggctaggggacccttgcgcctcactctgtcctgaagttgaggtggtctttcgtcgcatcgatgcgcgcaggaaaagcggcaagggcgcccaagttagaatgtagattttactgcctcccaaagtgggcaatggcgcatccacatcgcgggagcggggagcagggaaggggcttcacagtaagctgaaaggtccctgctcgctcctgaaagggatcccttcttctccctggaaggggtgtaggagtcagggtctgagtctccgggaggatccgcctcctggggacgcccggctctccgcgcgcctggcatccgccccgaaaaagaacattggctacataagcaaggtgtgcgctcgctgccgtacgccggtaacttactagtctggtcccggctcgcctaggctcttacgcgctatagggacagcaatctgcagactagagggagagagcgaaaagacctgctgaacacaggaagcgcttcggtagcctcggcaggccggcttgcagggctcctgaagcggggagggctaagtcttgcacacatagctttccccgagatcgctgggcccgcaggtctggaagaattattattattattattattattattattattaattttctgagtgttggagagtgtgtgtgtgtgtgtgtgtgtgtgtgtgtgtgttggatgcgggtaggggttcttagcgatcctgcggagtttccttttaaattggtcactgacattctcgctgtccggggaac

SEQ ID NO: 119088 - DNA, 30 bp, Homo sapiens; identical to SEQ ID NO: 47220
  chr10:73074250-73074280
  hyper

SEQ ID NO: 119089 - DNA, 38 bp, Homo sapiens; identical to SEQ ID NO: 7413
  chr10:73113222-73113260
  hyper

SEQ ID NO: 119090 - DNA, 129 bp, Homo sapiens
  chr10:73156346-73156475
  hyper
cgggcttcctccctgcccctttgggggattcgtagagttgccacagcagccggtgccatgacatcggcagagggcagcttcgccagcactgaaatattcatgccctgagcgcccggcggggctcggcgc

SEQ ID NO: 119091 - DNA, 170 bp, Homo sapiens; identical to SEQ ID NO: 47223
  chr10:73156697-73156867
  hyper

SEQ ID NO: 119092 - DNA, 985 bp, Homo sapiens
  chr10:73156912-73157897
  hyper
cgcggagacccaggagctgccggcacgccgcggatgagccttcgcgccggcgggaagacgcggcggtggccagggccagagcaggcggcccgcgggggccgatccggcggagagcagagcccgaggcgaggcgaggcgcggcgccgctgcacacacgcacacggtacccggagccacgcaccgcctcttccctcctcgcttccctctccttcccctcgccgttcgcccgccgcgcggcggggaagttggtggtgaccgcggctgccgaaccacttgttcccagcgcggccatcgcccgtggcgggcgctcgcggcatccttcggtcccaggcccctggccctagcctcgcgccccgctccgagctccccgacgcgcggcaactttgattcctgggaactcgaattccattcgcgttggccttgggaggacaggcatcccatcccccatccccggtcctgggaccgcgaacatttgggggctttgctctcggcgctacggagagggtccaggtctggggtggagagattttcgagagtggagcgcgttgggatccaatcccctccccttctgagccctgggtccccatttggacagtggggatggggtggggcgcacccctactgcgggctgggcagaggcgctgaggggaactaaaggcacgtagttctcccctcccctcatcaagtccctgtgcccgcgggagaccccaggggacttacacatcctcccaaattcggtccagctatgggaagacgcgcccctcgaggagccgggagccttttgcggctctcgcttcgccttcctggccctggaactggtccgctacgagcggtgctggctgcccccaggagctggcacccgggagcactgcccctcatctccaccgtaggtcagcccaggactcgagcagagcccgcgtgttccaaggcagtgacggcgccagccggcggggactctgcctggctttctcggagcgggcaccta

SEQ ID NO: 119093 - DNA, 31 bp, Homo sapiens; identical to SEQ ID NO: 7415
  chr10:73437159-73437190
  hyper

SEQ ID NO: 119094 - DNA, 30 bp, Homo sapiens; identical to SEQ ID NO: 47226
  chr10:73533020-73533050
  hyper

SEQ ID NO: 119095 - DNA, 30 bp, Homo sapiens; identical to SEQ ID NO: 47227
  chr10:73533434-73533464
  hyper

SEQ ID NO: 119096 - DNA, 30 bp, Homo sapiens; identical to SEQ ID NO: 47228
  chr10:73610555-73610585
  hyper

SEQ ID NO: 119097 - DNA, 104 bp, Homo sapiens
  chr10:73610993-73611097
  hyper
cgcagtctgcaatgcggagcgtcagctgatcccccgcagatataaatctgccctgccccaaagccgtccagagcgcaggcgctaaccccgccccatccgggcct

SEQ ID NO: 119098 - DNA, 30 bp, Homo sapiens; identical to SEQ ID NO: 7416
  chr10:73648623-73648653
  hyper

SEQ ID NO: 119099 - DNA, 1093 bp, Homo sapiens
  chr10:73723717-73724810
  hyper
agggggcggccgtaacggccccgggcgctccggcacggagaagccaagggggttctccaagcagcctccacccaccagcctcgccaggagagcgtggatacccgagcggccccaagcgagtccccggggactggagggccgaggggcagcgcccggaacaaaggcccgcagaggggtcctggagacagcggctccccgggggcggctcccctctctcccctctctcccctcctctcctctcccgccagctcctccttctcctccccttcctcccccagaggcccggccggctcgcggcccgagcagcgccaacttcgccaacggttcccaagttgccgggcgcgcaggggtgggagctgggtggggtgaggaagaggaggaggaggaggagaagggctcccggacgccttggacgcggttcaggaatccgccgccgctagccggctcgggcctgagcggggagggcgccaggcaggacctctcgcaggctcgctgcgcaggacggcgcccgcctggcgccgcttcccttccagcgtgccgaccggccccgcagcgcctccatccctccggcccgccccggagaagacgcacagctcgggccgcgcgggcgccggggccgcggaaccgcttctgccgggatcttccaggaggaaagcgaagttgcgagcggatgctgcccgcgccggaccccagccgcggagggtcggggccgccggtggagtctcggcggccggggtaagtggggcgccggcgtcctggaaccgccgcccagcccgggggaggccgcccagccgggagcccccgccttccgcgtccaggcgcgcgcgccagactttggagggagaagggggcgaagcggacggtgggaggtggagttcccagctcggggaaaagcccaggcaggcacccacaacccgctgcaaccggatcacacctgccaggtacacacagctcatcgccactcataccccgcacacggcgcaggctgatctgcgcacacccacaccggccaggcacatgccacacaccgaaatgcacattcctgggagcgcgggggatttggcctctacagcaggcacgtcctcacacccct

SEQ ID NO: 119100 - DNA, 145 bp, Homo sapiens
  chr10:73846836-73846981
  hyper
cggcgtcgcctctggcgcatccgggcccatcccccacagcacccccaacgatctcggggtccagccacaccctccgcccgccctgcctcacccctgcttccccagcccccaacccggcccggccgagaggaaggagccagccccg

SEQ ID NO: 119101 - DNA, 364 bp, Homo sapiens; identical to SEQ ID NO: 7419
  chr10:73847427-73847791
  hyper

SEQ ID NO: 119102 - DNA, 161 bp, Homo sapiens; identical to SEQ ID NO: 47234
  chr10:73848208-73848369
  hyper

SEQ ID NO: 119103 - DNA, 403 bp, Homo sapiens
  chr10:74020596-74020999
  hyper
ctgcccccacccagccgccggggccccaaatgctgagctcagcatctctgtggcctggctgccctcctcccgggcagtgggaggagcctccttcctcccgagggtgggcggggccagggccagccccgccctcctccccgttccccctctccctccatccccctcccgttcctcagtcgcacgttctccaagtcacgtcccccgcttcccctagtagggggtcgacggagattggacccttcccccagtcagctgctctgcatctgtcacctcggcggcagcgctcccttgaggtcgcacctccgctgtggagggaggcgagagcgagctgagtggggggtcttcccttcccccatcccgctggccccagacaagccaccgcagaccgcggcgaaatcagtta

SEQ ID NO: 119104 - DNA, 467 bp, Homo sapiens
  chr10:74032434-74032901
  hyper
aaagcaagcctgacccgaggcaaggcccgcctatctggttaggttccttgcccgcccccggggccctgggcatctgatgtaagtttggctccctcttccatcagggtcctcctgtcccagactgataaacctttagagcaataaaggtcgagtccgtctcaacctccacccaccctcagcaaccactgttagcctctgagcactgctgccaggccagatttcctgtggccccgcctgaatgatgaaacacgggatggccattgcactccctggcttttccagagatctcggtcctcggtcctgatgcaaccgtctggatcttttacacaaagcgctaggcgagcgctgggtgctaggacccggggggcgcccgggcagggaggtccggctgcgctgcctgcagtccgcggggagggcggatgggtctgtgagtccgactgctgtgaatcctcgcttccatccctgca

SEQ ID NO: 119105 - DNA, 30 bp, Homo sapiens
  chr10:74033154-74033184
  hyper
gagggggtaagggcgcgagggcaggccggg

SEQ ID NO: 119106 - DNA, 30 bp, Homo sapiens
  chr10:74033599-74033629
  hyper
ggtctggattgggtcgtggcgcagagaagg

SEQ ID NO: 119107 - DNA, 30 bp, Homo sapiens; identical to SEQ ID NO: 47237
  chr10:74033870-74033900
  hyper

SEQ ID NO: 119108 - DNA, 260 bp, Homo sapiens; identical to SEQ ID NO: 7422
  chr10:74057401-74057661
  hyper

SEQ ID NO: 119109 - DNA, 296 bp, Homo sapiens; identical to SEQ ID NO: 7423
  chr10:74057707-74058003
  hyper

SEQ ID NO: 119110 - DNA, 31 bp, Homo sapiens; identical to SEQ ID NO: 47240
  chr10:74070291-74070322
  hyper

SEQ ID NO: 119111 - DNA, 418 bp, Homo sapiens
  chr10:74079274-74079692
  hyper
tttccctcgtttgtccgctcagaccagacggggcaaagggcagccatcaaaggtgtctgggacgagcccggcggggtaatgggccgctagggactcagtctggcccgggtctcagccggggcagaaggcagccgggcgagggccgcgggtggggggcagggggccggggacaagcagccccgcccaggccggcgcgctgtgtgcacaacgtgcagggctgcgaaagcggatgcggcctgatggggcaatcgctggcaacgcgccgcgggttgtcagcgggcgctggggggtgggagcccggcgccggcgggccctgcctccagcattggccccgcccccagttccgcagtcgtggctgggtttcggggagggcgcccggtgcggggggcgcccagggcctgcgcacacgggtaggccc

SEQ ID NO: 119112 - DNA, 193 bp, Homo sapiens; identical to SEQ ID NO: 7426
  chr10:74079752-74079945
  hyper

SEQ ID NO: 119113 - DNA, 30 bp, Homo sapiens
  chr10:74113854-74113884
  hyper
cgatggaggactggcggtggctgaggtcag

SEQ ID NO: 119114 - DNA, 30 bp, Homo sapiens; identical to SEQ ID NO: 47244
  chr10:74114148-74114178
  hyper

SEQ ID NO: 119115 - DNA, 30 bp, Homo sapiens
  chr10:74114598-74114628
  hyper
gatggccttgagggcgatgctgatacagcg

SEQ ID NO: 119116 - DNA, 200 bp, Homo sapiens
  chr10:74114845-74115045
  hyper
tcaataatggtgcacgcccagattccatgttccggaggtcttagagttgagtatgcgccaaccctctaatcttccggaggaggaaacccaagctcaggaaggtcacgtggtagccgtcgggatgagactggggccttcggagtgcctgttattcccagacggtttactaagtggtgatctatatacgtaatgtaactaca

SEQ ID NO: 119117 - DNA, 70 bp, Homo sapiens
  chr10:74386145-74386215
  hyper
acctcctcggtacccgttttcgtgttggctatgttggctaagcaaaaaggagttcgtgaaaagaaaactg

SEQ ID NO: 119118 - DNA, 117 bp, Homo sapiens; identical to SEQ ID NO: 47247
  chr10:74451756-74451873
  hyper

SEQ ID NO: 119119 - DNA, 30 bp, Homo sapiens
  chr10:74452365-74452395
  hyper
ttccctcccttcttcgttcttaacagccct

SEQ ID NO: 119120 - DNA, 30 bp, Homo sapiens
  chr10:74855363-74855393
  hyper
tatttcatcccctccgagtgcattccaagc

SEQ ID NO: 119121 - DNA, 148 bp, Homo sapiens; identical to SEQ ID NO: 47248
  chr10:74927730-74927878
  hyper

SEQ ID NO: 119122 - DNA, 30 bp, Homo sapiens
  chr10:74928162-74928192
  hyper
caccccagccggggcgggcggcgggcgctc

SEQ ID NO: 119123 - DNA, 30 bp, Homo sapiens; identical to SEQ ID NO: 47249
  chr10:75006447-75006477
  hyper

SEQ ID NO: 119124 - DNA, 34 bp, Homo sapiens; identical to SEQ ID NO: 47250
  chr10:75007236-75007270
  hyper

SEQ ID NO: 119125 - DNA, 185 bp, Homo sapiens
  chr10:75012128-75012313
  hyper
ggttgcctccatcgcgcctgggagagctctccccacccggccccgaactcccgagccccgtgaccgcccggaacgtctcgcggtggcccgatgactcactgaggtggaccatggtgccgccggcgtgcggctcctcggagagccccgctacccgcacgcaccagctctacggccttggcagggca

SEQ ID NO: 119126 - DNA, 85 bp, Homo sapiens
  chr10:75012574-75012659
  hyper
aggcgaatcccaggcgcgccaaggaaagtgctacaaaagccatccatcttgcaagcgttggtgccgaggcgcaacgctgagaacg

SEQ ID NO: 119127 - DNA, 225 bp, Homo sapiens
  chr10:75173164-75173389
  hyper
ccttggtttccttgcgcagtgtttgcacaggatgagctaatttcaacacagatttgctgctggtcggggaacagcaatcaaatctggaatgctattctagaatagcttccaagaactgtaaacgagaaccagtgtacgaccttggcctggcgcattctgtcctacggttcactaaacacagtaaaaatttccccaagtttccctaaattcgctgtgtcaccggaa

SEQ ID NO: 119128 - DNA, 285 bp, Homo sapiens
  chr10:75173745-75174030
  hyper
agggaggggggcgccgctcctcacctgaccccagcagcagcgtcacagcccaacccggtctcccgcaagatggagccgggggcgggcccagggtgggcggggcgtctcgcgagcccgttaggatcgcggctgcagccgggaacacccccggagccggagagggcgctgcggggagcgggctgtccctcagtcccgcccctaggcgccacctgagggaaaaagactctcccttcgggtggcccagcggatttttaatcacatttatctgtcgcaaggaccctgcac

SEQ ID NO: 119129 - DNA, 30 bp, Homo sapiens
  chr10:75255485-75255515
  hyper
aggggacggtctcccgcccgccctcacaca

SEQ ID NO: 119130 - DNA, 30 bp, Homo sapiens; identical to SEQ ID NO: 47255
  chr10:75255847-75255877
  hyper

SEQ ID NO: 119131 - DNA, 30 bp, Homo sapiens
  chr10:75384959-75384989
  hyper
gaatcgctctctcccgcccccctaccctgc

SEQ ID NO: 119132 - DNA, 180 bp, Homo sapiens; identical to SEQ ID NO: 7429
  chr10:75385747-75385927
  hyper

SEQ ID NO: 119133 - DNA, 55 bp, Homo sapiens; identical to SEQ ID NO: 47257
  chr10:75407357-75407412
  hyper

SEQ ID NO: 119134 - DNA, 324 bp, Homo sapiens
  chr10:75407477-75407801
  hyper
cgtctcctcctttcccggccggaacatctgcttccgggtcccccggcgccgggcctcctgcaggatacccgtgcgggcagctggcacagagatgcgctgctcgcgagcgctggggggctcaggagcccctgggcctggggcaggcgcctctgggcgcgcagagggtcgcaaaggcgcagataggaagatagaagcggtggaggtcatggcagctgcgctaggaggagcggggggctctggagctccacctggggtgacaggccgactaggggctgggatgtacagggagctggtggctgtcacagggcccgaggagcgtggggt

SEQ ID NO: 119135 - DNA, 277 bp, Homo sapiens
  chr10:75408168-75408445
  hyper
agcatggctgctggttcgacccgtgccagttcctgggtgctggagtctgcgcgctggcgctgctgttcaaagagctgcacccctcgcccagagacctcactcagctgccctcccagcccagagccctggccctctgatgctcttgagcccgccctggcaagctccatgtccagatagggactgtcccagtcagattgattggtgaggctgcgggcgtcagagaaggcttcttcgtccagctcggactcactcgtggggggaacgccgtcctcctcct

SEQ ID NO: 119136 - DNA, 30 bp, Homo sapiens; identical to SEQ ID NO: 47259
  chr10:75490319-75490349
  hyper

SEQ ID NO: 119137 - DNA, 146 bp, Homo sapiens
  chr10:75503716-75503862
  hyper
accaccacacgttccgcaaatctcataaccagcaaacgccatgggtgagagcaacctagcggacggaaatcaacggggtcaggggtcaccaggaagtgactacaagactctagctcagaggtcactaatacgtcacaggcagagtg

SEQ ID NO: 119138 - DNA, 158 bp, Homo sapiens
  chr10:75504288-75504446
  hyper
gaggagcctgggggcggggcctgggtagagaccctcacctcacgcatccaccatccaggagcaggtcctagaccatcccttcgtctcccggcccagattccggctcctgcttcctgccccgagcctgttaaaaggtgcaagacgtttggtctctgtgc

SEQ ID NO: 119139 - DNA, 228 bp, Homo sapiens; identical to SEQ ID NO: 47261
  chr10:75531956-75532184
  hyper

SEQ ID NO: 119140 - DNA, 28 bp, Homo sapiens
  chr10:75532489-75532517
  hyper
gctgccgcgcctggcgcaccagagctgg

SEQ ID NO: 119141 - DNA, 30 bp, Homo sapiens
  chr10:75533124-75533154
  hyper
cccatgcacctgggcgctgtgcccgtgtac

SEQ ID NO: 119142 - DNA, 30 bp, Homo sapiens
  chr10:75541543-75541573
  hyper
ttcctgcatgtccccggccccgtactgccc

SEQ ID NO: 119143 - DNA, 96 bp, Homo sapiens; identical to SEQ ID NO: 47262
  chr10:75542069-75542165
  hyper

SEQ ID NO: 119144 - DNA, 30 bp, Homo sapiens; identical to SEQ ID NO: 47263
  chr10:75545346-75545376
  hyper

SEQ ID NO: 119145 - DNA, 30 bp, Homo sapiens
  chr10:75545651-75545681
  hyper
gcagagtgggaggacggagagcgcttctca

SEQ ID NO: 119146 - DNA, 30 bp, Homo sapiens; identical to SEQ ID NO: 47264
  chr10:75571310-75571340
  hyper

SEQ ID NO: 119147 - DNA, 30 bp, Homo sapiens; identical to SEQ ID NO: 47265
  chr10:75634210-75634240
  hyper

SEQ ID NO: 119148 - DNA, 30 bp, Homo sapiens
  chr10:75634580-75634610
  hyper
ttatgggcttgtcccggggcggaccccgcg

SEQ ID NO: 119149 - DNA, 40 bp, Homo sapiens; identical to SEQ ID NO: 7431
  chr10:75639672-75639712
  hyper

SEQ ID NO: 119150 - DNA, 170 bp, Homo sapiens; identical to SEQ ID NO: 47267
  chr10:75670638-75670808
  hyper

SEQ ID NO: 119151 - DNA, 114 bp, Homo sapiens
  chr10:75671363-75671477
  hyper
ctccaaagtgagtgcgctcttgctttgactgatgctgcccaaggacctctgatcagcaccaggggagaggaggggctgctcagggagctggggtcctccggattccatccacag

SEQ ID NO: 119152 - DNA, 30 bp, Homo sapiens; identical to SEQ ID NO: 47269
  chr10:75700453-75700483
  hyper

SEQ ID NO: 119153 - DNA, 30 bp, Homo sapiens; identical to SEQ ID NO: 47270
  chr10:75700833-75700863
  hyper

SEQ ID NO: 119154 - DNA, 30 bp, Homo sapiens
  chr10:75757794-75757824
  hyper
gcgctgccattgggcgcggcgacgagaggg

SEQ ID NO: 119155 - DNA, 30 bp, Homo sapiens
  chr10:75910419-75910449
  hyper
gcccagatcggagtcgggggccccagctat

SEQ ID NO: 119156 - DNA, 162 bp, Homo sapiens
  chr10:75910773-75910935
  hyper
catctagattcaggcggtcatctgctgcctaacgcagtctggggtccctcatggtaggggaggcggggtcaggaatgggcggggcattcgctgttggtgccgacggatagagccaatgattgtggatgacagcggcacagaatgggcggagtctggaggggc

SEQ ID NO: 119157 - DNA, 30 bp, Homo sapiens; identical to SEQ ID NO: 47272
  chr10:75911607-75911637
  hyper

SEQ ID NO: 119158 - DNA, 151 bp, Homo sapiens
  chr10:75936203-75936354
  hyper
gtagacagtggccacgtgactgctaaaccggttgccagaggcgcggccatttttggggcgggcacccaatctctcgccctgtaaactgcggggtgacgggacgctgttactaggactcaagatggccaccgcgcccgctagtcatctcgct

SEQ ID NO: 119159 - DNA, 30 bp, Homo sapiens; identical to SEQ ID NO: 7434
  chr10:76585836-76585866
  hyper

SEQ ID NO: 119160 - DNA, 104 bp, Homo sapiens
  chr10:76586293-76586397
  hyper
caatggagcagcggcggggcgggaccgcgactcgggtttaatgagactccattgggctgtaatcagtgtcatgtcggattcatgtcaacgacaacaacaggggg

SEQ ID NO: 119161 - DNA, 30 bp, Homo sapiens; identical to SEQ ID NO: 47276
  chr10:76803545-76803575
  hyper

SEQ ID NO: 119162 - DNA, 30 bp, Homo sapiens
  chr10:76969865-76969895
  hyper
aaatgggtggggcacgctaggacccgctca

SEQ ID NO: 119163 - DNA, 207 bp, Homo sapiens
  chr10:76970481-76970688
  hyper
ttggcagcgggctgcgctgcagggacaggcgcggcggacagccccgggggcagcggcggggtcctgtctgggagaggacagggttgcggcgggcggaacggtgtctccttcacttcgccctccagctgctggagctgcagcccgaccgcgagcgtgccaagcggcttcagcagctagcggagcggtggcggcggcccccctcaggac

SEQ ID NO: 119164 - DNA, 29 bp, Homo sapiens
  chr10:76994561-76994590
  hyper
ctcccaggccggcccgggctctgtgacaa

SEQ ID NO: 119165 - DNA, 30 bp, Homo sapiens
  chr10:76995792-76995822
  hyper
tacccgcggagccgcggtctcgggcatcat

SEQ ID NO: 119166 - DNA, 390 bp, Homo sapiens; identical to SEQ ID NO: 47278
  chr10:77054512-77054902
  hyper

SEQ ID NO: 119167 - DNA, 4329 bp, Homo sapiens; identical to SEQ ID NO: 47279
  chr10:77159486-77163815
  hyper

SEQ ID NO: 119168 - DNA, 30 bp, Homo sapiens; identical to SEQ ID NO: 47280
  chr10:77168537-77168567
  hyper

SEQ ID NO: 119169 - DNA, 809 bp, Homo sapiens; identical to SEQ ID NO: 47281
  chr10:77168770-77169579
  hyper

SEQ ID NO: 119170 - DNA, 737 bp, Homo sapiens; identical to SEQ ID NO: 47282
  chr10:77190964-77191701
  hyper

SEQ ID NO: 119171 - DNA, 30 bp, Homo sapiens
  chr10:79396186-79396216
  hyper
cgctccgcgtaaaaccgcggcctcaggcgg

SEQ ID NO: 119172 - DNA, 1904 bp, Homo sapiens; identical to SEQ ID NO: 7442
  chr10:79396526-79398430
  hyper

SEQ ID NO: 119173 - DNA, 427 bp, Homo sapiens
  chr10:79470897-79471324
  hyper
gctaaggagaggtctacgttttattttttaagaaggcagagctcgagggggccttgaagtcacatcgccggctgctgagtctacgaacagggaagcagccgcagtccccgaaaggacccgtcccagcgagccagggcctggttttccttccgcagaaggcggagggaccggagcgggcgcgggcacccctgggctctgaggggcgcgctctgaagggcggcggacttcagggccatgctggctgtccccagaaagcaggagcccgaaaccgcggggccaacgaacgcccacattctctgctacaacctcgccactcccctgcgcctctccccttgccccctgcccccacaggtaacgcccagaacgagtgcttctcccggtggggtactgaggagcctgggctgcagctgccgagccgccacagcca

SEQ ID NO: 119174 - DNA, 74 bp, Homo sapiens; identical to SEQ ID NO: 7444
  chr10:79606675-79606749
  hyper

SEQ ID NO: 119175 - DNA, 221 bp, Homo sapiens; identical to SEQ ID NO: 47286
  chr10:79685703-79685924
  hyper

SEQ ID NO: 119176 - DNA, 46 bp, Homo sapiens; identical to SEQ ID NO: 47287
  chr10:79686267-79686313
  hyper

SEQ ID NO: 119177 - DNA, 470 bp, Homo sapiens; identical to SEQ ID NO: 47288
  chr10:79686574-79687044
  hyper

SEQ ID NO: 119178 - DNA, 35 bp, Homo sapiens
  chr10:79793410-79793445
  hyper
tgcgtaaacctagtcggctcgagttgttctggttc

SEQ ID NO: 119179 - DNA, 30 bp, Homo sapiens; identical to SEQ ID NO: 47289
  chr10:79793996-79794026
  hyper

SEQ ID NO: 119180 - DNA, 30 bp, Homo sapiens; identical to SEQ ID NO: 47290
  chr10:80062650-80062680
  hyper

SEQ ID NO: 119181 - DNA, 30 bp, Homo sapiens
  chr10:80063033-80063063
  hyper
tggtgactaatggccgcggctgcgcgccgc

SEQ ID NO: 119182 - DNA, 30 bp, Homo sapiens; identical to SEQ ID NO: 7447
  chr10:80159487-80159517
  hyper

SEQ ID NO: 119183 - DNA, 30 bp, Homo sapiens; identical to SEQ ID NO: 47292
  chr10:80181336-80181366
  hyper

SEQ ID NO: 119184 - DNA, 30 bp, Homo sapiens
  chr10:80713069-80713099
  hyper
cagggagacagcttccgggcagcctcgaag

SEQ ID NO: 119185 - DNA, 116 bp, Homo sapiens
  chr10:80733745-80733861
  hyper
gcccgccgccacctcccggcgaccgggcagtagcagccgtaattggatcctcgctgcctcctcccagctccccgcccccaatcggggagcgggtaaatgccgggtaccttggcaaa

SEQ ID NO: 119186 - DNA, 30 bp, Homo sapiens; identical to SEQ ID NO: 47294
  chr10:80819116-80819146
  hyper

SEQ ID NO: 119187 - DNA, 116 bp, Homo sapiens
  chr10:80827232-80827348
  hyper
aatccgaagcgggctccgccggctcccggccgaagccgcccccgcctgccggggaggggagcgcgtgcgtgggcggcgcgtgtgtgtccaaagagggctgcgcgggcgccaattat

SEQ ID NO: 119188 - DNA, 30 bp, Homo sapiens; identical to SEQ ID NO: 47296
  chr10:80827808-80827838
  hyper

SEQ ID NO: 119189 - DNA, 408 bp, Homo sapiens; identical to SEQ ID NO: 47297
  chr10:80828531-80828939
  hyper

SEQ ID NO: 119190 - DNA, 30 bp, Homo sapiens; identical to SEQ ID NO: 47298
  chr10:80829901-80829931
  hyper

SEQ ID NO: 119191 - DNA, 30 bp, Homo sapiens
  chr10:80830521-80830551
  hyper
gcctgcccgggagccgtcagcttcctgggt

SEQ ID NO: 119192 - DNA, 190 bp, Homo sapiens
  chr10:80830745-80830935
  hyper
tggcggctgggctggcggggtgagggcacggctcggccagcctttccctcctctctgctctgccacggacatttggagccctctgggtggacagcccagggcatgggagagtagggcccagccccaaagatttaaaagggcagtgggcggccgcctgtggaagcccctggctccgcgccgggtgcagagc

SEQ ID NO: 119193 - DNA, 30 bp, Homo sapiens
  chr10:80831232-80831262
  hyper
tcgctggcgcttgtacggtcccgggagtgt

SEQ ID NO: 119194 - DNA, 30 bp, Homo sapiens; identical to SEQ ID NO: 47300
  chr10:80841132-80841162
  hyper

SEQ ID NO: 119195 - DNA, 30 bp, Homo sapiens; identical to SEQ ID NO: 7451
  chr10:80909886-80909916
  hyper

SEQ ID NO: 119196 - DNA, 30 bp, Homo sapiens
  chr10:80955241-80955271
  hyper
gagcccggcctctccggctatagagctgca

SEQ ID NO: 119197 - DNA, 146 bp, Homo sapiens
  chr10:81002562-81002708
  hyper
cgcccggaggctggagtgctgctcgtcgggtcgtgcgttcgctcggcagcggcgtgcaccagcaccacccctgcgtgcaagtttgaaatgtgagctgcctccgattcatactcgctcgcgctccctcgcagcgaagtggctgggct

SEQ ID NO: 119198 - DNA, 106 bp, Homo sapiens; identical to SEQ ID NO: 47302
  chr10:81074798-81074904
  hyper

SEQ ID NO: 119199 - DNA, 58 bp, Homo sapiens
  chr10:81107045-81107103
  hyper
tctgggcctggaggcgggagtgtttcaaagcacttcacgctccgcggccccaccggct

SEQ ID NO: 119200 - DNA, 251 bp, Homo sapiens
  chr10:81107653-81107904
  hyper
agaatgatttcttccggcctccctcggagcactggagcgggggagacgggagggagggcacgtgtggaggagaaagctcaaggtcagatcgcagagagggagggctcagcacctctgggccggcccgggcacgagggaggggctccaggagccttctggggctgagcctagatccggagctccgaggtgggtgtcgggggtcttggggtgagcgtcgtggcccagcgggtgctcacgtggcggcccttgca

SEQ ID NO: 119201 - DNA, 141 bp, Homo sapiens
  chr10:81204443-81204584
  hyper
ggtgcctttcgggtcgggaaccgcagaggtcggagaaaagattttaggcccttccagaggagctccgagcagaatctgcactctcggtcccagcccgcggtggccaggacgaggataaggttgggcgtgagaaggacactt

SEQ ID NO: 119202 - DNA, 30 bp, Homo sapiens
  chr10:81205151-81205181
  hyper
gtacaccgaggcggcgctcgtgtcgatggc

SEQ ID NO: 119203 - DNA, 30 bp, Homo sapiens
  chr10:81205539-81205569
  hyper
ccacgatgccccgccgcccactccctgccc

SEQ ID NO: 119204 - DNA, 30 bp, Homo sapiens; identical to SEQ ID NO: 47306
  chr10:81206361-81206391
  hyper

SEQ ID NO: 119205 - DNA, 716 bp, Homo sapiens
  chr10:81664374-81665090
  hyper
cagccatagtccattcgtccggagcacggtcactccggggtggccaggaccaaatgtgcctccttctggcttttgcaccgcaccaactaatccgcgccaggccgcacagctgctctggccttcggggaggactcctggagcgcggtgtacactgctccggagtccctccgcaggagttgaggcagcgagttccgagggcggggtggggcggaatccggaggcacgcggacccggtggaacgcactgcgcagacggcgccggcgcctgcactcagctgttgacgagtctttcttccagctctaccctgaaagtcctccaggcaccggtcttttttttctgccttttgtttccctcccggcgagtcggcgcgacagtgaatttccgtttcccgcggtgtccaagcggacctgaggagttgcagctgtgagcaggttcggtggtgccgcgggctggggtaggcggcggtggggtccctggctctggggcactgggaagatcgcgagtcgtgcgcgtgggaaggtcctccggctcatctttgctccccaggagcagcatatttcgcatctgccagaggtgtgcccgggggtcgttgggagagggacggggtgaatccctgcagagagccgggacggggagggaaggtgtcggggagacgtggtttcctggcgacgtggtcccggcaggcgacttagacctgagccgaatgtgttgacccc

SEQ ID NO: 119206 - DNA, 1022 bp, Homo sapiens
  chr10:81741258-81742280
  hyper
cccgcctgggcaccccgaccttcgcggcccagatcctcccgccagcccagcccagggggagcgaggcgacggttgccgggaagcgcgcagcacccctccctcccattcttcgtcctcccctggcgcaccgcccgtttttcctctttctccgttaaaaacaactgggtggctgtgggaagagggaaggtggcgccggcggagtctgggcaggcgcctcccactcagccgccagcagccctgggagccggaggatggctgcggtagcagccacagccccagaggaggcggtgcccgacgcccggggcgcccagcgcgcccagaccggcagtggccttcatggcgcaccagaacctaaaccagaggcagccacacggacacctgagccgcctcttcctgctagagccagcgaggtgtgcccgcagccgagaccccttcctctccacgtctcctcgtctccttgtctcccgtgcccgcgtcaggccgccagcctcgcccacctccccaggaagagcgcgccgggcgccgacttcccctggggcggcggccctggacgtgcggggggtctctctgggccggctgctgcgccttggccctgccctctagctcccgcgctcgctcccgccctcctggctctccgggcgcgcctggcggggcagggcggacatgggcaccaagcagaggagccgcacgcgcacgtactggggctcggatctaccttccagtagcaacggaggagccaatgggaccgcgggcggcggcgggggcgctcgggccaccgcggggcggttcccggctcaggtgcccagtgggcaccagcccagcgcctcgggcggcgctgctgcgaaggccctggcagccccgcgcagccgctcccgcggcggggccgtggggagcgtggctttgggggcccgcgcagcgcagtcctccttcagcatgccgaacagtagcagcggcctatagggcttacaggactcggtgcacagcagcgctgaggaaggtggcgcggccggtccaggccggtg

SEQ ID NO: 119207 - DNA, 30 bp, Homo sapiens; identical to SEQ ID NO: 47309
  chr10:81838458-81838488
  hyper

SEQ ID NO: 119208 - DNA, 323 bp, Homo sapiens
  chr10:81838725-81839048
  hyper
gggtcttgggcgggcgcccagggccctgagaaaccggctagccaggcttttcttatatgggggcggggacggctggggagctcccagccaactctgtgtctgggtttttcaagaggatggtgaagtcggaggccagcaatgcggctaccgcctatttccgtccagcaagacccttgccctctctggtcacagtcctggggctgggctacttcgcggtgaggcgtggggtggggcggggcgggcctctgttttggcccgccgggccctcgtagggcgaggggagctctgggaacggggcctgtgcgcacgcgcatctgacggtt

SEQ ID NO: 119209 - DNA, 379 bp, Homo sapiens
  chr10:81892275-81892654
  hyper
cccttcctcgggaggcgcccaggtggcacgtcggtgcctcagctcccggggtctctgggctccgcgctgcccacggggtgccgaggggcctctggagggggcgggttctctcgagccagaaagtccggagccgcccaggaattttggctcgaactgagtgcatttcctctcgggccggccgggtgcgatccgggaagggcggctgcgggcagacgcggcgctgcgctcggccaggccggcaccatgcggcccctgctctgcgcgctgaccggactggccctgctccgcgccgcgggctctttggccggtgagtggggcgcagggcgcggcaggggacctggagccggggagacccgcagatggcgaggaaggaatgagc

SEQ ID NO: 119210 - DNA, 1 bp, Homo sapiens
  chr10:81964767-81964768
  hyper
t

SEQ ID NO: 119211 - DNA, 99 bp, Homo sapiens
  chr10:81965473-81965572
  hyper
gcggcgcccagtgccgcgcagagccgcattcgccctcctgcaggggtgggcatttcctaagtcctctccagccccgtgtgcgtcggttagtgactctct

SEQ ID NO: 119212 - DNA, 560 bp, Homo sapiens
  chr10:82116580-82117140
  hyper
ggtgagcagagggcacgcggtgggcagcgaagggggaacgcgcagcagagaggagagggcgtgcaggagtaggagcaggcggcagagtagagggggcgcggcagagtagagggggcgcggcagagtggagggggcgtgcaggagtaggagcccgccgcagagtagagggggcgcggcagagaggagggggcgtgcaggcgcggggcgcccggcagagagaaggggtcgtgcggaagggggcgcgcgccaggggagggggccagagaggagggggcgttcaggagtcgggcctgcggcagagatgaggcggtgtgcaggagggagagcgcgcacgagggggcaacgggcagagaggagagggaatgaaagaaggggagcgtggcagagagaagcgggcgcgctccagggggcggggtccagggaggagggggagcgtaggatcggggcgggaggcagagaggagcgggcacgcgggacgggcgtgtgctcgtgaggggtcgaggaaaggcgtatgtggaggcgcgcggggtgggtgagccgaggagacttgctacacagaa

SEQ ID NO: 119213 - DNA, 64 bp, Homo sapiens
  chr10:82168028-82168092
  hyper
ttaggggtgtccagcgccttcttttgccctaggcagcgccctgaagaacgcgtcggggcctcgg

SEQ ID NO: 119214 - DNA, 30 bp, Homo sapiens
  chr10:82168515-82168545
  hyper
tgaggcgcgcccctcgggcccgcgccaact

SEQ ID NO: 119215 - DNA, 240 bp, Homo sapiens
  chr10:82213503-82213743
  hyper
aaagccgggcaggaacgcctcttatctccaccacagccattttcctaatccttcgcccgctctccacggtcatcccgtgtatccctcgagacgccgcctcccacagctcgtgcttctcccaggttcggctccgacaaggccagagcggcgtctgcgcagcgcaacggctcagagcgctcccggcggctacaagtgcccggccccgggccaggcccggcctgcgccgcgcacccactggga

SEQ ID NO: 119216 - DNA, 30 bp, Homo sapiens
  chr10:82214174-82214204
  hyper
tctttgtctgaggccgacttccccgagcgt

SEQ ID NO: 119217 - DNA, 30 bp, Homo sapiens; identical to SEQ ID NO: 47317
  chr10:82215060-82215090
  hyper

SEQ ID NO: 119218 - DNA, 562 bp, Homo sapiens; identical to SEQ ID NO: 47318
  chr10:83633799-83634361
  hyper

SEQ ID NO: 119219 - DNA, 292 bp, Homo sapiens
  chr10:83634466-83634758
  hyper
cgagggttggctgcgggccggctgaagaacaggtgcacctcaccgcccgggctcgcggagcagccgccgaagatcgcggcggccaggcaggccctctgtgtcggaatgcgggtggcgggcacccggcaccccgcgaccggccgccggggccactgaaggcggcgcgaggcccaggcgcggcgcgagcgggcgccccagggagcgggctgggcgcggtgccccgaggatgtcggcgctcctggagcgcacgcaggcggcgggcagcagcagcagcagcgggcgcggggacccg

SEQ ID NO: 119220 - DNA, 702 bp, Homo sapiens
  chr10:83634796-83635498
  hyper
cgccgctctctgaccgaccggaggcgccgggggcccgtctcgcccctcttccgagctccttaccgccccctccccggccccgtcccctcccccgctcctctcctccccgcccgccgcccgcctctcggggggaggggcgtgggggcagggagcggatttgcatgcggccgccgcggccgctgcctgcgcccgagcccgccgccgccgccggagcccgcgcccgcgcccgcgcccggcccgcgcggccccatgcctctgccgcggccctcgggggggcgaaggtgaagaccggctcctaggatgagtgaaggggcggccgctgcctcgccacctggtgccgcttcggcagccgccgcctcggccgaggagggcaccgcggcggctgcggcggcggcagcggcgggcgggggcccggacggcggcggcgaaggggcggccgagcccccccgggagttacgctgtagcgactgcatcgtgtggaaccggcagcagacgtggctgtgcgtggtacctctgttcatcggcttcatcggcctggggctcagcctcatgcttctcaaatggatcgtggtgggctccgtcaaggagtacgtgcccaccgacctagtggactccaaggggatgggccaggaccccttcttcctctccaagcccagctctttccccaaggccatggagaccaccaccactaccacttccacc

SEQ ID NO: 119221 - DNA, 102 bp, Homo sapiens; identical to SEQ ID NO: 47321
  chr10:83635530-83635632
  hyper

SEQ ID NO: 119222 - DNA, 803 bp, Homo sapiens
  chr10:83635670-83636473
  hyper
cggtcccgtccaccacggccccgttcttcagtagcagcacgctgggctcccgacccccggtgccaggaactccaagtacccaggcaatgccctcctggcctactgcggcatacgctacctcctcctaccttcacgattctactccctcctggaccctgtctccctttcaggatgctgcctcctcttcttcctcttcttcctcctccgctaccaccaccacaccagaaactagcaccagccccaaatttcgtaagtaaacactgtgtctcaactatgatttactactgagtttcccttctgccctcctgctgtctttttccctcgccgcctgttttctagcaagccccctcccccatcccaggtttggggcagagtgagagctgattaaaactggccaccagcggggaagaaggtgccagcctgctctggttctgggggggtgggggcgtgtaggaacgggagggagattgtcaggctccactggccccactttagcgggtcccaagtgagaacagatctcccaactcccttcaaagggttaacgcgagtgcgatccctcctcactgcagacctgctggcgagctgccggatcccgctccagtagagggccagggagggagagagggccttcccgaaggcactgagccccttctccgcccgccggtaggaaggaaagaaagcaaagcacatgcaaattgaccgacgataaaccacaaaaggaagttatgtccttgtgtggggtgacgagttgatggagataatggtagaatgttgctgaggacgcttccagcagccctgacctg

SEQ ID NO: 119223 - DNA, 30 bp, Homo sapiens; identical to SEQ ID NO: 7459
  chr10:84158654-84158684
  hyper

SEQ ID NO: 119224 - DNA, 30 bp, Homo sapiens; identical to SEQ ID NO: 7460
  chr10:85233864-85233894
  hyper

SEQ ID NO: 119225 - DNA, 30 bp, Homo sapiens; identical to SEQ ID NO: 7461
  chr10:85247485-85247515
  hyper

SEQ ID NO: 119226 - DNA, 30 bp, Homo sapiens; identical to SEQ ID NO: 7462
  chr10:85416512-85416542
  hyper

SEQ ID NO: 119227 - DNA, 31 bp, Homo sapiens; identical to SEQ ID NO: 7463
  chr10:85899255-85899286
  hyper

SEQ ID NO: 119228 - DNA, 131 bp, Homo sapiens; identical to SEQ ID NO: 7464
  chr10:85899675-85899806
  hyper

SEQ ID NO: 119229 - DNA, 945 bp, Homo sapiens
  chr10:85954178-85955123
  hyper
ctcctgtccaggactgggggccgccggcaaagggggcgtggcgggcggggagtcctcttgtcacgccctcctgcccccgcccgcggctgggagcctgtcgctccgctctgcgccgctaattggtctcgtcaggcggccggcaggagcagatccgagccgtgtcatcctcttagcgccctcacgccacccgccgctcccgccccgtgccccctcccgccgcggctgcagtcgccgctacccccattgtggtctctgccctccccgcgggcccagggcatgctccgtgcccctgcgcccggtctcggcggcggcaggcgacactccgcgccggcggagacatgaggcgctgccggtgggccgccctggccctggggctgctgcgcctctgcttgggtgagtggccgctgggccgcgctggccgcgtggatggcgagggagatgggcgctggcgtcacccaggtggccagagggacatggtcctggaccacttccagagtgggactcgggctggtggacgggagcggagaagtccttccatcttcctggcccattcggtagtggggagtggggtagcggagtagtggggagctccggggcgcttctccagagctggcatcctagggccccagggtttggcgcccggacccccgctgctctccgcttgctgggaaccagagctgtaggcttggtggcagctccgatgctgcgtggggcaggagatagtgccctgactcgcggcttgaccttggctgggctggggcactgcccctctccgagcgcgggtgcaatctgcccattgatgaaggaggggttggattgctacctgggttctaagcgcccacatgctacgtgtccctgacaagcccgagcccaccgggggcggagtgggggtcaggggcatcctctgggcggcgccccagtggggtccctcggtgcacttgggtt

SEQ ID NO: 119230 - DNA, 43 bp, Homo sapiens; identical to SEQ ID NO: 7466
  chr10:86088146-86088189
  hyper

SEQ ID NO: 119231 - DNA, 30 bp, Homo sapiens; identical to SEQ ID NO: 47331
  chr10:86475849-86475879
  hyper

SEQ ID NO: 119232 - DNA, 30 bp, Homo sapiens; identical to SEQ ID NO: 47332
  chr10:86514862-86514892
  hyper

SEQ ID NO: 119233 - DNA, 30 bp, Homo sapiens; identical to SEQ ID NO: 47333
  chr10:86904510-86904540
  hyper

SEQ ID NO: 119234 - DNA, 30 bp, Homo sapiens; identical to SEQ ID NO: 47334
  chr10:87074845-87074875
  hyper

SEQ ID NO: 119235 - DNA, 30 bp, Homo sapiens; identical to SEQ ID NO: 47335
  chr10:87081956-87081986
  hyper

SEQ ID NO: 119236 - DNA, 30 bp, Homo sapiens; identical to SEQ ID NO: 47336
  chr10:87270873-87270903
  hyper

SEQ ID NO: 119237 - DNA, 30 bp, Homo sapiens; identical to SEQ ID NO: 47337
  chr10:87397127-87397157
  hyper

SEQ ID NO: 119238 - DNA, 30 bp, Homo sapiens; identical to SEQ ID NO: 47338
  chr10:87405011-87405041
  hyper

SEQ ID NO: 119239 - DNA, 30 bp, Homo sapiens; identical to SEQ ID NO: 47339
  chr10:87424457-87424487
  hyper

SEQ ID NO: 119240 - DNA, 30 bp, Homo sapiens; identical to SEQ ID NO: 47340
  chr10:87453632-87453662
  hyper

SEQ ID NO: 119241 - DNA, 57 bp, Homo sapiens; identical to SEQ ID NO: 47341
  chr10:87493569-87493626
  hyper

SEQ ID NO: 119242 - DNA, 30 bp, Homo sapiens; identical to SEQ ID NO: 47342
  chr10:87515091-87515121
  hyper

SEQ ID NO: 119243 - DNA, 30 bp, Homo sapiens; identical to SEQ ID NO: 47343
  chr10:87536102-87536132
  hyper

SEQ ID NO: 119244 - DNA, 30 bp, Homo sapiens; identical to SEQ ID NO: 47344
  chr10:87602797-87602827
  hyper

SEQ ID NO: 119245 - DNA, 30 bp, Homo sapiens; identical to SEQ ID NO: 47345
  chr10:87622976-87623006
  hyper

SEQ ID NO: 119246 - DNA, 30 bp, Homo sapiens; identical to SEQ ID NO: 47346
  chr10:87672380-87672410
  hyper

SEQ ID NO: 119247 - DNA, 30 bp, Homo sapiens; identical to SEQ ID NO: 47347
  chr10:87832587-87832617
  hyper

SEQ ID NO: 119248 - DNA, 30 bp, Homo sapiens; identical to SEQ ID NO: 47348
  chr10:87836471-87836501
  hyper

SEQ ID NO: 119249 - DNA, 30 bp, Homo sapiens; identical to SEQ ID NO: 47349
  chr10:87838181-87838211
  hyper

SEQ ID NO: 119250 - DNA, 30 bp, Homo sapiens; identical to SEQ ID NO: 47350
  chr10:87863910-87863940
  hyper

SEQ ID NO: 119251 - DNA, 30 bp, Homo sapiens; identical to SEQ ID NO: 47351
  chr10:87866056-87866086
  hyper

SEQ ID NO: 119252 - DNA, 30 bp, Homo sapiens; identical to SEQ ID NO: 47352
  chr10:87886909-87886939
  hyper

SEQ ID NO: 119253 - DNA, 30 bp, Homo sapiens; identical to SEQ ID NO: 47353
  chr10:87941840-87941870
  hyper

SEQ ID NO: 119254 - DNA, 30 bp, Homo sapiens; identical to SEQ ID NO: 47354
  chr10:87992037-87992067
  hyper

SEQ ID NO: 119255 - DNA, 30 bp, Homo sapiens; identical to SEQ ID NO: 47355
  chr10:88023113-88023143
  hyper

SEQ ID NO: 119256 - DNA, 30 bp, Homo sapiens; identical to SEQ ID NO: 47356
  chr10:88096446-88096476
  hyper

SEQ ID NO: 119257 - DNA, 30 bp, Homo sapiens; identical to SEQ ID NO: 47357
  chr10:88118882-88118912
  hyper

SEQ ID NO: 119258 - DNA, 30 bp, Homo sapiens; identical to SEQ ID NO: 47358
  chr10:88123778-88123808
  hyper

SEQ ID NO: 119259 - DNA, 59 bp, Homo sapiens; identical to SEQ ID NO: 7467
  chr10:88124921-88124980
  hyper

SEQ ID NO: 119260 - DNA, 1060 bp, Homo sapiens
  chr10:88125456-88126516
  hyper
tacacagacacacaccggagaagcaggcagacactgtgtccactctaacaggctgacagacagtcgtgcacgcaccaacacacgctcagatggccccacacaccccaacaccctctcacagtaacaccgacaccgtgccaggcgcacacagcgacacacgctgacaacacgcacccacacacattcacacacggttccggtccggcctctttgatcttgccctgccaacttggcgagccccccgctgtacctccccctgccccccgctgctctgagctgcgcagaagggccctcccgacccgccgacggccccgctaagggcgcgggtctcgacgcgcgtccatcccggtgttccccgaagcgtcggccctaagtgtcggtagaggccgcggggccccgcgcggagatcggagccccggggagcggcaagcagccagcgggagcgcggcgcggccggtgcacagctcctccgccgggcggcgcggcgcggcccttcgggggagcaccgcccgccgagcccctcggcccagggaaacgccaagtttggacgccgcgcaccccctgccccgttggggcccccgcccagcctcggcccggcctccagccgcgcttaccgatgtggatgatggagtcggcccgcaccgacacgcactggcatatccaggggagaagccacagcgtcagcgcttccatgtcccccgggcgcgcggctcatccacccgggcccggggcgaggccgagggcagcgcgaagcggggaggcgctggtcccggtgcagtcccgggccgctccccgggagagccgagcccgcccgtgcgtcttcccccgcgcgcccgcccctgcgccctgcgcccgccccagcccagcccagcccagcccagcgcggtcgggctcccgctccggctccggtggcggctgcggcggtgctggcagcttgagcccaggccggcgcggcgggggcggcccgcggctgtggcagcggcgcttcccgcggctagagcggcttcgggggaggctgaggcggtggcggcggcggccgggccggcgtggcggctctggg

SEQ ID NO: 119261 - DNA, 388 bp, Homo sapiens; identical to SEQ ID NO: 47362
  chr10:88126744-88127132
  hyper

SEQ ID NO: 119262 - DNA, 30 bp, Homo sapiens; identical to SEQ ID NO: 7469
  chr10:88137193-88137223
  hyper

SEQ ID NO: 119263 - DNA, 31 bp, Homo sapiens; identical to SEQ ID NO: 7470
  chr10:88148418-88148449
  hyper

SEQ ID NO: 119264 - DNA, 363 bp, Homo sapiens; identical to SEQ ID NO: 47365
  chr10:88149245-88149608
  hyper

SEQ ID NO: 119265 - DNA, 30 bp, Homo sapiens
  chr10:88161331-88161361
  hyper
cccaggactggggccgcgctccagggctcc

SEQ ID NO: 119266 - DNA, 30 bp, Homo sapiens; identical to SEQ ID NO: 47366
  chr10:88193994-88194024
  hyper

SEQ ID NO: 119267 - DNA, 83 bp, Homo sapiens
  chr10:88224574-88224657
  hyper
aggggcaagacttcgtctcaaaaaaacaaacaaacaaacaaaaaaaagttttacatgtagcatacagacgatgtgatgacatg

SEQ ID NO: 119268 - DNA, 30 bp, Homo sapiens; identical to SEQ ID NO: 47368
  chr10:88271572-88271602
  hyper

SEQ ID NO: 119269 - DNA, 317 bp, Homo sapiens
  chr10:88281850-88282167
  hyper
gcagctgtatcaatcgcttcccctccagggacccgccggtgcctggggaccgcgggctgtgcagctgtgccgggcctgcggaggccgccgcccgggagctgggaggcagggggcgcgtggtcaagagccgccctcgacctggcctggtcggtcctggcccggcgtaggtgacgatggcggggaccgcgaggcgccggacacccgaggccacgagcagcgtcgcccctcgctttttcgcgcccctccagccctgcagtccttcctctaagtccgtctgcccctcaccgattgaaagtggccccgagaatattggatgg

SEQ ID NO: 119270 - DNA, 213 bp, Homo sapiens; identical to SEQ ID NO: 47369
  chr10:88294491-88294704
  hyper

SEQ ID NO: 119271 - DNA, 30 bp, Homo sapiens; identical to SEQ ID NO: 47370
  chr10:88318471-88318501
  hyper

SEQ ID NO: 119272 - DNA, 30 bp, Homo sapiens; identical to SEQ ID NO: 47371
  chr10:88332878-88332908
  hyper

SEQ ID NO: 119273 - DNA, 30 bp, Homo sapiens; identical to SEQ ID NO: 7472
  chr10:88392073-88392103
  hyper

SEQ ID NO: 119274 - DNA, 30 bp, Homo sapiens; identical to SEQ ID NO: 47373
  chr10:88413886-88413916
  hyper

SEQ ID NO: 119275 - DNA, 30 bp, Homo sapiens; identical to SEQ ID NO: 47374
  chr10:88453438-88453468
  hyper

SEQ ID NO: 119276 - DNA, 30 bp, Homo sapiens; identical to SEQ ID NO: 47375
  chr10:88480957-88480987
  hyper

SEQ ID NO: 119277 - DNA, 30 bp, Homo sapiens; identical to SEQ ID NO: 47376
  chr10:88487419-88487449
  hyper

SEQ ID NO: 119278 - DNA, 30 bp, Homo sapiens; identical to SEQ ID NO: 47377
  chr10:88499801-88499831
  hyper

SEQ ID NO: 119279 - DNA, 384 bp, Homo sapiens; identical to SEQ ID NO: 47378
  chr10:88515315-88515699
  hyper

SEQ ID NO: 119280 - DNA, 30 bp, Homo sapiens; identical to SEQ ID NO: 47379
  chr10:88550295-88550325
  hyper

SEQ ID NO: 119281 - DNA, 30 bp, Homo sapiens; identical to SEQ ID NO: 47380
  chr10:88560576-88560606
  hyper

SEQ ID NO: 119282 - DNA, 30 bp, Homo sapiens; identical to SEQ ID NO: 47381
  chr10:88581192-88581222
  hyper

SEQ ID NO: 119283 - DNA, 30 bp, Homo sapiens; identical to SEQ ID NO: 47382
  chr10:88592397-88592427
  hyper

SEQ ID NO: 119284 - DNA, 30 bp, Homo sapiens; identical to SEQ ID NO: 47383
  chr10:88628328-88628358
  hyper

SEQ ID NO: 119285 - DNA, 30 bp, Homo sapiens; identical to SEQ ID NO: 47384
  chr10:88629689-88629719
  hyper

SEQ ID NO: 119286 - DNA, 256 bp, Homo sapiens
  chr10:88731053-88731309
  hyper
tgagtggggcgctgccgcccggcggggtcccgccccgccactccccggggaggggcttcggggcacggggccgtgcacgtgagaacgaagcacggttgtggggggggcatgcacgtgcgcgctcgcgtgcgggagacccctcccttccacaccacttcctttcgggacaaaccggtaacctccggccctggaaggttttgtctagtgggttccggatggactggtgttcccagcacccccccggcacgtgtccacg

SEQ ID NO: 119287 - DNA, 180 bp, Homo sapiens
  chr10:88853593-88853773
  hyper
tcattttctatgttcggatatcatctgtcactattggaacaggagtgaacaaataccagaaaataatttgacagcttgcatttaggggagactcacaaaagcccaagaacactgacgaggcattatcacacgggcaggtcattccctttcctagaagtgcatttcggcaggacccgccgt

SEQ ID NO: 119288 - DNA, 30 bp, Homo sapiens
  chr10:89265189-89265219
  hyper
actacggccgcctgcggctcatcaccagtt

SEQ ID NO: 119289 - DNA, 114 bp, Homo sapiens
  chr10:89265585-89265699
  hyper
ggaaaggggacagacgaggtctcccgcaatttttgcgctcccgttcccaaactgaattgccccttcgagcgccaacccatcccttcccccttccctggcgtctagtttcacaat

SEQ ID NO: 119290 - DNA, 31 bp, Homo sapiens; identical to SEQ ID NO: 47386
  chr10:89419678-89419709
  hyper

SEQ ID NO: 119291 - DNA, 30 bp, Homo sapiens
  chr10:89419999-89420029
  hyper
ggtcgccgcgcccgcgagagacctcccgag

SEQ ID NO: 119292 - DNA, 470 bp, Homo sapiens
  chr10:89577721-89578191
  hyper
ggcgaggcccgggacgcccttggaggttaatcctctagatactaagggctgcggggcgcttgggggcggcactgaggtagggcgtgggagaagaccggggtgacctttcctccgggggttcccaggtccgagacggtccttaaaggacctcagaaggatacgacaaccatcccatgaggccccacgggaaccagctactcacccaggggcagaaacagcaagagcaagtgccctcagccggcctcacacaggaaggaaacgcaacctgggagagaacgcttccggcgggaggcgcggcgcactccctcccacggagcatgcgcgacccgcggtcgccggcgcggagggggcgtgctcccaggcttagaaacagtgagggagagcaaattcgcgcacctgatgtctgcttaagctacctgctagactgagactttctgcgaagccggcgtgtctgcgagcagcactcgcta

SEQ ID NO: 119293 - DNA, 1525 bp, Homo sapiens; identical to SEQ ID NO: 47388
  chr10:89621327-89622852
  hyper

SEQ ID NO: 119294 - DNA, 233 bp, Homo sapiens
  chr10:89623142-89623375
  hyper
gcacccagagctaccgctctgccccctcctaccgccccctgccctgccctgccctcccctcgcccggcgcggtcccgtccgcctctcgctcgcctcccgcctcccctcggtcttccgaggcgcccgggctcccggcgcggcggcggagggggcgggcaggccggcgggcggtgatgtggcgggactctttatgcgctgcggcaggatacgcgctcggcgctgggacgcgactg

SEQ ID NO: 119295 - DNA, 30 bp, Homo sapiens; identical to SEQ ID NO: 7476
  chr10:89692890-89692920
  hyper

SEQ ID NO: 119296 - DNA, 30 bp, Homo sapiens; identical to SEQ ID NO: 7477
  chr10:89717657-89717687
  hyper

SEQ ID NO: 119297 - DNA, 298 bp, Homo sapiens
  chr10:90342572-90342870
  hyper
tagagcgcggggtactcctgccgggcccccaccctcgcccccaccctcgccccttcttgggccttttcccgggcggcggaagtccccgatcacgtgacgaggcgcgccactcggcgcatgggccgcgctacacggccgctcagggagctgagggtatagcgttttcgccttagactttcttgggtgcaggcccacaccacctcagcagcctgcccggcagtcctcttttcccaggttttggcgtttagacaacccacctgagtcctcagccttgtcccacacagcaaggtacaaggga

SEQ ID NO: 119298 - DNA, 103 bp, Homo sapiens; identical to SEQ ID NO: 7479
  chr10:90343138-90343241
  hyper

SEQ ID NO: 119299 - DNA, 175 bp, Homo sapiens
  chr10:90639669-90639844
  hyper
cagtgacagtttaacggtcagctgcatcaaggcttgtgtactgtgcagtcttaaaaggcaccactcctgtccatctcggtgaaattgatggtggagcaaaagggagtttaggtggttccggtctggggagaagacgtgcagggtttcagatgcgaaagtcgcacccaaccgcttc

SEQ ID NO: 119300 - DNA, 30 bp, Homo sapiens
  chr10:90734799-90734829
  hyper
ttctagcatgtagttcgtgctccatgcatt

SEQ ID NO: 119301 - DNA, 54 bp, Homo sapiens
  chr10:90735035-90735089
  hyper
gagataaatcagaggcggaagaaaccgtgtacagagcagcgtgtgcatttgaat

SEQ ID NO: 119302 - DNA, 157 bp, Homo sapiens
  chr10:90749777-90749934
  hyper
ggaaataatgagtaacgaaggacaggaagtaattgtgaatgtttaatatagctggggctatgcgatttggcttaagttgttagctttgttttcctcttgagaaataaaaactaaggggccctcccttttcagagccctatggcgcaacatctgtact

SEQ ID NO: 119303 - DNA, 80 bp, Homo sapiens
  chr10:90750153-90750233
  hyper
gaaagggcaggaggccggctctcgaggtcctcacctgaagtgagcatgccagccactgcaggaacgccccgggacaggaa

SEQ ID NO: 119304 - DNA, 184 bp, Homo sapiens
  chr10:90750729-90750913
  hyper
gggcgcgggacgcgtgcgggattgcggcggcagcggcgcacgcgggcacctgggagcggcgggctgctgcgggaggcgttggagactggctcccgggggctgttaggaccttccctcaggcccgggtgctcagaacgctggaggacttgcttttcttgggccttgatgcgaagtgctgaccccg

SEQ ID NO: 119305 - DNA, 30 bp, Homo sapiens
  chr10:90751254-90751284
  hyper
caccttttctttctcgaaaaagttatatgg

SEQ ID NO: 119306 - DNA, 30 bp, Homo sapiens; identical to SEQ ID NO: 47397
  chr10:90751519-90751549
  hyper

SEQ ID NO: 119307 - DNA, 1621 bp, Homo sapiens
  chr10:90966573-90968194
  hyper
accttgtggaaggtgcggtacagccagggcaccttgtggtgcagcaggtgccacacgaagaactccatgtcgaagagtagcaggcagaacaggatgtggtgcagcagcaggagcagctcgggagcttcgtggggcaggagggccgggctgcgggcccaatgcagcagcgtcacggggaacacaaacatcacatgctggtagagggtctgccccaggcaaggtagcagctgctgcgcggatggcgagaagtcagggtggatcttgtagcgccgcagggcgggcacccaggagcacaggatatccaggaccacgaagggcaggcaaaagcccacgtatgtggtgatggagaagatgaccgggaagaagggcgactgtaggagggcctcccagctcctcaggtggtcccagaggggctgcaggaacagctgcccggagctgcaaaggacctgggggtcggagcagttgtggcagctcattgcgaggctgtgcaaggcagctgaggctgctgctcgagtcccatcgacttttcacaggactcacggccccgccccgagtgatgtcagctgcctttccatccctttcccggcgatgcgaagcttgaataagctagcaacccggcagagtggcccttcattgctgtaaatgtgctcatctatagccgcatcttaccggcttttagatatgcgtgtatgcagtggcacttcgtacttttcatgtaagttctgatttttcagttgacgtacaattaacacgggacacaatgtacagatctaccgtgtggagtttctatgagtttggcaactcagttcacgtgtgtcatcacgggtctcaaactagaccgtttacattgccaccagaaagcgctcctttgcaatcaatgcagaattgtttgtgttttttaatgcatacgtataactgcatccatgtgctttcataaagacgcaagcataatcgcattttaaaaactgtttaaagctacatgcggtctgtagctcgggtgttttctgagaacccggttgcggtctatccagcggcgatcgagaaacgagccctttgcacagggaaccgctggtccccgaacgccggcggtgaccgtcagctcaggaaatcagacgggaagggtggccggatgggaacctccgccagctccagcttgtccccagagttttcctggccggcgggcagcaagctagagagaccacgcacgcaggctctccgggagaggccgcagcccggccgcgtagctaccctcggcggcgcgtcccggggcgccgggcccgcgatcggagccggaggcaccgcacagcggaaagagggctccgcggcggccaggctcagctttgccgggaaaatgctggatttaactcccagtctgcgccaatctggctaaaaagcccgttgtatctcaatttggggcgggaacacttaattcagcaaaccacctgcgttgttcgtcaagggaaagagatgtgagttcctgaagcctcccgggaggctattgaaggaccaggtgatgtcgtcactaccctacccttccccttgttggctttgcggggccaacttgcagtcgccctctgccaccggtccttgaatccactccgggcccacggagcccggctag

SEQ ID NO: 119308 - DNA, 30 bp, Homo sapiens
  chr10:91011168-91011198
  hyper
ccctgctgtcctcgcggtccaggagcactg

SEQ ID NO: 119309 - DNA, 30 bp, Homo sapiens; identical to SEQ ID NO: 47399
  chr10:91011603-91011633
  hyper

SEQ ID NO: 119310 - DNA, 30 bp, Homo sapiens
  chr10:91152107-91152137
  hyper
gaggacgtgaatctcgttccaaatgctggc

SEQ ID NO: 119311 - DNA, 30 bp, Homo sapiens; identical to SEQ ID NO: 47400
  chr10:91174294-91174324
  hyper

SEQ ID NO: 119312 - DNA, 30 bp, Homo sapiens
  chr10:91174652-91174682
  hyper
gccttttcaggggccgagcccctcgcgccc

SEQ ID NO: 119313 - DNA, 519 bp, Homo sapiens
  chr10:91294972-91295491
  hyper
aaaactcggccgcagcgcagacccaacccagacagggcaagtgagcacgtgtctccctcccaacccaagctgcgcgccgacgcacccaagttagggtcccaggctcccggcgcgggatgggcgctagggcagcggagaatggagggtccccgtcctcctccagctccaacgacagcgccagcgccccgccgtcccgccgcccttccttgaaggatgcccgtgtcacctgagccaccgcgccctctgcacaaccgtgtcagggagagggaagagggggagccgaggaagcttcttggccagggcgctggggatccgggagcgggggccgccggcgagactgagcccgggacagcccagagctccagcgctccagcgctctgcagcccgcccagagcgcgcagaccacccccatgccccgcccgccctcctgccacacccgcccccagcccggccccgccgcctcctcacctcgccgggaccactgcagccctggcggtagcgcgcggacatgcccccggg

SEQ ID NO: 119314 - DNA, 260 bp, Homo sapiens
  chr10:91295584-91295844
  hyper
cggaggcgccggcgaggctggggccgggggcctagctggcaacgccgggagagggaagcgtagcgcggaaaatcccagtgctcggccttcgaaatgcaccggctcattcagccccgccagctccgccggggactctgcctggccggcaaagaggatttagcgcggggatccgctctaagtactgtggcttggctaggggcgaggggcgcagcggaggagggacgtctcgcggttatgtaatgcaccggctttctgtgtcc

SEQ ID NO: 119315 - DNA, 251 bp, Homo sapiens
  chr10:91403630-91403881
  hyper
gaaataatgcacttcggctttctccggtgtacattacaattacaaaccctcaactcaacctcccccttcgttgaaaaaaaaaatccacctccaatcctcattggtccacatagttccggcccacatggtatcagtgggtgtgtccctcccaaaaaaccctctcattggccgtgaagaaacagcttctaataggctgtgattttggggggtagttaaactccacgcctccagacttgcgctctccaatagac

SEQ ID NO: 119316 - DNA, 30 bp, Homo sapiens
  chr10:91404674-91404704
  hyper
ggccccggctcaggcggcctcgctggaggt

SEQ ID NO: 119317 - DNA, 30 bp, Homo sapiens
  chr10:91405285-91405315
  hyper
agtgtgtgcttacgcgcgcgcgcgtgtgtg

SEQ ID NO: 119318 - DNA, 274 bp, Homo sapiens
  chr10:91461092-91461366
  hyper
gtcccagtcaacagcgtggtacttatgacagccgcgagaaagcgcactactaaagcccggctagcagagctgggaggcaaaccagaccgtcagcaccagggcggcccacgcctgcttccgcccattggctgcccgcgtttcaagacccgcccccatattggagagcttcttccggtagccactggaaagcccgcagcgcgagccggctacgctccctggcggagctctggacgccccacctactcccagcgttcagtgcggtgccctggccgcc

SEQ ID NO: 119319 - DNA, 11 bp, Homo sapiens
  chr10:92616983-92616994
  hyper
tccacttgccc

SEQ ID NO: 119320 - DNA, 1140 bp, Homo sapiens
  chr10:92617016-92618156
  hyper
cgaagggcatgaccgccacagccaccgagaggtcggccagcgccagggacacgatcaggtagttggagggctggcggagcttcttgacgaagcacacggagatcaccaccaggcagttgcccgcgatcgtcagcagcgtgatgagcgtcaggatggagccgatcacaactttctcgactctgccgtagttgatctgttccccacagccggaggcattgtccgggggcgcgtcccaggtgggcgccgggctggctgtcacctcgctcagcaggtgcggcgcccaggagcccgcgaccgggtcggcgccaccgtcggggctcaagtcgggcagcccgcgccccacttctggcagaaggaaagagcggaggtgcccgtagaggtccgggcggccgctgctgttaacgtccatcatcgcgccgccgtgtgccgctgcccatggagccggcgccccggccacgcgcctccggctgccggccccggggcttcacctcaccggttccgctccgcccggcccagccatggggcccgcgccgaccgctggggggcgcctggctctgtctcggagccccgcactccccggacccccggccgctgcgggtaacgcggcagcgcggcctcacggggactccctgcgggaggcgcttcggcccccgacggacgcctgggacgcgcggagtcgagggagctcgggctgggctccgctggcagctccacagttcgcagcagcagctcggctgcgccgagagcgcccgggcggcagcggcagaagttgcggagtgcgccccgcccctcgcgcccgccgccgccgccgccgccgccgccgctcccctgcggcagccgcgccgcgtccccgccgccgccgcctccggccgctgcccgctccctcgcgctcctgggacgggatacccgggctgggcaggcaccgccgcctctcccgcgcctccctactgtgagggggcggcgctgcacgcgcctcccgggatcccgggtcccctcgcccgggaagctgtccttgccgcatgatagatacttagaacccctccagccgaccccagcctccgcacactagtcagccacagttcagtgggggcatttttcttttgttaagaggcctaatgagccagcggatgtttgggctca

SEQ ID NO: 119321 - DNA, 220 bp, Homo sapiens
  chr10:92631511-92631731
  hyper
gaaccaaacattgtcgttcagaagaagacaaagagagattgaaatgaagctgttgatttcaacacacaaattctggtggtagatgaaagcaaagcaagtaagtttctccgaatccctagtcaactggaggtagagacggactgcgcaggttaactacagctcccagcatgcctgaggggcgggctcagcggctgcgcagactggcgcgcgcggacggtca

SEQ ID NO: 119322 - DNA, 178 bp, Homo sapiens; identical to SEQ ID NO: 47409
  chr10:92979924-92980102
  hyper

SEQ ID NO: 119323 - DNA, 30 bp, Homo sapiens
  chr10:92980612-92980642
  hyper
gggagctgcagggacgccagactcctcacc

SEQ ID NO: 119324 - DNA, 357 bp, Homo sapiens
  chr10:92980920-92981277
  hyper
gtcctgccggagaacgcagaaaagttcccccttgcccccgccccgtcattgcaagttcttgcttcccttaactgtcttggtcacagggctctgtgccttaggatcttagtaccaccccaggtcgggaccgtgcatttcctcttccagaggactttctcttactttggagtttcatggcaaacctgtgggaaaggcaaggcagttaatcccaacttatagaggaggaagccgagacccaggctcagatatgaaacggtttgctgaaggtcatacaggggtaagggccagaaccctgattccctgtcttttaattatgcttgctttctgttacacgcacgaatacggtttcccaagagg

SEQ ID NO: 119325 - DNA, 30 bp, Homo sapiens
  chr10:93169480-93169510
  hyper
gtctccccgggctgcgcaagctccgggccg

SEQ ID NO: 119326 - DNA, 50 bp, Homo sapiens; identical to SEQ ID NO: 47411
  chr10:93393013-93393063
  hyper

SEQ ID NO: 119327 - DNA, 34 bp, Homo sapiens
  chr10:93557956-93557990
  hyper
acaatatgcaggatcgttcggcttcagcagaacc

SEQ ID NO: 119328 - DNA, 30 bp, Homo sapiens; identical to SEQ ID NO: 47413
  chr10:93558646-93558676
  hyper

SEQ ID NO: 119329 - DNA, 709 bp, Homo sapiens; identical to SEQ ID NO: 7490
  chr10:93647031-93647740
  hyper

SEQ ID NO: 119330 - DNA, 67 bp, Homo sapiens
  chr10:93669232-93669299
  hyper
tccctgtgaatgaacgtggtatcaatggaacagaagaggcctacccttcttcgcccctccccgattt

SEQ ID NO: 119331 - DNA, 189 bp, Homo sapiens; identical to SEQ ID NO: 47416
  chr10:94000528-94000717
  hyper

SEQ ID NO: 119332 - DNA, 30 bp, Homo sapiens
  chr10:94051214-94051244
  hyper
ccactggggaaggccgtgtgcgccggctcc

SEQ ID NO: 119333 - DNA, 231 bp, Homo sapiens
  chr10:94051614-94051845
  hyper
gaagtgtttgtcagcgatgtcactggcaagaaccgggttatctttcaggggaatgacccccttataattttaagtctctgtctgagaaccaatgataagcattcttttggaaagcctgataggctgatttcattctcccactttccctgaacccgcaccccccgtcccccccgccccatcccgtccccacctccgaactgtaaggtcagagtatccgcaagggagatttaa

SEQ ID NO: 119334 - DNA, 160 bp, Homo sapiens
  chr10:94180506-94180666
  hyper
ctcagccccagatcccgggactcaggaggagctgggccgagctgcgggaggcgtggaagccccaggagagggttttgcactacgaaaaaaccatatgcaaattgcctgggaagagtttagattctgtggccaaactgcaagcggccgttgctaaaatggg

SEQ ID NO: 119335 - DNA, 30 bp, Homo sapiens
  chr10:94333571-94333601
  hyper
aggggcagcggtggcggctttaagtgctga

SEQ ID NO: 119336 - DNA, 320 bp, Homo sapiens
  chr10:94333922-94334242
  hyper
ggatggggccaggacgcaggcgaggacggtgaagaccgcggacagccgaggcctgagcaggcggactggagggacaggggtttggccggggcgctttaggagccagcacccagactttcccaggcggggagggtcccagctagatcccaccggccgcacttgtgagggtggcgacgtgtgtctgactgtgagggggcgaggggccgctcataaatccagtgagggcacacggggctatgttttctgaggcacccccactgactagcgtgccggaccctgcaggtgttggaacaaggttcgtggtcgcggcggcctcacgt

SEQ ID NO: 119337 - DNA, 30 bp, Homo sapiens; identical to SEQ ID NO: 47419
  chr10:94334451-94334481
  hyper

SEQ ID NO: 119338 - DNA, 30 bp, Homo sapiens
  chr10:94351361-94351391
  hyper
taccacacctacagcggtcgagtcacgcca

SEQ ID NO: 119339 - DNA, 84 bp, Homo sapiens
  chr10:94352685-94352769
  hyper
acactcaattctagcgtctcggctctggactaccaagttccggagcaagcagacagaccacctctttacgttcccgtaggccac

SEQ ID NO: 119340 - DNA, 30 bp, Homo sapiens; identical to SEQ ID NO: 7493
  chr10:94353316-94353346
  hyper

SEQ ID NO: 119341 - DNA, 142 bp, Homo sapiens
  chr10:94448826-94448968
  hyper
cgtgcaaaaccagagagccagactgcgcacagctgcgaccctcaagagccagcagaaaagacacggagcggcccccactggattgaagactgcacagcctctgcccggcgctgtaggacccgggcctccccttgattgctgc

SEQ ID NO: 119342 - DNA, 259 bp, Homo sapiens
  chr10:94449138-94449397
  hyper
cgctctgagctcgggaaacggccggtgtgacagccagcgccactgttaatccagggagcgcacccaccgaggaggcgtcttaggccagcggcctctgctcccgccgagtcccgctgctccccgcctggaaacagctgctgccaccccgggcccaggcctggacggcgcccccgaatttcggcagaggtgcctcggggccgcggacagggccgctggagcccgcactccagaaggcggtcttcctcgcgcctcccccgac

SEQ ID NO: 119343 - DNA, 364 bp, Homo sapiens; identical to SEQ ID NO: 47421
  chr10:94449797-94450161
  hyper

SEQ ID NO: 119344 - DNA, 1225 bp, Homo sapiens
  chr10:94450377-94451602
  hyper
ggggtggggctcccttagcgggagggacggggaaaggggcgtcgaggcgcccctggccggcccccgtggggcagggatcgcagccgggcccgggtggctacggggctggacctggttcaacaggcttgtgcagtgaaagagcctgaccctttccgttcatacaggaaatcttgagttctcgataggagtaaatctggtttcagaagctgttaagtgttttcctggctgcatgaagcagacccttcccccggagtagtgcacgctgctgattattttatcgacatcctcaatacagacaaattcaggaaacactcgacttctgatagccgggatccgtttttctgatattgttcatttcctctgtgtgggatgtgactttatggcagctaaaataaccagttgcttcctattttttttcgaggctgttttgcaccagtctgaagcctgacgcaagcaaaatctcgaaaaaacaatgctagctttcaaagcgttgaggtgcaggcctgcagacggacggacggaccgaccgacactactttgggagtaggaagcagcagctcctggtcgccagttaggaagggaagcagggacacatagggcatatattccagaacttcggggcttgtcccctcaatgtgcggcctaacaaataagccgcccgtggtccgcgctgtgggtgacccttggcgccttcgaggtctggagccctagggtaaataaggaaacggggcgcctctagagttttaaatgaactctgttattggaagcttcagtagggaccctgaaaacaattaacgtcttaattagcattttaatgtctccattattacggcgcgggctctagctcagccctttaccttaccttctcaccgttaacaggggagggggattgtatttttagttcatctttttatgtttttgagttgttatcctgtctgtctgattccagcctcgagggtttgatgatgcggcccgagcctggctgtggtcgcctgtcggggctggagcgggaccctcagccgggccgggcctgggggctaacgttttcacagtgcgccctgagtttccttgggttactgctgggaccgcgcaggaggaagcaaagagtttttcgagctagaccaacaggaaacacattgacggaaatgttgccatagcccatggggtggctttaactggccgcccccgcgggctgggtgtgaaatcagaggaggccgcggctccc

SEQ ID NO: 119345 - DNA, 30 bp, Homo sapiens
  chr10:94451976-94452006
  hyper
gttaggtccacgtgccggtgggtgtatgtg

SEQ ID NO: 119346 - DNA, 30 bp, Homo sapiens
  chr10:94452252-94452282
  hyper
ccgcccgagaggaagcgtctggccaagatg

SEQ ID NO: 119347 - DNA, 30 bp, Homo sapiens
  chr10:94459301-94459331
  hyper
ggagcgtggctcccccgagaggaggcggcg

SEQ ID NO: 119348 - DNA, 156 bp, Homo sapiens
  chr10:94459541-94459697
  hyper
tttggagcatccggccgtcgccgcgagcggccgaacactttcctgcgtcgctgctttaaaaaaaaaaaaaaaaaaaagtcactgccaatatcaggcgactttccacatgaaagccaatgaggccgcttcccacttaaaaaacgtttgtttaaaacg

SEQ ID NO: 119349 - DNA, 394 bp, Homo sapiens
  chr10:94607698-94608092
  hyper
gtggacttcttgcaggcggggacatgaatccacctggagcggtcttcatggtcaactgggatctttattcgttcctaaaataaatcttactatcacatgcaattttgcttttcgtgagtgcatgttttcctttctctgactccccacgacccagagtacatcaggcccttgttaaatgtccccgtggctcttattacagattcagggtgatgatctgagtgtccaccttgctgattactacggtacccccgcgtgtggcacagggtgtggcacacacagaagacaaggagatatgttaaagcccaaaggccaggcacaagacgcccaggagggactagtcgcgagagagggcaggaggccagctgggtacccggccgccgcccgtagccccagc

SEQ ID NO: 119350 - DNA, 30 bp, Homo sapiens; identical to SEQ ID NO: 7497
  chr10:94609021-94609051
  hyper

SEQ ID NO: 119351 - DNA, 111 bp, Homo sapiens
  chr10:94828013-94828124
  hyper
agttcagggcccccccgtttccaggtgcctcgtggtcaggctgatctcctcgcctctctgcagggctaccagatccccaagggctggagcgtgatgtatagcatccgggac

SEQ ID NO: 119352 - DNA, 572 bp, Homo sapiens
  chr10:94828193-94828765
  hyper
cgcgaagattcccggggcgcctccagccgcttccattacatcccgttcggcggcggtgcgcgcagctgcctcggccaggagctggcgcaagccgtgctccagctgctagctgtggagctagtgcgcaccgcgcgctgggaactggccacacccgccttccccgccatgcagacggtgcccatcgtgcacccagtggacgggctgcggctctttttccaccccctcacgccttcggttgcggggaatgggctatgcctctgacatgcttgcgctctaggacacggcttggccggtggctatggcgcgcacgcagcgccacccatctgccgctccccattgtagcgtcgcgcgcccactctttcactcgttcaacaatctttcaacaaatgttcgccaaacgcggatgtgtgccggactcgaggaaggaggagggcgagccaccgctgccgcgccagagaagcatctaagcccatgggaagatgccttctgcgctccgcgcccagaggaaggaaaatgtcgtgggccaagcaggaatggagggaatagatagatccccacgaggtgctgcttgg

SEQ ID NO: 119353 - DNA, 553 bp, Homo sapiens
  chr10:94831376-94831929
  hyper
cccacgaaagcttggcgagattcctagatcaaagttcctattggcctggtaatttattgaccccccaccccccgccctgcccccctacaagatgttctttaatgatcgttcactctcacatttaatcctttcctgccggacgcccccgccggcctcgatgtacagatagattaaaacgtttttttccctgcggcaatttccagcgtgcaggccccgctcatcttgtgacccggcttgagctgaacttggcgaggtggccccgcagagttcactcggatgtcacggtccggcctgcaggggtcacaggcgggtcaggcccgaggattgggaatgggccccaggtcacgtccccattcgtcggctttgcacaccggccggaggcgctgtccagaaaggggcggacccgggatttctgagaattacctccagcgcgattggcctggcttcctgcagtggccagaggttggttcgccgtgtttacagccaccaaatcgtttgccggagactgaaaccctgcccagagcctctgaaacactgggcaggttatggggaa

SEQ ID NO: 119354 - DNA, 864 bp, Homo sapiens
  chr10:94831980-94832844
  hyper
cgctaggattgtgcgggtccctccgacctctgcagatatttcctgatacctccgggtttggggactaccgcgagaagggcaacgcatttaaactctcaggagcagagttttccacctccaagggacgccttccaaggcgtgcggcgtgcttctgccagagacagtgttcagttttaaacaaatgcaggtcattctgtttcattttcggcgccgcaggtgcgttcagcgcccaaacccaggtagcgtgtgaccctgactggtcccgagccgggaagctccggcaggtggagagcagagagagcaggtgcgcgtcccgcagcgtctgagctccgggcattggcagctcagtagcagctgattgtagatgggcaaagtacagaagacttcccagtacggatcccttcacccctcccattaggggtcggtagagccctgagtttagggccgagcaccccctcacctggatgaggacagtggctttactctgggtgggacttgggagagaggaggaggactccagtgcccggtgtaccggacacccaggtaacgcagtctaccgtgcctggagctgggaagagtagttgcaaccggagcccccttttgggaactcactaccctgaggcttagacaggtcgggaatgatcgcctcccggttaaggaggaggaaacaggcacagtgatgtgtggtgacttgcccaaggtcacacgcagtacagatggagccgggcctcggagccaggactcctgggctccccttcctcttataccgtctctttatcctgccagggctaaggacccccttccctgctgtccagctggggcgccaagcagcagggccctccgaataggcgagctgtgcttgga

SEQ ID NO: 119355 - DNA, 1946 bp, Homo sapiens
  chr10:94833093-94835039
  hyper
cgatccttcggagacgtctggaggcctgctttatgcatctctcttggacctcagtttccccacacgtgggaggaggcagctggacgattcctgaaaggactttcccttgcttcctcatcacgtggaagagagcccacccggcacctggaaatggaaagccagtgaaggctgctttgggccggggcagcgggtgggaccgggcgggagggattccaaagagaccgccgggaaggctagagcttggaattccggctcctcggagtcctggccctcccccaccgccgcctcggagctcagcacaccttggatgggggaggcgggcagctcctagccccgcaccccaggaggcgcgctcggagggaagccgccaccgcgccgcctctgcctcggcgcggaacaaacggttaaagattttgggcagcgcctcgcggggggaggagccaggggcccaatccgcaattaaagatgaactttgggtgaactaattgtctgaccaaggtaacgtgggcagcaacctgggccgcctataaagcggcagcgccgtggggtttgaagcgctggcggcggcggcaggtggcgcgggaggtcgcggcgcgccatggggctcccggcgctgctggccagtgcgctctgcaccttcgtgctgccgctgctgctcttcctggctgcgatcaagctctgggacctgtactgcgtgagcggccgcgaccgcagttgtgccctcccattgccccccgggactatgggcttccccttctttggggaaaccttgcagatggtactgcaggtaagggagggtggggcgggacaggctgcttccccggagcccggcgcggctctgggcttctgctgaagtcggggtaggcgcccccgggaggcatgctattgcggctaggagcagggctggcgggagcgcggcgctccccggcgccccctcatgcccacttctctcctccgccttcctcccacagcggaggaagttcctgcagatgaagcgcaggaaatacggcttcatctacaagacgcatctgttcgggcggcccaccgtacgggtgatgggcgcggacaatgtgcggcgcatcttgctcggagagcaccggctggtgtcggtccactggccagcgtcggtgcgcaccattctgggatctggctgcctctctaacctgcacgactcctcgcacaagcagcgcaagaaggtgggggcaggaggcgacggctggacagggagggggaccccatttatgagcggaattccggctgatggatgctaggcgcgggctagcagcttgaggtgggctaggaccctctgccagctccaggttagctttcccagctcggagagtgccatgtgtctggcaggactgggggtgtctggaaggggacggcggtagacgagaggggcggatggaggcttttaacgctgtcccctcctcgggactcaggtgattatgcgggccttcagccgcgaggcactcgaatgctacgtgccggtgatcaccgaggaagtgggcagcagcctggagcagtggctgagctgcggcgagcgcggcctcctggtctaccccgaggtgaagcgcctcatgttccgaatcgccatgcgcatcctactgggctgcgaaccccaactggcgggcgacggggactccgagcagcagcttgtggaggccttcgaggaaatgacccgcaatctcttctcgctgcccatcgacgtgcccttcagcgggctgtaccgggtaagggcggcaaacgggctgcggactaggggcgcgggacctgggcgtctgctcaccgccgcgcgctctctgcgctcagggcatgaaggcgcggaacctcattcacgcgcgcatcgagcagaacattcgcgccaagatctgcgggctgcgggcatccgaggcgggccagggctgcaaagacgcgctgcagctgttgatcgagcactcgtggga

SEQ ID NO: 119356 - DNA, 206 bp, Homo sapiens
  chr10:95242141-95242347
  hyper
taccgaactccccgcgtctacgcagtgccgcaggcacagacttatgaattcgggaaatgtggaagtgaaaaggacaaaccctaaactaaaaataattccgtgcgacaaatgaaaccaacatgaatttggagctaagaaatacgggtaggtcaggaaaccactaaaatgttgctgccttttagcaatggttcgtgaaactgaattaa

SEQ ID NO: 119357 - DNA, 30 bp, Homo sapiens
  chr10:95256119-95256149
  hyper
tttaggtctaagcccgcagagaacccccga

SEQ ID NO: 119358 - DNA, 900 bp, Homo sapiens
  chr10:95326152-95327052
  hyper
aggccctgcgggggctcgaggaattcgctaagtgagttttctggcttctggatacactttcaaagggccagagggcacgaggcttccgccttggccgccacctccccggccagctgcggtgttcgcggccagtgttgccgggcacttcctggttcccgcgcgccccgggtgcagctccctgcacccagtgctggcgctcctcagaagggagggggccagaggcgagatgtcgcaaccgcctccctccctctttccccgccttggcactcagtcgcctcccagatgagcactctctcagaccgctgcgggccgccaggcgccgggaatgtcccctgaatgcgcgcgggcagcgggcgacgcgcccttgcgcagcctggagcaagccaaccgcacccgctttcccttcttctccgacgtcaagggcgaccaccggctggtgctggccgcggtggagacaaccgtgctggtgctcatctttgcagtgtcgctgctgggcaacgtgtgcgccctggtgctggtggcgcgccgacgacgccgcggcgcgactgcctgcctggtactcaacctcttctgcgcggacctgctcttcatcagcgctatccctctggtgctggccgtgcgctggactgaggcctggctgctgggccccgttgcctgccacctgctcttctacgtgatgaccctgagcggcagcgtcaccatcctcacgctggccgcggtcagcctggagcgcatggtgtgcatcgtgcacctgcagcgcggcgtgcggggtcctgggcggcgggcgcgggcagtgctgctggcgctcatctggggctattcggcggtcgccgctctgcctctctgcgtcttcttccgagtcgtcccgcaacggctccccggcgccgaccaggtgagcgc

SEQ ID NO: 119359 - DNA, 827 bp, Homo sapiens
  chr10:95360574-95361401
  hyper
acagcaggggtttggcgtccgggggcgcacggcgggccgcggggagggcggggatggggtggggacctgggccgcctgggccccctgggccgatacctacgcgagccttgtcgaagttctccttgactcggaagctgctcactcggcagtcgcgctccgcgcggccgctgcccagcgccgccaacagcaagagcgcccacacccacttcatcttgcccaggaatccgccctgcgggagacgcgcctccgtcagtgcccggcagccgacccccgccgccgtatcccacctcaccccaccccaccccaccccggcccatcccgccgccggccccgaggccccggccgcgactcaccaccgggaggggaaccgcgcgcaagcctggccgccgagtccgggcgcgcgtggagcgagggaggcgagcgcgccgcggccgccccgctgctttatagcgccggggggagggggtcgcgctttcgtaaccgcgcggggtgaaagaccgaaggggaggcgccgggggcacttgcataacgcgccctgactcaccggagcccgggcacgggcagggtccctgtgggccggcctcacctccaggacagcctcgggcacagtggagcggccgcgcggggtggcctcggccaggccaaatgcgccagcggccctggctcagttaccctgcactcgtgccagcggccgccagctgcggtctagggtggcctccggggccagtggctctggcaggaggctcgagtcaacctggcgggaagaccgtggcctcacagagcgagagcggacccgcgaggctccctggtgcgtgagtgcccaggcc

SEQ ID NO: 119360 - DNA, 30 bp, Homo sapiens
  chr10:95462152-95462182
  hyper
gccaagttcgcccccggagtcgtcgtttcc

SEQ ID NO: 119361 - DNA, 30 bp, Homo sapiens
  chr10:95653555-95653585
  hyper
agcagagggttggacgccttagagccagct

SEQ ID NO: 119362 - DNA, 30 bp, Homo sapiens
  chr10:95653927-95653957
  hyper
gctctgcctttcctcgccgtgttgctcccg

SEQ ID NO: 119363 - DNA, 914 bp, Homo sapiens
  chr10:95753357-95754271
  hyper
ggtgtgcagagttcccgcccttcccggagccgggcgccccaggagcgctctctctggctcccgccagaaaggatggctcctaggggtcagggccaggggtctgggaaggggtcgcgccgccagcagccagctccgggggaggcggccgggtcctcgctccgcgcccgccttccccgcgcggcaggagccgggggcgggcccggcacaggccgctcccccgcccggccgcccgcggtggcgctagcggcctctcacccggggcgggcgagttctgggaaagcccggcccagggcgggggccccgctgccgcccgcgcagccgccgctgtccgggcagcgcgcacatctcggcgggagcggactgtgaacggcgcgggtccacacggtaacgctgggcaacgtgggcaacgcggcgggcggcgggctcgcgcggcgggaggggcagcggcggcgcgcccgggctctacctcccgggctctgcctcccgggctctgcctctcgggcacttgcctggctcctgcgcgttcctgggcatcggctctgcagctgacacacagtagcggggacacccgacgccgctagcgacaggcgcgcggacggctggtcccagagggacgctgcgcttggggacgccggcgagactcgccaggagccaagaggtgaggaagcgactctgtagctcggttcctgaggactggagaaagggaaggatgggctggttctctcccaaggcagtcgacccgcctaagggagcagcccgactccgcgtacctggcggaaaagtgtcctcgcgctcccgggggacccgaggcgggcggtcctccagggcatgcaggccgccctcgcaggggctaaaggacaccctgccagtgccttcactccagacgcctgcctcaggtcgccccttcgtgttgt

SEQ ID NO: 119364 - DNA, 30 bp, Homo sapiens; identical to SEQ ID NO: 47436
  chr10:96066325-96066355
  hyper

SEQ ID NO: 119365 - DNA, 152 bp, Homo sapiens
  chr10:96122664-96122816
  hyper
aatgacacacgtgccgaagtccctacactaccagagccggaaacggccttcagtccctcccaatcctccgccgccggaagtgagggcgggacttccgtagacaggttcgggctcgcgccctctcgcggtgactgtctcgcggccctggaccg

SEQ ID NO: 119366 - DNA, 1667 bp, Homo sapiens
  chr10:96161936-96163603
  hyper
tggaaggacttacccacgctaacacctcccaaatatgggagtattttactaccataaatgaaatacatcaagtgaatttttgctaagcgagcaatacccgcgcttcggtaagaactgtcacgcttagagcgggccaaccagcttccaccatccagatggcggatcctagattggcagcctgcgtctctctagctaccgtctctatggttcggggaatctccaggtcggggcttgaccggtccgacttttgcgcgtgcgcgagtcctggcgcgtgcccgccctcaagcaactgtccgacccagcgggtgggaggggtgggtctgggaacgttgcggcggctgtcgccgcggccccagcacccagagctgttctctggccaagcctgcgcctgtagtccttctttgcctcctggggcggccgccacccacccccagatggtgggtccggaggatgccggagcctgctcgggaagaaaccccaagttgctcccggtgcctgcgccggaccccgtgggccaggacaggaaggtaatccgggccacgggcggctttggcggaggcgtcggcgctgtggagccgccggaggaggctgacgaggaggaggaggctgacgaggaggaggagacgccgcctcggcagctccttcagcgttacctcgcggcggccggggagcagctggagccggggctctgctactgtccgctccccgctggccaggccggcgccccgccgccctcggcagccccacgatcggacgcctgcctgctgggctcgggctccaaacaccgcggcgcggaggtggctgatggccgcgcgccgcggcacgaaggcatgaccaacggcgactcgggttttctgccgggccgggactgtcgcgatctggaagaggctcgcgggctggcgcgcgccggcggccgggagtcgcgccgccgccgcccctacggccgccttcgcctggaggggcctggcgacgaggacgcggacggcgcgggaagcccgtccgattgggcctctccgcttgaggacccgctgcggagctgctgcctggtggccgcggacgcccaggagcccgagggcgcgggcagcgactcgggggacagccccgccagcagctgcagcagtagcgaggactcagagcagcggggagtcggcgccgggggtcccgaggagggcgcgccccctgccacctcggccgagaggactaatgggggtgcggagccgcgcctgggcttttctgacattcacttcaactctcgcaacacgttccaggtgagccgcggtcagagcgcccgcgatcacctgcccccggcggggccgccggtgcccttgcccgccgcggagcagggtcctgcgggggcttcggcccgggctcgacggagtggcggcttcgcggacttcttcaccaggtacagcgcaggctgcatgggactcggggcgggtccggggccggggccggagccggggtcttggtgggagtcggagccggagccggagccggagcggagagcttggtcggccgcttccgtgccagccccacacgcgtcaggacttagctttgatttgtcactggaggaagaggaactgggtcggctttgtgtttctataggagaagttgtgagctctgtggacagcgagtctttctgttgccttgtccgcgggaggctgtac

SEQ ID NO: 119367 - DNA, 30 bp, Homo sapiens
  chr10:96306122-96306152
  hyper
tcccccgtcaggctcggaggctccagcaat

SEQ ID NO: 119368 - DNA, 60 bp, Homo sapiens
  chr10:97050342-97050402
  hyper
tggcggacacggagcgcgcccgcggcgggccgaccagcccgggagcgcagcctccgcgaa

SEQ ID NO: 119369 - DNA, 220 bp, Homo sapiens
  chr10:97051015-97051235
  hyper
tcctgtacgcacggccgcaccgcggctctcgggcccggggcgggtgctaggtgagagggaagcaggtcctgacagcgagacaaactcgcgcctcgtgctttgtaaaacgagaaatttgaagtgctgtgccaagtcagccctctgaggtcggctccgacttcccatttgctttttgtaatcggtaatgatgtttaaaaggtgctttcgaacgatctcattt

SEQ ID NO: 119370 - DNA, 268 bp, Homo sapiens; identical to SEQ ID NO: 7508
  chr10:97055028-97055296
  hyper

SEQ ID NO: 119371 - DNA, 30 bp, Homo sapiens; identical to SEQ ID NO: 7509
  chr10:97208010-97208040
  hyper

SEQ ID NO: 119372 - DNA, 192 bp, Homo sapiens
  chr10:97321200-97321392
  hyper
tgggctgcggtgcccgccccctcattagcatgcctctggaaccgtccactctggcagcgcccggccagcgggcggtgccgggggcggggccgggcccagccgtgacaggaaggggcgtgtgcgcggatgggaggcgaagaagtgtccggcgcccggctcctggcattgtgagcccgccggcctccgccggta

SEQ ID NO: 119373 - DNA, 145 bp, Homo sapiens
  chr10:97416707-97416852
  hyper
agacaccttcgaaacgccgccccactgggccttccagggaggtagaagaggtgcctggcaccctcagctgctggtagatttcataaggtgtgtttgtcaatgttaaccatttatatcccgggcacacctcggaaataggttggat

SEQ ID NO: 119374 - DNA, 30 bp, Homo sapiens
  chr10:97453230-97453260
  hyper
agactatgaaagtacgacacagagtgagtg

SEQ ID NO: 119375 - DNA, 30 bp, Homo sapiens; identical to SEQ ID NO: 7511
  chr10:97659562-97659592
  hyper

SEQ ID NO: 119376 - DNA, 30 bp, Homo sapiens; identical to SEQ ID NO: 7512
  chr10:97667063-97667093
  hyper

SEQ ID NO: 119377 - DNA, 30 bp, Homo sapiens
  chr10:97667579-97667609
  hyper
gcgaacagacttggcgcaccgaagattccc

SEQ ID NO: 119378 - DNA, 1215 bp, Homo sapiens
  chr10:97802912-97804127
  hyper
gtgaagacttttaaacgccaaactgaggcgtcggaactttgctccgcgggcatcgaggagccatcgaaggttctcagcaggtgagtggcctaactggattggtcactgcagtgatccaccttacaatttctccggcgctctctgccgacctcagccggcgatcaggccggcttcgcagtaggtggcggctgagcgccccggcaaccgaagcgccaggccagcccaggccacgccgcgccgtgcgggatgctgaccgtacccaggcgggagccgccgcgccgccgcctggcgctgcacctgggcccggcccggccgccaattggacggctcggggcgaccccgctgtatcgcgagacgagattggcagcggcggggcctcaagtgcccccgcgctggctttgtatgcggagccgcctgccggtcctttaacaatgggcggcgcgagcgtccaggcgctgggctctagctgaggccggcgcttagcggcccactgtccgcagcatgagcggggccggcgtccgccgcacgacggcggggctggggctgtgagggccgcggttccgggtaagggagccagcgtggggccgggcggcccggcaggcctggggtaggcgtggggcagcggaccctcccggggtgaggcgcagagcctggctggcccggccttttgttcccctttctgaggccgcgcggaacgtgcgtttctcggggctcccggggaggagcaggctcccgacgtccatgcggagacccgcggccaggcagacgctcacccccgggctttgccatgggagcgtttcccctcagcggggctatgagcgtgtcacctctccccgctcctcagggagggcgggagaactccagccccggacgcagggagccccagccgggcctcccccagctcttcccgagctcgcacctggctccgcgctttggcaactcagggcccgagtggatccccttttgcccgacacatagtcgagcagtgagtctcagagtccttcggctcttcctgcgggggcagacccggcttcgcgtgtggcgttgggggaaacgactcgggtcgggctgggttgaggaagagtcaagtgaagatgagcagccacaccgggtggcctgaggtcacaccccccggggagggggcgcagagggtcgcgggggagccggcagtgaccgcgcctggggtgtgtcttacagactcgagttgccgcgtcg

SEQ ID NO: 119379 - DNA, 105 bp, Homo sapiens
  chr10:98135070-98135175
  hyper
atggtagcgaaaagcgcgcaatcaatatagccaccatccgtttcccaagggaacgccttttggaaactaccacgtgagtctgtgagcctcgggcaaacgcttccc

SEQ ID NO: 119380 - DNA, 1084 bp, Homo sapiens
  chr10:98272407-98273491
  hyper
cctgggagcgtgagcgtgagcacccctctgtccgtgctggaactgccccacactcatcagcttgctggaacatgcgcttggcccttcggaggctaacgcttcaacgactccagctcggaagccgctcccctcaggactcacgagccgatcagtggccccgaggaagcgggagctgcagcgcccgggcggcgattgcgcccgaaaggcccgtacgtcctggggcgccgcttcctggagggattagagcacctgccggcttccatctccgcccgcccagagcgaccctcaggccggtaccgctacagggaagtttccggctattcgagtcttgctcattctccctcggcgacccctttccttttgcccgctgtgacgcttttctttttaaaatctcccaagagtaaccacagatcttgggaaactttgcgcgaaacttaaaaatgctgtgaaatcggagccaggaactccatctgagcctcggagcgccgcgcccagtccagctcttctgctccggcccggagcgtctggcggtggccagtgctgcccactcgctgtcaggcggccctggcacccaccccggcccctgggcgccctctcggcctctggcacccgctctgattcgctttgggaacgcgccagctgtcgccccccggtgcgcaccgcaaacctggggccgggacatcccagcctcggagtggtttttaagcaattcctcggaggcattgtcttccgggggagccggggatctcaggggaggggaggggagacccgccccatagacggtagtgcaggcttgcccaccacctcatttgcatttcaaaggcaaacttctgcgggacttccccagcggcggcacctaccggctttgcaagggtcgtggtaatgctccagctgctgctccgtgccctcctcgccgtccagctctgagtagtctgcggtggcgtccgggcgctccccgagtcccccggcgccgcgaggcagcggcagcagcagcagcagtgacaccagggccccaagtgcagtcgcccggggcatggtggcgcggggccggctggggcagagggagttgcgtgcacgaaagctc

SEQ ID NO: 119381 - DNA, 38 bp, Homo sapiens
  chr10:98273888-98273926
  hyper
cacccagcctaaggcgcctgcccggggcgccacctcgg

SEQ ID NO: 119382 - DNA, 32 bp, Homo sapiens
  chr10:98347033-98347065
  hyper
agccgcctccgggccgcgtcccggtgtttcgg

SEQ ID NO: 119383 - DNA, 762 bp, Homo sapiens
  chr10:98479727-98480489
  hyper
ccccctgtgggtccacggagcccaggagacgcgtttggccctgtagaccatccacatcgcccgccctccgcttctctcaactcgcctctcgcttcagagtcggagggacaggggaagcgacgctcagacactcctagggccagaggtggagggagcgaaggagaccctgaagaagtgggagggggtcgggccaggcaggggctgaagagaatcgcgccacaggctgggacgggaaacgtgggaaagttggagtgggaagtttgcgacagggaacatagaaaagagcagaaagagggcaagatccccgcacagaggacgcaaacagaagcaagcgggggagcgcgcctcaagggatgcggggtacgagagaggggccgggagcccggggacccgcggcgcctgcctacccacctgaggctgccatgccgcggggcgccgctcacatccctggctcgctgcgtgcccggggccgggaccggggccggcggcgtcctggctcgggctggaggggcgccgggctccgcgcgggaccggccgccgctctggcgcttcctccctcagggcagcccggcctcgccacgagggcgtgtccacagagtccgccccgcctgcgggactcggcccgcggcacctgcacccgcggccgttggggaggggaagtgagaaccccatgccggccgccggccagctccccccacggccccctgctcaggggcagcgagaaggcgggggcttcgcgccacgtgcgccccactcctcggg

SEQ ID NO: 119384 - DNA, 30 bp, Homo sapiens; identical to SEQ ID NO: 47451
  chr10:98592089-98592119
  hyper

SEQ ID NO: 119385 - DNA, 229 bp, Homo sapiens
  chr10:98593369-98593598
  hyper
tgccctctcgtcgtccgctgtcccccacgcccagtcctcggggaggcccagaattccagccccttctcccccaggggaatattcttgggaaccaggtctttcccggcagaatctaggagagtctatccgttcgcttgggcccctcattccctccttcccgacagggtttcgttggaaggaattatgcaaatcctgctttctggtgtccattcagcggcaatttcatgcg

SEQ ID NO: 119386 - DNA, 48 bp, Homo sapiens; identical to SEQ ID NO: 47453
  chr10:98841572-98841620
  hyper

SEQ ID NO: 119387 - DNA, 30 bp, Homo sapiens
  chr10:98856133-98856163
  hyper
gagcccccccgccagcgccctgttccctca

SEQ ID NO: 119388 - DNA, 1001 bp, Homo sapiens
  chr10:98945009-98946010
  hyper
ggaagctgacaaccccgccgagggccctttgaatcccagggatggggaaaccacggcgctcctggctcctggctcgggaaagaccccggcaggcactgacccgtctgtgggctgcggagcccggacgggccccaatggtcctgcccccacccccaagtccggaattgcgtctgggtgggagggcaacctcggagccagggagccaggggcggggaccatactcacaggcgctcggtgttccgaggtatattcttgggaatggcctgcagccccgtgccgtggcagtccaccgtggttccggtgcaggtgcagagggcggggcacgccgaggcacccaggcgccacgcggctgcccacagcagcagccagagctccggccggaccggccccgccgaggacccccacccgggagtcagcgccatggtgccctcacagcgtcccgctcgcgagccagacggcagcagccgctgaccatccccgtccggggccgcctccaggtgcagtcccggggcagagccaccgaagagcccgcgggcttgcgcgcggcgcccctgcgggctgggaggcaccttgctcctccaagcgacggcgcctgtgcgcggacggagggagggcgccttgggcggagggggctcggctcctctgccgtttcgccgcctgcgtctccctctccctccctccagctcccaactgactgctgcgaggaggaaaatgggcaggccccgcgcgcgcacgcaccctgcgcacacaccacacacacacacacgatcacacacacacccgcgcgctcgctcccacccggcagtcatccatcaatcgaaaagcacacatccagggccaggctcctccccgccctcccccgccgcagcccccctctcccgacgaccactcagcggctgcaagccgcctacagtttcaaaggtggaacctccgaggcgccgtcagcgggcacggggctgcgggggatgggagaagagggaagggggtgtgactcgacccgc

SEQ ID NO: 119389 - DNA, 76 bp, Homo sapiens
  chr10:98946094-98946170
  hyper
cgcaccccggcacccgcggccccagctgctagtccagggtgggagggagatcttattttgccgcttggacgccttc

SEQ ID NO: 119390 - DNA, 13 bp, Homo sapiens
  chr10:98956253-98956266
  hyper
aacgggaatgggg

SEQ ID NO: 119391 - DNA, 94 bp, Homo sapiens
  chr10:98956313-98956407
  hyper
cgcacccagggaagctctgggtttgtccactctgaggcctgtccagttgtccaaccaccctgtcctcagcgtcgtttggcggggacagatgcat

SEQ ID NO: 119392 - DNA, 23 bp, Homo sapiens
  chr10:99042885-99042908
  hyper
cacccgcccggctgttactatgt

SEQ ID NO: 119393 - DNA, 30 bp, Homo sapiens; identical to SEQ ID NO: 47457
  chr10:99051960-99051990
  hyper

SEQ ID NO: 119394 - DNA, 215 bp, Homo sapiens
  chr10:99052453-99052668
  hyper
gttttcacctcttccgtgcgattggatgactcgaccgcccctcctcaacctgaaccgtttaatatattattggtctattcaaatgactaaccgtcattggtcgttcccagccctggcggaaaaagagggaggggcggggaagaagacccagccccgaggcctgccgggagttgtagtttctcattttgatgaacccttccgattccacagacctt

SEQ ID NO: 119395 - DNA, 30 bp, Homo sapiens
  chr10:99078835-99078865
  hyper
tcaggtccccagggcgcccttgcagacagc

SEQ ID NO: 119396 - DNA, 272 bp, Homo sapiens
  chr10:99080167-99080439
  hyper
ctaatgacgaggaaccgaaaaatcgcgagtgtttcgcgggtaactggggttgagggccaaaatatttggaatgaaggactttggccctatttaaggcagattttacagagcgcacctcaaacgtacaagtcagtaggactccttatttggcgtgacccgacctggccgcggagcctgcatttcctcgcagcctctcagtgccctccagccccgcgaccatgtggccacaatccacgcttctccggatcgcggtgcgccggaaccacggagga

SEQ ID NO: 119397 - DNA, 254 bp, Homo sapiens
  chr10:99080676-99080930
  hyper
tgggggaaggctgtacgacacgggtggggaaaggaggtgggggcggggagtattgaatggtggtggaagggtagagaggcgcggagtgaaccccacgccctgtctaaagtgtattttcagagccggcccgcctctcctcggttcaaggtcactgtttcctgggcacgcactgggttgcgggacagagtagccaggttctgccggtgctcggagaagagcgcagtgttttgcaagtgctggagtctcctgaggac

SEQ ID NO: 119398 - DNA, 99 bp, Homo sapiens
  chr10:99080989-99081088
  hyper
cggtaggcgaccaccgcccctggccgcgctccgggctttcacggaaactcccgagaccgggccctgggttcctcctctcctactcggctctgcagtcct

SEQ ID NO: 119399 - DNA, 35 bp, Homo sapiens; identical to SEQ ID NO: 47462
  chr10:99093444-99093479
  hyper

SEQ ID NO: 119400 - DNA, 50 bp, Homo sapiens
  chr10:99185971-99186021
  hyper
gagcggtgcgagcgcgcaggcgcggccgacggggcgggctgctactccgg

SEQ ID NO: 119401 - DNA, 30 bp, Homo sapiens
  chr10:99206179-99206209
  hyper
ccttgtcttgagtgcgggttcctgctctct

SEQ ID NO: 119402 - DNA, 30 bp, Homo sapiens; identical to SEQ ID NO: 47464
  chr10:99258003-99258033
  hyper

SEQ ID NO: 119403 - DNA, 229 bp, Homo sapiens
  chr10:99258428-99258657
  hyper
ggtggggagaggggcggtacgcaccacgggggaagccaatgagaaaatcaggcccagccctagggggcggtgctgtcggtcacatgcgcacctggggcgggtggtggcggcggcgcgggcaccgcgagccggcggaagggagaggggccggcctggggcggggttaggcaggtgagtgacaggctccagggggccggcccctgcctggtgccccgagcgagccgggagt

SEQ ID NO: 119404 - DNA, 30 bp, Homo sapiens; identical to SEQ ID NO: 47466
  chr10:99258970-99259000
  hyper

SEQ ID NO: 119405 - DNA, 337 bp, Homo sapiens; identical to SEQ ID NO: 47467
  chr10:99259372-99259709
  hyper

SEQ ID NO: 119406 - DNA, 30 bp, Homo sapiens; identical to SEQ ID NO: 47468
  chr10:99392748-99392778
  hyper

SEQ ID NO: 119407 - DNA, 30 bp, Homo sapiens
  chr10:99393359-99393389
  hyper
agtgtttgcgaacccgggctgactatgtga

SEQ ID NO: 119408 - DNA, 85 bp, Homo sapiens
  chr10:99400379-99400464
  hyper
ggccaaggaggcgtcgcgacctggttggccggccggggcctgggggatgtcacggattggtcgcggccgcgagcgcagtggtgtg

SEQ ID NO: 119409 - DNA, 30 bp, Homo sapiens
  chr10:99446938-99446968
  hyper
ttcccgggagaaagcgctccctagccccgg

SEQ ID NO: 119410 - DNA, 123 bp, Homo sapiens
  chr10:99447291-99447414
  hyper
ttcctgccccagggtgcggcgaaagctggccctgccgggtacacgtgacggatgccccttctcctgggcccgaggccagcgcgcgcggcactgactgccttgcagcgcgtggccctctgcaga

SEQ ID NO: 119411 - DNA, 232 bp, Homo sapiens; identical to SEQ ID NO: 47470
  chr10:99473542-99473774
  hyper

SEQ ID NO: 119412 - DNA, 261 bp, Homo sapiens; identical to SEQ ID NO: 47471
  chr10:99474282-99474543
  hyper

SEQ ID NO: 119413 - DNA, 72 bp, Homo sapiens
  chr10:99496832-99496904
  hyper
ggcggagctaaacccggagcgggatgacgtcatgaggacgcagccgcagagcgattcgcgtcccggaagcgg

SEQ ID NO: 119414 - DNA, 30 bp, Homo sapiens
  chr10:99497244-99497274
  hyper
ggccaaggccagtgcgggcgtcgatatacc

SEQ ID NO: 119415 - DNA, 1080 bp, Homo sapiens
  chr10:99530901-99531981
  hyper
tgcgggggataattccggggacgctgggctgagctaggacagcgtgtgtgtgtgtgtgtgggcggagggggggagctgcacctcttggggggttcgcagagctgtgctaggggagctgcagggccgtcggagcgcgcggggacggcggcggcggcgctacctggaggcgcggtggcgggcaggtgcccgaactgcacggcgatgcagaggtcgttgtccagggggaacttgtggcagtgcagcatctcaggccaggggaagccgtaggcctccatgagcggcgcgcagccggcgcgcacggcctcgcacagcgagcggcacgggtagatgggccggtcgagacagacgggcgcaaagagcgagcacaggaagacctgcgtatccgagtggcagcgcttggccagcagcggcagccagctgctcgcctgctgcttcacttcggccaggctctcgtgctccagcaggttgggcagccgcatgcgcttgtagcccaccgtgtggcagagcggcaggtcggcagggatgtcaaggcactgcggcggcttggagtaggagcggccgtgcagcggctcggcctgccagccatagtagtcgtactcctcgcagcgcgccggcgcccagtgcagcgcccccagcagcagcgccagcgcggccgtccgcacgcccccccccgccgccgccgcccgcatggctgcgccctctccaggtgcgcgccgcgcagccccccgacgctcggtgcccggcggcccaggtgttccggcgtgcgcccccggccctgactctacccagccgccgccgccgccgccgcggaggtcgcccaggtgggtggcagcctgcgctgcgggcgccccgactgatcctggcgcctcccacctcggggctccagcccgggcctcgccgtgcgccccagccaatctccggccgcctggccccagctccaaggcggggaggcagtgggggcggccctcagcccctcccgcaccctgcccgagcgtcccgcccagcgccaggtcttgcgcccctctcccggctcggctcccctgccgcagccctggcctcgcccagcgtttctccccaggg

SEQ ID NO: 119416 - DNA, 30 bp, Homo sapiens; identical to SEQ ID NO: 47474
  chr10:99610069-99610099
  hyper

SEQ ID NO: 119417 - DNA, 30 bp, Homo sapiens; identical to SEQ ID NO: 7523
  chr10:99629442-99629472
  hyper

SEQ ID NO: 119418 - DNA, 54 bp, Homo sapiens
  chr10:99789240-99789294
  hyper
cagcagcagcggcggcggcggcggcggcggcggcggcggcggcggcagcagcag

SEQ ID NO: 119419 - DNA, 407 bp, Homo sapiens; identical to SEQ ID NO: 47477
  chr10:99789562-99789969
  hyper

SEQ ID NO: 119420 - DNA, 318 bp, Homo sapiens; identical to SEQ ID NO: 47478
  chr10:99790021-99790339
  hyper

SEQ ID NO: 119421 - DNA, 322 bp, Homo sapiens; identical to SEQ ID NO: 47479
  chr10:99790437-99790759
  hyper

SEQ ID NO: 119422 - DNA, 260 bp, Homo sapiens; identical to SEQ ID NO: 7527
  chr10:99790917-99791177
  hyper

SEQ ID NO: 119423 - DNA, 30 bp, Homo sapiens
  chr10:99894303-99894333
  hyper
ctgaactcagtgggcgcggccgggcctcgc

SEQ ID NO: 119424 - DNA, 124 bp, Homo sapiens
  chr10:99894649-99894773
  hyper
gacccctgcgggcccgcggttgagagggaccctcccggggctcttttgcactcactggggctcgtgctcgctttgggcgctcgccccaaatgatcctggcggaaaggacgtgctttttctgggt

SEQ ID NO: 119425 - DNA, 30 bp, Homo sapiens; identical to SEQ ID NO: 47481
  chr10:100027947-100027977
  hyper

SEQ ID NO: 119426 - DNA, 44 bp, Homo sapiens; identical to SEQ ID NO: 7528
  chr10:100206320-100206364
  hyper

SEQ ID NO: 119427 - DNA, 48 bp, Homo sapiens
  chr10:100206737-100206785
  hyper
ggggccggagccgccgtcgccttccgcgggttcgagccccgcccctgc

SEQ ID NO: 119428 - DNA, 217 bp, Homo sapiens
  chr10:100991730-100991947
  hyper
ctgcatctacaccccgcaggaacagcctgttaagcagtttgggctaccagctctcagcctccaagacagccgcccagcaaaaggccggcagctgggtgagaacaacctggagaaccccctttgcgcaatgaggtcaggagttccacactgcagtgtctcctcatctgaagcttccaacttttcattttcaggcgaggtgcaaccaggctctccaaat

SEQ ID NO: 119429 - DNA, 184 bp, Homo sapiens; identical to SEQ ID NO: 47485
  chr10:100992006-100992190
  hyper

SEQ ID NO: 119430 - DNA, 425 bp, Homo sapiens; identical to SEQ ID NO: 47486
  chr10:100992221-100992646
  hyper

SEQ ID NO: 119431 - DNA, 441 bp, Homo sapiens; identical to SEQ ID NO: 47487
  chr10:100992681-100993122
  hyper

SEQ ID NO: 119432 - DNA, 1393 bp, Homo sapiens; identical to SEQ ID NO: 47488
  chr10:100993447-100994840
  hyper

SEQ ID NO: 119433 - DNA, 30 bp, Homo sapiens
  chr10:100995484-100995514
  hyper
ccccggggctaggcacgcgggggggcggga

SEQ ID NO: 119434 - DNA, 465 bp, Homo sapiens
  chr10:100996055-100996520
  hyper
gggtctcgtttttacgtccttccctgagaggctctggagggcggttcaagctccgactccgacccgaaagccccagcgccaacccgggacgcgctgggatagagttcccaccgacagcacgcttgtttctcctgacagcgtcaggcacttcgtccgctcagggcccttttctggttgaagcagcaataccaagggcggttaagttgcagaggggtcttgaggcggtgattcctgtcaaagcatagagccctgaaggacattccccgaagaggagccctgatctctgtgacgcgttggatagccacaccgaagcatcctctgacctccatagggcaaagagtagcaagaaggaaaaacatagtgacctggtcaagcagcttttccgatccgagggccaaaagggacatgcgccctcgctctgctctgctcttcccgcaaccgaggaataagcgtcttgggagcgtc

SEQ ID NO: 119435 - DNA, 30 bp, Homo sapiens
  chr10:100996789-100996819
  hyper
ataacagccggaagccgctgtgatgcacga

SEQ ID NO: 119436 - DNA, 542 bp, Homo sapiens; identical to SEQ ID NO: 7533
  chr10:101088989-101089531
  hyper

SEQ ID NO: 119437 - DNA, 717 bp, Homo sapiens; identical to SEQ ID NO: 47492
  chr10:101089565-101090282
  hyper

SEQ ID NO: 119438 - DNA, 94 bp, Homo sapiens
  chr10:101190596-101190690
  hyper
ggctgaggcgtgggcgaagactacggttgattggtagagcgtgctcctatcgcagaggctgttattccttgggtctcccggctgaggggaggag

SEQ ID NO: 119439 - DNA, 30 bp, Homo sapiens; identical to SEQ ID NO: 47494
  chr10:101190909-101190939
  hyper

SEQ ID NO: 119440 - DNA, 30 bp, Homo sapiens
  chr10:101191142-101191172
  hyper
agcttcctcccgcgcgcaccggaccagatc

SEQ ID NO: 119441 - DNA, 653 bp, Homo sapiens; identical to SEQ ID NO: 47495
  chr10:101279839-101280492
  hyper

SEQ ID NO: 119442 - DNA, 358 bp, Homo sapiens
  chr10:101283149-101283507
  hyper
ttcagaaggcggggacgagggctggcagccccatactgaatagaaagcgaaggacggaggtagggagaaaggaaactgctctggggggcggaggtgggggtacacgtaggagggaaggggagggggctagaggaggctccgccccaccgtccggcagtgtttattttcaaggcagcttcccgtcaatcctgtcaccggggcacattcttttcgggggctgtgaaccaccgtcagggctctgcaggaagatttgaggagggggagggctgtcgagtagggagcaggaattcgcagagtagagagaactgcgtctgggcaggcagtccctgcgtggcgcgggggaagagaggaagctgag

SEQ ID NO: 119443 - DNA, 963 bp, Homo sapiens
  chr10:101290179-101291142
  hyper
cggaatttggggtagaggggcacccgtgggccggctggtggggaggagacagccccctgcatgagctcacagaggcgccctggtgggctccggcggctgcagagcgtctgtgggcgtgtattggcgatcaggcgctggaggggcgctttgtcctggtcgcagttttaagacctggattgttgggctagatttatgaaaggcctaggagcgaagcgagatgggaagcaagggaatgtaacaaggagaaatgcaggcttcggttggaaactggggagagagagattgtttcgatagcctttctccttttctttttccagaatcatgaaatcaccgaggagaagaaaactggggactagaagagagcagaaacatttcccctgagacagttttgccccggaggtggggtggggaagtggcgctggagctcagcttcctgcttttatgctcggcggccaccgtgatgcacacacactcgaggtccgccaccccgcagtgccgtgcacccctctgcccccacctcggaatttttgtgcccgagcgctcgggatccacggcaaaaccaggcacattcctccctctgcagactcaccgcctggtttgtagacactggtctccgcctggggcgtcaatagtttcaggatttaaagcagaaagacaccgggcgcccctgtggctgaggaatggcggttccagcacaagaccctgcccacagagggtctctccctactgcctgcgggccgccgctaccctaagtactccggggcgcacgtggcccgcgcggcatcccagctccccgggcggacccaggggctgcctctccacaacagttccgctcccttctgcagagccccgcctctcccacctcccgacaggctgttctttctcccttcaaccttgggcacccactcctgtcgccgttgcgggacccgcgtggcagccctccaccctcgtacccactcccag

SEQ ID NO: 119444 - DNA, 1641 bp, Homo sapiens
  chr10:101292286-101293927
  hyper
aacactgcatctcctcgtggatccagcgcccagtatttacccgccaggaagttttcctgccccgcgcagcagctgaaaaaaacacactcctggggcatccttccctggcgttggttcgtggacagcaagcctcccagaactggcctaggtcgggaaggtgcagccacgcgggaatcaatggttcaggaaccggatctgtgcagcctcgcccgcagcgtctcggacttcaggactctatactagtccttgtctatttctggtagagccgcaacatcccactcgcagagagcagggggcgtggcccacatgagccagaacctatagggagggaggttggggcgccagccccgcccccccaacgtgacgcaaatctcccggacagaggcttaggagcccgggccccagtccctgcagtggctgtaacaaaacccagacccccaggtcccggccaatggaggcgatttagactggagtgggaccgcgtctgtcaaaagcccgactcggcagcagcggcggagtccaggaggagagctggagccgccgcgctgcctccccgcccccgccgggatttattatttggactggacaattaagtggccctgatgatgttaccaagcccggtcacctccacccctttctcagtcaaagacattttgaatctggagcagcagcaccagcacttccatggtgcgcacttgcaggcggacttggagcaccacttccactctgcgccctgcatgctggccgccgctgaggggacgcaattttctgacggaggggaggaggacgaggaagacgagggcgagaaattgtcctatttgaactcactagccgcagcagacggccacggggattcagggctgtgtccccagggctatgtccacacggtcctgcgagactcgtgcagcgagcccaaggaacatgaagaggagcccgaggtcgtgagggaccggagccaaagtgagtagagggggaaagaaaacgcacccgcacacctggagcaatggcagagcgcacacaaacagcccacagaccttgccagcgcagctgcccatccctttaccctttggctggggccatgcctccgccctggtcaccgacagctccacaaagcgcaggtacctgcaagggagccggggtggagagacaaggacgaggtgaccctgacaactactccccccaaaagggggaaatgagggaagggaaggtggttactgctgccctgatgctgagaggcgacgtgggctcagcgcctgggtcctcataactggcagtatttttgctcttccccccgccccaaaaggctcttcccccaaaaagggcaggagcctggacctttttcgttttccctctagggtgagatgagttctcttagcccagggcagccaccccttcttctccgaaaagacagcccaagcagcctgtgtctctcgcacccgcaggggcaggaactttggtggaggccagctgggcggtttcctcccttctctgcttggagctcagcgtccttgaacccgtggcactcggtagagagagaggagatgatcggaaagtgcgtgggaacaatgtctattccgcgcgaccatagctctcacatccctaaggcgccagccttttttgaaaatccgtaacgttttgctt

SEQ ID NO: 119445 - DNA, 1501 bp, Homo sapiens
  chr10:101294528-101296029
  hyper
cacgaaacgcgcctccgcctgctaagggcgttctttgggtactggggctgtctcagggtcccacagcgccaggagccacaaacgttcccaaaagtccagccatttactaccgcacgctctgcgcagccaccaaaaagggtcacggtgctccaggacaggagccgcggtgcggccgggaacagctaaggacgctgttgtttgcttcttccgcagaaagctgccagctgaagaagtctctagagacggccggagactgcaaggcggcggaggagagcgagaggccgaagccacgcagccgccggaagccccgggtcctcttctcgcaagcccaggtcttcgagctggaacgcaggttcaagcagcagcggtacctgtcggcacccgagcgcgagcacctcgccagcagcctgaagctcacatccactcaggtgaaaatctggttccagaatcgcaggtacaagtgcaagagacagcggcaggacaagtctctggagcttggcgcacacgcgcccccgccgccgccgcgccgcgtggctgtcccggtgctggtgcgggacggcaagccgtgcgtcacgcccagcgcgcaggcctacggcgcgccctacagcgtgggcgccagcgcctactcctacaacagcttccccgcctacggctatgggaactcggccgcggccgccgccgccgccgccgccgccgccgcagcagcggcggcctacagcagcagctatggctgtgcgtacccggcgggcggcggcggcggcggcggcgggacctccgcggcgaccactgccatgcagcccgcctgcagcgcggccggaggcggcccctttgtgaacgtgagcaacctaggaggcttcggcagcggcggcagcgcacagccgttgcaccagggtactgcagccggggccgcgtgcgctcagggcaccttgcagggcatccgggcctggtagggacggggcgggtcacgcggcgggcaccccagcgcagcctggcgccgcgggactgaagctcgagaagggcctgacctaaaggtcaggtcccctcgttaaaaaaatatgtacgtctagctcctcagggcttcggatcgcagctcactcgaggcctggggaaggggactcaggggcgaggaggatgactgggtccggtcgccaggactgtctctgaggcagaaacgccggctgggcgccggggaggacgatggccccgaccctggcagcgagaggagaccaggaggctaggaccctggccgcgcttggttcttccaaagcgagaagggcttctctccctctgcctttccgcggcctccgcgaagcgttggcggggagcccaaggacataacaaattaaaagcatgaaggagagaaaaatgggggtcgtggcttgagaaattccaggccctaccgatcctctgccccctttgcgggcctggagcgccatagcacagtcgatttcgtttcgcagctgtctcccctccgcagcagatacctcggtccagatctccg

SEQ ID NO: 119446 - DNA, 158 bp, Homo sapiens; identical to SEQ ID NO: 47502
  chr10:101296558-101296716
  hyper

SEQ ID NO: 119447 - DNA, 629 bp, Homo sapiens; identical to SEQ ID NO: 47503
  chr10:101296737-101297366
  hyper

SEQ ID NO: 119448 - DNA, 31 bp, Homo sapiens; identical to SEQ ID NO: 47504
  chr10:101300724-101300755
  hyper

SEQ ID NO: 119449 - DNA, 30 bp, Homo sapiens; identical to SEQ ID NO: 47505
  chr10:101345350-101345380
  hyper

SEQ ID NO: 119450 - DNA, 30 bp, Homo sapiens; identical to SEQ ID NO: 47506
  chr10:101351688-101351718
  hyper

SEQ ID NO: 119451 - DNA, 30 bp, Homo sapiens; identical to SEQ ID NO: 7540
  chr10:101380402-101380432
  hyper

SEQ ID NO: 119452 - DNA, 30 bp, Homo sapiens
  chr10:101381044-101381074
  hyper
tgaatgaggttccccgggccccggctgtca

SEQ ID NO: 119453 - DNA, 112 bp, Homo sapiens; identical to SEQ ID NO: 7541
  chr10:101381345-101381457
  hyper

SEQ ID NO: 119454 - DNA, 30 bp, Homo sapiens
  chr10:101418865-101418895
  hyper
atgcgcttcggtcgcgaacaccctgaaccc

SEQ ID NO: 119455 - DNA, 30 bp, Homo sapiens; identical to SEQ ID NO: 47509
  chr10:101419226-101419256
  hyper

SEQ ID NO: 119456 - DNA, 30 bp, Homo sapiens; identical to SEQ ID NO: 47510
  chr10:101419612-101419642
  hyper

SEQ ID NO: 119457 - DNA, 56 bp, Homo sapiens
  chr10:101491583-101491639
  hyper
gatctgaacctatgcgttgtgagtgcactgtaaggagctccggaaacgtgatgtgg

SEQ ID NO: 119458 - DNA, 30 bp, Homo sapiens
  chr10:101492014-101492044
  hyper
cgcagctgttgacgcgcttcttagctggtg

SEQ ID NO: 119459 - DNA, 30 bp, Homo sapiens
  chr10:101945387-101945417
  hyper
gttcctcctgggagcgggagaaaaggaccc

SEQ ID NO: 119460 - DNA, 502 bp, Homo sapiens
  chr10:101945662-101946164
  hyper
agaagaagcccagccgcaggctcgcgaggaaagccgacccctcggccgcgcctcaccgatcagtgacgcatcgcccccgcccgcacgtgcagccgactcccgcgccgagccaaccgccgccaacagccggccccgcccactcgcccagcactgcggctgcgcggggacgcacacggcgtagccccggcccgcggctagtgagacggggagcgcatgggacaaaattctcctagccgcgggccgcgcaggctcctttggaggcaagtcgctttctgtacactgctggttaactgcttcggaagaggacagcccgcagtctggagtgagcagcgaagcagagaaaaggagacgccctttcggacaagggactggttggtttgttcttgtgcagagaacccactcgctcactctcaaacggtagctgttcggtttatttgtccttttgcagtgtatgcggagccccactgtgtggcacgcacttgcttccggcagagatcctgcc

SEQ ID NO: 119461 - DNA, 28 bp, Homo sapiens
  chr10:101989346-101989374
  hyper
cgccgatgctcgcgcgtctttgttctcg

SEQ ID NO: 119462 - DNA, 30 bp, Homo sapiens
  chr10:102027504-102027534
  hyper
ctctcaggtgtttgcgcctcaaggaagaat

SEQ ID NO: 119463 - DNA, 389 bp, Homo sapiens
  chr10:102046128-102046517
  hyper
ctgacacatcaactcgcctccctcgcaccgcccctcgcccatacccggcacccccgctcatcctggcaccatcccagtcaccctgacaggacaaacactcgcgcgcagcgacaagtgcactcctctcaccagcccgttcctgccaggtgagccaccacacactcaacctcgcccacccgagacggagccccaggccccccaccggacgcttcctccccatccattccgggtacctcgggcgggctcatcactccgggtcgccagtacgccctcggctgccgccgccatagcggaccccgcgctgtttccgggccggggtgctgcgcatgcgcactgggtgtgccccgcccacccggccggccctgcagtcctgcgcctagcggtccagt

SEQ ID NO: 119464 - DNA, 191 bp, Homo sapiens
  chr10:102106581-102106772
  hyper
tgggctaggctccgcgccccagccccaaaccgggtccccagccccttccagagagaaagctcccgacgcgggatgccgggcagaggcccagcggcgggtggaagagaagctgagaaggagaaacagaggggagggggagcgaggagctggcggcagagggaacagcagattgcgccgagccaatggcaacg

SEQ ID NO: 119465 - DNA, 30 bp, Homo sapiens; identical to SEQ ID NO: 47513
  chr10:102107569-102107599
  hyper

SEQ ID NO: 119466 - DNA, 365 bp, Homo sapiens
  chr10:102132967-102133332
  hyper
ctctggctcagccctgcgggtgagtgtttaactttcagcccagcttaagatctccgaagacacccatcgcctcgtcctgcccagtcccctccgctaaagggccggcctgcccgggcctggctggcagctgacatgaatggagaggaagcgcctccctctccacccactctcgccggggttactgccggtcacagacccgggccttcaagagctatttacacctacaacagcccaccagcgcctgaccacgccggagccaatcagcggcccccaagcttgtctgattctgtctgctccaatcaggaggcgcggtccttccagcctcttgctcctgtgaatcacaggtcggcgggagccttttttcc

SEQ ID NO: 119467 - DNA, 53 bp, Homo sapiens; identical to SEQ ID NO: 47515
  chr10:102133790-102133843
  hyper

SEQ ID NO: 119468 - DNA, 30 bp, Homo sapiens; identical to SEQ ID NO: 47516
  chr10:102196220-102196250
  hyper

SEQ ID NO: 119469 - DNA, 387 bp, Homo sapiens; identical to SEQ ID NO: 47517
  chr10:102321811-102322198
  hyper

SEQ ID NO: 119470 - DNA, 526 bp, Homo sapiens
  chr10:102414411-102414937
  hyper
gcataagattaagccgaggctctcagctgcgcagcgactcccctccggttcccatgttgtcgaggcatgctgggagtacaagttccgagcgcacggccaggtgaacgcgccgccgccgccgtcgccgcgcgactccccaccccccctagccccctcccgcgggtcccgactggcccaccccggcgggactggtgacgccggcgcggcctgcgcctcccggaaacccaggcagatagcccgggtggaagcggcccggccctggggtcaccatcgcccctcaccccggggttcgacggcggccctggacgtccccgggcccccgtcttcctcctgggccttctctctagtccctggcagctgggagcggccctcccgcccctgcactccttcctgtcgcgctgtggttctgccctctggttgtcgctcccctagccctcccctctttctctctgcagtgtttcttggggctgttgtctttctgtctgtcactctgcgtctcggtctctctggagtccttctgcctctg

SEQ ID NO: 119471 - DNA, 601 bp, Homo sapiens; identical to SEQ ID NO: 47520
  chr10:102415092-102415693
  hyper

SEQ ID NO: 119472 - DNA, 706 bp, Homo sapiens
  chr10:102415927-102416633
  hyper
cgcgggagtctcgttcgccggggctgtgacctcgagtgggggctcggcgtgtaaaggggtgtacgggagcggcccttggcttcctgcctctgcggcctcccctgcctcccggccccatcccgtctccctgtcctccgccctcacccacccggacagagggagactggcgcgggcagtgcgtgggttgggggcacagcccgacccctaagtttattcgttggcgtgggtgcagggtggcggcgggtccgctccgcccgcctcgggtcccagcccccaccccccggagcttccctcccccaccccaccccgccccgccctcgccccgcacaatctcggcgctgacagccgagcaggtgataaatgccggcgacgcggggaaggaattgcgcaaaataaagaagcatgttccaacaagtcctgtcaggattgtattgatttaatcatctgcagaaatacacattctggattactgtagcgtgcccgggccgggggaaggggcgggccggccggctagggccgcggcgggcggggcgcagcggcgggcgaaggggcgggcagaactggggccccgcccctcgccccaggccccgccccaccggccttctggcctggcgagaaactgcagggcgctggggctagggtttgggggttccctacctaagaggtgctgcggaagggctgttctgccctgcgggcacctcctcct

SEQ ID NO: 119473 - DNA, 86 bp, Homo sapiens
  chr10:102419180-102419266
  hyper
ccccgcgggcctgcgcgtgactttagcgcgcgcggctccgcccggaaggtcacctccttcatcacggattctatttgcatccggaa

SEQ ID NO: 119474 - DNA, 103 bp, Homo sapiens
  chr10:102419578-102419681
  hyper
ttctcagaggagccgcgtgcccgtgcgctcccgcctgtcggccccagagagcgcagccctgacacctcctcccggaagcccgccggcccgaccctggtttgga

SEQ ID NO: 119475 - DNA, 385 bp, Homo sapiens; identical to SEQ ID NO: 47523
  chr10:102430676-102431061
  hyper

SEQ ID NO: 119476 - DNA, 68 bp, Homo sapiens; identical to SEQ ID NO: 47524
  chr10:102440841-102440909
  hyper

SEQ ID NO: 119477 - DNA, 99 bp, Homo sapiens
  chr10:102441133-102441232
  hyper
tggggagcgggtggcggtgtttggatggagacagcagcctcctccggaagccggcccagggcacaattagcagggagcggagacgcccgcgaaggctga

SEQ ID NO: 119478 - DNA, 485 bp, Homo sapiens
  chr10:102469791-102470276
  hyper
gggagacagtgacaccgggagaaacccgcgccccgcgcccccatcccccaggagcccctccctccgcggcgctccgggcagaagagggaagcagtgacccggccaggtggtgatgatgcggccggccgcgctggtcactcttggccgctccccgcgcgcagcccgacccccctcgtatgggtcacggcgcctgcaaaactccctgacacagaaacgccgcggggcctgcgcgtgtcgggaacaatcctgcgcctgatgggaagcgacagctccgccccgcctccctccactcctgccctcccgcggctcctcccgggcgccgcgtcccgcgctcctgctgccagcccagccggcctggggcgccctagccgctggtcctggcccaacaagtagccaccgacccctcccatgtggcctaggacgggaggagcttctgcccggcagttgggggtgacaaggatggggtaaagaggggcgccgggcag

SEQ ID NO: 119479 - DNA, 643 bp, Homo sapiens
  chr10:102473072-102473715
  hyper
acttttcgccatagccggaaataccactgttggatccaccttctgcgccccaggcctccccagcctccgtacccaggaggcagccagcttagcagggtaggcatgtgggtggcccaccagctcctggaatggagcgtactccgtttctggggaggttccccgcgtcctgcctggagtctagaagggagcggggaagtgaccagcactagattagaggcgggaactccggatgagaaagagacgagggggccaggatcccagggctggcagcgacaggaaggatgggaagaggtccgcaggcccgacgggtgcgggccagcctggccgcgcagggggagctgggagctgggtgggcggggtggggcggacgccaccaggcgtggcgcggggaacagagcagaatgaaatgcagatgcaaaacgtgctcataagagtttcctctctctccccatctgccaaagccgagattttaatctttaatccatgagcaatcagcgagcagcggcgaatggcacattacagatgttttactgtcgcgggcgctcgcagctttcgcgctcggcacaggcgcgccgggcgcccccgctccgcccgccccctcttctccccctctggttcttcttcctctcccctccccaggtcc

SEQ ID NO: 119480 - DNA, 165 bp, Homo sapiens
  chr10:102473759-102473924
  hyper
cggaggtgggactggggagcagggcctgggactccgctggtgggggtacacgcaggggcactggcgggggcggggggcgacggcactcagaattgcgctgaggcaaattccccgccaggtccagattggggggcgcgaggacaggagcatcgagtgcccggatag

SEQ ID NO: 119481 - DNA, 240 bp, Homo sapiens; identical to SEQ ID NO: 47529
  chr10:102475168-102475408
  hyper

SEQ ID NO: 119482 - DNA, 44 bp, Homo sapiens; identical to SEQ ID NO: 47530
  chr10:102475555-102475599
  hyper

SEQ ID NO: 119483 - DNA, 73 bp, Homo sapiens
  chr10:102475881-102475954
  hyper
gagacaggaatacgcgccggggctggtcacacctcttccgcgggaggggcggggtcggcggccacggcctagc

SEQ ID NO: 119484 - DNA, 375 bp, Homo sapiens
  chr10:102483870-102484245
  hyper
ggagttggagacgatgataaatatgataatttgtataaaatctgaatgggtcttgttttcagggagaatgccttggatgatgaatgggcccggctttcagatagatggctgataaaaagtgtattggattgttgagagcgattttaattctcattctgtacctgcagatgccgcggccgccgcgcccggcctcctcctccctcctgcccactgcgcggggcggacgccggcccggccggcctcggcggctcaggaggcttctgaaatgactctaattacagagttattaattttaagaggagggtgagcggggggtttatgattattaatcgagcgcccgagctcggcgggcggggcttggcgggccgcgggcta

SEQ ID NO: 119485 - DNA, 292 bp, Homo sapiens; identical to SEQ ID NO: 7555
  chr10:102484269-102484561
  hyper

SEQ ID NO: 119486 - DNA, 365 bp, Homo sapiens; identical to SEQ ID NO: 47533
  chr10:102489298-102489663
  hyper

SEQ ID NO: 119487 - DNA, 1444 bp, Homo sapiens
  chr10:102489700-102491144
  hyper
cgccatggacccaggacgacaccccacacccagacaccactctttccaggggcagatgctccggcgcgccccgcgccctgaagttcaacttggaatccaggtccgcgcgggaccccgcctagcgccccaagcgcacaggctgagcgccccgccctggcctcctgggcctgcggcctcagcgcgagagccctggcccccttcccgccgcgggtcgcggtcgggaaagcgcgccctgcaagggggttttgtagataaacaaaagcgtttgctcttctggttttcttttattttctttattcgcctgtcccttccttcttaatctccctcttcgctcttgtttctttaacttatttcccttcctcattttccctttcttttcgttcgcttttccttgtcactctccttcttgttctcttctgtctctttctgtatctccctcttccattttggccccttctctgcctctgggtttccctttcccgggcccctcactcttcctgggctaggattgcgccgtctccctgcatcatttttcctggctccgctgcctctttctcactttttcgttctcccggcggccaccgtctggcgggcttgggtccggctcccccgccgccgcagtgatttattcgcttcacccggcggaatcaggtgctgaaccgagccccggaacgagagaacagatttctcccaggaaaggttttgtgaactaaacgatgctaattacggggtgggggatgcgtcgcccgggaaggggaggcgcgcggggccgagcgcggcctgggaggggagagaccggggctggccgaggccctcccggggcgcctcccctgcacctctcgccctggctttcgcctttccctgggaactttcccgtctgagttaactattaaccaccggcgagaggcaattttcttcggaatttcagcgatttccttttcgcagtggactcagattagcacgcaaacagtgagatgctcggcttgagtctacgcgcgggcgaagatgcctctgtcgcctcaaacagtgtccttcgcgacggcggaaaactacagcccgcccccgctcccgtgcctgctcaggaagccgtgaccaagccagtgcccgccggtgcccggagtgaaggtggaaaaagccgagtgctcctgctcgggggcggggttgagagggggagattaatccgggcaagccaaggggaccttagacttgcagccagggccgccacccgaggagcccgcatgcagggacgcgcctgaaggcttagtcaaacccggggaaatgccctcccccgcctgcagaatccccacgccgtctcttacttcctccctctttgccactggcgagcttacacgtgcacacacacacacccctctctgtctgtgaccgcaacaaactttgtgaaacttgaaccgctgggtgcaaagttcacgcccttttctccttt

SEQ ID NO: 119488 - DNA, 350 bp, Homo sapiens; identical to SEQ ID NO: 7558
  chr10:102495095-102495445
  hyper

SEQ ID NO: 119489 - DNA, 238 bp, Homo sapiens; identical to SEQ ID NO: 7559
  chr10:102495452-102495690
  hyper

SEQ ID NO: 119490 - DNA, 514 bp, Homo sapiens
  chr10:102497252-102497766
  hyper
cgggtgcgggtctcgtgttccaggcagcagcagctccgggaaaggcgggggggagctgcggagctgggcaggagacagggctgtgtttgggaaaaggaaaccgcacttcgaggcggctccgcagagcagagctgcagagtcttccgccctcccagccgccttctccctttgcctctttctcttttcaccgccccctccctcatctcttcggtagccacgtttggccggggcacaactccctggaggccctgcccccctagacggccccgagcccttttggacctcatccggctagtttaaaatgacaatgacagaggcgcgtgaccgaacgtgcctgccggacgtcctggcgcaactgccgcagccgggtttgcgaaggatgcgggttttacttagtctcgctgagcctgttccggagcagcgaaaaccatcaggaaagggcgagagaaggaggaaggggattgaatcagcaactagggcaattgtggtcttcagctatcgctgcctatacccc

SEQ ID NO: 119491 - DNA, 102 bp, Homo sapiens
  chr10:102497994-102498096
  hyper
agcctgatgcctcgccgccctcttttgccaggcctcctcaccccgttattaactgctgtgttgacctgcaggattgattggcggccccgctggaagaggctg

SEQ ID NO: 119492 - DNA, 192 bp, Homo sapiens
  chr10:102498739-102498931
  hyper
gagggcctaatccgtcgcgcgcgcgcacgcggacacacacacacacacacacacacacacacacacacggcccccatagccaccgcaactctcagcagcagccctagccccgacccgaggccccaagacggcgggccaggaacccctgggacgtcctggctccaggctggacgtaggcggaggtggcaggag

SEQ ID NO: 119493 - DNA, 30 bp, Homo sapiens; identical to SEQ ID NO: 7561
  chr10:102499135-102499165
  hyper

SEQ ID NO: 119494 - DNA, 30 bp, Homo sapiens; identical to SEQ ID NO: 47541
  chr10:102499614-102499644
  hyper

SEQ ID NO: 119495 - DNA, 30 bp, Homo sapiens; identical to SEQ ID NO: 47542
  chr10:102499974-102500004
  hyper

SEQ ID NO: 119496 - DNA, 31 bp, Homo sapiens
  chr10:102501342-102501373
  hyper
atgcgccctggggtgcgccgggacccagagg

SEQ ID NO: 119497 - DNA, 835 bp, Homo sapiens
  chr10:102501590-102502425
  hyper
tttaatgcatttaatttggtccgcgctgtggggagcatttcctggggagatgcatttaatttcggaatttctaatcccctccctcagaccccggtcctagctcccctagccgctccccgggaagtggaaggaggaaggcaggtcccggccacgggggaggggcgcggctgggatgctcccgcggccccctccgtctcaccaaggctcagccgccttcccaagctactggaggccgggcgcctgggccccgggtcagggccctgcaggaggaggagaggcaaccacgcttctgccttttctcgcctgggcagaaaacgctgggccagggaactggaaaccggaaaacaggagaaagggtttctggaaggcagcgggagcgggtggcagcggggcagcgggcagtggactaggtctacaccggcacttcacttttgcacaacatgcccagaaacgcatttgagagccctggagtcgcgcttggcttggcttggggcgccggtgcgtgggtacactcgaggtgcggggtgcctatccgccaccccgacacctacacccagacagagcaggcgcggcccagccagaaaaccaggccggcagtagctcggcctggagggcggaggcaaggttgggggccgccaggcgcctgggcaagcctggcagggaagggagccgagaaggcaaaggagccgagatccacaaggaagatttattgggcagatcagatgcacagaggcggctaatgaagcaaatcccgagatgggtatcagagcaactccccaaaagtttatttgcctttaaatttccgcagggaggcgggctccttgtttgaagtgta

SEQ ID NO: 119498 - DNA, 741 bp, Homo sapiens; identical to SEQ ID NO: 47544
  chr10:102504007-102504748
  hyper

SEQ ID NO: 119499 - DNA, 113 bp, Homo sapiens; identical to SEQ ID NO: 47545
  chr10:102505251-102505364
  hyper

SEQ ID NO: 119500 - DNA, 140 bp, Homo sapiens
  chr10:102507395-102507535
  hyper
taatcatatatttagcgttgcgggggttggggggggcgtttaaaaatacttctgggataaaatatatttttctaagtaatttccaagcgcaggaaagccgcgccgagggcatcaggcctccgcgggtctcggcgagcggg

SEQ ID NO: 119501 - DNA, 522 bp, Homo sapiens
  chr10:102507767-102508289
  hyper
ggtggactggtgggtgagacaccgcagcccgagtcggtgctggcggccgtggcgcattccaggcccgactcagcgccgactcgctgcagtcccccagccctggactcccgccgtgtccccttcccatccccaccccttagactggggctgaggggccgggccctgagcccggggaggctgaattattcatctttaatctgcccgcagctgccgccttttcataccggtaacgcgagttctcccggggcctaaattattgatggtcggggtttggagggaggggagggtgagaagtggggctagagatagggagattaacggggtgggcaagggggtaaaagaaggggcttcagtctctcccagcaacgcgatcagaggtctttccccagggtttcaccgagcttgctctaggtaccccccgagaaagggaggggagagaaatgaggggggcacagatgtccccgctttctccgaaactcgcgtgaggctagcggggcaggggctgcagcttgccagtccggg

SEQ ID NO: 119502 - DNA, 477 bp, Homo sapiens; identical to SEQ ID NO: 47549
  chr10:102508341-102508818
  hyper

SEQ ID NO: 119503 - DNA, 30 bp, Homo sapiens; identical to SEQ ID NO: 47550
  chr10:102509023-102509053
  hyper

SEQ ID NO: 119504 - DNA, 638 bp, Homo sapiens
  chr10:102585767-102586405
  hyper
gagagctcgtggtgtcgaggggggagtcgttaaacagaatctagtgctgatgaggaaattacacttgtttcattagcgatggggaaggagatagctcagttcctcttggtcacagttgagctcagaagctcattatcctgctgcacgcatgctttccctcctcgtcaataaacaggctttccagtggctgcatcccccacccccaccccagctccctctcagagaggggccccttctcctctacttaacccgcggttagggatcactgtaaacagtctggggtcatcacacaggagaaagggcgagggggaaacctggaggcctggcctttctcccgcagagggagggaggtagcttccgacgacggctcccaacccacgggccctccgctcaccgctagcggaccagcgggcagtccacctgcgccgcctccatcccctgccgcgtagcccacgcatccaacctcttgagggaaaggcgggagggcggtgtctcccaaaagagctcccacctcttgtgttggcactgcacattgatgccattcttaggactttctgggagaaaaatgtcccgaaggcctttcttcgccaccgccccccactcccatttccacccattaggggccatgcctcctagaa

SEQ ID NO: 119505 - DNA, 121 bp, Homo sapiens; identical to SEQ ID NO: 7566
  chr10:102587491-102587612
  hyper

SEQ ID NO: 119506 - DNA, 610 bp, Homo sapiens; identical to SEQ ID NO: 7567
  chr10:102587830-102588440
  hyper

SEQ ID NO: 119507 - DNA, 159 bp, Homo sapiens; identical to SEQ ID NO: 7568
  chr10:102588941-102589100
  hyper

SEQ ID NO: 119508 - DNA, 1151 bp, Homo sapiens
  chr10:102589250-102590401
  hyper
gccctgcatgtctcctcacccgtggatcgtgacgactcgaaataacagaaacaaagtcaataaagtgaaaataaataaaaatccttgaacaaatccgaaaaggcttggagtcctcgcccagatctctctcccctgcgagccctttttatttgagaaggaaaaagagaaaagagaatcgtttaagggaacccggcgcccagccaggctccagtggcccgaacggggcggcgagggcggcgagggcgccgaggtccggcccatcccagtcctgtggggctggccgggcagagaccccggacccaggcccaggcctaacctgctaaatgtccccggacggttctggtctcctcggccactttcagtgcgtcggttcgttttgattctttttcttttgtgcacataagaaataaataataataataaataaagaataaaattttgtatgtcactccccatggctccaagtttgtctctccctgtctctgagatgggcctcccctccattggtcgatccccaaaagccccttcaatgatcctcccaactacactcccgctgccacctccaactcctttgccgagacccccttggcggcagctgaaccacggcgaaggccgagactagcctgccctttagtagccaccctcccccacgcaccccggccctggggacaggaagttcttactctccgaaacttcagaataactcctagttaggcgcctatactaggccaactctgtggtcctaccagtacacccgcacccagatttagggtgctggctctcagaacccgaagtctgaggccttctccacgtgggtggaggggtggtcgtctgtcctatctcctccctccgttccctatccagtgcagttgcgcgtgggcgcagcagcaattttatccccgaagtctgcaatgaaacgcgaagaccgcagacgcttgccgcaagtttcctcgctctgcgtttacttctgggcccgaagaatgccccgcagaggccctaggagctggttcatgggacttcacgcgcctccagtgtcttgcggagccccagccccagcaagcagcggctgaaattggtgcgccttgtgctgtggtctgggtgtgtcccggagagggcgcgcaggcgcctatgtctgtcgcggggcggtcggc

SEQ ID NO: 119509 - DNA, 264 bp, Homo sapiens
  chr10:102671978-102672242
  hyper
atctatgctgcccacgcttaacatggaaaactgaaagctgaccttgtgttcctttaaaaaatctccaaggaagtcggctgcagagacttcatggtaactcatgagaaacaaaatgcttttgtggattaacaactgtctttattccaatggagttttttgggggttttttcttcttcttaaagacaaaaaaataatctaccgctgacactcaacaagaaccgtcgtagaatggacaagtcttcggatcgcgctgtgcagatccct

SEQ ID NO: 119510 - DNA, 30 bp, Homo sapiens
  chr10:102672922-102672952
  hyper
ggtcgtcgcccccgcgctgccatctgagac

SEQ ID NO: 119511 - DNA, 31 bp, Homo sapiens; identical to SEQ ID NO: 7571
  chr10:102746537-102746568
  hyper

SEQ ID NO: 119512 - DNA, 361 bp, Homo sapiens
  chr10:102746983-102747344
  hyper
cccctgactgggggcgacctacccggggagtcgttgccacctccacacccaccccgacccgcgcctgcgcacttcccttggctcacctggcgccgcgagacgaggcgccgtcgcggctgacgctgaagctcagacgctgcagctgctgcacatagcgacccagtccgttgtggagaacgctggccaagaagcggctcggagtcccgcgcgccgtcatagctacagcttggaggccgcggagcctaagcagcgaggagaggggggcgggactaaacctcgaggcttccggttccgggacgaccgctcccggagttttgcttccgaggtcaaggcgagtagcatgtgcgggagactcacgttg

SEQ ID NO: 119513 - DNA, 30 bp, Homo sapiens; identical to SEQ ID NO: 7572
  chr10:102756780-102756810
  hyper

SEQ ID NO: 119514 - DNA, 30 bp, Homo sapiens; identical to SEQ ID NO: 7573
  chr10:102757011-102757041
  hyper

SEQ ID NO: 119515 - DNA, 30 bp, Homo sapiens; identical to SEQ ID NO: 47562
  chr10:102757872-102757902
  hyper

SEQ ID NO: 119516 - DNA, 30 bp, Homo sapiens
  chr10:102758395-102758425
  hyper
acctgaccgggtcaccgagacccctagggg

SEQ ID NO: 119517 - DNA, 190 bp, Homo sapiens
  chr10:102758640-102758830
  hyper
tggaaagaaggaacgcggacccacgtgacggctgagactgcggctgcatgtgggaaaggtcttgtgggtgttagggagactgtattgtgtgcgagaaggtgagactacttgaccctgaggaagtggaatattgtctgccgtgaggctggtgtaggtttgggctgtaggcttgcaccggttcgccccagtg

SEQ ID NO: 119518 - DNA, 795 bp, Homo sapiens
  chr10:102791375-102792170
  hyper
cagttctggaatggtcgcagggtggggcagctggtcccaggaccggaagaatcctaagaatccttctgatgcacttgctcggatgcagaccgcgaggttcctggggtcgtctgcccctccacatctcaggggtggggctacggtctggggtgcagggctaggggttgggagcgtaaggagaccagggacacagtggagctaggggttacagagggggagcagggagagggctggggacatagaagaggcacaggcacgacaggaacggggctgtgaagtgatgcgaatgccgcgctgctacaagaggagcttgtggatactggggtaggagcccagggggacaagcaagccaaaggccattgccaaggcagccatcaagtaaacaagccaggcggtaacccgagtccctcccggcgcgccagcagaggaccgcccctccacaccgcccacctgcgcccggggctttctctctgggcacctagaccgcttgctgcagggctgggggtctgctgaggcccgccaggggactgtaaaccaagggagcagcgcccgcggctccagcccctcctccctttggctggggagggggccagaactgatccccgaggtgggattggctctgggaagcagcttagggcctggtccaggtggcccaggctgggggcatcgcctcgaatgacacccaccgccctcaggttctgccaatccccgtgcccaccgggtgggcgcggccgggaagctcctgcccctccctgctggtcggcgtcacgcgtgacgtcccgcgtgatggctggg

SEQ ID NO: 119519 - DNA, 382 bp, Homo sapiens
  chr10:102802619-102803001
  hyper
gtcaaagctaggctcggctccgcctccttcccgtttcccgagcaacggctttagtacctcaggccccgattctcgctcaccttccgggtcggagcctggaagctacgtctcagatccgccttcccgctgacctcgatcctgcgccgttaaatccaccaagtccccctccctcctttccaatatcgaaacccacgaattccctagcgccagccctttgacttcctgcccaaaaatccgcgaggttttcgaggaatcacgcgaggactctcctcctggatcccaagcccaggtttttttttcagctgcctctgaggctgttggctctttcttcggcgccgtcctcctcctttccctctctccacccttgcgcctaacagtccag

SEQ ID NO: 119520 - DNA, 404 bp, Homo sapiens
  chr10:102809889-102810293
  hyper
gcggtaaactctccccgactgagcgggctcccccggccttaatgagataatcaatacttgttctcggcttaatttccatctaattgctctttaacgacgccggataatgggccgcctcctgtgaggagggagctggctgggaatccgacccgcctcggactcccgcctttcctcccccgggcaggatgccctcgcgcaggtgggaagggggcgcaccgcgttctctgcgtagccggagctcccttcgcccgcccgcctgccccgcgccgccacctgcctgcagcgctctcggcccccaccggggggcgcttcagactttggttgcaggatcctggccaaggctccgtttcaggttcgggccacccccaaccttatgggctgtggaaccgcgcgcctctggacaa

SEQ ID NO: 119521 - DNA, 30 bp, Homo sapiens
  chr10:102810561-102810591
  hyper
tcagttaggttcctgcgaacgccagcagct

SEQ ID NO: 119522 - DNA, 30 bp, Homo sapiens
  chr10:102820474-102820504
  hyper
tcctgtttaaaatccgcgggctcttagtgt

SEQ ID NO: 119523 - DNA, 599 bp, Homo sapiens
  chr10:102822295-102822894
  hyper
cagggtgcccgaacgcgctgatgccccgagtgctcgcagggcttcccgctaaccatgctgccgccgccgcggcccgcagctgccttggcgctgcctgtgctcctgctactgctggtggtgctgacgccgcccccgaccggcgcaaggccatccccaggcccagattacctgcggcgcggctggatgcggctgctagcggagggcgagggctgcgctccctgccggccagaagagtgcgccgcgccgcggggctgcctggcgggcagggtgcgcgacgcgtgcggctgctgctgggaatgcgccaacctcgagggccagctctgcgacctggaccccagtgctcacttctacgggcactgcggcgagcagcttgagtgccggctggacacaggcggcgacctgagccgcggagaggtgccggaacctctgtgtgcctgtcgttcgcagagtccgctctgcgggtccgacggtcacacctactcccagatctgccgcctgcaggaggcggcccgcgctcggcccgatgccaacctcactgtggcacacccggggccctgcgaatcgggtacgcatggcccggggcccccaccccagcactt

SEQ ID NO: 119524 - DNA, 205 bp, Homo sapiens; identical to SEQ ID NO: 47568
  chr10:102826289-102826494
  hyper

SEQ ID NO: 119525 - DNA, 31 bp, Homo sapiens; identical to SEQ ID NO: 7577
  chr10:102827419-102827450
  hyper

SEQ ID NO: 119526 - DNA, 30 bp, Homo sapiens
  chr10:102827717-102827747
  hyper
gttttgtgccttagcggaaagaggcgacat

SEQ ID NO: 119527 - DNA, 30 bp, Homo sapiens; identical to SEQ ID NO: 7578
  chr10:102851346-102851376
  hyper

SEQ ID NO: 119528 - DNA, 1012 bp, Homo sapiens
  chr10:102890943-102891955
  hyper
ccctcccctccctcgcgctgtcattcaccccgctcctctccgcgcacagccaatggagagacccagtcgaaaccgcgaagctctcttgcaccgggctttttcgcctggtgattgatgtcccagagtcaacagcgagcgagcagccggagcggggaagcagaagccagagaggggaagaatacggcgccccctctctccctcccctcccccttctactttagcctttctgcgcacttcgcttccaagtctccgcgcagccaggagccgctgttgcctcccagcccctgctagctgccccccgagccgagcgcagcgagcgccgccgcccgggccccccggtggggccagggccagcatggagcacctgggtccgcaccacctccacccgggtcacgcagagcccattagcttcggcatcgaccagatcctcaacagcccggaccagggtggctgcatgggacccgcctcgcgcctccaggacggagaatacggccttggctgcttggtcggaggcgcctacacttacggcggcgggggctccgcggccgcgacgggggctggaggagcgggggcctatggtactggaggtcccggcggccccggaggcccggcaggcggcggcggcgcctgcagcatgggtcctctgaccggctcctacaacgtgaacatggccttggcaggcggccccggtcctggcggcggcggcggcagcagcggcggtgccggggcactcagcgctgcgggggtaatccgggtgccggcacacaggccgctcgccggagccgtggcccacccccagcccctggccaccggcttgcccaccgtgccctctgtgcctgccatgccgggcgtcaacaacctcactggcctcaccttcccctggatggagagtaaccgcagatacacaaaggacaggttcacaggtgagtccggcccgcgcgctccccgcctggccgcggcccgggctccgtgctacccctgccccgccgggtggctccccaaagccggttct

SEQ ID NO: 119529 - DNA, 15 bp, Homo sapiens
  chr10:102892090-102892105
  hyper
cggaggagctctccc

SEQ ID NO: 119530 - DNA, 255 bp, Homo sapiens
  chr10:102893696-102893951
  hyper
cggcgacggcggcgtcggactggcgggcaggaggaggccgtttcccgccgtgggcttgtcgctgagggctaacgggaggatctcggccctgctcgtgggggttcagctgctgcgctcgctgactcgcggggtgttgggcctgggacgcttcctgacgctctgctgcttgcctctgccgtctgtctgtctcccgctccagtggccctctcacccttcactgtaacacgccgtataggtcacccctatcagaaccgg

SEQ ID NO: 119531 - DNA, 1155 bp, Homo sapiens; identical to SEQ ID NO: 47573
  chr10:102894090-102895245
  hyper

SEQ ID NO: 119532 - DNA, 418 bp, Homo sapiens
  chr10:102899183-102899601
  hyper
atccccgcaggcccgcggagtgctcaggttgggccctgacgagctgtgtggagcgtagtgagcaggttctggcggcagcgccgggtctgctgcaggtctcccgcattcaccggctgtggcacccagcgccaggccgcgcaaaatccagaaatagcctccagcacctcagaagtcgtctccctctacctgggcaggtctgctgtcccctctgctcccgcaggactggagccaccgagctcgcgccttcttctcggggtgcgatttctctcctcttttggactcaagatcaatgcttcccggccggcgcagatcacacagcaggaccccaggggagactgtggccttcttcccgcctcccaattccccaagaccgcctctagaggctgctgtgtccggagaactccgagcattttctgga

SEQ ID NO: 119533 - DNA, 14 bp, Homo sapiens
  chr10:102899841-102899855
  hyper
ccggagccctcagc

SEQ ID NO: 119534 - DNA, 263 bp, Homo sapiens
  chr10:102900262-102900525
  hyper
ggaggctggaggggaggggggctgcgagggtcacagtcaaggccaactactcacaacagaaagctcgaaactctccctctacctcccctgccggaaatgacccgtctctgttcaaaaatagaaaaagaacgatcggaataattgttcgcagaggtgccgggagagaaggggaattaacaaacctgcctgcgcggagaggtctgcttccttctttggcttcagaaccgacggcaatcaccaaattcctgcggccagcgagccct

SEQ ID NO: 119535 - DNA, 30 bp, Homo sapiens; identical to SEQ ID NO: 47576
  chr10:102905722-102905752
  hyper

SEQ ID NO: 119536 - DNA, 30 bp, Homo sapiens; identical to SEQ ID NO: 47577
  chr10:102906934-102906964
  hyper

SEQ ID NO: 119537 - DNA, 121 bp, Homo sapiens
  chr10:102973523-102973644
  hyper
gctgcctccagccccgcagcccgccgcagtgccaaataacagacggcagagggcgctcctacctaacctttcccatgccgcggagggtgcgaggaccggaactttgcgagccgagaaagtt

SEQ ID NO: 119538 - DNA, 2925 bp, Homo sapiens
  chr10:102975123-102978048
  hyper
gggtgtagactcccgcgtcccggggctcccttcctcgctcttccttcggacacccacagcagctgctcctggggaatctgcccccaagtttcgaggaactgccccccagcgcccaggaggaaaggggaatggggctgtaaacgtgtctaattcagacccgttatccagatcggaattagtttctcgcggacacctccgcgccgcgggccattctctgcctggggcctttcttggaccgatccatagggcctcgactggcttccacggcgcttgcaaattagagactctgatgcctcaaatttgtggggtcctgcctccagctcatccccctctcccgaggcttggcctaaaggcaccatccctgccactcctcaccccctgaattcagtcgggggcctgtgtggagggaaaggaaaacctggagagaccaagtggctgcactgccaccgcgcaggcatggatcctgcctggccgccgtctgggaactcgagatccgaggaggggcaaaagccgccggcgccggggtcaggcctggtggacccgagctccttggtgagacctggacccaccgtcttctccttcaaaagcacagggtggcagcggggaaaggatacgttcccattgaaggggcgatggaaaactggaatcagagactgaaggaggcggggcatgggaccccggaagatgcctcccagacgttccaggcctgcttgcccggctccggaggtcttagcagcatcctcggaggttgccaaacacctgggaagggggtaggtggagcttgaaaggactctgggtctctctttgggaatgcaaagtcccctcaactctcctggccctcccatccgccccccacccgcgccagcgtgtggtagccccgagcctagcacgctgagatgtgggaaggtgtgggtctgcccagtgggtggccccgacagaacgaatccgaggtcctgggaggaattgggagacgtgaagagttgggtatctgccgccccaaggtggggccatccgcttggcagtttcggctctgcgggcggcgcggcctcgcgcggaatctagccagcccctgagagtccccgccccctccccgaggcccaaggtattagtgctgcttgatcagacctcatttcctgcgaaaatggaaacatatccagggtccttaataaagtgaatgacgaggcttcggtgtaattgggcttccgtttggtggctatttccttaaactgagagtggaaaaaaatgtaaactcacagcgctcagatgtaattatatgattatcaaaaggagtgcaggatggattagccgagcaacgacctagagtctgagaaacgggcaggcacaaacgcttactcagaccaagggacccagaagtcccggacttccacaccagccccgcatccaagcgcgcgcctttgaaaccttcggcctctcctgccagccagagacccgccctgccgttgccatcgggacacgcgggatctttatttatacgctggggtgggtcttttccttcctcgcagaggaggagcgtcctctaaggcaaggggggtgggtgctggctacgagtcccctgaccgcctgcccggcccgcgtgcgctggctgcatatttctatgcataatccaattttctccgtgactatctagttaaactctttaacaacagctacataattagaatttggattcccattaattttccttgggcctcgaaccatttgcagctcacactggtaattaatgcgatacatcactaactttacccagcgcaggccggcccggctcaggtcgctcggccagcgcctggcgccctcgagcgggaccctgactcctgaccctgcttcccaggtgggagccgttttcctccttccaaagccagatgcctcgggcccgcgaaccaaaagccttctttccaggaaatttcacaattaaaaatatttatcgggagcagatttacgtttctgggtttccagtctcggggcgtctgggtaggctattaagagtaattagcatcttttgcgcatgcagatttacttcgctcattgccacataactcatccctaaaagccggcgcaggcgaaagcaggcgccgccggcggagccgctgccacagctaccgccgctgcccgcccgagcccccctcccctcctgcgctgcccgctcccagtctctccggcccgaattgtccgctccaggccccagacgctgaacacggaacgaaaaggcttccatcctggagacctggagacgagtgacgccagagcgacctcgtgcggttggggaaggcccagactaggctctccaggctggggccgcgccgtctggaccccaggcattgcgaccacgcatgtgtgtgcaccaccgagtgggcgcttgtgtgtgtgcacgctcacgtgcgcgcgagtgcacaggagtatggttgctagtgcgcgttcctgagagggcgaaggggcgcgtggaaaacgagctgatcaccatcctccccttccctgcagcccaccggttcccaggacgacgctcaaacgtcagtcctaggccacccacctagggcactgagtttcagagggagactcgggcccctaccttgcctcgaattcccttctacagagccagttccatccagccaaacggcctggagcactcagcgcccagccgggggaactgggaggcccaacacccggctgcagccgagcgcatggctggcctggtaccggtgagaggccgccagagaaagcgcaggcggagccgggggtcactgaacagagactttcagggtcgctggggggcggctggagacgatgaggccacgcgactgaagggattggggggtgaggagtggtggtgggggcggacaaagggacaacgtggcggtggacgaaccagggccagagagggccgctgtggctcccgctcttcgggccgaa

SEQ ID NO: 119539 - DNA, 181 bp, Homo sapiens; identical to SEQ ID NO: 47581
  chr10:102978303-102978484
  hyper

SEQ ID NO: 119540 - DNA, 337 bp, Homo sapiens; identical to SEQ ID NO: 47582
  chr10:102978736-102979073
  hyper

SEQ ID NO: 119541 - DNA, 739 bp, Homo sapiens
  chr10:102982317-102983056
  hyper
gggcggagggtaggcgcgcggccccagctcgtccctttcaggggggactcatgcatcaaacttcaattttccggacgattgaattagtgattttttttctcctgaactaaaatacacttaagtctttgggattaattaccacgttctggtccctcagactggagtattacttatcggagctgcgtctgacaccggcccgacacctcgtaaaatagggaactgcgcctctctgcctcaccccgcgccgctcgccaggccaccaagccgggaaaggcggagcgaggggaagccgaacaagcgggatcggccgtccgcgcgcggaggggttcctagactggagagcagaaactacccgcgtcccgggacttggcaagccccgtcgagccccgggacacaacggggaagggagagacaaagccgagccgcctctcctggccagcccggaaccgaaagtgggtccgtagagagcccagagtcctgggggaacagatgggcaaagggctctaggaggtgatggaactcaggcccgaagggcaggcagcccacaggataccaagccttaacgaactacgccagaagaatgggcgtagggcccacagcccctcacacaacccaggccaagctccctcgtacactcagaccaggagaagaaacagacacgcaatacacaagccccgctcccttggagcctacacttgggcgaacacaccactgctgtttgcagtatcccgagacaggc

SEQ ID NO: 119542 - DNA, 292 bp, Homo sapiens
  chr10:102983087-102983379
  hyper
cgaacttgggatttgaggctctctcacatcgccggtcccagcggcagcgcctgaggcacagccaagaccatccgaggtccccgggccgcgcgcaggtagcagacttcttcagaactgggggagctaaagagagagtgggcttagagcccaggcctccctggatcccagatcctcgcctccgcctacagccaagcccctcagcttttgcccagagctgctgacttcctcgccgcctccctgcgcaatgggacctagagataagccccaagcccgggtgctagtccaggcagag

SEQ ID NO: 119543 - DNA, 484 bp, Homo sapiens
  chr10:102983434-102983918
  hyper
cggctgggctccggaagcccacccggaacctgatggaggcagcgaattcctcagagcagaggacactgcggagaggctcgaatccacttcccacattgtgcgggaccgagcgcgcagggcgctctcgcgtggcctccttagctcgggttcagccgaggctctcacgtacacttcgttaccccttccccccgccgcagctctggtccttccttccactggctctcttctctggcctatggaaacaacgaactacttttcgcctttcaaggcccgggtcccaagccacctcctctgtgaagccgccaacaccctggtagctgcctctcagtgttttgcaactggcacggccctgtccctcggtccgcttctactagcgctgggggtgctgcgagtcttgcccactagactaggagctccttgagggcaggaaccgaatctgattcgtttccattttcccagcccccctgcgcggcctggcgcagaa

SEQ ID NO: 119544 - DNA, 137 bp, Homo sapiens
  chr10:102984233-102984370
  hyper
gcgcctgcttagctgcgcgccccgcgggcgccgcagctcgggtgggctcagccctggggccgccgcccccagcccaaagggacccagcggggccaggcccagggccgcgaagcagagagcggccggaggtgccaggg

SEQ ID NO: 119545 - DNA, 273 bp, Homo sapiens
  chr10:102984512-102984785
  hyper
cgaggaggcgcgcgcggggacctaatccatcaaattgtctacaaattgtgaagaaaattcaaaaaccatatggtcgccagcgccggcgcgctctgggctgcggagggccgcggccgtgcccgcaccgggagccgcggggggctgggcccggctattgtcgcctgtcagcggccgcccaggcccattcgtcccggccttcatggtccgcgctccgaattacagacccatccatcctaagagagggcaatttttgtcgcccgggaggaaccagcc

SEQ ID NO: 119546 - DNA, 30 bp, Homo sapiens; identical to SEQ ID NO: 47585
  chr10:102985181-102985211
  hyper

SEQ ID NO: 119547 - DNA, 30 bp, Homo sapiens; identical to SEQ ID NO: 47586
  chr10:102985499-102985529
  hyper

SEQ ID NO: 119548 - DNA, 188 bp, Homo sapiens
  chr10:102985772-102985960
  hyper
tttatgggcaagaggcgcctcctcctgctgcttccccctcgcccttcactcttaagcctgtcctgaaaatcccccccaaatctccaaggctagggcgaccggcacgaagagcggcaagaagcccagcctgccgctgcttctcggaaacgggcccaccactcagacacggtcgccgccggttctagtaa

SEQ ID NO: 119549 - DNA, 488 bp, Homo sapiens
  chr10:102986464-102986952
  hyper
cccacatgaggaaaaaaggcccgaggaaatagaagtcaactgcaataaggccgagggaggcgaggaaggagcgggccggtgcattcgccacatgcagagaaaaatcaaaacagccggagctgccactcccctagaccgcagggttagtgttccccgccctggtttctgtctcgccctcagcaaacccggcagcccgagagctttgaaaacatcgaaatctccgagatttaaaaaataataataaaagaaaggaaaaatcaggctgcggtgggaagaacccgctatataggtttaaatatttatatagaagccatacagaattgcacggcgagggcttccggggcggcggaggccgctggtggcggccggcccggccggccagcctgggtttattgcttcgagagggaagaggcggctgccaggagccgagtccggggccggggacaggggaggaggcgggagttggcagaggaggtcccagctcccct

SEQ ID NO: 119550 - DNA, 350 bp, Homo sapiens
  chr10:102987206-102987556
  hyper
gccaccgccggctgtggcctccgagttctgctcgagttcggccagcgccacgatgtccatctgcccgctggggcccagtttcttggcggactctacgtcggccttcatctcctccaggtcccgcttgagcttagcgcgccgattctggaaccaggtgatgacttgcgcgttggtgaggcccagctgctgcgcgatttggtcgcgatcggcgggggacaggtacttctggtatagaaagcgcttttccaattcatagatctggtggttggtgaaggccgtgcgcgactttcgccgcttcttaggggtctgccgctgcccaaagatggtcataccgtcgcggcctgggagga

SEQ ID NO: 119551 - DNA, 1008 bp, Homo sapiens
  chr10:102987928-102988936
  hyper
ctcgattccccacgccgagtagccgggctaagagcgcccaggacactgggaacgcaagggagcccggcaaagcaagcagactgcggaaagagcttggccacccttctcctgccaccccccagctctggcctacccagaggtccctgggaaataaggattgggtcccgtcccacatatcttcactcccataagcagctgctcaggctggaaggccctggcggccggagagggcagaggcgagcagaggcataggggacgaagcgcgcagggcacagggcgcgaggcgctgggtgcaggggaacccagcagctgcgcctaccttcggctgcctgcagaacgctgacctccagccccttaaacgtcttgctggcgagctcctccagcgcgcacagcggcgaggtctgcgagagcagcgcgcggcccgccaggggcaagccgccctgcgcgtgcttgtccgcggcggccagcaggtgcgccgccccgcacagcgagtaacttctccgcacagacggcttgttgaggatgtcctcgatgctgaacggcgtcagtggcttgttggagttggcaggcggaggcaggtggtccagcgggctgcgccgccgctcctcccccggcgccgccttgccgtcctccttggaagtcatctcggccttgttcggggtcccggccggggcggctcgggccgcggggacccagcccgcgggcagctcgggcgccggacggcgcgggcaggcagcggcgggtggaaaggaggccgcactgggcagggcgcgggccgggcgcggggccgattagcgcggcggctgaggaggggagaacagcgcggggccccgggaagagggcgctgacgcgggcgccgctgctgctggggcttccagcaatccggggccggagccggggcgcgctgcgcggggctccagtttcgccaaccccggtgctatttaaaggtgtcaggtggctcggcagtggctcctggccccgggtcctggcggccgcagttggaagagc

SEQ ID NO: 119552 - DNA, 999 bp, Homo sapiens
  chr10:102989239-102990238
  hyper
agctcattaattagcgggccgggggtaggaggagccggctggaattagcctgcctaatgcgcctgtcagtccgggcgctgcgctgcgttcggcccgagctgtttgtaaattacattagctgctcctttattgcacccgaacctcgggcgactgaaaagccaccgcccccaccccaaactgcgagccgcgctcctggcgcacccgcctcccgccggcctagctgcaatgaccgcaccggcccgaaggtctcggtctctccgacccgggatgtggagcccgaaagagtggtgggaaccccagcccgggagggacgcggccgccgctcgggccaggtaggaccaggagcccgggtgggccccgctgccacccagagtggactttgcggagctgagatcaagagcccagcgcctctacctctgaccctcttgcccctcaccccactgcctgggcgacgcgcctggggagagggaatctgaagccctcctgcgctggcccgcaggaggtcagagccggctgcgcagccttgggtgggcgacgcgggaagggggtggaggaccccaggggttgggggagggggctagtcggagagctcagccttctccacgcggagaggcggaggagggaattgttggcggctctggacgcctctccccggcctgattccgaagcggccgccctacctcctccggcaatcttgctcactttcctccggcagccgctccccaggctggctggggccaccaacggcctgatgatgggcgtctgaagagtagccaggccaggtgccggggctaacggggccggctccgtgcctccctgctgcgctccgcccgggccccggccggggccccgctgccggccccgcctagcccagcgcccggcttgagtgcatggccaggccgactccagctgttccggatgcggggcgggggcccggcgggagccaggccgcggctggggctttgctctcaggaactcgcagggaggccaggcttccag

SEQ ID NO: 119553 - DNA, 508 bp, Homo sapiens; identical to SEQ ID NO: 47593
  chr10:102995972-102996480
  hyper

SEQ ID NO: 119554 - DNA, 230 bp, Homo sapiens
  chr10:102996596-102996826
  hyper
cgccaggctcggatctgtgctcagagccgggatccctccgggctgcttcgtcctggccaggactttccttgccctgaagtgaggcgccagggaagctgcagggccctccgccctctctgaactcccacgtacttgggcctctcccagcctttcttggacctgtggaagcaattcctgcaggaccagactcccctgtctccccgcggccccctaggtacactccgtaactt

SEQ ID NO: 119555 - DNA, 328 bp, Homo sapiens; identical to SEQ ID NO: 47595
  chr10:102996899-102997227
  hyper

SEQ ID NO: 119556 - DNA, 303 bp, Homo sapiens; identical to SEQ ID NO: 47596
  chr10:102997281-102997584
  hyper

SEQ ID NO: 119557 - DNA, 246 bp, Homo sapiens
  chr10:102997849-102998095
  hyper
agccacacagtctgacgttagacgggtgaatccagccctcgcagggcctggagtgacctaagccgagaggagctgggctgaatctccaggcgttcctttctttctgccctaggaaagctttgaaattcttattttcaggtaaacgattttggcagtgcccggagaaagatagaagtaagacctaaagaggaactttccgcatgttatgggagagcccctggggcgaggaggcgagggcagccttcc

SEQ ID NO: 119558 - DNA, 54 bp, Homo sapiens
  chr10:102998372-102998426
  hyper
ggctcccggtgaccccgtccccagtgccagcggtggggtcgcctgtggcggccc

SEQ ID NO: 119559 - DNA, 145 bp, Homo sapiens
  chr10:102998647-102998792
  hyper
tggactgagggcgccgctgccacagcgcctgctgccggcgggtcgcgggaagcgtaggccctggccgccgcgctccccgcgcgggtccaacgccctgggtgcccttctcgcctgcgccttgaagcccccacgcccatcctagcgc

SEQ ID NO: 119560 - DNA, 251 bp, Homo sapiens; identical to SEQ ID NO: 47599
  chr10:103043976-103044227
  hyper

SEQ ID NO: 119561 - DNA, 149 bp, Homo sapiens
  chr10:103044300-103044449
  hyper
cgtgcctgcctcgcctccagcccggggtaaggagatccacggaggcctctgcgcctaaactcaggtggccagacagagttggggcgggaggcgggtatacggaaaggacacccttcccctctatgggccccgcccgctgtgcaagggtg

SEQ ID NO: 119562 - DNA, 466 bp, Homo sapiens
  chr10:103051149-103051615
  hyper
cacagaaggacccttcgcgcaggatgtcccggagactcgtccacgctccctagccgggctgcgaaggcccagatctcccagcgcctccatgccgcgtcggccgcggccttgggggtcttccggggacagtggccagccctgggccggtgacctagcctttgggcgcttccccggggctctagggtcccagggcgccagggccaacaccaggaaagccagaaggttccttcctttggggcaggagttggggggagtcgccgtacgcccaccctgccacgcgggaggcctccgggagagggcagagggcgccgggcagggaccaatcatcggcggcgaccggtcactcgcgccccagcgaggagaccctgagatccgcggggagagcacagggtcgcgccgccccctggcggctcaatgacagagttgaggcccggcggctggcgactgcggcgtctggcagctccag

SEQ ID NO: 119563 - DNA, 30 bp, Homo sapiens
  chr10:103051866-103051896
  hyper
agcccattagatctcgtactattgatccgc

SEQ ID NO: 119564 - DNA, 493 bp, Homo sapiens
  chr10:103052146-103052639
  hyper
cccgccccctggagcgggagcatttgggttgagctgcgcctgtcctataaatccacatataattctcctctttcctgttcagctaaggaaaataaacgtgtaaggctgtttctgggagcccagctcagggaccgctctaaattctcctcttattgagtaggggctggaaatcattcagctcggcggcgcgccccagaaccaccccctacccccgctccggcccgcggccgcgcccgcgcccgccgcgcacacgcacgcgcgcacacggaaggcaggcgccgggtatataaatatctccagctctccccatagccgggcagatttattccgctgccaagcctgcagaaaattgacttgttcatggaggcggctattgacacatcaccggggggagggttaggggagaaagcagtggagccggcgcccctccattatacgttaatgtaatcagcagtgtgcgaaatgactgcgcggaaaatagcatcactgacat

SEQ ID NO: 119565 - DNA, 30 bp, Homo sapiens; identical to SEQ ID NO: 47603
  chr10:103113509-103113539
  hyper

SEQ ID NO: 119566 - DNA, 30 bp, Homo sapiens
  chr10:103113761-103113791
  hyper
tgggctttcgcctgcgcacggagaagccga

SEQ ID NO: 119567 - DNA, 226 bp, Homo sapiens
  chr10:103326425-103326651
  hyper
cccccacccccaccccgtgccggtaacgggagccgatcctgctccgcccgccccgggagggagcccagccgctgccgccgggccgccaatcacgtcggggcccaagacgcccagaccgaggagccgtgaaaccacgcggcccttctcggcggaggaacaaagccctgcgctcagcggccgcagggggctcaccgggcgtctggcctgcctgcggccaggacgtgca

SEQ ID NO: 119568 - DNA, 139 bp, Homo sapiens
  chr10:103329325-103329464
  hyper
ccgtccaaggtcgacgggcctggcccagccataaatcacggcggctggaggtgggctacaggcggagcgatggtccctgggatgcagtccagagctcagcccccagctcagcccgggaggaggcgcagacggcctcagc

SEQ ID NO: 119569 - DNA, 440 bp, Homo sapiens
  chr10:103347718-103348158
  hyper
tgtggggagccctccgggaatggaggagtctcgcagctgcgggtgaagtcccgggcaggtgcggtgtactcgccgtgtacgcagctggcgcaggccagggaatcccagctcggggctagaagaaagctggagtgcccgaccccggccccaagagtctctccaacccccagagtcggtccccgggtggggtcgactactggccaagctagtcacccgggggtgggcaggaatagaccacttaccagcagagccaatgagagcggacgaaggggggaaggagggcaaatggccagaatagcttccgagtcagccggaagtgaccctctggaacggttgccatggcagcggctgggcgtgctgcttagcaggggaaagatggcggtgacgggctggttggagagtctgcggacagcccagaagactgcgctgctgcaggacgg

SEQ ID NO: 119570 - DNA, 203 bp, Homo sapiens; identical to SEQ ID NO: 7591
  chr10:103348787-103348990
  hyper

SEQ ID NO: 119571 - DNA, 48 bp, Homo sapiens; identical to SEQ ID NO: 47607
  chr10:103454952-103455000
  hyper

SEQ ID NO: 119572 - DNA, 390 bp, Homo sapiens
  chr10:103535380-103535770
  hyper
tgccctcagccctcccgcgccggccgcagagtcagtcccggtgcccccgaccggcgctgcccacccgggtctcacaccggcgcgcccggcccccgcctccgcgcacccctcctcacctgggcttggaggcagaggaccagcaagtgcaacagcctgtgggagacaaaagcgggcgggagagagaggcgcgggtgaggcgaggggcgcggggggcgggtggcggggcagggcggcgcggtactcacaggcagctcagcgcggagcgggggctgcccatggcgcgcggccccggggcaccgagagcccggcgggtcacgccgtcccgcgggccgccgcgggaggacgcgctgagcagggcgcgagcggagagggtgcgggtgcgggaggccg

SEQ ID NO: 119573 - DNA, 415 bp, Homo sapiens; identical to SEQ ID NO: 47609
  chr10:103535841-103536256
  hyper

SEQ ID NO: 119574 - DNA, 113 bp, Homo sapiens; identical to SEQ ID NO: 47610
  chr10:103536299-103536412
  hyper

SEQ ID NO: 119575 - DNA, 30 bp, Homo sapiens; identical to SEQ ID NO: 47611
  chr10:103539504-103539534
  hyper

SEQ ID NO: 119576 - DNA, 30 bp, Homo sapiens; identical to SEQ ID NO: 47612
  chr10:103539938-103539968
  hyper

SEQ ID NO: 119577 - DNA, 141 bp, Homo sapiens; identical to SEQ ID NO: 7594
  chr10:103543155-103543296
  hyper

SEQ ID NO: 119578 - DNA, 32 bp, Homo sapiens; identical to SEQ ID NO: 47614
  chr10:103575732-103575764
  hyper

SEQ ID NO: 119579 - DNA, 32 bp, Homo sapiens; identical to SEQ ID NO: 7595
  chr10:103576003-103576035
  hyper

SEQ ID NO: 119580 - DNA, 30 bp, Homo sapiens; identical to SEQ ID NO: 47616
  chr10:103577305-103577335
  hyper

SEQ ID NO: 119581 - DNA, 30 bp, Homo sapiens
  chr10:103578519-103578549
  hyper
gagccgcggcctctcgttcttaaagagata

SEQ ID NO: 119582 - DNA, 31 bp, Homo sapiens
  chr10:103599573-103599604
  hyper
gcacctgcgggggcatcggttcatggtttgg

SEQ ID NO: 119583 - DNA, 258 bp, Homo sapiens
  chr10:103600529-103600787
  hyper
tcttgtccacttgacggcgactatccccaccgcaaagcagctccgtgcgcatggctcctcgcagccacacgggggcgcccccgccccggcaacaatactcagggccggagggactccactgagatcccagtcgggggaccgagctcagggctagccagccaggctccaaccctctccgcatcttctcttggcctttctctcttccgctcagacagggccgctgctaaacgcggcctttcccctcggaaccgcactgcc

SEQ ID NO: 119584 - DNA, 30 bp, Homo sapiens; identical to SEQ ID NO: 7596
  chr10:103601064-103601094
  hyper

SEQ ID NO: 119585 - DNA, 30 bp, Homo sapiens
  chr10:103815167-103815197
  hyper
ttctgcttccccattcgccaggggcagcac

SEQ ID NO: 119586 - DNA, 30 bp, Homo sapiens; identical to SEQ ID NO: 47618
  chr10:103816074-103816104
  hyper

SEQ ID NO: 119587 - DNA, 198 bp, Homo sapiens
  chr10:103824902-103825100
  hyper
tccgggccactgggcggcgtcctggggtctggggaagggcctccccctgcgccgagagcgtgcccgggcgggcgcggtccaggcgctgagcccctggggcgctcccgtggctcctcccccggcgggcgtgtagtgtcggcccagcgactgcgggaggcatcccggagccggccgggcggggcggagtcgacgctcggc

SEQ ID NO: 119588 - DNA, 30 bp, Homo sapiens; identical to SEQ ID NO: 47620
  chr10:103825762-103825792
  hyper

SEQ ID NO: 119589 - DNA, 30 bp, Homo sapiens; identical to SEQ ID NO: 7597
  chr10:103879812-103879842
  hyper

SEQ ID NO: 119590 - DNA, 117 bp, Homo sapiens
  chr10:103880249-103880366
  hyper
aagccgggcagggccgggctttattaatatgctaattgtcctgctagtgggaggggagagccgtgtcaaagtgacccgggagagcgcgcagcaagcgacgacgtgcgtgcgccgcgc

SEQ ID NO: 119591 - DNA, 30 bp, Homo sapiens
  chr10:103880693-103880723
  hyper
ggccccttgtttcgcgtccctaccctaggc

SEQ ID NO: 119592 - DNA, 175 bp, Homo sapiens
  chr10:103892294-103892469
  hyper
gagggcggagaacgcgacattttccgattaagtttgcagtactgccgcaatatgggattaggtgaggattagcgcttggagcgcaagtgcccactagggggtggtgtttcaaaacatatacaggcccacttggccccacttggactaaggtgaaaggaacgtacagcaggtagaa

SEQ ID NO: 119593 - DNA, 30 bp, Homo sapiens; identical to SEQ ID NO: 47622
  chr10:103911866-103911896
  hyper

SEQ ID NO: 119594 - DNA, 200 bp, Homo sapiens; identical to SEQ ID NO: 47623
  chr10:103912111-103912311
  hyper

SEQ ID NO: 119595 - DNA, 30 bp, Homo sapiens
  chr10:103912564-103912594
  hyper
ctggcagagtgcagcggggaggtagagtct

SEQ ID NO: 119596 - DNA, 371 bp, Homo sapiens
  chr10:103985870-103986241
  hyper
ggggtggacgttttacgggagaaaaggctggggaagtgggcgggcgatggcctacgacgggacttggggcggggtgtgcgaaacgcctggcaggcgggcccttgagtatgaccaatcagaatgcggactgcgtcccaggggcggagcagaggcgtatcttggtcgagattggatagcggcggggcgcaggaaagaggtcgcgccagcccgggcaggcagctttgcaagtccgcgttatatatcgcagtggctgcgcccgggatagctggctgcgccgccgcgcacatgcctaggttcgacgccctcctccctttgcccaggagttccttctgtcccggctctgttccgtctcgccccgaggttcacgccat

SEQ ID NO: 119597 - DNA, 897 bp, Homo sapiens; identical to SEQ ID NO: 47624
  chr10:104000942-104001839
  hyper

SEQ ID NO: 119598 - DNA, 30 bp, Homo sapiens
  chr10:104004978-104005008
  hyper
agccactgccaaaccgcgcactgcaaccga

SEQ ID NO: 119599 - DNA, 32 bp, Homo sapiens; identical to SEQ ID NO: 47625
  chr10:104005225-104005257
  hyper

SEQ ID NO: 119600 - DNA, 30 bp, Homo sapiens
  chr10:104153685-104153715
  hyper
cctgagccctggcccgctgggaacctgtca

SEQ ID NO: 119601 - DNA, 30 bp, Homo sapiens
  chr10:104153918-104153948
  hyper
agggctggggccgtcggcttccccctgggg

SEQ ID NO: 119602 - DNA, 30 bp, Homo sapiens
  chr10:104154197-104154227
  hyper
ggcgcgaggcgtgacgcacggaaacgtcat

SEQ ID NO: 119603 - DNA, 30 bp, Homo sapiens
  chr10:104154484-104154514
  hyper
gacactcggatccacgtcgacaccgttgta

SEQ ID NO: 119604 - DNA, 30 bp, Homo sapiens; identical to SEQ ID NO: 7599
  chr10:104155270-104155300
  hyper

SEQ ID NO: 119605 - DNA, 30 bp, Homo sapiens
  chr10:104155635-104155665
  hyper
caactttaggcgggcgtctaaaattctggg

SEQ ID NO: 119606 - DNA, 85 bp, Homo sapiens
  chr10:104170177-104170262
  hyper
gcagcgcagcagcaccgggaaggtctttttggctgtccacgcggcgggggagcagtgtggagtgtacccccatccaatccctgtc

SEQ ID NO: 119607 - DNA, 393 bp, Homo sapiens; identical to SEQ ID NO: 47628
  chr10:104170407-104170800
  hyper

SEQ ID NO: 119608 - DNA, 218 bp, Homo sapiens
  chr10:104178851-104179069
  hyper
ctccagaccccacgcgtgtccctaggaggctgccacatgacctgttacatgccacacgcgctcccgcccccacgagcacgcggccgcgccaagcacacggtatgggtgtagactggacccgccccctaaatccaggagaccatcaactatggaaaggagatctagggaacaccgtcttgaacccgccaggggttttgagtctcggacccaggagatcc

SEQ ID NO: 119609 - DNA, 100 bp, Homo sapiens
  chr10:104179456-104179556
  hyper
agcgccagatttgtcgcactgcgcaggcgcagaggcgcgaacaaagaggggagggggacgaggcgcgcggccggaggtggtgcgcgctcacgtggctcta

SEQ ID NO: 119610 - DNA, 30 bp, Homo sapiens
  chr10:104180464-104180494
  hyper
ggatagtttctccccgtttttcaaagtcgc

SEQ ID NO: 119611 - DNA, 30 bp, Homo sapiens
  chr10:104180851-104180881
  hyper
agaaaatcttactgcgcacgcgcaatagac

SEQ ID NO: 119612 - DNA, 30 bp, Homo sapiens
  chr10:104181293-104181323
  hyper
cctgggtaccgccccgcctctagcccagcc

SEQ ID NO: 119613 - DNA, 293 bp, Homo sapiens; identical to SEQ ID NO: 47630
  chr10:104181704-104181997
  hyper

SEQ ID NO: 119614 - DNA, 30 bp, Homo sapiens; identical to SEQ ID NO: 47631
  chr10:104192138-104192168
  hyper

SEQ ID NO: 119615 - DNA, 112 bp, Homo sapiens
  chr10:104192422-104192534
  hyper
tgcccacaacagggcggagctcctgctctaattctctaacgtcccagggctatggacgggctcccttggcggccagttttgttgcgcgtagggaggcgttaggcgtgaaggt

SEQ ID NO: 119616 - DNA, 30 bp, Homo sapiens; identical to SEQ ID NO: 7603
  chr10:104195356-104195386
  hyper

SEQ ID NO: 119617 - DNA, 112 bp, Homo sapiens
  chr10:104210001-104210113
  hyper
tgcccttctcccaccgtccagcaataaagcgagagaaacaagtgcaggaaactggccggcagtcatgggagaagccaaaaagacaggtgagcagcgcgtccgcctcccgcgc

SEQ ID NO: 119618 - DNA, 47 bp, Homo sapiens
  chr10:104220985-104221032
  hyper
cttttaattttggtcgctaagggcaagcgcccgtgacaaacatggcg

SEQ ID NO: 119619 - DNA, 267 bp, Homo sapiens
  chr10:104221426-104221693
  hyper
cgcagaaaggctctccgggggtctggaggaaagggatgcagtgggtcaaatagctccctggtggtctgggatcgagggatgcactggtcaggtcgggatccgtgccattagcataaaggcatttaaccctggtggcacttggggagctttgaaaaacaccgatgctgggcccgcccgaagagattccgatttaactgttctgggtgaggcctgggcctcggtattattgcacagctcctcaggtgattttaacgtgcaggcggtggg

SEQ ID NO: 119620 - DNA, 30 bp, Homo sapiens
  chr10:104261847-104261877
  hyper
accacccagagtcccggaagccaatcccca

SEQ ID NO: 119621 - DNA, 143 bp, Homo sapiens
  chr10:104262486-104262629
  hyper
ccgccggttcagggcggcgagggagcggcccgacctcgcctctgaagaactacaatccccagcaagctttgcgcctgggttagcgatctagcttgctttgttgcccgcctagtttaagattgggagtcgcatttccaatgcgc

SEQ ID NO: 119622 - DNA, 121 bp, Homo sapiens
  chr10:104263673-104263794
  hyper
gtgcgccggcgccccgccccccttagcgccccgccgccccgaggcaccctctggcagactcggcggcggcgacagcctgggcggacagtgcgccgtgcgcaggcgcggagctagacctcgc

SEQ ID NO: 119623 - DNA, 30 bp, Homo sapiens; identical to SEQ ID NO: 7605
  chr10:104264834-104264864
  hyper

SEQ ID NO: 119624 - DNA, 30 bp, Homo sapiens; identical to SEQ ID NO: 47637
  chr10:104403692-104403722
  hyper

SEQ ID NO: 119625 - DNA, 31 bp, Homo sapiens; identical to SEQ ID NO: 7606
  chr10:104409284-104409315
  hyper

SEQ ID NO: 119626 - DNA, 46 bp, Homo sapiens
  chr10:104474157-104474203
  hyper
gcggggtgcagctccgctttccccagagtgcgcaagtgcgctaagg

SEQ ID NO: 119627 - DNA, 65 bp, Homo sapiens
  chr10:104474415-104474480
  hyper
ggtggcatttgtcccgggaccaggtaaggggccttgggacaatggcgctcgccctgtctacctcc

SEQ ID NO: 119628 - DNA, 30 bp, Homo sapiens; identical to SEQ ID NO: 47640
  chr10:104595232-104595262
  hyper

SEQ ID NO: 119629 - DNA, 236 bp, Homo sapiens
  chr10:104613986-104614222
  hyper
ttgtcttttggccccggcgactcaccatcgtcagtgcgcaaccgttcgctaactgaaatgatggcgactggaacgccagagtctcaagcgcggttcggtcagtccgtgaaggggcttctcacggagaaggtgaccacctgtggtactgacgtaatcgcgctcaccaagcaggtgctgaaaggctcccggagctccgaggtgagctggaagtggactctcccggcctgatagtccgg

SEQ ID NO: 119630 - DNA, 30 bp, Homo sapiens
  chr10:104629398-104629428
  hyper
gggcccccgcaaggcgggaacgcgagcgcc

SEQ ID NO: 119631 - DNA, 165 bp, Homo sapiens
  chr10:104678000-104678165
  hyper
tgtgattggctggtcggcctgcctctcgcgggagcagccggcgctcctctccctccctctttccctcccgcgagcctcggggttcctcagctggctgaggtggagtcagtgtcagtcagggaggcgaactgctgagcactggccgcggacgctccgttgcagtct

SEQ ID NO: 119632 - DNA, 31 bp, Homo sapiens; identical to SEQ ID NO: 7607
  chr10:104951847-104951878
  hyper

SEQ ID NO: 119633 - DNA, 30 bp, Homo sapiens
  chr10:104952228-104952258
  hyper
ttcaggcctcagatcggcatctcgccctct

SEQ ID NO: 119634 - DNA, 30 bp, Homo sapiens
  chr10:104953185-104953215
  hyper
gtctgtctgtcccgcgggtctggagatctt

SEQ ID NO: 119635 - DNA, 51 bp, Homo sapiens
  chr10:105025609-105025660
  hyper
ttccattctcagaatcggtgaagtctataaagcaggcgccgacaccaggac

SEQ ID NO: 119636 - DNA, 208 bp, Homo sapiens; identical to SEQ ID NO: 47643
  chr10:105036450-105036658
  hyper

SEQ ID NO: 119637 - DNA, 182 bp, Homo sapiens; identical to SEQ ID NO: 7609
  chr10:105036700-105036882
  hyper

SEQ ID NO: 119638 - DNA, 998 bp, Homo sapiens; identical to SEQ ID NO: 7610
  chr10:105036893-105037891
  hyper

SEQ ID NO: 119639 - DNA, 149 bp, Homo sapiens; identical to SEQ ID NO: 7611
  chr10:105037955-105038104
  hyper

SEQ ID NO: 119640 - DNA, 95 bp, Homo sapiens
  chr10:105041588-105041683
  hyper
gctgcgatgctcagacgagctaagacgatgctcagcgtttgtcttagctcctccaggagagaccccagctggagctgggcgtgccgctctccggt

SEQ ID NO: 119641 - DNA, 203 bp, Homo sapiens
  chr10:105110863-105111066
  hyper
cgcgggagttcggccggcctcggacgccaccactgcgcaggcgcggcagcctgaggggctcgccgggaaatgtggtttagcggccctcacctccgcggggcgcaaaccctgcagctccggggcaggctgcggggcgcgcgggccgcactttaaaggaatctcaccagattttctccttggaaggggacgctctcttcgccgcc

SEQ ID NO: 119642 - DNA, 30 bp, Homo sapiens; identical to SEQ ID NO: 47648
  chr10:105127617-105127647
  hyper

SEQ ID NO: 119643 - DNA, 121 bp, Homo sapiens; identical to SEQ ID NO: 47649
  chr10:105156272-105156393
  hyper

SEQ ID NO: 119644 - DNA, 574 bp, Homo sapiens
  chr10:105253253-105253827
  hyper
atccggggagctcggcgttctcgcggccctgctccccttgttttcaagtgcaagttccatgtttccgtgctgggaataaggccagccccgggtgccaccatactcgcctgatgtcttaccccgacccgcgccgccgagagcttgcggctacgggaacgcggcgcgccccggggccacatctggcctagcgggcgcgcgcgtgtcactaagacgctcattcaccggcgcagctgtcaccataacaaccggagcgagggaatcctggagactgccggggcggggggcgggggcggcggtcgcaggagggacccggcgcgggcgggaccgcggcggtcgggggacaccagctgcgtcggagcgcccagaacgccccgcgctccgccgagccccgctccacgcagacccgcgggcgggagggagccacgcacatcgccgccgcggccgtctccgcggggcggtaaccgagcctgcctcggagccgccgaacgcccacgccagcgaccctgactctatggccccgggggagcgcgccggagccgccgcgccgcccacccccagccggaaccctagcgtc

SEQ ID NO: 119645 - DNA, 588 bp, Homo sapiens
  chr10:105253853-105254441
  hyper
cgtccccggccccggcccagggccctgcttgtggcccccgctcccgccacggggcatgggaggcaggtagcccagcctgcgccaggacacccgtggcgggcggaacccgccaaggaccgcgaagtccagagaaaggaagctgaggagctgcccgcccgcccccggctgcagccccagcagggccctcccccggtggcgcgcacccgcgcgcgcacactcgcacaccgcacctcagcgcctgcccggcctcgcccccacccgcgagcgccgaacctcctggggccggatgccatgggtaacaacttctccagtatcccctcgctgccccgaggaaacccgagccgcgcgccgcggggccacccccagaacctcaaaggtaggctccccggccgagcgctgctggaggactggggcgcaggtggagggccagggaggtgtggttggggagggcgggcagacgccacctgttgtgcgtgtctggaggccggagatgcacctctggccgtggagtgggctgggggtggagggcagccggcgatgatggtgatggaggatggcgtcccgcggggtctgcgcagttctgtctgc

SEQ ID NO: 119646 - DNA, 31 bp, Homo sapiens; identical to SEQ ID NO: 47652
  chr10:105315201-105315232
  hyper

SEQ ID NO: 119647 - DNA, 30 bp, Homo sapiens
  chr10:105614684-105614714
  hyper
acagatgacttcaccgttgtaacagacaag

SEQ ID NO: 119648 - DNA, 30 bp, Homo sapiens
  chr10:105615031-105615061
  hyper
cacaaagcgagtggcgcccccggcggcgtc

SEQ ID NO: 119649 - DNA, 370 bp, Homo sapiens; identical to SEQ ID NO: 47653
  chr10:105615412-105615782
  hyper

SEQ ID NO: 119650 - DNA, 30 bp, Homo sapiens
  chr10:105677668-105677698
  hyper
actctgggaagatacgtctgtacaggcgta

SEQ ID NO: 119651 - DNA, 30 bp, Homo sapiens; identical to SEQ ID NO: 47654
  chr10:105694285-105694315
  hyper

SEQ ID NO: 119652 - DNA, 30 bp, Homo sapiens; identical to SEQ ID NO: 7613
  chr10:105726673-105726703
  hyper

SEQ ID NO: 119653 - DNA, 257 bp, Homo sapiens
  chr10:105727530-105727787
  hyper
ttcaagttggggagcgagaagaagaagaagcagtacgaacacgtgaagagggacctgaaccccgaagacttttgggagattataggagaactgggcgacggagcctttgggaaagtgtacaaggtaagagggggaaaacgggaagttgtactgcgaaggtaaaacagccactggcctggagtggcgggaggacttctgctcccctggtccttatcctgtccttcttttgactgttacggttcgatgcaactttactt

SEQ ID NO: 119654 - DNA, 30 bp, Homo sapiens
  chr10:105880975-105881005
  hyper
tgcttcctgtgttgcgccacaacaaatttc

SEQ ID NO: 119655 - DNA, 30 bp, Homo sapiens
  chr10:105991563-105991593
  hyper
gggatccgggctgtcgccaggtggaggggg

SEQ ID NO: 119656 - DNA, 377 bp, Homo sapiens; identical to SEQ ID NO: 47657
  chr10:105991884-105992261
  hyper

SEQ ID NO: 119657 - DNA, 419 bp, Homo sapiens
  chr10:106014280-106014699
  hyper
cacaggctctgaagtcgtgaagccttgggacggagcgggtggtgcttcgaggtcagtgtcacgggagggaggtcagggtcagggtcagacgtggagccccgtggagtgcggagtggtgaccccttcgttcgggggcggagggatgactgagcatttataacttttgtgtatctccccgtgggtgcagcccttggccagcgagatgctttgacacagccccttaagatgttttaagggctatcccataaagccgggaaggcacaacgggtggagctggcggccgccgggggcaggcacttttgagctaaggaggaagcgggggagggaaggagggcgggaaggacgcgccacctacttcctgaatcccctgcaaaccccagaggagctcggcctgcgctgcgccacgatgtccggggagt

SEQ ID NO: 119658 - DNA, 159 bp, Homo sapiens
  chr10:106014938-106015097
  hyper
cggtcccggagggctcgatccgcatctacagcatgaggttctgcccgtttgctgagaggacgcgtctagtcctgaaggccaagggaatcaggtgggcacccaggcgggggacgctccccgagccgtccgggagcctgctgcaggcggcggggtggggtg

SEQ ID NO: 119659 - DNA, 254 bp, Homo sapiens
  chr10:106034507-106034761
  hyper
tccagatcgcttccccgtgccccgccagagcccagtagttcaaaaattaaatttggggcaaggggtgcgcgccagagcgcagctgtttctggagcctgcggcagcggtggcgagccacagggcggcgaccgtgagctccgggagctgcgcaaaccacctggagaccatgtctggggatgcgaccaggaccctggggaaaggtgagtgctctccatggggtccgcgagctgggggcgccgcgtgacagaaaatgt

SEQ ID NO: 119660 - DNA, 736 bp, Homo sapiens; identical to SEQ ID NO: 47660
  chr10:106097222-106097958
  hyper

SEQ ID NO: 119661 - DNA, 681 bp, Homo sapiens
  chr10:106098025-106098706
  hyper
cggtccccgccgcgggaggacggctccagcacaggctttgcgcgcaggtcgagggccgaggcgccgctgcttgcaggcggctgcggtggagcttgcggcccggcacttagaggggcgcgggcggcgatgcccccgctggctcccaccttctggcctgcagcggccggctctactgaacttcagagttactcatttcctggatgtcacaaaaactttttcctccttataagaacaaaacacccgcctctacccgcggccccggaagctccttaaggaggaccgtgtgggtttcggtggttgggcccaggatccgccgggaagaccttcccagtgagcccccagaaacttccccggcacggcagaactggagagtgactgggagagacggaatcaggccagtggagtaaactggagcgagtggacaggggcgcggggaggacgcccttaaaagtcgtcctaagccgcggagcggaaggggttaagtccttaccagtcggggagagttttctgcggcgcgttttacaagtggcggaattcctggggccacctatttagtctcttggaggaaaatataactctagacaaaacgccagcctttttctcttttgcagcttgaaaggattaaaatagcttactaccgtttttttttttttttgagaaggagtttcgctcttgttgccc

SEQ ID NO: 119662 - DNA, 139 bp, Homo sapiens
  chr10:106098909-106099048
  hyper
gcgcctgggattacaggcgtgagccaccgcgcccgacttttatgataatcaaatgcatggttgcttttctccgggattaaccgggcacaaaggagaacagtgaccggatactgtacgggacaggcgcggtagtttctgg

SEQ ID NO: 119663 - DNA, 20 bp, Homo sapiens
  chr10:106113425-106113445
  hyper
gaaccctgcccaggtgccag

SEQ ID NO: 119664 - DNA, 336 bp, Homo sapiens; identical to SEQ ID NO: 47663
  chr10:106113480-106113816
  hyper

SEQ ID NO: 119665 - DNA, 123 bp, Homo sapiens; identical to SEQ ID NO: 47664
  chr10:106398564-106398687
  hyper

SEQ ID NO: 119666 - DNA, 464 bp, Homo sapiens; identical to SEQ ID NO: 47665
  chr10:106398825-106399289
  hyper

SEQ ID NO: 119667 - DNA, 1426 bp, Homo sapiens; identical to SEQ ID NO: 47666
  chr10:106399491-106400917
  hyper

SEQ ID NO: 119668 - DNA, 110 bp, Homo sapiens; identical to SEQ ID NO: 7618
  chr10:106401322-106401432
  hyper

SEQ ID NO: 119669 - DNA, 680 bp, Homo sapiens; identical to SEQ ID NO: 7619
  chr10:106401510-106402190
  hyper

SEQ ID NO: 119670 - DNA, 561 bp, Homo sapiens; identical to SEQ ID NO: 7620
  chr10:106402271-106402832
  hyper

SEQ ID NO: 119671 - DNA, 30 bp, Homo sapiens; identical to SEQ ID NO: 47670
  chr10:106440763-106440793
  hyper

SEQ ID NO: 119672 - DNA, 30 bp, Homo sapiens; identical to SEQ ID NO: 47671
  chr10:106441021-106441051
  hyper

SEQ ID NO: 119673 - DNA, 131 bp, Homo sapiens; identical to SEQ ID NO: 7621
  chr10:108923766-108923897
  hyper

SEQ ID NO: 119674 - DNA, 114 bp, Homo sapiens; identical to SEQ ID NO: 7622
  chr10:108923945-108924059
  hyper

SEQ ID NO: 119675 - DNA, 55 bp, Homo sapiens; identical to SEQ ID NO: 7623
  chr10:108924345-108924400
  hyper

SEQ ID NO: 119676 - DNA, 208 bp, Homo sapiens; identical to SEQ ID NO: 47675
  chr10:108924769-108924977
  hyper

SEQ ID NO: 119677 - DNA, 32 bp, Homo sapiens; identical to SEQ ID NO: 7624
  chr10:109674175-109674207
  hyper

SEQ ID NO: 119678 - DNA, 117 bp, Homo sapiens; identical to SEQ ID NO: 7625
  chr10:109674377-109674494
  hyper

SEQ ID NO: 119679 - DNA, 292 bp, Homo sapiens
  chr10:109674853-109675145
  hyper
cggcagccgccagcagagcccggtgcgggaccgggagctgccggggcctcagctccgctctccccacagctctccgtggctgcaggttgaggtcgaactgcaagcgccacggaccctgcctgctgtttactgcgttttcactggagactccagcaaatgtcctggagaggagagggattcctgctctgtccattttagtctctacattggcaccttggtgtaaacccacagcagaggctgcgtgtcctggctgagaaacacagaagggcagcggggacggaggtggggccgt

SEQ ID NO: 119680 - DNA, 165 bp, Homo sapiens
  chr10:110226003-110226168
  hyper
ccacttttcccaccgcgggggcggagaacagcagagaggggtcccagaccgaaggtggcagcgcgtggctctgcgctggcggctgtggggggcaggcgctcaggaccccaattccctccaagttgggccgcggtgggggcgggtggaggtggcgccgggcagctg

SEQ ID NO: 119681 - DNA, 289 bp, Homo sapiens; identical to SEQ ID NO: 47679
  chr10:110671594-110671883
  hyper

SEQ ID NO: 119682 - DNA, 417 bp, Homo sapiens; identical to SEQ ID NO: 47680
  chr10:110671929-110672346
  hyper

SEQ ID NO: 119683 - DNA, 220 bp, Homo sapiens
  chr10:111216352-111216572
  hyper
cagagagtcgcctgtcggagcaaatgtgacgctgattggcttcagctccccagctgcaaatgggtagctttgccggggtttctctcttgagctccaggcactctcaaggatccggttcatgtcttcgccctggcccgcttggtatagggggcgcacaggaagaggccaagaagtggaaagaacctcatctcgatgtcccaagtgacaaagcccccggggc

SEQ ID NO: 119684 - DNA, 157 bp, Homo sapiens; identical to SEQ ID NO: 7630
  chr10:111216610-111216767
  hyper

SEQ ID NO: 119685 - DNA, 22 bp, Homo sapiens
  chr10:111217161-111217183
  hyper
cgcagcttatgccctggcttgg

SEQ ID NO: 119686 - DNA, 40 bp, Homo sapiens; identical to SEQ ID NO: 7632
  chr10:111643944-111643984
  hyper

SEQ ID NO: 119687 - DNA, 150 bp, Homo sapiens
  chr10:111683212-111683362
  hyper
ccacgtcaggggagcgcagaccagctgatcacccgcggaagggccggcgcgaaggaggcgcgagagccggcgggcgggcgggcgggctagcgccgggtcggccacgccctcgcccgtggcgggcgctggcgccgcggccccgcccacacg

SEQ ID NO: 119688 - DNA, 767 bp, Homo sapiens; identical to SEQ ID NO: 47685
  chr10:111767115-111767882
  hyper

SEQ ID NO: 119689 - DNA, 99 bp, Homo sapiens
  chr10:111768339-111768438
  hyper
cccgacgcttcgcgcgtctgctggttttccctaggaaggcggggagtaccaaaatcagttactggctgaagcttaggtgaccccggggaccttaagccc

SEQ ID NO: 119690 - DNA, 49 bp, Homo sapiens; identical to SEQ ID NO: 7635
  chr10:111968982-111969031
  hyper

SEQ ID NO: 119691 - DNA, 47 bp, Homo sapiens; identical to SEQ ID NO: 7636
  chr10:111969324-111969371
  hyper

SEQ ID NO: 119692 - DNA, 30 bp, Homo sapiens; identical to SEQ ID NO: 47689
  chr10:111970013-111970043
  hyper

SEQ ID NO: 119693 - DNA, 1 bp, Homo sapiens
  chr10:111971053-111971054
  hyper
c

SEQ ID NO: 119694 - DNA, 30 bp, Homo sapiens
  chr10:111986014-111986044
  hyper
ccgagtttttggagcgccgggagcgaggta

SEQ ID NO: 119695 - DNA, 250 bp, Homo sapiens; identical to SEQ ID NO: 47691
  chr10:112064509-112064759
  hyper

SEQ ID NO: 119696 - DNA, 30 bp, Homo sapiens; identical to SEQ ID NO: 7637
  chr10:112065001-112065031
  hyper

SEQ ID NO: 119697 - DNA, 14 bp, Homo sapiens
  chr10:112257148-112257162
  hyper
ctataccccacccc

SEQ ID NO: 119698 - DNA, 1389 bp, Homo sapiens; identical to SEQ ID NO: 47694
  chr10:112257205-112258594
  hyper

SEQ ID NO: 119699 - DNA, 386 bp, Homo sapiens
  chr10:112327396-112327782
  hyper
ctgcaaggtggttccgtccgaggcgcggactccgcccccacgagcgccgccattttgtttggctgaggggagcgagcggcgctttgggggaggggtcgcgtaggcgcctcacctgaccctgcggccgtgcggttgctgctccggggcaggtctccttccaggccaggggcccggaatcatgtacataaagcaggtaaggccttcgcgtccctccaccccgtcatgggccggtaagggccgctccttgaggcgggagtgttgcggcgccacccgcagcctctcccctgtctccacaggctggaccagggctgggcggggactgtgggggaggagggagacccgggtcccgctagtgccccggctgcggggtcgcggagaattggggc

SEQ ID NO: 119700 - DNA, 30 bp, Homo sapiens
  chr10:112328125-112328155
  hyper
tgcaggatacggagcgccgcctccctcggt

SEQ ID NO: 119701 - DNA, 77 bp, Homo sapiens; identical to SEQ ID NO: 7640
  chr10:112328694-112328771
  hyper

SEQ ID NO: 119702 - DNA, 40 bp, Homo sapiens; identical to SEQ ID NO: 7641
  chr10:112333463-112333503
  hyper

SEQ ID NO: 119703 - DNA, 69 bp, Homo sapiens; identical to SEQ ID NO: 7642
  chr10:112335092-112335161
  hyper

SEQ ID NO: 119704 - DNA, 73 bp, Homo sapiens; identical to SEQ ID NO: 7643
  chr10:112337177-112337250
  hyper

SEQ ID NO: 119705 - DNA, 81 bp, Homo sapiens; identical to SEQ ID NO: 7644
  chr10:112337591-112337672
  hyper

SEQ ID NO: 119706 - DNA, 80 bp, Homo sapiens; identical to SEQ ID NO: 7645
  chr10:112338384-112338464
  hyper

SEQ ID NO: 119707 - DNA, 119 bp, Homo sapiens; identical to SEQ ID NO: 7646
  chr10:112340660-112340779
  hyper

SEQ ID NO: 119708 - DNA, 177 bp, Homo sapiens; identical to SEQ ID NO: 7647
  chr10:112341679-112341856
  hyper

SEQ ID NO: 119709 - DNA, 82 bp, Homo sapiens; identical to SEQ ID NO: 7648
  chr10:112342318-112342400
  hyper

SEQ ID NO: 119710 - DNA, 166 bp, Homo sapiens; identical to SEQ ID NO: 7649
  chr10:112343140-112343306
  hyper

SEQ ID NO: 119711 - DNA, 123 bp, Homo sapiens; identical to SEQ ID NO: 7650
  chr10:112343597-112343720
  hyper

SEQ ID NO: 119712 - DNA, 215 bp, Homo sapiens; identical to SEQ ID NO: 7651
  chr10:112343939-112344154
  hyper

SEQ ID NO: 119713 - DNA, 388 bp, Homo sapiens; identical to SEQ ID NO: 7652
  chr10:112349361-112349749
  hyper

SEQ ID NO: 119714 - DNA, 162 bp, Homo sapiens; identical to SEQ ID NO: 7653
  chr10:112350168-112350330
  hyper

SEQ ID NO: 119715 - DNA, 143 bp, Homo sapiens; identical to SEQ ID NO: 7654
  chr10:112350747-112350890
  hyper

SEQ ID NO: 119716 - DNA, 152 bp, Homo sapiens; identical to SEQ ID NO: 7655
  chr10:112352829-112352981
  hyper

SEQ ID NO: 119717 - DNA, 154 bp, Homo sapiens; identical to SEQ ID NO: 7656
  chr10:112356154-112356308
  hyper

SEQ ID NO: 119718 - DNA, 153 bp, Homo sapiens; identical to SEQ ID NO: 7657
  chr10:112357895-112358048
  hyper

SEQ ID NO: 119719 - DNA, 160 bp, Homo sapiens; identical to SEQ ID NO: 7658
  chr10:112359410-112359570
  hyper

SEQ ID NO: 119720 - DNA, 109 bp, Homo sapiens; identical to SEQ ID NO: 7659
  chr10:112360195-112360304
  hyper

SEQ ID NO: 119721 - DNA, 110 bp, Homo sapiens; identical to SEQ ID NO: 7660
  chr10:112360778-112360888
  hyper

SEQ ID NO: 119722 - DNA, 543 bp, Homo sapiens; identical to SEQ ID NO: 7661
  chr10:112361393-112361936
  hyper

SEQ ID NO: 119723 - DNA, 818 bp, Homo sapiens; identical to SEQ ID NO: 7662
  chr10:112362230-112363048
  hyper

SEQ ID NO: 119724 - DNA, 405 bp, Homo sapiens; identical to SEQ ID NO: 7663
  chr10:112363987-112364392
  hyper

SEQ ID NO: 119725 - DNA, 1575 bp, Homo sapiens
  chr10:112402938-112404513
  hyper
ctggtttcccaggcacgcaaggcacgcttttctctacttcccggggacgctggcctcaggacttagaactcctgtatgccggacagccggtaaggtctactgggcggccgctttctctggtctttctctgctccgtagacatttctgtgtcaggtgcctcgcatattcgcacccacgcgccagggcattaagccgaaccttgcttggtggctctcagccttgaaaggccgcaggatgtccgcgtccacagctgtgaaccggtgagtgcaggtggacgggcgcacgcgggcgccagggtaattaacagggcttcagagggcgtgacggtgaccgtacgttgtcggcgaactctcttttcatcctttacatttccacggagatttggccaataaataacaagaataaaatgtacgcatggttttgtctttgcgctcgtggggtcgtggcggggtcttttaagtgaagagaaaaagaaaccagaaacccacggtggccccaccggctgcttccggggacacctgaaatcagcagctggaactgacaatttggagagccccggggatggtcatctgagacctgggttacaatacaagtctgacctcggggcgagtccaggctttcttcccctcagggtcgggtgcctcaagagccagtggcgctggccgggctccagccgcgagcagatgccaggcccggcacactttgcacgggcgatgcgcgcggacgtcccgggcgcgctcggtccgcccggcttggcaggagctgcgagaggccgcgcgcaccgtccccagggacagccggaggactcagggctcccgggtggagcgagagcgcggcggccgaccgcgggctgcgtgtgtcgccttcctcacgcggtatgctgcgccgtggaacgctgggctacggaccctgagggtgcactgtggcgggtggcgtacgccgcgctccctccccgcttcctgcgcccagggtcggcgggcagagttcctgggtccagcttggcgctgagcagcccccggccgcagagcagctcccgccggtcgggagacgccccctggcccccgcccccgcgtggccggccgggacgagctggagcagcgggaggaggcggcgccgccaggactgcctcctccccgcccctcgcgtctcctccccgcgccaccgggaaggacaaggggactgggcacggggaccccggccagtgagcgcccgtggcccgggaccgcccctcccttgagctctctcgccgcgatcccgggcgggtctcgccccgcatggtgctggcagcagccatgagccaggacgcggaccccagcggtccggagcagccggacagagttgcctgcagtgtgcctggtgcccgggcgtccccggcaccctccggcccgcgagggatgcagcagccgccgccgccgccccagccaccgcccccgccccaagccggcctaccccagatcatccaaaagtaagaagggagaagggaacagggaccacgggtgcgcctggggacacgccccgagagccccctttgtggcttcatttcccgtccctgctgaacttcgctcgccccccttg

SEQ ID NO: 119726 - DNA, 632 bp, Homo sapiens; identical to SEQ ID NO: 7665
  chr10:112431814-112432446
  hyper

SEQ ID NO: 119727 - DNA, 107 bp, Homo sapiens
  chr10:112631243-112631350
  hyper
tcacttggagtgttcgcctaagcagtttctagaaatggaggcagggaccatcaggaagctcaaaacctttgcttcagccgagtttgcagaacgccctgtgaggagaa

SEQ ID NO: 119728 - DNA, 30 bp, Homo sapiens
  chr10:112631564-112631594
  hyper
agctccggctccgccgccacgattggccag

SEQ ID NO: 119729 - DNA, 30 bp, Homo sapiens
  chr10:112632012-112632042
  hyper
agcccagcctggagcgtgtcggcgcgggcc

SEQ ID NO: 119730 - DNA, 149 bp, Homo sapiens
  chr10:112632547-112632696
  hyper
ccctttctgtgaaacgcatgccatcttctccatttgtcagtttgatgctgtaacgtacatggggttttgcaagagcttcaaaactgtctgcagacgtcaatttcgcccccctcccccttgtgagaactcgctacgtagccagcaactgt

SEQ ID NO: 119731 - DNA, 70 bp, Homo sapiens
  chr10:112678714-112678784
  hyper
aggagagggaatttcggagccctaaactgttgtccatctccgtaagtgaccagacgtctcagtaaaataa

SEQ ID NO: 119732 - DNA, 137 bp, Homo sapiens
  chr10:112678991-112679128
  hyper
ttatcagttatggccgccttagcttcaacagtaacttccgatcggggagttgtcactctaccctgctggaggcttactctgtagcccggctagccagaggcgcccagtgggcgggagacggcgtagaggaactgagg

SEQ ID NO: 119733 - DNA, 2017 bp, Homo sapiens
  chr10:112835844-112837861
  hyper
caggggtagacacacgagtatctgctttaggaagatttctgcaacacggcagggtgcaattcaaactctgggttctcctttcctgagcttagaaaccaatttgttcggagataggagaaggctctgttggcagaagacctaagagacgggaggaggcgcctggcgtcagcgggtcgcttctcagccgtgaccacgagcggccagcaggtgtcagtgcgtcctcgctttgccctggcgctcggctcctggacccctccccacctcggtctaagggggcgcggtccagaccccgggtcttgcgtttcccgcagacagcatcgcggctgggaggacacgtagccgcttcttccctaagcggaggtctgaactccggcttgtaccacttccccgtgggtgctgtccattccgccccaggggttccatccgaagccgcgccttcctccctctccaggacccctttctccccagcctccaggagcacctgcggaccgcgtcggctctggcccggagctgggctgctccagacgtaactcacaccggaggttacttccctcgatttgggcggggattcccttccatttttttcttcccttttctcccaagatccagcttcttgggggcactcacgggtgcccgttgcgttctgctccgtcggcccggagctgcatggccaactcccagcaggggccgctcctcccctaccccccacccccgggctccctctttaagtctctagctcaaggtacccgcctctccaaagggctcgtcccgcctgagggcaacgctccccgaggtccagcgctaggcgcgggcgctagactggcggaggggtggtgcgaggggcgggggagggtcggcttcccacgtgggggctgacgccggctgctcagcaacgcttgcttgatcctggggctataaaacgagtccaccgtgagcgcagcggagcagcagcagctccagctcggtgcagaagcccagcagccggcgtgccgccgcccggccactccagcgccttcttccccgccttgcgctcctgccccaactcgcgctgtcgtcggaccccggcccatccagcagcgctcggcgcccaccaggcggacgcccaggagaacccctgcctccgtcgcggctcctggagagctgatcgttcacctgccccggcccgcctgaggacgggggtgccttcatgcggcccccacactcctcaccccgccgccgccgccgtcccggagctccgcacagtgtgccccagccccagcagggcgcacaactttggaagtctcgcggcgctccgagaggcggcagagtccgcgccccagccccgggccgggccgggccagaaccgcagcgtctgggggaagccagagagtcggtaatcgcttcggggatgtaaggcgacagacataggacccccgagctcgcatcagcacccttcggctgcctcccggggtgggggcgggccccgcacacggtaagacctcttgctttcgctcaggctcaagattcaagatacagatattgatatgtatatatatatttaatttcctgtcatccttccaagttatcaggccaccgatgatttttgttctcccttcttgaagaataaatctctctttacccatcggctctccctactctctcccgccgcttagaaataaaacttggctgtattaggagctcggagcaagaaggcgcccaccgagagcgtctgaagcgcgagccaggcgcagttcgcgggacccgggccatgggccgctagcggtcctccagttcgggcccggcctccctgcggccccctccctatgtgagccgcagccaggcgagcggggcgccggaggaagaggaggacccacgggcgccgggccggaaggcagctggcagcaggcccaggccagcgggcgcccgcgttcatgttccgccaggagcagccgttggccgagggcagctttgcgcccatgggctccctgcagccggacgcgggcaacgcgagctggaacgggaccgaggcgccgggggg

SEQ ID NO: 119734 - DNA, 29 bp, Homo sapiens
  chr10:112838325-112838354
  hyper
gcggcggcggcggcccgcagccggccgag

SEQ ID NO: 119735 - DNA, 30 bp, Homo sapiens; identical to SEQ ID NO: 7669
  chr10:113005648-113005678
  hyper

SEQ ID NO: 119736 - DNA, 30 bp, Homo sapiens; identical to SEQ ID NO: 7670
  chr10:113134325-113134355
  hyper

SEQ ID NO: 119737 - DNA, 471 bp, Homo sapiens; identical to SEQ ID NO: 47730
  chr10:114135832-114136303
  hyper

SEQ ID NO: 119738 - DNA, 181 bp, Homo sapiens
  chr10:114206542-114206723
  hyper
tccttggatgactccgtcatggacacctcagcccaggacaagcagagagcaaaccctggcagcgagaggctggagtgcgggacctgctacaagccgagcacctctcggccagcgccctcgccaggactctcccgctcaggccccctgcgcagtctctgttactgtcacttccggaggttcg

SEQ ID NO: 119739 - DNA, 10 bp, Homo sapiens
  chr10:114206783-114206793
  hyper
cgattcccag

SEQ ID NO: 119740 - DNA, 30 bp, Homo sapiens
  chr10:114207325-114207355
  hyper
ggagtgggtggtgccggctgttcccaggag

SEQ ID NO: 119741 - DNA, 30 bp, Homo sapiens; identical to SEQ ID NO: 47732
  chr10:114280686-114280716
  hyper

SEQ ID NO: 119742 - DNA, 30 bp, Homo sapiens; identical to SEQ ID NO: 47733
  chr10:114319364-114319394
  hyper

SEQ ID NO: 119743 - DNA, 41 bp, Homo sapiens; identical to SEQ ID NO: 47734
  chr10:114571158-114571199
  hyper

SEQ ID NO: 119744 - DNA, 685 bp, Homo sapiens
  chr10:114708956-114709641
  hyper
attttggtcagtctttcggggatttcatttcagacccccttcgagaaacactgtagcccaactgatcccaggggttggtgaactttcagttttattttccctgacggtgttaacgcccaaacttttcacctcctaagtcaaaaaggactttgactctagctcatttcctactacctccaacgtcagttaaaaaaaaaaaaaaaaaagcaaaacaccactctacatttaaaagaatcatatatttttccttaaggatacttttaatgtttctgacatttagcatttgttttttgcataaaaagtcgttttggcatatccatcctagtgggacttaacatttcatgaaatgattcactactaataaacaaaaaagggaggagggaggcctcatgggttaatagtttctttcattgtagatgaccaggaactttgaccagccccttcacttccccaagctctctgaaagtggagggttgatctttccttttgaccacttttgtcgcatcccgtctaagggtggctgatttcactgctgaattaaccaccaagcacccccccaccccctcccccagccaccactttctcaaatactacccttccttttccccctcccttaagacttatttctaatatttctaaagtgcactgttttgggcctctccccatccccgccccccaagtgggc

SEQ ID NO: 119745 - DNA, 34 bp, Homo sapiens; identical to SEQ ID NO: 7673
  chr10:114709863-114709897
  hyper

SEQ ID NO: 119746 - DNA, 57 bp, Homo sapiens
  chr10:114710114-114710171
  hyper
aactcactcaaatccgagcggcacgagcacctcctgtatcttcggcttccccccccc

SEQ ID NO: 119747 - DNA, 291 bp, Homo sapiens
  chr10:114710659-114710950
  hyper
gtcaatgaatcagaaacgaatcaaaacagctcctccgattccgaggtaggaaaagcccctcgggctggtggggttttttatctgtttcctgggcttggcaaatgttgctgaaaggggagaaatcggggctgggggcggcggcggggcccggcgggcggcgtgtgcgtacggtgccaccattgcaaaaacttgtaaccctgtttttttctacccccccctcgacctcgccgattctttttctcccccttctcccccttctgcgtggcgtttgcccctcgccctccccacctc

SEQ ID NO: 119748 - DNA, 47 bp, Homo sapiens; identical to SEQ ID NO: 47740
  chr10:114711333-114711380
  hyper

SEQ ID NO: 119749 - DNA, 30 bp, Homo sapiens; identical to SEQ ID NO: 47741
  chr10:114711588-114711618
  hyper

SEQ ID NO: 119750 - DNA, 959 bp, Homo sapiens
  chr10:114711917-114712876
  hyper
tgagaactggctagcgcgcagagcccggggccctggagaggctccttggctttctcttttgggcgactatgtatttagctttctagtggagattgctggctctcggccctccttcccccttcccctggaaggtcacacttcccagattggtcccaccgcaaacttgggggctctgaggcgtccttttctttggcaacccgcagggccgcgagcgccctgggcgccgtggcgggctccgctgcccggcgcactggctgcgggctctcccgggccgcgcagggcagcagggctgagtggggcggggaggcccctgcggcccggattcttggtttgtgtgcagccggaatggactcctccaagcggacttgtgtatttctagggaattttggcgccttgggatgtatggcggggtcggcgctcgccagcttccgtgtaggcccgtcgtgggccccaggggggccagagaccagggtgtgcgggctcaaggaggtgcgggggccgagggaggctggggcgcctctccttcaagggagtgggccgccgatcgccggccacccaactttgggggccccagggcagcgcggggtgccgggctcggggggcgcttcctgcagggtcggtcccgcgcccaaccctgacatttgttaatacggctcatcccctcccccaccggcctgtgccccctgccctcaccctgaaccccctcctcctcatccctccctccctcttctaagaagcctggattacgaatccctggacgcaagacgcatttgtgcccggcttcccggtattgtcattttacaccttctccagtttggtcccctaccccttatttacacacacgacttttgttttttctttttcggtaactctagatagcaatttgaaataatgcacccactgttcagcagccatggattcggtgctaatggccgagggcttgccggacgggagtcgat

SEQ ID NO: 119751 - DNA, 30 bp, Homo sapiens; identical to SEQ ID NO: 47743
  chr10:114726827-114726857
  hyper

SEQ ID NO: 119752 - DNA, 30 bp, Homo sapiens; identical to SEQ ID NO: 47744
  chr10:114773911-114773941
  hyper

SEQ ID NO: 119753 - DNA, 30 bp, Homo sapiens; identical to SEQ ID NO: 47745
  chr10:115438901-115438931
  hyper

SEQ ID NO: 119754 - DNA, 30 bp, Homo sapiens; identical to SEQ ID NO: 47746
  chr10:115439264-115439294
  hyper

SEQ ID NO: 119755 - DNA, 30 bp, Homo sapiens; identical to SEQ ID NO: 47747
  chr10:115439869-115439899
  hyper

SEQ ID NO: 119756 - DNA, 32 bp, Homo sapiens
  chr10:115613972-115614004
  hyper
tctaaaaatgtgttcgcgcccgcactttcagc

SEQ ID NO: 119757 - DNA, 263 bp, Homo sapiens
  chr10:115614293-115614556
  hyper
gatgtttcccttagcgcctctgggacgctgtccctaaggccttattccatgttgaatctgacgctctcaatgtccaggctcggctgcggcgtggggaccgaaaaggggcggggtgggtcggacggcagtttaattacgtccccgggaactgcgccgatttggacttttggcacttggacctatgctttaaaaagaaaaaagtgtcattggcgtggagtggggctagtggagggtgaggtgaatgcgccgtttggaaaccacag

SEQ ID NO: 119758 - DNA, 30 bp, Homo sapiens
  chr10:115615040-115615070
  hyper
ctgagttccgcccgcgcctgatattagcca

SEQ ID NO: 119759 - DNA, 148 bp, Homo sapiens
  chr10:115802988-115803136
  hyper
catcacaaccaagctcgcagggcaaactcctccaagcctggcggacaagctgtcccaggcgctctggcgcttcctgaacaccaaggtcccctccccgctcaagggagctagcgctctgttccgcagagaaccccggaactgcaggtcg

SEQ ID NO: 119760 - DNA, 655 bp, Homo sapiens
  chr10:115803385-115804040
  hyper
gaacccgcgggcgcacgggaggcactagctacgcgatcagctcgggactctcaggagccgctcaattgccaacgggaggggggtgcggggagttggaggtgggggtgcagaccagacgggggcgtgcctttgcccggattggctgcaggagcctgacgcgaggccccgggggttggcttggggagtgggagcggggtggggtgggtgctgggtgccggagctgcgggcccggcgcgctcagaaacatgctgaagtcccggcggctcttccagcagcggcagcggctccagcagcagcggcggcggcggcggcggcggcagcggcagcgacagcgctcggctcctgcgggaaaggcgcccggcgcccatgcctccggccccgcgccgcggctgccctgacccggccgcgacctccctctgcgcaccacgccgcccgggcttctggggtgttccccaaccacggcccagccctgccacaccccccgcccccggcctccgcagctcggcatgggcgcgggggtgctcgtcctgggcgcctccgagcccggtaacctgtcgtcggccgcaccgctccccgacggcgcggccaccgcggcgcggctgctggtgcccgcgtcgccgcccgcctcgttgctgcctcccgccagcgaaagccc

SEQ ID NO: 119761 - DNA, 258 bp, Homo sapiens
  chr10:115804303-115804561
  hyper
acgtgctgtgcgtgacggccagcatcgagaccctgtgtgtcattgccctggaccgctacctcgccatcacctcgcccttccgctaccagagcctgctgacgcgcgcgcgggcgcggggcctcgtgtgcaccgtgtgggccatctcggccctggtgtccttcctgcccatcctcatgcactggtggcgggcggagagcgacgaggcgcgccgctgctacaacgaccccaagtgctgcgacttcgtcaccaaccgggcct

SEQ ID NO: 119762 - DNA, 853 bp, Homo sapiens
  chr10:115804635-115805488
  hyper
cgcgaggcccagaagcaggtgaagaagatcgacagctgcgagcgccgtttcctcggcggcccagcgcggccgccctcgccctcgccctcgcccgtccccgcgcccgcgccgccgcccggacccccgcgccccgccgccgccgccgccaccgccccgctggccaacgggcgtgcgggtaagcggcggccctcgcgcctcgtggccctgcgcgagcagaaggcgctcaagacgctgggcatcatcatgggcgtcttcacgctctgctggctgcccttcttcctggccaacgtggtgaaggccttccaccgcgagctggtgcccgaccgcctcttcgtcttcttcaactggctgggctacgccaactcggccttcaaccccatcatctactgccgcagccccgacttccgcaaggccttccagggactgctctgctgcgcgcgcagggctgcccgccggcgccacgcgacccacggagaccggccgcgcgcctcgggctgtctggcccggcccggacccccgccatcgcccggggccgcctcggacgacgacgacgacgatgtcgtcggggccacgccgcccgcgcgcctgctggagccctgggccggctgcaacggcggggcggcggcggacagcgactcgagcctggacgagccgtgccgccccggcttcgcctcggaatccaaggtgtagggcccggcgcggggcgcggactccgggcacggcttcccaggggaacgaggagatctgtgtttacttaagaccgatagcaggtgaactcgaagcccacaatcctcgtctgaatcatccgaggcaaagagaaaagccacggaccgttgcacaaaaaggaaagttt

SEQ ID NO: 119763 - DNA, 190 bp, Homo sapiens
  chr10:115860784-115860974
  hyper
acgccgtgggaaaccgcagccagtgataagctgggaagccacaggggctggcagctgcagtcggaacgaagcggctggaagctccaaacgggagctcttcccagctcgctttccacttcgacggcaccgttcaaagctctgctcagacactgggacaaataaatgacagggctccgaaaagagggtgaag

SEQ ID NO: 119764 - DNA, 162 bp, Homo sapiens
  chr10:115933902-115934064
  hyper
gacgcctcactcagcggccgtttccccaaacccctgcggagctgacacatcaacaaagatggcggcgacactgaagccggcccggttacagctgagggggcgggggctccctggaggaaccaatcagcgcagcgcgggcggggtgacgcagcacaccttgag

SEQ ID NO: 119765 - DNA, 50 bp, Homo sapiens
  chr10:115934453-115934503
  hyper
gttccataacagcgcgttcgtgtcttcagcgtggcgctgctgccattgtt

SEQ ID NO: 119766 - DNA, 623 bp, Homo sapiens
  chr10:115998969-115999592
  hyper
ttttcaaggagctataaagcccgtggaggagtcagctgacggcacagtgttcgcggctgcaccgctcggaggctgggtgacccgcgtagaagtgaagtacttttttatttgcagacctgggccgatgccgctttaaaaaacgcgaggggctctatgcacctccctggcggtagttcctccgacctcagccgggtcgggtcgtgccgccctctcccaggagagacaaacaggtgtcccacgtggcagccgcgccccgggcgcccctcctgtgatcccgtagcgccccctggcccgagccgcgcccgggtctgtgagtagagccgcccgggcaccgagcgctggtcgccgctctccttccggtgagtcccagccccgagttggctctggcgcccgggtacccgccagtgccggctgccgatgaccgattcacgctcccggtactggggccccctctgcccagccacccctacccagagcacccgggctgcgcggccccgccgagggtgcgggctttgttcgcattgtctgcgcgcacctgagcgcggccttcctggcacggcggcgtcgggggaagagcgcacctggcgcgcgcctccctcgtggccactcgcggtccgtcccgg

SEQ ID NO: 119767 - DNA, 30 bp, Homo sapiens; identical to SEQ ID NO: 7676
  chr10:116064457-116064487
  hyper

SEQ ID NO: 119768 - DNA, 30 bp, Homo sapiens; identical to SEQ ID NO: 7677
  chr10:116163145-116163175
  hyper

SEQ ID NO: 119769 - DNA, 1363 bp, Homo sapiens
  chr10:116163376-116164739
  hyper
ccttttcaaaagaaccgcaatcgagacttgtagaccagctccgaggctccgagtgtgggtgctaagctgggcgtccggcgcacccgggacggcccgcccaccggggtttggcggagatcctggcccccgccaaacccaaagctcgcccagctgcgcactgagctaagccctcgggtccggacgcctccaggagctccacctgccgggcactccattcggcccccgaccctcgcatccctcctttcttggtgtgggggagcaaagaagggcttggagagaaacgatgacccgaacggcaggacgtttggggaggccccacctagcccggggagggtctgcgcgcccactccactgcccaagcgctttgccgggagcaggaagcccctagcccggcgggcgcccgggagaaaggactcaacagcccgaccctttgcccccagcagctcagcacggttcccaccttcttcggggcttcctcggccccaggcatctttcctgtgcggcgggactgagggtggagtggggtgccgggctcaccctctctcctgcaacaggtgagaagccccgccacgccccccactgacgaccccctccttccgcgcccgggaggatcaaagggctcgggccgcagcagccacctaggagcccacccgcccagtccgcggcgccgctgtcgccccctcttaggcccaggtccgggctgggtgggggcagtgggctctgcttatcccgagtcctggcaagacgagtcctagccctgccctccgcgtcgctgggcgaaagggagtgggtgtgcgccgcgcgaggaacccgcgccctcacctttgtaccgctccatcggggccacggagtgcgctcctcgcggctcggcttctgcgctgctctcccggcgctcggctcagcgcccaggccgccgcgctggcccctccccgtgaggtcacgctcgcggccggacctcctggcggggccgccgcgcccagggtcctcggacctggcccccgccagggctcgcccccagcgcccctgtcccagcgcccctgtcccagcgccggagaactccggcccgccgaggctgacagtcggctcttgagtcggtgcgcgcccgcggccccgctcgccgcccccggccgccttggcactcccttcacgtcttgactccgggggcgtcgagagggaacgagactgggacgttcccaaactctgggggaggctccgggaggccgggcttgggtgggcctccaagattgttcccacacccctgcccgctgcaaacccaatgcctggaggaggagaccgaggtccaagctaggaggttgagactggcttagagctcctcgcgcttggctcccgagccagcgcgctt

SEQ ID NO: 119770 - DNA, 30 bp, Homo sapiens
  chr10:116231236-116231266
  hyper
ggcaactgacaacccgggccaatgcacctg

SEQ ID NO: 119771 - DNA, 30 bp, Homo sapiens
  chr10:116286204-116286234
  hyper
aacaaaagctcctgtcgtttcttttgtatc

SEQ ID NO: 119772 - DNA, 370 bp, Homo sapiens
  chr10:116286486-116286856
  hyper
ttcaagttcagaacacggccaagaggctttgtagatgccagacctcagcccgacagactgaggctcccacctgcctgggttacatatcaggcttctctccgaagctcggctaaggcaacgtgcatccctctagagacgcactccggaaaccagccccgtgtgcggcgggcaggcacgctctctcacgcctcctctcctcgctttacttactagttcaacacaccagcaaccacaatgggccagtccatgttcccaaaaaaggagggggagtagatttactttctttctttttttaaatgcaggtaggaaagtaccatttctttgcattcactcactattgtctgcatgtgaaaccgacagtgattgtccc

SEQ ID NO: 119773 - DNA, 508 bp, Homo sapiens
  chr10:116391550-116392058
  hyper
gagaacatgtccgcccggctttcgattgatcattccccgttaggtggccgagccctgcggtgccattccaacttctgcaaccatgcacagtgatcgatatttataattacctttttccttcaccatggcaaccgggtcctccgacgagcaggactgaagaaggaacgaggaataaactctgggagtggaagcgcgcctcggcagacagatccgcgggcgctggggcagccaggagaagccccggcatccgcttgtgaggtccggggctgtggtctcgagtcccgccccgcctcggcgggccccgctcccatgcccgccccgctatcgcccccgcgctcttctccgcccgcccgccgagctgcagccgcgcccagctcggggactctgccctgcggctgaaaccactcgctacagctgctgctgtaacaaatgcaaaattctactgtcctaatctctggtcactgacaccaccttgtattcctcgcaccgaggacgggctatgaaaagc

SEQ ID NO: 119774 - DNA, 934 bp, Homo sapiens; identical to SEQ ID NO: 47760
  chr10:116527399-116528333
  hyper

SEQ ID NO: 119775 - DNA, 44 bp, Homo sapiens; identical to SEQ ID NO: 47761
  chr10:116581329-116581373
  hyper

SEQ ID NO: 119776 - DNA, 109 bp, Homo sapiens
  chr10:116697879-116697988
  hyper
aattcccacaagtccgtgcgacctctccgttctgcgcagcttcgcggtatgaggaagagggtcctgtcaggcgcactcttgttgcatcatcagcgtgcacctccacgat

SEQ ID NO: 119777 - DNA, 30 bp, Homo sapiens
  chr10:116698316-116698346
  hyper
ggaccaggctgaggcggtcgctgcgagagg

SEQ ID NO: 119778 - DNA, 1450 bp, Homo sapiens
  chr10:116852171-116853621
  hyper
ctgaaaaaaagccccgatgctgcaatatttttcaaggcagaatatcgtcccagatggaggagggagcactgacaagcagaaaaggagagacgtgcggtttcgaggcagcgtctgtaaggggtggagagcgcggggctcggagcctcgcagttctttgttgggggcgcgggcttcgttattcccgaggcagcaatggctccccctcggaggtccctccgcggagaccgcctcgcgcctctcgcagtccccaatccccgcccctcccagccctcgctgaccccacaacgtggtcggactgcggtgcctttaaggcttttgcctgctgcacatgctcagctctttgtgtgttgttggagtttttctctcttaagagaaaaagaagaaataggcaggaggatggggcggaggaagggggaagcgctagggaaaaagcgttgcacttttgcagctgcagacggcggacgggaaggacttcttttctgctgaagctgcgaagcctgtgtcgatctctcattcgtggggctcccggggcgcggggtgcgggtggggccggggtgcccgcaccggccggggggaagggcacgcgggccacacctggggggcctgtctccagtcagcgcgcgggccaggcggggtgggcgcgcgcgcgtgggggagtccccggtccctgtcaggggcggggcgagaccaaggcgccgggcctgtggggaggagtgtaggcgcgcgcgagggcggggggcggccccacgcatcgtgggctcccggcgctgccgctgcggccggctcgaggcaccggagacagaatggctgccggggcgcccttgaccgccgggcgggcgaggcggggctgaccgccgcctccttgatcgcccccttccacgttgggcgcgcccacttcggggcgcccgctcggcccccgccctcctgggcgcgcggcgctcggagccgaggcagttggcgcgggccgcgggcgaggcggggccgcgcgcggggtcccctcctcctcccggtcaggtcccctcaggagcgccgggcgcagtctgcgcctcccgctccccgcctccggccgggtccgggacgccgcggctgtggggtcggcccgctaaggacaaggtcgggagactgggtggcgatgcccgagtgcgactggaggcagccgagcggaggcgacggcggttgggatctgtccctcctgaccggggagcgggactcggacgggcgccggtgaggaggaggagaagcggcggcggagaggttttctgcggccggaattcccttcaacagcatccctgtcggcgcccgcgagcgcagtctcgccgggcaggggcgccggggaagatggagactgggggccgggcccgcactggtaccccgcagccagcggccccgggggtgtggagggctcggccggcgggcggcggcggcgggggcgcctcctcctggctgctgg

SEQ ID NO: 119779 - DNA, 371 bp, Homo sapiens
  chr10:116853672-116854043
  hyper
cgcaggtgtcccagtccaagccgtgcgagaggaccggctcctgcttctcgggccgctgtgtcaactccacctgcctctgcgacccgggctgggtgggggaccagtgccagcactgccagggcaggttcaagtaagtgccttcgccggaccccgaacctccagccctgcctcgctcccgtcgcggccttccccgcccccctcgcggcctcccccgcccccgtcgctgcctctgatcccccggccgtgagtgaacctcagcgcgcggcgggagcgggcgagagtggggcccgcgccgcgccccctccagccccggggcgccccgggagagctcgggcccgcgcggagccctgaccaacggggagctaggcatt

SEQ ID NO: 119780 - DNA, 31 bp, Homo sapiens; identical to SEQ ID NO: 7682
  chr10:117350835-117350866
  hyper

SEQ ID NO: 119781 - DNA, 430 bp, Homo sapiens; identical to SEQ ID NO: 47768
  chr10:118031118-118031548
  hyper

SEQ ID NO: 119782 - DNA, 605 bp, Homo sapiens; identical to SEQ ID NO: 7684
  chr10:118031624-118032229
  hyper

SEQ ID NO: 119783 - DNA, 773 bp, Homo sapiens; identical to SEQ ID NO: 7685
  chr10:118032412-118033185
  hyper

SEQ ID NO: 119784 - DNA, 749 bp, Homo sapiens; identical to SEQ ID NO: 7686
  chr10:118033244-118033993
  hyper

SEQ ID NO: 119785 - DNA, 108 bp, Homo sapiens; identical to SEQ ID NO: 7687
  chr10:118034142-118034250
  hyper

SEQ ID NO: 119786 - DNA, 198 bp, Homo sapiens
  chr10:118547541-118547739
  hyper
tcgtgccacctccacgcaacgccgttaaattcagatgctacgctaaaagcagaggaaggaaaaatatctgtgtcacagcaccaactggaaaccaacgcgcgtacatcctgtctctactctggccgagccgaccaaagcacatcctgcaaaattctagacccccgcaaacggcgggaggcggccgtgcgcacaacatcc

SEQ ID NO: 119787 - DNA, 770 bp, Homo sapiens; identical to SEQ ID NO: 47774
  chr10:118608584-118609354
  hyper

SEQ ID NO: 119788 - DNA, 572 bp, Homo sapiens
  chr10:118764186-118764758
  hyper
cccacccgcttctccggcaaggaaggtggcactgtgcaacctcgtccgcactgaatcctcgtcccttcccccagcccccgatcgccagcaaacgcaaccagcgggcagcgggtctcgagctgcggggcctgactagccccgacactccgcgttatcctcggtccagagctttcccaggcgcgccggccacggaggacgcttctctgcgggtgacggagctactgcggtgaccacggcggccgccacgtctcccgcccggcttccaactgccctggccccagcgccctggggccgtccccgcccacgggccgcggctgcccacacctggcgcccgcgtgctgcctaccttgctccttcagactggtaatgagctgcagctgcttctcttcgtccgagctgttcattttggcgggtggggccgggaataaaagggaaagagggagcggcgcggggcacacaggaggagggggaagaaaaagcaagatgccggtggcttgcggctccactacccggaagttggatccgctcccgctcctcctcctcctggcgcggagcgcgcgagtgagatcatc

SEQ ID NO: 119789 - DNA, 181 bp, Homo sapiens; identical to SEQ ID NO: 47776
  chr10:118764979-118765160
  hyper

SEQ ID NO: 119790 - DNA, 153 bp, Homo sapiens
  chr10:118890980-118891133
  hyper
gcccacactgtgccccgccttattttggatgcctccaacttcagcttcaggcacagtacacgagtaggggcagtaaggcctggctagggccggtgccgcacgggagctgcgggtccctgcaacacccaggtgtgcaggcgctacaagaaggag

SEQ ID NO: 119791 - DNA, 191 bp, Homo sapiens; identical to SEQ ID NO: 47778
  chr10:118891179-118891370
  hyper

SEQ ID NO: 119792 - DNA, 82 bp, Homo sapiens; identical to SEQ ID NO: 7691
  chr10:118891579-118891661
  hyper

SEQ ID NO: 119793 - DNA, 741 bp, Homo sapiens
  chr10:118891715-118892456
  hyper
cgcactataggggctgccaccctctgcccccggagtccccacgccgagactcatcatttgctggctctttcttccttttcttcttttgtttttttatccttcaaatataagacaaaaatacacctcatttatcatcatagatatatatatttcactctcaccacataaatacaaaacatccaaatatccaaaacattcagaacaaagttagtagcctggattcagtgacacctacccgcgtttgaatcgttcattattttcttcactatttgcctagaaaaaaaaaaaagatgaaaaagagggggagagtttccgacgtaaataatttacaataaaattactattttaaaaaagtgtttttcgcttgcttcagatggatgaatacattctagacactgcggcacctcgcagtctgggtctgtgattttggttaaaatgtgggtggccgtggctgtagggacgatcgccgctgcgcagggtaaggaaagagggtgtcgcggttcgtgttctgatttgggaccactgaaaccctaagactggggaggcgaggggagtgtctttcctatcaatcacacaagacgctatctggactccgagactactgctagaggaggcccgaccacccagcggcgtccctgcctccccttccgcaaagaactgctcagaaatccagacgtttcctgcgtgcaggaagggttttgtgaatccgggtgtttgggagaggaggcaatgagtgctgac

SEQ ID NO: 119794 - DNA, 722 bp, Homo sapiens
  chr10:118892517-118893239
  hyper
cgccggctgcgcaggctaccgccggcagccgctttgctctttcctggaggagtgggaagctgtcggccaccgccccgaacaggctcggagaaaagattctgaatttcctttgattagcggcgttaccttttcctttgcttttcccccattaaattcctgtttaaagttacaacacccagaaccttaattttgcattgccctgtggggcattctgtatcctgaattttcttacaccttccaaatttcatcattggaagtatttaaaaactggttccacttcatctggttttacgtagcaattgcttttattgctgattagatcaaatttatcagtgtcgttgcctactacgacgtttgttactgtttcctggggtcgggggtggttgtgattggagttgccctaaaggggagaaaaaccgcaggatttgcccgccaggaagctgtgttgtgtaccgactatcccgagaggtccgcaaagcggggcccaggggctcccacaagccctggtttccctggcaagaggaaggaacgtcctccttttttggtctaaagaaacctggaagcccctggggtctgcgcgcagttttcctctttcaaatattcctaggaatagtcggcagcggcagcagccgcagcagccgcggatctagagcaaacgtcctgtgctttggagttagaaccagtcttttccctcctgggctgggcacggggtcagggcatca

SEQ ID NO: 119795 - DNA, 74 bp, Homo sapiens; identical to SEQ ID NO: 7696
  chr10:118893506-118893580
  hyper

SEQ ID NO: 119796 - DNA, 146 bp, Homo sapiens; identical to SEQ ID NO: 7697
  chr10:118893679-118893825
  hyper

SEQ ID NO: 119797 - DNA, 37 bp, Homo sapiens; identical to SEQ ID NO: 7698
  chr10:118894034-118894071
  hyper

SEQ ID NO: 119798 - DNA, 14 bp, Homo sapiens
  chr10:118894477-118894491
  hyper
ggaatttccggtgg

SEQ ID NO: 119799 - DNA, 30 bp, Homo sapiens
  chr10:118896023-118896053
  hyper
tctcgcggcccaccacgtactggcagcgct

SEQ ID NO: 119800 - DNA, 1135 bp, Homo sapiens
  chr10:118896283-118897418
  hyper
gcggggtgcggagcgcgaccacaaccaggtagcaaagacactgtgtggagggcaaggggcctaactccataccgctgaccgaaggagggaccacactttgtctttttgtagagtcctccagacaggggagagaaaaaaatccaatcaattccacataggcggacgtttcttccggcctgggggggcctcggctgagccttccgggtcccctgtagcctgagggtacccttgtcgccccgcccgggtcctgcgggccccagctctgggcttgccgaccagaccgtgatccagacgtccccacccccaccctcgagtctccttccctccggagtccgcgcggcggaaggaggagggactgagtcggggccggccgggcccggagatctgctgctggctggggcggcgccgggccggggcccggcctcgcagcctccgccgccggggctaagtgcacgccgcgccatccgagagcggcagagcagagcaccaaagcggcaaccgcggctccgtaaccaagcccagctgcctctcccggcggcagcggtcgggcaccgatcgcggccgtggggtcctcggcccagtgcactaactggcagggccgtagcccgcgatcggcagctgttctccggggctcgcgttcccccttgggtgcgctcagccctccagagcgcgggagtcccctggccggctcccggcaggtcgtccggcccttggagcgcgcacacctcctcccggagttttctgctcctttcccgggtcggaggccgcagcccgatgcccggccgcacccgcgcagcccctcatctccccccgcagcccggtcagcggggcccctccgggcgtggagggccgaggcccctggagagcgcaccggagagtcccaggcgcttgtccccagccggactcggggcggggagggccaacaactttctcccaagtcccagccggcactccttcccaccggcctgtgtcggcggcagcgcgcagctccggccccggagtcgaccccaaagaacgcgcctggcagccctgcccatccctacctcggaccaggatccggcggcagtaatccgggtccgctgcggaattggatttacttttgttacaatcctcagcagcgcccgacgctgagaag

SEQ ID NO: 119801 - DNA, 619 bp, Homo sapiens; identical to SEQ ID NO: 47787
  chr10:118897478-118898097
  hyper

SEQ ID NO: 119802 - DNA, 20 bp, Homo sapiens
  chr10:118899582-118899602
  hyper
cgggctgatcgcccctcagc

SEQ ID NO: 119803 - DNA, 352 bp, Homo sapiens; identical to SEQ ID NO: 47788
  chr10:118899892-118900244
  hyper

SEQ ID NO: 119804 - DNA, 19 bp, Homo sapiens
  chr10:118900323-118900342
  hyper
cgcccggtcaaagacctgg

SEQ ID NO: 119805 - DNA, 722 bp, Homo sapiens
  chr10:118922201-118922923
  hyper
tttgccttctagaagcggcaggataagcacacgggtttgggcagtgctcacattttgggtttattggcttgatggggttgtttggggcgctctcagttacaaactgcagaagagtgggggcgggggacaggatggggaggaaagggtgggcgaaggagccgagagtaagacaagccgaagggtggaaactgcgggagggagaggaaacgccgaaggcgatgtagagtcctgcgagggaccgggagaggtagggagggatccgagccgcagtcctgagggagagcgaccgcgcgccccgcagccgagctgggtcccttcgccccgcccggaatcccggcccccgcccgccccacgcaagtccccgtgccccctccgggaggtgggagtcgccgggactctgcgctccgccagcctccgtctgctggccgggtccgggatccgcacccggagaggctgaaccgaggctgaaccgaggcggacgcagccccgggtcggtggctcgcctggccgggtggggtgggagcgattttctggcggtggcgtttgcaggaggggaggagacagcgccacccagggcctccccgagcactgccggccaggccgggctcgggggccggagtgagggtgcaggtggggctccgggttctgcttcttgaaggcggcggcggggcgagaaatgcaaccgcgtgggccccgcctgctccccccggtcctgtctttcc

SEQ ID NO: 119806 - DNA, 557 bp, Homo sapiens
  chr10:118922943-118923500
  hyper
cgcagccccctagtcgcgatgctctcaggtccccggcgtggaccagcacgtgggcccgggagtcgagtggggacgaaggcatgttggccgcctcaacttcctgcgccgacggctggggacgcggagaaccctctccgagctggggtccccgcctgctgggcaacctcacctcaacgtctggcctggcctggggccgcttggactcggcagcggctgcactcctacagagcccagacgcgccttctcgctttttcctttctgggccggggccctaaactcccggaactcgccgcaagaggagcgttgaaaacaaaagggacagcccaagctgtcccgcccgctgcgcccgaggagcatccccttggcgctgcaggctgtcgcctcccccagcacctggcggggcgggtgccaggctgggcctctagacggtttcaccgctgcttatcatttctccttcattttgcaggggcaggggagctgcccctcccttcggagaaaggccgcgcctgcacccaaaggtaaccctcgggtgaccccgggagcggggctgtctggcc

SEQ ID NO: 119807 - DNA, 1142 bp, Homo sapiens
  chr10:118924327-118925469
  hyper
ggctataaaagcaacgccatacattgggatgaaattagacagcgacaaaatcattaccttgacttcccacaataaagacaaccttaaaagggggctattgatggtttcaaattacataacggtggtttatatgttcttcctctgcgctcacagaaagcaattttaaagtgtgaattcttcaaagaacgggcaaagcattcacacacagacatgcgtttttattttatgtattgcaaagcgctatgagagagagagagagaaaccaaaaacaaaaatcccagcaaaaggaggccgagtccaaagagaatatgtccggtttctatttcaccaagctcctggactcacatttggccccggagccgagtgctcggtctctttccccgggacgggacagggagtggagttcctagccccttgggtgggaaaagccccgcgcacgtcaccgggtcccgtctgctcactgcttctgcatattttaagcctggacacagcctcctttaggatagaaaggcatttcccaaacaacaccgattctgggggtgtagtgggcctggcgctgggtcctggagagaaggttcagccccccttctcatccctgtactttggggatggctcgtacttggacaggggtgggcctccgccttctccgccttctatcggacctttcttcggatggatttctacgtaaactcggaaggcgatcaaatgcaggcggccaacctccagcgcttttttttttcctctcaaaggcggcgcctgcatttttgggggctccagcccaggctgagaaagtcccctcaaacctctactctgaggttgctcacacggcctgcaaaaacccgacggggcaccccgccaccccaccttacgtttccctagggccaagtcagtggtcaaaaaccaacccggtggtagctgcctttaccaaggaaagacagccaggacgcccgcaccgacggcaacgcgcggacagagaggaccgtgccctctttcgcatgttacggggcgagggggctgttggcgtcaggagcgccctgggaggaacttcgtagcggattcgagagacagagggaattcagcaaacttgctgccccgggctgccggctggagcccggcagattcgctgcgcagcactgccccct

SEQ ID NO: 119808 - DNA, 882 bp, Homo sapiens
  chr10:118927080-118927962
  hyper
gcactggcagaagttgagacacgctcccaggaatcgcgggccgtggcgcgtacttccacgcaccccagctagttccagagactcagcttgttctgagatcctcttgtcgagcccccttggtcccggcgcccggcctgtgtggtgctcagatcagacttatccacccgagcaccacgcagaccagcgcctggaccaaggtcccgggaaggaagccctcctccccttctcctgtggcttagctcagcgatcagggaggagccagttaagaagtcacagtcgaagccatgactgctgtgtcccggggaggcagtggaaggcgaggagcacggagcggggataccgccggacaacccctccccgccgccccgtcggcgtcctcgctgcgcaggggctcccttgctgccccaatctaaaaggaagccgtcgcggcccagggcacggtaactaaaaggccgtcggggagggagacgggaatgagtgggcttggacttgaggtttccgagccagctgctccctagagccgttcctgagctcgtcagccagcacgtatttaatgaatggccactgggtgctaggccttgcacgcaaccctttcgtcctcccccggggctgagccgagggtgacccaacactagtcggaacgagcctggagacatggcgccggggctgcgctctgcaggcctggcctggtcgctctccacgcacccctctctctgtagctgccgccccgcccggctctgcctgtgggcgccccctggcggcaggaagccgagcgcgcaccacgccctcggggctccatccccactcaccccggcgcctctagccgctccacccgcacccccagttcgcgctgcggcggccagcctcttccccgacggccga

SEQ ID NO: 119809 - DNA, 41 bp, Homo sapiens; identical to SEQ ID NO: 47794
  chr10:118927999-118928040
  hyper

SEQ ID NO: 119810 - DNA, 30 bp, Homo sapiens
  chr10:118928316-118928346
  hyper
ccgcgtcccgtgaaccgaaccgccaatgcg

SEQ ID NO: 119811 - DNA, 30 bp, Homo sapiens; identical to SEQ ID NO: 47795
  chr10:118934480-118934510
  hyper

SEQ ID NO: 119812 - DNA, 30 bp, Homo sapiens; identical to SEQ ID NO: 47796
  chr10:118976169-118976199
  hyper

SEQ ID NO: 119813 - DNA, 165 bp, Homo sapiens
  chr10:119000426-119000591
  hyper
caaggcactcggccacgcgctgggtccggggaagaggcgcggccgcggccgaggcggggacagggaggcggcagcccctcctgcgcagcgacggcgcgggcgggcggaggccggggcgccccagccccccgcccccgctccctccggccgtgacgtcagagccgg

SEQ ID NO: 119814 - DNA, 465 bp, Homo sapiens; identical to SEQ ID NO: 47798
  chr10:119000689-119001154
  hyper

SEQ ID NO: 119815 - DNA, 308 bp, Homo sapiens; identical to SEQ ID NO: 47799
  chr10:119001328-119001636
  hyper

SEQ ID NO: 119816 - DNA, 30 bp, Homo sapiens
  chr10:119134597-119134627
  hyper
gtagcggaagccctcgcccgcgcgggcggc

SEQ ID NO: 119817 - DNA, 30 bp, Homo sapiens
  chr10:119135198-119135228
  hyper
gggatctgggaggacggctggggacgcggg

SEQ ID NO: 119818 - DNA, 30 bp, Homo sapiens
  chr10:119135707-119135737
  hyper
ggaagattaatatgcgacccgctgtcagtc

SEQ ID NO: 119819 - DNA, 309 bp, Homo sapiens; identical to SEQ ID NO: 7706
  chr10:119256045-119256354
  hyper

SEQ ID NO: 119820 - DNA, 240 bp, Homo sapiens; identical to SEQ ID NO: 47801
  chr10:119292323-119292563
  hyper

SEQ ID NO: 119821 - DNA, 564 bp, Homo sapiens
  chr10:119293001-119293565
  hyper
gtacataggagacatcgtgtcctctgaaatagcccaggtaccgatctgctccttgtcgccgagcaccagctcagtacaaggcgctggaggggaaggagggaagcacatcagcgtctcctcatagtgatgcagccaccccagccctcaccctatcccagttccccacgcgcccacgtgcctttggggtggatgaaaagatctcaaacgaccagctcctcattggggtaaaggagtgaagagattatctctgatagaggtcaaactccaattgggaggagggcaccaattctgtaaatgacacccgagggcacactcaccaggttcactgcaagccctgagcgttttgcgtttggtgccccgagtgtaagcctaagtattctgtctccgacacgtaaaacaacttaaagtgccattttccaacggaggcatttagaggcaatttgaaaattgaaacgaatctttatatgcaagactggaacgttccagaggccctttaaagctgcggttagaaaggcagttagggaactcaatgatgggctggaaggagacgattgaacgcacagc

SEQ ID NO: 119822 - DNA, 1112 bp, Homo sapiens
  chr10:119293785-119294897
  hyper
ttctccagagctaccgagaaggggaacctcaacatcaagtgtctggcagatgggagtgtgtgttaagcgagggctgttttcgttgggaacgcacagcacagctcccttcctcagagccacctccagacccctcggccctcccacgacccccagttcccgggtccgaggttctgggcgccagcggcggccaccgcgccgcgcgagcagcttttattcgcactctctttaactcgccctttctggttctcttcccttcgagcgccctgcagcggagtgttagacaagccctgttgtctgtgggctctcacctcagagtcaatattatctcagatgggcacaatagactggaatgaaaagctaatattgaatcaatgctgtccctgtccgcgccgctgcgatgccaccctttgttgcgcacgccgcccccggcaagctgctggcggccggggctaagcggagggcggccgcggtcgggcctctccgggtccacgccaggggtgggaggacacttcgggcccagcgtagaggaggcctccgaggcccaagcgggcttcggctgctgcgagtccccagaggctccctcgggcctcactcgcggtgtctcctccagacgccaggggcaggccacgaagccgagggctccgcgtggccgtgggagaagcggggtgcacggagccttcccgcgcccagacgccgaggggatgcaaacaggggagccgggcctggtatggccaacctccaggatcgaggggccccagaatgtgcgtgtggccgggggcgggggcagctgcgggggccagaactagagtattccttcgctctcccctgggggccgggcccccacgagttgcagcagagcccgtctgtaattagggcctcctggtccggcaaagctgcggctgctcccagagagagttggggtcttctcagggcccgcgatgggggagtggtcgtggtcagacccccgtgagccccttcggaaggtcccagtccctgtccattcttctgtcccgcagctctctccgcgcaggcggggcagagccggggaagaagacgctggacgaggggtcttggggccgcctcgctggctgcggttggaagcacccgttttc

SEQ ID NO: 119823 - DNA, 350 bp, Homo sapiens; identical to SEQ ID NO: 47804
  chr10:119294908-119295258
  hyper

SEQ ID NO: 119824 - DNA, 226 bp, Homo sapiens; identical to SEQ ID NO: 7711
  chr10:119295682-119295908
  hyper

SEQ ID NO: 119825 - DNA, 479 bp, Homo sapiens; identical to SEQ ID NO: 7712
  chr10:119295951-119296430
  hyper

SEQ ID NO: 119826 - DNA, 119 bp, Homo sapiens; identical to SEQ ID NO: 7713
  chr10:119296524-119296643
  hyper

SEQ ID NO: 119827 - DNA, 161 bp, Homo sapiens; identical to SEQ ID NO: 7714
  chr10:119296755-119296916
  hyper

SEQ ID NO: 119828 - DNA, 464 bp, Homo sapiens
  chr10:119297138-119297602
  hyper
cccctccactggcctggatgacggcctaggcgagactttggcagtgtggcgcgaccccagcgctcccccgccctcgggctcgggggcgcggtgggtaccgcgcccgcgcccggccctcgccactaggcgccgctgcgctcacgccgatcggggccccgggtcgccgcgcccgcctggcgagaggcctctggggaagacgccagaaagggatttgtcgtaataatttttaaaaaatgtttttagggcattaattatacttttcgttttctcaccgccaccctgcgcgttcggagaggccggcgtgactggggatctcagtgggttggaggaattcttaacgcccccgaggcctttccaactcgggacaccattctcgcgcctcgggccgggaaagggctcgcccttcacgggcgtcggtgcggtccgcggcgagccgcgggagcacagggcgggctcagcattct

SEQ ID NO: 119829 - DNA, 544 bp, Homo sapiens; identical to SEQ ID NO: 47810
  chr10:119300883-119301427
  hyper

SEQ ID NO: 119830 - DNA, 190 bp, Homo sapiens; identical to SEQ ID NO: 7717
  chr10:119301759-119301949
  hyper

SEQ ID NO: 119831 - DNA, 109 bp, Homo sapiens; identical to SEQ ID NO: 7718
  chr10:119302046-119302155
  hyper

SEQ ID NO: 119832 - DNA, 192 bp, Homo sapiens; identical to SEQ ID NO: 7719
  chr10:119302221-119302413
  hyper

SEQ ID NO: 119833 - DNA, 2020 bp, Homo sapiens; identical to SEQ ID NO: 47814
  chr10:119302458-119304478
  hyper

SEQ ID NO: 119834 - DNA, 327 bp, Homo sapiens; identical to SEQ ID NO: 7722
  chr10:119304501-119304828
  hyper

SEQ ID NO: 119835 - DNA, 135 bp, Homo sapiens; identical to SEQ ID NO: 7723
  chr10:119304850-119304985
  hyper

SEQ ID NO: 119836 - DNA, 320 bp, Homo sapiens; identical to SEQ ID NO: 47817
  chr10:119305061-119305381
  hyper

SEQ ID NO: 119837 - DNA, 212 bp, Homo sapiens
  chr10:119305974-119306186
  hyper
tactgtacacggagccgcagggcggggtcaaagttcccagcaaacagtaacgtttttttgggcagactaagttgtaacacttttcctgggcagctcagaaaggtcgaggcttttgttttaaaacatgttccccaccccaaaaccgaggagggcctggcgggtttgtgcggagcccggcacaaggcgcggcccggctgatttctcctggacag

SEQ ID NO: 119838 - DNA, 156 bp, Homo sapiens
  chr10:119306273-119306429
  hyper
cgccttgggccagcgccggggagaaatgaaccgtcctccccctcaattagcaaactcaaagcaaattaaattcagccttgttcccgctcagcttttttcatggagcactttgggcgactgtggctttccgggagagcaagacggaccggcctgcgg

SEQ ID NO: 119839 - DNA, 441 bp, Homo sapiens
  chr10:119306644-119307085
  hyper
cgtgggatggcagccgactcccacctcattgctcctgagacctctcacagccgctctggtgaggccgggcctccagccccaccctggtgggaagtgatgggactggggtccgaggttgtgtgaccagcagcctgttccggggctgtttagaaggagggaagagggggcttgctgtcacctccccttctcttagtttctcttactttccgtgtaacccacggtctttcagaagctttcagttttgaactcattttcctagctataaaggtacagctgggttggtctggaggcctacacactccatgtccctcctggcctcctccagccccatccccttcctgctcacctgtgagagtcccccgcacggaggatgcagctcaggcaaaccctgatcgcctacccagggcccccgccacgaagaggagacgctatatttaggaa

SEQ ID NO: 119840 - DNA, 372 bp, Homo sapiens
  chr10:119307581-119307953
  hyper
gtatggtttcagaaccgaagaacaaagttcaaaaggcagaagctggaggaagaaggctcagattcgcaacaaaagaaaaaagggacgcaccatattaaccggtggagaatcgccaccaagcaggcgagtccggaggaaatagacgtgacctcagatgattaaaaacataaacctaaccccacagaaacggacaacatggagcaaaagagacagggagaggtggagaaggaaaaaaccctacaaaacaaaaacaaaccgcatacacgttcaccgagaaagggagagggaatcggagggagcagcggaatgcggcgaagactctggacagcgagggcacagggtcccaaaccgaggccgcgccaagatggcaga

SEQ ID NO: 119841 - DNA, 30 bp, Homo sapiens
  chr10:119308556-119308586
  hyper
aaacggggagcaggacgacgggggggctgg

SEQ ID NO: 119842 - DNA, 142 bp, Homo sapiens
  chr10:119309781-119309923
  hyper
gttcgagctacaaagcgtcctgcgagcttttgtgaaagtgcaaatcagtttaagcaattatcataccaggaatatgaaggggaaagaggaggccttgcccagtggtctcctttaatctcttaatccacggatccaggggggc

SEQ ID NO: 119843 - DNA, 112 bp, Homo sapiens
  chr10:119310262-119310374
  hyper
gggatacaccgccgccgggagttgccgggggaggagggagacggggtggcctcaggagacccgggcttgcgtctcacagggacaggtgcgcctcggggtatcctggaaaccc

SEQ ID NO: 119844 - DNA, 15 bp, Homo sapiens
  chr10:119310433-119310448
  hyper
cgctttgcagtcagt

SEQ ID NO: 119845 - DNA, 58 bp, Homo sapiens
  chr10:119310921-119310979
  hyper
agcggctcagagagccgcaatccactccaacgccccccttcccggcccaaagaaggat

SEQ ID NO: 119846 - DNA, 30 bp, Homo sapiens; identical to SEQ ID NO: 47822
  chr10:119311621-119311651
  hyper

SEQ ID NO: 119847 - DNA, 530 bp, Homo sapiens
  chr10:119312661-119313191
  hyper
gtgtcgttccagcagcgccccactaactccggagtttggcaaacaacagccgttttgtgtaactgcgcatttttctagaccagtctttattattccagcaatcagcgctggaattactggggcgccgcctagaagcaaccgccggcggggcggcagaggatgccggcctccagcgtcgggggaccgcgcccgaaagccgggctgctttgtggggcctctcgcgcctcgcccgcagcttccggcccgcgccctccgctcgaccgccgattttctcgccccagccagccccgtagccagaggaaagtgggagttttgagaaccctctgaccccagccgtgacccctctccgggaggtggcttctcccgcaggacccggtgcgccagaaaactctaggcggcgccacgcttggaagcgcaaggtccattcatcagccgcgccccagcgtctaattggccttttgtttattagtgtctgttgcccggctgggagtctccggagggccccggagctgcgagtcggggtgccagaa

SEQ ID NO: 119848 - DNA, 48 bp, Homo sapiens
  chr10:119313239-119313287
  hyper
cgcgtcgcactcctctgagggggcgccagagcgcgccaaagatcacgc

SEQ ID NO: 119849 - DNA, 294 bp, Homo sapiens; identical to SEQ ID NO: 47824
  chr10:119494302-119494596
  hyper

SEQ ID NO: 119850 - DNA, 156 bp, Homo sapiens
  chr10:119494848-119495004
  hyper
cgggagaagttcaggtgggacaggagacacgggggtgaggagatctttgagagggccggccgggaaagtgggggtcgcctgtggctgagagggccgcatgccgaaggtcccgaccccaggctcacgacaggcagcctggcacgcaggaaggggctt

SEQ ID NO: 119851 - DNA, 224 bp, Homo sapiens
  chr10:119805617-119805841
  hyper
cactgtgacctgcacgtgggttggaaaccacttttgggcttgctcggacagcatcatcctgtcctgtttctctgcccccgagttccctagcacaggcagtgcccctcccggagggagagcctaattccttaatcactgcatcctaaggacacttaacggaaacaggcaggctcagggctccccgacttccctatggctgatgtcaaaacgcctcgcgggggcag

SEQ ID NO: 119852 - DNA, 74 bp, Homo sapiens
  chr10:119806445-119806519
  hyper
ggaacgtgaaggggcggggcctcgaggtcaggggtcagcacctccctggttgccgtggcgactggaggcgcgcg

SEQ ID NO: 119853 - DNA, 30 bp, Homo sapiens
  chr10:120000911-120000941
  hyper
atgggaagcctttgcgtgtggctgacacaa

SEQ ID NO: 119854 - DNA, 30 bp, Homo sapiens; identical to SEQ ID NO: 7732
  chr10:120006277-120006307
  hyper

SEQ ID NO: 119855 - DNA, 172 bp, Homo sapiens
  chr10:120101735-120101907
  hyper
ggagcccgaaccggcgggtaaccaaccctccataagccgtactcacctgtcaggaagtggtcgcccagcagccatcttaggaccccgtcaacatcgcgccttctcattggctcctgcgtctcaaccaatgggctggggccgttctggccctagggtcgccttagcaaccggc

SEQ ID NO: 119856 - DNA, 30 bp, Homo sapiens; identical to SEQ ID NO: 47828
  chr10:120278928-120278958
  hyper

SEQ ID NO: 119857 - DNA, 30 bp, Homo sapiens
  chr10:120353923-120353953
  hyper
cagaaggtgcgccggcgccgagcgcggtcc

SEQ ID NO: 119858 - DNA, 161 bp, Homo sapiens; identical to SEQ ID NO: 47829
  chr10:120354168-120354329
  hyper

SEQ ID NO: 119859 - DNA, 29 bp, Homo sapiens
  chr10:120354368-120354397
  hyper
cgaacacccagccgcgtggctcgaaggca

SEQ ID NO: 119860 - DNA, 30 bp, Homo sapiens; identical to SEQ ID NO: 7733
  chr10:120355327-120355357
  hyper

SEQ ID NO: 119861 - DNA, 30 bp, Homo sapiens; identical to SEQ ID NO: 47832
  chr10:120356057-120356087
  hyper

SEQ ID NO: 119862 - DNA, 30 bp, Homo sapiens
  chr10:120513977-120514007
  hyper
ggcggcggccgcgtcgcagctcttcaacat

SEQ ID NO: 119863 - DNA, 442 bp, Homo sapiens
  chr10:120514799-120515241
  hyper
ggttaccatgacgacgaggccctcgccggttcctgaggacgcgcgcggagcagtcttggcagtagctgtggactggccagagtgattggaggtgttttcctcgcgtcctccaagtctacggggccttcgcacctctgagtgcctgagagccccggcttttgcttgggacggaggtacgggaccacaagaggccccggggtcgcaggttataaacggatgagaccgccctgggcggcccgtggtccgactgctcttgggtcggtccccagccgtcgcgacacacacgcacaaaatcgagaataaaaaccgaatcacacatagcaggatggcgcaaaaaagaaatgcgtttgagttactcatgtgtttttaaaattcctttacgtttgtatgcactaaggccagcaacccaacttttaaaaatgccggctcaggccgggcgcgg

SEQ ID NO: 119864 - DNA, 30 bp, Homo sapiens; identical to SEQ ID NO: 7734
  chr10:120670186-120670216
  hyper

SEQ ID NO: 119865 - DNA, 30 bp, Homo sapiens
  chr10:120789940-120789970
  hyper
gagctgcaggtgtgcgtgttctgccggaac

SEQ ID NO: 119866 - DNA, 30 bp, Homo sapiens
  chr10:120839928-120839958
  hyper
acggttccgggctacgcgcctcccagaccc

SEQ ID NO: 119867 - DNA, 30 bp, Homo sapiens; identical to SEQ ID NO: 47834
  chr10:120863846-120863876
  hyper

SEQ ID NO: 119868 - DNA, 30 bp, Homo sapiens; identical to SEQ ID NO: 47835
  chr10:120938014-120938044
  hyper

SEQ ID NO: 119869 - DNA, 30 bp, Homo sapiens
  chr10:120938480-120938510
  hyper
ggttttcctactgtcgccccaaccttaaaa

SEQ ID NO: 119870 - DNA, 30 bp, Homo sapiens
  chr10:120966828-120966858
  hyper
ggccgcctttgagtcgcctgtcggccgggc

SEQ ID NO: 119871 - DNA, 85 bp, Homo sapiens; identical to SEQ ID NO: 47836
  chr10:121271621-121271706
  hyper

SEQ ID NO: 119872 - DNA, 1307 bp, Homo sapiens
  chr10:121301365-121302672
  hyper
cacccaaaggcctgcacaggtcgtagctattgtgatgagcaaaagggtggaaggaccggaatcaagggcacggctccaccttcaccgtggggtctttggcctatcaagttgcccgagatcgtggctcaggctggcccaaagtgacggccaaggcgaatccttcgtaacgtcagaacttcgctggctcggaccgcagaagtgcccttctccatcctggggttccgccaccctcgcgatcccaccttttggctcctcgcggcagaagcgaaggcccccgacgccccaggcccaggggcccagtcggatgcccgggtccagccgtgctcccccgggcgctcggcatccttccacccacgcccgcagcggaggcggagagcgtcacggagggagaagcccgcgcgccgttccgctttcggaatctggagccccatgtcacctccaaagtttggagatttggggcgctcctttttctcccagaccatcactaaaaagaaaactgcggctgttcctctttcagccaaacttcctccccggggctcccggaggagctctgcgctcccgtcgcggctgggaccgcgaaggtgcggtacccagcggggagaggtggtgcggtcggccggggctccagtctgggaggtaccaccgagccgcgcccgagcacaagagggagggcaggaggccgggcgggcgaaacggcgccccgaccccgagcccgcgggcccccgaagccgcttacctgacggcggccgcttcctgctcagccggctcacggcgcggttgaacatcgccgcgggcgcccgaggaggaagaaggagcagcccggcggcgcggcggctgagccggaggaaggcgaggaggaggaggagggcgaggaggaggaggaggagggcaaggaggaggagcgggctcagcaccgccccggagctctaggtccccgcccgccgccctcctcctagccaggcgccgcgtggcgcgctcagtgcgccctgcccgcccccgctggtgaggactcgcggttccgctccggggtgcccgggcggggcagggcagggcagccccgggtgacccccgatcgcccagagtgtgccccgcgcctgggataaggtgcactggcccagagggagcccgcgccgccgggaacttagtagccccgcggaggcggttagcgcgtcccggggtccctggccctcgcctgagatgccgccccggcccgccccgcccagcttcaagctcccgggcccatcgcggtctcccgccttctccctgtagccccggagaaactggcacggcgccgcgggcgcaccgcg

SEQ ID NO: 119873 - DNA, 36 bp, Homo sapiens
  chr10:121303029-121303065
  hyper
tgtcccgcacaccgcgctctcgggacacttctctaa

SEQ ID NO: 119874 - DNA, 30 bp, Homo sapiens
  chr10:121355693-121355723
  hyper
catgcaaagaaggacgccagagaaaaaggt

SEQ ID NO: 119875 - DNA, 44 bp, Homo sapiens; identical to SEQ ID NO: 7736
  chr10:121356078-121356122
  hyper

SEQ ID NO: 119876 - DNA, 128 bp, Homo sapiens
  chr10:121356664-121356792
  hyper
gctgtctgggaaagcgaactacaagtcccagagttcctcgcgccgggggctgtcctcggactgctccaggcattgtaaggctcttctgttggcccagtctgagctgctgctccgccttcgtccagccc

SEQ ID NO: 119877 - DNA, 30 bp, Homo sapiens; identical to SEQ ID NO: 7737
  chr10:121410460-121410490
  hyper

SEQ ID NO: 119878 - DNA, 30 bp, Homo sapiens
  chr10:121410895-121410925
  hyper
ccaaccccgggccgcggccaacttctctgg

SEQ ID NO: 119879 - DNA, 30 bp, Homo sapiens; identical to SEQ ID NO: 47841
  chr10:121411153-121411183
  hyper

SEQ ID NO: 119880 - DNA, 30 bp, Homo sapiens; identical to SEQ ID NO: 47842
  chr10:121446162-121446192
  hyper

SEQ ID NO: 119881 - DNA, 53 bp, Homo sapiens
  chr10:121485049-121485102
  hyper
ctgtagccaggccccggggtctcgcctggtttcggtacgggcaggcagcgcag

SEQ ID NO: 119882 - DNA, 30 bp, Homo sapiens
  chr10:121631640-121631670
  hyper
tggttttccctccccgcggctctgcgggcc

SEQ ID NO: 119883 - DNA, 107 bp, Homo sapiens
  chr10:121632625-121632732
  hyper
ataagagggcaaagcgagtctgcacaacagctgaaaagcattaagctcagagacctcagagtcatctctgggcaaaattagtgggcgaaaccgccttgggaatccgc

SEQ ID NO: 119884 - DNA, 30 bp, Homo sapiens; identical to SEQ ID NO: 47844
  chr10:121651989-121652019
  hyper

SEQ ID NO: 119885 - DNA, 30 bp, Homo sapiens
  chr10:121652273-121652303
  hyper
atcggacggtgggccgcagccatggccgag

SEQ ID NO: 119886 - DNA, 635 bp, Homo sapiens
  chr10:122216121-122216756
  hyper
gcaaagcgaagcccgcgagtgatctctggggaacttcctagaaaaaagaaagaatttcaggttcgaacggtgtagggagggccgaacacgggagcaaggttggccagggctgccctgagccctggagaatccccagagcgatcgtccactacatgcccacgtgcgtgcgtgtgccagggagcgagagcccggacagcgggagtcggaggcaggaccaggagctgcagaggggccgcgggcagagccccagcgagcgcgctgccctggcgcggagcccaggggccgcccactggcgggggaggcggggagcgcgcagggaggcggcggcggcggtggggcttccccgggcttcccctccccggtccgcgggtgcccggcgcgggcccaggaggcggaggcggctcctggggagagggatccgggagtccctgaggcggccccggctccgcactaggaggcggggtccgcagtatcgccagcggccggcgcggcttcccggagccccggagcccgaggcgcgaggtttaggctgagccctccccggcgcctgcccccgcccggcgcccgcctccgcccccgcccgcggcctggagcgcgcctccctcgcctcccagggtctggcgagccggcgccgg

SEQ ID NO: 119887 - DNA, 511 bp, Homo sapiens
  chr10:122216793-122217304
  hyper
cgcgggagctgctccggccgcaccatgcgggagctggccattgagatcggggtgcgagccctgctcttcggagtcttcgtgtaagtagtggcgcaccgcgggcagggcgcactgacgcgggggaacaaccgaccaagcctctctgtgccctaacttagtttgcgcagccgcttcccactggggcctgggttcgaggtcccttccccgccaagtgcccgcaacgtgtcctacgggaccaagagagacccttcctctctccttcctgggaccctaggcgcggagcgaccaccgcgcgccgaggctgagacctgctcccgggtctcaccgggcccgcgcctgtcgccagccccgcaccacctgcccgggggatccagggctgcacctctaaacagggacgcgcaccctggcccgtgccctcgggaagtttctccttctgtgtgatctttgaggcccacgttggaagtctttacccctggccccgtctccgattcctccccgctgtgcccagggc

SEQ ID NO: 119888 - DNA, 33 bp, Homo sapiens
  chr10:122610817-122610850
  hyper
gaggaacctgacagcggcgccgagggggccacc

SEQ ID NO: 119889 - DNA, 30 bp, Homo sapiens
  chr10:122702469-122702499
  hyper
tgctgtggcctgtgcgtcgcatcggcatgt

SEQ ID NO: 119890 - DNA, 430 bp, Homo sapiens; identical to SEQ ID NO: 7740
  chr10:122708489-122708919
  hyper

SEQ ID NO: 119891 - DNA, 31 bp, Homo sapiens; identical to SEQ ID NO: 47850
  chr10:122709344-122709375
  hyper

SEQ ID NO: 119892 - DNA, 419 bp, Homo sapiens; identical to SEQ ID NO: 47851
  chr10:122738986-122739405
  hyper

SEQ ID NO: 119893 - DNA, 30 bp, Homo sapiens; identical to SEQ ID NO: 47852
  chr10:123093885-123093915
  hyper

SEQ ID NO: 119894 - DNA, 30 bp, Homo sapiens; identical to SEQ ID NO: 47853
  chr10:123337319-123337349
  hyper

SEQ ID NO: 119895 - DNA, 1665 bp, Homo sapiens; identical to SEQ ID NO: 47854
  chr10:123356667-123358332
  hyper

SEQ ID NO: 119896 - DNA, 30 bp, Homo sapiens; identical to SEQ ID NO: 47855
  chr10:123368166-123368196
  hyper

SEQ ID NO: 119897 - DNA, 180 bp, Homo sapiens
  chr10:123686257-123686437
  hyper
gatttggtgtacttccgggccttcttcctttcagaactgtaatcatgtcgcataagccatttgcatcctgttgattttctccgtttaagtccaaactggaagcatttttccatttagtcttcataatcctcacttctaacgattgcataactgtctactcaaaaccgctgcccacaagta

SEQ ID NO: 119898 - DNA, 30 bp, Homo sapiens; identical to SEQ ID NO: 47856
  chr10:123687143-123687173
  hyper

SEQ ID NO: 119899 - DNA, 30 bp, Homo sapiens; identical to SEQ ID NO: 47857
  chr10:123687682-123687712
  hyper

SEQ ID NO: 119900 - DNA, 4 bp, Homo sapiens
  chr10:123688093-123688097
  hyper
ccct

SEQ ID NO: 119901 - DNA, 30 bp, Homo sapiens; identical to SEQ ID NO: 47858
  chr10:123734226-123734256
  hyper

SEQ ID NO: 119902 - DNA, 30 bp, Homo sapiens; identical to SEQ ID NO: 47859
  chr10:123853457-123853487
  hyper

SEQ ID NO: 119903 - DNA, 1296 bp, Homo sapiens
  chr10:123872186-123873482
  hyper
acgccacagccttcccggcgttgccatgcgtagtgggaaggccgtggacaaactaagaacagtaacaagttgtcatgactcagagactcctggaagtctgcagcgcctccaggagcagcggccgggctgtgcgtccatcggtccgtgcgtctctcgcctgccgctctgcggccgcgggcccctcggtgcgtctgggcgcgcccggccccgcgcattcctggccggggaggagagcgcggcgggcgccctgcgcgagcagctggccgagcgctgccccgggtcggagagcccagagctgggggaggagcctggcccggcagccgccgctcgcccagtcattggccttttgtgctgcaacttttcccgagcctttcggggagccacgccggccctgcgccgttgtcccgggaaactttgcgtcccagggccgcaccggaccgtggtgaccccacgcgccgcgccgccaccgggctcggaaaacccagcgcccccgggctctttggcagttgcgactccgaacgaaggcggctccgtgcgggccatcccctatctccccgggcgggtaagtgccggggccacgggcgggcggccggggtcagaagatgggcgcccgaaggaccttggcccccagacaaaggcgtactggaagtggccaaagctcatttcggctttccccggcagggactggccgagggtggaaaagtggctaactgcacattcggtcccctgctggcagaggagtgtggctgcggggaaaccgcgggccccagagtgtctgcccaggagcctggttcccttgagtgggagcgcgggggtcaaagcccgtggttcggggcgcgcgccagtggctgggattcccgctcgcggttggggtccccgcgcgtggttgtggttggcgcccgtgaccaggctccctgccagggttggggtcccgcccttgggggcctccgcgccttcccaccgggctctttcccagctcgtgtggtcctactgggtcgcgtgggggcatccccggcgggccacgacggcgcgtggactagccataaaactctgcgctggatttcctccgagtttgggacttttaaattctcgaatagttacgtcagcagggccgagcgcacttcggggatccggcgcaacacgtgacccgcccgagcgtcccctccgcgtccttggctcccgccgcagagtgcgcctctgcctcggggtgtcctcgaaatccagtgtcggggcgctgggatttgctgcccaggctccgagcgccgaatacaccacgctgtggccaggtgtcctctt

SEQ ID NO: 119904 - DNA, 38 bp, Homo sapiens; identical to SEQ ID NO: 7746
  chr10:123922644-123922682
  hyper

SEQ ID NO: 119905 - DNA, 82 bp, Homo sapiens; identical to SEQ ID NO: 7747
  chr10:123923517-123923599
  hyper

SEQ ID NO: 119906 - DNA, 1372 bp, Homo sapiens
  chr10:124133664-124135036
  hyper
ttgctgaaagaatttcgactaacccttctttaagtctctcttaccctcctgtactattaacaccattgtaagtaggcagtggagctacatttgcagggagagagaagagcgaaaaattggcgcgcagagctgtaaagcgtttttctccaggtcacaccgcagcctgtaaatttgtgacacttggaccgattatgggacagcttgcaaacaaattatctgcaaactaacgaagcctatttttaaagatccctgttcctcgcagctctaggcgatgacatcagagaacccggagttctacctccgagccaagcccagtggtggtcaaaaactacgaataccaggaagcaccgcggcgcggcggcccagagctccgcgcgcaggcctccccggcgcgccgaggccgccgccgctggaaccaggaagacgccagaaactcggcccgccacgccgcagggacccgcgcggggcctgccgggactcgtagtctctgcgggctgggagcgcccgctccggaatctcagccgccgtctgagggctgaggcagcgtggggacgcgtgcgcagtgcgcgggctggccgtcgcggacgccgctccgggcagccgagcctctgtgggagccggggccgcggcggcgcgggtgctccgggccgaggccgcggtaaagtttagcttgaagaacgcggccgcgctggagcaggggtggtggacggggccaggcgcgaggtggcggcggctgcggggctgccgggctgctggagcgcggttcccgctgtggcgagcggggaggcgtccgcagaggggcggtgggtgctggtgagtgcggagccggcgccccctctgcgcacgtccgcgccacgcgccacagcacctggaggccgccgggccggctcacctgccctggcttggggcagcgggagggggcggcgtcttcttcccgtgggtccccgattgttttcccgacgtcagccctcagcggcgcccggcgggggagggcgggaggcccgcggcggtcgcggggccgacgagctcctcggcgtctccgccccccgagaaatcccgctcggggcgcggtgcgcgcagctgcccggggattcccggtggcgccggtcggagcgcctccctccagggctgtgcccgcggggcgcgcgtccccgggcatcctttcctggtgtttaatgcattttggcttcaggacttgccgaggccgaagccggctccgccctgggccctgaagtcgggcggtgtccgcgatttacctccgcaccttcggggcaggtggccagaggcagcgttgaaagcgacttgcccaaggtcacgcaggtggcaccggggaggcgaccagacccaggtctttcgacgccgaggccagctg

SEQ ID NO: 119907 - DNA, 576 bp, Homo sapiens
  chr10:124220488-124221064
  hyper
cactgtgggtctgggcgcgggctttctgccagctccgcggacgctgccttcgtccggccgcagaggccccgcggtcagggtcccgcgtgcggggtaccgggggcagaaccagcgcgtgaccggggtccgcggtgccgcaacgccccgggtctgcgcagaggcccctgcagtccctgcccggcccagtccgagcttcccgggcgggcccccagtccggcgatttgcaggaactttccccggcgctcccacgcgaagccgccgcagggcccccttgcaaagttccattagtttgaaggacgcgaatctcagcgagagaacctgcggaaagcgaatatgtggggcgcgcagacggggaaactgagtcccgcgagagggccggcctgtgcgctgccccgcccgcgccccgccagcaccgccgtgcccgggcgcgcccgccctgccccctccgcgggcggtcccggtccagccgcccgccctccctcccgccatccggccagcccccatcccgggcgccgtgcccgtccccaaggcggctcgtcaccgctgcgaggccaatgggctgggccgcgcggccgc

SEQ ID NO: 119908 - DNA, 1161 bp, Homo sapiens
  chr10:124221086-124222247
  hyper
cgaggccctcctgcactctccccggcgccgctctccggccctcgccctgtccgccgccaccgccgccgccgccagagtcgccatgcagatcccgcgcgccgctcttctcccgctgctgctgctgctgctggcggcgcccgcctcggcgcagctgtcccgggccggccgctcggcgcctttggccgccgggtgcccagaccgctgcgagccggcgcgctgcccgccgcagccggagcactgcgagggcggccgggcccgggacgcgtgcggctgctgcgaggtgtgcggcgcgcccgagggcgccgcgtgcggcctgcaggagggcccgtgcggcgaggggctgcagtgcgtggtgcccttcggggtgccagcctcggccacggtgcggcggcgcgcgcaggccggcctctgtgtgtgcgccagcagcgagccggtgtgcggcagcgacgccaacacctacgccaacctgtgccagctgcgcgccgccagccgccgctccgagaggctgcaccggccgccggtcatcgtcctgcagcgcggagcctgcggccaaggtactccgccgcgctcctgggcagctccccactctctccatcccagctcggacctgcttctgcgggactggtgggcaggttgaggggcagcgaagcgttgtggggtggccagggcaactctcggggacaggcaggtgggccccggggtggcggatttccgcgggctgcctcggaaccgagcttcgcgcccagcccggggccggttctgcgcccagacgatgccagtacgcccggcctgcactctggggctcgagacgccgggcgaccggccatggagtgccctgagggcaaccacacagcgcggggaccccaggacaaataagaggaatgggggcataaaggaaggagagaagttcaggactgggaattggcgcctcgcagagcggcttcaggaccacaagaagtcatttcggttgctttttcttctatttacgtcctccgtcccctttaaaattcactgctttgatcacgggaccgctcagtgaaaactgtatgtaactcttttggaaaggaacagtgtttgccggcccgccccggagtttctccaaaaagtctaccccgagcagggaacggtttggcaccgctctcgtttcggcggcgttgctgc

SEQ ID NO: 119909 - DNA, 626 bp, Homo sapiens
  chr10:124639062-124639688
  hyper
agcgtcgaaaaaccgccgtggtgcccgcgcacagtgcaccgcgcctgcgcatggtctccaaaggctgagcgagggcctgccagtgcgcatgctccgctctttagcgcttcctgagcaaagtttgaacgcctctcgagtccagttggcttatgcgcatgcgtttctctggtgcaggttctcaccaaatccagaagcggcgggcatttgaaatgatgtaagccgggagtcgctctgcctgcccgtttctgcgctgcactggccgacacttaagcactggaagagaggcctggcaggaggcggcgcagtggacacgcggtccgaggacgggggcctcacccgccgccccacgcttgcctcttcctgggatgccgcaggcggggccctaactcacagcctcctcacccgggctcgtgtctgcgcccgcgacttcgactgggaggagcttctggcgccacctgcgccacggtgcgccgggccgccggcgaccgggtcgctgcgctcggcgactgccgcgctcctcggggaacgtgagggtctgagtccgggatccaggagagcagttggtgtcgggtctctgcgggggagcggggctgcgaggtggaggcgaggaccggggtgggcggagg

SEQ ID NO: 119910 - DNA, 36 bp, Homo sapiens
  chr10:124768240-124768276
  hyper
gccttgttaaatgccgtcgccgccgccgccgtcttc

SEQ ID NO: 119911 - DNA, 30 bp, Homo sapiens; identical to SEQ ID NO: 47868
  chr10:124768523-124768553
  hyper

SEQ ID NO: 119912 - DNA, 30 bp, Homo sapiens; identical to SEQ ID NO: 7753
  chr10:124768777-124768807
  hyper

SEQ ID NO: 119913 - DNA, 171 bp, Homo sapiens
  chr10:124893021-124893192
  hyper
tgcgggcggctgtcccggactcttctcccgccacactgggcctgtcccctccccatctgagtctagcgctggagttgtgatcagccacgagtccccctccccagactgaaccctcagcattcccagtttaaagtcgactttcgtgcgtcagaactctagccaagtttgcat

SEQ ID NO: 119914 - DNA, 544 bp, Homo sapiens
  chr10:124893237-124893781
  hyper
cgccggggtctctccacgcatactcggccgcgtggcaggctgtgtgcaggcggtgcccacccaaccctcatagacctacgtgcatcgagctatttctgcggttgggggaaaatgacctctgggtatccagcagcgattgggcgacctaggcccagtttcctcctctctgggcgcgggtttccacttacaaaatccaagtatgagacccaccctgctggggtctcagggcagtgatccgttccaacccagattttggatggcgtagcgttttgcattccagtaaagccctgtgtaaactcaagggagtaataacagtaattgtttatggaagcgccatttacgtttccagatttccaaagcaaaaatggggttcgctgctgtagatgaatgcagaaagaaacattacatatgcccgtcgagatttggtgggggagggtctgacgccccaggaccgaaaaacaaaatctacctctcaagtggggaccccacacgatcacgtctgccaatgcagggcggccttgaattaggcgaggctcaatctaac

SEQ ID NO: 119915 - DNA, 546 bp, Homo sapiens
  chr10:124894060-124894606
  hyper
gttctctaaggacttcgctgccgtcgagacgcgcagcggatgccgctgcttgccgcggcggaggaagctacgccgctgcgccttcggttcaccttgcccccattaaagcgttagttagacagctccaaacgccagctggccggagagacttcctgggagaaagtgctgtcgtcggggtcacagactcggagttgatccgcgagccttgggcaccggcggccagagcagaggggtgcccttccgagagcagccgtcggtgccgagaagctgttgccccagcagccccaccgagtgacgcgcgggttttggccgggtcagcgcgcatacgcacacaggcacacccactcctggtcccgggggaaggctcactcttcggttttccagggctaaaggccaaggccacgcggatttctgagtccgaagacgcagtgcgaggacttacacctggattcccttactatcggctggatggtgggtggggaacccaaatccctctcttcttggcctcgcccttcctagcaggctttaggaaaaataccgaggtcg

SEQ ID NO: 119916 - DNA, 825 bp, Homo sapiens
  chr10:124894870-124895695
  hyper
gggctcgcggccgttagtgcgcttcggccaagggcgccgcctgctccgcgtccctcgctcgcctcctgcgctcgcaggagcgctccgagtgcctctttagcgggagccaatatccttttgtgctaataggcttgtcctcatttgctgcctaattggactatataaagccaataacgggcgggctcttatagcccgaagccaaagcgccaaaatccgagggaaggcgaggagggggcggtggcggaggcggctgcggggccggggctcggctgagccttcgcctgcctaatcccatttgccattgtacgcgcccaatcgccgtatactccccgcatttaacttggatgacattttgatttcatcattagcatccggcgccggattgacgcagcctcgagccggggactgctcttgctgcctcctccgcgggagccgcagccgcagccgagccgcctcgatccctcggtgccgcggcagggccgctccccgcccctccgcacccctccctcatgcgagcccgcccgtctgggtcctcactccgccctcccgccgttggatttgcgcccggggcggcccccgactttgcgccccgtagttgagttccgtttatggtctgatttccggcctctcgcctgctcgccccgccgcccgcctgtcccgctccctccctcccggggacccggaggagaggggaccatgccggaacccgggccggacgctgccggcaccgccagcgcacagccccaaccgccgccgccccccccacccgctcccaaggagtccccgttctccatcaagaacctgctcaacggagaccaccaccgg

SEQ ID NO: 119917 - DNA, 700 bp, Homo sapiens
  chr10:124895832-124896532
  hyper
cgacctggctttccctcgctttgagatcccggcgcagaggtttgccctgcccgcgcactacctggagcgctccccagcctggtggtacccctacaccctgacccccgccggcggccacctcccgcgacctgaaggtaccgacctctctttgaactttcgttgtccccctgcgcgcccgccccgtccccgccccgcgctgcttccctccgcagttctgggaccccagcacccgcaaaccctctgctcggtcagtttttttcggcccctagcctgccctcgcgctgggttgcgctgcccgttaatccaatcccacttggtgagaaaagaagtggaattggagccccgggcacggtgcttcccgggaaaagtggcctcgggcgtgaatagggaggcttcggacggccggggcttgggacacggcctggaaggagggggtgattccaatgcgcctaagccgaaagggaaccgttctgccggcccctggcgaggaagctgagggaatggaaggaggtggccgcgctaccaccatctgcttgcctgtcctcgggaggagggggatcccaggactcggcgtcccttctctggcccagccgagaaggaggcagcccgcgggaatggtgaggcctcatggcctgggacctggaggccggcgcgggttgagcctgccgtccccaggcgccgggcctcgctcaaggctgtg

SEQ ID NO: 119918 - DNA, 539 bp, Homo sapiens; identical to SEQ ID NO: 7755
  chr10:124896937-124897476
  hyper

SEQ ID NO: 119919 - DNA, 1152 bp, Homo sapiens
  chr10:124898992-124900144
  hyper
aaaactcttttctgtcttgctcgctgactgcctctgcgctctctaagtacaacctggacgcacaaccctgtattccgggaggcggtggagacagaggcggctttgttcgcgaccagaggcactctctcccctgtactttccgcggcctgaaacgcccagcgagcagggaagaatgctgggcggaaggggagtggacttaggcttatctagtttgcgaaattgagcaaagcgacagcgcgcgaggcgagataccagagacagctggtatttccgaacactggtctgcagcctcccgttctgttcttaaacctgggttccttcgggagccgagagcttttgggcagggcatccctgggcattcgtcagctggttaacttcggtgggctctggttggagggaagaagggagtgagttcagagtttagctgcagccgtaggccgattgccaagtcaggctaggaaaggctgggccacaagaggacaaccccagggacagccagctcttgggacagcggctcccactaccaggagaggggaacttcctcaggtcttgcagagctgagattcccggggcgactcgagcatgggcgcggtcctgatgtgctaagtgtgagggaacagaggctacctagctgctgcagctgcaacagagaagaccttgtctcttccgtgccaggctcttctctttcccctggcgcccaacacctcctgggcggcatctctagatccccgaccctgtcctggcagacgccgagaagcgtagcgctcaccacacccgcgcgctactgggttccaggccgccgcgctcttagtgagcagcctgcggaggcacagcgcgccggaaccgcctggaagggtgggtccgcccgacagaagcaggtgcctgggcgacactcgctggccgggtgtggccgcctgcctttaagctgggggtctgcacgtacaattcctggcggggcacctttgaagctggggagccgaaagggggagatgaggaacccagagggtgaaaaagattccagagagcagccatagggcgcgaccgctggggagcgcctgcacgcctctctttcctctcgcagtgcgttgctaggctcctcaaattcaatcgacacaattgattctactgtggctgaaacgtccagtatagttt

SEQ ID NO: 119920 - DNA, 160 bp, Homo sapiens; identical to SEQ ID NO: 47876
  chr10:124901886-124902046
  hyper

SEQ ID NO: 119921 - DNA, 430 bp, Homo sapiens; identical to SEQ ID NO: 47877
  chr10:124902138-124902568
  hyper

SEQ ID NO: 119922 - DNA, 841 bp, Homo sapiens
  chr10:124902607-124903448
  hyper
cgccctctcgctgtcccccaccccctaacccgggctttgaggtgtgagcgatcccttgcctctgggcctaggactctggaagtgtgcacggccgttgtgcagggtggatggtgttgaccttttgacctgaaaacagttgggggctggggagcggaggaaggatggcggaagagaggaaagagccacgagaacaactaggcgggatgtacttttgagccctgccgggtgtctccgatcggagtctggggttgagatttgggctgcacttgtccccggtgtgtctctccggcggagtaccctgaaggtgcacgaggtggggagcataggctgaggtgggtaatcgggtcctggatagaaacacaaccctcgtcctcactggggcccatgtatgcgcctgggattcctccccacccttccatttccaggacccctaagggtatcactccagcgacggggcggttctggagacccgagggaagggatagctggagactgcagcgcgccttctccgagagtcccctggaggtgcgcatgagttgtactagcgcagatctcttccttggctgctgctcctggcgatgcatctccgggggaaacttcccaaagtctgagttgccggggttccaaaaggatccctttgggtttaggcctgggagaggtatagagccagcgagagagcgcgttgcgcctatcactgaggcaggagcggtgaggtggagtcacctgctgtgcctcacccaagcgctaatgtcttaaagaaatataaagaatccccttctttcgtgagctccttcaccgccctcgcccccgttggtgatggagtgcacgcatcagattttca

SEQ ID NO: 119923 - DNA, 229 bp, Homo sapiens
  chr10:124903911-124904140
  hyper
tcgaaacataatcaacgtttatacttagaaaatttattgagatcattttctctggtatttccttattttaaagtttggacgcgccatatatcataatccactcgcgtgggggcgggggggcagactgtgtttaatatttatcgaagcttgattccaagatcaaacttgtttatgacttcatctgtcatttcggagggagccttcttctattacccggctcagccagcct

SEQ ID NO: 119924 - DNA, 436 bp, Homo sapiens
  chr10:124904557-124904993
  hyper
gggcgtctgggcctccgtgctcccggtgaagatccccatatgctagaaaggggcggcaaggaaggttgtttcttgtccctcccgtccttgcggtgtgacggctataggtgctggaggggcgggaggtccctcgggctatcaatcgaggggagctcaggggaactgcagtcagtcaggctgcagagctgggtctccaccacagccttccttgccccagccccgtgcccaccaccatctcttccctggtaaagtgcacgcactagtaggagctcagtgaacgtttgctgaatgaatgtgtgagtgtgcgcaggcgtttatgcaagtgccttcatgcgaattaatgcgtcctttgccgggtgtggcagcagaggaagtgcctcggtgaagatcagaccctcgaagcgattagagggacgggacagaggaaatacaaggc

SEQ ID NO: 119925 - DNA, 306 bp, Homo sapiens
  chr10:124905573-124905879
  hyper
gctggcactgctccccgagttagctggccagttcccctcggggctgccttgaccctggctccggaggcagcgcctagctcaggatgtctgcgagaagcggatggttagtgagaatccgacgattctttcgctgaacctcccgcgtaccccccaacagcgcgggagcacgcgggacccgctgcgacgtggcccaggagcctgcgccgccgcggcgcagaggagaacgcacaaattgtatttcagcgccaggtccttccgggttaatgagctgacaccatgattaaagctgaccatttgtaatgtgtc

SEQ ID NO: 119926 - DNA, 202 bp, Homo sapiens
  chr10:124905919-124906121
  hyper
cggaggccggcacctgcccctcgctggcctcccgggccgctgcgcgcaccccctggcccccgccccctcgcctgcccctgccccggctgcgcggccgactcctaatcaattagcccattaacgagcccctcgaggagttaagtagggaagagttctgccacgggcagggccgcagtcggtaactcaccgcggctaatgatat

SEQ ID NO: 119927 - DNA, 30 bp, Homo sapiens; identical to SEQ ID NO: 47881
  chr10:124906406-124906436
  hyper

SEQ ID NO: 119928 - DNA, 1416 bp, Homo sapiens
  chr10:124907166-124908582
  hyper
cacccccacgcagggcgccacggtcccaggagtgccggctttgcccgcccactggggctagaaggggtggagggctgggggaggatggtggagcagcctgtacaagcccctgggaggcgcggagacccgtcgcctgcggaggcgtcgagccactccagctccgagtcccgcaccgcccctgcctctggagagaagggtccaaggggtccaaggagtcggagttgccgcagccgccaggaacccgggctagaatctgcagctgctttcagccctggctgcccctggttagacgccgctgatgcccgccaggccctcggcgcgctctgggggcgcaccggtgctgtgtgcctggccggagcgttttgaaattttccggggccgctcggcggcgctgcgattggccgcgttcgggtaacctctatgcaaatgaggccgcgccgcctccgcgccgccggagacccggcgagttggcgggcgaggaaggggcatttgcaccggggctgggcgggcgcacccagagccaggcgggcaggaacccctgcgcagccatccggtgcctgcatgtccctggcgcggaagggacgcctcaccagcctcggcgccccctccccctagatttcctccccgcccctccccactgcctgcctgctgcaccaccttccacccagatcacccagatcgtctctaaagggagttcttggtttccttcgatttcttatgaacccaggatgggcagcaaagaagatgcgggcaaggggtgtccggcggccggtggcgtctccagcttcaccatccagtccatcctgggcgggggcccctcggaggcaccgcgggagcccgtcggctggccagccaggaagcgcagcctgtccgtgtcctcggaggaggaggagccggacgacggctggaaggcgcccgcctgcttctgcccagaccagcacggccctaaggagcagggccccaagcaccatccccccatcccttttccttgcctgggtaaggatcgcacgtcgccagtgtggcagcgagcgagcgcgaggggagggaggctgagcgccccgccaagactcccgcgccgggccccctctggccagagctgcggcagccgggggttcgggaccgcggggagaggggcgcgcactgtggtgcctcctccgcccggtgggcccctgggagcaggcgaacacagacccgtgccggcttgggcttcctggggaaggttgagttgttgagagagtggaccacagcgagagggacacgcggccggccttacacccggctgtcctcaatcactgcacatctggtactttctttccggacacgaggtggagatctgcaagtcgggtctgggcagtctgtctccaccgtaatctctttctgagtcttcttcctcactcgctccgtatctctgccttt

SEQ ID NO: 119929 - DNA, 142 bp, Homo sapiens; identical to SEQ ID NO: 7763
  chr10:124908972-124909114
  hyper

SEQ ID NO: 119930 - DNA, 285 bp, Homo sapiens; identical to SEQ ID NO: 7764
  chr10:124909252-124909537
  hyper

SEQ ID NO: 119931 - DNA, 72 bp, Homo sapiens; identical to SEQ ID NO: 7765
  chr10:124909673-124909745
  hyper

SEQ ID NO: 119932 - DNA, 224 bp, Homo sapiens; identical to SEQ ID NO: 47886
  chr10:124910230-124910454
  hyper

SEQ ID NO: 119933 - DNA, 492 bp, Homo sapiens
  chr10:124910708-124911200
  hyper
cgctgcgcccagctacccggccggtggcagagttatgtgtctcgcgcggagagggaactgggcgcggtgaggcagttctgcggctcaggagagatccgaggcccgggaccaggcaaagaaggtgagggaggcaaaggcgcttccctacactcttttgttgttaatagtttgcattggttcagcgtgtggctggatcaccggctagcacgcggccgcttgctctgaatggaaccttgacgcgcggcgggggcgcccacggacttcctcgccctgacacctgcggccgcgcaggggctgggagggcgctgcaccgagagaatagccgcgggagtatcatgcaaattgcagattctcgctcccaatagattgcagccacctgttcttggcaaaacctcggaaaaggaagcctgagcttggaggaagccggtggttcagcaccacctggggcgagctcctccggcctctggctgggcagagcggatgcaaaggagc

SEQ ID NO: 119934 - DNA, 30 bp, Homo sapiens
  chr10:124913578-124913608
  hyper
gagggcgggcagagcgtcagcccctagaaa

SEQ ID NO: 119935 - DNA, 30 bp, Homo sapiens; identical to SEQ ID NO: 47888
  chr10:124913813-124913843
  hyper

SEQ ID NO: 119936 - DNA, 30 bp, Homo sapiens
  chr10:125425502-125425532
  hyper
gtgcgcggagcggagcggagacagagctcg

SEQ ID NO: 119937 - DNA, 343 bp, Homo sapiens
  chr10:125650819-125651162
  hyper
gcgcgcaaccaccggcgccccctcgggctgcccagcgcagaaagttccttacctggtggaggcggctccggagccgacttctccctcttgggagctttcttgggcttggtggccctcttgggcggcctgggctcctgcgggcgccgctcccactcctccccgggccccgcaggcagcggcggagagaaggtctcgagctcgggctccgggcgcgcgtagtagggctcccggctccagatctcctgcccgtaataatcagggtcctcgagggctgcgccctgggctccgaccccggccagggtcactgccaggagcaccagggccagcgctggggtagcggtcc

SEQ ID NO: 119938 - DNA, 88 bp, Homo sapiens
  chr10:125651372-125651460
  hyper
gcagaggcgcggggcgggcgcaggggggccggccccgcccttccttcttccctccctttcccggcgacccctccgaggccggtccttg

SEQ ID NO: 119939 - DNA, 31 bp, Homo sapiens; identical to SEQ ID NO: 7768
  chr10:125727316-125727347
  hyper

SEQ ID NO: 119940 - DNA, 1264 bp, Homo sapiens
  chr10:125851233-125852497
  hyper
ctgtcacagcggctccgcgcacgcaggcagacgaagaagggcccccgcccccaggagctggtcccagcctccagcctggcagcctccttcgaagacttccctacactgggcgcggacctccagccgccagcagccggcaacccagccccagccttcctcctctatacccgccgtcccagccgcgccggccggccccgggcgcagggcgggcgggaacgtgggcacccggacagcgacggggaggtcaagcagctgtgcccaggacccgggcggctccgaagcctcaacacgcacacactcgcgcgcacgccggcccatcggttgcctggaggagtcgggaaggtgcttccacggctcttcattcattttcccaaaggcaaggttcccttcgccccggcgcctctatcctgccatcccagggggccaattgcgccacagcccgccacccagccacccacagccaccgcgtcctatctcccggcacacacaacccaacagactcgcattacatctccaccgccagcgtcgcctccgcgccccggccgctgccatccggctccccagcttcgccgccccgcagccccggctccccgcctctggcctcaccgcgcggctcagagctgcctcgctcggctcgccgcaccaaggccggccagagacgccgccaccgccgggaagcgccggcaactcccgagtcacgccgcctcccgagacgcggcggggcgcagggaggggacagcagtgggggcggggcggggaggaggaaggaggagggggcggggagcaaaagttcacaccgctcggggctcagccgctcccctatctcttcccaggcccgcccccgccatcccccttccctgaaccgggtcccacgggcttaggcgcgggagagctctggcctccccgcccggaaccgccgcaaggctagagccagggttctggaagcgcatccgagctcgcaaccggggagagagtggcggatgcccacttacctgccccgggccgcgcctggaaacttccccaaagtgcgataggggtgtgggggcggagcgcaaggctggggggaatccccgtcccctaccgccaaacgacgcgcgctcacaccgtgaaagcactggtctgtccgtcggtcggtcccccgcctgcggctcccagagctgggcggtgcaggggcgccccgattccgactactgggctccttctcccggacagcccgccggtgcgttccacgcggcttgcgccccccgccggcctccggctatcc

SEQ ID NO: 119941 - DNA, 833 bp, Homo sapiens; identical to SEQ ID NO: 47891
  chr10:125852540-125853373
  hyper

SEQ ID NO: 119942 - DNA, 160 bp, Homo sapiens
  chr10:125853672-125853832
  hyper
gcccggccgccagagacatctttaaggaacttggcggtctggagccagcccgtacattaatattcaaggccacagcgctggtgagttcggcgccctctgttgtatttttgcatcccgggaaggctggcccggctctttggcccggcgtgttttgcttccg

SEQ ID NO: 119943 - DNA, 126 bp, Homo sapiens
  chr10:126077683-126077809
  hyper
gcagggaggggccgcggggctctggtttctgcaagttctgaattgtctccaaggagcatattccaacgtcagaataataaacttttacagaactgtattgctctgcagcgcgcggggggactcggc

SEQ ID NO: 119944 - DNA, 30 bp, Homo sapiens
  chr10:126078051-126078081
  hyper
gggttattgacttgcgcgtgggcgctgagt

SEQ ID NO: 119945 - DNA, 1218 bp, Homo sapiens
  chr10:126106653-126107871
  hyper
gcaaaaagcccccaacgggaggttttcatgctgaaagtcctgttgcccccccatcccccaccatctaattaacctgcacgttactgtaaggaaggttctgcttccgtaattttctttatttcgacagaggctggagaaaaaaaatcataggctggaagaggggagcgatgggcaggccgatctgcagggcgcaggagcaggccgggaggacccagccctccaaggctgcatcagcgcccccgccgcgtgaccagggccaccggtttactgcacagctcccccgtccccagaacgcagcctccccgccaaccccaggaaccaagggtgcccaaaggcctcctacccggaaccccggggcgcctcggggtctctgggccgggtgggccgagtcctggcctccacaggccgcgagcgcagggggcggcggctccgcccggtctggcaggcggggctgccacatcctcagcctctccctgccgcccgcccgtcggccgctctgggctggaaccaggactccggcctgcaagccgtgggtcgccacgcccctgccccctgaagctgcgcgccggccggagactccagggcgcccgggtccgagccgcccgcagagtaaacgggccgctgaagcggggctcgttccccggccgaggcccagcgcgccccctcagccagcatcccccgaacccgggccgcggccaccccgcgcccgcccgcctcccccgccgctgtcagggaaccccggccagggcccgaaccagagccccaggacagcggcgcccagacggtacctgacagcgcctgaggacaaccgggtacacgcggcgtctatgaagcgcaacagtgacgccggagagtcactgcaacttaaaggctgattctgccccgcccccaagacaccctcgccgctcattggctggggcggagggcaggataccaatcgcgtgggtcccgtcctccgccccgccctccggccgcgcatcaaggatctttgctcctcccgcggattcgatccgcgctcgcgcctcctgagcccgccggcctgtacctgagctcaggcccctcggtcgcctcctctggcgggacgagaagagtccttgtccgcccttgctgacgagaagactgaggcccgaaaaggaaaagtctgttgggccccccactgcgcgggccgggtgtggctggaggccgagagacgtgaggctggaccgcccgccctgtgct

SEQ ID NO: 119946 - DNA, 910 bp, Homo sapiens
  chr10:126135877-126136787
  hyper
cgcggcgggcaggggtgcgctgacacccgcgcacctgcacccccggtggaggagccgagggcacacgacgatgccaatccctcgtgaatcccgcgaaagaggggccagggggctccggattcatagacgcggggcgtagaagggggtcaggtaggaaggcccaaggaacggcgcgaaagggctcccgggggcggcagccgtcagcgggaaggaggcggcggacgggaagaggacattggccgcggagtaggaggggaaagtctggaagtgcagagcgccggtgccgggagggccaggactgccccccgagccgccgccgccgccgccccccgccgcccctggctggggcgcgccaccccccacctgcgccgcgccgtcggcacccgggttctgcttcttccacttggtcctgcgattctggaaccagattttgacctgcgtctcggtgaggctgagagacagcgcgaggttcaggcgctcgcacactgacaggtagcgcgtggcccggaacttgttctccaaggccaccagctgctcgtaggtgaaggcggtgcgcgcgcgccgcggcttggcgcagttgggctccaggcgccggcgcctgggacgcggggagccgggggatcccgggggggacctcacagggccgcccccgccgtcctcgcagggctccccagacgccaatgccccggccggggcgtcaggtgagcgcgctaggcccggcagcaagcgcgcagcccgctcccgcagccgcggcctcctcggatcctccgcatcctcctcctcttccgcctcggaaccctccaggggggacgcctggccggcgcctgggcccgcagcatctaggggagaaggggtcggtgaacagaagcctctccaggtccccaaacctcgtcctcgtcctccctagagc

SEQ ID NO: 119947 - DNA, 1710 bp, Homo sapiens
  chr10:126137184-126138894
  hyper
tcttctctctcccgccgtgttaatagagtttcagatttgtgcggggccggatcgatagatgtcatctattaaaggtaagttttaatcgaacaatattaggatcagacagggaaagggggtttgaagtcggtacctgcaagctgcgggcaggagatatgcaggcgccagtaatagaatatcgatcacgagggtgggggaagggagggcggcccctcggagagaagatccgaacaattaccaggccgcctgcctgggcccaagtgcggccgccagaggcgccccgggccccaggcaatcaccgccaaacttggggaggggagcagggggctgcgcggcatccagcctcccccgatgacctgagcctctgaccctccagggagccgcctttccctgtctgatcccagcaggactcctgctgtcttccgtccttccttccagccacaaactttcctaaccccttcatcaggtgtccgccagcgttgggagtaattcagaaagggtttcgagaagaaagtaccgaaagcttcccaacactccatccgagccccgcccccagcccagtcccagttaacagttgagtctggggagcttgagcgcctggggcagcccagccccgcaggcgtctccgggtggcacctgacctcgctactcacgaagacccccggcgcaagccttagcgtcagctcccccatccataaaatggaggtgatgttaatgatgctgtccatctctcaggttccgaagttttcatcacctttatcccagcccttagcccaggtcctagcacgtggcaagcgcattaaatgcccgataaatgagtaagcctggcaagacaggcgccaggtaagtttccaccgcgagcatcagaactgtggtgcgggtgagcttggcgggtgagcagggatgcggcaaatccctgccctgtaatgcggggagcctcctctctgcctctatccaagtccgaggcgggggctacacttcgcacccggtcccgtgcgccttctctctgaggaagacgctgttaagggccactcaccgggcccggctgttcccccatacactccgcattgttggggctgaggcctcctggggccggggccgccttgcatcttaccaggggtctccagctgtcggacagggtccctggagctggcatctttccccgcttcgacctccgccaaacttttcctggcttcccggggagccgggcgcacggcagggagcgctgcgcgggtgaatttctgtgggtccaggatgtccaggacagagaaagaaatcttgtggtgggagggagccgccttggccccgccgtcctgccatgccagcatgcccgtcgcccacgggccggcggtcggcggcgcggggttggggatggcgccgctcgggcttgccttcggctgtggcttggcggtagctttccagccaggagccgggtccgcgctgccaagtgaagctggggaggggggcggggaggcggggcggggagagcgccgcggggggctgcgcgccgattggcaccggcgcagcccgggccagcctcgggactatcaggcgctgtgccgcggccgcttgcctgggctcggggaagcctccgcgcgcccggtgcgcgcgaccgcggggacagtgttgtcgtctccgcgcgcctccgcccaaccctctgggactctccgagggcgcgagggaggcttccatcccggggatccctcaccc

SEQ ID NO: 119948 - DNA, 30 bp, Homo sapiens; identical to SEQ ID NO: 47900
  chr10:126150278-126150308
  hyper

SEQ ID NO: 119949 - DNA, 30 bp, Homo sapiens
  chr10:126150703-126150733
  hyper
gtgctgaccacggacgaccccactgttgcc

SEQ ID NO: 119950 - DNA, 30 bp, Homo sapiens; identical to SEQ ID NO: 47901
  chr10:126431871-126431901
  hyper

SEQ ID NO: 119951 - DNA, 30 bp, Homo sapiens
  chr10:126431902-126431932
  hyper
ccggacggcccttctcgccatgtgcaaaag

SEQ ID NO: 119952 - DNA, 30 bp, Homo sapiens
  chr10:126432936-126432966
  hyper
gagtgtgcagtgcgcgcagccgccgatggg

SEQ ID NO: 119953 - DNA, 218 bp, Homo sapiens
  chr10:126490203-126490421
  hyper
ccctgcggaggatacggtgccggggtccttccgatcgcaaaaaccggcgttcctcagccttcaagactgtgagcgctcagggccctcggccgctgcccgccgcagactccacttcccatgatgccaaggggtcgggccgtccggaaggccgtgtgccctccgcggggcatgatggggtagctggagatttccatcatggcggcgtccatttcgggcta

SEQ ID NO: 119954 - DNA, 30 bp, Homo sapiens; identical to SEQ ID NO: 47903
  chr10:126605435-126605465
  hyper

SEQ ID NO: 119955 - DNA, 28 bp, Homo sapiens
  chr10:126606092-126606120
  hyper
cccgtggctggacgcggtgccggtccca

SEQ ID NO: 119956 - DNA, 167 bp, Homo sapiens
  chr10:126847189-126847356
  hyper
gaaggattgtttaccccggacagggcaaggaagcccggtatgacgacgtaggccattgccagcagcctccaccacgagcacgcagagcggggatttctacgaaaaattcctcctcttccctataaaatcctaaacgtggggtcctctgcagccaactgccgcttggg

SEQ ID NO: 119957 - DNA, 285 bp, Homo sapiens; identical to SEQ ID NO: 47905
  chr10:126847583-126847868
  hyper

SEQ ID NO: 119958 - DNA, 123 bp, Homo sapiens; identical to SEQ ID NO: 47906
  chr10:126847900-126848023
  hyper

SEQ ID NO: 119959 - DNA, 371 bp, Homo sapiens; identical to SEQ ID NO: 47907
  chr10:126848387-126848758
  hyper

SEQ ID NO: 119960 - DNA, 94 bp, Homo sapiens; identical to SEQ ID NO: 47908
  chr10:126849002-126849096
  hyper

SEQ ID NO: 119961 - DNA, 648 bp, Homo sapiens; identical to SEQ ID NO: 47909
  chr10:126849497-126850145
  hyper

SEQ ID NO: 119962 - DNA, 60 bp, Homo sapiens; identical to SEQ ID NO: 47910
  chr10:126850345-126850405
  hyper

SEQ ID NO: 119963 - DNA, 30 bp, Homo sapiens
  chr10:127408029-127408059
  hyper
agacatgcagggggcggagcctgagcgtca

SEQ ID NO: 119964 - DNA, 30 bp, Homo sapiens
  chr10:127511335-127511365
  hyper
agcatttttaactgcggtgccggctttaaa

SEQ ID NO: 119965 - DNA, 69 bp, Homo sapiens
  chr10:127511974-127512043
  hyper
aggggtcatggctgcggaatccagcaggggcattggggttgacgtgcactcagcgccgagcttcttcgt

SEQ ID NO: 119966 - DNA, 30 bp, Homo sapiens
  chr10:127512474-127512504
  hyper
ttaaaggtctagtccggtccagttaatctc

SEQ ID NO: 119967 - DNA, 30 bp, Homo sapiens; identical to SEQ ID NO: 7780
  chr10:127532323-127532353
  hyper

SEQ ID NO: 119968 - DNA, 31 bp, Homo sapiens; identical to SEQ ID NO: 47913
  chr10:127585010-127585041
  hyper

SEQ ID NO: 119969 - DNA, 30 bp, Homo sapiens; identical to SEQ ID NO: 7781
  chr10:127730549-127730579
  hyper

SEQ ID NO: 119970 - DNA, 1314 bp, Homo sapiens
  chr10:128075548-128076862
  hyper
ttttagccacattacagtagacgcggtgggggcggagggcagcagtggcaatcgcaaaataaaacgtatcataaagtggtaacggttcgtgatttaggccagttgttgaaaaataaatgcctgttatatagaatcacagaacttgagagcttgcggccaagggaagtcgttcatcggtggaccgacagcgccccgggcggcagaaagaaggcggcggcggcggagacccggggaagttgccggatttttaaaaaggcacctgctgggtgagtcctcactgtgcaaacgggagccacaggtgcccgattttaaggggctacaactcgggaaaacctaagtctgtaaaactaagtacgttaaactaagtaagttctcgctgtgcaccaagttgatgggggcgattatttacggcggagaaactgagtggaggaaggagggagaattccgctaaagtttgcctgcgactgacagctagggagtgacctggaagccaggaagaggggcagagaggaaactaaagaagtaggtaagagagtcagtttatgaaaatagagcctgctgtggagagcagcaggcacacctgcggaggagggggctgcctcacctgcggggccgctgcgcgcccccctaagtgtgttagcgggggaggcggggctggaaaggaaacctggtgaagggctggcccggagcctggggtggggatattcactgcgggatagggccagcaagaggacccgacacgcatcgtcccgagtgacacgtgtaaatgtcaagatacagagacatctgcaaatgtcacccaagagggtgaggacgggggagcggtcccgaggctgtgccctccggggcaggtactggctcctgtggggctgcgggccaagtgtcgcccttccccaaggaattggcacctggggggggggggtcggtctcgccgcgctggaagcgcaagccccggggctccggagatgcgccggggcgcgtcgcccctcggggcagccctggacctcggcgcgcccaggcgcagcgtgcggtgccctcggcggggcgggcagcgagccgccctagttcggcgacttacctcgggcctcgcagggcgcgagcagagcaccggccagggcgagcaggagggcgcgggcgggggacacgggcagcgggcgcgctgccatcgtcgccggccttcagtgcagcagctctcgggcccggcggcgagcgctgcaccatcccacgcgggcgccgagccggggccgggcgtcgcgaccggagggatttcctgcctcggcgagtcagctccggagccctcgcgcagcgcccgcg

SEQ ID NO: 119971 - DNA, 300 bp, Homo sapiens; identical to SEQ ID NO: 7783
  chr10:128076940-128077240
  hyper

SEQ ID NO: 119972 - DNA, 1057 bp, Homo sapiens; identical to SEQ ID NO: 47917
  chr10:128593607-128594664
  hyper

SEQ ID NO: 119973 - DNA, 31 bp, Homo sapiens; identical to SEQ ID NO: 7786
  chr10:128850483-128850514
  hyper

SEQ ID NO: 119974 - DNA, 68 bp, Homo sapiens; identical to SEQ ID NO: 7787
  chr10:128993453-128993521
  hyper

SEQ ID NO: 119975 - DNA, 948 bp, Homo sapiens
  chr10:128993580-128994528
  hyper
cgttggttggtttcccacgcctgtcccggtctgactcgggctgccaggcaccgggaagccccgcggcgccgaccccaacccgcagccccgggaaggtgccaaccccagcgagtggaggagacgagcatttcacgtgggcatctgccttcactgctgctcgcgcctctcctcaacggccggcgtcagggcccctctgttccaactcatcccccccccgaagttaatcagccgtacttgtactttccagggcgctttagtttggaaaatacttaaaagcctcgaaaccttccggggagacggccgcccccagatctcccagttttgcctggctagggctgtcgggcgctcacgaagctgtggcgtctgtctggaacccacatcgcagaggcgcagccccgctcctccctgacgtcgccaaagttgccagacgcccctcagcgacccggtcgcgccagatgcagttgcataaccttgccccccacctgcgaccgcaccgggtccgctcccggctgcaccggggtgtcccggccccgggagccgccgagtttccggccaagccggtttggggccgagtgtgtgcgcccgaatcggggtcggcgcccgtcccagcggtgctctgcccgcggccaagtacgacgggcgcgggggcgcgggaggagggcacgcggggctccgcttaccttccgctgcttacagataagtcgaggtcgatgcagcgcctggctcgggcatgtctcgctgcggaccctggcaagcctggggcggcacggagcactccggacagggcatccgcggccagactcgccgcgctcacgcggaggaagcctcggctccggggacttggcccgctgcgcgcctgctgcccgccccctccaccgctgccggcccggccctgctggcccggccggcccccgcgccgcagctcgcgtcgctcgcgtccctccggcc

SEQ ID NO: 119976 - DNA, 307 bp, Homo sapiens
  chr10:128994545-128994852
  hyper
cggggaggcagcggctgggccagctccggggacgcccgcgcgctcgcttgctcgcgacgcggcggagccagccacagccacccggcttcgcgctcctccgatgtcctcatttactgcaattgtcttcggcgagatctcagagccagggccaggaggcgggggcggggcagaggagggagcaggagggaagtcctttccgctgctccaggtcccagctactccgcggagccgggcggccagaggcgagggcgccccaagccgcgcgcctgccgcctgtgcgcccggctggcaccgaggcgggcggagc

SEQ ID NO: 119977 - DNA, 30 bp, Homo sapiens
  chr10:129355325-129355355
  hyper
gaagtaattaagcggcgatgtgaagccctg

SEQ ID NO: 119978 - DNA, 164 bp, Homo sapiens; identical to SEQ ID NO: 47921
  chr10:129534421-129534585
  hyper

SEQ ID NO: 119979 - DNA, 454 bp, Homo sapiens; identical to SEQ ID NO: 7790
  chr10:129534992-129535446
  hyper

SEQ ID NO: 119980 - DNA, 528 bp, Homo sapiens
  chr10:129535695-129536223
  hyper
cgcttcgggtcccgggcctgcgccgccctacgcggccccgagctacggggctcccggcccgctcctcggcgccccgggcggcctggcgggcgccgacctcgcctggctgagcctctccggccagcaggagctgctgaggctggtgcggccgccctactcctactcggcgctcatcgccatggccatccagagcgcgccgctgcggaagctgacgctcagccagatctaccagtacgtggctggtaacttccctttctacaagcgcagcaaggcgggctggcagaactccatccgccacaacctgtcgctcaacgactgcttcaagaaggtgccccgcgacgaggacgacccaggtaacagcggcgcgccggctcgctccgtccaggactccccatcttcccgccgggccgcgggcactccgggggtgggagcaccttagacaacctaatttctccctgcgcggttggggatacccggggaggagggagaaggggaagaagtgcttgggcatggacaggttctcagaca

SEQ ID NO: 119981 - DNA, 2 bp, Homo sapiens
  chr10:129536258-129536260
  hyper
cg

SEQ ID NO: 119982 - DNA, 1005 bp, Homo sapiens
  chr10:129705207-129706212
  hyper
gggccatacccgcctcgcaggtggggcgggcgccctggatgcgctccccgcgccgggcaccaggcgtcgcccccgctcctcgcagcgcccaggcccccgcccccgccgcggagccacagccggagctggagccgaggcggcggcgggacgcggccggccggacaaatttcctgctaggctgcggacagcgggcggcaggagccggcgcgagcggcttcaggaacccacggcctctgcgcgtccccgcgacccttcttcgcgcccggcgaagacagccgggcgccccggagggcggcgggcaggcgcccgggagatgcggagcctccgctgcagcgcgatctgcgcgaccagaccggcccccccgaggtgagcgcgcgtgcggacagggaccctgcgcccctgtggggaactgtgcaccccgggaggcccaagcaggccggggcgctgcctcggccgctgccgcgggagggaggggccgctccggggctcagagtccggaccccggccccgccgcccccgcggcgcgcccagtaccagcggctggggcccgtacgacccccgaccccggcctgtggcgcgtcccctcacccggagtccccagcccaacttggcgaccacagtggcagtgctcacgctccctctcggtaaacaggaggagggcgcgcgtgtctgcgggtggctacagtgcgcgggggccggcggcagggcggcgtacgtgaaagcgggcgacacagagagggggtgcaggccgcgcgtggggggctgcgcccactcgaggctggaggctggagcctttgaagaaagtggctcgagttgtgccaactctgggaggggccggcgctctgccaggatgctgccccgcagccgggcgggcgcccgcgccttcccagggaggcaggtggagcgggatgcagcagccgccgggggtcggagatgcggcagggagaccctggcaggtggtccaggctggactgccgcgatttgcagggtcgacgacctcacagg

SEQ ID NO: 119983 - DNA, 108 bp, Homo sapiens
  chr10:129923798-129923906
  hyper
ctttctcagctaaaacgtccgcgcgcgcccgcggggctcaccttccaaacaagcaggtgctgaggctcaggggaaagtggggaccgtcgaccccgctccttttgatag

SEQ ID NO: 119984 - DNA, 30 bp, Homo sapiens
  chr10:129924907-129924937
  hyper
gcgagggcggctggcggagggcagaggtgg

SEQ ID NO: 119985 - DNA, 64 bp, Homo sapiens
  chr10:129948077-129948141
  hyper
gcggcccctccgcagcggccccagcccgcgtccccgcagcgccccttccgaagcgccccctccg

SEQ ID NO: 119986 - DNA, 415 bp, Homo sapiens
  chr10:129948376-129948791
  hyper
ggagcggagcccacgcggccctggagcgcggtggctgggcccgtagcgccacctggcggcggatcagggcccccgcgcccttgcgtcctcggaagggggaggggaagggactccaccctgcaccccccacagcgcgctcccgaggccgtttcccaaggatgcgcgggcccgaggggatggggacgcggcccgcgcggcgcgttcctggctacctggagtctgggaatggcgaatcccactcgcagcggacacaggcgaggcgcagcgggacgggattggtgggaacggaaacagcggtcacctgggagcccagaaccagcgagtgcgcggtgcagcgttcgcttaccaaacgttgtgggacaaacgcctttcaactgtttctggacgccagtgggccggcgttaccctgttgagc

SEQ ID NO: 119987 - DNA, 310 bp, Homo sapiens
  chr10:130008566-130008876
  hyper
gagtccggccgcggacggcgtcccttccagggccggccgccagagggcgagcgcgccttcccgggcggggcggggacgggacggggacggggaggggacgggacggggacggggaggggacggggacacggacacgggaggcttccgctcgcccgcgggtggcgtctctgctcccactagagcgggccaggcctctgggttccgtttctcaagcacacagggagggtggccgcgggccaggggcggccgcgagactccacgtccacgtcccgggcagtccctccggaggttgggccgcgcggcccgggga

SEQ ID NO: 119988 - DNA, 325 bp, Homo sapiens
  chr10:130008906-130009231
  hyper
cggggcctttaggcgcccccgtttcctcgtcagtggggggcgcggtgccgcttctccgcgggctaaactgctgaggaaggggcgagttcctgcggcccctgcctgtcccggccacgccccacctccgccccgccgcgttgcgcgttcccgcggggccccgggcacccctggggccccggggatctctgacgcccccttccctccaacccccgctgcgatcccacaggtggggtgaacagcgcccctgctgtcccacggggcgtcttcgcgggtgatgcccacactctcagcctgaagagcaggacctgtccgcgggtggggccca

SEQ ID NO: 119989 - DNA, 30 bp, Homo sapiens; identical to SEQ ID NO: 7796
  chr10:130066478-130066508
  hyper

SEQ ID NO: 119990 - DNA, 240 bp, Homo sapiens
  chr10:130085035-130085275
  hyper
ttccggggaaggccacgcagggtgcaacccggacgcgcccccgggggaagcccgcgacgcagcagccacacccccagcctgcactggcgcccaccccatgacttcgccttcgcggtcgcgggcagggagcgcgcgtttccatcggttgattagaagcgggagtcggaggagcccccgcccgccggcggccagcgcacagcccggccaggggcgccctccctgccgccgccggccctttga

SEQ ID NO: 119991 - DNA, 79 bp, Homo sapiens
  chr10:130085355-130085434
  hyper
cgcacgggtccccgggccgcggcgcgctccccgccacgccgcacatcaaggcccggccggccggcgggcgccttcatta

SEQ ID NO: 119992 - DNA, 183 bp, Homo sapiens; identical to SEQ ID NO: 47934
  chr10:130338585-130338768
  hyper

SEQ ID NO: 119993 - DNA, 994 bp, Homo sapiens; identical to SEQ ID NO: 47935
  chr10:130338803-130339797
  hyper

SEQ ID NO: 119994 - DNA, 30 bp, Homo sapiens; identical to SEQ ID NO: 47936
  chr10:131265560-131265590
  hyper

SEQ ID NO: 119995 - DNA, 241 bp, Homo sapiens
  chr10:131757611-131757852
  hyper
accgaccccggaacccggggctcccgggccccttcggcattccgcgccgccgccaggccgcgtcctcaggccattgtctacaacgagttccaatctgcatgttgggagaggccgatcagaacgccccgaggctaaagaagcagggaaggatggtcgcggcgcaggagcagtttgccaagggccgagggccgcgcccgccctgccctgcgcgctcccccggctctagcaagtctggcgcccc

SEQ ID NO: 119996 - DNA, 46 bp, Homo sapiens
  chr10:131758276-131758322
  hyper
cgcgctcagcccggctccgccgctgggaacccgagctggggatcgg

SEQ ID NO: 119997 - DNA, 2208 bp, Homo sapiens
  chr10:131761128-131763336
  hyper
atctttatgtcctttcaccagcgcagaaaaggagagccagccgctgcaggggcggcgagcacgcagcaggcacttaccgttgctgtacaataactggagtttatagtggatgccgttgttggttttctcgttgtttggctcctgaaagtaacgataaataattgcatttagtgcgatcggtgtcaggcgcggccaccacgctcggtccccctccgcgaccgaggctctcggcctcacacatggcaggattcctagctcgaagcagcgcggtgatgtcactttcctgctggaagcccagcgttctcctcgccccgagtaagtccgagggcgcagagaagttgcccagccctcggcggtcccgggcggccgcacgtggcggcggcggggtggcctggcggagccgagcccgccgcctaggggggcactcgaacccccgcgcaccggcaccgcctgcctcccgcttctagaaagagagagggtgtgatcgtgtgtttgcacttactttctctttctccacaaagtccacaaaagcggtcctttcaatctccaccggctgcccctgcctatcgtagagcgccagcacgaagtggaagaaattggatttccggaggttggaaggcggctgcttctcgaagtgcgcccgcgccagccccacgccgctgcgggaggaaagagacagcggcccggtgaggagcgcggcgccggccggcggagggggccgggccgggccggggccggggccagggcgcgcgggggcggccggtacgtacctctgggcggccgtgttggcgtccaccacgcccgccgtgtgcatccacgagcgcaccgggttcatgccgctgcccagcggctcctccttcatggtcgtccccccgcgcggaatattctcctgaatcccaaacatgaaaactgctggcggcggccgcagctcccggccgaaagcgtttcctcgagcagcggcgctcggggcttggcggcaggcggctgccctggccgccctcgccctgctcggcgcctgcggtccggccccgccgccggcttcagcccgtcccgggcaggcgcgacatacaccagcggccgggcgctccggacggccaggggcgcggaggcggctccaccggcggcggcggcgcttcgaaggagcaggacgcggtggccgcggcggcgcttgttgttgttgttgtttgcaggcgcgctcaacgtggtgtcatcctagccaggcggcgtccgcggctgcaggacactgcgggatcgcccgcttctggcgcggcccgcctgctccaaagacaaataaacggggcagtgagtgctgcggcgcagtcccgggcgcaggcggggcgcggcggggcctggagcggcgcgcgcagcggacggaggcgcacaaaactcagccctctctccccgaggaatggaccctttcccgggagccaaaactcgaagcccccgggagcggcgctgtcagagggtgacgtcggggggcggtgcctgcgccatatatgggagcggccgcccctcgccgcgcccctcgccgccgccgccgccgcgctcgccgactgactgcctgacggcgccgcgagccggcccgagccccgcgagccccgcgagccccgccgccgccgagcgccaccgagcgccgccgccgccccccgccacgcaccgcggctcctcgcgtccagccgcggccaaggaagttactactcgcccaaataaatcttgaaaagaaacaaacgcagccactgcacaattgcagtttggccccttaatacctccctgcaaaacctgccacacagtcgaacacgatgggcggggcggggggctgtaaaatgctgaggcgccccaagttgcccagatgcatgcaataaatgcaaggggctgcagcttgtcctggggccgcccgaaggagaagtgggaagaggcaggtcgaccgcagggagggcgccggagggaggagcgggcaacggactgggaggaggggtgcccagggctccccggccaaggctggacgcgcagctcagcctgatttctaagcagacctaaggctgctgcagggccggccggtcccggtctgagccccgccaggtaccccaagcttcctaccccggcggaggccgccgagtgccgggcagggaatcacgtcggaggcagggtctgccagatgctccctctcccccggtggccgcggcagaccccggcccctggcctgttctt

SEQ ID NO: 119998 - DNA, 269 bp, Homo sapiens
  chr10:131763632-131763901
  hyper
gggactccgcgcccaggagcgcggcccgcccaaaggacgtctgcgcgacacggagcagagacccaggggacgaccaggaactgtcctaggcacttccctgccaagagaaatcaggcccttttgattaaaagaaaaaaaaaaaaaagattgcagggcgcaagtgtgttgcagggcagcctcctcccgccgggtctggggcagcactcccttttcccgtgaattggcagcgtgtgtacgttaatattttaattaatcgggaaagtcgaagt

SEQ ID NO: 119999 - DNA, 30 bp, Homo sapiens
  chr10:131765430-131765460
  hyper
gggggccggactgggcggagcctgaccttt

SEQ ID NO: 120000 - DNA, 30 bp, Homo sapiens
  chr10:131768126-131768156
  hyper
gcgcccgagcgggcgcgggagacgccgatt

SEQ ID NO: 120001 - DNA, 547 bp, Homo sapiens
  chr10:131768687-131769234
  hyper
tctggaagctaaccgcgcacaaaagtttgccaataaaattctagtttgaaaccgcggtttgccaacacgagtaaaggaagttggggtggtggagagctacagtgggcacggacggaaagggtggccacggtcaccgatgtactaatgtcctcctcctcggctacccgatctcactccttcacagcaccttaacagagtgtatacacccgttctggtgcgcaaaagtggggcgatgggtgccggcggccgggccggggagtccgtccgggtaattaactcagctccggcgactgcgacgatgaggccgggagggaaggaagagcataccgctcttggacagaaatgtgtcaagctctcctcccttccagcctgcataaaccctttcgcgcacattcgcgcgacttctaagggatccaagccagcggactgggtccagcagcgcgcggcggcgggacgcacccctcctctccccccaggaaggcgggtgcacgccggggctggaagggggagggtgcacctctggctacaaattcggccgcgaagagat

SEQ ID NO: 120002 - DNA, 847 bp, Homo sapiens; identical to SEQ ID NO: 7804
  chr10:131769490-131770337
  hyper

SEQ ID NO: 120003 - DNA, 530 bp, Homo sapiens
  chr10:131770563-131771093
  hyper
atcaatttttggttgttaatccgaaaggaggagttttaattgcttcctgcgttgtcgtccaggcatctaggcgcttcgaccttccccatccctctctccaagggtctggcgtttgtactgggggaagacggagagtgaaaaacgcggggtccttcagctaaatcctcggaaccccggatcttcgcccgtgccggtacgcgcctcccccgcgccgagaatccctggcacgcgatcgcctccccgcaggcccgccgggaaggccgcgagcagaggccaacggaggcctcccaggcagtgctcgccaggaaccaagacgctgccagggcgcggcgcaaaagttcactgcgaggccaggcctgggcgcagctcatggtcaggggctcctgcctccacagtcccaccccgcgcctccgccgcagccccgcccgcgctcccgtaggcgagaggagcgcacccggctccggggccccggcaacccggcccccagcgttcagtgtccggcccgccacgcgcgaagttcaactttgctg

SEQ ID NO: 120004 - DNA, 20 bp, Homo sapiens
  chr10:131771281-131771301
  hyper
gggagagcccacgggcccgg

SEQ ID NO: 120005 - DNA, 30 bp, Homo sapiens
  chr10:131908696-131908726
  hyper
ggagccccagtgagcgtgtgggtcaggaag

SEQ ID NO: 120006 - DNA, 97 bp, Homo sapiens
  chr10:131909003-131909100
  hyper
ctgtcgccagcggccgagcgctaagctgtccatgcagccccagggtcaaaccctcccggcatctcaggcctggccgaggcccgcgcaccacgccccc

SEQ ID NO: 120007 - DNA, 30 bp, Homo sapiens
  chr10:131934520-131934550
  hyper
cgggatccagagcccgccgccgaggcccct

SEQ ID NO: 120008 - DNA, 30 bp, Homo sapiens
  chr10:131935308-131935338
  hyper
gcgagggaaggccccgttgcattagctagg

SEQ ID NO: 120009 - DNA, 31 bp, Homo sapiens; identical to SEQ ID NO: 7806
  chr10:132050986-132051017
  hyper

SEQ ID NO: 120010 - DNA, 88 bp, Homo sapiens; identical to SEQ ID NO: 7807
  chr10:133109172-133109260
  hyper

SEQ ID NO: 120011 - DNA, 120 bp, Homo sapiens; identical to SEQ ID NO: 47947
  chr10:133110064-133110184
  hyper

SEQ ID NO: 120012 - DNA, 321 bp, Homo sapiens; identical to SEQ ID NO: 47948
  chr10:133110553-133110874
  hyper

SEQ ID NO: 120013 - DNA, 125 bp, Homo sapiens; identical to SEQ ID NO: 47949
  chr10:133110966-133111091
  hyper

SEQ ID NO: 120014 - DNA, 30 bp, Homo sapiens; identical to SEQ ID NO: 7809
  chr10:133252504-133252534
  hyper

SEQ ID NO: 120015 - DNA, 412 bp, Homo sapiens
  chr10:133794829-133795241
  hyper
ctcataacaggccacttgccacgccttggtgtttggtcattaaaaccaatactggtctgaactacagaccgcggagggcaacgtggactttgaggctgttcggtccaactgcgagacgcagattcacctccaggtggaattctagctcgcgcggagctggagaatcggggctttcccgtgcggtccgacccgggtccaagccaacccccgcccgagtggcgaggccgcgaaccccgggcagtacgcggggtccccacgccccgggctccgcatgcccgcaggaggggtgggtacggaaggggaggatggcgcagcctcgcccggcccgcgatgccccctaggcctccccggcaacctccccttggcgccctcttggccttccccaggcttcccccccgcgccccctcggctc

SEQ ID NO: 120016 - DNA, 571 bp, Homo sapiens; identical to SEQ ID NO: 7811
  chr10:133795312-133795883
  hyper

SEQ ID NO: 120017 - DNA, 83 bp, Homo sapiens; identical to SEQ ID NO: 7812
  chr10:133795975-133796058
  hyper

SEQ ID NO: 120018 - DNA, 1 bp, Homo sapiens
  chr10:133796301-133796302
  hyper
g

SEQ ID NO: 120019 - DNA, 509 bp, Homo sapiens
  chr10:133849625-133850134
  hyper
accaacaagtgggtgcggaccttcctcccgctttaccctgaagtcccagcccggagcacgcggccgtggtgagctgcgatcccaggccccggcgcagcgctgagactgtggctctcaatccgcagcagctgcttcatctgctcaatgccagactccaaaaagcatttctctcgcaacaggccaggggaggcagcgttcggggatgggacgccaagagttaagggtgaggccgcacgcgtgcagctcccccgtgctgcgcatggcgctgggatcggcctgagcggcgggtgagtccctctaagccggcggcgcccggtgcccggctccctacgcgcgccccgcggcccccgggctattttcagccacgccgagccctgttttaggagcttgcacagcggctccgcggagaccgggactgcgtgggggaggatcgcggcgggggccgtcgccgagcaaggagcgcggccgcggggaccgcccgggagtgggggcggcggggcgggccgggt

SEQ ID NO: 120020 - DNA, 628 bp, Homo sapiens
  chr10:133850156-133850784
  hyper
cggtgacgcgcgcccccgcccgccgcctctgccatggccgatccggtccgtcggacgccgcccagagtcgctcgcggggagcctcggtgagcagcggccggggtggggccgcgaccgggggccgggcctctgcgctgcgtctggcacggtgcgtccgggacgcgggcgccctggcggccgtggggcgggcggggggcgacgtcccgagggagggggtcccgcggcagagacgcccctgtctggggcggggtcctccttgcctctcccggcggtccccccgtgggcgggtcctctccacggcaccccctgccctgcacaggcctcggcgctggcgtgacgcggccgctgggtggggcccgcgcaggtgctgggccagggctggggacccgcatctccgtgtctccgactgtgcctcccgcggaaaggggcgccgtgcgattatttttatgttggtgtctggtttttaaatttcacagcccccatttcagggatggccagcgtggccgtgggatgctgacgatacgggaagccagagaataaaggctttggtggaggtcgggaggaggcgccggcctggacagttttcctagaaaatattctctgcgtgtacccgcgaccttgcctctcg

SEQ ID NO: 120021 - DNA, 159 bp, Homo sapiens; identical to SEQ ID NO: 47956
  chr10:133999363-133999522
  hyper

SEQ ID NO: 120022 - DNA, 132 bp, Homo sapiens; identical to SEQ ID NO: 47957
  chr10:133999554-133999686
  hyper

SEQ ID NO: 120023 - DNA, 276 bp, Homo sapiens; identical to SEQ ID NO: 47958
  chr10:133999776-134000052
  hyper

SEQ ID NO: 120024 - DNA, 317 bp, Homo sapiens
  chr10:134000108-134000425
  hyper
cggggcctggcaggacgtggccggactctctccctcgcctccccggggtgcaaaccccgcgcacatcagctggagcaggttgaaatccccacccagcgctcgtccgcgggtctgcgcgggggcccggggtgcagagatcagaccctgcagcggttccagcgctgggggggctttaaagcgaaggagtggctgagggcgggggcggggctgatgggcggggtgaggcggggctcgggctggggcgggccctatcgggggcggggcctgccgggggcggagccggggtgggggcggggcccagcgggggcgggaccgga

SEQ ID NO: 120025 - DNA, 210 bp, Homo sapiens
  chr10:134000529-134000739
  hyper
cgcttgtgccgcccctaccagagacccccaggagcaggatgtccttccagggcaagaaaagcatcccccggatcacggtgagcccggtcccgcttcgcccggcgccccctgcccgccgcccggagtggggcctggacgccgggcggaccctcctggtcttgtgcgtgggtggggggtccctgcctttgcgtctggtccctgtcctggcgc

SEQ ID NO: 120026 - DNA, 149 bp, Homo sapiens
  chr10:134000798-134000947
  hyper
cgcagacccccttaaggagcggggcgcccaggcccggcccggcccggccctgcccggccctgccgggccctgccgggccctgcccggccttgcccggccttgccggcttccgggagcctcggctgcgcccggggagaacccggggccgg

SEQ ID NO: 120027 - DNA, 184 bp, Homo sapiens
  chr10:134001139-134001323
  hyper
cgatttagccccggccgctctggccggagtccctggtggccccgaacccttccagtaacctgggttcagcgactccaaggaaagcgagcggtcaagggccactggccgggaaccctggcagcccctgaaccttcgagagcagagacccctccccaacacccacacgcaccggcgcgggaggtcc

SEQ ID NO: 120028 - DNA, 20 bp, Homo sapiens
  chr10:134045848-134045868
  hyper
caacagagaagagggcgggt

SEQ ID NO: 120029 - DNA, 112 bp, Homo sapiens; identical to SEQ ID NO: 7815
  chr10:134045912-134046024
  hyper

SEQ ID NO: 120030 - DNA, 30 bp, Homo sapiens; identical to SEQ ID NO: 7816
  chr10:134046263-134046293
  hyper

SEQ ID NO: 120031 - DNA, 769 bp, Homo sapiens; identical to SEQ ID NO: 7817
  chr10:134120668-134121437
  hyper

SEQ ID NO: 120032 - DNA, 632 bp, Homo sapiens
  chr10:134121687-134122319
  hyper
ctagggatgggggctgtggttcgccgggacacggggaccacggctcagactagacggcgggtacgagagcgagggaggcagggagcgtccccacgggtatcctggggccccggaggtcggcgtccctggcacggggactgctgtgcccggcacggcggcgggaccttctcgcggtctccgggggcctccctcccctgccttcttcgtgaaaacagccggcgcgcgggcttccgccgcccagtgcggggagccctaaactccagccttctgctttgcgcagggtgaggccgggctgcaggcccgggatgcgggcggcgggaatctgccgggcagagcccggctcacggtcaggaggcggcaggctgagtccaagcgctgcgccagagggtggggtggggcagggcgggcctggctgcgcgcgcgcacacgcgggcgcctggggtgggcgctaagccctgagcacgtgcgcccgcgctctcgggcacccccgtgccatcctcgcgacccccgtccggcctgagaccgcgtgcccgagtcgcccagggtccccttgtccagatgcgacaggggcctcggcactcggcgtatttcggaggcctggggcgcggcttgacctccgggcacctctgccc

SEQ ID NO: 120033 - DNA, 295 bp, Homo sapiens; identical to SEQ ID NO: 47966
  chr10:134209483-134209778
  hyper

SEQ ID NO: 120034 - DNA, 946 bp, Homo sapiens; identical to SEQ ID NO: 47967
  chr10:134210376-134211322
  hyper

SEQ ID NO: 120035 - DNA, 30 bp, Homo sapiens
  chr10:134211541-134211571
  hyper
gcctcctggacaccgcgtcacatggcaggg

SEQ ID NO: 120036 - DNA, 30 bp, Homo sapiens
  chr10:134211846-134211876
  hyper
ggttcctgcccgctccgtgtgggctaccgc

SEQ ID NO: 120037 - DNA, 30 bp, Homo sapiens; identical to SEQ ID NO: 47968
  chr10:134266664-134266694
  hyper

SEQ ID NO: 120038 - DNA, 58 bp, Homo sapiens; identical to SEQ ID NO: 47969
  chr10:134350648-134350706
  hyper

SEQ ID NO: 120039 - DNA, 771 bp, Homo sapiens; identical to SEQ ID NO: 47970
  chr10:134351008-134351779
  hyper

SEQ ID NO: 120040 - DNA, 50 bp, Homo sapiens; identical to SEQ ID NO: 47971
  chr10:134545672-134545722
  hyper

SEQ ID NO: 120041 - DNA, 31 bp, Homo sapiens; identical to SEQ ID NO: 7822
  chr10:134564784-134564815
  hyper

SEQ ID NO: 120042 - DNA, 119 bp, Homo sapiens
  chr10:134597971-134598090
  hyper
cggggactcgaggcgggtacgcggctcacccgccctttcgggaacccccaagcgcgtccgaatccgccccgaggcgaggcgggccgggccgtacctgctgctccgtccccggctccgtc

SEQ ID NO: 120043 - DNA, 166 bp, Homo sapiens
  chr10:134598367-134598533
  hyper
ggggccgcccccggattctgcaaaaatagattcgcccccaccccgcgggtcctcacaaggcgtcccccgcgccgccgccgcacgggctgaccagcgccaagttcgagggtttgtgcttcttgagcagccgcgtgatcttctcgtcgtccgagttggggtccagggg

SEQ ID NO: 120044 - DNA, 161 bp, Homo sapiens; identical to SEQ ID NO: 47974
  chr10:134598860-134599021
  hyper

SEQ ID NO: 120045 - DNA, 114 bp, Homo sapiens; identical to SEQ ID NO: 47975
  chr10:134599431-134599545
  hyper

SEQ ID NO: 120046 - DNA, 308 bp, Homo sapiens
  chr10:134599708-134600016
  hyper
gctgattggctgcggaccccgcggtccggccattggccggcgccccccccccgcccgcgcgcccccgccggccgcgcactccatgaagggcccattagcgcggcaggtgcctcccgggctgtaaattcgccccgatttatctccccggggacgaaataaatccagcttggatgggagtgtagttaggcaaaggttttcatgcgaaatcaggaaaaaatacgagaacgtattttattaacggaaagaatgcagatttgaggacccgcccgcgcgctcggagcgccccactcggggaagagtcccggccc

SEQ ID NO: 120047 - DNA, 1678 bp, Homo sapiens
  chr10:134600037-134601715
  hyper
cgccgcccgtggctggggtgggtgtgagcggcagcggacgccggcggggaacgcgctccgggcaggtcggggccacaggagggcggaggacgcgggcctcgagtccacggaatccacgggcctcacggccgggcgaggctcgcacggagctgcctctggtttcgccgacacgcggccggcgcggtggaggagtgaggcaggcgggagcggggcggggaggcgggtcccgggaccacacgcgcggctcggcacttccccgtcatcggcctccaggtctcccgctgggggtcccccaggatgtgacctgggcccacgacttcgcccacgggccgcctctcgcgaatccccggccgggagaacagagaccaggacggcctcagcgcggaagccctgtccagggcccgaacgtgggtgcgggctgggggcgcagcggcagaaacgcggccttagacgcgcgcggggggccggtgtcccccccgcccccacggcaccgggagccgctcgctcatccatcccgcagaccgggcggtgagatgactccgagccccgcgcacggcggccgcgagcaaacgctccgacgtctgtggtgacgtctcgtattgatttagggacacggggcggctgtggctgtggcccacggctcgtggggagcccgagtctgtgcgcagggaacgccgctgcgtggcctctctcgggcctgtgccgcggaggaaggcggcgcccggggttcggggccggggtctcacgtccgccccctcgcccccctccagcgtccgttttcgttttgtgcaggtcgaggcggggacttggcgccgtcggccgctcctggatggcggcttggaaaagccacctgcggccaaactccggggcagtggtgcggccgccgggtgtgtgcgcgctcggggctgccccggcggcttccggctccactgaggtgcagccccgcgttcacggggggttcgcttcccccgtcgactccgcactcgattcgactgggattgggattcgattgggcgcggccgccccaccggtgatcggcccccgcggagcctggcccgggaacccccagcgcccgtccggccccgagacccgccccggcctgtcctgcgccccgctccctcggaggagacacgaggaagggccctcccgggtcgggttcgggcccctcccagcaccccaaggcgacggcgcccgcgcccaaggctcgggctctgagctgagacgcgggaactgcggggccggggggggcgggcagggggagttgggggcgggggctgctgtcgccctgggatcccccactctgcgcggccgggcagaccctgggcgggccgggaggggtgcgggtcgcccgaactgaggcccaggaggcgcgcgcgggcggaacggcgggaggaagccgcgctcgggacaggctctggctcttctcacagcctggaggggcggggcagggggcgtcgctagcgctgttttatggctgaggaaacatggacctggaggcgctgcgctgcggcccgataaaccctgggtctgtctgcgccccccggtcctccctgggctgccgagggaacgcgtggggtcgcgggtggggctggcgtgtcactggctgcggagcgcgcggctctccagggctcaggggcgcgggatgaggggccagggtgagttgggggcgcagaggagc

SEQ ID NO: 120048 - DNA, 418 bp, Homo sapiens; identical to SEQ ID NO: 47978
  chr10:134602127-134602545
  hyper

SEQ ID NO: 120049 - DNA, 123 bp, Homo sapiens; identical to SEQ ID NO: 47979
  chr10:134650410-134650533
  hyper

SEQ ID NO: 120050 - DNA, 442 bp, Homo sapiens
  chr10:134676257-134676699
  hyper
agagcgcactcccatcgccggcctcggggagcaggttcaggagaggctggagggggacggggcggccgggctgcactggctgagggtgaggaggggcgggaggggagggcagcacatggaggcaggctttctgtggtgtggatgtggctgagaagccagggtgagctgagggcaaagttgaggacgggaggtaggaggccttcaggcaagagggcgggaaagatcaaggaaacaaacaacttcctgtcagaagcgcctgctgtgaaacaaagtccctgcaaaacagcggctgcaggaaggagggtggcgaacccacgttcgcgggagtccagcacccatcacgtctgtcctgggtctgggctccaaggtccacggtggccccgggtatgaggcaggttcactccccaagtcccagagctcaggaccacggaggccccggcat

SEQ ID NO: 120051 - DNA, 30 bp, Homo sapiens; identical to SEQ ID NO: 47980
  chr10:134755847-134755877
  hyper

SEQ ID NO: 120052 - DNA, 167 bp, Homo sapiens; identical to SEQ ID NO: 47981
  chr10:134756154-134756321
  hyper

SEQ ID NO: 120053 - DNA, 940 bp, Homo sapiens; identical to SEQ ID NO: 47982
  chr10:134901184-134902124
  hyper

SEQ ID NO: 120054 - DNA, 217 bp, Homo sapiens
  chr10:134902187-134902404
  hyper
cgctgaccgccgctgtcttcacagatgggagcagctcccggactgcgcccgccccgccgcggtcaccctgaggccaggggcccgggagcgcgacctcctggccgccgtctgggactttgaccttccagaggccatggaggctggcggggagcagggcgccacctgatcgcctccccctggacgcctcctccagcggcgctcacgcttccgcaacttt

SEQ ID NO: 120055 - DNA, 840 bp, Homo sapiens
  chr10:134973431-134974271
  hyper
gagaccccggcccagcgaccgccccgccccccaccccgggccccgccccccaccccgggccccgcccggccctgcccaacgccgctgcagaggccaccccgggactgcggcagccccgcccggcagcagcgggggtgggacgggggcggcgggagccggcgagggggtctgcccgtccgagctttcctgggcgccggctccgcccctcgacccttggggcccaggtggggcgcagaccccgtggctccccgcggaggccacacgcctggctccgcccccggtgcctcccccaggaaggagcgacgttccctaggcgccgggtccggacagcgccgcgcagcccccgcgcaccccgcgccccccgcgccccccgggcccgccccgtatccctgaccgcgtcccctggagacactgcggcagcggcgggcgggcgggggcgggcgagggccgggcgcgtctccatggagccagggcgcgcgtagccgagcccagcccagcccagccggaggccccgggggcggtgcgcggcgcggccgcaggatgcaggccatggacccggccgcggcggatctttacgaggaggacggcaaagacctggacttctacgacttcgagccgctgcccaccctccccgaggacgaggtgagcccccggccccactggggggccccttccgccgccgaggggtccgcggagagcgcccggggggaggacccgggaggggctgtgagctcccgcctccccaggcgccctccatggccgaggggttcccaccgccgttctcagcccccgcgttaggattttcacccggaggggacagcacccccgaatgcgcacggg

SEQ ID NO: 120056 - DNA, 70 bp, Homo sapiens
  chr10:134974307-134974377
  hyper
cgcggtagctcctggtggaaaccctggcgggacagtgtgggggcagcaaggaggacggaggggggtctgc

SEQ ID NO: 120057 - DNA, 534 bp, Homo sapiens
  chr10:135043091-135043625
  hyper
gacagaaggactcggcgccgtgcggcaaggaggaagagcatttaataggaagagaatttcctcctcccagggatgctggctgcagacgcgctgcagatggaagaagttcagattttaaaagctacttctgcgagcgcgtgaattccgacacccattcccgcggctggcgtggcttctcctcggacccatcccctggcctggcgactccccctgggacccgggtcggtcctccggacccctcgcgtgcaggtgctgagcccgggcgggggcggcgggggcgggggcagcactgggggccggacaagggggcgccagcgccttccggagcgggaggggctccgcacacacctcgacgggggcgggggtaggctcggcacaggctaaaaacgagcggagccgccggggcttaggcatcgcggcacctccgttgaacgggtctaagaacagaactcctgaggaccctccgtttccaaccgaagccagtctttgctctgcgtcttcccggccgcagcgccaggaccgaccccttaggac

SEQ ID NO: 120058 - DNA, 564 bp, Homo sapiens; identical to SEQ ID NO: 7830
  chr10:135043826-135044390
  hyper

SEQ ID NO: 120059 - DNA, 186 bp, Homo sapiens
  chr10:135044554-135044740
  hyper
cggacgcctcccccgcccccggctccccgccagctcccgccccgaccgccctcgccacctgcatccccgaggaccgcgcgcccgtccgcggccccgggtccccgccgccacccccggcccgcgaagaccccgactcgccgcccggccgccccgaggactgcgcgccccctccggccgcgcccccgt

SEQ ID NO: 120060 - DNA, 1095 bp, Homo sapiens; identical to SEQ ID NO: 47988
  chr10:135050031-135051126
  hyper

SEQ ID NO: 120061 - DNA, 14 bp, Homo sapiens
  chr10:135071048-135071062
  hyper
tctcacggctcccc

SEQ ID NO: 120062 - DNA, 97 bp, Homo sapiens; identical to SEQ ID NO: 47990
  chr10:135071117-135071214
  hyper

SEQ ID NO: 120063 - DNA, 30 bp, Homo sapiens; identical to SEQ ID NO: 47991
  chr10:135071467-135071497
  hyper

SEQ ID NO: 120064 - DNA, 136 bp, Homo sapiens
  chr10:135074987-135075123
  hyper
tcctcagaggccagcgcgccagcctggcaccacggggacgctcccagggggtgcccagagggaacgtgcgcatcgggcggggtactgcggcgcgtgtgggccgtgagccccgccctgtagtcggacactggagtcc

SEQ ID NO: 120065 - DNA, 129 bp, Homo sapiens; identical to SEQ ID NO: 47993
  chr10:135090194-135090323
  hyper

SEQ ID NO: 120066 - DNA, 106 bp, Homo sapiens; identical to SEQ ID NO: 47994
  chr10:135090391-135090497
  hyper

SEQ ID NO: 120067 - DNA, 42 bp, Homo sapiens
  chr10:135121725-135121767
  hyper
cgtctgtctctcctacaaggctgccgcgccctcctgtgatgc

SEQ ID NO: 120068 - DNA, 711 bp, Homo sapiens
  chr10:135138913-135139624
  hyper
agagatggaagcctccggtggacgtgaaatctttacttagagaaaagcgacagagtcagagacccacgggggcggggctgcagcgagggcgcctggggacacgaacacggcggagagcatcgggagacgcgctggtcacaggagctggcggaggacgctgcggagacagagcccgagggttgagagcggcgacgcggccaggggctccccgcggaccccgcgtcacccggcgggctcggattcgcaacccccaaccccgaggttctggcgggccgggtcggagggaagaggaagggaagggtggcgggggtctttggctcagaagcggtggcgggaggccaggaagagacctgggcagagccggccggagccccgcggcgcgcacctaccccgggccgggctgcggggctggagacgtcactgcgcgggcgggggcgccgcgctcccggccgccttccgcgccgcctccttctccgccttggccgacggcttcccggggggttcggtggccgccgccgccgccccagcctgggtgggccccttgcgctcctccttggctgcgcggtagccgtccccccaggccgccggcgtctccgtgccgtgcttgcggctcagcgggtaggccccgatggccgccaggatgctgcggtggcgctcggggtccatctccgtgtagtacatctccagggtcagcggcgtgcagatcttgtg

SEQ ID NO: 120069 - DNA, 30 bp, Homo sapiens
  chr10:135143376-135143406
  hyper
ctctctgccagagacgcacgaagtgagaaa

SEQ ID NO: 120070 - DNA, 403 bp, Homo sapiens
  chr10:135148818-135149221
  hyper
catagggtagggccacgccccggagggcccgcgccaggagtctccgcccgaacccccgctcgggcaggacccccgccaggaggagctgcgcttgaggggtccccttcgagccaaacttcaaatccaactcctcggacggccaatttacgtcatcgcgggtttccatggcaacgcagacaggcccgagacgcgtcttcaggaagaaaaagccattgggggcccactggagcctcgcttctggttccgggcccagcgccccgggcggaatgcggggttggaaaggggggactagcctgtgtgtggggtccaacccccccaccccacacaccagaccttccctttgcattgctgcgtcatgggggcctcctcccacggatgacacgcggctcgtggaactgggggg

SEQ ID NO: 120071 - DNA, 30 bp, Homo sapiens
  chr10:135149575-135149605
  hyper
cagcgcgtgtgactgcggatctgagggtcc

SEQ ID NO: 120072 - DNA, 697 bp, Homo sapiens
  chr10:135149868-135150565
  hyper
cccacccccaacccccgtgcgggcagcggctcctcggtgctctggtccgacgccccttctgtcgccctccccaccccgcctccggcggacagagctgggcgggagctgggactggtaccccctccccacctcggagacacccttaactccaggctgcgatcctcgtgccggggccccgccgtcacgggaagcctggagaccaccgccctcgggtccgcggggtcggactggcctggggcagccagaggaggcccgagggaggagggcggccgtgcagcgcgccctgcacactcgcacccgcacacgcgcctcgcacacacgcactcacaccctcatccgcacgcgcgccacgcacaagcgcactcgcgagcacacgcacctcgcacacacacccgcacacgcgcctcgcacccccgcaccccttcgggccccccgcccacattctgcaagaaatgtggaaatagctcacaggcggctccactggcagctgctgcaggacgcggtcggggaggacgacgatgcggatgtggatgcggaggatgcggttccagacgcttcgcggccgggcggggcgggggctgcagctgcgagaccgaggctgtggtcgccatggaaacgcggctagaggcggggcctcgactctggtcccgcaccctctacccccacccaccgccccggctagggagccgcgcatgcg

SEQ ID NO: 120073 - DNA, 43 bp, Homo sapiens; identical to SEQ ID NO: 7834
  chr10:135170629-135170672
  hyper

SEQ ID NO: 120074 - DNA, 30 bp, Homo sapiens; identical to SEQ ID NO: 7835
  chr10:135171068-135171098
  hyper

SEQ ID NO: 120075 - DNA, 30 bp, Homo sapiens; identical to SEQ ID NO: 7836
  chr10:135171488-135171518
  hyper

SEQ ID NO: 120076 - DNA, 30 bp, Homo sapiens
  chr10:135186839-135186869
  hyper
ctctctggactcctcgcccggccccgcgga

SEQ ID NO: 120077 - DNA, 152 bp, Homo sapiens
  chr10:135192039-135192191
  hyper
ctcaacttcccgggcgagggacgtttctgcacttgccctcggcttctgaactttgtactttgcgagtgtactttgtactttggtcctgtgtccctgcagccctgtgactacacgcgcacacgcaggcgcgcgcacacgcgaactgacggctc

SEQ ID NO: 120078 - DNA, 30 bp, Homo sapiens
  chr10:135208057-135208087
  hyper
ccgcggcgcagcctcggacccagggcctgc

SEQ ID NO: 120079 - DNA, 30 bp, Homo sapiens; identical to SEQ ID NO: 48000
  chr10:135237125-135237155
  hyper

SEQ ID NO: 120080 - DNA, 126 bp, Homo sapiens
  chr10:135333790-135333916
  hyper
tggcttctctctggcgccctctggtgggcggggcccgggtgagcggggtcccctcggggcctcagggagccgcagccccagcggaaccaggagggcgccctccgcccagccgcgctgccacttccg

SEQ ID NO: 120081 - DNA, 30 bp, Homo sapiens; identical to SEQ ID NO: 7837
  chr11:207281-207311
  hyper

SEQ ID NO: 120082 - DNA, 230 bp, Homo sapiens
  chr11:207666-207896
  hyper
ggtgttcctgtgaacgtggggcggggcggggccgtttgcttgctcagtgcctagacgatggtggtggaaagacgcttctgtgggttaggtcctaacggttaggaaggattcacaggcgggtcatgaggaaggagcagacccctcgggcagaagcccgcgaggagcactgggtgtggtgggggcaggggtgcctcctctgtcaagtggagatcggcgcctcgctcgtgcct

SEQ ID NO: 120083 - DNA, 30 bp, Homo sapiens
  chr11:208933-208963
  hyper
aggaggtaagcggccgcctgaggccggggg

SEQ ID NO: 120084 - DNA, 30 bp, Homo sapiens; identical to SEQ ID NO: 48003
  chr11:237048-237078
  hyper

SEQ ID NO: 120085 - DNA, 138 bp, Homo sapiens
  chr11:279430-279568
  hyper
gcccggacggacgcagcatcccgtgggggcggctggagcgcgcggacgccgtggacctcgcggagcagctggcccagttctacggcccggagcctgccctggaggtggcccgcaagaccctcaagagggcggacgcgc

SEQ ID NO: 120086 - DNA, 187 bp, Homo sapiens
  chr11:280031-280218
  hyper
agcctgccccacctccgacccttgtccccgcgctgtctcccgctgcgcccagagtacaagaagaagtaccgggagcacgtgctgcagctgcacgctcgggtgaaggagaggaacgcccgctccgtgaagatcaccaagcgcttcaccaagctgctcatcgcgcccgagagcgccgccccggaggagg

SEQ ID NO: 120087 - DNA, 269 bp, Homo sapiens
  chr11:280472-280741
  hyper
cgcagcctggctgacctgatcctggaccagtgccccgaccgcggcgcgccggtgccgcagatgctggcccagccgcagcggctgctcttcatcctggacggcgcggacgagctgccggcgctggggggccccgaggccgcgccctgcacagaccccttcgaggcggcgagcggcgcgcgggtgctaggcgggctgctgagcaaggcgctgctgcccacggccctcctgctggtgaccacgcgcgccgccgcccccgggaggctgcaggg

SEQ ID NO: 120088 - DNA, 6 bp, Homo sapiens
  chr11:308159-308165
  hyper
accatc

SEQ ID NO: 120089 - DNA, 226 bp, Homo sapiens
  chr11:308230-308456
  hyper
cggccagcctcccaactacgagatgctcaaggaggagcaggaagtggctatgctgggggtgccccacaaccctgctcccccgatgtccaccgtgatccacatccgcagcgagacctccgtgcctgaccatgtggtctggtccctgttcaacaccctcttcatgaacacctgctgcctgggcttcatagcattcgcgtactccgtgaaggtgcgtatggccctggcg

SEQ ID NO: 120090 - DNA, 413 bp, Homo sapiens; identical to SEQ ID NO: 7839
  chr11:314082-314495
  hyper

SEQ ID NO: 120091 - DNA, 31 bp, Homo sapiens; identical to SEQ ID NO: 7840
  chr11:320543-320574
  hyper

SEQ ID NO: 120092 - DNA, 196 bp, Homo sapiens
  chr11:327112-327308
  hyper
ctgcctcagtgccccacggacagggggtgcgatctgagcagaatgaggtgacgtcactgggtcagcggctcctgtggcatctggccaaggacaatgtgctgagaagtttcccctgaaaaaatcagaaacaaaactcacctcaggagaggcccctgcaccctccaagaggaagtgggagtcacgtgaggctcgtctt

SEQ ID NO: 120093 - DNA, 30 bp, Homo sapiens; identical to SEQ ID NO: 48009
  chr11:355886-355916
  hyper

SEQ ID NO: 120094 - DNA, 32 bp, Homo sapiens
  chr11:369236-369268
  hyper
tgtgtgccgcgcccccgcgctccgtggcccag

SEQ ID NO: 120095 - DNA, 730 bp, Homo sapiens
  chr11:369469-370199
  hyper
gattggttccgcgcgcgcggccggggcccgatccgcggtggcagccgtggatgctgttcggtcccgccgccgccccaggagcgcggagccgggagcggccgggcggggggcaccgcgaggagccgcccccgccgcccaccccgggcccgcggccgagggcggcctgggggggtcgcggccgcacccggtggccgcgcacggcggacaaaggaccatgcggggccgcgggcgctgagcgcggcggggcgggccggggatgcggcgcggggcgggcgggggccgggggctgcagcggcgccgctgagcgcggcctggggcgggcgcggcggccgcgatgccgcggctcccggtgaagaagatccgtaagcagatgaagctgctgctgctgctgctgctgctgagctgcgccgcgtggctcacctacgtgcacctgggcctggtgcgccagggacgcgcgctgcgccagcgcctgggctacgggcgaggtacggcgcggggggcgcggggggcgcggggggcgggggcggcgcggggggcgcggggggcgcgggcggcgcggggggcgcgggcggcgcgggcggcgggggccccggggcgcgggccgggcctcccaccgcacagaggtctcggctgggcccgaccctcccggagaccccgcccgctgttctccgctctgcgatttggggggagggggcgcggttcggctcggcccggacgctcgatgacgtcg

SEQ ID NO: 120096 - DNA, 308 bp, Homo sapiens
  chr11:406792-407100
  hyper
ccatctctaacccgccgctagccccggaccctcccgcgcctgctccgcaccacggagccgggcctccagagcagcaaggtcaccaggtggcggtgctggcgcagcaggcggagcgccgggtgcgcggggtcgcgcctctggccctcgaaggtgatgaagatgggtctgcgggtgagctccagcagccggcacaggccctccctgcggggcgggaccgtcaggggggtgggtgctacgctggggcccacccaaccccgcgcgggacccaccggaagctgtggctgcaccaggcccggctcaggaaggcg

SEQ ID NO: 120097 - DNA, 76 bp, Homo sapiens
  chr11:407427-407503
  hyper
cgcgcggcaggaggtcgcggtcgtccaggaagagcttgtagccccgacgccgctccagctgcggctttaggatgaa

SEQ ID NO: 120098 - DNA, 985 bp, Homo sapiens
  chr11:416565-417550
  hyper
cgtcctcggtccgcggccgcccctgcccggtgggttcgacgctcagcacccagcaccctgcgggcgactcccgctcagctcggacgcgccgcccctccgctccccgtgcgcgctgggcccccagcgcctgtcctgaagcaggaacgtgggtaaaaggctgcggccccgcaggccgaggggctctggttcgctcccctaccccgcgcccacctgcgccctgggcgccctccaagtgaggagggcggagaacgaggacgcgcgcgggaggcgggcacgggggtgcggctcggggcgctcggccggggcagaggcgcgcggatggcggaagctccacccggcgccgggcgagctcgggccccagcctgactcttggtccgccctcggcgcctcaggaagcctcgagctgggatccaggcttgggcgaccgaggtgggatccctgcgcgcctcggcgctcctagccccgctctgttctgcgcgagggtcaccaaaaagccgctgaccacgtcgggcagaggaaagggtggcccccgcccccttcgcccactttcctcccttcccccagccctggaaagggccaggacgcgggcgagctcgggcttccgggcgacgcgggaacctccccggccccgagccatttcctgagagaccgcgcccagggacaagcagcgccccgggccccgactccaggcctgcagcggctctgggaggactgcgacctccactcaccttcgcgggtctgatggcgaccgccactcacctgctgccaggacctggggctcgcgccgggcgggggcggggcagctcacctgagccaggtgcgcagcggcaacagccccggcggcggcgtagccccggcagcggcagcaggtgcggccccgccccgcagtcagggcgggggcggaccccagcgtcccgctctgcgcccaaggctggcgctggaggctgcgctgctgcccgggagccgctgccgcacgggcctgggg

SEQ ID NO: 120099 - DNA, 147 bp, Homo sapiens
  chr11:441945-442092
  hyper
ccagctggggtttggcggccaggagagtggctgccagcggcgggtgctcctacctgacttccgcgtggggctcgcccctccctcctcctcctccagcgtcctgcagctgccgcgcctgggtgtagtcggggcggagccagcatccag

SEQ ID NO: 120100 - DNA, 30 bp, Homo sapiens
  chr11:448123-448153
  hyper
agatcacgctactccgggtcccaaggcccc

SEQ ID NO: 120101 - DNA, 269 bp, Homo sapiens
  chr11:450010-450279
  hyper
gctgggctccgggatccgtcggcgaggaaggggcgaaggggtggagggactcgggccaggccgccggggatgtctgtggttacctccaagctctggaggccttggcgagacccgcgccatccgcagcttggttcctgcgacctcagccgcagggcggtccggctccggtttcccagcaaccaggcgtcatccttcccagcaagcactgcgtccaacccgcgacgtcggaccacaaggcccagcatgccccgcgcggactacaagcccca

SEQ ID NO: 120102 - DNA, 267 bp, Homo sapiens
  chr11:485907-486174
  hyper
cacgggcgcgcgtgtgctcaccgtgcgcgcaggcgagcgtaaacagtgcacgggcgcgcgtgtgctcaccgtgcgcgcaggcgagcgtaagcagtgcacgggcgcgcgtgctcaccgtgtgcgcaggcgagtgtaaacagtgcacgggcgtgtgtgttcaccgtgtgcgcaggcgagtgtaaacacagctggtgccctggtgcgtgtgtgctgtgagcacaggtgtctgtaaatgatgtaaacctcccttgacgtcaggcccaaaag

SEQ ID NO: 120103 - DNA, 30 bp, Homo sapiens
  chr11:506339-506369
  hyper
ggtttcccccaaggcgcgtgggcaccttgg

SEQ ID NO: 120104 - DNA, 282 bp, Homo sapiens
  chr11:518711-518993
  hyper
ggaaacgcagccagcgcggaaccggacgcccaggagccggccccgggctgcccacgacggggccgccggagaggactcgcggcgccccctcctggatgtggccggcggcgcgcgaggaaggagccgccccgaacgcgcgagcgaggccgggactcgggcgccctctgccggccgctctgagggaccggggcgggggggcgtgtctcccggtcacgtgacctggaaaccccgcccccaaaccgaggggaacttgcggccccaagacgcggcgcgcttacgagg

SEQ ID NO: 120105 - DNA, 6 bp, Homo sapiens
  chr11:519003-519009
  hyper
cgccgc

SEQ ID NO: 120106 - DNA, 547 bp, Homo sapiens; identical to SEQ ID NO: 48019
  chr11:537026-537573
  hyper

SEQ ID NO: 120107 - DNA, 30 bp, Homo sapiens
  chr11:554905-554935
  hyper
cagcggacacagcccgcccagccccggcgc

SEQ ID NO: 120108 - DNA, 30 bp, Homo sapiens; identical to SEQ ID NO: 48020
  chr11:560574-560604
  hyper

SEQ ID NO: 120109 - DNA, 30 bp, Homo sapiens
  chr11:561339-561369
  hyper
cgaggtctgggttgcgaccccgagcgcctc

SEQ ID NO: 120110 - DNA, 212 bp, Homo sapiens
  chr11:568187-568399
  hyper
cactgccgggtgggcgggcggagggattgaccccacccccgtcccctccaacttgggcgtccgagccccgccgcgcctgcccagcccgaccccccgcagcccccgcgggagggcggcctctgaggggcgccccgcccgccaacctgggatccctcgcgcgtcacctgcgaccccggcgcggggccgtcgccggctctcggcccaacttcagc

SEQ ID NO: 120111 - DNA, 185 bp, Homo sapiens; identical to SEQ ID NO: 48022
  chr11:575193-575378
  hyper

SEQ ID NO: 120112 - DNA, 222 bp, Homo sapiens; identical to SEQ ID NO: 48023
  chr11:575603-575825
  hyper

SEQ ID NO: 120113 - DNA, 61 bp, Homo sapiens
  chr11:576421-576482
  hyper
gtggttccagtcagcgagcaggacagaggagcccggaagaggcgccgtgcacttccgggtc

SEQ ID NO: 120114 - DNA, 30 bp, Homo sapiens; identical to SEQ ID NO: 48024
  chr11:577074-577104
  hyper

SEQ ID NO: 120115 - DNA, 53 bp, Homo sapiens; identical to SEQ ID NO: 7851
  chr11:581817-581870
  hyper

SEQ ID NO: 120116 - DNA, 93 bp, Homo sapiens; identical to SEQ ID NO: 48026
  chr11:615556-615649
  hyper

SEQ ID NO: 120117 - DNA, 3 bp, Homo sapiens
  chr11:615793-615796
  hyper
cgc

SEQ ID NO: 120118 - DNA, 102 bp, Homo sapiens; identical to SEQ ID NO: 48027
  chr11:637161-637263
  hyper

SEQ ID NO: 120119 - DNA, 158 bp, Homo sapiens
  chr11:637349-637507
  hyper
cgcgggccggccgcgggggcatctgcgggggcatctgcggggctggctgggcagggcgcggcggcgctggtggggggcgtgctgctcatcggcgcggtgctcgcggggaactcgctcgtgtgcgtgagcgtggccaccgagcgcgccctgcagacgcc

SEQ ID NO: 120120 - DNA, 11 bp, Homo sapiens
  chr11:639559-639570
  hyper
ccgcccgcgcc

SEQ ID NO: 120121 - DNA, 151 bp, Homo sapiens
  chr11:639682-639833
  hyper
ggcagggtgggagccgccggcagctgctgctcatcggcgccacgtggctgctgtccgcggcggtggcggcgcccgtactgtgcggcctcaacgacgtgcgcggccgcgaccccgccgtgtgccgcctggaggaccgcgactacgtggtcta

SEQ ID NO: 120122 - DNA, 268 bp, Homo sapiens
  chr11:694727-694995
  hyper
gacgaggcgagaggccggcgggcgcacttgcctgcgaaggctgcggcagcggcggcctcgtcggggccgggcagggcctcggcgcccatgtccatgtgcccgggctccgccgccatcaccgccactgccgtgacccgcggcgtctcccgctccgcctccgagtctgcgtcctcctccgagtcctcgtccctgctcagcaccggctcctccgcctcgcctcctgccgcggccgcggccgccgccgccacagcggccgcggccgccaccg

SEQ ID NO: 120123 - DNA, 30 bp, Homo sapiens
  chr11:695228-695258
  hyper
ggagcggagccgaggcgaacagaggctgcc

SEQ ID NO: 120124 - DNA, 688 bp, Homo sapiens
  chr11:705950-706638
  hyper
taggggctaggcccgcggaggggcacaccaggcgggtgttggggaggacgcagagggctggggctggagcccaggcggggcagggggcggggcggagctgggtccgaggccggcgggggcgcctccatcccacgccctcctcccccgcgcgcccgcccgctctcgggtgactccgcaacctgtcgctcaggttcctcctctcccggccccgccccggcccggccccgccgagcgtcccacccgcccgcgggagacctggcgccccggccgaggcgcgaacagacggacgcaccggcgagcgccgaggggacaggccgagcgcggggcgccggaggcaggtgagcgctgcggacacgggggagcgcgcccgcccgggcctcagtttacccggtggcgatgggacgcggggcttctggttcaggacaccgggacgaacgcggcgtcgcagggcgcggggcacttggagggcggccgggccgagggcgcggggcaaggggctgggggcctggtcgagtccccacctctcctggacgggtcctgctgcagcccggcctgcccccgtcggtcctgggcggcggccggcgagcaaggatatttttaagccagcgatgggtgactcacctgccccgtcctgcccactcccagctctggggcttggtgggggcaatccctgcgtccggagagcgct

SEQ ID NO: 120125 - DNA, 190 bp, Homo sapiens
  chr11:721127-721317
  hyper
atccccttccagcaccgcggcggggattccccggaggccaagaatcgcgtgggcccgcaggtgccactcagcgagccaggtgggccgaggggctggagggggctccacagggctcgttgtggggggctcggtgagcagccgccgtgtcccccatcaggtttccgccgtcgggagtcgcaggaggagccgc

SEQ ID NO: 120126 - DNA, 30 bp, Homo sapiens
  chr11:747505-747535
  hyper
cagaggatggagtccgcgctggaccagctc

SEQ ID NO: 120127 - DNA, 30 bp, Homo sapiens
  chr11:748016-748046
  hyper
ctgtgggcagcccgcgggagcccctctgtg

SEQ ID NO: 120128 - DNA, 30 bp, Homo sapiens; identical to SEQ ID NO: 48030
  chr11:776823-776853
  hyper

SEQ ID NO: 120129 - DNA, 30 bp, Homo sapiens
  chr11:777883-777913
  hyper
gctccgggtgtccccggagactaggagggg

SEQ ID NO: 120130 - DNA, 30 bp, Homo sapiens
  chr11:796054-796084
  hyper
tgcccagggccacgcggctggctcacaccc

SEQ ID NO: 120131 - DNA, 178 bp, Homo sapiens; identical to SEQ ID NO: 48031
  chr11:796406-796584
  hyper

SEQ ID NO: 120132 - DNA, 30 bp, Homo sapiens
  chr11:804939-804969
  hyper
cggggtcctggggccgggaccccaattcgt

SEQ ID NO: 120133 - DNA, 68 bp, Homo sapiens
  chr11:809682-809750
  hyper
cgtccctttggactcgcttcgtccaacgcccccacgagtttcggtggcccttcgccccacgctataag

SEQ ID NO: 120134 - DNA, 30 bp, Homo sapiens; identical to SEQ ID NO: 7853
  chr11:826927-826957
  hyper

SEQ ID NO: 120135 - DNA, 95 bp, Homo sapiens; identical to SEQ ID NO: 48034
  chr11:829437-829532
  hyper

SEQ ID NO: 120136 - DNA, 35 bp, Homo sapiens; identical to SEQ ID NO: 7854
  chr11:832780-832815
  hyper

SEQ ID NO: 120137 - DNA, 30 bp, Homo sapiens
  chr11:833330-833360
  hyper
caggggtcccgggacgcgcagcctggacac

SEQ ID NO: 120138 - DNA, 30 bp, Homo sapiens
  chr11:842502-842532
  hyper
gatcatggcggcggcgcgtcccagactgcc

SEQ ID NO: 120139 - DNA, 48 bp, Homo sapiens
  chr11:842930-842978
  hyper
gttgtgggggcgtgcggccagggtcccgtggccggaggtgtccgaccg

SEQ ID NO: 120140 - DNA, 30 bp, Homo sapiens; identical to SEQ ID NO: 7856
  chr11:844070-844100
  hyper

SEQ ID NO: 120141 - DNA, 30 bp, Homo sapiens
  chr11:880179-880209
  hyper
ctgtgcggagccccgcgtgtctcagtgtgt

SEQ ID NO: 120142 - DNA, 153 bp, Homo sapiens
  chr11:880652-880805
  hyper
gcccctccccacggccgaccaggaggaatcaggggtgatggcctggcctcggctcacctgcctgggctgacacacgcacacacccctcacggagggcaggcctgtgggggacctgcaaaaactcgtaaagacgacagccgaggcctccacaaa

SEQ ID NO: 120143 - DNA, 30 bp, Homo sapiens
  chr11:910333-910363
  hyper
gggtcctggggacccgatggccaccactct

SEQ ID NO: 120144 - DNA, 42 bp, Homo sapiens
  chr11:910923-910965
  hyper
ggctgcccgaaagtcggggccggggccggggccggggccggg

SEQ ID NO: 120145 - DNA, 30 bp, Homo sapiens
  chr11:911354-911384
  hyper
cacattgcacgagccggagccccaggaggc

SEQ ID NO: 120146 - DNA, 30 bp, Homo sapiens
  chr11:926047-926077
  hyper
gatgcggggcctggcggtcttcatctcgga

SEQ ID NO: 120147 - DNA, 31 bp, Homo sapiens; identical to SEQ ID NO: 48038
  chr11:1139541-1139572
  hyper

SEQ ID NO: 120148 - DNA, 134 bp, Homo sapiens; identical to SEQ ID NO: 48039
  chr11:1357329-1357463
  hyper

SEQ ID NO: 120149 - DNA, 569 bp, Homo sapiens
  chr11:1357817-1358386
  hyper
tccgtcattcagacgcgaagacaaagcgtccctggctcagccctgagaagcagcgggacggcggcgcgttcctgagttcccgccacgcgggcgcccggcgagggcggggcggggcggggcgggcgggggggcggggcgtggagggcgggggggcggggcgtggagggcggggggcggggcgtggagggcgggggcggggcgtgggggcgggggcggggcgtgggggcggggcgtggagggcgggggggcggggcgtggagggcggggggcggggggatggggacaaggtaggggtcgtggggcgctgggctcaccccaggccctcaggtgtctcgagatggcccgggctccgagcgctcccggcgcttacgctagagcctcctcctgtgcgaaacgcgtccgtgcccaggcgcggggaccctgcagggctgtgggttcgcgctgccgctgatcctgcgtcttcccccctcccaggccccgcgtccagcccgccccgcccgcggtgggagacgcgccctccaggtgcggatgagacgcgcggacagcgggatggagaaggtgagacctgt

SEQ ID NO: 120150 - DNA, 8 bp, Homo sapiens
  chr11:1358616-1358624
  hyper
ggaagcca

SEQ ID NO: 120151 - DNA, 30 bp, Homo sapiens; identical to SEQ ID NO: 48041
  chr11:1404200-1404230
  hyper

SEQ ID NO: 120152 - DNA, 824 bp, Homo sapiens
  chr11:1410709-1411533
  hyper
accggacgtggcagccggcgggctggaggctcccaggtcccggcctcgccctggcctcgcctcgccccctagagtctccccgagcgctcgtagcggcggggcggggtggggaggcgctgattggccggcgcgggcaccgcttgccgccgccacggcatcccgctgcgttcgtacaggctcgtgtcgactcggctccgttgcgcggcccggctcggctcccctcagctgcgctcgactccgctgttcggctcggctgttcggcttggctacagggctcggctgttcggcttggctacatggctcggctgcgcggctcggctctgttcggctcggctcggctgctgggctcggctgttcggctcagctgcgcggctcggctcgtctcggctctgttcggctcggctcggctgctgggctcggctgttcggctcagctgcacggctcggctcggctcggctcggctcggctgcgcggccgctgacgggcgtgcgctgggggcgcggggcgcggggcgcgggcctcggcggcggcggcggcggcggcggcggaagccaggtgcccccgcccgccctgtcctctcgacgaggcggaggcgtcgccgcgggccaggcctcggactgccgcgtcggagtggacgcggggggcggcggcgcgggcggacgcgggcggcgcgaagcagcggggcccgcgggggcgccccggccgggtcggcgcggacggcactcggcggacgcgggcggacgctgggcggcccctccctgcccgcgcgcccgggcgcccctggccggcgccgggccccagagcgatgacatcgacggggaagg

SEQ ID NO: 120153 - DNA, 235 bp, Homo sapiens; identical to SEQ ID NO: 7859
  chr11:1411549-1411784
  hyper

SEQ ID NO: 120154 - DNA, 443 bp, Homo sapiens; identical to SEQ ID NO: 48044
  chr11:1411841-1412284
  hyper

SEQ ID NO: 120155 - DNA, 678 bp, Homo sapiens
  chr11:1568235-1568913
  hyper
gctgctccccgcgcccgccctccacgccagcagtgcctggggacccggacccgcgaggggcgcgcaggacgcgggagccgaggagcagcggcgctttgcggatggagagcgccgcggagggcagtctgggagtgggcgcggccccgccgggcgtgaggtcatcgcgagcagctggcgcaccccccgcgcctgcctcccggtcctcggagcccccggctgcgccccgcggcgcgcgcaggttgggcaggttctgggctctgggcggcggggcgtggaggagccctggggcgggattgtgactgggcgcttcctgcggggttggcggcccggacgccggtgccacccgagccacccagcgatgctctgggccccctacgtcggggctgacctcaccgcccatcctggcggaccccgcccgctctaatgggaccgcgcccaccctacactggcctgcagccgccgtcctcccggctgcgggttccttgccctcagggagggcggggccgccaccagctgcccggagaggtggggggacccaaacctcccctcgcccacaccaaccccgtcctactgccctcaatcctgcccctcctggagtttcttgttacggtccacacaggcgaagggccccatcggccgcgccttgccagccctaatgccctccgagaggcggaggcc

SEQ ID NO: 120156 - DNA, 499 bp, Homo sapiens; identical to SEQ ID NO: 48045
  chr11:1592746-1593245
  hyper

SEQ ID NO: 120157 - DNA, 96 bp, Homo sapiens; identical to SEQ ID NO: 7862
  chr11:1593576-1593672
  hyper

SEQ ID NO: 120158 - DNA, 118 bp, Homo sapiens; identical to SEQ ID NO: 7863
  chr11:1594038-1594156
  hyper

SEQ ID NO: 120159 - DNA, 30 bp, Homo sapiens; identical to SEQ ID NO: 48048
  chr11:1594881-1594911
  hyper

SEQ ID NO: 120160 - DNA, 30 bp, Homo sapiens
  chr11:1596150-1596180
  hyper
aagcatccctattgcgcagaaggaacagtg

SEQ ID NO: 120161 - DNA, 66 bp, Homo sapiens; identical to SEQ ID NO: 7864
  chr11:1674133-1674199
  hyper

SEQ ID NO: 120162 - DNA, 30 bp, Homo sapiens; identical to SEQ ID NO: 48050
  chr11:1714569-1714599
  hyper

SEQ ID NO: 120163 - DNA, 152 bp, Homo sapiens
  chr11:1769711-1769863
  hyper
gcgccggacccacagcgacgctgcctcagccgccaaccggcagagctagcagagcggccaaagcacctgcccacggcgcccgcggacacccgataccgccacgggcaccgccacgggctccaccgcgggctgcaccgcgggctctccagacc

SEQ ID NO: 120164 - DNA, 347 bp, Homo sapiens
  chr11:1770262-1770609
  hyper
cgcgcggccggaccccctgagcctcggtgcgcgcgtccttccgccgtcccgcgggccgctgtctgtccactgatccgcctcccagcggcccaaccttgagggggtggggagcgcgcggggctcggcggcggcgccgctgcctcccccgccgcctgcgctccctccgcagcgccagaccggccgcgcggctgcagcccagagcctgactcacggcggcagcgggcacagccacctccccgcctccgcctcctcctgccaggagggtgggggcctcggaagccgcgaccctggggagttgcaaggtcccgcagggatgggacccctacagcccccgaccagggtgtccg

SEQ ID NO: 120165 - DNA, 30 bp, Homo sapiens; identical to SEQ ID NO: 48052
  chr11:1784965-1784995
  hyper

SEQ ID NO: 120166 - DNA, 30 bp, Homo sapiens
  chr11:1785392-1785422
  hyper
gcctggcctggggtcgtggggcggcccacc

SEQ ID NO: 120167 - DNA, 30 bp, Homo sapiens; identical to SEQ ID NO: 48053
  chr11:1853900-1853930
  hyper

SEQ ID NO: 120168 - DNA, 36 bp, Homo sapiens; identical to SEQ ID NO: 7866
  chr11:1856742-1856778
  hyper

SEQ ID NO: 120169 - DNA, 30 bp, Homo sapiens; identical to SEQ ID NO: 48055
  chr11:1874056-1874086
  hyper

SEQ ID NO: 120170 - DNA, 30 bp, Homo sapiens; identical to SEQ ID NO: 48056
  chr11:1908990-1909020
  hyper

SEQ ID NO: 120171 - DNA, 217 bp, Homo sapiens
  chr11:1968628-1968845
  hyper
cccccgtcgcggggcgccccttagtgtcacaagcagacggaccccacagggcgcgcggactccggggagcggggtgggcgtccctgggccgcctcctggcccgggcgaggcagggttctccgggaccccctgtcatgccttgagacacgcgaggcgggtggcggaggagccccccgccaggtttagggcaaccccagggggcgggcgtggccgggct

SEQ ID NO: 120172 - DNA, 30 bp, Homo sapiens
  chr11:1969481-1969511
  hyper
ggaccggtgctgcgcgtggccctgaccttg

SEQ ID NO: 120173 - DNA, 176 bp, Homo sapiens; identical to SEQ ID NO: 7867
  chr11:1970023-1970199
  hyper

SEQ ID NO: 120174 - DNA, 30 bp, Homo sapiens; identical to SEQ ID NO: 48058
  chr11:2048642-2048672
  hyper

SEQ ID NO: 120175 - DNA, 171 bp, Homo sapiens; identical to SEQ ID NO: 7868
  chr11:2290846-2291017
  hyper

SEQ ID NO: 120176 - DNA, 421 bp, Homo sapiens; identical to SEQ ID NO: 7869
  chr11:2291072-2291493
  hyper

SEQ ID NO: 120177 - DNA, 124 bp, Homo sapiens; identical to SEQ ID NO: 7870
  chr11:2291800-2291924
  hyper

SEQ ID NO: 120178 - DNA, 113 bp, Homo sapiens; identical to SEQ ID NO: 7871
  chr11:2291944-2292057
  hyper

SEQ ID NO: 120179 - DNA, 254 bp, Homo sapiens; identical to SEQ ID NO: 7872
  chr11:2292105-2292359
  hyper

SEQ ID NO: 120180 - DNA, 324 bp, Homo sapiens; identical to SEQ ID NO: 7873
  chr11:2292391-2292715
  hyper

SEQ ID NO: 120181 - DNA, 31 bp, Homo sapiens; identical to SEQ ID NO: 7874
  chr11:2398444-2398475
  hyper

SEQ ID NO: 120182 - DNA, 565 bp, Homo sapiens
  chr11:2398757-2399322
  hyper
gccgcccgccgcccgcgccgccatgggagtggagggctgcaccaagtgcatcaagtacctgctcttcgtcttcaatttcgtcttctgggtaagggctgcgccgggggccggggcgggagggggcaggcacacactccacgttgggcaggtcccgcggcagcgtgctaggccccgcgggcgcagcgcgggccgcgaagttgtggggccacctgtgggctccaggagcggggtggggggtcgcccggggccaccgcgccccccgacattggggctgagggctgcgagccgagtttcggggcctctgtgctcgggggcccacctctgcggccgggccggggcttctgggggccgccgggcagttcccgctgtggtggtgatgggtgcggtggtcgcgggtcgggacccgagtacccggccgcccctcagctaaggaggggcctgcgcgggtccctggccgcggattccggactgctgcttcgcggggacgaggggggggctcgcgggcgggactcctggcgccccgcccccatgagctcatcaagagccgccgcccctggatggtggg

SEQ ID NO: 120183 - DNA, 415 bp, Homo sapiens
  chr11:2399399-2399814
  hyper
cggtcaccacccgagaccttcctgggggtcgcgcctaaaaggagcgcagactcccgccgggatggcccagaagctggggtgcgcgcaccctggccgtccctgcctgggagccgatctccctctcctcacccagacacgttccagcggaggcctcctcccagaagggctctggaggcctcgcaggagtggggatcccgcggttctgagttggcacaaggaagagagtggcaccaggggcctggagtggatggcagggtccgggagtggggccgctgctttgcaagaggggcccccacgctgggcatctttgggtgccagcgtgggtggaggagggtcttttgctgagaatggctttctcctgaccgcagtctttgctgctgggaagtgactgatgggctttcgccttttgtttcca

SEQ ID NO: 120184 - DNA, 177 bp, Homo sapiens; identical to SEQ ID NO: 48066
  chr11:2421276-2421453
  hyper

SEQ ID NO: 120185 - DNA, 30 bp, Homo sapiens
  chr11:2422370-2422400
  hyper
ctctaccttccactcgttgccggctttcgc

SEQ ID NO: 120186 - DNA, 188 bp, Homo sapiens
  chr11:2465461-2465649
  hyper
cgcagctcgcgcgcctgggcacccgggggcgctcacagtgatcgcggggccagcacaccctcacccaggacatccctttcctccccccaaccccaactccggagtggctcagagggagggaaagtagatgccggcaccctaccccgcccctcctgcccccgctgtgccgttctcggtcgtggtatcgg

SEQ ID NO: 120187 - DNA, 172 bp, Homo sapiens; identical to SEQ ID NO: 48067
  chr11:2466003-2466175
  hyper

SEQ ID NO: 120188 - DNA, 670 bp, Homo sapiens; identical to SEQ ID NO: 48068
  chr11:2466191-2466861
  hyper

SEQ ID NO: 120189 - DNA, 30 bp, Homo sapiens; identical to SEQ ID NO: 48069
  chr11:2552828-2552858
  hyper

SEQ ID NO: 120190 - DNA, 110 bp, Homo sapiens; identical to SEQ ID NO: 48070
  chr11:2554315-2554425
  hyper

SEQ ID NO: 120191 - DNA, 112 bp, Homo sapiens
  chr11:2554453-2554565
  hyper
aaggaaaccccagcgcggcctcggagggattaggcattctgctgaaccagggatatgcggtgggcctgaaaaagccatttcgggaggaatctggtctcggctggggtccggc

SEQ ID NO: 120192 - DNA, 7 bp, Homo sapiens
  chr11:2801630-2801637
  hyper
cagccgc

SEQ ID NO: 120193 - DNA, 30 bp, Homo sapiens
  chr11:2847665-2847695
  hyper
accgccgtgcggttccgcgcagacagtcac

SEQ ID NO: 120194 - DNA, 475 bp, Homo sapiens
  chr11:2883668-2884143
  hyper
gggcggggcgggggccggggtcgggggtccggcgagctttaatgcgcgcacaaagcctcatttgcaggtcaatgccgcggcacactcgcctctcccctcgcccggcgccctttgtccggccgcgcccgctcctcgcgccagatggccgcggaaatgctaatttcgggcgcccctgcccccccacccccgcgtttaattgcgcctttgcagatgggccgcgagtgtgcgcttcatgcagatgagcgcggcctcgccgccttcctcggacctccgggagccgcggccgggcgtgctggggccgagggcagggagggggccgctgtccctccactcgacgcgccgccgggcacgggcgggcacccagcggcccgggcccgggaagcgcgcttctctcttttcatttctccaaaatgggatcttaagtgattctgaatgaaaacaaattggcccgctttcttctccaaacagacgcgcg

SEQ ID NO: 120195 - DNA, 70 bp, Homo sapiens
  chr11:2884158-2884228
  hyper
cgggcgcgggcccggggcggcccgggcggtggggttggctccgggaccccctgcccggcccggccctcgc

SEQ ID NO: 120196 - DNA, 134 bp, Homo sapiens
  chr11:2890872-2891006
  hyper
cccaaggcccgttcccgtggacaggcgcgcggagggcagcaggaccgatgcaccgacggacgcaccgacggacgcgcggacagatgcgccgaccgcaggctctcccgccgtcccggggccgtcgtgcccgtgca

SEQ ID NO: 120197 - DNA, 1731 bp, Homo sapiens; identical to SEQ ID NO: 48072
  chr11:2905410-2907141
  hyper

SEQ ID NO: 120198 - DNA, 30 bp, Homo sapiens
  chr11:2907535-2907565
  hyper
cccgtgggcctcctgcgccagctgacgagg

SEQ ID NO: 120199 - DNA, 30 bp, Homo sapiens
  chr11:2908056-2908086
  hyper
cagacctcggtcgtgcgcgcacgcacacac

SEQ ID NO: 120200 - DNA, 61 bp, Homo sapiens
  chr11:2923532-2923593
  hyper
aggtcaccctggagcgctcaccccaccggcacccgtgcccaagcccgcccctgcaaaggca

SEQ ID NO: 120201 - DNA, 871 bp, Homo sapiens
  chr11:2949948-2950819
  hyper
agcctgaggggccccgagaccctgacgcgagggggccagcgcgattgcggggcgccgggtcccccaaggaggtgcagcgcccccgccccgccgtctggggttgaagtggtttttcccaaaggccccggtcccggctgttagggcgcagggctcgccgggacgcgggcagtcactcaccgcggcgggctcatggcgtgcggggtttgggctgcggggatggcctggagggctccgagggctcggagggtgcggcggccgcggcagccacggcgtcctcggcgggtgcggcgggtgcggtgcgttcctggcggctgcgaaagtcctgcagggcgcggcggttctggaaatcgatgagcgccagcgcgatggccgcgttccagcagctctcgcccgcgcagcggaagtcgatctccttgtggtcggtggtgacgatggtgaagtacacgtacttgcccgtgcgctccacgcagtccaccttgaggatggagtggaagcgcagctccttggggcgcgcgcgggggctggcggggaacaggctcaggcggtcggaggtgagcaccccgcgcttcttcttccatagctggaagaggctgtcgctgcgcttctccaactcgccctcgcgtagcacctcgtcgggggatttcatgtcgtgccgagcgcgggactgggagcggcaatgcgggcggtgacggcgccggctctgctcctcgtggccccggcgcggcctttatagctgcccctccccgccccgcccctccccgccccgccccggccctcgggccaccccgcccgcctgagccccgcgcgccccgggccataccctccccaagcccagccgtccgggcccgcaccgtcgcgtccgcgctctggt

SEQ ID NO: 120202 - DNA, 30 bp, Homo sapiens
  chr11:2951456-2951486
  hyper
ggactgctccgaccgcgcccccacgacccg

SEQ ID NO: 120203 - DNA, 434 bp, Homo sapiens
  chr11:2951690-2952124
  hyper
gggggtggagccggccgagaggaccccagagaccccggctactactccacgtctcccaccttcccgcacccctgccccctagctgcgccctggggtggttacagcaggaagtcccaactctggggtcagaattggcctcaatgacggggctcacgcaaaatgaaaacgagagtcccctgattcaaaatgtatttaaaatgtcaagacagtggcagcagagcgtaaaacccagacctgggaccagccctacctccacctgcccttcagggtcactgtaaaggataaagagacgtccggctcagaggagcgccccagacccggttctgtgaatggcatgcaggtagcagctgcccggtggtcccaccggtgtggccagaggacctggcagtgggcagggatgtggtgtggaggggcagtgccggcagagggcaggg

SEQ ID NO: 120204 - DNA, 298 bp, Homo sapiens
  chr11:3013494-3013792
  hyper
tgcggcagtggcggcgaccctagcttcgctcgctttggggctgcgccgccgtggcctccaacaacgccggctcccattggccgaggctcctagctcctctctccgcgagcaagacaggctgcgattcgccgagcgcggcgcaagtcaactgcgcttcgcgccgcagtcagcaaccaatcacaagcctccgaagaaacgccgcgccatatgcaaatattcctccgcgcggcgcgcgccctgcgttcctccgcctctttaaatggggcggggcaaggtggagaccgcgtgtgtggttccg

SEQ ID NO: 120205 - DNA, 141 bp, Homo sapiens
  chr11:3014087-3014228
  hyper
gtaagcctaacccccgctcatcccccaggtcccaggttggagaacacttcctctgcgaagaggtcggggctgggtcacctccgcggacaggacgggactagccactgcctgcatctcttcccccacgccctgagccccgca

SEQ ID NO: 120206 - DNA, 30 bp, Homo sapiens; identical to SEQ ID NO: 48076
  chr11:3077907-3077937
  hyper

SEQ ID NO: 120207 - DNA, 300 bp, Homo sapiens
  chr11:3078595-3078895
  hyper
atggctgggaatcccggacccgcagctgcggctacagacacttcctagaatctgatgcaaccgccgccccggaagtcgcgccccacgccgggcccgtcttccgggacacgcccggtcgctaggcaactaccaggggctccggatgtcgccggcccggagcatgctgggagctgtagttcaacccaatggcgacccgcgctccggagcatcgcgcggccaagcgttcagtggccgtgctgggagtagtcagcccagccgcggggagacaagcactaaagactgagcgtcctgtaataggtg

SEQ ID NO: 120208 - DNA, 31 bp, Homo sapiens; identical to SEQ ID NO: 7883
  chr11:3112953-3112984
  hyper

SEQ ID NO: 120209 - DNA, 118 bp, Homo sapiens; identical to SEQ ID NO: 48079
  chr11:3181648-3181766
  hyper

SEQ ID NO: 120210 - DNA, 764 bp, Homo sapiens
  chr11:3186007-3186771
  hyper
ccttggagcccgcgtcggccgagctggggggacagaccccctgattggccagggtttgtggtggtcagacccagccaccttccctggcggtcccggctcctttaagccccaccaagtggggagccgagctgggcgcgccgcttcccactcgcgggccccacccgccccaacccgccaggcgccgacccgtcctggcccggggcgcccccaggctcccgcgctccccagctccccagcgcgcgaccggccccgcggcgtggttccccgcactggctactgccagggtccgcggggctgcggcgcgagctcctggatcccttcggccggccccccgcggccctcggttcgctccggccctgcccggcggggccctccggatccttcccagcccgccatccccccgccgccctgccgccccccgggccgccgcgctcctacctcctaccgtgccgcgagctcggtgctccgggccggccgggcgcgcgggggctccactggcggcgcgggcctggctgcaggaaatgccagcagatggtccccccgcgcgaggcggagcgagggcgcggcggagggaggaggcccagggagcccggaggcgggaggaggaggcgcggcggccgcaaaacccgggccgaatcgccgcgcggagcgggcgcccaggggctgccccccaccggctgccgcttctcctcatcccccaaccccccgcgcgcgctccggggctcacacccacccgggcggccagaggtcgggacactccgctg

SEQ ID NO: 120211 - DNA, 30 bp, Homo sapiens
  chr11:3186866-3186896
  hyper
agccagggtgcgaggcgcctcctctccctt

SEQ ID NO: 120212 - DNA, 236 bp, Homo sapiens
  chr11:3224436-3224672
  hyper
ggccctgcactccccggcagaaggcagaagctgctcccagccccctccccaccacacgattccagacccttgaatgcttcctccacagcgtctccctccgacaccaccggcagtggtggcccgtggagaaaggaagccccctccacagatggcgcgaggctcccaggcggtgggctgggggtgcccggaggcggcactcaccgtgcagcagggcatgggggcgaggctggggtccc

SEQ ID NO: 120213 - DNA, 30 bp, Homo sapiens
  chr11:3225049-3225079
  hyper
gaacggctccgtctccgcggcgggctcgct

SEQ ID NO: 120214 - DNA, 30 bp, Homo sapiens; identical to SEQ ID NO: 48081
  chr11:3400093-3400123
  hyper

SEQ ID NO: 120215 - DNA, 35 bp, Homo sapiens
  chr11:3400476-3400511
  hyper
tggatagggcatcacgccccgccccctcaggccct

SEQ ID NO: 120216 - DNA, 30 bp, Homo sapiens; identical to SEQ ID NO: 7885
  chr11:3427830-3427860
  hyper

SEQ ID NO: 120217 - DNA, 243 bp, Homo sapiens; identical to SEQ ID NO: 48083
  chr11:3444552-3444795
  hyper

SEQ ID NO: 120218 - DNA, 27 bp, Homo sapiens
  chr11:3602557-3602584
  hyper
ccgcggacacgccgggccctggcctgc

SEQ ID NO: 120219 - DNA, 501 bp, Homo sapiens; identical to SEQ ID NO: 48085
  chr11:3663250-3663751
  hyper

SEQ ID NO: 120220 - DNA, 333 bp, Homo sapiens
  chr11:3818838-3819171
  hyper
cgcgaattggtggacgcggccgccactctgggtcgaccctgttattcattgggcaacgcgtcttttgaaaccgaactgaagggggaaggggcgagagggaagaggaggggcagaaggagttcggggaggcacagggtaggagcggtgagagggccgtggagtcccgcccctcgccgccgcggttggcgggagcgtgtcgtgacgtcacacagggcctctcgaagtgggcttgtgaatggctagattgggaagcaccggcggggtgtcgggaagggtggtgacgcaacatagagactccgcccccttccttggagcgccgcgactcgggctgag

SEQ ID NO: 120221 - DNA, 30 bp, Homo sapiens; identical to SEQ ID NO: 48087
  chr11:3829204-3829234
  hyper

SEQ ID NO: 120222 - DNA, 30 bp, Homo sapiens
  chr11:3829451-3829481
  hyper
cgaggcaggagagacgggcggatgagaaag

SEQ ID NO: 120223 - DNA, 30 bp, Homo sapiens; identical to SEQ ID NO: 7888
  chr11:3829956-3829986
  hyper

SEQ ID NO: 120224 - DNA, 30 bp, Homo sapiens; identical to SEQ ID NO: 48089
  chr11:3861497-3861527
  hyper

SEQ ID NO: 120225 - DNA, 30 bp, Homo sapiens; identical to SEQ ID NO: 48090
  chr11:3876233-3876263
  hyper

SEQ ID NO: 120226 - DNA, 30 bp, Homo sapiens
  chr11:3876498-3876528
  hyper
ctctagaactgaggcgagtggagcagcacc

SEQ ID NO: 120227 - DNA, 30 bp, Homo sapiens; identical to SEQ ID NO: 48091
  chr11:3877461-3877491
  hyper

SEQ ID NO: 120228 - DNA, 31 bp, Homo sapiens; identical to SEQ ID NO: 7889
  chr11:3887889-3887920
  hyper

SEQ ID NO: 120229 - DNA, 30 bp, Homo sapiens
  chr11:4116041-4116071
  hyper
acgggtggcgggcgcgggaaggggatttgg

SEQ ID NO: 120230 - DNA, 30 bp, Homo sapiens
  chr11:4208434-4208464
  hyper
gtttttggaggggccggggagggcgcgttc

SEQ ID NO: 120231 - DNA, 101 bp, Homo sapiens; identical to SEQ ID NO: 48093
  chr11:6280497-6280598
  hyper

SEQ ID NO: 120232 - DNA, 161 bp, Homo sapiens
  chr11:6281089-6281250
  hyper
tgagcaggtggagccgcgttgggagcccgccgggtcgagctgagtaaggcggcgggctcggcgggggccatggagctgctaaagctgaaccggagcgtgcagggaaccggacccgggccgggggcttccctgtgccgcccgggggcgcctctcctcaacag

SEQ ID NO: 120233 - DNA, 533 bp, Homo sapiens
  chr11:6341236-6341769
  hyper
gtaggtggatggaagcggggagcccccagctggtggcccacaggccggcaaaggcctcggattggggaccgtttgaggtcactgaccttgaagagcagaacgtggagcttcccgcgcgccaccagcagcccgtggttggcctccagccgctgcacctgggctgcgcggcgcaccgcgcgctcttgggcggcgttggcgtgcgagctcacgcgctccgccttggccagcagctgcgccaaggtgttgctggtggtgtcgtggctgcgactcagagcgcccaggccgctctggatgcggcgcacggaccctgccaggcctccctgccttcgagccaggcctccctgccgctcccgcagagtctccagcatggaggccagcttctccagcagggtcaccaccgtcacggcgtgcacgggaccccccgccggcgcctcgggcacaggcccccgctccaacgcactctccctcatgatccctgaccgctctgctccgtctgcctgcaactgctggccgcactacggtcaggggcctcc

SEQ ID NO: 120234 - DNA, 30 bp, Homo sapiens
  chr11:6411381-6411411
  hyper
cgggaatctgagcgcggattctgacaaagg

SEQ ID NO: 120235 - DNA, 42 bp, Homo sapiens
  chr11:6440455-6440497
  hyper
cggccctcggacctcggtgagccccgcggtccagccctccca

SEQ ID NO: 120236 - DNA, 198 bp, Homo sapiens
  chr11:6495353-6495551
  hyper
ggtgctgctagggagccggcgggccggcgagccggatcccggatctcggatcccggatctccgccagctgcctccggctccgggaagggcggtgtagtcggtctcagggattgagatgagactccgtcaagaaaaggcagctggggcagcagggatttcggactctgggagcctgtctgggccgcctgcctcctggag

SEQ ID NO: 120237 - DNA, 219 bp, Homo sapiens
  chr11:6502786-6503005
  hyper
taagtgagaactaagtcgtttcgaggccagacgttcagctcgcattcctgcacacatcgcgggaaccccacagggccagggatttgagggctggaaacttcgggctatggcgcgcgggcctgggaaactttgggcggcgcgaccttgactagaagtgtggggcccttatcgctgagtttgtggtcccccttttctctcagctgcgtgacttcctgttgg

SEQ ID NO: 120238 - DNA, 30 bp, Homo sapiens; identical to SEQ ID NO: 48100
  chr11:6624579-6624609
  hyper

SEQ ID NO: 120239 - DNA, 30 bp, Homo sapiens; identical to SEQ ID NO: 48101
  chr11:6624826-6624856
  hyper

SEQ ID NO: 120240 - DNA, 251 bp, Homo sapiens
  chr11:6625057-6625308
  hyper
tgcgagaggacccgcgccccctgtcacccctcacttctcctgagtcccaagtaaggaacggagccaaccctggggaggacccccggtcccctctcccagagtatacggagcctgaacctccccacttcccccaactctgttcgcggatagggtctagttgcctgctctcggacatccgttcagcagacactacctcttcgtcaccccctgcccaccctgacccgcctttacctcgcgtctagaggacacag

SEQ ID NO: 120241 - DNA, 30 bp, Homo sapiens; identical to SEQ ID NO: 48103
  chr11:6633896-6633926
  hyper

SEQ ID NO: 120242 - DNA, 85 bp, Homo sapiens
  chr11:6640705-6640790
  hyper
ctagtaactagtgacggtactggctcctcccttgcatgggtggtcccaaatgctaggcaagggtggggccgccacccggattctc

SEQ ID NO: 120243 - DNA, 238 bp, Homo sapiens
  chr11:6676729-6676967
  hyper
cccaggggaggccggcgggcagggcgggcgcggccagacgggccgggcgggcgcgggcactgacctccgcgcgacgcgggctccctcgcccggtgctggggcgccgtccggccgcggtcagccccccgggcagcgcccgctcgcgcggggcctgaggccgcgcatcgtccgcagtcgctgtctccgaggcccgcgatcccctccgggcagccgccgtcggtccgcgcgcccttggccg

SEQ ID NO: 120244 - DNA, 302 bp, Homo sapiens
  chr11:6677036-6677338
  hyper
cgctgccgcggccccgcgccccctcccctcccctccccccgccctccgcgcggtaacccgagcccccgcccctccgcccgcggagcccccgcccccgcccccacccgcgctccgcgccgccgcccccccttccccccggcgcccgcccggcctccctccgcccctccacttcccggccccaggccccggctccggatccggccccagcgccgcgccgcgcccccgtcccggttcccttcccttctccccgtcacttctcccgtcctctcctcccattcggttctctacgccctctcgtctct

SEQ ID NO: 120245 - DNA, 350 bp, Homo sapiens
  chr11:6704607-6704957
  hyper
catgcgccttagctcggagcgtggtgaacgtgtttgcgcatgcgcatcagagcctgcctcgttggcaatctcgggaagggcggagaaacggtgttgagcttttccagaggcggcgagctgggcgggcttcaggcatccagagcgctctgtggcggccgaagaaccaggcgccccctagtgtgggataagcgggccatcgggttttttttggggctgcgtcagccagtggcatttagggcgatggggcgctccgccgcggagactcctgggaaagagagcgtctgaagagaaaggcacccggagggttcggggtcctgcgggctgacggccctaccgggtccagcagtggc

SEQ ID NO: 120246 - DNA, 712 bp, Homo sapiens
  chr11:6947536-6948248
  hyper
gcgccggaagtatgacgctcatttctttaagccactagaagctcaccgtgagtccattcacagggccagagttccaagtgtgcggcgtgggcggggcctgcagaaagggacggggcctgcagaaagggacggggctggcaaaggcctggtctacctcaccgatccgggtcgcgggggctcctagggggttccttccacagctggtgcgcgtgcgcaagagtgcgtcgaggttgttccgcggcaatttatgaaactcggagccggcagtgagttgagggttcggcgaggtcagggattcctagttgcagcgtgattaccaacgccagctcccttcactgtccaagacagcgattccgcggctcctctgagaactggcgcttgtgagtgactgaacgggccactggagaggagcggtgctcacgggtatcgttctcgtcagcgggcggtggggacgcggggtcttggaattgggaatcacgcttgagggcgtccatgcggaacgtgcagcttacctcagcttgcttgcagttacccagtttccacgctgccctccaaggtctgtgccggaaaacctggaggagggcgcgagctgacgggagggatggaaacgtgggctgcggaagtaagacaagcgttgagagcagcgacagagggcgagggggtgggcggcgggacggctggggtcaggatccagctccgctaaagcaaggat

SEQ ID NO: 120247 - DNA, 715 bp, Homo sapiens
  chr11:7041180-7041895
  hyper
tgcactgaagacgcgcgcggcctccgttgcttatccagatccccggccagaactctgccccggcaccgaacaccgggcacccataccccggggcccaagctgcttctgccctcctctacttgcctttattaagtcttaacgtgggagagaagccgtgatgtacccatctacacgggtgtctctggggtttctaaaccggagtagcttctcagtccctgaccctcgattttctgcccctcttccttcaagcacagctcgtcttgccctgtccgcttctggctcagtcctcctgagagttcatgtcacttaacggagcctgtgagagtggaccgggatggccaaaacactcagtccacacaaacaatggccgcagcccggctggaccgaaacggaagtcccaggtcttggagtagacactcgcagtgtttccatggatacgggaggggcggggcgggaagagagagcgcgggaaaacgtgactcctgattggccagaagtatcccgcgcctcccgacctttggccgctggcattcctgcgcgggcgggagctgcgggcgctcgggggataaggcgaggacgcaccagcattaatggaataggagaactcccgaagcttttagggccctgggaaagggggcgtggctggaaacggagctactggcttcggagaattctgtgaccctcaccaccgcgacgaccccgaggaaacgctgtc

SEQ ID NO: 120248 - DNA, 176 bp, Homo sapiens; identical to SEQ ID NO: 7895
  chr11:7272752-7272928
  hyper

SEQ ID NO: 120249 - DNA, 193 bp, Homo sapiens; identical to SEQ ID NO: 7896
  chr11:7273066-7273259
  hyper

SEQ ID NO: 120250 - DNA, 219 bp, Homo sapiens; identical to SEQ ID NO: 7897
  chr11:7273679-7273898
  hyper

SEQ ID NO: 120251 - DNA, 180 bp, Homo sapiens; identical to SEQ ID NO: 7898
  chr11:7274075-7274255
  hyper

SEQ ID NO: 120252 - DNA, 30 bp, Homo sapiens; identical to SEQ ID NO: 48110
  chr11:7534314-7534344
  hyper

SEQ ID NO: 120253 - DNA, 31 bp, Homo sapiens; identical to SEQ ID NO: 7899
  chr11:7534832-7534863
  hyper

SEQ ID NO: 120254 - DNA, 30 bp, Homo sapiens
  chr11:7535596-7535626
  hyper
ccctgcctgggatccgcggacagtccgcac

SEQ ID NO: 120255 - DNA, 155 bp, Homo sapiens
  chr11:7694730-7694885
  hyper
cagccttccggaatccgagccggcccgccccactccccgcccttcgcggtcccgcccacgacctctccccacgcctcccgctccggcccccaacctcccggtcggacgttcgttcccggctctagccggcctccgcgcctctggcctctttcctt

SEQ ID NO: 120256 - DNA, 164 bp, Homo sapiens
  chr11:7695108-7695272
  hyper
ggaccccgcaggctgggaccccggcggctggcccgctccccgagaagggccgtggtcggggggctctcactcacgagccgctggctctgggtcagccctgcccccagggcagcgctccatcatgaggctggcggggcgctgagccgtggcgtcctcgctcctgc

SEQ ID NO: 120257 - DNA, 30 bp, Homo sapiens
  chr11:7695484-7695514
  hyper
cggggcgggtgtttgcggggtggggccgaa

SEQ ID NO: 120258 - DNA, 169 bp, Homo sapiens
  chr11:8040394-8040563
  hyper
ggctgaagactcccacgccggaaaggagggcgcctctgcggaagggccccgagtggcgacagcggatccgggactcccaagcaagcaggagccggagcagcctcttagcaacccctgtcccgggaaggtttgaaagcagcggtgccctagtgacgccggaaaagatgga

SEQ ID NO: 120259 - DNA, 194 bp, Homo sapiens; identical to SEQ ID NO: 48114
  chr11:8040581-8040775
  hyper

SEQ ID NO: 120260 - DNA, 611 bp, Homo sapiens; identical to SEQ ID NO: 48115
  chr11:8040960-8041571
  hyper

SEQ ID NO: 120261 - DNA, 631 bp, Homo sapiens
  chr11:8102564-8103195
  hyper
gcccggctgcagcgccgccgttagccgaaggtgggagccggcgcggtcacgcgcatggagcgtggatcgcgacgatttcgggggagggggcaagggcgctccgcaggccctgagccggccggggggtggggtctctgcggggcggggcggggcggggcgagggagaaggggcaggccgccgctgccacgcagtactcccgccttggcgccagaggggcgcgggacggtgcggtcggcctccccgcctccacgcgcgcgcacgacccgcgcactcccggagcttcgcccatctcgcctcgccgcgccgcgcaggcagccgctcgcagagccagcagccggggccctggcgtgcagcgcgggcctcggcggggcccagcgccccggcccgggaggatgcggcccggggcggcccgggagctgagcagggcccccgcgccggcccctccgggccccggcctccagagccgcagccaccgccccgcccccgagagacatgacttccaagccgcattccgactggattccctacaggtacgcgggcgccgggccggggcgcccaccactcccgactcgggacgtgagctggctggggatacgcggccggggcgcagggcaccgctgccctccccac

SEQ ID NO: 120262 - DNA, 708 bp, Homo sapiens; identical to SEQ ID NO: 48117
  chr11:8190058-8190766
  hyper

SEQ ID NO: 120263 - DNA, 888 bp, Homo sapiens
  chr11:8284164-8285052
  hyper
gccactctcgcaggccgctcccgcacaagtgctaccggccggcggcgggacactttcttcctctgggccaaactcccgcctccgcgctcagagagacagggagctagcgggccggcacaagaggcggctctctttctcaccgagtcacgctcatgcagatgtcccccggagggtccaacccgccttcccctcgcctgccgggcaccctggcgctcgcgccgtcctcccgcgctcccgcttgccccgagctctggagcccgattctccccgaagccgctgatttgctcggcgctcagcgcctctcgggttacgcggcggctggcgcgagggtgatggctgcggtgagagcagcagcctcagacacgaaatgctcagagcgaacctccgcggcgcggagatcgcaagggagccccagcctccgcgcggccccgcggcgcagcacacggccagtgcacagctcctcggctcgcggccgggacccggggggcgtgcggccccgggcgcgtgcagcccggggctcgacctcctccccccgcaagttccgcccggctgtcccccggtacttccccccgccccagccccggcccccagcgcgccgcccgccccgcaatccccgcacagcccagcaggtgtgcgcccgtgtccccgcgtgtgtgtgcctgcgcgccgcggcagggggcgagggggtgaggggcgtcgagaccccggcccgccacctaccgtcctccttgtccagcaccatcatctcgggcgctccgtgtccagccgcagctaggctcggccgggagaagggcgccgactcggggcgcgctttggaggggcggccggtcttcgggcagctagcgggctctaattacccgcttgtccggctcttaacctagattgcac

SEQ ID NO: 120264 - DNA, 135 bp, Homo sapiens
  chr11:8285494-8285629
  hyper
ggagtggagacgcacggctgtccggctccgcagcgccacctggaggcttctaggtcctagctcggtgagcgtctttgctccgatcccagggtcgtggtcttcaatgattgtctggaggacgcatcccatctgtca

SEQ ID NO: 120265 - DNA, 493 bp, Homo sapiens; identical to SEQ ID NO: 48119
  chr11:8289527-8290020
  hyper

SEQ ID NO: 120266 - DNA, 252 bp, Homo sapiens
  chr11:8290057-8290309
  hyper
cgccgccggccgcctgcgctgctcccgccggccccgcgcgggcgccgagtccggagagccgcgaccgccgacgggggcagacggaccggagtccggagcgcagccccgcgggcagggagcgcaggaggagggactggggggaaggcgcgggggcgagacggccaggccgggatcgcgggagcctcgcgagcagcagctgcccgggccgggccgcagccggagcctgagccgcgcgcgcgtccttcctccgcg

SEQ ID NO: 120267 - DNA, 30 bp, Homo sapiens; identical to SEQ ID NO: 7905
  chr11:8305026-8305056
  hyper

SEQ ID NO: 120268 - DNA, 30 bp, Homo sapiens; identical to SEQ ID NO: 7906
  chr11:8305287-8305317
  hyper

SEQ ID NO: 120269 - DNA, 749 bp, Homo sapiens; identical to SEQ ID NO: 48123
  chr11:8615282-8616031
  hyper

SEQ ID NO: 120270 - DNA, 31 bp, Homo sapiens
  chr11:8625693-8625724
  hyper
aaatgagtgccccggcgccacctatggggct

SEQ ID NO: 120271 - DNA, 34 bp, Homo sapiens
  chr11:8703869-8703903
  hyper
gcggttccgcactgcggccgggagacaaaccagt

SEQ ID NO: 120272 - DNA, 50 bp, Homo sapiens
  chr11:8704466-8704516
  hyper
aggctgcgcatggccgcctgcggggcagggtggccggcgcgggcccgggg

SEQ ID NO: 120273 - DNA, 141 bp, Homo sapiens; identical to SEQ ID NO: 7909
  chr11:8710628-8710769
  hyper

SEQ ID NO: 120274 - DNA, 559 bp, Homo sapiens
  chr11:8892072-8892631
  hyper
cgcgcgcgcgcgcgcgttcttcaaggagcctgcatacaagctgcaacagctccaggtaggagctcgaatgccgccaccgagaggcaaggcggtgcgcagagccagctcccaggacgtcccgagatcgggtctccgctcggcaccaggcagctcttcaccgccggactctggccgcgaggttccccacccccaaccgcgcggcccccgccgggccggaaagcagagccggcggctactgaccgcccgggagggcggaccccaccagccccgctcctctgcgcctgcggcggcccccacgcgcgtactcacggagctggacaccgctgccggggccgggagtcgggagcagagggaaaagggctgggagggcaggggcgggaccgggcgcgcacgcgggaaccggggccacccggcccggaggcgcttacctctgcgttccccagccgggccgggcgcggcgcctggatggggtctcgccgggagccgcgcggcccggaggaggagccgctcctgcagagagggcgggcggcgggcaggcatccgcgccccgggctgcggc

SEQ ID NO: 120275 - DNA, 30 bp, Homo sapiens; identical to SEQ ID NO: 48127
  chr11:8892878-8892908
  hyper

SEQ ID NO: 120276 - DNA, 30 bp, Homo sapiens
  chr11:8933357-8933387
  hyper
aagtcctttcaaaacgctttacatttgaca

SEQ ID NO: 120277 - DNA, 30 bp, Homo sapiens
  chr11:8986202-8986232
  hyper
ggggcttagggagtcgccattgcgctggaa

SEQ ID NO: 120278 - DNA, 1189 bp, Homo sapiens
  chr11:9025074-9026263
  hyper
catccagggaggaggcacagccgaggggagcgcaagctagaaaagctacgacggaatccccaccgaaaccgcagcaggggtactggaaggggaggaatccgcgacgcagcgaccgcgagccaagggcagcggcgggccgggccgtgactcagtgaaagccgcaacggccgggcctcggaaaacggcgggcgcgaagccgccggggccggggcgagaacggcggcgggggctcaccatgtccttggacgagcccagcttcttgaggccgtccaggggcagcaggtcggcggagtccttgtggatgaactgcaccgcctgcttcatccggcgctgctgtcgcagtgacgccgcctcccgcatgtcggtctccttgcggccgccctcagtgaggagccctgagtaaaacatcgctgaggcgccggcggcccggtagcccacagccccccggcagcctcagcctcgagctcctccagcgccgcaagggccccgagccgcgccttttatagccgagcgtgacgtcgcggggagcagccagtgcgcgcgcggggggcggggccggcacagagtccacgccccgcgcggctccctcgcgtcccgcgtcccgcgtcccgcgtcccctgctcacccggtggcaaagccggcgaggaggcggcggcgctggtggggactgacccggcagtccgagaatccaccgcggccttttcacccaaccgccccctcctgcgtgggggccccgcatcccctggactggcgtgggctctggggcccgatgccctggcagccccggccatctctgccgctggccgcgggtacctgctcacctgtccacgccgtggccgacccggggatcaccgacagccgggccatgcctcgagtcccgccgcccgcgccgctgctcggcttctcagaaacgcacctccacgccgccagccggggctccagggtccaccgcccgggcccggaggactggcgactccctccgaggttgggagcgctccggatttctccaacttcaggtcggtccccacccaccgggccacgtgactggggagggggcagccggtgcaggcgtgtggaggaggctttcgggacctcctcccccgggcaccctctgcctgcagcccggcacccggcccgcgtttccgagccgggggagcaggtgcagtcggaagcccgcgggtgggcgtgg

SEQ ID NO: 120279 - DNA, 76 bp, Homo sapiens; identical to SEQ ID NO: 48129
  chr11:9112509-9112585
  hyper

SEQ ID NO: 120280 - DNA, 492 bp, Homo sapiens; identical to SEQ ID NO: 48130
  chr11:9112639-9113131
  hyper

SEQ ID NO: 120281 - DNA, 30 bp, Homo sapiens; identical to SEQ ID NO: 48131
  chr11:9113370-9113400
  hyper

SEQ ID NO: 120282 - DNA, 30 bp, Homo sapiens; identical to SEQ ID NO: 7913
  chr11:9285571-9285601
  hyper

SEQ ID NO: 120283 - DNA, 885 bp, Homo sapiens
  chr11:9286203-9287088
  hyper
ttcctttattttaaacgaagtcactcaacctacaccaaactgagaacacacaaccctccctctttctggtcgccgaagacgtggccactgcgcagcgggccgtaggtttggacccctcatggctcagagcccctcatccgtttcccccctccagtccaaagcccccttcgcccgcgcccgccctggtcctcccggccgacactcgcccggctcccgggacaaagcggggctgaaggaaggtttcttctggggtccccgacgacagcgggcgcgggaaagcgccccgggctcggcgcgcactcacccgacagctcgtccggctccagcccggtctccgtgtccagtccgcagatgacaaagtagtcggcgaagcgactgggcgccgagccccctccgccgccgccgccactcatggcgccggggccgagaccggccgggcagtgcggagcggcaccgagcccccgcaacccgggcgcccgcccgtccgccctcaggccgcccctcccgccgccgccgctaccgcggctcgggccgccgcccccggccctggcccggtcccctcggccgccgcggctgccgtgacggggcgggggggcaccgggccgccccgcaccgcatcctggatgccttcccctccgcgccgccgccgctgcagctagccgagagcgccgcggcccgagcgagcctggagaagggcggagagcgcgtggacagcccccaccgtgaccctcctcctaccgcgcctgcgcaggcgccgtctgggagggggcgggctcctgggggaaaggatgacgtgatgctcttcggaccccgccggccgcagcttcccgggaggtcgccgcagcgcagccggtgactgcttggtcgcccgcaactgccactccc

SEQ ID NO: 120284 - DNA, 30 bp, Homo sapiens; identical to SEQ ID NO: 48134
  chr11:9335566-9335596
  hyper

SEQ ID NO: 120285 - DNA, 30 bp, Homo sapiens; identical to SEQ ID NO: 48135
  chr11:9336001-9336031
  hyper

SEQ ID NO: 120286 - DNA, 180 bp, Homo sapiens
  chr11:9336371-9336551
  hyper
cctggcgtctaaagcgtagccttaattacccggaagtgcggtcccagggacttcaaaccttttgtccaggccgccggaggtgcctgtgattagtcggcatttcgcggctgaggctgattcagcccattacatcaattccgcagctgctgtcttcaatttggaggcgccagagagtgcttg

SEQ ID NO: 120287 - DNA, 30 bp, Homo sapiens; identical to SEQ ID NO: 48137
  chr11:9385823-9385853
  hyper

SEQ ID NO: 120288 - DNA, 36 bp, Homo sapiens
  chr11:9406094-9406130
  hyper
ctcccaaagtgctccgcaggcgcgcccacaggaagt

SEQ ID NO: 120289 - DNA, 269 bp, Homo sapiens
  chr11:9482340-9482609
  hyper
gattctgcactttgcgcgagccactcaggggcgggctgtaaagtcaggcttggctgacgtcagttgagtgggcgcggctagggcggttttctttcgcgtcgaccaaacgtgggccaatggaaaaccggaagcgtcctgtgagtgatgtaatgacagcccaatggaagctgggggcgggcctcagacacactatgcgggttgcggggcctgggggccggacggctgtttcctgtcctggtgcatggtggtcggacgaaggaattgttgga

SEQ ID NO: 120290 - DNA, 30 bp, Homo sapiens
  chr11:9595185-9595215
  hyper
actcacgtggttaacggtcgcgggaagccg

SEQ ID NO: 120291 - DNA, 30 bp, Homo sapiens
  chr11:9595529-9595559
  hyper
cggcctgcaccttgcggcagaagctgatct

SEQ ID NO: 120292 - DNA, 872 bp, Homo sapiens
  chr11:9596146-9597018
  hyper
ggccgctcccccctcgctttcctgcgccgccccccaaagttggcagcccttgtgtttggccctgccccgaggttgtccgttgagattatgtaactgaacaatgggcctcgtctggaacttcatcttacaaaggggccgatcggcccgtccgggtggccaaggatttgccgcccgttgagtccgggccgccccgagcgtgtcagccccgagtgcggcaccgataacgcggttcgcgaggatgctggagggtgccggcccggccacctgacactcccgagccataggatgccttttaaacgcggcgatcgggcctgtaatttgggcggcgcgggcagaaggagtttaaagaaaaataattgtcccgccctgatcgtgtcgtgtcgtgtggcgtggatgggggaaaggtctggggcatgcagggagactacgcttggacttgggagtaaaggctggccttccaagcatttacagtcctacagactcatcctaagtccaggcagtactgaggcctgtttctggacaaggtcttggcccagcatttgtttttatcgtgggtttgcggtgcccagagtttggccggcctccgtgtgattaggaacatcctaccgtagataaggtatcttaaagaaggaggtgttcagcacctgtgttttgaaaggccttcgagtactgcgcagatgaccacttttaaaactgcagattttaaagctgatacttccagagattaagacaagcctcgcatttgtaaggttaacagggaagatgcaccttttaaagtgagtttgttttgttttcaatgtactgtttgtcatcagcctaggcaatctgtgtgctttcgagctgtactgtttattggccgacttgctcaaggc

SEQ ID NO: 120293 - DNA, 30 bp, Homo sapiens
  chr11:9635028-9635058
  hyper
gcctccttctatgccggtttcctggggcct

SEQ ID NO: 120294 - DNA, 174 bp, Homo sapiens
  chr11:9635930-9636104
  hyper
ggttactgggcacgcgctgacaacccacatctggaaaacccggtcctaactggagaataaaacttaaatgcacgtgaactcaccggcagctgaacatttccgtgagaaaacccctaaaagccggcaccggctccggtggggccacagagtctctggagcgaggctctctccaat

SEQ ID NO: 120295 - DNA, 89 bp, Homo sapiens
  chr11:9685090-9685179
  hyper
actccccttaaacgtcgtcgctgtgtccctagaacccaagatagagtatgcatgaataaacttttgcgaaatgaaccaacaaacttccc

SEQ ID NO: 120296 - DNA, 823 bp, Homo sapiens
  chr11:9685218-9686041
  hyper
cgacttgggactgcgctatcatttcagtcctggtctggggacttttcggggtcttctctggccttctcagacagtgactccgttcccaggacaggaccagggatccctttttcactgcggggcgctgggaggaggcgggtaggctgctcacctaatctctcgggtttttcctcaagacgcggtcatttgtgtgaggtgttgtactcgagcacccaaaatggcccgaactggtctgggaaacattagggagatgtgtttaccgtcctggctgacactgaaggccaagcattcttgccaccaggcgtggcttgactcgcagaacccacactctggcggctgtgggcgcggcactggaccggcgccggcagcagggcggggcctggcgggggcggggcctggcgggtcaggtgactgcgcggcgggctgtggctgcggaggttgaggggcgtccgaggcgcggaggggctggctgggcaggaggggttggcggggcagcagggccgcggccatggggagcttgaaggaggagctgctcaaagccatctggcacgccttcaccgcactcgaccaggaccacagcggcaaggtctccaagtcccagctcaaggtgggcgcctcctgacccggccccccacccgaccctccccggcgcgctctgtacttcccttgggtggaagcgggacctggcgggccgtgaccgcagggcggggcgggtcggaatgcgcccggtaggcccgcttggggcggagtgggtctgagaccgggatttggtgtttactgcctcccccttgccttcgggccatgccctcggttggatgtgtta

SEQ ID NO: 120297 - DNA, 18 bp, Homo sapiens
  chr11:9863100-9863118
  hyper
agagtcttgctctgtccg

SEQ ID NO: 120298 - DNA, 1 bp, Homo sapiens
  chr11:10315717-10315718
  hyper
a

SEQ ID NO: 120299 - DNA, 124 bp, Homo sapiens
  chr11:10316352-10316476
  hyper
tccaccgaggaacgcggcatccccgggatcctcccgaactgggctggcctctccctggggagccccgcacgcctcggcttgcttccctcgcagcggtcccagggctctcgcagcccgagcaggt

SEQ ID NO: 120300 - DNA, 386 bp, Homo sapiens
  chr11:10324218-10324604
  hyper
caagggcacttgcttcgcgatcctcctggcagagccacagctcaagtttcccccacggaatcacgagcttttgtaaagggcagcgaggaggcagcgaggtggcagcgaggtacagtcgcagagttctctggagaacgaacacccccgccgcgccccaccccccaggactggtggagactggaaggaacgagtccagaccacgggaccttccctggccgtgggccgacgcctagctgtccttgacctccccagcagtcggaggcgcgcgcgggagaaatgaaagtaaaacctgtcctggcgcggaaccaagtggaagctggcgacaagtaggtcgcatcctcagagcgactgatagccagtcctggatctgcgcgaagagcttgact

SEQ ID NO: 120301 - DNA, 409 bp, Homo sapiens
  chr11:10326038-10326447
  hyper
tagctcaccccgaaacgccggggtcttggtcctctgggggactagtgagtcctgctcctctcggctttgctccgtccctgccccggcccctccgcgggagtctggggtcgcggcccggtcaggcgccaagccggcaggggggcgcggtccacttgaggccacagctccccaggtccagggctcgggccatccgcgctgtcccttccgcgggctcttgctgttcttcgccaggaggctttgcactccgggccgcatgggtcctggataaggacctcaagaggttgtagtggcgccccttcgctccggcgtactgtctgaaccctgtgcccaaagagggctgtggcagttcctgcaccaaccgcctggagcccatacctaagccctctgggcacgagggacctcctctccc

SEQ ID NO: 120302 - DNA, 243 bp, Homo sapiens
  chr11:10326499-10326742
  hyper
cgtccgagagcaggagcgcgcgtggctgaggaaagaaagggaaggcaaccgggcagcccaggccccgccccgccgctcccccacccgtgcgcttataaagcacaggaaccagagctggccactcagtggtttcttggtgacactggatagaacagctcaagccttgccacttcgggcttctcactgcagctgggcttggacttcggagttttgccattgccagtgggacgtctgagactttct

SEQ ID NO: 120303 - DNA, 30 bp, Homo sapiens
  chr11:10327123-10327153
  hyper
ggctaaacccgcctcgccggggcccctgcc

SEQ ID NO: 120304 - DNA, 233 bp, Homo sapiens
  chr11:10329350-10329583
  hyper
ttccccctgcctgccgcggttgttaaagttccaagccgccctagcaatgcgtggggacacctccggaaaacccagtaacccctagtaaccccgggtctgcccgggcctgagcgcccgcgggccgctggctcatgggcgaggctgtagcgccccctgcaggcagctgagacaggcccagcgccgccaagcagtacgtgcggtttaataagttctcctacgtgggagtcagcaca

SEQ ID NO: 120305 - DNA, 30 bp, Homo sapiens; identical to SEQ ID NO: 48151
  chr11:10472084-10472114
  hyper

SEQ ID NO: 120306 - DNA, 160 bp, Homo sapiens
  chr11:10562150-10562310
  hyper
ctggctaagtagatcgacgtggctatttctgagctatcgtcccaggcaaaaggtttcttatttgggtgtccagcccggcggagaccgagcccgcgggccaccctagcgctcgctctggctacgccgcctcagcccctcctcaagcgcacctggacattta

SEQ ID NO: 120307 - DNA, 30 bp, Homo sapiens; identical to SEQ ID NO: 48153
  chr11:10562822-10562852
  hyper

SEQ ID NO: 120308 - DNA, 30 bp, Homo sapiens; identical to SEQ ID NO: 48154
  chr11:10757366-10757396
  hyper

SEQ ID NO: 120309 - DNA, 167 bp, Homo sapiens
  chr11:10772629-10772796
  hyper
gggcaccctacagccgacacgccaacaaaagcttcggagccgccaaccccaaaacggaaacaccggagccacaagctgagctcgcgtagggcacgctcccccgggagtgcttccgggacagggggcggggtcgccggaagtggccgtccgccgtccgctgctcgttg

SEQ ID NO: 120310 - DNA, 31 bp, Homo sapiens; identical to SEQ ID NO: 7920
  chr11:10814227-10814258
  hyper

SEQ ID NO: 120311 - DNA, 30 bp, Homo sapiens; identical to SEQ ID NO: 48157
  chr11:10830215-10830245
  hyper

SEQ ID NO: 120312 - DNA, 32 bp, Homo sapiens
  chr11:10830955-10830987
  hyper
gctgtggctgccctcgcgtgcctggcctctcc

SEQ ID NO: 120313 - DNA, 30 bp, Homo sapiens
  chr11:10879090-10879120
  hyper
ctgtcacaggtgcgcgctgcccacagattg

SEQ ID NO: 120314 - DNA, 30 bp, Homo sapiens
  chr11:10879632-10879662
  hyper
ccctacaatcttcacgagcgactctgccgc

SEQ ID NO: 120315 - DNA, 152 bp, Homo sapiens
  chr11:10880013-10880165
  hyper
gccccaaaggagcacgcagaacctcggctgctgtgcatttatcacctcttttgttcccggaggccgcaccccaggtccagtttacacagctgccaactccttttcttggttcccactggaatctaggaagaaaactcgccctttacttctcc

SEQ ID NO: 120316 - DNA, 30 bp, Homo sapiens; identical to SEQ ID NO: 48160
  chr11:10952240-10952270
  hyper

SEQ ID NO: 120317 - DNA, 30 bp, Homo sapiens
  chr11:10955611-10955641
  hyper
aggctagaggaaggcggtttatttgcttcc

SEQ ID NO: 120318 - DNA, 1498 bp, Homo sapiens
  chr11:11642466-11643964
  hyper
gggcatctcgcctgacgcctacagtggccaaaaaagctcgtttgcccgcgcgttccctcttgtacacacacagacattcacatgcacacacactctgagccggacttgtgtgcgatcccgagagcccgcgagcaaccagcccagagtcacacgcacatttggacacgtgcgcagcgcgcccccataccgccagctagctgcacacatccgctcgtgcagccctgcgcacacacgtgtgccccggggaagagcgcacggccgcagacagaaggtcccgaacgcaggcaggagctcacacgcaggccccacgactaccacgcatctgcggccccagagccccgccgtggctgagttgatgcgcaccagccccagcgcaccccgcgccgcgcggggcactcccgggcctcatgggcgacccaagtttccggggcgcccgtaccttgaatgtgctgcttgatgacattctccaggtggtccagccgctcaataatcttcagagtgtcccctttgtcttcctccagcttcttgtcgggcgccggctcctgcccccgcacatacacgctggcgatgtagttggtgacccagcccacgtagagcaggcagatgatgttagtcatgccgctcaggatcacgcaagtggacaccaaagttttggtcttcctggtgcacaccattctgggctccttcctccatatagagctcccgggggcccttccttgtcgtgcgccccgaactcccccgcgctcgcaccccgtagcacgtccggagccgctgggcacctcagcacctgagtcccgaggttctccaaagcccggtccgctgccggtgtagccgccgtgcccaagtttgcagctcctgccgctggccacccggagagaccttgacaaaggaaaccaggtggatttttttccaaattaaaaatccctgaacccttcctagaggggtcacgggtagccggcagccgcgcgtccagatgtgtacgtctgggaaactttgccactgcctgtgtcggcggccacgccgcttcccatcgccagcgccggctgccttggcggtccgaccggcccgcgctgctaggagaacagcggcagcggcagcggcggcggggagagccgcgaagcagagcggcccggccccctccgagcgacaagcgctgccaccaatcgcgctccggctcgggagaggggccggtgctgagcggcagcggaccaacggggagggagcggggggcggagtccagctcccaggccccacctgctggccgcccctggctcccgcccccagggacgcgcccgggcctccacccgcgcctgcacaggctgccccagacctgaagctcccggagagggcgcgctgccagtcccagcccttaggtcggcagcttcctccgttaggggaattccatctcttgctcttgggcaggaatctcctggttttgtggagggggtggggggttcgcacgggtcagcttctttcatccgcccggggcttctcgcat

SEQ ID NO: 120319 - DNA, 30 bp, Homo sapiens
  chr11:11864002-11864032
  hyper
aataaaggagcggacgggaaagaatcaggt

SEQ ID NO: 120320 - DNA, 1143 bp, Homo sapiens
  chr11:12029917-12031060
  hyper
tcttccaccgcgctgcgcaatttgtgctgcgtgtcctccatcagttcctcaacctcgcggaacatctcattgagggtggcctcctcctgcgggtagctgagagccgggccgggcttgactggagccgaggtcgccgtcggagcgggcgcgggggccgtggggaccgccgccgccagcagcaggcacagcagggtggccccaagccgctgcatctccgctctgcgcccgcagccgccgcctgtgtgtcccggaacgcgatcagaggcgcgcggaccacccccctcgctgggcccgccgccccgccccgttccgccccgccgcccgcccctggcgcccctctttcccgcacccgcccggagacgggaggaaaccgaggcccctgaaaacgcagctcccctacacccgaaaagacgcgaccccacccgctccagcccgagccccgatcgccccaggaccccgcacccccatcctcgagcacaagctgagctctgctcctcacctgtgatgctggagccctcgccagagcaaccgaacccggatcctctacgctaatagctcccaagccccagctcacctagactctgtccccggttcaaaccctagcccctcctcgaccaggtcagagtgcccgacccccacttccacctcaagcctctctcagcccctacctggggtggaccaagcacaggtcagccccctccccttggcgtcgggtcctactcgagcgccccgccccacatccaccaagagaggctgagctcagcagagtcgtcccctcccccgccgccgcccctcacccaccccgactggaccgagttgcgctgcgggccggactggatctgctcgctcccgccgggaggccgccgggctgcgggtgcagatgcgggagcggcgcggtgggcgggccgcgggtgcgggagcgcggcggggtgcggcagcgccggtacccgagggagcccgcaagacgcgccccgcccgcccaccaggctccctctccgcccccgccccgagccccgcccgcccaccaggcccaccccgccccgcggaggggccgcagcccggccattggccagccggggcgccggccacctcacgccccacgccccacgccctcctcttctgcctcagcgaccagctctaccg

SEQ ID NO: 120321 - DNA, 893 bp, Homo sapiens
  chr11:12131733-12132626
  hyper
caggacgtacacagtcggtactagaagtgccatgctgctcccccatgtccaaaaggggatgccgtgtcttgctttccagccgcctagaccaagaagcgtgaggcccaggccctcgccgctcccttgatacccgcttaccaacaccgggggtttcatctcgcagcgccaccacgccccactcccagcagccctcccctggtctccgccctgtgcgggtcagggtgggagcgcccggccactccctgcgttctgggccgggctacagcccacgtgcgccggcggcagcggcggtgacagccggccccacgggggcggggcgggctccgtgctgtcctgtcattggccgcgccgctgtcgggggcgttccccagcccggtccaccgcgcggcgcagaaccgcaggcgctcggctggctaagcctgcgccgggccgcctcgctcgctcccagctctgtcagtggcccgcggggcccgatcgctgcgcccgcggccagggccgaggcaggcctgacccggggccgggcagcccgcgcgactttcggtaaggcgggggcggcgctggcctcagggtggggagggcgggcgggcgcgggtggggaccgtgccagcctcggctggactctgcgccgtgtccaacgcccgggagggtcaggtgcggccgcagcatcccccgcctcaaacccacccggcggggcgcacagtgagcaggtggcgctgcgacgaagcccggggcggccctggccggcctctgaaccaattagaacgcaataaaagcctcccaccggcacgccgaactacctcttactccgctccgcaacacccaaaccctgcagttccaagcctagaaaatcgcaagcgccaaaacggggtgggagtgacgcgcctgcagtgctg

SEQ ID NO: 120322 - DNA, 30 bp, Homo sapiens; identical to SEQ ID NO: 7924
  chr11:12260402-12260432
  hyper

SEQ ID NO: 120323 - DNA, 878 bp, Homo sapiens
  chr11:12398998-12399876
  hyper
cagggcagagggcggcgcgagggagggagcgagggagggagcgagggaagggaaaggcgagcgtgagctgcctcaaatgcttggaataattccgcttccgtttggaaagccgcagcctcagtcccgccgccgcccgctgcgtccgcccagcgccagctccgcgtcccgaccggcccgcggcagcctgcgccgcgccatggccacctccccgcagaagtcgccttctgtccccaagtctcccactcccaagtcgcccccgtcccgcaagaaagatgattccttcttggggaaactcggagggaccctggcccggaggaagaaagccaaggagggtgagtgcggccaggccggccgggcgggcggtaggagccgggggtgccgtaggggccgaggggccggggcactgggaccgggcgggagcgcgccgcgggtgcccggcgcggtggggcgcgcggcgatgcgtgcgcgcgcttcccgggtacgtcgggcaggagcgacgcgcaccccacactgagcccggggctcgcgggccatcgaggccaccccgcccgctcgcggtcgcccgggcgctgccctcctgggccggggaccaggccaacgcccccgccgggccgtgggcgggcgccgcttggcggccggaggcggcgggaccggagcccaggcggggccccagcccgcagacagtgcgatccagtaggccctgccccgccctctgcgcccgaaggctggcatttcccaagtttccgctgcagctttcctgggcgccgtcgctcttactcgttgccttcattggtccttaaaatcaggtcgtttcctggacctgctgacgtcctctggcagcggcgtcgtggctttggcctcttcgggatcttttgtcc

SEQ ID NO: 120324 - DNA, 96 bp, Homo sapiens; identical to SEQ ID NO: 7926
  chr11:12695399-12695495
  hyper

SEQ ID NO: 120325 - DNA, 1423 bp, Homo sapiens; identical to SEQ ID NO: 48167
  chr11:12695572-12696995
  hyper

SEQ ID NO: 120326 - DNA, 276 bp, Homo sapiens
  chr11:12715487-12715763
  hyper
gcctgcctttgtaagcggtaggaagatgtatgtctgaggaacaaaggcacttgagtcaatttactgaaactgtttataatttgtggtcttgatctgaatgtcaggctgcgttggcacaccctgctctgctgtgcggcccggcacaactcagccaggaaaggcggcaggctgagtccggggaagtgccccagcaaacacatggcaaatgtttcaaggggctttagtgttccagtgaatcctaaaactaggggacatgcaagccgacactaggcagaa

SEQ ID NO: 120327 - DNA, 341 bp, Homo sapiens
  chr11:12849684-12850025
  hyper
ccagcttgactctggcgggctgagggtgctgccgtgccactgctgcaggatggagctctcttcctggtggagacttgattcacaaggacgctaattattcattcttcctccgtgcagcccgctgaaacaattgctgtgcttgttcggtgcacagtgtggcgtcggacagtcaggcctttttatgtaactgatggcgctgtatgttcatattgttctttatgtacttattttatagcttatgcagcagacattcgagtcaattagcttcttgtcttgcaaactgggcactgctgttctagaaccaagttagaagggtgtgttgagggcgacccgggcagacc

SEQ ID NO: 120328 - DNA, 569 bp, Homo sapiens; identical to SEQ ID NO: 48169
  chr11:13030349-13030918
  hyper

SEQ ID NO: 120329 - DNA, 770 bp, Homo sapiens; identical to SEQ ID NO: 7929
  chr11:13031244-13032014
  hyper

SEQ ID NO: 120330 - DNA, 644 bp, Homo sapiens
  chr11:13032093-13032737
  hyper
ggcgctgcgacgacttgctgcggcttcaggagcaacgggttcagcaggaggagttgctggagcgcctttcagccgagattcaggaggaactcaaccagaggtggatgcgacggcgccaggaggagctggcggcgcgggaggagcccctggagcccgacggtggccccgacggcgagctgctgctggagcaggaacgggtcaggacgcagctcagtaccagcctttacattgggctgcggctcaacacggacctagaggccgtcaagtcggacttggattacagccagcagcaatgggacagcaagaagcgcgagctacagggccttctgcaaactttgcacactttggagctgacggtggcaccggatggggctcctggctctggcagtccctcgcgggaacctgggcctcaagcctgcgccgacatgtgggtggaccaggcccgtggactggccaagagcggtcctggcaacgacgaagactcggatacgggactgagctctatgcatagccaagactcggactccttgcccatgtgcgaatcccttgtgtaggggtggggggcggggggcggggggcgggaacagggggattcttttttcttgcagaatgcagtgggccagccggctcgcggacttgaaacc

SEQ ID NO: 120331 - DNA, 77 bp, Homo sapiens
  chr11:13229520-13229597
  hyper
tattcctctctctcccgacttccctctctccccgagttaaggacttcctgctctagtgtccccgcaacgccatccac

SEQ ID NO: 120332 - DNA, 30 bp, Homo sapiens
  chr11:13229828-13229858
  hyper
caatttccattgtgtcgcctttgaaaaaca

SEQ ID NO: 120333 - DNA, 305 bp, Homo sapiens; identical to SEQ ID NO: 48172
  chr11:13298518-13298823
  hyper

SEQ ID NO: 120334 - DNA, 30 bp, Homo sapiens
  chr11:13299395-13299425
  hyper
cgcgccggactcaccgccgccgccgccgcg

SEQ ID NO: 120335 - DNA, 474 bp, Homo sapiens
  chr11:13300227-13300701
  hyper
gtctgcgggcaggtgcgcgtcggcctggggatgtcgcccggagcccgggtgcgggccggccttggagtcccagagctccgcggagggcgcagcgagcctggctccagctccgggtttgacagatgtcagggaagaaaaggttcccgctcggctattgccgggcgttgacatcccagagagcttcccgtttgcttggaagaagacgaggaaggtagaggtgaacgtcgaccttgtggggcgcatgttagcctccccgaggggtcgcgagagccggcagcggggtgagctcaggtgcccgccggcaggagctggggagggaaggggagtgctggacaccggcgcctgctgtcaagttctcgccggccggtgagagacccgctgccgccgcgcaccccgcacctcctgacccctctcccctctccgcctcggccccttcccggtcacctagcgttgttttggcgctttggcgcttgc

SEQ ID NO: 120336 - DNA, 30 bp, Homo sapiens
  chr11:13357021-13357051
  hyper
tcacagtgacccagacgaggcttttactgg

SEQ ID NO: 120337 - DNA, 131 bp, Homo sapiens
  chr11:13484748-13484879
  hyper
ggaagccactgaggcggctgcgcgtagcggagccgccccggcaggttgcaggccggctcctcagcctcttaccgcgagagctcacaatgcgaagaggcgaggccagcagcgttctcgcgagaacggtgctc

SEQ ID NO: 120338 - DNA, 81 bp, Homo sapiens
  chr11:13485188-13485269
  hyper
atcgcttctgccggcgtggacctgatgagagtcggtcgtcgtgagggacaccctctgttccctaacgtcccccgctgctta

SEQ ID NO: 120339 - DNA, 1268 bp, Homo sapiens
  chr11:13689449-13690717
  hyper
ttccataggttccctcgtgccccacccctcagaagtaaacgttattctaactcctatcactaccggtaagttttgtagggaattattttggaggaagtggaaggtggaatgaatgggcccacagtcccctgggactgggcgagacccgtggaggctccaggggtccgtagagctcttcgctctcaccgacccgggccacacccgccaagctggtagttctccgaacggatccctcacgcccagcaatggccggagggcccccgggccccaccataatagcgctaagcacgccacaatggcagccccgctgtctcccgcgcgggcctcgctgcgtgctcccaaccttgggagttggcgcccctcccgcgcgacggacagccgggcgtggccctgggcgcgacccgacaggacgccagcagccggcgggggcgctccaggactcgagatgtggggcgcgggcccattggctgagcattcccccgcgagcctcccggccgcagggcccacctcccggccctctctccgcgcccccattggccgttcgcgttccgcgggcgtccgctcccgccccactcccgcccggagggaaaccgggttgggggtgagaggctaaagcagggaggaggatgactggtcctgcggataagggtgtgcgcgagagccaatcaaaagcggatgtcgaaaagaggcgccgctccagccagtcacgtcgcgaggtgcggtcggggccggctgacgcgactgcgggcctcagccaatgggcgtgccactgcccgtccgctcttcagcagccggtcgcgggcggtggaaaagcgagtgaagagagcgcgacggcggcggcggcggcggcgcagctattgctggacggccagtgggagagcgaggcctgagcctctgcgtctaggtgagaagggggtgcgccagcgggagcggccgggctgcgggctcctcctcgcctggctcgggaagtggttgcgggagctcgggctgcaggcctggccgaggcgggggcgccgaccagccgtcccgcccccgcccccgcccgggtacgcccagaagtgagggcgcccgcctcaccccgggtggtctctgcccctctttgccccgccgccgcccttcacagggccgggaccgcgtgggggacgtacggtggggcctggtttgcagccgcggagcccggggagccgcctggggtgggaggccgctagaggtggcgaaggtggggcggggtggttagccgagcagcgggctccgcgtgctcgcgggag

SEQ ID NO: 120340 - DNA, 30 bp, Homo sapiens; identical to SEQ ID NO: 7935
  chr11:14086442-14086472
  hyper

SEQ ID NO: 120341 - DNA, 203 bp, Homo sapiens
  chr11:14521220-14521423
  hyper
aaagccagttcttccgactctgcccgacccaccacgcctctgggactgggggcttgtggcccactaccaggctccgaggggcagtggtttggtgcagccgcggatccgtctactgcggctccgtctactccggctatgaaccgcagcagcggcggcggcggctccagagtccttggctgacgtggaagggggtggggtaacga

SEQ ID NO: 120342 - DNA, 170 bp, Homo sapiens
  chr11:14521484-14521654
  hyper
cgcttgcgcgctgcaagtatatcctattttcttcctcttctcttgtccagggtttgattaggccgcagagcaatgaaaccacgtattttctagttttccctgcaagccaagctctgagttaagcactatgctaatttaaacgctaactggaaatcgttccttcttcagga

SEQ ID NO: 120343 - DNA, 397 bp, Homo sapiens
  chr11:14541532-14541929
  hyper
gagctattctggaccgctcagaatctactccactgaaggaacctgaggggcgaactcatctagctgaccgaggaggaagtgtcggaggctccccgggaagcgaaagcggtggaaaggccgcactggctaccgataacccctagcccggccaggccggagatgctgaatcactgccggagcccggccgtctgccgaggctctcatacctcgtggcaccgggcgacgctaaggatgacaggagaggtggctcgtcatcccccagtcaccagagctctgccctaaaccttccagagatcgggattcaacgtaccatggtggcggcgcgggcctggttgcggcctccagcaaaactgagaatcaaggaggtgctgccgaaagtatcgctcagcgatctaca

SEQ ID NO: 120344 - DNA, 138 bp, Homo sapiens; identical to SEQ ID NO: 48178
  chr11:14542170-14542308
  hyper

SEQ ID NO: 120345 - DNA, 853 bp, Homo sapiens
  chr11:14665095-14665948
  hyper
tcttcggactgccgccgccgcgctttcctcggcctgggcacgctgggtcggcgtggtcccggctcgcgtccctgttgggcggccgcggcgcgggtggcggcgggacaagtcgtgagcgcgcgctgggcgcgcgcccggccggggcagtcgcgggggaggagcgcccgcccgccgctcgcgcgcccaacggaccaggctggggccgtgaggtaactgttgcagccagcggaggtgggaggcgacactgagtctccagtcccgagaggtgcccgagggaaaaggaggcggcagctaaactggtcctggagagaagccccttccgcccctctcctcagccagcatgtcccggactccgccgctcctcagtccgcgcggtggggaccccgggccgtggcggccggcgcagccctgacgggttgcgaaccagggggcgccccgaacgcgggggttggggtctgggagcgcgagcggccgctacggtacgagcggggtgtgctgagtcccgtggccacccccggccccagccatgaggagggacgagcgagacgccaaagccatgcggtccctgcagccgccggatggggccggctcgccccccgagagtctgaggaacggctacgtgaagagctgcgtgagccccttgcggcaggaccctccgcgcggcttcttcttccacctctgccgcttctgcaacgtggagctgcggccgccgccggcctctccccagcagccgcggcgctgctcccccttctgccgggcgcgcctctcgctgggcgccctggctgcctttgtcctcgccctgctgctgggcgcggaacccgagagctgggctgccggggccgcctggctgcgg

SEQ ID NO: 120346 - DNA, 859 bp, Homo sapiens
  chr11:14665995-14666854
  hyper
cgcctgtgccttcttcttcctcacctgcttcctcacccggaccaagcggggacccggcccgggccggagctgcggctcctggtggctgctggcgctgcccgcctgctgttacctgggggacttcttggtgtggcagtggtggtcttggccttggggggatggcgacgcagggtccgcggccccgcacacgcccccggaggcggcagcgggcaggttgctgctggtgctgagctgcgtagggctgctgctgacgctcgcgcacccgctgcggctccggcactgcgttctggtgctgctcctggccagcttcgtctggtgggtctccttcaccagcctcgggtcgctgccctccgccctcaggccgctgctctccggcctggtggggggcgctggctgcctgctggccctggggttggatcacttctttcaaatcagggaagcgcctcttcatcctcgactgtccagtgccgccgaagaaaaagtgcctgtgatccgaccccggaggaggtccagctgcgtgtcgttaggagaaactgcagccagttactatggcagttgcaaaatattcaggagaccgtcgttgccttgtatttccagagaacaggtatgttagctggaaggcgaggtctgggacgcgagcgggttcgggtttaccgctgcagtttccgagttgaattcgcttatttcaaagcatgttaactttcagaatggaaaaagggtgtgttgcggggggggggggggaggaaataatgttttattctggaaaggattcttaaaatacaggaagccttttaaaaatgcagaagcaagtagcttttgtcattgaatagaaatcaaatagcccgctaatcacatggca

SEQ ID NO: 120347 - DNA, 30 bp, Homo sapiens
  chr11:15096326-15096356
  hyper
cagcctccaggcggcgccattcaggtgaga

SEQ ID NO: 120348 - DNA, 452 bp, Homo sapiens
  chr11:15136037-15136489
  hyper
ttgtttcagctccaagggaaacgatcgcggcacattcccttcccctctccagatgttggcatgcggggcaccttgtgggcgaccccgcctggacggcttcgcggctcccgggcgatcaccctggtgcctgccgcctggcccgggggagcccggtctctaattaggcctgaccgcgtccccattccagcgctcctgcagatgggagggagggccatgtttccccccccaggggcaccgaaatagcctcgtagtcccgcggagacagcaggcagccgtggctgacgcgggaccaaggcttggcagggagcgcgctgctgtggaaggtccttgggaggctgcgaccgcctcggagagggcgggcgggggagaacggggcggggggtggggcgggggccaggggcggcctctcgggctgggccggcagagcggccactttgcgcgcggcctctgga

SEQ ID NO: 120349 - DNA, 252 bp, Homo sapiens; identical to SEQ ID NO: 7939
  chr11:15671675-15671927
  hyper

SEQ ID NO: 120350 - DNA, 1693 bp, Homo sapiens
  chr11:16626017-16627710
  hyper
ggttgctggctgggccgtgcagccagggccaaagcccggccgcaggagtacgcggctagcaccggcgcccgggacgcggacgtcatccgagcgcccattgacagtacagcgggaggtccggagcccagcccagtttgccgcaaggacggcttcgggccacctctagccctaaacttcaagcgcggccctcacagggtctcacacacaaaagcagcccaggacagcccatctcgctaacagcccagccccgccagttcagtcgaagacttatttttagtccccaaataggggctgcattcaatatctgacaattcacacaaaacaacattttcaaacttggtccgcctaagagaccgtaaataaaactcaaaacaagctggcgactgccaccttttatctgctccgaacacaccaattctttttatcttaaagctctgcggagcgccggggaagcagcccggcaccgagctaatctgccctcagcagccccgggccgctcctcccggcatcggagcacaaccccagcagcctttgcacaagccctttcccttctctgcccggccctttaagggagaaggaagaaagcagctcccgcgggagcggccgggctcgggctgggtcccggggcgggtggcagcaccgccccctgccctgggccgagcccgggagcagcggaccgcggccccggctgcagaggaacggcgggtggcggggccccggcagggcgccgagaaggacggagggcgccggctgggctcagggacgcggggcggggaagaaacgtgccggcgaccgtgcgctcggccgggtgactccctggcgaagtccgcgcccggcggggctgaactacccctcgcccccgctcccgccaggtcaggcaccactgccctcgcggccagggtaaagaggaccacagatcagtcagccttggatttcggatgggcttggaattcggtttgtttattcctgaaaagatcattaaaaagtactgtccaaaaacggggggagggggaaggaagggcgacaagcggagggagctggaggcaactcgagcggtgtcccgaaaaagttgcggcggagcggcggtggggtgagggtgggaggagggagcgcaagcgttttctagcgacccgggttttcttcatgaactcctccgagtaaactttatcccggcgagagagcggcggagatcctcgactcccgcccgccctcaaccagtgtcaaccccacaaacagcctaagtttccaaaccgaaatgggggtggggtgggggtagcattaagaagcccagaagctcagcgggtcctcccgacctcccgcacccagagcctgggtgacactgaagcgctccgaacactgtggcgtctcagtcacacagcgaatcaacccaacacttttcaagaaaacaaaatatttgctaggaaacttactttgcatttagtctctattctttgggggatgcggtttaggtcggctcgcaagggaagcccgttttgtccaggttggatattgtctacgtatggatcagcccttggatgagggtttattttaatttatggcttatgcattcttttaaggtcgatttacatgacctccggctacaactaagacagccgaggagggcactccagtcgtcagtcggccaaacccacaattaaaacagccctccccctagtctcggtgtgactagggc

SEQ ID NO: 120351 - DNA, 58 bp, Homo sapiens
  chr11:16627947-16628005
  hyper
gcattaccgcctagcggtcccatctgaaccttcaaagccgacacgcatttgctttcac

SEQ ID NO: 120352 - DNA, 1184 bp, Homo sapiens
  chr11:16628220-16629404
  hyper
agacagatttccggacgaatacttaggatggcgataacagctttctgttgtcaaaggttgcgttgtgtccctgtccctgcccttttgccttaatgtcctacgcacagttatctacggctacaacatgtgttttctcagggtggattttttggaggggaggtgaaggggagaaaaacagacccccgccacgcagatctgtcactccggaacaaggcgcaactctccaagagggggacgcatcctcgggatcagcgcgtccaccagcgagcggcgggcgcccgggcccctttctctccctccactccccctccgcgtcggcccctcggagcgccctcctcccgctcctcctcctcctttcccctccccagccaagtacgcaaacccgccccggcccggcagccgcggctcccggccacccgcgccctctcggggctccgctcgctcggctctcgtccctctgcctgtcctgccccagcccctcggtcccagctcacagaaactaaccctggagtgcccggaagggcaggagcggaagacgccgggggacggcggcccggccctgggctcctgccccctgccccctccggcgccccaacaggtagctcacagcgggccgcgcgccctggctctgcctccctcgctctcgagatcgctcgctccgtcccggttacctgggcgggctccaggatggtaccgcgcgggagggctccttgtgcgctgcgccgcaggagtaaatggcattaaagaaaaagggaaagatacaaataaaaaaaattaaaaggaaggggagtcggtgctaggtcaattgtcacagtccggggagcaagggaacagaaccccccagcgccgcggccggcgtagcccgttaactcaagtctgcgggggtgtcccgccccgggtgggggcagcgcagagcggcagaagtttgccgccggggttccaggaggtgcgcgcggagcggggtgactaggggcttcaccctggaacaagtgaaggcgatggttagtgctgtcaatcttggcaatcagtgtgagcggccatgtcgtaagtattcaaagcatttcccgtcgtgcaacatcagaaagtgagtggccagggcattgatctgagcgagggagaggaggctgggctcccctcccagacaacacaggcaagatgagacaagaggcgagggaggcagcgag

SEQ ID NO: 120353 - DNA, 337 bp, Homo sapiens
  chr11:16632513-16632850
  hyper
cgcaagaaccccgggcgctgagctccggggaacctgggagggaaggaggggcgagcgggtggggctgacttacctgcccgcagcagtcgctgcctctgtgttgtccgaatgtccctgcgcaccgcaaccagcaaaggcaattcggctttgctaactttggcctcgcacctccagagaagaggcgcgaactcgcaaaaggaaaggcgcgcacggttcctggagagaggtccccctgaacttgggaaggacaaggcaattaattctgctcgagaagttagtatttaaaacacccacgcaaaaatcataacggctattaaaacctcgaattcccgctttg

SEQ ID NO: 120354 - DNA, 104 bp, Homo sapiens
  chr11:16633299-16633403
  hyper
caaggcattgtccctcgactttaagtggacagagaataacattaaatttcatttgaatctgcgtgtcatttctgttaggaagatcacagcggtagcgacagtag

SEQ ID NO: 120355 - DNA, 443 bp, Homo sapiens; identical to SEQ ID NO: 48189
  chr11:16634102-16634545
  hyper

SEQ ID NO: 120356 - DNA, 492 bp, Homo sapiens
  chr11:16635527-16636019
  hyper
tgccctcagagactcgggctgacaggagtgagagctaaaacttccaactagctgaaaccaatagccgggaatcgagcgaaggcgaactctcccagcaaagtataaagcttcgggccaaagagtctgcagctccaagtcaggggctgcggctccgaaactccaaacactaactcccagggcagtggcagagggtgggggcagcttcgaagaggcataccaactgctccggtcctggccgaagaccgagctcccttctgcggtgacctcggctcagagctgactccgtactccctgggactcatctcccgcttcctctccaccttcggaacagtagacaaagggactcagggacgcggccagacccaaggtcacaaacggaggtctccgagacgagaattgcgtgcaagagaaggacgttcaggcagcccggccgcctgctgcgagagctgaacatttcccagctctatagtcgcccatttctcaggaaatcag

SEQ ID NO: 120357 - DNA, 113 bp, Homo sapiens
  chr11:16759950-16760063
  hyper
aagctctcggccaacgctcaccgccatacacatccgcgggaacgcttcctccaccagccgaaggcggggcctctgagggcactcccgccacacagcgcgaattgagcctcggg

SEQ ID NO: 120358 - DNA, 30 bp, Homo sapiens
  chr11:16760475-16760505
  hyper
gaggtggcctgcagcgggagagcccaggga

SEQ ID NO: 120359 - DNA, 31 bp, Homo sapiens; identical to SEQ ID NO: 48192
  chr11:16760933-16760964
  hyper

SEQ ID NO: 120360 - DNA, 30 bp, Homo sapiens
  chr11:16947047-16947077
  hyper
cgaaagttacagcgcgcacacacacctgca

SEQ ID NO: 120361 - DNA, 1615 bp, Homo sapiens
  chr11:17034984-17036599
  hyper
ccctccccgcaggcccgcgcagtggatggaggccgggggcgaggttccgactctccaagaccatcccagagcctgcggcgggagagggggcgtcctcctaagcgagattcccctagtctctccctctccccactccaaccccgcaggcccacaccaggacagaacttctcgttctactcctcccacccgagcccatccaggtcccggcactcgcctctcccggcggggcgcagccccagaccctagaggggaggcgtgcccagcccgcacaccagcacccgaatccagccggattgcaaggtccagggcgcagagtctgcggcctcttcccccccggcccaggtccccagcgtaggtgcggcccccaccgccttcctctcggaggccgccaaacaacttgggcacacaaaacgttgagtgtggccgcggcgcagcgcgcgccaacgagcccgggccggcgggagcagaggaagggcggggcgcccggcgggaacggggagggaccccccccccgcggcacaggtgcgagcgcggcggccccactcactcactcgatgaagtagctggcgccctcctccgtgaagccctcctcccagccgcggggcaggtctgcggaaacgccagaaaagtcgggtcaaacttgggccgccgctgcgcgcgccccccacccgccggcccggcgcccacctgagcggatcatgtggcccgagttgacgggctccccggtgcgcggatgcagccaggtcgtgcagcggagctggtcactgcgggcagagaggtgcacctgttagcgccgccacagcccgccgggtgcccgcccggcccccgcccccgcgcccccacccgcgtccccgcgtccccgggtcctcgcgccgcacttgatgaagaagacgcggccatcccggcacaccccgtaggaccaatgctcaggtaaagtgtcccgcccgaccgtcgccgccgccatgttcgccgagcgcggagccgccgcggggtgggggggagggggcgggggcgcgggcaggggcggaggcgggggcggtggcgggggctcggcctgcgcgtggcccggcggcgccgcgaggcgctccatccaggcgcgggctcctgagggagcgaccgcccggccgggtcctggcgcccggagttcgcagccgctccggccaacccagcgcagtgcccgcggcctttgtccccgagccttccccgcccccagcctgctggcaccggcgctcccctttgcccccgaggccgggagacccgggcggcgcggggggccgctggcgggggccgctggcgggcgcgcctgggcagcttcggggcgcgcggttggacccgaccaactccgaaaacggcgagcgcccgaacgctcagtaaaccccagccgacccgcaccacagaacttcccgacccgggaactccgcttgtgtgtgaaccaagttaacactcaggttcctgccatattcccagcctccttctcttcccctgtaaggttaatcgagtccacacgggattgttgtgtagattaaatgaagtaacaatcgcataaagtgcttaaccggaccatggcatgtagtaggtgctctatcaacggcaggccgagcgcgatttcattttc

SEQ ID NO: 120362 - DNA, 30 bp, Homo sapiens
  chr11:17099443-17099473
  hyper
ctgacgccagcttgcgtcgaaattccctgt

SEQ ID NO: 120363 - DNA, 30 bp, Homo sapiens; identical to SEQ ID NO: 48194
  chr11:17099673-17099703
  hyper

SEQ ID NO: 120364 - DNA, 405 bp, Homo sapiens
  chr11:17228725-17229130
  hyper
tatttatgattcctccgtcactcaggaagagttaagctagtattttttaatctgaccgctctctcagaaggatgatgcgctaaatacacactgaaagaatagtgttcccaaagcaagtggattcgcggctaaaggcaacgcggtgggagtggggggtccgggaagaagaaaaagtatccttggcccccagagccagagatgggacaggaggtgaaagaaggggccgtcactgagaagtacaacacacacactcgccagaactaacaatctgccaagaaaataggaccggccactgcggctccagcccggtcccgcgggacaaggcgggggaggggggccggcggccggggggcctgccctccttctgtgggacaaaactaactccctggcgcacctccgctcccg

SEQ ID NO: 120365 - DNA, 30 bp, Homo sapiens; identical to SEQ ID NO: 7946
  chr11:17297717-17297747
  hyper

SEQ ID NO: 120366 - DNA, 30 bp, Homo sapiens
  chr11:17298522-17298552
  hyper
gagggggctcccagcgcgagccggaggcgc

SEQ ID NO: 120367 - DNA, 572 bp, Homo sapiens; identical to SEQ ID NO: 7947
  chr11:17372998-17373570
  hyper

SEQ ID NO: 120368 - DNA, 116 bp, Homo sapiens; identical to SEQ ID NO: 7948
  chr11:17373642-17373758
  hyper

SEQ ID NO: 120369 - DNA, 220 bp, Homo sapiens; identical to SEQ ID NO: 48199
  chr11:17373997-17374217
  hyper

SEQ ID NO: 120370 - DNA, 30 bp, Homo sapiens
  chr11:17375366-17375396
  hyper
ctggactttggcaccggaagagactgtgaa

SEQ ID NO: 120371 - DNA, 229 bp, Homo sapiens; identical to SEQ ID NO: 48200
  chr11:17411056-17411285
  hyper

SEQ ID NO: 120372 - DNA, 59 bp, Homo sapiens
  chr11:17497461-17497520
  hyper
cacgcacgattgtcccggccgtggcgcccaactttgcaagcaagggcgccggggtcgct

SEQ ID NO: 120373 - DNA, 277 bp, Homo sapiens
  chr11:17497545-17497822
  hyper
cgcagagcctgagaagttgcgctctggagacacatgcccgggtggggtggcgggggaagggaatccaagtccctagctctcgcctctcctcgcccagggcgcgggcctgggactgtcagagatcacggaccactgcgcggctcagcccggtgaaagcataggggttagctgggcctccatcccagactccaaagcacaggcttccctcttccctaggcccagctgcggctgacagggaggctgccttgcgggaggggtgacccggctccctaagctg

SEQ ID NO: 120374 - DNA, 669 bp, Homo sapiens
  chr11:17498077-17498746
  hyper
cgggccggaaggggacgccgagcggtgcggcgcgcagcgcctcctcctccctccctgctctcccgtcccctcctccgcggctcgctgcgcgcactcaccaatgaagaggatggggaaggtgatgaagagtaggaagacgtgcggcaccacgttgagcgcgtccacaaagcagccgttgttgaggaccccctggtccacccggtaggcggccgagtggttctcgctgccgcagaaggccaggggcatggcggcgcgggcgcgggctgggctcgggctcagctggctccgctggctccgcgcgcctgccgcgcctctgtcccttgcagctccgccgcccggcccggccgtcaggcccccgccccccgggccccgcccagccccgctggcctccccctccctcaccccgccctgctccaccacctgcggggccggggggcggcgaggaacccgaccggccctgctacgcttgcgcccaccttccagatgtggaggcgcgtgctcccagatgttgccggggtggcttcgtgagtgccctgatgcacgcgtgcgctgggggagaggggaaaggcaggctaagatggggagtggggtgtgggcacactggagtctgggtgggaaaggagggtggggcgtgcagaagaggagagaagggcccgcaaggcctggagt

SEQ ID NO: 120375 - DNA, 30 bp, Homo sapiens; identical to SEQ ID NO: 48203
  chr11:17717614-17717644
  hyper

SEQ ID NO: 120376 - DNA, 379 bp, Homo sapiens; identical to SEQ ID NO: 48204
  chr11:17740291-17740670
  hyper

SEQ ID NO: 120377 - DNA, 36 bp, Homo sapiens; identical to SEQ ID NO: 48205
  chr11:17740872-17740908
  hyper

SEQ ID NO: 120378 - DNA, 337 bp, Homo sapiens
  chr11:17740930-17741267
  hyper
cgccagtgtggaggggcgggctggctggccagtctgcgggcccctgcggccaccccggggacccccccaagccccgccccgcagtgttcctattggcctcggactccccctcccccagctgcccgcctgggctccggggcgtttaggctactacggataaatagcccagggcgcctggcgagaagctaggggtgaggaagccctggggcgctgccgccgctttccttaaccacaaatcaggccggacaggagagggaggggtgggggacagtgggtgggcattcagactgccagcactttgctatctacagccggggctcccgagcggcagaaagtt

SEQ ID NO: 120379 - DNA, 361 bp, Homo sapiens
  chr11:17741528-17741889
  hyper
cggcggtgcacccggccccgggcgcacgtgaggacgagcatgtgcgcgcgcccagcgggcaccaccaggcgggccgctgcctactgtgggcctgcaaggcgtgcaagcgcaagaccaccaacgccgaccgccgcaaggccgccaccatgcgcgagcggcgccgcctgagcaaagtaaatgaggcctttgagacactcaagcgctgcacgtcgagcaatccaaaccagcggttgcccaaggtggagatcctgcgcaacgccatccgctatatcgagggcctgcaggctctgctgcgcgaccaggacgccgcgccccctggcgccgcagccgccttctatgcgccgggcccgctgcccccggg

SEQ ID NO: 120380 - DNA, 531 bp, Homo sapiens
  chr11:17741952-17742483
  hyper
cggcatggtaaggccgggaccccaggaagtgaggaagttagggcggcgctcgggatatcagggacgcgtttccgagggcggggagctggccttgcgggaggtttgggccaggatccttcccgagagagaggacccccttgtcctgggcagctgtcactggggtagcctgttttggaagtgtgcgggcaagcgttcgagctgccccattgggggcgctattagaacactgcagcgcgaacgtgaagatctttttctctacttatccctacttccaaaatgtaaatttgcgccccttggtgactgtccgcccttggtttggccctgcatgttgcagacctcatctcctacccacccgtaattacccccccaaccaggacaggtctgggcccggaactagagccttaggctagagttagggagggggcggctacaggaattggtgttcgggcctcgagccgtcccgcgggcctgactcagtcgcccttgctgtttgcagatggactacagcggccccccgagcggcgcccggcg

SEQ ID NO: 120381 - DNA, 539 bp, Homo sapiens
  chr11:17742745-17743284
  hyper
gtgggaggcttgtcgcggccccacccctgcttactaaccgagccctccccgcgcagaacccaggcccgggaagagtgcggcggtgtcgagcctagactgcctgtccagcatcgtggagcgcatctccaccgagagccctgcggcgcccgccctcctgctggcggacgtgccttctgagtcgcctccgcgcaggcaagaggctgccgcccccagcgagggagagagcagcggcgaccccacccagtcaccggacgccgccccgcagtgccctgcgggtgcgaaccccaacccgatataccaggtgctctgaggggatggtggccgcccacccgcccgagggatggtgcccctagggtccctcgcgcccaaaagattgaacttaaatgcccccctcccaacagcgctttaaaagcgacctctcttgaggtaggagaggcgggagaactgaagtttccgcccccgccccacagggcaaggacacagcgcggttttttccacgcagcacccttctcggagacccattgcgatggccgctccgt

SEQ ID NO: 120382 - DNA, 905 bp, Homo sapiens
  chr11:17756066-17756971
  hyper
ggcccagacgtctctcggagcccccgcccctggagtggcgttccccgagggcggaccgtgggcgggtcccccgggagcagcaggagccgcgcggggcgggcgcccccagcgccgaggttgagggaggccgggctcggtgcggggctgggaggggggcgcggaatcagggctttttaggacccagcgcggcgccttcctccgggggcgagtgcggctgcgcgcgccgtgtgcccgtgtccggagagcggcgggctggacgcggaccgcgcgaacgagcaggcgacgggcgagcagcaagcggagcagcagcccgggcggcagcagcgtcgcggcggcggcggcagcggccgctccgcgcctcgcctcaccggcctcgctggcctcacctcgccgcgcccggacccgccacccccgcctccccgcccgacctccgcagcccccgtctcggccggcagcgcccaccgcctgcccgaagcgaggagcggagtgcggggcgcagaggcaccggagccagtgcccgccggccccgcaaatcaaacccagccaggagaacccccgcctggccccgtgcagctccgcgaccgccgggagctgtcccttcagcaccgccgcgggagcccaagtccgagcgcagcccagcggaaccccagctcgagcccgggctcacggagagcagcgctcggcgttagccgcacgagcaacaccccgggtgcccctgcccagggggcccgccatctcctccaggaggcggggagaaggaacgaggagggcgggcgggcaggcgggcccgccgccggggggagcaggcagccaagcaaggagagagggagggggccggagcccgccctgcgtcccgagctgcagcccggccacgcagggaggaaggcaggcggcatccatctccc

SEQ ID NO: 120383 - DNA, 151 bp, Homo sapiens; identical to SEQ ID NO: 48212
  chr11:17756993-17757144
  hyper

SEQ ID NO: 120384 - DNA, 30 bp, Homo sapiens
  chr11:17757875-17757905
  hyper
ccgccagcaccgcgacgccgaggaggctct

SEQ ID NO: 120385 - DNA, 156 bp, Homo sapiens; identical to SEQ ID NO: 48213
  chr11:18034649-18034805
  hyper

SEQ ID NO: 120386 - DNA, 114 bp, Homo sapiens; identical to SEQ ID NO: 48214
  chr11:18034821-18034935
  hyper

SEQ ID NO: 120387 - DNA, 30 bp, Homo sapiens
  chr11:18127681-18127711
  hyper
gactccccctacagcgccatctgctgttcg

SEQ ID NO: 120388 - DNA, 108 bp, Homo sapiens
  chr11:18343665-18343773
  hyper
gccggggaactcaccgcgcactaagagcggaacgtgaacttcagtctcccctcgcgttcctccccttccttgctgacgtcatccaggagagccgcagactggaaacaa

SEQ ID NO: 120389 - DNA, 30 bp, Homo sapiens
  chr11:18344084-18344114
  hyper
cgccttgctacttccggtcacgtgccctca

SEQ ID NO: 120390 - DNA, 1229 bp, Homo sapiens
  chr11:18415859-18417088
  hyper
caggctcatggctccgaccccggcttctgtggttggagggcagcaccttacttagactcccagcgcacgtggagcagtctgccggtcggttgtctggctgcgcgcgccacccgggcctctccagtgccccgcctggctcggcatccacccccagcccgactcacacgtgggttcccgcacgtccgccggccccccccgctgacgtcagcatagctgttccacttaaggcccctcccgcgcccagctcagagtgctgcagccgctgccgccgattccggatctcattgccacgcgcccccgacgaccgcccgacgtgcattcccggtacggtagggccctgcgcgcacggcgccagagggatgggcgggtagagccaactgcctctggttctgctggcctccgctgctcgcgaagggattcctgctcccgggaggtgtaggagccgctttccagaagcacagcccagagacgtctgggcggcggcccacacaacgcatgtgttcggagctcgccgcgctctgcttttgctctaagcgggaaccatggcttctggccacgctggggaaccgaggaggtggccgcacccaagcaggggtcgaaagcccgggtggatgcggaacaaggatatgataggccttaagggtgggggatacctctgggctcgaaatcggcgggcggtgcaaaactcgaggtccagttctcggagcccatagagccaaaaaagcctcagcttgtccggggcgggttcttgaaagacggaaagcggctgagtaccacgcggcttgcatttttctcttgggacgctcgagaggtgggctccgtgagggcagctgctgcctgcagattatagggagccctttgcgcatttattaagaagctactggtgtatctcgggctgcgctaggcacggcgcatgcaaagatgaagcaggcagcatcccagcccttccgcacctcagacggtcagttgagtaggatccgccggtaccaactcctccttttaacaaatagggagaccgaaagctaggagacagtcagggatctctaagttcccagtgagtaggaggcagaggtgaggtgtagaactcgtttttgcatgtctctcgcctctagacgcacccttccctcatcccatgccctcccacctccgcccctacattaaaggtagcattggatcccggggccgttcagtgaagctagcaggtgtccgcaggaactcccttccccctg

SEQ ID NO: 120391 - DNA, 30 bp, Homo sapiens
  chr11:18547878-18547908
  hyper
ggccacactctctgcgggtcggcaaaagaa

SEQ ID NO: 120392 - DNA, 36 bp, Homo sapiens
  chr11:18548287-18548323
  hyper
cgcgccctgggaggcgagcgcgtcgcagcctcacct

SEQ ID NO: 120393 - DNA, 241 bp, Homo sapiens
  chr11:18548580-18548821
  hyper
ggttccaaccaacccgcccctcgagtgccggaatcagcaggacgaatcgggtcccaaagatgtgggcaagactgttccgagggtcgaaactctggttcaggataagattagcaggtatttcacagagtcgacttaaggaagctagtgccggagagggaagaagtacgaagggcttgccagtgagccttaatgactgattgatcaagtgggagggcactgcactggcggtcagagaactgtt

SEQ ID NO: 120394 - DNA, 56 bp, Homo sapiens
  chr11:18610407-18610463
  hyper
gagtgggcaagtgacgagggcacggccagaaacgcattggcgtcaaggaaaccacg

SEQ ID NO: 120395 - DNA, 205 bp, Homo sapiens; identical to SEQ ID NO: 48220
  chr11:18610539-18610744
  hyper

SEQ ID NO: 120396 - DNA, 30 bp, Homo sapiens
  chr11:18655797-18655827
  hyper
agtccatgttgggccgaggcgggagagact

SEQ ID NO: 120397 - DNA, 33 bp, Homo sapiens
  chr11:18656063-18656096
  hyper
tacgtggctgctggcgtcgacccgaggggcagg

SEQ ID NO: 120398 - DNA, 30 bp, Homo sapiens
  chr11:18720142-18720172
  hyper
gcctggggggtatccgccttctgacccctg

SEQ ID NO: 120399 - DNA, 31 bp, Homo sapiens; identical to SEQ ID NO: 7960
  chr11:18720185-18720216
  hyper

SEQ ID NO: 120400 - DNA, 30 bp, Homo sapiens
  chr11:18720714-18720744
  hyper
ctccatgtatttggcgcgggtcggcggggt

SEQ ID NO: 120401 - DNA, 1083 bp, Homo sapiens; identical to SEQ ID NO: 48222
  chr11:18742609-18743692
  hyper

SEQ ID NO: 120402 - DNA, 928 bp, Homo sapiens; identical to SEQ ID NO: 7962
  chr11:18812614-18813542
  hyper

SEQ ID NO: 120403 - DNA, 643 bp, Homo sapiens
  chr11:18813609-18814252
  hyper
cggaggagtgggagcagcgcatccatttcattcatgattttttctcctcttgggagccccgggtcgggccgcgcggctacggcaactgccagagggaccccggcagggccgtgcgcgctgaacctgggacgggacagacaggcagacagaaggagtaggggccagcgagacaaagggggcagagttgggggagggagtcggctcattgggggcatgccgtggcgctccccgcatgttgccaacacctgcgcaagtggagcggccccatactagggcgcatgcaataccaggtgccgaggactcgttctaggacgctgaggaggcgtcctttttcccagttctccctgttcagcctctggggagctagagcgagtggacagcccctccctccactgagtcttgccctcctgacgtgcggcgcggggcacgcacctgttttggttttctcgtgggcaccaggggcccggacgagcagggagctgcccatgtgccccacaatcctgccacaatcttccgtattctccaggctgctagtgcgctggccagaggtttccggcattccatccccatgggggcttgaggctgtgggctgcacacagggcagggatcctaaactccattttttacacggggaatcagaggc

SEQ ID NO: 120404 - DNA, 137 bp, Homo sapiens; identical to SEQ ID NO: 7964
  chr11:19093002-19093139
  hyper

SEQ ID NO: 120405 - DNA, 30 bp, Homo sapiens; identical to SEQ ID NO: 48226
  chr11:19138660-19138690
  hyper

SEQ ID NO: 120406 - DNA, 30 bp, Homo sapiens
  chr11:19261864-19261894
  hyper
gaaacaaagcctaacgaaaaatgacaaact

SEQ ID NO: 120407 - DNA, 30 bp, Homo sapiens; identical to SEQ ID NO: 48227
  chr11:19262109-19262139
  hyper

SEQ ID NO: 120408 - DNA, 30 bp, Homo sapiens; identical to SEQ ID NO: 48228
  chr11:19262532-19262562
  hyper

SEQ ID NO: 120409 - DNA, 637 bp, Homo sapiens; identical to SEQ ID NO: 7965
  chr11:19263418-19264055
  hyper

SEQ ID NO: 120410 - DNA, 49 bp, Homo sapiens; identical to SEQ ID NO: 7966
  chr11:19264093-19264142
  hyper

SEQ ID NO: 120411 - DNA, 496 bp, Homo sapiens
  chr11:19366638-19367134
  hyper
accctggaaggggaccggggtggcgaggccgccgattggcagcgaggcgccatgtgaactgcactggttggctggcgggagggaggaggaggcggtttcccgggtaacgggagggcaaggagcggctgcagcggcagcggccgcggctgagaagcgcgggccggagtgcagtgcgagaccggctggaggaggcggctccgcgaagccggtgtgggcgcaggtaggaaccccctatgctgcctcccccaggtcgggtctggctggactgcccggcggcgggaccggcctgggaaagtttgcggtgcaactgggtgggcaaggaggagaggacttggggatgctctgtgctgagctccggggtccagagcagggtggggactgccgttggggagagggccggcccctcattgagaggctcgggggccacacctctgctgcgggactctgaccgagggccagggcctctcaagccacccggccgcagcatagataccgg

SEQ ID NO: 120412 - DNA, 99 bp, Homo sapiens; identical to SEQ ID NO: 7968
  chr11:19367267-19367366
  hyper

SEQ ID NO: 120413 - DNA, 130 bp, Homo sapiens
  chr11:19367846-19367976
  hyper
gcctgtctgtccatacgtgtgtatgtgttggtgggggtggtgtaggtggatcggatccgagccaagccgggggcaactaggccaggcctgcggttcccctggctctcgctctcccacgctccggttagct

SEQ ID NO: 120414 - DNA, 2022 bp, Homo sapiens
  chr11:19733694-19735716
  hyper
tggccagagcctgccggggtcatggagcctctcccggcttcttcaggccactctaattacagagtctgtggtaggttgcgtggaggagctgtctcggggcgggaagcttccctgcgtattgtatttgcctataaatacttcaaatagttaagtgaaatgtgcagcctttgaaaactggagaggaagccgttgggaggccccccgcccagccggcctggaagagcaggcagagaaatggctggcgcgctcttaaagcgggagacgagcttcggccctgcccaagccagatgggggcagcgaggctgcgggcgtgactccggaagactcaaaccgttaaggtgaccggagcaatttgaaaaaggaaacaaacttccctcgagccgtgcccgcgtggctctggggcggacggttgcgttcgaaagggcatttttcaaaagaagggtttcaggaacgcaggggtgtgggccccccgggaggcgcgcggccggggcagtgccgcaaagcggccaccagcccgctttgtactcgcggccaagcgcggccccagagtttcggcggcggccagagtttaggccacaccctctttgcagtgagacccgcggccgctgattggcgcaccgtggaccaatgggcgcgccggggcggccccggctgtcagcgcgcgccgcagcagcgccggcagcagcctgtcctcccctgcgctgagccccgcagccagcgcagccttcccgggaagcgcggcggccgctcccgagcgcagccctgcccggcccgccagccgcgcgtcccggcgcccgcgccccacggccacagccttgcctctatctagctcacggagcatgtgcagacccgcaggcgctaaggtgctctcagtccgggggccttctgggcagcggtgactgtcaccccaagagagacctttcgggggctcttgccgcacctctgctgcgtcgcgggtgacactgcggtgctcgcgagcagggtggcagctgcctctcggtggagacgtcttgggacccttgcgcccttcttctctccttccttcgctgctgtctcctttccttccttggctgctcgctctttctctcgccggctcagacccgtagcctccggaacgggactcgtgggtcgccgccgcctctgtctcttccaaaggggcctcctcacttcggagatgcagtgacaagttaatatgggcgtccaagcctctgtttcccaggaggaaatttgcaagaggcggcagcccctgagcgcccagagctcttgaaaggccacccaggagaggtgtgagacccggcggcagcatccgtccaggtgggacccgctgagcgccgtggccagtcccccattcccatcccggcaccccaaaggcgcgctcgcccgattgcttcgagttccccgacctggggattttttttttagccgctggtggtgggcgcctcgtgggctaaggcccggcgcctgctctgctacccgcgctgcctttagcggtcgcccccgccgccgctgccagggacgtgctgggaaagcccaagccccgggagaagatgccggccatcctggtcgcctccaaaatgaagtcgggactgcccaaacccgtgcacagcgccgcgcccatcctgcacgtgcccccggcccgggcgggcccccagccctgctacctgaagttgggaagcaaggtggaggtgagcaagaccacctatcctagccagatccccctgaaatcgcaggtgctgcaggggctgcaggagccagcgggggaggggctcccgctgcggaagagcggctcggtggaaaacgggttcgatacccaggtgagagatgccgtttgccggggtactgttctggaaggatggatgaatagttctttcgggatggtgtgggagaaagggctggatgggagaagggtctaccatgtggccagggaagggaaccattccccttaggccggcaggttgggggatgcgcgaggagagtgggccggccggtgggtgtggcccgggtgccggaggtttgccttaa

SEQ ID NO: 120415 - DNA, 919 bp, Homo sapiens; identical to SEQ ID NO: 48236
  chr11:19798522-19799441
  hyper

SEQ ID NO: 120416 - DNA, 732 bp, Homo sapiens
  chr11:20153467-20154199
  hyper
ccgtgcagcaatactcgcagcgtggagagttccagtcccgaaatggcagcgtcaggcaagctgcttccaatacccctccctccgacaaccagaaacaaatacccagcgcccagatccacaccagcagcaacccagagctccagtctgaggatgagactgttccagggccacagaaaagaggaaaacctcgggcagatggtgagggaagggaacctccgtgttcaggacacctccgcccatccacattcggcctggcaccgatcctgcggaatctctccccaacgcacggtttctacactggaacgattgaaactaagggggtgcgccaactcccccaccttcgcgggtcccctggcaggagacctggtccttgccttaccgcagtaggtgtggctgtgactgaagggagcggcatccctgagcacagtcggagacaaagggaggcgagggccaaccccagcccggaaactctgccctgtaactcggccaaaggagacgccgcattggagcggctgttccgcagcaccatgctgtagaaggtacgttcctctgatgccctgtgcgcaaacccctagccagccttcccacactgccaggataacccttttgaaacctcccctgtttgggacaggccgtgctcccaccttttattggagacgaggcgaacctgggcttagggcgccacctagagccaaaaaagaggaagcgacctggccgcgaagcttcgctagg

SEQ ID NO: 120417 - DNA, 255 bp, Homo sapiens; identical to SEQ ID NO: 7973
  chr11:20177587-20177842
  hyper

SEQ ID NO: 120418 - DNA, 1008 bp, Homo sapiens; identical to SEQ ID NO: 48239
  chr11:20178093-20179101
  hyper

SEQ ID NO: 120419 - DNA, 146 bp, Homo sapiens
  chr11:20180569-20180715
  hyper
ggcatcaaattggcgcgacggattcatgaatgttatacgcctcgcaacctctgaaccagagcataaccccgaggggtggacggagaaatacggcttcggagcagggagcgatgggccggggctggggcgccgccctgcctcgcgca

SEQ ID NO: 120420 - DNA, 30 bp, Homo sapiens
  chr11:20181281-20181311
  hyper
tgctcaagttcactccgaggatggggcgag

SEQ ID NO: 120421 - DNA, 312 bp, Homo sapiens; identical to SEQ ID NO: 48241
  chr11:20181724-20182036
  hyper

SEQ ID NO: 120422 - DNA, 547 bp, Homo sapiens
  chr11:20182622-20183169
  hyper
gtgttagaagtcccattctgacgactcagggaaacttggaaacggatgctttggggccactggatgtgtgtccgtaagagtggggagaggtctggagttatttcatttcgggagactggttgagtttgagcgttggtggatacctgaaaagtaaaacgagtctccttcaaattcccagcaacttggaaaacgattttctctaggagtttctgcaaggggctgtccgcacctcaccttgcgggaggagcggaggagagcggcgctgggctgccgagcggcaggattccgcttgcaaagagcttaggctgaccggaaactgcctcgggcaagggtatccaaaggctgtgagtgctatgctggccgttctccaaacacagggagctctcggcagtttaagttgaaactcacagccctgacattttaagccatagcagcgaaggtccagacgtcgtctggagagaaccctaccacttgcggggcccttaacttggcccaaggtttggcagcttcttaattaactacaacgcacaaacgcgtgaaaaccaga

SEQ ID NO: 120423 - DNA, 144 bp, Homo sapiens
  chr11:20183610-20183754
  hyper
acattaaaccagaaacggagccggctaaaactctcccttgattcaaattaaaaagttatttagggcccagctccagaggcgaattaatgctagaagatgacgtaagtgcggagtttctgagcccaagaccgctcatgctcatgg

SEQ ID NO: 120424 - DNA, 173 bp, Homo sapiens; identical to SEQ ID NO: 48244
  chr11:20184117-20184290
  hyper

SEQ ID NO: 120425 - DNA, 902 bp, Homo sapiens
  chr11:20184580-20185482
  hyper
ggggcgagggctggccgcccgtgaaaggaaaaataaatcctaaggaagcaagaaatcggacgaaaggatcttactttaagtgatctccttgaacgcgtcttttcaaactccgcgatagcccaaggagctgcgcggcgcggcggctgcggctaagacctgtgactaatgccatttgacctgagcccatggggttttgtgcgtcctgccattcactgttatgtcgttatcttcaagtttatttcggagaaatcactcgcgttctttgtctcaaggctgagctttctgtctatttctctttcaagagaaaagaagacgggaggggaaaagagagaatcggagtccctggtttggggtttaaggtccttgcctacgctgcgggggaggccgcagcagatccggctggggctccccgggcctaggtggccaaagctgccgaaacctgccttggatagtagaaagagcgtgtcggaacgcactctgggggtttcgttccccccgcgcaggggagagcgagcatgttcctgccccgggcgccgtgcggtcgcagcagcagcgcggccctctccagtgcgagccgtgcctggaatgtctcgggtaagcgaagggccagcaagcgaggcgaaacggacactataaagcagagagtggtgtgagcttccccgccctctgaaaagatggcaagtctccgtttcgggaaggctgcaacgctaaggtcaccctttgcaggcttcggacccccagtcctccatgctccctgccggagcagccaacagagtgagagcgcattttggaaagattggccggatgccgggcggcgacagggaaaagcgcccgacgcctggctttggggtggggggtgtggggagggggggcagggagctaacgggcgaggcgaaggagga

SEQ ID NO: 120426 - DNA, 104 bp, Homo sapiens
  chr11:20229455-20229559
  hyper
tcagggttttctggacgtcaggaagggaccgcggtggggtgctttagaagtggccggagcccgcacctgcatgcagctcgcgcagaaagcgcctggacgctccc

SEQ ID NO: 120427 - DNA, 170 bp, Homo sapiens
  chr11:20229878-20230048
  hyper
cgaagggagtcattgcgaaggcagccaaagaccgaagcggcgccctgcaagttcttcccaagtcctcttgggaaaggcgagcctgagagggagaggcgcttttcaccaaaaggtgttttgcagagggcgggagggagctccccgcttccagctcccggagtggcctggag

SEQ ID NO: 120428 - DNA, 250 bp, Homo sapiens
  chr11:20230314-20230564
  hyper
cattcccactccagacgccgcagttttgaggcgcaatggggcctttggcctgatcatactcaggaatccttttaggccctttggcctagaggccagagccggggtctgcagagacgcaggcactctctgtccccgcgagccccaccactgggttgctgcttttgagccggttgcttcgggccggcagcccttcttatttcagcacaaaaggtttgaggtgcattgctttctttggcgtaaagcccttgcg

SEQ ID NO: 120429 - DNA, 209 bp, Homo sapiens
  chr11:20385070-20385279
  hyper
agtctactagctggcgcctgggtgagctgagcccagcaggtgagggaaaacgcgggaagagggtcttgcagattccaaacttaggaagggtcgcggctccgcgcacgtgctctcggggtcaccttccccgcgcctgtgagggtgccaggagttcgtctccaggtcccgcccctgtgggcggggcgaggcagcgtcgccgcgaggccacc

SEQ ID NO: 120430 - DNA, 236 bp, Homo sapiens
  chr11:20385481-20385717
  hyper
gagctgggccaggtctcctggccgggccggggataccgtggggtatgcccagtgatgccagcagcttgtggcacctgggcgcaccctccagctcgggccccttccgatgggtctgctggctcaggtgcgggcgatggccggggagccgcgccccgcacgtgactcagcactttccccagagcccggactgcggagaacaatatcctcctccctaacagataaacagcccttgttcc

SEQ ID NO: 120431 - DNA, 69 bp, Homo sapiens
  chr11:20408918-20408987
  hyper
cgacctcccactaacgcctgccgcaacccaaggaggagacaaaagtcatcttccgggctgcaacattaa

SEQ ID NO: 120432 - DNA, 30 bp, Homo sapiens
  chr11:20409765-20409795
  hyper
ggaacgccttcgggcgggaggcaagccaga

SEQ ID NO: 120433 - DNA, 30 bp, Homo sapiens
  chr11:20617359-20617389
  hyper
aggcgtgagccactgcgccggccgaggtag

SEQ ID NO: 120434 - DNA, 200 bp, Homo sapiens
  chr11:20618192-20618392
  hyper
cagaccgaatggctgcgcggtgatggatgcggatttacggcctccttggctgcggcgcgctgggcctgattatcactataaacaggcgtccgcggagggcgggggcggaggcccgcgtctagaggacgtgcggctggtcttcttcttcttcttcttctttttttttgtttttgttttttaatactgcggttccatcctct

SEQ ID NO: 120435 - DNA, 502 bp, Homo sapiens; identical to SEQ ID NO: 7979
  chr11:20618422-20618924
  hyper

SEQ ID NO: 120436 - DNA, 187 bp, Homo sapiens
  chr11:20619219-20619406
  hyper
cgtcccccaagatgccaagagcctgcggggtgcttctcagcgccagccggaacttgagcaggcacccctgcggaattctcagtcccacccactcagacgaccctcctccagccagagtccaccacagcccaccctaccctcttaaccctcgttcccgacctctccctacgagcgggccccggggaga

SEQ ID NO: 120437 - DNA, 360 bp, Homo sapiens; identical to SEQ ID NO: 48251
  chr11:20619673-20620033
  hyper

SEQ ID NO: 120438 - DNA, 327 bp, Homo sapiens
  chr11:20621326-20621653
  hyper
gggaaagggggcgacgaggagaacaattctcgcagccctaggtatttgtacttgtgagcgtcacctgaggtcgcaaagaggtttcctaggctgtagagctgagaggttggctgtggctcctaaagacccgatcccgggcactgtcctcggtgctgaaaagccagatgccggtacagaggcgagttgctctgggtcctagaggctactgagacaaatgctggctgaagccgaggtacctagatttgtgcaaatcgaggagttctattctgcgtgtttgtgaaagggggttagacgagaggagtgcggtggaggcgaagataataggat

SEQ ID NO: 120439 - DNA, 93 bp, Homo sapiens; identical to SEQ ID NO: 7981
  chr11:20622699-20622792
  hyper

SEQ ID NO: 120440 - DNA, 245 bp, Homo sapiens; identical to SEQ ID NO: 7982
  chr11:20623258-20623503
  hyper

SEQ ID NO: 120441 - DNA, 167 bp, Homo sapiens; identical to SEQ ID NO: 48255
  chr11:20631746-20631913
  hyper

SEQ ID NO: 120442 - DNA, 90 bp, Homo sapiens
  chr11:20689750-20689840
  hyper
gcaagtgagaagggcacgttcttattagtgaagaggattctgaaacgttggaattggtttccaggaaacgagggacggctgttctgaggt

SEQ ID NO: 120443 - DNA, 484 bp, Homo sapiens
  chr11:20690393-20690877
  hyper
aaccacagctcgctccgcctcgaggaccccttttctgcacccccacctcagcgccctcttcctgcacccacaaagagagtactcagtcataggggttcaacaggagagaggagacagaaggtacaggcggtgagcagggactcagccatcatccccctcaggtccctccccacccagttgacagagcgaatcccgagtaattgttttccgagggggtccgtgcgcgctcggtggcgccgcctcggtctgggttcccccgaggaaaaatacccacccgcgagggctcggcggcttttcgactcggcggggatgaactgtggcaacttcggcagcccccaccgcggtgcggaagtaaagagggcaacattggcgactgcggctcggaggggctggagcgcgtgaagccgtgggggcgccgtgcgcctcccgctctctcgtttcggccgcaggtcctgggactccgacttcggtgctccgggtgata

SEQ ID NO: 120444 - DNA, 103 bp, Homo sapiens; identical to SEQ ID NO: 7984
  chr11:20690982-20691085
  hyper

SEQ ID NO: 120445 - DNA, 258 bp, Homo sapiens; identical to SEQ ID NO: 7985
  chr11:20691121-20691379
  hyper

SEQ ID NO: 120446 - DNA, 184 bp, Homo sapiens; identical to SEQ ID NO: 7986
  chr11:20691431-20691615
  hyper

SEQ ID NO: 120447 - DNA, 118 bp, Homo sapiens; identical to SEQ ID NO: 7987
  chr11:20691747-20691865
  hyper

SEQ ID NO: 120448 - DNA, 52 bp, Homo sapiens; identical to SEQ ID NO: 48261
  chr11:20692076-20692128
  hyper

SEQ ID NO: 120449 - DNA, 293 bp, Homo sapiens
  chr11:20692589-20692882
  hyper
ggactgagcaggcagcggctttcgtctggttaagaatgttgaatatggatttctcaagggacaaaagaaacctcccattccgttccttacctctatccgagcttcccaggctgcggagacgccaaggctcagtctagcttagaatagttgcttcttgagttcaggcccatccggatgggttagtcttttaaaaccaggacacgctgaaggagtgcgcgcaccccaggaagatcaggacaggcaagactagtgcagagcgtgggctactggctctgagcgcgagagtctggtgc

SEQ ID NO: 120450 - DNA, 1312 bp, Homo sapiens
  chr11:22214110-22215422
  hyper
agggagagggacttttccccacgagaccaaaagtaactcccaactgggagaggggttctctccgagtggcacgcatgagcggatcgatgaagacccggccaaccggctgagggagcatcgggaccccctttggggatcggaggaggaggattccgacaggagggaagcggcagccctggggaaccaggattcctggtcgtgggtggacccagtggaaaaggacgtgcgaagcctgtacagaatggagcaggccggccaacagggccggggggcggcgggtcccgaggagggacgggaggctgcatgtccggaggaggtgcgggaggcggcagagcagggacctggggacggcttgagcggagaggagggggccagcgtggagccagccgggccggggggcggggagatggcggtctccgagggtggggcgccggccggtcttgcggtctggaggcggggaaagaggcgtggaaacagggacgcagcgaaggggaaaggaaagctgccagagggcaggagtggaaaggatcctggcgagcaccgggaggagtggcggctgcgggatcagctgccgagcaggcacagggacaggtgcctggagaagtactgggagagcgcccaggagcgctaccggctgagggtggggaagcgcagggccaagcgcgcgaagcaggttgtgggggaccgggtcgagtggaagtacccgccggagaggaaggccggctggctgtggcgcccagagacggtggagtccgaggaggaggagaaggaggcctgcagaaggaagagcaggcccttagaagtccagcagcagcaactccggcggcccacagtcagattcagcacctgcctcagatctccacgtctgtctcagctgcccctctcctgctgcctctcaggcaccagtgccattaacgagctggcgaagatgggcgacccggatctcctggaagtgttggcggaggaaggtaggaccgcgccaagaggcgtcaagggagagccaggctggctgcctgcacccctccacccgcggcgcagaggccccgggggacgttggcggccctgcggcctgagtcctagggaggttcgctgcgtggcgtgctcagcgcgaaaccgggactgcggggcagagtcccccgcctggggtgagtggggttggtttcggcgccccacagatttctctgctgctcctgcgcgccagggacctgcgacctgtgacccctatggttccggaacaccctccttgctcccctgcaggcctgggaaccgccgagtaattcagggctgctaggctagcgctgcagtgcttggg

SEQ ID NO: 120451 - DNA, 99 bp, Homo sapiens
  chr11:22359318-22359417
  hyper
attgtaccgagacccgcccagacgggcgctgtcagccgctgaaaaaaaaaatcttccccgaggctgcccaaatcagaactgtgtatcttttatttactc

SEQ ID NO: 120452 - DNA, 10 bp, Homo sapiens
  chr11:22359485-22359495
  hyper
cgtgatggga

SEQ ID NO: 120453 - DNA, 30 bp, Homo sapiens
  chr11:22359777-22359807
  hyper
ccgtggcactgcttgcgctctttgccaccg

SEQ ID NO: 120454 - DNA, 735 bp, Homo sapiens
  chr11:22362584-22363319
  hyper
tgggcccgcctgcagcggagcagctctctggtgctgtgttgcaggaggacaccgcggtagtcagggtaaagccctgctgggcgcgtgtaggagtgggaggcgcctactcaggtgcagaggaggcgctggtaacccctgccctcacaaaatgcagaccctgcagatcctgcaagaaagttaggcccaagcggcctgtgtatctcaatcagagcgcccaggggtggatcccgagatggggactcgctaccttaggcctaaaggtgttaaagttgaagagacgccgccgccgcggccaagggcacctgcagaatgtgagagagcctgggaggtcttgcagcttggtgtcaccccaccaccctaatccccgagggtggggggaggtcgacggccctcctcccaaccccgacgggtcctgaaaaatgggaatgggtcagcatcgggggtacctaagccgccaagtccttgactcgcccctgctctgccgcgcagggtgctggagaagaagcaagacaccggggagacaatcgagctgacggaggatgggaagcccctagaggtgcccgagaggaaggcgccgctgtgcgactgcacgtgcttcggcctgccccgccgctacattatcgccatcatgagcggcctgggcttctgcatctccttcggtatccgctgcaacctgggcgtggccattgtggacatggtcaacaacagcaccatccaccgcgggggcaaggtcat

SEQ ID NO: 120455 - DNA, 30 bp, Homo sapiens
  chr11:22364053-22364083
  hyper
caggcgggaaaagcgcgctcccacctttcg

SEQ ID NO: 120456 - DNA, 30 bp, Homo sapiens
  chr11:22364469-22364499
  hyper
tcttcatggggagtccgaatttccaagacg

SEQ ID NO: 120457 - DNA, 43 bp, Homo sapiens
  chr11:22364859-22364902
  hyper
tcatcactcagattccgggaggctacatcgcgtctcggctggc

SEQ ID NO: 120458 - DNA, 524 bp, Homo sapiens
  chr11:22365107-22365631
  hyper
gctctctgggaccagcgcacgcggcctccttccctctgctgtggctgaacttgcttttggcgaaataatcgacgtgctgtatggcctgacaggagctgagggcagaccgggagcaggcagagcagggacagtgcgcctgagtgcacaaaggggtgtagaacggcagatgctgcgctctctcctgcactccccgcaggctcccaggctccccgagggtctgacctcctggcaaggcgcctcgaagacctggccccgtcccccgcccagttggtgctctgggtatgaagtatttgtttctaggggggcaggcaccagcgatgcgatttcacctgttaatgagctgcgtaggggcgggcgttgggggagccctcagctgctttcagtggcctcctgccttgctgcggtgtccacaaccaaggtcctagcgccagttcccagaagcgccaccaacggcacctggagagacacccctaaagcataagacctaaggaccgatggggtggaggtgtcgaggggcacgcttg

SEQ ID NO: 120459 - DNA, 30 bp, Homo sapiens
  chr11:22454013-22454043
  hyper
tgatggcttgccgcacgtgccgcatggggg

SEQ ID NO: 120460 - DNA, 137 bp, Homo sapiens
  chr11:22646582-22646719
  hyper
cccggctgggagggcgcgacaaaaggcagcaaagacttccgaattccccagaagccagtggactagcacttggctcccctctccaggtgatttgtggatgccgggttccaactcttcttggggccgacgagacaaag

SEQ ID NO: 120461 - DNA, 30 bp, Homo sapiens
  chr11:22647108-22647138
  hyper
aagttcgctaatcccggaactggaccccgc

SEQ ID NO: 120462 - DNA, 106 bp, Homo sapiens; identical to SEQ ID NO: 48267
  chr11:22647395-22647501
  hyper

SEQ ID NO: 120463 - DNA, 513 bp, Homo sapiens; identical to SEQ ID NO: 48268
  chr11:22688124-22688637
  hyper

SEQ ID NO: 120464 - DNA, 134 bp, Homo sapiens; identical to SEQ ID NO: 48269
  chr11:22850851-22850985
  hyper

SEQ ID NO: 120465 - DNA, 30 bp, Homo sapiens; identical to SEQ ID NO: 48270
  chr11:22851487-22851517
  hyper

SEQ ID NO: 120466 - DNA, 241 bp, Homo sapiens
  chr11:24518212-24518453
  hyper
ctctctccagagcgacgttcttccaaacacggtttaagcggcgagagacacctgcctaggaccctacgcgtctggaagtctctcccagtgaattgggtctcatctcctgccgagtacgcaagttcaattatcggcagattaggtttctactctccgtgccccgccccgcgccatcctggggagcagcgggaataaatgatccgcccctggccagtgctcacccgactgaccagagcgcagc

SEQ ID NO: 120467 - DNA, 95 bp, Homo sapiens; identical to SEQ ID NO: 48272
  chr11:24518550-24518645
  hyper

SEQ ID NO: 120468 - DNA, 243 bp, Homo sapiens; identical to SEQ ID NO: 48273
  chr11:24518677-24518920
  hyper

SEQ ID NO: 120469 - DNA, 30 bp, Homo sapiens; identical to SEQ ID NO: 48274
  chr11:26353469-26353499
  hyper

SEQ ID NO: 120470 - DNA, 118 bp, Homo sapiens
  chr11:27384894-27385012
  hyper
agcttggcttcctccgccccggcctcccttagccagcccttcctcctcagtggcaggaaggtgcctgctgtttgcaagcttgtttagtacggtgtctccccacgccactggcggggtc

SEQ ID NO: 120471 - DNA, 285 bp, Homo sapiens; identical to SEQ ID NO: 48275
  chr11:27493262-27493547
  hyper

SEQ ID NO: 120472 - DNA, 763 bp, Homo sapiens; identical to SEQ ID NO: 48276
  chr11:27493755-27494518
  hyper

SEQ ID NO: 120473 - DNA, 30 bp, Homo sapiens; identical to SEQ ID NO: 48277
  chr11:27527910-27527940
  hyper

SEQ ID NO: 120474 - DNA, 30 bp, Homo sapiens
  chr11:27528415-27528445
  hyper
gtggccgagtgtgtcgccgcggccatcagg

SEQ ID NO: 120475 - DNA, 30 bp, Homo sapiens
  chr11:27720694-27720724
  hyper
accttccctagcttcgttctctgggtcccc

SEQ ID NO: 120476 - DNA, 222 bp, Homo sapiens
  chr11:27721073-27721295
  hyper
gggttcggcctgcccgagagtgtcgcagaccctttcagttcccagcggtaggaattccgcctcccaagttttccaagctacattggcttcggacttgtaagtccacttcagtctcaattcctggggagcaggtagccgtgtgcagctccggggaagggatgcgggctgaaggcgcaagcttccctcccactccccccgcaagtcggcgcggggaccacccac

SEQ ID NO: 120477 - DNA, 33 bp, Homo sapiens
  chr11:27722045-27722078
  hyper
ttcgattggtcaaacggcgccgccccccccccc

SEQ ID NO: 120478 - DNA, 32 bp, Homo sapiens
  chr11:27722621-27722653
  hyper
gcttaaacagagttcgcgcactgacctctcta

SEQ ID NO: 120479 - DNA, 30 bp, Homo sapiens
  chr11:27722956-27722986
  hyper
ggggggagggggcgcgagtctttggtgccc

SEQ ID NO: 120480 - DNA, 30 bp, Homo sapiens
  chr11:27723370-27723400
  hyper
ccccagcaaacacacgtataagctaaccct

SEQ ID NO: 120481 - DNA, 30 bp, Homo sapiens; identical to SEQ ID NO: 7994
  chr11:27739812-27739842
  hyper

SEQ ID NO: 120482 - DNA, 113 bp, Homo sapiens; identical to SEQ ID NO: 48281
  chr11:27740063-27740176
  hyper

SEQ ID NO: 120483 - DNA, 705 bp, Homo sapiens; identical to SEQ ID NO: 48282
  chr11:27740480-27741185
  hyper

SEQ ID NO: 120484 - DNA, 30 bp, Homo sapiens
  chr11:27741813-27741843
  hyper
accacgcgtcctctccggaagacagtatca

SEQ ID NO: 120485 - DNA, 1149 bp, Homo sapiens; identical to SEQ ID NO: 48283
  chr11:27743202-27744351
  hyper

SEQ ID NO: 120486 - DNA, 114 bp, Homo sapiens; identical to SEQ ID NO: 48284
  chr11:27744660-27744774
  hyper

SEQ ID NO: 120487 - DNA, 148 bp, Homo sapiens
  chr11:28129837-28129985
  hyper
gctctttgcttgctcgtcaccgtggcaacgcgcgcggccgtttccggaggcggtggccaaagtgggcggggctaggccggagctgctggtgggaggcagccacttgagatcaccaggcctcctgtagaccggcgggtgcagggcccgg

SEQ ID NO: 120488 - DNA, 30 bp, Homo sapiens; identical to SEQ ID NO: 48286
  chr11:28132180-28132210
  hyper

SEQ ID NO: 120489 - DNA, 70 bp, Homo sapiens
  chr11:30037681-30037751
  hyper
cacgcaaatccaaacgttggaagaggcagcaattcagacccgttcaccggctgttcccaaaagaagggaa

SEQ ID NO: 120490 - DNA, 54 bp, Homo sapiens; identical to SEQ ID NO: 7999
  chr11:30038271-30038325
  hyper

SEQ ID NO: 120491 - DNA, 158 bp, Homo sapiens
  chr11:30038548-30038706
  hyper
cacgcctcccctggccgcgaacgcgctctgggcgggggcggggccagggccgaaccgagggtgtggcgttcgcgacggtcgccaggggcgcctcccggcgcggcggggcgggtgcagtcacgacgccgcgactccccgcaccccggctgggccccccg

SEQ ID NO: 120492 - DNA, 127 bp, Homo sapiens
  chr11:30038919-30039046
  hyper
ctctatatctcccctcgagccccgagccccgtcttcttttccccaccccatcccctcccaaagcgggtttgttgggttgggagccgggtgcatctccggcgaggccacgggcggggagccctcctgt

SEQ ID NO: 120493 - DNA, 157 bp, Homo sapiens
  chr11:30040139-30040296
  hyper
aagcccacgtggcgacggggtctccctagacacctctcccagctcgcccgatggaccaagcaggcagtggcagcgctatgccccggactgctggagcaaatccgaccttgggctggttggttggcgccaggactgtcactgtcgtcctcggggcggc

SEQ ID NO: 120494 - DNA, 119 bp, Homo sapiens
  chr11:30344495-30344614
  hyper
agcacctcttgcctcgccttgaatcatttgccacttcacaccgccccgccccttccgtccccggaggcggccagcctcgtgtccgctctaggcttctcccggacgtctctttgtggtgg

SEQ ID NO: 120495 - DNA, 30 bp, Homo sapiens
  chr11:30344922-30344952
  hyper
gcgtagttcatctgcgacgcaacgccttgt

SEQ ID NO: 120496 - DNA, 30 bp, Homo sapiens; identical to SEQ ID NO: 8001
  chr11:30393948-30393978
  hyper

SEQ ID NO: 120497 - DNA, 24 bp, Homo sapiens
  chr11:30605848-30605872
  hyper
ggcagttgcgcgaggcggggtggg

SEQ ID NO: 120498 - DNA, 229 bp, Homo sapiens
  chr11:30605931-30606160
  hyper
actcgccctgcccttctaggctcacggctggctcttcccggctacaacttccccttccttcctgaaacaccagcgccttactcgctcagtcccccgttgccacctccgtcacctcctcggccgccgctcctgctggcactgctggcgctagcgctggcggccccgggctccgctggacgcctatcttttttctctccctcttccctagctctggattgattgatgacca

SEQ ID NO: 120499 - DNA, 539 bp, Homo sapiens; identical to SEQ ID NO: 48292
  chr11:30606215-30606754
  hyper

SEQ ID NO: 120500 - DNA, 1559 bp, Homo sapiens
  chr11:30606795-30608354
  hyper
cgcctagcctcgaccccagcttgggtcgccgggtcgctccgcaggctgcgagcgcggagacccaggcagcggcggagagtgaggttggggcgcggggacggggtgagaaagagccccgagcgagagcggcgcgcgcgggcggccccgggggcggccgcggggcgcagccggagcacaaagctgcgcggtgccttcccctcgtcactgcacctggcctcgggccgccgcgggagcccggggatcgggccaacacaatgcacccaggcctaggccggggcggctcgaacacatcaccccgggactttctagtaaacagctcgctgagccctcgtccccacccccatccccgccgcccggcttccccagcttctcgccgataccccctcctctcctcctaagaaatcctggcggaggagggagcgaagaggtggggacccccagaggtcgggggactgatggctggagggggtggagaagagaagaggcgcaggatggggagtcggagggaagacacctcctaaaaaagaatttgctttcgctcaggggttgaaaatcagccctccccgagcgccgaattgcccgggaggcgcccgctcgtgcggatgtcaggggcaccggggcagcccgggtccgcagcctccgagcccctcgcacgcgcctctgacaaggcacctctcacccgggctccgctttgtgtgtgcatttttttcccttcctctagtgctcggcaccgggctcccggccgcctcctccccctcccccgccctccgcctcccttcccggggcggattacctttcccgggctgcgctccggatcccggggatgccttcagcgcccggcgagcaggcgatccatagccgagcggcccgagccggctggaggagcgctgggggcgcgcgggggcggcgaggggcgcgagcgggccagaaccttcgaccccggaggtcccgccgcaggctggggctgggggccagggggcgcggcgctagagggaggcggggggagaaaggacccgagcagcctcgatctggggagagagcgagcgagggggcgaggagagggagcgagggcgcggcgagccggagggagagcgagcggtgcagtgacagggactgccactggggtcaaaggagcacagctccaggaagcagggcggccgaggcgccgctccgtgcgcgctccccggcgggaccccgcgcccctgcacgcccctcccgcagtccctgcccactcggacccccaccggtgccccgaagccccagggtttcgagaggaggagggagccgagggcgaggcccggtagcctgctggtgctcccgggtcaagcaggcggcaggaagctgagctgcaagttcatcatcatgagtgcgatctgcgtaaaaaatgataggggaaggaaggcgggctacggtgccccaggaaaagaagggagctttctcccaaatggtgttcttctgcaaagagaacacccagctccccgccacccaccgacctgccaggctctgtcaggagtcctggcaccgttccaggacgcagggctcaccgcaggggtaagggg

SEQ ID NO: 120501 - DNA, 234 bp, Homo sapiens
  chr11:31391278-31391512
  hyper
gttaccatagagaccgcgtcggggtgggcggagcgtcgcttctgagctgtgccacggccacatcagctcggccagaaacgcgaacacgtcggaacagtgacttccggcggaagaagaagccggtccggagttctggccgacagcaggcgaggagtgggtagcagcgcctatgtgaagttaggtaggtctgatgtcgtataaagcgcggagagggtgcccgccaatggctgggtg

SEQ ID NO: 120502 - DNA, 30 bp, Homo sapiens; identical to SEQ ID NO: 48295
  chr11:31531120-31531150
  hyper

SEQ ID NO: 120503 - DNA, 232 bp, Homo sapiens
  chr11:31531542-31531774
  hyper
accagctcttaggtcggttcagagcggagatctgggctcagccgaggggaaacttagggaggggacctgtcggggaagccactttgaccccacatctctttctgacccctaaaccttcggaggaggagagaatagcctggtctgattgagatggaggggaatacgggttgtgtggagacttctgagcgctgttaactaaacatgttttagtgccctcgctctctatttcatt

SEQ ID NO: 120504 - DNA, 71 bp, Homo sapiens
  chr11:31818441-31818512
  hyper
tagctgagggagacgcgctccgctcacgtgtgcgggcacaagcgtctgtgctaatttactgccccaagttt

SEQ ID NO: 120505 - DNA, 652 bp, Homo sapiens
  chr11:31818827-31819479
  hyper
tccgaagaaccccgccgatagcatgctctgctctcatttgcctctttgacattttcttaattttaaaacatggagattcacattcttatccatgttctgtctcacacaaacatacacacgggtttacacaggcagcacgcgatcgccgccaggccctgtgctgcctccagaactgacacttaagagagaaaagtcagcagggacagtagagctcaattttaaatctggaaaaaaaaaaaaaaaaaaaaaagatgggaagcggggattggaattccacagcaaaaagaaacctgtcgctgcaggatcccttctctaccccgcggggagagcggcacggagacagttcattactttagaagtggcaactgtttgcagccaggcggtgacctagcggctgctcttacataaaatgggtacatttccccccactttagtggatttgccttccactcttaaagcttttaacaaaataaaactagaagttggatctcgactcccccacccccacgataaacctaagtggtggacaattaagatatcttcttcaaaaggcgccccctcggagccgcgcaaagcaggggccttcagtgggtgccgttcaccttccagcctaatccgtgagaaagcgagtgaaagcgcctcccattatccc

SEQ ID NO: 120506 - DNA, 557 bp, Homo sapiens; identical to SEQ ID NO: 8008
  chr11:31819803-31820360
  hyper

SEQ ID NO: 120507 - DNA, 1548 bp, Homo sapiens; identical to SEQ ID NO: 48298
  chr11:31820460-31822008
  hyper

SEQ ID NO: 120508 - DNA, 80 bp, Homo sapiens; identical to SEQ ID NO: 8011
  chr11:31822245-31822325
  hyper

SEQ ID NO: 120509 - DNA, 171 bp, Homo sapiens
  chr11:31823125-31823296
  hyper
tggtacagaccccctcggacagtaatctgtctcggatttcccaagcaaagatggacgggcactcccgcttatactgggctattttgcttacaacttctggagtcgctactctcggtttactaccaccgattgccctgggtctgatggagccagtctcgtaatacctgccca

SEQ ID NO: 120510 - DNA, 192 bp, Homo sapiens
  chr11:31824181-31824373
  hyper
gaaatgaagagagggcgttgagagtggagggccgcgggggcggcgagtggggcggcgccgggaggatcacctgcagaattcgggaaatgtcgcacggccgggccccgctgtgagctagctctacaatcttctgccgggtggagtccggcagtggccgcccgttgacaaagacaccaccgagctgattcactc

SEQ ID NO: 120511 - DNA, 30 bp, Homo sapiens; identical to SEQ ID NO: 48301
  chr11:31824585-31824615
  hyper

SEQ ID NO: 120512 - DNA, 5 bp, Homo sapiens
  chr11:31824958-31824963
  hyper
agtgc

SEQ ID NO: 120513 - DNA, 28 bp, Homo sapiens
  chr11:31826042-31826070
  hyper
acaggcgtttgggggatctgggctccgg

SEQ ID NO: 120514 - DNA, 197 bp, Homo sapiens; identical to SEQ ID NO: 8014
  chr11:31826106-31826303
  hyper

SEQ ID NO: 120515 - DNA, 324 bp, Homo sapiens; identical to SEQ ID NO: 8015
  chr11:31826408-31826732
  hyper

SEQ ID NO: 120516 - DNA, 117 bp, Homo sapiens
  chr11:31827113-31827230
  hyper
gggcctggtttcgctgggcctccaggctcccaggtcggagctctagactagccctgccgcgtaccagcacccaccacgaacaggaaggtgggtgggaccccacggggtctgggcaga

SEQ ID NO: 120517 - DNA, 457 bp, Homo sapiens; identical to SEQ ID NO: 48307
  chr11:31827597-31828054
  hyper

SEQ ID NO: 120518 - DNA, 228 bp, Homo sapiens; identical to SEQ ID NO: 48308
  chr11:31829160-31829388
  hyper

SEQ ID NO: 120519 - DNA, 845 bp, Homo sapiens; identical to SEQ ID NO: 8018
  chr11:31831436-31832281
  hyper

SEQ ID NO: 120520 - DNA, 941 bp, Homo sapiens
  chr11:31832704-31833645
  hyper
gccggcgcccggcctcgcctccaccgctcctcactggcccattagcgaagcctgacctctgtcatcatcctccagcaaaacacttcctcctgcgcctgaaccagagcgggaaatgaggccgagccacggttcccttttcaaacccactaatcactccgcaacatgcaaatgcaccgctcgctctcacacaaaatattgctttatgcaaagcagcgccggggcctcgcgccagccgattggatgctccctctccccgcctggtgcaattggtccgtttgtttgaatatgaatacacttgttttcggctccgccggtgggtcccggctcctctccccggcgcagggcccccgagcccgggctctggcgctcgcctgcatctccccgctccgcgcacgccgagattcggcgcggcccgccctgctgccgcgaacttgagcggtcaagtgaaggtttctgggttgggggtcgcgcccccactccccctaagctggactcgggactcccagtcctcggagggtgcaagtttctgtgctgtcctttcttgccaactccaggacagcgtggcctgccgccccgcccccgcccgcccccaccccatcccagccggggccccaagacacagagcacagcggcggccgcaccccagcccacctggccccttggaagaagaggaaaggggcgggagcgtcactgggtcctggcagctccattccagctgcggaggccgcggcgaagcctaggccgagaggaggttgccgggccgagaactaaacgaggccagaggcctccccagcccaagcctccagggcctgtccaaatcctccaccccgctctccccgccctttcttctctcctttctcctttcggaagccgcggtgcgcagcggagcagaggcacagctctggctggagaggcccgagtaaacacgccacttactttgt

SEQ ID NO: 120521 - DNA, 1169 bp, Homo sapiens; identical to SEQ ID NO: 48311
  chr11:31833905-31835074
  hyper

SEQ ID NO: 120522 - DNA, 1232 bp, Homo sapiens
  chr11:31835306-31836538
  hyper
agttcaaccccagaatgaggccgagttttcaaagtttaaggagagaggggtgagagtgagatttcctcgttctctctggactggtctcaaggaaggtgggggtgctgttctacctcgtggggagcctcactccctctgccaagtaccggctctgggggcgaagcggcctaggggtgtgggggccgagactgaggtgcgggcgcggttgccagaggtgtgtacaaaaccgagacaactcgcaggtcgccattttaattgcggctaccaacacgcccgaggcccacttgctgccctccaagacgcgggggggcggcggggattgcgctttaggttctgtctcctttccccgcctccccacaggcccctgttcccccctaccctccgccccctgtggccagagggaggacctctcaggccggcgggtgcgttcccgcgggggccgccggggtcgtcccacccggtagcggggctgtctgcgtggagggagtcccgctgggggaccgtggctcgccagagcctgcccagagcttctagccagtattgatgcgtcaacatgaggtgaggcaagcatctcacccgcaccgatccctggcattcccctgtgcccaccccatcaggccttcggggaggcaaagaagtgcccacttctggggggaagtgcctccagctcccagcttcagaaccaagagcctcccatccggagttctgacagttctgacacctccaaactctctctttccccggtcaagcagaggcgcagcgccggcgcgctggaaagggtgaagactggcattttttggagaaggaaagtcttggcagacacctgcgtcactttgtagtgccccaaacgtctctctttttgcagaccctgggaaggtgggatcccttgtccgcggagctggcaaacgggtccagtgagccctaaaggcaaaggctcccatcccggccgcccagtccctggtgcctcccccacttccaggcctttgtccctctcctttctccagcaacctgccggttcccgctaacccggcagcctcgccgagcccagagcctagaaaagccaagaagatcccagagccgccccgtggcaccttcaggctgtggccactgctcggcttggggggaagccgcggtgccctcgcccttcctcgcctcctgccaaatggccagtgctaggggctccctgggttcagtcctcagtcctcttccgttcgctctgggaggccagcctg

SEQ ID NO: 120523 - DNA, 91 bp, Homo sapiens
  chr11:31836597-31836688
  hyper
tgcccacccccaaaatacctttaaaataacattgtccagtggagtctcccagcaaagggattcctagcagcccagcgggtcagactcccaa

SEQ ID NO: 120524 - DNA, 158 bp, Homo sapiens
  chr11:31837354-31837512
  hyper
aattcggcgcttttcgtcacttcctaacccagtctcacagagggtgacttccaaacctggctagcggggaaaaccgctgcccgggggacagaggggctgacaggaactgcgggttggctcagccgaatgcggccggggagaatttaagaattctcagc

SEQ ID NO: 120525 - DNA, 2404 bp, Homo sapiens
  chr11:31837541-31839945
  hyper
cgagaggaaagggaatgaaaaatgaagcaacaaatgacaccacccaggctggcagccctcgttcccggccagaccccgctcctcaggcccggctctggcgccgggtggcgtccagcccctgcacgcgcggcgcggcccgcgggaaagtttgtgcagcgagagtgactgtccttccgcctcgcgcgcgctgcccccttctgccccggaggggcgttgggttcccttcggttttcctttccaattctaaaataaataaataaactccgggccctggggaaatctgaatagtaattccagtcatccaaattctatgagagggtctgaggaaaaaaagacaagcctatcacgggcgccctccgatcacgaagggcacgggcatgagaaggcgacagaggaggtcctcggctcgccctgggcgcggagcgaggactctggtcagaggtaattatgtcaccgcgttttctcgccgtgacagccgaataaacacgatctccaataaacatctctaatgagggaggaggcccgaggatggctgggtttgatttatgactggaggagaaggtccacttcccactgcgaagcaggcgacctgctcgccgcccagctccagggagaggaacccgcggaggagaggatcccggcccaggtaaggcgtgcggccggactgccactgcgctcgtcccccgtttccaggtgaggtgagcagggggcgccaccgctcggagtcgggcggaggtcccaacacctgtcacaggtgactgagctccgaaggtgctcccagaagacctagaaagggggcgcaggagcgcgagtgggagtgggggttgggggctagccggggcctggcccagaggccgccccaaactcccgggcggggttcttgggtgccccgcctaagccggcctgggcgtctccagctgcttttagggccgggctcccaggactttcgcccggctgaaccacaagttagtctaagtttgggtcgtcccttccctgactcactaaggggacacttccgggccccggctctggccctccaagggccgcagggtggtgggcgcttctctttcccgggcttggcggcccggctcccatggcgcccgcgcgcttcccgccgaggcagccagcgcagcgcccgcagtaaccggagcccgcgttctagctcagtgagaatcgctaattattaggtcttccgaagtgaagctcaaatcacacgctgggagctttacgcgctgcccagctctgtcggccgcattctttcgtactccgcgtctttctgagaaacgaaccccatctctagactttgttgcggtccagccatctgcactttgcaaccgcgggaaacttctgctgcacctcgcccgacccgcggcagggtgtctttaagcgctccaggcgcgggtacggactttcccaagcgtggatgtcgtgaactgcgatgcagaggaggtctggatgcaaagtgcgtccccacctcctgcatttttcgcggtcgcgagtggctttagcagacagcagcagcagactcccgccccctactcccagctcagggccggactggaagtccactcttaggagtggaacattttgctacttttgcagaagagcacactcggcaaagacaagtccctcctccaccccccttcctatccctccctcagtaactcgcttccatctttgtatgcctccttttaaaagcaaaaatcaagccccggggccacttggggcgggctttgatttggggacagcagtcgctggcagcggagaggccccgcgggccccgagccgggccggggccggagcccgggcggttacctgggagcggagggcggggaggcaggtgagcctggcagcgccggttcccacacttctcaccgccgctcggcaggggaagtggcagatctgacagccgcgttctacgcgaggacctgccccagagtttaaatgtcaatgataagaaaagagggtgctcaggcaggcgctaactttccttaatatccacgccagcgccgtcctcattggctgcccggcccgcgtgacgtcatggcggctagagttgggcacagctctgcgccgactagttttccggccgggcgggagcctgcttctccccacccagggtccggccggctccaacccctgctttggccttccttggcccggcctgtgactgctctagcccggcccggtccagcctgggccgccgtcctgtatggcgtagagtcgatccccaggaaactagtcttgccgagtgcgctcctccgcaccttcgggcactagggccccaagatctctgcccttaggctggccagctacctctctgggtaatcaccctgtcccctcctccgatccccaagggagtcccttcatcggagagacccgaaggccgcgccgggatggagag

SEQ ID NO: 120526 - DNA, 24 bp, Homo sapiens
  chr11:31840041-31840065
  hyper
cgggggctccgggaagaggacatg

SEQ ID NO: 120527 - DNA, 51 bp, Homo sapiens; identical to SEQ ID NO: 48317
  chr11:31840878-31840929
  hyper

SEQ ID NO: 120528 - DNA, 314 bp, Homo sapiens; identical to SEQ ID NO: 8025
  chr11:31841774-31842088
  hyper

SEQ ID NO: 120529 - DNA, 206 bp, Homo sapiens
  chr11:31842174-31842380
  hyper
cgcccagtctgcgtaggctcccaggccagccccggccccagagcttccccatcagccagcagaggctgggtggagagcctggatgggcgtgagaggccttgaagtaggggaagtagtggagagagagaaagatagagaaatcggctcttggcttgaactgttgttcttgtcgaaggtatgttttcccctcccggcctctgtcgctt

SEQ ID NO: 120530 - DNA, 30 bp, Homo sapiens
  chr11:31843416-31843446
  hyper
tcaacgtgacaaggccggcttcgatctaca

SEQ ID NO: 120531 - DNA, 30 bp, Homo sapiens
  chr11:31843870-31843900
  hyper
atgaaataaattgtacggataaaacagcac

SEQ ID NO: 120532 - DNA, 185 bp, Homo sapiens
  chr11:31845170-31845355
  hyper
tggtccttgcggggccggggagctagaggccgcaggaagctgggagggccctttccaggcaggcagggcagcctcctggcgcggcccaaggcgcgaggcagccgctggctagggaggtccagtctcctgcaggccagggagggcttcctctgggtgcagccgtctccctccgctcctcagcttgg

SEQ ID NO: 120533 - DNA, 30 bp, Homo sapiens; identical to SEQ ID NO: 48320
  chr11:31845627-31845657
  hyper

SEQ ID NO: 120534 - DNA, 653 bp, Homo sapiens; identical to SEQ ID NO: 48321
  chr11:31846200-31846853
  hyper

SEQ ID NO: 120535 - DNA, 157 bp, Homo sapiens
  chr11:31847144-31847301
  hyper
cctagcgccagccgccggggcaacgtggcgctaatgcagaaatcttggctcctgcctgcattattcatttcggggacgtggggatgggataggagtggagagtgggtttcttcccctcccccgaacttattctgaaaatcccggggaccaatggaca

SEQ ID NO: 120536 - DNA, 342 bp, Homo sapiens
  chr11:31847370-31847712
  hyper
cgctccccggctgtctttttgtcccaggggttcccaggcccgcagggctaggatcccccagctcccaccctagtcagtcccagtcagggaggacctaggccagggcctcctcccaaggctgtcatctggcggggcaaacgctcttctctcattccttcgtctcccttccagccctcgcatcctttccttctttctgcttcagagctctcaggctcgcgtgcagggcgggatgggcccggatcgggggccccttcgcagatttgaaagttgcctcggccttgatcttctcccagcctccctgctggggactcacccccacatcccgctaccccccggggaaaa

SEQ ID NO: 120537 - DNA, 103 bp, Homo sapiens; identical to SEQ ID NO: 8029
  chr11:31847769-31847872
  hyper

SEQ ID NO: 120538 - DNA, 83 bp, Homo sapiens; identical to SEQ ID NO: 8030
  chr11:31847895-31847978
  hyper

SEQ ID NO: 120539 - DNA, 136 bp, Homo sapiens; identical to SEQ ID NO: 48325
  chr11:31848466-31848602
  hyper

SEQ ID NO: 120540 - DNA, 555 bp, Homo sapiens; identical to SEQ ID NO: 48326
  chr11:31848722-31849277
  hyper

SEQ ID NO: 120541 - DNA, 2 bp, Homo sapiens
  chr11:32008879-32008881
  hyper
at

SEQ ID NO: 120542 - DNA, 126 bp, Homo sapiens; identical to SEQ ID NO: 48327
  chr11:32009000-32009126
  hyper

SEQ ID NO: 120543 - DNA, 30 bp, Homo sapiens
  chr11:32112619-32112649
  hyper
agtcccctcctccgcgccggccccaaccct

SEQ ID NO: 120544 - DNA, 30 bp, Homo sapiens
  chr11:32113122-32113152
  hyper
cctgcccaactcggcgctggggctcaggct

SEQ ID NO: 120545 - DNA, 30 bp, Homo sapiens
  chr11:32113362-32113392
  hyper
cctccccactctctcgcagtttctctctga

SEQ ID NO: 120546 - DNA, 134 bp, Homo sapiens
  chr11:32354825-32354959
  hyper
ttcttggggatccttcgccccccacccccacccccggccgtatttctccctaggctcttattaaaaccaggtgcacggaaggcggcccattctggacagaaaagctttcgtttgacccaaagctcccccttccg

SEQ ID NO: 120547 - DNA, 364 bp, Homo sapiens
  chr11:32354999-32355363
  hyper
cgagcaggcggcttctcctgaccggggagacgcgggaggtttgcaaacagaccttggcctgggctgcgcagggacaaagtgttcaagggcagcaggggaggctgagggagtacacggctgggaacaagggacactgccgcccccagccacgcaggagcggtgtctgcaccactgaaagtcccccggggcccacagctctatccaggcggaagggaagcagccaggccgccgcggatctgaacttgaatcccgggtggaccggacgccccggccggcgctcctgacgcgcggaggagctggcgagaacctgcagatctcagggctcgcccgcggtccggcgctcggttcaggacgtccgggaacc

SEQ ID NO: 120548 - DNA, 360 bp, Homo sapiens
  chr11:32448533-32448893
  hyper
ccttgacgtcagccccgggtccccgcgcggaggggagggaggatggggatgggtttgggggcagccggtgtcaggatccccgagcaccagggaggagggggctatgaggtcatgcgcgcccaatcccgggccgcacaggcctcgcgctgctgctccccggcccccgccccaacttccagccccgtgcgggctggtgtgcgccgcagttactaggcaaccctatcgcagacgcgggcggccggccaagttcacccaaagttgaagaaaaaatttgggggagagaaggtggagcgagaggcgagaagaggaagcacggagcggggaaaagcttggaagggaatgaagctggccttgggcctc

SEQ ID NO: 120549 - DNA, 90 bp, Homo sapiens
  chr11:32449104-32449194
  hyper
cgcgccttcgaggtagtctggccggtgtggccattggatgggtttgaggtctcagaaccgagtgggagtggactccgtgtttaatattta

SEQ ID NO: 120550 - DNA, 1383 bp, Homo sapiens
  chr11:32455062-32456445
  hyper
cgcattccaaaaacatcccggtccctaggccctcgagtaattttgctccaggaaaagcatccgccattgtattagtaaagcgtttactaaattaccgaatcaaaccgaactggcttaggttctcaatagcgtggaaatccactgaaaataaatgaagagggcaaactacaggggctccgcaggttcgggtccgcgccgcccaggcgaaagagaggtgggcgggcatcggcgcgggatgagaaaccaacctgatacttatcgtgtgccgagttccctccttgtatcctgactaagcacagcgaataaccctgtccttgttctaaccccaggtcttgaagaaatactgtcccagctgagccccgcgtttacaagatgaagaggcgccccagatgcgctgaaagaaaggccaaagctcgtgcctccttccactgcctgcggtagaacctggtcccgcatagcttggactcggataagtcaagttctcttccatccccagaacctgcgtggccgccgcctgagcgaagcccagtgaagatccacttctgtattaccatacgcgggagctatccacggacacgacgctgttccagaaagccatttagttactggaggtgcatgtgctcattctagttctctacgatacttaatgtgcacctaagtgtgtgccaacaccgtattataagggctggaggtgctcctggacattttagcgctgcggaggcagcacagcacaggcgctcacccccgcgctggtcccactccgaatccagagtccagacgtctgaaaagcgctacgcttggtgacaatttggcgtttccttaattaacaaaactctccccaaggcagagccagacactgcgccggtctcctggttccactcccgtggggactagcagtcccggaatctctcggactctaaggggccccagacgccctcccggctcttgcgaacagtcaggctcctagctctgcctggctttggaggatgtcgggggccagtgcctgcgtgcactcccactctccggcctcctccccagccgccgcttccgctatcctcacggcccttgggaagcagctgggtaagagctgcggtcaaaaggggtaggagaggggggtgtcctagagcggagagtccctggcgccactgccccgcgcgtagggggcgctccccggcctacttaccctgattgcgaatagcgggctggctctcgaggcagctgggcaggtagggcgcgttaggaaacatcctggcctggccggatgacgcctggctgggcggaggaggaccgaagggcccgtagcgacaggctccggctgtgccagtgaactggccggaaaagtggacagtgaaggcgctcaggcactgctcctcgtgcggctcc

SEQ ID NO: 120551 - DNA, 440 bp, Homo sapiens; identical to SEQ ID NO: 8035
  chr11:32456758-32457198
  hyper

SEQ ID NO: 120552 - DNA, 202 bp, Homo sapiens
  chr11:32457219-32457421
  hyper
cgccctcgcagctggggtgagggcgggtccgagggagcgtccctctcggagacaccctcctcttcaacccaacacgcgctctcagctggccggtgtggcacaaccctccccccacctccccttcttggccttcgccagtgtgggagcctcgtctcactggagagtccgttcaggtaagcagtgagtccgggcagggtcgaat

SEQ ID NO: 120553 - DNA, 468 bp, Homo sapiens
  chr11:32457707-32458175
  hyper
gcaccagttataagccgggcgtatttcgatcggctagtagttgtttacttggtgaggtttgcgccaggcggaaggcggttgccgcctacctaaaattggagtcagcagcacttagtttccctttccagtgaggaatatctaattcttctacggttaagccgggaaaacagcggctagtttaggagggaagaaaacccttgggcaaacgcccaaagcctgcgtatattccggccggagcatcctggcgcccagtttggggaggaggggtgaaggggagggtttggatacgaagcccggcagggagcgggtaactcctggagccactccgccgagcactgcctgtggccctggtcgaggataccattctggttgctcagtgattgaccaggaggcggaagccagttaaggggaccaaggagtggagtagggagaacctccatcggcccacgggcgcgagttagtgttcga

SEQ ID NO: 120554 - DNA, 397 bp, Homo sapiens; identical to SEQ ID NO: 48335
  chr11:32458433-32458830
  hyper

SEQ ID NO: 120555 - DNA, 37 bp, Homo sapiens; identical to SEQ ID NO: 48336
  chr11:32459413-32459450
  hyper

SEQ ID NO: 120556 - DNA, 198 bp, Homo sapiens; identical to SEQ ID NO: 48337
  chr11:32459576-32459774
  hyper

SEQ ID NO: 120557 - DNA, 97 bp, Homo sapiens
  chr11:32605169-32605266
  hyper
tgaaaactggaggccgcgacaagcgtcgctgagtggaggcccagtaagtcccacccactaggccagcccgagcgcgtctgccacgccctgctgcatt

SEQ ID NO: 120558 - DNA, 95 bp, Homo sapiens
  chr11:32605713-32605808
  hyper
ggactcatttctgacgacatagtacttttagactgatgaggaatgatgtctgcttccgtccgtcaaatgcagccacattcggagtgggaggtggt

SEQ ID NO: 120559 - DNA, 413 bp, Homo sapiens
  chr11:32851552-32851965
  hyper
ccttcccaggtttgcgcgcgggggccatccagaccctgcggagagcgaggcccggagcgtcgccgaggtttgagggcgccggagaccgagggcctggcggccgaaggaaccgccccaagaagagcctctggcccgggggctgctggaacatgtgcggggggacacaggtacgaggcctggcggcaggacctcggcggggagggggttacctggaaggggccacctcggcggactgggttggattcgaacacatagcgagggttgcccgcggcgacaggtgcccgatcagccctcggcagggtcactgggcacggcgtttgtcccaggcgctctcaggggctgcttcctgggcgcgcgtcgggttccggcgaccgaaaccgcgcgccgggcgctcttgcgcctaggctttgagt

SEQ ID NO: 120560 - DNA, 30 bp, Homo sapiens
  chr11:32913975-32914005
  hyper
agctccaagcaaagcgttgacccggctacc

SEQ ID NO: 120561 - DNA, 942 bp, Homo sapiens
  chr11:32915114-32916056
  hyper
gggagtcgtggggctccgtcacctcttgggtcctgggctctcacatggtgaagtttgggctcgtggctgaactcgggatctgtgagacccaggattggcgccgggggtccgaagggggcgccggagagtttggggcagtggcgatccattgtattggaacctgggtggccgacaatgcggtcttggggactccggcgtgtgagggttgcggaggcgggagaggaagagtcgcggaaccgcgtcccggagacactggggggcccgggagggctgggctacgggagaatccccggggcgcagggcagaagagggggcccggcagggcgcgaacgcggctccagggccgggtgacatatgtttgcgctggtggccaagatttaggcgatttttcttccacgcgttcaaagttgctcttaggtttcctccccttttaacaacagcaggaagtaaggaatctttctttgccttctatgcctcggggtgactgagagttgggaagaaatggggcgggggttggggtgggggtagtgaaggccgtaaaggttgaagaaccaaagcatgcttctccatctcggcctttaaggtccgggtgcattatgtagcgtggggttcaagagttcatcttgcatgaccaagggaatctaaaattttgactcctacttgatatttaagctcgcgggaaatgtgtagtagtgccacactgtgaaacggtcccatttgaatgataactggaaggcgtggtctggtttggagaattggtgagcggggtgttttaaagccacctctcccgaacaatacagaatctggtaggtgcagcttctgattacatggaccagggaatcctgggttgctaatgacttcatcctcagctaccaacaggaagcttcgtggctttatgatctcatcagatttcttcattatttttcacgacagaagtgaact

SEQ ID NO: 120562 - DNA, 562 bp, Homo sapiens
  chr11:33037369-33037931
  hyper
agagagacacgtgaccggcagcgggggcggggcctgcagggagccacgccccgcacagttaacagacgggcgctcagggagctagggagctgtgaagctgctggaggagttggcgtccggggagcaagggccatggccaccgtgcaggagaaggctgctgcgctgaacctctcggctctccacagccccgcgcacaggcctccgggtaggtgccgaggactgccgcctgggatggcgcggggcgggctggggtgcgcgggctgggtcccggcgcggggcgggcggcgtggggcgttcggccgcctgcgcctgtcaacggccggctgggcgagcacagcacagctgcgaccacttggccaacgcccccgccgagcgggcggatcgagttcctctctggctggtgggctgcaagcggcagagcccgcccgcacagcccagcttttttctttctacccagactctcaacttgaccgcgcgttggtctgtgcgcccgctaacgtgccaggcacgcgccggggagctccgggatatgctccgcggtgctaccggtgacaagtgtggt

SEQ ID NO: 120563 - DNA, 102 bp, Homo sapiens
  chr11:33060992-33061094
  hyper
gcgccgcccagctgcgagtcaccgcttactgaaccccttcggcaagcaggggaaagaccctcccgcctttccgtacgaagacatggcgctgccctatattgg

SEQ ID NO: 120564 - DNA, 30 bp, Homo sapiens
  chr11:33061525-33061555
  hyper
tcctcccctactcccggccctgccactccc

SEQ ID NO: 120565 - DNA, 42 bp, Homo sapiens
  chr11:33182772-33182814
  hyper
atgtctggagcagtcggaggaacagacgtggagaagaggtcg

SEQ ID NO: 120566 - DNA, 265 bp, Homo sapiens
  chr11:33183093-33183358
  hyper
ggcggggctaatttcgcgactctggttattccgagcgtgcagaaagcagcgagatcccggggcgggcccaattcctgggctgacgtcactaccctggcttggagaggctgttgctgagccggctccaaccggctggaaggcgggaagctgtttcgcctggaggctcgcgcgctttttggaattcagttatcaagctttagagcctggctactcacagttgaagcctgattgcaggtcagcaatgctaaacgttaaatgcctctta

SEQ ID NO: 120567 - DNA, 1122 bp, Homo sapiens
  chr11:33397372-33398494
  hyper
ctgccgcttgggcacgttgaccatgacccccctccccggccagacgacctctctcccgccaaccttcccttctctagatgggggacaggaggggagggaagccctccccttaaggacctccgctgcgcgggagccgccgggaggggtccccctcctgggtctcgagcccggccgggcgcgcgggagcggggagcgcgcggtggctccgcgcggggctgcgcgcgcgcgccggcctcgcctcctcgcctcctcgcccgttccggaggctacgtgctttctttgtcaatgaggcgccgctctgagctgcggtagcactcgcggcccgggaacccgagccggagccggggctggaacccgaagcccagcgaggagcgaggagcgaggagccaggacagcggggcgccgaggctgcagcggcggcgggagggagggacccgagcgcgccccgcggccgccacccccgttcccggcagcctcgccccctagttctgcaggagccggcccgggggagggggccccgggcggcgcccgtcccaccctcgccgccccaatcgcgccggcgcgcggcgacaggcaccgtgggaaccccggcccgcacccgccgcggctccatgcgggcccggcccctgcgcgggtgaagccgcggctccctggagcccgccccgggcgcggcaggacgagcgagccagtcgcgccgctcggcgccccctccctccggcgcccgggccgtggccggcgatgcccggtgaggaccggggcgccgagggctgggctccccggcgcggtgcagagcgaggcagcggcctggatgtgtgaagcgtccccatggctccgcaggaggccaagcctcagggctcaagggaagctgggcccgcgacgcgggggcgcgggggccggcccgtggcgcgtgggcttggtcgggctgcctggggagccgcgcgctgcacgggtgtgaggggccccggggccggcgcgtcccacgatgcgcccccgcggccaccgacgctgctgctgggacttctgctgctggcggccctcctggagcacggccaggccgacccgggtaagcgctcggcggcggggcgtccgcggaggtttctggaggagcggggcggcgggacg

SEQ ID NO: 120568 - DNA, 30 bp, Homo sapiens
  chr11:33722304-33722334
  hyper
cgtgggaggaaccccgcgccgggagacgcg

SEQ ID NO: 120569 - DNA, 30 bp, Homo sapiens; identical to SEQ ID NO: 48349
  chr11:33758142-33758172
  hyper

SEQ ID NO: 120570 - DNA, 30 bp, Homo sapiens
  chr11:33758207-33758237
  hyper
ttggggcgtcctcctcggatttgctatggg

SEQ ID NO: 120571 - DNA, 30 bp, Homo sapiens
  chr11:33796172-33796202
  hyper
ggtgggctgaggtgcggctccctggagacc

SEQ ID NO: 120572 - DNA, 30 bp, Homo sapiens
  chr11:33850946-33850976
  hyper
accccaagccgcagcgatagaacggccctt

SEQ ID NO: 120573 - DNA, 30 bp, Homo sapiens; identical to SEQ ID NO: 48350
  chr11:33888571-33888601
  hyper

SEQ ID NO: 120574 - DNA, 1000 bp, Homo sapiens
  chr11:33890236-33891236
  hyper
tggtgcattaactttcgaggttcacatgtccccatcggtggaccccgaggaggggtacacctactcagatttactccggatttcgctgctctagaaatccctggaggcccagagccagctccgaggtggacggtcggacccctcacccgcccgttatccgcaaggctggcagcggctccacctgcggaccgggaaggcggccgttggggaccccggaggccgccacttggaatgttcccctttccaagaccaaatggacaaagagaaaggaccgagaaggagagggaagaagggagcagagtcaagcccagaacgctctccggactgcacctgcgcgcctccaggctctcctcgtgcctgctcccgtgcaaactttctggcccgtggtggctttggggagcgtcccagtagcctggagtggcccgcagaggcgccgggccgacccctgtccctgccgcccgccgcccagtccctctcccagagcccccggaatcacccgggaggaaggaggagcccagcgctcggcacagggggccaagggcacgccgcgagcgcgcacctggagccccctcgcgggccgcccgggtccccccgacgctccgggacgcgaggccgtggacaccgggggtggcaggggcaggggggccgcacttactctgaagggtccaggctcttcctttcgatggccgaggacattggggagggaggcggggtgccgggcggcgggggcgctccctttgtggcgcggggctggccggctgccggggctcggaccccctcgggtgctcgggcgccgccgccgccgccgccgtcgccgccgctcctgcgcctccgcttgctccggcgctccgccggcgagctcgcccctccgcgctcaaggacagtcaccgcgctcccttcaaacgccaaagagagagagcgaatcaccgggctgcgggcgcgccgcggccgaggcgggggccggggcgcgcagcctggctccaggcggctgcagctgctg

SEQ ID NO: 120575 - DNA, 551 bp, Homo sapiens
  chr11:33891710-33892261
  hyper
ggggacggggagagccgctcagcgaacacctctccttggaaaggaggctgggcaaccactaaatcattcttcagggcttcccctcttccgcctttcccttttggtttaactaaggcagaaagtaacccacgaacagctcgagcaagcaagaaaagacaagaatgtgaaataagcacctacagaaatgcaagtgttcccagtggattttccgcccgtcccaggttcgaggtcccaggtccacggacgccgtgcactgggatgccccggacagcgcggctctgcgggctgcgggctacgggctgcgggccccaggctgcgggctccgggctgcgggctccgggctgcggccgcgctctgcagaggcgatggtggtgcgccagccgggactgcacgggctggggacgcctagagcagagccagggcagctaatcccagagggagggtggctgggagggaccacgcggggccggggctcctctcagtcggctggtggcggaatcccctccctctgcacctttcagaaagcggactcctgcggttaaactgccccc

SEQ ID NO: 120576 - DNA, 30 bp, Homo sapiens; identical to SEQ ID NO: 8048
  chr11:34073472-34073502
  hyper

SEQ ID NO: 120577 - DNA, 119 bp, Homo sapiens
  chr11:34126916-34127035
  hyper
caggccctggggtgcggacatctattttgcccttcttagccgaggtactttagctgggatatgaagagtgaagaggcaaaccgcagccaacacccagctaccgcgagcagtgggactaa

SEQ ID NO: 120578 - DNA, 30 bp, Homo sapiens
  chr11:34127595-34127625
  hyper
tgtaactggggagtcggggtgaatgggtgg

SEQ ID NO: 120579 - DNA, 30 bp, Homo sapiens
  chr11:34196143-34196173
  hyper
ggggggcggggacgcgtttctgtcctctgc

SEQ ID NO: 120580 - DNA, 30 bp, Homo sapiens; identical to SEQ ID NO: 48355
  chr11:34378278-34378308
  hyper

SEQ ID NO: 120581 - DNA, 30 bp, Homo sapiens; identical to SEQ ID NO: 48356
  chr11:34378790-34378820
  hyper

SEQ ID NO: 120582 - DNA, 30 bp, Homo sapiens; identical to SEQ ID NO: 48357
  chr11:34380824-34380854
  hyper

SEQ ID NO: 120583 - DNA, 30 bp, Homo sapiens
  chr11:34937549-34937579
  hyper
tcccgccatcggagcgccccgcccgagacc

SEQ ID NO: 120584 - DNA, 30 bp, Homo sapiens
  chr11:34938492-34938522
  hyper
cggttggggtccgccgacttggcctaatgc

SEQ ID NO: 120585 - DNA, 1065 bp, Homo sapiens
  chr11:35160295-35161360
  hyper
agatcttgctccagccggattcagagaaatttagcgggaaaggagaggccaaaggctgaacccaatggtgcaaggttttacggttcggtcatcctctgtcctgacgccgcggggccagcgggagaagaaagccagtgcgtctctgggcgcaggggccagtggggctcggaggcacaggcaccccgcgacactccaggttccccgacccacgtccctggcagccccgattatttacagcctcagcagagcacggggcgggggcagaggggcccgcccgggagggctgctacttcttaaaacctctgcgggctgcttagtcacagccccccttgcttgggtgtgtccttcgctcgctccctccctccgtcttaggtcactgttttcaacctcgaataaaaactgcagccaacttccgaggcagcctcattgcccagcggaccccagcctctgccaggttcggtccgccatcctcgtcccgtcctccgccggcccctgccccgcgcccagggatcctccagctcctttcgcccgcgccctccgttcgctccggacaccatggacaagttttggtggcacgcagcctggggactctgcctcgtgccgctgagcctggcgcagatcggtgagtgcccgccgcagcctgggcagcaagatgggtgcggggtgctcagcgcggacccggcggcagcccctccggctgagtcggccctgggggactggagtcaagtgagctgtctgcgaagtgcattgggctccggaaagcagggctgggatttgcgctaaaccgttggagaatgtgtctgtggaagcaccatttggttgaaagaaaaagagaaagagaagaaagtttgttgggcaggctgccggcgcgcagttttgggcgaggtcgctagagctgcagcacatggcagaaagtaaccgttctcccggatgcgcacagtcgttgtctggactaacaggctcctgtgcccaagggctcgccaagccccaccgggctgtgtctaggcagggcagagctgggcggggcagagactggggctggaacagggcgagtggctgttatca

SEQ ID NO: 120586 - DNA, 201 bp, Homo sapiens
  chr11:35439896-35440097
  hyper
cgttttcccgcctcccgggaagcacccaaatctcttccacccttccttagagctagccagggagattccgccttccagggacaaggaccgatcggagcgggcccagcatctccatggcgactctgcaaacctggcgttcaaggccgcgcgcgctggtccttgccccgccccagggccctgtcttggctcattccttccgag

SEQ ID NO: 120587 - DNA, 237 bp, Homo sapiens; identical to SEQ ID NO: 48361
  chr11:35440137-35440374
  hyper

SEQ ID NO: 120588 - DNA, 415 bp, Homo sapiens; identical to SEQ ID NO: 8052
  chr11:35440469-35440884
  hyper

SEQ ID NO: 120589 - DNA, 910 bp, Homo sapiens
  chr11:35440936-35441846
  hyper
cggtgagcgtgcgtgcgcgtgtgcgggtgtgtgcgcgcctggggaggcggtggaggccgctgcgctctggctcggcgccggccagggagggattgcaaggtttagccccgccggagctggggatttgcaggcgatccctctctattttcgtcgagagctgacatcacccgcgccgccgcctcgggcaactcctttaaccgccgccccccgcccccatctccagtcgcggtccctcctctgccatccctccccccagcctctcgccataaattagccaaataagaaaagaggccccgccgctcgtccgggaaggcttgggcagccggtggcaggagcccaggatctaaggagtagctattgtttcccctgaagcccgcgtggccccaggtcaccccgtgcggggtgaagcgcaggcgaccgcgcggagacccgggatgcccctccgtctccgcctccctggagcagcccctggcgctccctcctcactccccggagcacccgcttcagctcacactcacccccaaactcacaggcaggcacacccaccccatcctcccacgtctgggggtcccaggtccagcggagtcgagcggctgaaacacgcgggtggtgcagcctaaacgcggcccagctgcgctccctcccccgccgaagctcgaataaatctctggccttcaattattcagcgagattaatattaatgcagctccctgggggcggcgggcggggtgcaggggaggccgggattttttttttttttttttaggccgagagaggtcggcctcgtgggtgccggctgagaaggcgcggagagttggccgaggggtgagtggcgggggacggttctccacccactcggcgctgctcgccgcctgcttccgtgtcccgggggcggcgcacagagacagat

SEQ ID NO: 120590 - DNA, 81 bp, Homo sapiens
  chr11:35442068-35442149
  hyper
tttccccggggtagacgatcttcggatttgcgctgtgctggaccttgttagacgatggaacgcgaccggccacgtgcaaac

SEQ ID NO: 120591 - DNA, 594 bp, Homo sapiens
  chr11:35547020-35547614
  hyper
gggtgtcctcctagggtgtcccggacgctactcacagtacctcttggcaaggacgagatgagaaggagctgaagaaaagtgagccccaactgcgtccagcaacccagctccatccttgccgcggctggtgcccgagcgtctactggggagggagaggagggacccagggaggccgggggcaggcgggttttacagggacctccccgagccccagctgagcgggagctcgggtttcagctcgccaggctctcccatcctcatctgaggggaaccaccttcagccagagcgacgtcagcccaaacctctcctctctgctgccttaacccttgcggggccccgggaggtgtggccacgcctggagacccgcggacggcggctgcaaaggaagctgcgggggagggaggccagcctgggtacaggtggggtcccagtgttgggtgctgggaggaggggccataggaccctgggcgggagcagaggtacccagggctgcggggcgctcaggtgaggccgggagatcttcctacgggaggctgagacgggagctggctttgccctctctgactgcacgcggggagcctgattaaaagcct

SEQ ID NO: 120592 - DNA, 1622 bp, Homo sapiens
  chr11:35639631-35641253
  hyper
cgctgcctaggcaaagggacccggcgaccaagacacccccgcgagggcccagggcgcgtccctcccgccaggccccagactccggctctgcgccaccccctcctacgccccggcgcgggcgcagccagtccggcttcctccaggcccccaagtcccggaccgagtgtggggccgcctctccctctcggaaggagccatcgccgctttaagtggaagaggagaggaagggggcgggggagcggggggcggggagcggaggcggaggagggggagggggatccccctggctcccacgtggtccgggcgcctgtgaatcgcgcccaccggagggtctcacagcgaaatacaaaagcagctgggaagcggcggggactcgagttcccagcgccgggcggagcgccggacagagccccgcagcgccccgcggccgcgatggggccgaagcgcccgaagccccggagcccacaaactgccgggcccgcctcgccgccgggacccgggtgcctgggctcggcttgaagcggcggcggcgcaccggcacagccgcgggagcatgggcaggaggatgcggggcgccgccgccaccgcggggctctggctgctggcgctgggctcgctgctggcgctgtggggagggctcctgccgccgcggaccgagctgcccgcctcccggccgcccgaagaccgactcccacggcgcccggcccggagcggcggccccgcgcccgcgcctcgcttccctctgcccccgcccctggcgtgggacgcccgcggcggctccctgaaaactttccgggcgctgctcaccctggcggccggcgcggacggcccgccccggcagtcccggagcgagcccaggtggcacgtgtcagccaggcagccccggccggaggagagcgccgcggtgcacgggggcgtcttctggagccgcggcctggaggagcaggtgcccccgggcttttcggaggcccaggcggcggcgtggctggaggcggctcgcggcgcccggatggtggccctggagcgcgggggttgcgggcgcagctccaaccgactggcccgttttgccgacggcacccgcgcctgcgtgcgctacggcatcaacccggagcagattcagggcgaggccctgtcttactatctggcgcgcctgctgggcctccagcgccacgtgccgccgctggcactggctcgggtggaggctcggggcgcgcagtgggcgcaggtgcaggaggagctgcgcgctgcgcactggaccgagggcagcgtggtgagcctgacacgctggctgcccaacctcacggacgtggtggtgcccgcgccctggcgctcggaggacggccgtctgcgccccctccgggatgccgggggtgagctggccaacctcagccaggcggagctggtggacctagtacaatggaccgacttaatccttttcgactacctgacggccaacttcgaccggctcgtaagcaacctcttcagcctgcagtgggacccgcgcgtcatgcagcgtgccaccagcaacctgcaccgcggtccgggcggggcgctggtctttctggacaatgaggcgggcttggtgcacggctaccgggtagcaggcatgtgggacaagtata

SEQ ID NO: 120593 - DNA, 485 bp, Homo sapiens
  chr11:35641291-35641776
  hyper
cggaccgcgcggcgcgtcctggagctgcaccgcggacaggacgccgcggcccggctgctgcgcctctaccggcgccacgagcctcgcttccccgagctggccgcccttgcagacccccacgctcagctgctacagcgccgcctcgacttcctcgccaagcacattttgcactgtaaggccaagtacggccgccggtctgggacttagtgtcaccgggaggaaaagagagagatctggggctggggtatggatgatggggggaagggcggtcgcctctgccactgtcagggaccagccggccaacgcccacccgcaaaggtgtctaaaaacttcagcttttcacccacctgcccctttctttcaatcccacgctgtttcctttcaaagttctgggaggacgaactcaccgaggcgagaagtgtaacattctctccacccagcttataaaaggattctttactgtgccagcacggggattggatccg

SEQ ID NO: 120594 - DNA, 30 bp, Homo sapiens
  chr11:35684186-35684216
  hyper
gctgagatttggagcggaggagctgagccc

SEQ ID NO: 120595 - DNA, 30 bp, Homo sapiens
  chr11:35684630-35684660
  hyper
cgaggccttggccgcgtcacagcacccaca

SEQ ID NO: 120596 - DNA, 187 bp, Homo sapiens; identical to SEQ ID NO: 48369
  chr11:35966092-35966279
  hyper

SEQ ID NO: 120597 - DNA, 30 bp, Homo sapiens
  chr11:36311159-36311189
  hyper
tagggggaccagggcggaggatggtttact

SEQ ID NO: 120598 - DNA, 30 bp, Homo sapiens; identical to SEQ ID NO: 8060
  chr11:36397581-36397611
  hyper

SEQ ID NO: 120599 - DNA, 1506 bp, Homo sapiens; identical to SEQ ID NO: 48371
  chr11:36397977-36399483
  hyper

SEQ ID NO: 120600 - DNA, 200 bp, Homo sapiens
  chr11:36531739-36531939
  hyper
ccagtgggagccttcgccaccttcgctggccgcccgcaggccaagccccagctgcggacgccactgcttccgccttctctgctggctgcggggagcgaggggcagggagcgcgccggggaggagacagagcggccgagttcggagagagtgccccctggcggtgatcctccaggcggactgtggcgcgggccgggcggcg

SEQ ID NO: 120601 - DNA, 412 bp, Homo sapiens
  chr11:36616033-36616445
  hyper
atttcccaagaatccgttctctctgggatgtgtagctttggaaatctgtctttgttgctctgggagaggggactcctggaatgtgtctgtgaataaagactagccgaaggtgcgaagtgactagacgggagcaaaggaggaaaactagggaatgggaggtgagagtggctgacaccgacccaacgtccgggttgccggaaggctgcagcgcccggagcggtgtcgggcaaaccgctaccctggtattgctggagcctctcctggggacttttgaacaggtgacccgataggaagcacaactgcttctgttggagtgcggttacctggagaccgcagtctgaagggactcccggcagagatgtcgttacggtgtcctgcctgtctggatgcttaggagcgcgactcaaaacta

SEQ ID NO: 120602 - DNA, 913 bp, Homo sapiens
  chr11:40314507-40315420
  hyper
ccccagcctccccttcgaagaatttggggagcaacttcccccccactctccatccttccggccggccccttcgccaaagatctgattagatttctcatcacaacccagtgcgcaattgaatttttgatttcagccacccggccagccaccttcccctctcccctccaaactccggttatatcctgtctccttccctccaccgcctctgcaatttcataatctcacgttaaatggagtgcggggggcgggggcgggggcgggggcggaggtagtggaggaaaatttcaaggctccgtcagctgtcaagaagaaacccattcctccccccgctactttttttttttctttttaaggctcggggtgcctttccttcctctgtccccgcccccacccccagcacccggtccagatcctccaggtgttgcagaactccgcggtcggggccgggatcacgggggagacgcaggatgcggtccctcgccggtggcccctgccagcccccgggtccccttctcctccatcagccggtagtggctccgggagcgccgaggtgatggaagttgagactggggcttttatttcaaatggggagggcgaagtgaggggacagacagggtggtaggcaaattaaaaaaaacacacacgaaaaaagaaagaaaaaaagaaaaagaagaaaaaaagaaaaaggaagaaaacgggtaaaaaaaaaattccctaatcgctggctcttctcatccttctcaaatgcaactgcagctttgatctcatttccagctgcgttgggtacattttggagccacaagttggttcccgttggcgcagaccttcccgatgtctgctagtcctctgcgaggagacgcgttctcgggagcgcagctgctccgcgccgcccttagcgccatcgccctggctc

SEQ ID NO: 120603 - DNA, 123 bp, Homo sapiens
  chr11:40315465-40315588
  hyper
cggtttgaactctcttcctccccctccctctgctctctcccctctttttctcccaaataaatgctctcccagcaccggcggcagctcttgccagcccaggctttctctcgaccaatgccacgt

SEQ ID NO: 120604 - DNA, 215 bp, Homo sapiens; identical to SEQ ID NO: 48374
  chr11:43333312-43333527
  hyper

SEQ ID NO: 120605 - DNA, 30 bp, Homo sapiens
  chr11:43333767-43333797
  hyper
cctgcagggcctggcgctccgcggcctttc

SEQ ID NO: 120606 - DNA, 67 bp, Homo sapiens; identical to SEQ ID NO: 48375
  chr11:43569007-43569074
  hyper

SEQ ID NO: 120607 - DNA, 504 bp, Homo sapiens
  chr11:43569128-43569632
  hyper
cgagcgcagccggagcagtcgagcgggcaggacaccgtcagtgccgggagaacacgcgcgcgtgggtggatggcgggagggtcctcacagccagccgcaccacccccctcccccccacatcccgcaacctggcttctcctcgctctaaatctaggggaacaaaaacccggcgcgtctgggacagcctctagagagactggggagggggcttccccggggggggggggggcatcgcgcagccctaggcgcccgcccctccggcctaagcagggttcctccccaccttccttctcctcgccgccccaccctcccgcgcccttctcttcccccagctcgggctccctgggctccgaggcttcgcccccgcgcgggagctctcggggcgagggcggtgcgcagcggtgcgggggcagaggtgatgctgggcggggcggggcggcacggggagggagcgggcggggcggggccgcgctgctacgtaagcagccgcgagaggggatcctg

SEQ ID NO: 120608 - DNA, 993 bp, Homo sapiens
  chr11:43596514-43597507
  hyper
gcagaggggaaagccgcagtagcaagccggacactcccctctgggcgctccccaccgccagaactgacgccttcgagggcggtggatttgtgaatcagctcccctttcccccacacaggggagcccctaaatggctgctggccatttgcaaagggttgtgtgcatgtgtgtatttaattgcaggcttatttgtttctgctctgggagtctgtccgtctctctgtaactcggatcattgctctctgggaagctgtataactggctgattccgtgggagaccaggcaggatgcgtgggcgcaggaaacagaagagggaaaaggagggagaaaaagagagcaggagggagagagcgggagccttagaatctgttatttgcgtcactcgaggagccggggctatctgcccgacaaacacacagaattaatccgagttacagccatagctgtctatgctacagtgaccagatgagaaagggcggggaaaggacgcgcgcgggagcgtgtgcacggccgagtttgcattgggcgtcttgggagagtttggggagggggctgtcctgctgggcacgcccctcggggccccgcttgcccggtgcagactaggctgcagcctgctctgcagctgcccagcccaagcctggggtggcgcccgcctcggccgcctcgcctgctcagtggctgcgtggaacacaaagcgctgtctccgagcagaagcgtcttctcagctgaaccagacccaccaaagaggagaatctgcacgtgacgtcagtagctgatgactgacgcaggctggcaaaggagactcaaggcggctgctccgcgctgccttcatgagtctattttctccagccccctcgtagtgaattactagaacgcaaaacacacacacagacacacatatgcagctttcaaaatatacatttccaaaggcggtgtgttgcaaacacaacgcgattttgcagagcgtgggtgggaaacgtgggaagggtatgg

SEQ ID NO: 120609 - DNA, 1517 bp, Homo sapiens
  chr11:43599957-43601474
  hyper
aagccgtccctctctcggaaggttccctgactgagactgaatattcaactcataatagtaacaagggcttttaccgatgtgcagaataacacaaataacgctgcaacccacactttgtcttgacaattcagttcaaaccaaagctgctcacagcctctcggcccaccccgcggcctcctcgtcattcactgggacctactggttccctttcccaagcctcgcccctctcagccctgcaagttgcgtggttgtgtttacaaattctgccacaattgcaaaggaaataggggtggggggagcggtcggggcgggagtggtggtagcgccaataaagcacttgcaacacgtggagcggtggttggggggaggtgtccaagagtcaagaagggggcggagggacaccccatggcctcatttccacctccccattcttccccaccccttctcattgcttggcacaatgcacaagtttaccccccgaactggatcctattaaataattcaatggtagcggtgtaattttggttggaaccagcacggattcccaagtcgtgactgcaaaaagtgagtaatgcgcgctggctgcgtcatggctctagtcacagttcattccgaactgagaaggaatcgtgacttcgcctggagacgtcccctacatgggagatggggggcgggggggcaccaaatcagtggggacgggggtgggggggaagacctatccaatgaaaaccgctgccaggggggcatttgaactccgtcgcttgctgtctcgctgtcccctctctgccccgcgcacctcgctccccctcccggccggcgctcgcagtggcgcgcctgctcgctctcccgctaagcgacgagtcttcaacaagttggaggaaggcaggaacgcaggggttaagctcggaaagccgcaattaccaagatcgtgaccctcccacacagtacagtaacttatatacttacctggaagaacccgctttgccgccgggcaaacacccgtggggggcggggaggggccggagggagcgggccggcaggagaggggctgcttccagctggctgcagtgcggacgggaccggcgcgctcccgtggcccccagaccgaggtaaggagcagggagtcggcgcccgggtcggctggtggtcggtcggctcactggtagtcggtcggctcacgggtagtctgagcagaacttttttttcccagttgccccgcgccgcggcggcggcgggcgcagaccgcggagcccctctggcgcggcgggcgcgcagacgctcggagggtgtgtgcttgcgtctgtcagtcccggagccgaggggatgccgtgggagggtgagtgggtcgcggagctgcaggagggtgatggatgggcgaagggggtgggtcgacagggacttgaagacagtgcctccaccgtcgagagacgttttctccgggcgtgctgggcgagggtgggagtgtgtgtgcgcgcgcgcgcgcccgcccgcacgtcgattccagggtgccaaagaac

SEQ ID NO: 120610 - DNA, 30 bp, Homo sapiens
  chr11:43601857-43601887
  hyper
tcaggcagtcaatgacgggttcgccccttg

SEQ ID NO: 120611 - DNA, 631 bp, Homo sapiens
  chr11:43602405-43603036
  hyper
tgacgattttagtccgcaccaatgagctggcggcctcgtctgtatttatttagtgctctgggggagtttttctctttacgcagcgcctgtagtcacggctggaaccttggctgggggactctgagggataagaggggattcggggggaatccgaactgtacctgttcagagatccgcgaccttgcagccggggctggcggaactctgatagggagatagagggataggacaggcaggcggggaggctccgggtgctggggcgacaggaaaggggtggaggctgggctccgggatccgggtgcccctctgcggtccccttctcgccctccacacacttctctcggggctgagttgggggatcgcggacggtctggagaaatggagacacgagtccaggggcgcggaggggcgggcagcgcgcggagtggtgagactgagccgcgatggaacgcgctggggagacccagcctgttcggctccagggttcggagacatcctgggctgaaggcggcggcgaaccgaagaagccggcatattctgcccttcgcgaatctttttgcggtctgggcttgctgtacataactcaatagccggaagcccttaccccaaaaagcatttgcggagggcgcac

SEQ ID NO: 120612 - DNA, 159 bp, Homo sapiens; identical to SEQ ID NO: 8068
  chr11:43603076-43603235
  hyper

SEQ ID NO: 120613 - DNA, 622 bp, Homo sapiens
  chr11:43603523-43604145
  hyper
ttagtatcttatgtcctggtgcgggggacccggaggtgaggcgagccgcggtgaattgggtagatccgaaaaagagggaaaacacccaggcaccgcccgatccccggagtctcttcctcccgcgcctgcttccaacctaatttggggcgttttgcagcctcgggtctcccacatctcctctttttcaaaactaagtagcacggaagggggtaaaacaggcgagaactggggaagcccccgcagagaaggagctttggagagatgcggttgtgcccgactcagacgcttagcaggaacagaagcagcagcagcagcagcagccccatcccggcctctccaggcgccggtcctggggaggggggcaaagctgcaggagaggggagagtctgtgagtccccctcctccccctccactcattgcagtcctgaccacttcggtcacaagtggcacaaatcaggccttcaccacgctccccgcgcccttcgcctgctaggaacactgctagacgcccttgcccttagggactgggccagaaggacacacatacacacatgagtgcccacagggacagaaatgggtagaagatgggtctagagacaccggagttcaagacccgagggct

SEQ ID NO: 120614 - DNA, 51 bp, Homo sapiens; identical to SEQ ID NO: 48383
  chr11:43604828-43604879
  hyper

SEQ ID NO: 120615 - DNA, 337 bp, Homo sapiens
  chr11:43902241-43902578
  hyper
taggccctccaggcgcgggggatgtgggactacccggactgaggactgcgcaccggaagtagtggcggcgctgcgtaacgtcgagaggaagtgcctgatgccgcggcctgtgattgggagttgctggagtcggtgcttcactcttaaggttccgatcacagactgcggagtgggtcaggggctgcgagggctgccccaagtcctaccgggtttgcacgggcgcgcccggctccgcccgcaagtgcgccttcctgacttactgctgggtgcgcggggctgggggtgcgagtaccacccctgaagtctcttcctgggcgacctccggggcctcattcta

SEQ ID NO: 120616 - DNA, 38 bp, Homo sapiens
  chr11:43963548-43963586
  hyper
ccggaatggaataatcgagatgtgtttgcattcgtgcg

SEQ ID NO: 120617 - DNA, 2558 bp, Homo sapiens
  chr11:43963645-43966203
  hyper
gggggtggcaaggatccagaaggggagcccaccccttcttccgagctcagctctggggagccgggcgctcaggctcgccaggctgcaaagagagctgagagctgcctcgcgccccgcgcagaaccggcggtggaataaccagcgcctcaagtgtgtgcatctgggaccagggggcgggggagggggacctgcggccccgcggccaacccggttggtgcagacttggggatcccagaagggacagtgcccgcccagtcgcggcgattgagggtccctgtccgggcgcagctcgggccagccgcgtgctccggggccgcggcttctcccggaacccccgcgggcggggcctgccttccggagccggttggcggggggcgggcggcgccggggaaggggccgttactttcccagagcggcggggcgacgtcaggcggaagggcgcggggcgcgcacgctttaaatggcattcgctgtcatccgagctcagagccgtgtgggcagccgcgggctatataagccgcgagcctggccgccgcggggcagacggcgacagcagcggcggcgagcgcctcggagcgcggcggaacagcgccccccgagccccgtgccccccgacgggtccgcccgcccgcccgccctcccgaggagcgccggcccgggcccgcgagggccgccgccaccccgcagcagatttggatcccccgcccggcgagcccccggctgctgcctcccggggggccccggcgcagcggccgccctcggagagccccggcgccccgccgcccggccccgcagacgccggaggcgccatggccgccaagcccggcgagctgatgggcatctgctccagttaccaggcggtgatgccgcacttcgtgtgcctggccgacgagttcccgcagcccgtgcggcccgccaagctgcccaagggccggggccggctgcggcggccgcgccagtctcgcttcaagacgcagccggtgaccttcgacgagatccaggaggtggaggaggagggggtgtcccccatggaggaggagaaggccaagaagtcgttcctgcagagcctggagtgcctgcgccgcagcacgcagagcctgtcgctgcagcgggagcagctcagcagctgcaaactgaggaacagcctggactccagcgactccgactcggccctgtaaggggcgccgcccgcgggggggacgcgcgcgtccgcggtccgcgcggggaccggcgtgtgaaccccgagagtgcccgcgccctgctcccgggggacccgcaaggacccgggaccgccgctcctcgcgcgctcggactcccgccccgctgcgaaccggtcggtgcgcccctcgccgcgctcgccctggcccgggagcgccgggagcggggccgctttcctcgtccttgtaaatgtttattttttaactcttcccagtgcgaactctgctgtgagtgtgtgcggggaggcgcgcccgcgctgagtcggcggcgggtagccactccatgcccttgtccgatggtttgcaactccgattttgcacaccgctccaccgtgccccccagcgcacacccattcacactcacgccaacactctcgctgaacacttttataattgttaggcgtggccgttgggactttgggcgcagcgcggctgctactgcgtctggaggattgatatttatttttgcattgcgatggctgaaggcatttatttaacgatctttttacctggatatgtctgtgaggctcctgaaaggagacaaataaagtcaatatatttgcacagtgcagttttccaggctcttgactttttgcaccttcggggtccaggctcccaagactcggggaggtgggggaggaggtggcagggggatgtcggaccagggagccgggagtggagctacctccacaagcttcggtcaccggaacgaggttgcgccaccggtgcgcgggtcggttgcctgcctccccaagtggatccacccccggtccagtgtgctcctgcgtccctggtctattccccatcgccggcatccgggctgaagtgaagccgcaggaggggcggaggcagagctgacgatggagagctctctcctccgtacagttcacttcccagagctggggtcagggtcctcgccccgcacccgccacagaagacgcatctccctctgcgctgattcctggcggcgggtggggagatgtcggagccagcaatgcgagatgtttgggcgttgggacccgagagtgggctggaggccagcctgggttggtcgagagtgtgggtgcgcgctcgctgtcgcgggcaggtgactccctgaccgcagttgacccagcgcagtgcctggcgctcctgcgctgcggggaaaaccgcggccgctatgtctccagccgttctctgcgctccgcagggttcctccaggagggtggggcatgtctttggttagagcctgaagggcacctgggtaccatcgagtccttcccttctccccgcccctgcctttgtttacatatgagaaaacaagcctagggtaacagggagaggagcgcccccagttctccg

SEQ ID NO: 120618 - DNA, 186 bp, Homo sapiens
  chr11:44087352-44087538
  hyper
gaaatgacaaactgcgatgaaaggccataaggatgctcacacccgaatctaaaaagccctttgtgtgggccgcagccaagcatactttggcaagaaatttctgtggctctaacctcctttgaaaactggagaaccaaggccaggaggcagaaggaggtggcagacccggcccggcggcggcccagc

SEQ ID NO: 120619 - DNA, 129 bp, Homo sapiens; identical to SEQ ID NO: 8071
  chr11:44087989-44088118
  hyper

SEQ ID NO: 120620 - DNA, 86 bp, Homo sapiens
  chr11:44117172-44117258
  hyper
tgtccagcaggaggcgcggcccggcagctcccgcatgcgcagtgcgctcggtgtcagacggcccggatcccggttaccggcccctc

SEQ ID NO: 120621 - DNA, 30 bp, Homo sapiens
  chr11:44325945-44325975
  hyper
tctctctggttaagcgttctctcttctctc

SEQ ID NO: 120622 - DNA, 335 bp, Homo sapiens; identical to SEQ ID NO: 48388
  chr11:44327252-44327587
  hyper

SEQ ID NO: 120623 - DNA, 562 bp, Homo sapiens; identical to SEQ ID NO: 8072
  chr11:44330877-44331439
  hyper

SEQ ID NO: 120624 - DNA, 299 bp, Homo sapiens; identical to SEQ ID NO: 8073
  chr11:44331482-44331781
  hyper

SEQ ID NO: 120625 - DNA, 34 bp, Homo sapiens
  chr11:44332118-44332152
  hyper
gattcaacccggaggcgcccgagggcttttccga

SEQ ID NO: 120626 - DNA, 673 bp, Homo sapiens
  chr11:44332353-44333026
  hyper
tcctacggactcctgcgcgcgagctcgcgggcgccgctgcgggccttcccgctggcaccttttcctaggtttccaaccttcctccccattcccgttcctacgggagattaacacacacacaagccttcgtcgtccagtgcatggtcacttgcacgtcttgttaactatttccctctgctgtaagggcgctgggctgggatgtagcggaatctgtgctccctcaagccctggagaagccctgggctgggcccggcttcagaagctttagagcgctgccctctgcgctcccgtctagaggccgcaccgttcacgccccacgtctgcgcccaggcgaggggatttcctgccaggcgaagtacagagagcggactctggagaccccctgaccttgcccgatagtcgcgctgtcacctgttcactccttggggtcaggggtcggggagaggggtgagaccgtctcttccctttctggcctcactgcccccgactgtaaaacgaactgcttggttttgataggttgtggtttcaccaccactgcgagcctcaaggcccctggcaccgccacagcaagggaaaaaactttgcgcgtgcagcccctcgatttcgcttcatgacaaccgtgctagagattggcgcccccaattttctgatgagctaacggaggctcagagag

SEQ ID NO: 120627 - DNA, 58 bp, Homo sapiens
  chr11:44337570-44337628
  hyper
gtcttaaccgctgcgcgagttatcagaaatccctggagccaaacactacgggggaccg

SEQ ID NO: 120628 - DNA, 135 bp, Homo sapiens; identical to SEQ ID NO: 48393
  chr11:44337726-44337861
  hyper

SEQ ID NO: 120629 - DNA, 175 bp, Homo sapiens; identical to SEQ ID NO: 48394
  chr11:44337882-44338057
  hyper

SEQ ID NO: 120630 - DNA, 711 bp, Homo sapiens; identical to SEQ ID NO: 48395
  chr11:44338086-44338797
  hyper

SEQ ID NO: 120631 - DNA, 30 bp, Homo sapiens; identical to SEQ ID NO: 48396
  chr11:44340824-44340854
  hyper

SEQ ID NO: 120632 - DNA, 366 bp, Homo sapiens; identical to SEQ ID NO: 48397
  chr11:44341436-44341802
  hyper

SEQ ID NO: 120633 - DNA, 31 bp, Homo sapiens; identical to SEQ ID NO: 8075
  chr11:44587386-44587417
  hyper

SEQ ID NO: 120634 - DNA, 1696 bp, Homo sapiens
  chr11:44748052-44749748
  hyper
gctttcaacaggtacttcccccggcagcgggaagcccaggagcccgatcaggaccgaggatctcaccccaacccctgcgtttgggccccggggtcagctgaaagttcccctggaataaacacttcgggtccagcatgcccctctccccactcccgcaacgatcttccgaattcagacgcagagagggcccgcgagcagagcgggaggtggtcggaggcggaggaaggggagatgggcagagggtgggcccagggacccccagacaaggcctggacgcggggttggaggaggaggcggaggctggcgggaggcgaggggcagcccgcagaggagacgcgcttctcggcagcaacggcgtctggagccgggaggggcggaggtttggggagggggagggagggcgggggaggggagggacggacggcggcggaggtggggccggcgggctggcgggcgtgcagctgccgccggcgtcgcggggctccaggctgcggggcggacgtagcgccgagcgatccaccgcggagccgcgcgaggccgcccgagccccagccccggccccggccccagccccggccccggccccggccccggccccggccccggtcccggccccgagccccgagcgagcgccgccgcctcgcgctgcgggtccccggacgcgccgccaccgccgggaaggcagccggcgccgggcaagttgcgagcgcgcccctccgaccaggaaagtttccccccggccgccggcgggatttggcgcggggtccggcagccgccgctggaaggtatggggctccgcacctccgtgccctccgcacgccgccgccgcgcccccggggacctggggacccccccgcgcgccgccccgggggtgctgctggacgcggcggggaattggggtggagtagggatcccaggacggaagcccggcaaccaagttccactcaaactagcacgcgggggctggggggccggggacggtctccaccccgtgcctgcccggagtccgctgagggccgggggctgcgcccaggacaggtgcagagccggtgggctcccagtgctccgggtggaggagtgggggcttctggagaacggcgcggggtggcaggtgtggttacaaggttcggggtttcggccagggctgcgcccggaaaggggctgctcgccacgccacccggtaagacagtgagggaccagggactgggagcggcgatcggggccgggagggctgtggggcccggcagctgcatggagggcgggctgcctttggggtccctggcagcggggcggggcggggcggaggcgccactcgttcctccaggaccccccttattccttaggtgtgtgcggtttggggaagtggagactccatggagtgctgggtgggtgggaggctcgggcacgtccagatttagggggcagtgggagccagttgggacggtgctcggctcgggtgggatcgcgccggctccgggtcctgctggagtgaggtgactgggctcccgccagggggcgcactgccccggccctcgccagcaggaagcgcgttctggctcctgcgaggcaaccgcgccgacatccaggacgcagggaccacagacacccaacttacgcggggtcccgccccgaggagcccgccctacactagccagacgggggagcgggaccaagagtgaggcgaaaggttcacagt

SEQ ID NO: 120635 - DNA, 385 bp, Homo sapiens
  chr11:44970972-44971357
  hyper
tgcagggtagtggggcggtgagggggccttggccagccgctctgggctttggaggagcctgggggttcttggcctccgcgctgctcttgccccagcctccatctctccggcggagaaacccactccccccgggctccaggaagaggcggaagcccgagactgggtcagggcgaaggaaggtagagcgaggggacccaaggcgagcgccccgccccgccccgcccagcggggcgcgccggggtgggcgcggcgttctggcccttcctccacacagcctcccccgggtaggtgcgagtgttctgcccacggcaggggccctaacccacccagcgcccggccagtggccccacactgtacccttcctgcagatcgcgcgactttgggg

SEQ ID NO: 120636 - DNA, 30 bp, Homo sapiens
  chr11:45169067-45169097
  hyper
cggtgtagactcttcgggaaacctctccgg

SEQ ID NO: 120637 - DNA, 30 bp, Homo sapiens
  chr11:45169357-45169387
  hyper
cctagacgtttgcttcgtgtggagaaaggc

SEQ ID NO: 120638 - DNA, 30 bp, Homo sapiens
  chr11:45201840-45201870
  hyper
gcaggcgccccaggcggtgcaggtgcggcc

SEQ ID NO: 120639 - DNA, 567 bp, Homo sapiens; identical to SEQ ID NO: 48400
  chr11:45307445-45308012
  hyper

SEQ ID NO: 120640 - DNA, 160 bp, Homo sapiens; identical to SEQ ID NO: 48401
  chr11:45376917-45377077
  hyper

SEQ ID NO: 120641 - DNA, 104 bp, Homo sapiens
  chr11:45377121-45377225
  hyper
cgctcgaaggctctgctggccgcggctagccggtgaggagggtggggggaggggccgtcccgcgtgtgggggagtctgaaggcgaccaacgagagggagggccg

SEQ ID NO: 120642 - DNA, 62 bp, Homo sapiens
  chr11:45392758-45392820
  hyper
acgttagcaacgaccgttctctctacgccaagctcatttgtctgagcgtatcagcaacacga

SEQ ID NO: 120643 - DNA, 97 bp, Homo sapiens; identical to SEQ ID NO: 8079
  chr11:45684298-45684395
  hyper

SEQ ID NO: 120644 - DNA, 264 bp, Homo sapiens
  chr11:45686159-45686423
  hyper
gcgggagggttgttccggctttccgtggtgggctctgcaccatccggcggctccggccccacaggggcccagctcatcgcagcggtctgggtgcggaggccgggccagggctgggagcaggaagcagggagcggcgcccccgcctccgggtgcagctgggtttggaaagttggtgcgggcgcggggacctcagggtctcaaggcgcctccgcagacccgagccaggcgggtcgtgggacggtgagcccggagcagcccctgagt

SEQ ID NO: 120645 - DNA, 748 bp, Homo sapiens
  chr11:45686449-45687197
  hyper
cgcctcgggggccaccgcgcgtctcaagtttgctgccctcctcgaatgggggcagggagggctgaggtgatcgcggcgctcaccggccaccagccccggcagccccttcctgcgcccaacacgccgccgttcctcgccgccgccacccctccgctcaccgccggtagctgctgtccccgagcggaggggcgtctcccaccgcgcccgcgcccctcccggctgctgcggcggagtgtccgctcccgcccgccccggagcccgcggggcccggccaatacctggtcggggacgcgccgggagcagctgcagcgcccagcgccggctccatcctcgggtctggagtcagggtcgccggggacccgcgggtggcggcggcggcagcagccgcggcggcatcctccgcctcccgcgccctcctcctcggcctccctcctccctcctcttcctccgactccgcgcgcgcctcacgggcccctcttcatggcccgggggcgcgagcccggggcggctcgagcagctgagtgcgttctctccggccggacgcgggacccggggccggggctcagggacccgagagatgccgggacaggggccgggacccggagcgccgcagccccgggcgccggaggagagcagcagccgcaggcaccagagcctctcggagcgcccgcccgcgtccccgagccaagagcagcggcggcagcggcggctacagctccgagcgagcggcaggcgctgcggtcccggc

SEQ ID NO: 120646 - DNA, 78 bp, Homo sapiens
  chr11:45687428-45687506
  hyper
cttacccccgagggcgctgctggccgggccgccaaagcctttcgcccccccagcgcccctcgccgcggaagtcctgct

SEQ ID NO: 120647 - DNA, 30 bp, Homo sapiens
  chr11:45792949-45792979
  hyper
cacaagaaggtgctcgggagccagaattca

SEQ ID NO: 120648 - DNA, 233 bp, Homo sapiens; identical to SEQ ID NO: 48408
  chr11:45825484-45825717
  hyper

SEQ ID NO: 120649 - DNA, 184 bp, Homo sapiens
  chr11:45826512-45826696
  hyper
aaacctgtggctgccgaggtcccccgccagcagcgggcagcggagcgcaggggcggggctggggactggcgaactccgcctctctggggctgtcgctttaagggcaaggcggggcgtgcgggccctttaaggccacgtgggggcgtgtcaggaagtgagtccagggcccgcctcccggggagtc

SEQ ID NO: 120650 - DNA, 217 bp, Homo sapiens; identical to SEQ ID NO: 8081
  chr11:45907276-45907493
  hyper

SEQ ID NO: 120651 - DNA, 30 bp, Homo sapiens; identical to SEQ ID NO: 48411
  chr11:45921542-45921572
  hyper

SEQ ID NO: 120652 - DNA, 30 bp, Homo sapiens; identical to SEQ ID NO: 48412
  chr11:45921944-45921974
  hyper

SEQ ID NO: 120653 - DNA, 46 bp, Homo sapiens
  chr11:46141116-46141162
  hyper
acttagaaatcactctcggcacatctgcacccgacaaccggcctgt

SEQ ID NO: 120654 - DNA, 767 bp, Homo sapiens
  chr11:46259332-46260099
  hyper
cggcgagtggcggtgcgcgcggggccaaccgcgtggagctgtcgggagggcgataggatgggcgcgcccgggctgcaggcggggagccggaggtgggaggtgcctcttgagagtggctctccaccgctgacagcaaacgagctggtccggacggaggacagagggggaagaaacggagggagtcgctgggggacggcgacgagtgggatccgggcgggtgggactgggcgcaaaggaccgcgccgacgccgcatggctgccgggaattcagctcccccggccaggttgagcgggccccggggcccggagcgggcgtcggcatctccggcctccccgcggggctgcaggcaggcggcgccccgagcgcaccccgcgcgagcaggcgcggaacagcggacccaggccgggccttcccgcagcttttctggccgcctcggagggcagggtcccagcgcggcccgaggcgcctcttgccagcggcccgacctcctgccctcccggccccctccaggctccccgcacgtgcaggcccggcgacgtcactgcggctctgacgcgctcttggaggcccgggcggaggcggcgcggcgcgggcttcctccgggaggtcccggtcccggcagcccgcggccgcgtccttggccctcctccgggggaacctcgttcattccaaactctggaaggccggctgtccttcggttactgataaggacgcgagctcttggtaaaagatttgaacaatgcccggaaagaaatagctggaccta

SEQ ID NO: 120655 - DNA, 168 bp, Homo sapiens
  chr11:46260603-46260771
  hyper
ctgggtcccagaggcgcagcccctgcggggtttggatgggttcctgcggcctccgatccgctggtgaattgggtgtgtctgagcatcgtccccgctcagcccgcaggcgtaggatagggaggcgtctccgggaatctactccgggacgggtccgcggtcctcagtcgg

SEQ ID NO: 120656 - DNA, 30 bp, Homo sapiens
  chr11:46264529-46264559
  hyper
acccttttgggaaccggcaatagcacttgt

SEQ ID NO: 120657 - DNA, 63 bp, Homo sapiens; identical to SEQ ID NO: 8082
  chr11:46264957-46265020
  hyper

SEQ ID NO: 120658 - DNA, 703 bp, Homo sapiens
  chr11:46299153-46299856
  hyper
atgtgggggcgtggcgccttggccagctgggctagccagccaggggttcccggtttcacagagaggaaagtgacagaagacgtgcggagggagacgcagagacagaggagaggccggcagccacccagtctcgggggagcacttagctcccccgccccggctcccaccctgtccggggggctcctgaagccctcagccccaaccccgggctccccatggaagccagctgtgccccaggaggagcaggaggaggtggagtcggctgaatgcccacggtgcgcccggggcccctgagcccatcccgctcctagccgctgccctaaggcccccgcgcgccccgcgccccccacccggggccgcgccgcctccgtccgcccctcccccggggcttcgccccggacctgccccccgcccgtttgccagcgctcaggcaggagctctggactgggcgcgccgccgccctggagtgagggaagcccagtggaagggggtcccgggagccggctgcgatggacgccgtcttggaacccttcccggccgacaggctgttccccggatccagcttcctggacttgggggatctgaacgagtcggacttcctcaacaatgcggtaagatgaagggtctccgttcccgttccacccctcggcacccgtcctcgcggcgcgcctgggcccctagaaggacccgactacacatcact

SEQ ID NO: 120659 - DNA, 20 bp, Homo sapiens
  chr11:46316812-46316832
  hyper
gagctggtaccattactgcc

SEQ ID NO: 120660 - DNA, 460 bp, Homo sapiens; identical to SEQ ID NO: 8085
  chr11:46316895-46317355
  hyper

SEQ ID NO: 120661 - DNA, 297 bp, Homo sapiens; identical to SEQ ID NO: 8086
  chr11:46317407-46317704
  hyper

SEQ ID NO: 120662 - DNA, 30 bp, Homo sapiens; identical to SEQ ID NO: 8087
  chr11:46330245-46330275
  hyper

SEQ ID NO: 120663 - DNA, 30 bp, Homo sapiens
  chr11:46354281-46354311
  hyper
gactaggacccgggcgggggcgcagaggtg

SEQ ID NO: 120664 - DNA, 6 bp, Homo sapiens
  chr11:46354559-46354565
  hyper
cgcggc

SEQ ID NO: 120665 - DNA, 30 bp, Homo sapiens; identical to SEQ ID NO: 48422
  chr11:46354982-46355012
  hyper

SEQ ID NO: 120666 - DNA, 30 bp, Homo sapiens; identical to SEQ ID NO: 48423
  chr11:46368795-46368825
  hyper

SEQ ID NO: 120667 - DNA, 30 bp, Homo sapiens; identical to SEQ ID NO: 48424
  chr11:46369644-46369674
  hyper

SEQ ID NO: 120668 - DNA, 30 bp, Homo sapiens; identical to SEQ ID NO: 48425
  chr11:46402195-46402225
  hyper

SEQ ID NO: 120669 - DNA, 43 bp, Homo sapiens; identical to SEQ ID NO: 48426
  chr11:46402520-46402563
  hyper

SEQ ID NO: 120670 - DNA, 30 bp, Homo sapiens; identical to SEQ ID NO: 48427
  chr11:46403394-46403424
  hyper

SEQ ID NO: 120671 - DNA, 30 bp, Homo sapiens
  chr11:46410938-46410968
  hyper
aggtgctgacagggcgaggctcagggtctc

SEQ ID NO: 120672 - DNA, 206 bp, Homo sapiens
  chr11:46412033-46412239
  hyper
agtgcacccacaaggcggaggcccggacagagctcgggtcaggcgagtgcaagactcttgtcctccttctctcctcaccctgcaccctaccccagaggcactgtctagcccctgtgaccaaagtggggacccagtttctcacgctagggtcgggcgggcctcgagggccgtgttttcctaggccatctggaggctcctccatgtct

SEQ ID NO: 120673 - DNA, 308 bp, Homo sapiens
  chr11:46412276-46412584
  hyper
cgccctccctccaagcccctagcacgcagttcctgcagcctctgggcgtgggcactgtgtttcccgagtcctcgacacccctcttccccgggcgagaccggagggggtgctccgcacgcccgtggggtggtttggggtgtaggtcttcggttcttgggcattcactccatggctctgggaaggctgtggcccctggatctgtccctggggcgggagaggagactccagagtccaagggagggagaggcgaagatttggcaccgacattgtgcccaacacttccgttgcggggccggaggagggggcct

SEQ ID NO: 120674 - DNA, 810 bp, Homo sapiens
  chr11:46412964-46413774
  hyper
gcctccgagagcccccggccttgcttccagcggggtcccccagccccggcccactgccgctcccggcccgcgctcgccccggagggggtctggcgccctgtcccagtcgaacccacctctggggagcctcagagcgtcccggggacctgcttcctgctcttcccggcgagccccccgcccccgcgccgccgcggagccacttacccgccgcctctgcccagctcccctcgcgccagacagacggcgggacggacgcgcggccccgcgggccggcggggcgggcggccgggccgagggccgggggcggggacggggtgtcgaggggcggcccctgctccgcccgcagctcccggcgctgtggctccgactcgcgctcacgctcgcacttttccccgagccgcgtgatgtcacgaggaagcagccaatcgtggcggggccgcgccgcccgccccgggccggtcacccggcggcgacgcgcgggggtcaacacccgaggcgtcggagaccccggcggtccgcgcccctctcgggggctggccggcagctccctgcttgggcacagagggcgccgcccacggccagcgacgcaggggagcagggggcgctgccctccggggggtgggggtgtccgcgttgtcatggggacgcggcgccccctcgcgggctggggaaggagctggcagctgggtccggccgcgctcccgcctccgccctgaccatactcccgggaccctgagctattttcgcgcctctccgggacctcagcgccctgcgtggccccgctggcggtttggccgcgaggcgcgggag

SEQ ID NO: 120675 - DNA, 173 bp, Homo sapiens
  chr11:46414468-46414641
  hyper
cggggaaacaactcaagaccctcccccgagggccggaggtggtgagggcgattgcgggggcggcggtggaggagaggcaggagcctcttggcagagaatgggagggaactcgagtagaagccagcgctgcggggctcttggtgtggggttctccgcgcggaacccggaagtgg

SEQ ID NO: 120676 - DNA, 334 bp, Homo sapiens; identical to SEQ ID NO: 48430
  chr11:46564031-46564365
  hyper

SEQ ID NO: 120677 - DNA, 30 bp, Homo sapiens
  chr11:46582128-46582158
  hyper
tgaagaaaaaagaaacggaagttttatctg

SEQ ID NO: 120678 - DNA, 30 bp, Homo sapiens
  chr11:46615398-46615428
  hyper
ggtttgcagtccagcgaacgggctgagcca

SEQ ID NO: 120679 - DNA, 73 bp, Homo sapiens
  chr11:46638623-46638696
  hyper
tcaaagtctgattgcgccggccactcagttagcccaggcccgtcacccacctctccgcggctgccaggttacc

SEQ ID NO: 120680 - DNA, 30 bp, Homo sapiens; identical to SEQ ID NO: 8090
  chr11:46638954-46638984
  hyper

SEQ ID NO: 120681 - DNA, 30 bp, Homo sapiens
  chr11:46722656-46722686
  hyper
acctgcgatgtccgcgaccctcaaccttgg

SEQ ID NO: 120682 - DNA, 183 bp, Homo sapiens
  chr11:46848280-46848463
  hyper
tgcttgccctttgcccgtggtttgacacttacgctccccgggcagggagaggtcagggaagctaaggtccgagcaggatcagcaggaatacccggcaggcggcggcggcggcggcagcagcattggtgctgcggtccgctgggaaacgcctcctccgagggcggggcccggagcgccactgtc

SEQ ID NO: 120683 - DNA, 350 bp, Homo sapiens
  chr11:46867727-46868077
  hyper
actcgagggcctcgcgggtggggcaggcccaccgaccactcacctcagctgggtcagaaccaagcggcctgctctaagccgtttgaaaccgcttgggccgccgcacaccccgcagtgtcctcgttctttattggtcctcgacggaccgcccatcggacttttattggtccatttgaaaggcctgtgggcacgcgccgcccgcagccttaaaggggccgcgcgcagccgtgtttccctctggaccagacgccgcctgcacgggtggggacgctggtcgctgccgggggcaagtctgccgactccagaaagaaaggcgaaagaatgtgtgtagacccgggcatccttggtcg

SEQ ID NO: 120684 - DNA, 628 bp, Homo sapiens
  chr11:46938420-46939048
  hyper
acattcctaccccagtagggccgctgtcccaacacgccaaagaggctacaaataaccttccaggagagagccggggaggggagagcgcagagcggagcggaacgtgggccggccaagctaccgctcttcggagagaaagagctcagtccgcgctagagaggacgcggaaaaaagcccctgaaaacccacaggtagtttaaataagagacatgaaaactctgttttggatttgggaggtaaaccaatctttaaaacgagtgcctagacatctccacgccctgccaggcaagttcggaaatctgcactgactttttccacacgagctgtcctacgtgaaagaaagaaccggtaaaagaccaggcagggtctccagacccctccattctgagccccagctcccttcatcggggctgcgaggcaaatggggagactcggaactcccgccacgatgaatagcgatgggtgaatagggctggggttcaaagatcaaagttctttgatctctgggcacaaactagggaaagctgctcaatcacggggtgcacccagggtcgttaagagcccgcggagaagcagattccatcggagccctagtcccacacaacagggggtacgggcaccaaggagt

SEQ ID NO: 120685 - DNA, 30 bp, Homo sapiens
  chr11:46939350-46939380
  hyper
ctggagtccgggaatcgttctccgagtaga

SEQ ID NO: 120686 - DNA, 35 bp, Homo sapiens
  chr11:46939596-46939631
  hyper
gggagggcgagcgaacgaacgccccggaccttacc

SEQ ID NO: 120687 - DNA, 47 bp, Homo sapiens
  chr11:47198541-47198588
  hyper
gaccaatgggcagccggcgggacgggggcggcgacgacaaccgcggc

SEQ ID NO: 120688 - DNA, 30 bp, Homo sapiens
  chr11:47198981-47199011
  hyper
ggccccataacagacgctaggcctctctct

SEQ ID NO: 120689 - DNA, 772 bp, Homo sapiens
  chr11:47208474-47209246
  hyper
gcagggctgggactccaaaaccgtgccctaccgttccacagctgccctgctaatctggggcgccttctaaggcctgagacgaacacgcggtgggggtgggacaaaaaggcctaagctcctcccgctccgagttcttatttccagattttgtaccacgattcattcttacccttcgcccctccaccccctttatcagtctggtacatttttccatatcgccacgatgccaccccacgctaaataaatcccttctccctcctctctccctacttccctctccccgctttcccccgggggtgagattttgcagagcggctccgtctgttatttatatccactggagcggtccaagaatgttccgaagctgacctaatcgccacctgctcggcctctccgcccctcccactctctcctgggcccggtgacccagcggcggtgccctgagccttgaagaccagggggagcgcggaccaacggggtcgaacgcccgggcgcagaaggtcccggacgcagaaggtcccgggcgcgcagaatcgcagcgggtcggagagccccggcgctctcagaggagtgcgcccccagggacgcggctctgagccctgggaagctgaggcgcctggctgcgccctctgaagctcgtacttttcctcccaccctcagctccctgaagagtgtgagtgcgtgcgcgcggagttttaaacggcagctttaaaaatagcaaaattatgttgtttctaaatccaggaggaatcactgacgcgttctttacgca

SEQ ID NO: 120690 - DNA, 30 bp, Homo sapiens; identical to SEQ ID NO: 48436
  chr11:47236572-47236602
  hyper

SEQ ID NO: 120691 - DNA, 52 bp, Homo sapiens; identical to SEQ ID NO: 8092
  chr11:47237125-47237177
  hyper

SEQ ID NO: 120692 - DNA, 247 bp, Homo sapiens; identical to SEQ ID NO: 48438
  chr11:47279141-47279388
  hyper

SEQ ID NO: 120693 - DNA, 30 bp, Homo sapiens; identical to SEQ ID NO: 48439
  chr11:47291023-47291053
  hyper

SEQ ID NO: 120694 - DNA, 30 bp, Homo sapiens
  chr11:47291475-47291505
  hyper
cacttggcacgcgacggcgctgggtcggcc

SEQ ID NO: 120695 - DNA, 30 bp, Homo sapiens
  chr11:47429698-47429728
  hyper
actcagagcaggagcgcacagtagtcctcc

SEQ ID NO: 120696 - DNA, 29 bp, Homo sapiens
  chr11:47430322-47430351
  hyper
cgggagtcaggctcgcccgcttcggcctc

SEQ ID NO: 120697 - DNA, 82 bp, Homo sapiens
  chr11:47447396-47447478
  hyper
gcacaggagctgtgcgcccaccttgatctcactgtccagcagccgtgtgcgctggatgatctcctccgtggacatcttgagc

SEQ ID NO: 120698 - DNA, 63 bp, Homo sapiens
  chr11:47448208-47448271
  hyper
gtgacagatgcttgcggaggggcgcgttcaaactcagaccgtgaccccgctaggaataagggg

SEQ ID NO: 120699 - DNA, 30 bp, Homo sapiens; identical to SEQ ID NO: 8094
  chr11:47574975-47575005
  hyper

SEQ ID NO: 120700 - DNA, 30 bp, Homo sapiens
  chr11:47587395-47587425
  hyper
cgtccctgtcgggccgctggggtctccacc

SEQ ID NO: 120701 - DNA, 30 bp, Homo sapiens; identical to SEQ ID NO: 8095
  chr11:47587657-47587687
  hyper

SEQ ID NO: 120702 - DNA, 30 bp, Homo sapiens
  chr11:47600554-47600584
  hyper
ctgctgcacacttccgtttccggtccgtgc

SEQ ID NO: 120703 - DNA, 151 bp, Homo sapiens
  chr11:47600836-47600987
  hyper
cgttctgttgctgccggtgaggcgggagagcgccggggccgacacgcgccgtgagtatgtgcgggcagcgctcttctctgaactatcggcggggccccttagatgcctgtccttgccctaggatgcccttccctacgtcctcctggcaaat

SEQ ID NO: 120704 - DNA, 30 bp, Homo sapiens
  chr11:47615883-47615913
  hyper
ctggggccaggggccgggcgtggggaggcg

SEQ ID NO: 120705 - DNA, 37 bp, Homo sapiens; identical to SEQ ID NO: 8096
  chr11:47661386-47661423
  hyper

SEQ ID NO: 120706 - DNA, 30 bp, Homo sapiens; identical to SEQ ID NO: 48444
  chr11:47663991-47664021
  hyper

SEQ ID NO: 120707 - DNA, 155 bp, Homo sapiens
  chr11:47664235-47664390
  hyper
ttaagggacagaggcgcatgcgttctgccgggggctcgcccttcaccaggaatgacggtttctcttgcacatgcgcttccaggccgcaagtgtccggaaacagaagaatgggagtgtcagtgggggagtgtgaccgtgacggcagaggcaaggtc

SEQ ID NO: 120708 - DNA, 30 bp, Homo sapiens; identical to SEQ ID NO: 48446
  chr11:47736780-47736810
  hyper

SEQ ID NO: 120709 - DNA, 30 bp, Homo sapiens
  chr11:47788261-47788291
  hyper
ccacagtcacaggccgcgcacgcggaaact

SEQ ID NO: 120710 - DNA, 33 bp, Homo sapiens
  chr11:47789175-47789208
  hyper
gacttccccacttccgtcgggttccacccatgc

SEQ ID NO: 120711 - DNA, 30 bp, Homo sapiens; identical to SEQ ID NO: 48448
  chr11:47869790-47869820
  hyper

SEQ ID NO: 120712 - DNA, 30 bp, Homo sapiens; identical to SEQ ID NO: 48449
  chr11:47870099-47870129
  hyper

SEQ ID NO: 120713 - DNA, 51 bp, Homo sapiens; identical to SEQ ID NO: 48450
  chr11:48002695-48002746
  hyper

SEQ ID NO: 120714 - DNA, 30 bp, Homo sapiens; identical to SEQ ID NO: 48451
  chr11:48003050-48003080
  hyper

SEQ ID NO: 120715 - DNA, 30 bp, Homo sapiens; identical to SEQ ID NO: 8097
  chr11:48294280-48294310
  hyper

SEQ ID NO: 120716 - DNA, 30 bp, Homo sapiens; identical to SEQ ID NO: 8098
  chr11:48561464-48561494
  hyper

SEQ ID NO: 120717 - DNA, 250 bp, Homo sapiens
  chr11:49229743-49229993
  hyper
gaccagcaacaggatcccactcggcagctgacccgcgagtcccagcaccgcggcaccacggggaagactccgaggtttgctccgcgaggcgcccccctaccgaagaggaagccgaggagaaagaagccacccgccagcaccagcgccccagcgcacagccagcgcgggcggcgcgcggtggccacagccgagtcggtttcgtgaaggagattccacatctcggcgcgagcagagccggcctcccgggacc

SEQ ID NO: 120718 - DNA, 140 bp, Homo sapiens; identical to SEQ ID NO: 48455
  chr11:57056830-57056970
  hyper

SEQ ID NO: 120719 - DNA, 30 bp, Homo sapiens; identical to SEQ ID NO: 48456
  chr11:57078961-57078991
  hyper

SEQ ID NO: 120720 - DNA, 176 bp, Homo sapiens
  chr11:57092400-57092576
  hyper
ccgtcaccgcgggacgaagccactgcgagccccggcggggccccgccccaactccgcccaggtccacgcccccagggcgcttcatgaatatgcatgagccggttggaacccgggagtgggaagcccgtgcagaattcgtcccaccgtcggcaaacaggcgcggcccagcactcaat

SEQ ID NO: 120721 - DNA, 232 bp, Homo sapiens
  chr11:57103414-57103646
  hyper
gcatagagcgtcagcgactctggaggacctgagggaagggtggttgccgtgaagcctctctcacccagggggaatccggcctagaaaatgtgtgtagggctctttagaaactacagacacttcttcagtcgagactagatactaaagagaaattgtgtagttttattgtatcagacttagtacaggggtggggtgggggtgtgtattggaatgatgcgtgcccgtttctctg

SEQ ID NO: 120722 - DNA, 648 bp, Homo sapiens
  chr11:57194086-57194734
  hyper
gaagcggagctcctgcgctcgaattctgaataccgtcccctaaaataatgacagcaactcaaccaggtgcagaggcagggagatttcatacagaagacacaaactcccgctgccaagttggtgttatcttcagtttactgacaatgaaacaaaagctcccatggatttcaggaacttgcccaaggtcacagggctagtttagtcacgacgcaggccattctactgccagaaatacccccaactcccatgaccctcgcctaggactcgcaaacctggtccccgccgcccttcctcgcatcaacttctaccaggaaagcctccgggggccgctccccgccagcctccgcaccccgctccagcctgcggcctgccctccccgcagaggagcccgaggggccaggccgcgctcggcgccccatggcgcccgaaaggggacccttcgccctacccgcctgctccgcgccggggctctccgcgccctttccgcacgggccaggttcgcattcgcgcctctcgcagcccctcccagtcccctgctcgcctccgccccctcctgcccgcccggaaggggctggggcagacctcccactctccatcacttccttcttcttttcccttgctcacagcctcccgcgccctttttacctc

SEQ ID NO: 120723 - DNA, 30 bp, Homo sapiens
  chr11:57228362-57228392
  hyper
ctgcaaggtaagaacgccagcggcgggaga

SEQ ID NO: 120724 - DNA, 541 bp, Homo sapiens; identical to SEQ ID NO: 8100
  chr11:57243624-57244165
  hyper

SEQ ID NO: 120725 - DNA, 30 bp, Homo sapiens; identical to SEQ ID NO: 48461
  chr11:57283197-57283227
  hyper

SEQ ID NO: 120726 - DNA, 79 bp, Homo sapiens
  chr11:57298237-57298316
  hyper
cgggaggaaagtcccgcctcttctttgattcaaactcgcttccggaattaaataccaacgagacggcgccgggaactcg

SEQ ID NO: 120727 - DNA, 80 bp, Homo sapiens; identical to SEQ ID NO: 48462
  chr11:57334770-57334850
  hyper

SEQ ID NO: 120728 - DNA, 30 bp, Homo sapiens; identical to SEQ ID NO: 48463
  chr11:57335341-57335371
  hyper

SEQ ID NO: 120729 - DNA, 54 bp, Homo sapiens; identical to SEQ ID NO: 48464
  chr11:57365686-57365740
  hyper

SEQ ID NO: 120730 - DNA, 30 bp, Homo sapiens; identical to SEQ ID NO: 8102
  chr11:57405800-57405830
  hyper

SEQ ID NO: 120731 - DNA, 136 bp, Homo sapiens
  chr11:57414485-57414621
  hyper
acacagctgtaagtgcggtgacagcggggcagatagctgcggaaagtcttggtggggaggcaggcagggcccggaccggggtcacagctgggcatgacgggctggaggacaatgccctggtgggctggaggggctg

SEQ ID NO: 120732 - DNA, 1 bp, Homo sapiens
  chr11:57414662-57414663
  hyper
c

SEQ ID NO: 120733 - DNA, 30 bp, Homo sapiens
  chr11:57415041-57415071
  hyper
gcccacgggcacagacgctgccatgggagc

SEQ ID NO: 120734 - DNA, 40 bp, Homo sapiens; identical to SEQ ID NO: 8103
  chr11:57417003-57417043
  hyper

SEQ ID NO: 120735 - DNA, 30 bp, Homo sapiens
  chr11:57417353-57417383
  hyper
ctcgttctgtacctcggtctgtgggtgaat

SEQ ID NO: 120736 - DNA, 30 bp, Homo sapiens; identical to SEQ ID NO: 8104
  chr11:57424758-57424788
  hyper

SEQ ID NO: 120737 - DNA, 110 bp, Homo sapiens; identical to SEQ ID NO: 48468
  chr11:57425066-57425176
  hyper

SEQ ID NO: 120738 - DNA, 30 bp, Homo sapiens
  chr11:57434363-57434393
  hyper
taatcagggcaaagcgtagcactatgacct

SEQ ID NO: 120739 - DNA, 30 bp, Homo sapiens; identical to SEQ ID NO: 48469
  chr11:57434671-57434701
  hyper

SEQ ID NO: 120740 - DNA, 52 bp, Homo sapiens; identical to SEQ ID NO: 48470
  chr11:57434927-57434979
  hyper

SEQ ID NO: 120741 - DNA, 30 bp, Homo sapiens
  chr11:57435788-57435818
  hyper
ccgggtcttccaaccgcggcgggacccatg

SEQ ID NO: 120742 - DNA, 104 bp, Homo sapiens
  chr11:57479589-57479693
  hyper
agtgcggttgggggcggtggtgggtcagcctgagccccaaacagtgccgtgaaattctccatcgtaccctccgccccggcgctgtctccgtgtctgccgttggt

SEQ ID NO: 120743 - DNA, 30 bp, Homo sapiens
  chr11:57480026-57480056
  hyper
tatggtgggggaggcggggcgagacctacg

SEQ ID NO: 120744 - DNA, 117 bp, Homo sapiens
  chr11:57480292-57480409
  hyper
gtgttagtaccccgcgaccttgactgtccctgcccttgcaggtgtatctgggaaccctggggtttacctctctgaggacacctgaggttccgagcctgtagcggacttagagactat

SEQ ID NO: 120745 - DNA, 40 bp, Homo sapiens
  chr11:58345680-58345720
  hyper
tgagcccggatgtacggcacgcgtcgcgacctaacccgga

SEQ ID NO: 120746 - DNA, 30 bp, Homo sapiens; identical to SEQ ID NO: 48474
  chr11:58346184-58346214
  hyper

SEQ ID NO: 120747 - DNA, 30 bp, Homo sapiens; identical to SEQ ID NO: 48475
  chr11:58347511-58347541
  hyper

SEQ ID NO: 120748 - DNA, 166 bp, Homo sapiens; identical to SEQ ID NO: 48476
  chr11:58668330-58668496
  hyper

SEQ ID NO: 120749 - DNA, 543 bp, Homo sapiens; identical to SEQ ID NO: 48477
  chr11:58672746-58673289
  hyper

SEQ ID NO: 120750 - DNA, 14 bp, Homo sapiens
  chr11:58874208-58874222
  hyper
cgaaacctccaggc

SEQ ID NO: 120751 - DNA, 30 bp, Homo sapiens; identical to SEQ ID NO: 48478
  chr11:58910222-58910252
  hyper

SEQ ID NO: 120752 - DNA, 30 bp, Homo sapiens; identical to SEQ ID NO: 8110
  chr11:58911100-58911130
  hyper

SEQ ID NO: 120753 - DNA, 430 bp, Homo sapiens; identical to SEQ ID NO: 48480
  chr11:58912102-58912532
  hyper

SEQ ID NO: 120754 - DNA, 30 bp, Homo sapiens; identical to SEQ ID NO: 8111
  chr11:58939938-58939968
  hyper

SEQ ID NO: 120755 - DNA, 203 bp, Homo sapiens; identical to SEQ ID NO: 8112
  chr11:58940403-58940606
  hyper

SEQ ID NO: 120756 - DNA, 270 bp, Homo sapiens; identical to SEQ ID NO: 8113
  chr11:58940666-58940936
  hyper

SEQ ID NO: 120757 - DNA, 143 bp, Homo sapiens
  chr11:59317875-59318018
  hyper
ggcgcaggggcgagcgaagcctcggtggagcggagccgcctgcacctccagagaggcgccatacgggggccgccgcggaggccgactcagcgccgagcgctaagagaaaccgggctgatgcagcaggcgggaaacaagccgta

SEQ ID NO: 120758 - DNA, 357 bp, Homo sapiens
  chr11:59323831-59324188
  hyper
cgaagggaaagaatgcggccacgtggcctattttcctgtggatagactaagcaaacgcttttcttcaggggcccggatagctcagtcggtagagcatcagacttttaatctgagggtccggggttcaagtccctgttcgggcggatgctgttttagtttccaataaaatggatttgggcgaggctgagagaaaggaacgttatgtgaaacccgcttggggtgcctcctccttgagggaaaccagaacttgctagtgggttcttaccggaagaagtgaaacgtgtggaaaatgccaagaaactttatcttccaatagcaggcttttcttttccaacctttatacgttgctttgtctta

SEQ ID NO: 120759 - DNA, 541 bp, Homo sapiens
  chr11:59333338-59333879
  hyper
ccggtccttgttacggtttaaaaagctggacaaagcccgtgcgccgaacgctttcgaggacttctttggccaagagggggcccgggctgtcaccattcccggcaagcccgcgaccaagcaggcagcggaggcggcgcaggccgagagctcccgcccctctgacagtgagagaagggtcgcagcgcccacggctgcctagaacccgaaagaagaggagcggggtgcggggacacagggttgctcaagaaagtgagctatgcgcagtgctccggaagagcttgtctcaaaccaggtcccaagtgagggcagaggcgtaacttcgtactgggcagtttaaaaggtaagacatatgtccccagtatcctccctcccaggggaaaatgacgataaggtttcccttaactgccccagcccgcgtgagaacccacagggtgttgaccctgttaactgcagaaagaccctgttaactgcagaaatcacatgtagtgatgactaacgcctaaaacggaagcgctgccgaaacccgggattgaaccaggga

SEQ ID NO: 120760 - DNA, 30 bp, Homo sapiens
  chr11:59382862-59382892
  hyper
tctcgagccgagcccgaacccccagcgccc

SEQ ID NO: 120761 - DNA, 199 bp, Homo sapiens; identical to SEQ ID NO: 48486
  chr11:59383394-59383593
  hyper

SEQ ID NO: 120762 - DNA, 30 bp, Homo sapiens; identical to SEQ ID NO: 48487
  chr11:59383813-59383843
  hyper

SEQ ID NO: 120763 - DNA, 30 bp, Homo sapiens
  chr11:59436631-59436661
  hyper
agagactgcgcacgcgctgcccgtcttcgg

SEQ ID NO: 120764 - DNA, 30 bp, Homo sapiens; identical to SEQ ID NO: 8115
  chr11:59521707-59521737
  hyper

SEQ ID NO: 120765 - DNA, 211 bp, Homo sapiens
  chr11:59523105-59523316
  hyper
gccgtgagtttcgccgcaggcggggtgctgccaggaggggtgctgcatgggagaggggcttccctttgctccccaagtcgaggctggaggggggcccgagccggaggcttgccctccccaagcccccaccgcttcccgcgccggttccgcaccctcccctcccctcccctgcggggtcatgtgcccggtgattcatcgctaggcaatgatt

SEQ ID NO: 120766 - DNA, 30 bp, Homo sapiens; identical to SEQ ID NO: 48490
  chr11:59578152-59578182
  hyper

SEQ ID NO: 120767 - DNA, 56 bp, Homo sapiens
  chr11:59578499-59578555
  hyper
ctgttagtgcctgccggttgcttagcaaggtggtcccttacgattcacagcctttg

SEQ ID NO: 120768 - DNA, 30 bp, Homo sapiens; identical to SEQ ID NO: 48492
  chr11:60609378-60609408
  hyper

SEQ ID NO: 120769 - DNA, 30 bp, Homo sapiens; identical to SEQ ID NO: 48493
  chr11:60609989-60610019
  hyper

SEQ ID NO: 120770 - DNA, 30 bp, Homo sapiens
  chr11:60673646-60673676
  hyper
actgcggggcactgcgcaaatgcaccccgc

SEQ ID NO: 120771 - DNA, 268 bp, Homo sapiens
  chr11:60674117-60674385
  hyper
ggattgactcggctcgttccgtaaagcgccggaggattggctggggcgtcgggagagaggaggctcgaaactacatttcccatgacgcagtgagaatttaaaaccaaaacaattggacagcacttgttttgacaactgtgcggcactgtgccacgggaccctggtctttgaaaccttggcgtgcgcgagaatttcccagtgagtttgttaaaatgcagattcctcgggtctgcgtagacagactgtgccccacgcttttctaagtcag

SEQ ID NO: 120772 - DNA, 30 bp, Homo sapiens
  chr11:60681290-60681320
  hyper
gctcgttagcggctcggttagaactacatt

SEQ ID NO: 120773 - DNA, 30 bp, Homo sapiens
  chr11:60691771-60691801
  hyper
cctcctggcagaggcggccgtcctctgttg

SEQ ID NO: 120774 - DNA, 50 bp, Homo sapiens; identical to SEQ ID NO: 8117
  chr11:60692120-60692170
  hyper

SEQ ID NO: 120775 - DNA, 253 bp, Homo sapiens; identical to SEQ ID NO: 48496
  chr11:60718600-60718853
  hyper

SEQ ID NO: 120776 - DNA, 261 bp, Homo sapiens; identical to SEQ ID NO: 48497
  chr11:60718976-60719237
  hyper

SEQ ID NO: 120777 - DNA, 46 bp, Homo sapiens
  chr11:60737964-60738010
  hyper
ccaccagagggcagcggcagcaggtgccggcgctggggcaggactg

SEQ ID NO: 120778 - DNA, 155 bp, Homo sapiens; identical to SEQ ID NO: 48499
  chr11:60775226-60775381
  hyper

SEQ ID NO: 120779 - DNA, 30 bp, Homo sapiens
  chr11:60809815-60809845
  hyper
cctccgagcagcacccggagaccacgcctg

SEQ ID NO: 120780 - DNA, 30 bp, Homo sapiens
  chr11:60928632-60928662
  hyper
gggagccggggcggcgcctcgcgctctccc

SEQ ID NO: 120781 - DNA, 307 bp, Homo sapiens
  chr11:60928908-60929215
  hyper
cgcgcccacacttccggggtccgccaggcccgccccctaccggatgtgacccccttgcaacgtccggcgccccagtggcgcgcgtgctcgccccgcgaccccgttggccgccccgcctcgcgcgcctctgagttaccacgacatcgtgccacacacacacgctcgcggccgcccgggccacaaccacgggagcgcccacgagacccctccagcgctcgccgcacgcctcggccccgcccccggtaagaggccccgcccactgggcggagaccaggccgctctgggctagtgcgccggcgcggacgtc

SEQ ID NO: 120782 - DNA, 30 bp, Homo sapiens
  chr11:61062190-61062220
  hyper
cagccaggggggcacgatgagcacccgcct

SEQ ID NO: 120783 - DNA, 568 bp, Homo sapiens; identical to SEQ ID NO: 48500
  chr11:61062455-61063023
  hyper

SEQ ID NO: 120784 - DNA, 22 bp, Homo sapiens
  chr11:61063061-61063083
  hyper
cgctgagcagttctaggcctgc

SEQ ID NO: 120785 - DNA, 119 bp, Homo sapiens
  chr11:61100428-61100547
  hyper
gttgtacgacatgtcgaggcttggagcggcccgtcgggactcgagcgcgacactagaaagagggacacaagcgaaaagacaggtggcccccaacagcgcgcagcgaactccactgccgc

SEQ ID NO: 120786 - DNA, 30 bp, Homo sapiens; identical to SEQ ID NO: 8122
  chr11:61129505-61129535
  hyper

SEQ ID NO: 120787 - DNA, 30 bp, Homo sapiens; identical to SEQ ID NO: 48504
  chr11:61129849-61129879
  hyper

SEQ ID NO: 120788 - DNA, 129 bp, Homo sapiens
  chr11:61159723-61159852
  hyper
tttgcagagatccgtcgctcacaccttttcttgtcttccgttgaaaaaagagaatcgtgggagtaggacctatttgccaatctcctggtaacactatcacaactggccacttccgcccaacgcccggta

SEQ ID NO: 120789 - DNA, 225 bp, Homo sapiens
  chr11:61160435-61160660
  hyper
gatgtctgtcagctgcgagttacctcttgacttttattcctgaagccgaagagtcgagtttcacggtgattcctaggaaaggagggaagccccctccactcccacccccgtaccctcgccccctcattatcagcaaccagaagtgcccctgagtggccggtcccattagttgcagcgtctagtttccccaaagttagacaccaacccatacgagcagagagggag

SEQ ID NO: 120790 - DNA, 31 bp, Homo sapiens; identical to SEQ ID NO: 8124
  chr11:61160872-61160903
  hyper

SEQ ID NO: 120791 - DNA, 153 bp, Homo sapiens
  chr11:61197744-61197897
  hyper
cgtctgcccgatagcgcagggcaagggcaggcccagggagaggccgatcctgcaactcaggaaataaaggtcgcttccattctttggtgagcctactgtgtgccggtctggaaatatctgcttaaacgatcagtcatcgtccaagacccaatt

SEQ ID NO: 120792 - DNA, 692 bp, Homo sapiens; identical to SEQ ID NO: 48508
  chr11:61275811-61276503
  hyper

SEQ ID NO: 120793 - DNA, 584 bp, Homo sapiens; identical to SEQ ID NO: 8127
  chr11:61276535-61277119
  hyper

SEQ ID NO: 120794 - DNA, 600 bp, Homo sapiens
  chr11:61334793-61335393
  hyper
gatggagccattgagcgccccgccccccagagctgtccaaggtgctgaaacagctgtcggccacgcggctccttgtccttggtgctgaaacagaactcagtcctggggctgcgccctcttccaggtcgccctttgcgcagctcccagcgagcaggatccgagagactgtgcatagtgattccgccttcctctgccaatgcctccctgatcaaccctcagctgaagctatggcagcacccagtgacctcaagagccccctttcctcgagttaggtcctcggatgctgaagaccccagtcctgactcaggacaaaaagggccgccccgcgaacgtggtaaataccacgccccattccctcccgggggcccgccgcactgcctcctggtggctggcgcgggcactgcaccccggcgggcgcacagacggtccccagcggcggcctgggccagcggcgaagcagcggcagacggttctccggcccccgccgccccctcaccgctcccggggcaatctggcgctcagagcttgcggcgttgcccgacacccgcacactccagcctgtctgactgcatcctggccgctttggggctgcctgggtca

SEQ ID NO: 120795 - DNA, 713 bp, Homo sapiens
  chr11:61347879-61348592
  hyper
cagcgctggcacccccggggcaccggtgctggggagcctcgggtgcctctgagggcactgcccggctcccacaggggcagcggctcctcgctccgccacacacgttgtccttgggctgttgaggggtgggggagaggtccttgtggggacactgcgaagccggtcccagacatccagcctggcagtgtccagactgcgggggaccggggtccgagccgctgccgctcgatcccgcgcccccggggctgggatgacccctgggggagcccgtgcggctccgggcggacaacagccccaggctggggctccgagacggcgtccggcgctgccgctgtcctgcccgccggtgcggggcgccccagcccgccggggccgcgcttacctgggctggccgcctccgggtcccggtacatggtcccctcgtcgccggttccctccgggctcctcagagccgcccgcggccgcgcgctgctccgccgccgccgctgggcatggggccgggcgacccccgggggcgggtccgagggcgggggccgagcgggctgcacctagccgcggagccggggagcgggggccgcccgccagccctcccgcccgcccgcggagcacgctgccgccgccgccgaacagcgccgagccgcctccctccggcctgcgcgccgcgtgtgcgcgccggagcgtgtgtgtgtgtacgaggccgtgtgtatgtgtgt

SEQ ID NO: 120796 - DNA, 218 bp, Homo sapiens; identical to SEQ ID NO: 48513
  chr11:61355114-61355332
  hyper

SEQ ID NO: 120797 - DNA, 407 bp, Homo sapiens; identical to SEQ ID NO: 48514
  chr11:61447551-61447958
  hyper

SEQ ID NO: 120798 - DNA, 520 bp, Homo sapiens; identical to SEQ ID NO: 48515
  chr11:61519847-61520367
  hyper

SEQ ID NO: 120799 - DNA, 30 bp, Homo sapiens; identical to SEQ ID NO: 48516
  chr11:61552664-61552694
  hyper

SEQ ID NO: 120800 - DNA, 167 bp, Homo sapiens
  chr11:61560142-61560309
  hyper
gacttgtagtcctgcgatttcgggtgtagagggagcaggggcctgcggggacctggtgtgggtggagtggggacaagcggtggagaagggtacgccagggtcgctgagagactctgttctccctggagggactggttgccatgagagcagccgtctgaggggacgca

SEQ ID NO: 120801 - DNA, 30 bp, Homo sapiens
  chr11:61563832-61563862
  hyper
ggcagcacccagggccgcctggatgatttc

SEQ ID NO: 120802 - DNA, 146 bp, Homo sapiens; identical to SEQ ID NO: 48517
  chr11:61582552-61582698
  hyper

SEQ ID NO: 120803 - DNA, 2071 bp, Homo sapiens
  chr11:61582756-61584827
  hyper
cgtctgcgcatgcgccgggacacgcctgcgcccttggccgcagtcagggctcccgagtggtcactctggttgacccgcgcaagctctggcctcgcccactaggctggtcgcgtcagagggtggggcgggtcttcgccccgcagcgtctaagctctgctgcgacgttatgggaacctggtgacccgcggcacactctgggacgccagggtagtggatagggacagtggagggcatcacgctgcagggcacgggatcagagggggatgcaaggggaggggacgccattctggccgccaagggggaaacgcggtgaagggaacgccccgactttcgagtccctaggactgagtccccaggactccaacccagcagagaggcgccggggccttagctctgagggctgtggtctagaaagggaagcagcaggcctggggctggggcgcgcgccgaccccgcagtgagaccaagggaagaagggacaggaccccgcgaagggcctaccgccccagagcgtaaacagcggtccgctccgcggaatagctgaagacctcgctggcctgcggctcagtggcctccccggcgattcgagaacagctctgggggtcctcgctaagtgtatgccattcccaatcccttatgtacgccagcggccgcttgccctccccggccagcgctgtcccttccgcgtcctccagtcttcacacgacgcaggggtccccaaggcagcggtctccccaagcttcccgtttcagccccatcctcgagaatgggctcctttcctgctccctctccgctcctgctggcgagtggagaccggcacctaggtccagacgcggctgcgctgcctctcctagccatcgagacaggatgtgactccctcccctggccactgaccccctccctccccaggcggcctgcatccttgctctcctccctcctagcctacccagctcggggttctgtccccgcccagagacctgaggctcggggctgcagatggaatgcacggcagggaggcgggaccctttgtttgtgtgtgcgtgttgttggcctccatccccactccccagactccacttctccaggcctctctcccgccttttcatcccgcatccgcaggacacccaatcaccgggcaacaggtatgatcaggcgcctccgggctttcctccgaattagtcggtgtttggctcggagtgcgtaactctgtctcccctgcactcagcctccggtcccgccctctcctgtgcccccgcctggctgcgctcaccgtggcatcctgcccggcgtagtggctgatgacccgggagccccctggatgccggcgggtgaactcgctgatgttgtacaccttacggtcgatcactagccaccgctcctcgcaccctgagcgctgggccacctcgtcccaggtgaagtagcgcggggtaggtccctgagccgcggtctcggcggccaccgggtcgggggccatagctggcctggcgacgccgcgcgccgggccagcaggggctgtcaggcgcgtgctcggggtccgcgggctccaggagtggatttgctggcgcgcgcccagagccagccgcctgcgcgccgggttttcagcaccgcagggcagaccggcgggcctcgcagcgcgcgttcccattggccgagcctcgtggcgcggggagcgagatcccgtcccccggtgggtcttgggcaactcacagctgggctgccaacacgcgccccctcgcgggctccctaaaggcgtcgccgccggattcgacttcctgacgtcaggcgggcatcgcggcgttggctcccagggggcgccgcggtaggaacagcggttctagtgcaggccctgggtgcggggccgcgctgcaggagtgaatggactgaggggccagggctgcggggtggccgcaggaagggtgggcggggccggggttgaggtttttccgtgcacgaggctgcccgggcggtcgcggacatcatctttaggctgtggatgccttggccggggtctccagacgctgaccctccagggttggaaactactgcctgcttgccacgtcgtgccgccaat

SEQ ID NO: 120804 - DNA, 1762 bp, Homo sapiens
  chr11:61594981-61596743
  hyper
gaggttgcagaaaggcgccagaatgtggatggcgcggacaatgtgggatactggagtctcgactgccgcgcgccaaggaagggcgtcacctagccaagccggccctggagttgagtgccccgcagcccgccggtccacccgcccggccgcttgctggcaccctggtggccgcgccggctttgtgtcggcatcaggtgcaaacccccagagcgccgggcgtgcgcgcacgcgccccggagcgcgcggagcccattcgttgcccccaccgggatctcctctaggatctcctccggcgcccggggccggagagtgggggagggaggaggtcggacacgtagcctgcctcgcagcagggctcgactccacgcgggagggcgggggagccggggacccgccgctccagcccgctggccttcgaaagatcctcctgggccaatggcaggcggggcgacgcgaccggattggtgcaggcgctctgctgatcgctgtggaaactcgggcggcggggaacgcgggaggatgtggaacccgaggcggggggagccggaggggcgggcagaggaggtgtcgaggccctgagctcccggggagtttttactggaggcaaaagtccatagcgggagggctgagggaggggcggaggaaggggaccgcttgggggcactgggaagccagggatcctccgccaggaaggcagggacactcccgagcgcaggcgagaaggctgggggagggggcgcggtgggaggagtaggagaagacaaaagccgaaagcgaagagggcccgggctgcacacaccggctgggaggcagccgtctgtgcagcgagcagccggcgcggggaggccgcagtgcacggggcgtcacagtcggcaggcagcatggggaagggagggaaccagggcgagggggccgccgagcgcgaggtgtcggtgcccaccttcagctgggaggagattcagaagcataacctgcgcaccgacaggtggctggtcattgaccgcaaggtttacaacatcaccaaatggtccatccagcacccggggggccagcgggtcatcgggcactacgctggagaagatgcaacggtaagggtctgggggcgccccagccacccttctctgctgcaggcggagtcaggatccctggctccccgtgggccaaacagacctccggcgctgaatggagcttgggacgtcctgtagggaaggaaagtgcatctattgcactcgtaccccctccccaatcctcctcctcctctgggccgactggggtggagaccggatctgggacccggggaggcggcgctgcggtgaaagtcccagcggtggagaacagggcaagcatctaccgcgcgcgccgggacccacgcgtcctccccttcctcggggtttgtctggaggcagggactccccaagaggggcgctcgggccagacggctttggcgcccccagcggggaagatggccgcccctgcgcgccgctgaaaggagcgggagcgcaggcagccaggtgtgggactccgcgcttgtcccgcactctccatccagactgggtggcgagaaggaaagctcgtccccggccggagatcgctcctgctgggactcttgtctaagaagttcctcaatggccacctgggaaaaaccgcccagcagctcgggttcccacgctccagggattatctagactcaccccaagctcgagccggccttcttggggaccggcgtccgggattggtggaaggagaacggcctggggtttgc

SEQ ID NO: 120805 - DNA, 30 bp, Homo sapiens
  chr11:61658575-61658605
  hyper
atcacgcccacgaccgagctccaggctcca

SEQ ID NO: 120806 - DNA, 191 bp, Homo sapiens
  chr11:61659370-61659561
  hyper
ccggaggcggagtcccggtctgtgagcagcggggcctggggggcttccagccgcgcgtcctgcaacgtcaaatccagtgcgcccagaggggggacgctgtctcggggtgcctgtgaacagccttcaaaccatgggccccaatctctgcggggcccccaccgccgctgcagctctctcggagccctctgctg

SEQ ID NO: 120807 - DNA, 449 bp, Homo sapiens
  chr11:61684587-61685036
  hyper
ttgacgctgtcaccccgggacggtcggctgcccacccttcgcaccctgcaccccgagagacacccccgacccctcccccggagtctcctggctgcaagtcggctcgcctgcaggcagggcgggggcgcacagcacctccgggtggcggcgcagacccggcggggacccccgaaatcctcccgtcccgggaggcgaccgcggcccagacccagcgcgggaccgcgagcgcgcgcggacctacccgctccacatcccggcgcctcggggcgcccaggcgtccgttcccagcgccgccgcgtcctcccagcgccgcgtccccgcccgccgccgactccgccaggggccgagccgccccaccgcctgtcagccctgcccgcggccggtcagtaggtctcagacgcctgggctcgcggcccccagcccagccccgaccctgccctgggcgggtc

SEQ ID NO: 120808 - DNA, 135 bp, Homo sapiens
  chr11:61685087-61685222
  hyper
cgccggcccggcgctgggatccggcgcgcgctcccaaggcctggccccacccggcccgccgcgccgggacagggagaccacggcgctcggagggaacccggcccccaacatcccgcgggccgcgccgcgctcaga

SEQ ID NO: 120809 - DNA, 336 bp, Homo sapiens
  chr11:61722650-61722986
  hyper
catccccatttccttcgtgctgggtgagttcccccttctggctgttccgggtccctgtggccgcccaggctccagacaggccaggggaggatcacgaggagctgcggcaaggggctggggagggggcgggggaacgccagcggcaggtcggcgcctctctgtagggaaaggtgcggactgcagccagtgaaactgaagttagacgttaggtaagacgtcctgccgttagcaatgaaaaccccattttctgagggaagcgctgacatcatggtccctggagcccctgcgcgggaggggagggggtctggcggatttctgggaccagcagggggaccc

SEQ ID NO: 120810 - DNA, 36 bp, Homo sapiens
  chr11:61735123-61735159
  hyper
gtctcttatagccgcgtcggcgtcaggcccgccccg

SEQ ID NO: 120811 - DNA, 176 bp, Homo sapiens
  chr11:61793162-61793338
  hyper
tgcagtcagcagacacgtacgggatgtgggaggtttgttttgaccacacccctgtcaatagttacaagataagccaaagcaagaagcacagacaccatgcctggcagaaaagcggccgtttgcggaactattttatgtaacacaaaaccacgttttcggtccgtaaggcagggtct

SEQ ID NO: 120812 - DNA, 30 bp, Homo sapiens
  chr11:61849659-61849689
  hyper
aacgcgggctcggccggcctgtgctggact

SEQ ID NO: 120813 - DNA, 30 bp, Homo sapiens; identical to SEQ ID NO: 48524
  chr11:61891916-61891946
  hyper

SEQ ID NO: 120814 - DNA, 165 bp, Homo sapiens; identical to SEQ ID NO: 48525
  chr11:62192261-62192426
  hyper

SEQ ID NO: 120815 - DNA, 30 bp, Homo sapiens; identical to SEQ ID NO: 8134
  chr11:62312705-62312735
  hyper

SEQ ID NO: 120816 - DNA, 469 bp, Homo sapiens; identical to SEQ ID NO: 48527
  chr11:62313645-62314114
  hyper

SEQ ID NO: 120817 - DNA, 30 bp, Homo sapiens; identical to SEQ ID NO: 48528
  chr11:62314492-62314522
  hyper

SEQ ID NO: 120818 - DNA, 302 bp, Homo sapiens
  chr11:62314746-62315048
  hyper
ttggttcccaagctccgtgctgccgcgcccatttctcgcgttctctctttctgggggcccctccgtccatatccgcacagaactggcttggatttccaccccccaggagccggggtcaccagtgcctcgcgcaccgcggtgctgcgcaggccgcgggcatacgggggtgaggaccccgggcgttggacagcggacccgacgcccaccttcctctccagactcccgcccccaggagccagagccccagcgcttcctctgcctcccattccttctctgagcgccgcccccgcctccccacttgc

SEQ ID NO: 120819 - DNA, 30 bp, Homo sapiens
  chr11:62341504-62341534
  hyper
ggcctgctggccagcgcggaaaaagctcgg

SEQ ID NO: 120820 - DNA, 30 bp, Homo sapiens; identical to SEQ ID NO: 8136
  chr11:62342061-62342091
  hyper

SEQ ID NO: 120821 - DNA, 33 bp, Homo sapiens; identical to SEQ ID NO: 48530
  chr11:62359273-62359306
  hyper

SEQ ID NO: 120822 - DNA, 30 bp, Homo sapiens
  chr11:62359594-62359624
  hyper
gcagtagtgggctgcgtggtgtacgccgga

SEQ ID NO: 120823 - DNA, 209 bp, Homo sapiens; identical to SEQ ID NO: 8138
  chr11:62369473-62369682
  hyper

SEQ ID NO: 120824 - DNA, 50 bp, Homo sapiens; identical to SEQ ID NO: 8139
  chr11:62369883-62369933
  hyper

SEQ ID NO: 120825 - DNA, 30 bp, Homo sapiens; identical to SEQ ID NO: 8140
  chr11:62380530-62380560
  hyper

SEQ ID NO: 120826 - DNA, 446 bp, Homo sapiens
  chr11:62389461-62389907
  hyper
ggacgaggggttcccgccccaaaccccggctcctgtccgcaggccccgcccctgcagcggctccgccctgcgtcccgccttcctcgcactcccctaccagctcccagctggggctggcagcgccgccagggcacgcttccggtcatctgtgcacccccccgccttgtagacttgatttccggtcccaccgccaggttccgggaaccaccgggtggtgacgtcacatccggcgtgccaaactcgcgtggccggcagtcaaaaccccgggtaggtgcagaatctcgagtaggtgcacgtggtacctacctcgagacccgccccctcatcacggaattgcctgagaaagccagtcctggcgcccagatcttcaccttattcatccatccagtcagtcacgccacccaatagctgttgctcaatacttattacacgaatgaaatctaagg

SEQ ID NO: 120827 - DNA, 233 bp, Homo sapiens; identical to SEQ ID NO: 48535
  chr11:62413281-62413514
  hyper

SEQ ID NO: 120828 - DNA, 69 bp, Homo sapiens
  chr11:62414221-62414290
  hyper
attatcgcagggggcggggcttcaggccaggggcgggaacgtccagagccaggcgctgtcagactttgc

SEQ ID NO: 120829 - DNA, 396 bp, Homo sapiens
  chr11:62420563-62420959
  hyper
atccgggtttctaccgagaaggctagggatcggcgcggggccgcgcgatggggggaaggtgccaagggctctaactacctgagaggcgcgggaccgtgggtggccggggcaggcccaggtggccctggggccccgggagggtcgcacagcgcggacatcccggagcccgagccgagcccgaggcgcgagcggcggagcgcaggcggcgcatgcgcgctgacaggaaacgcgaaaggaaccagctaccaggcctcgcaggaaaattaatccggcgatgtcctcgaccctcttacattagttccgcaccctgtcggagtcccagagcataatcccgggacgatgatagcaggaagccgattcgccctatatgcaaccactttattcaaaagcctattg

SEQ ID NO: 120830 - DNA, 30 bp, Homo sapiens; identical to SEQ ID NO: 48538
  chr11:62432568-62432598
  hyper

SEQ ID NO: 120831 - DNA, 304 bp, Homo sapiens; identical to SEQ ID NO: 48539
  chr11:62432818-62433122
  hyper

SEQ ID NO: 120832 - DNA, 231 bp, Homo sapiens; identical to SEQ ID NO: 48540
  chr11:62433206-62433437
  hyper

SEQ ID NO: 120833 - DNA, 82 bp, Homo sapiens
  chr11:62439247-62439329
  hyper
gtcgcaatgctgggcgcaggggctggcgtgggctacgcgctcctcgttatcgtgaccccgggagagcggcggaagcaggaaa

SEQ ID NO: 120834 - DNA, 30 bp, Homo sapiens
  chr11:62446325-62446355
  hyper
aactcccttacgcgcgtcccctggggaagc

SEQ ID NO: 120835 - DNA, 240 bp, Homo sapiens
  chr11:62473883-62474123
  hyper
agccttcccgagctgcgaggtcgctgtctccttgcgctcgccactggctctctctgcggcaggtttccctccggttaccgtgaccaaaggggaaagacgcctgcctccctgcaggccccaagatgtgccccaggggatgcgctgactgcagcctccgctcggctctcccttgagactgcaatcacagccctccgtgcacaccttcaccacaggccatttcacccgcgaagcggccgagtg

SEQ ID NO: 120836 - DNA, 118 bp, Homo sapiens
  chr11:62476909-62477027
  hyper
aaaaggtaaacaggccgaagaggggggatttaggggagggtgcgggagtgcagtcgtacagcagaggaactcttaggagggtaggggcggagcttggcttcagttaccgcgactggag

SEQ ID NO: 120837 - DNA, 208 bp, Homo sapiens
  chr11:62477103-62477311
  hyper
cgtcacggagtttaccgtacagggcttctcttaaaatggcggcccccaggcaaccggcgttctcaatatggtcccttccgccctcttctggtctcaaaatggctgcccctgccctaaccaagccggggcccgcgccctgcaaccccgaaatctggatttcggtgtcctcccgattgagtcgaaggcacacgggcggccataacgaaga

SEQ ID NO: 120838 - DNA, 30 bp, Homo sapiens; identical to SEQ ID NO: 48542
  chr11:62493462-62493492
  hyper

SEQ ID NO: 120839 - DNA, 30 bp, Homo sapiens; identical to SEQ ID NO: 8141
  chr11:62493994-62494024
  hyper

SEQ ID NO: 120840 - DNA, 250 bp, Homo sapiens
  chr11:62495746-62495996
  hyper
gcttgcagctgtgacgcttatgtggacacctcagtgtcgctggtggttcacctcggcttcccagtttatttattgacgtcaacaaataaatgttgaataaggaagaagagttagaattgcttgaagccctctggagttttagcactagtcccgcccactcccttctacttccaggtcgggggggggcgggtccaatagaaaggcggaagccagtgtcccaggcgttctcacgcccgcaacaattcctgag

SEQ ID NO: 120841 - DNA, 30 bp, Homo sapiens; identical to SEQ ID NO: 48545
  chr11:62496433-62496463
  hyper

SEQ ID NO: 120842 - DNA, 258 bp, Homo sapiens
  chr11:62521740-62521998
  hyper
gtgctcgccgccatcgcttttgcagtcaggcgttggattgggtgacgctcctgtcctcaacttttcctcttcgtcccgccttccttgcctccgagccctcaggattggctgagcttctccttctacctaatccagcaggcaggaggtacccggctccgagtcgctgaacgcggcgctctcctggcgaggctggaggtcgggaaccctgcagtgtcggacccgagctgacagcaagccactcccgctacaggctgacag

SEQ ID NO: 120843 - DNA, 30 bp, Homo sapiens
  chr11:62529198-62529228
  hyper
gagactccccttgtcgtccaataacctgcc

SEQ ID NO: 120844 - DNA, 30 bp, Homo sapiens
  chr11:62538469-62538499
  hyper
ttggggaggtaggccgggcaggaaaactaa

SEQ ID NO: 120845 - DNA, 316 bp, Homo sapiens
  chr11:62538723-62539039
  hyper
aatcttcagcgtcacgtgaccgccggtctctacagtctgttcacactggccaatcaagagccaggaagcctcctggagggccggaaactttccaaggcgcccgccgactggctgtattggggagggcggggccggggccccgggagagggaatgagtgtgagctcgtgagtgggcgccgccgccaccgcccccgccgccgtcgtctcggtagcagccttcgccacgccggggtcttcaggtgagcaggccttgctctggtccaaggactccccattcccgacgccgactgcttactcaccagtcttggagcccgca

SEQ ID NO: 120846 - DNA, 110 bp, Homo sapiens
  chr11:62539068-62539178
  hyper
cgtgacccaagttcagtgacccctgacctcctccccccgcgcaccccctccccgatctgggctgggctaggccgggtgggaggatgcgcgttgccgaggcccggcccgcg

SEQ ID NO: 120847 - DNA, 30 bp, Homo sapiens; identical to SEQ ID NO: 48549
  chr11:62553854-62553884
  hyper

SEQ ID NO: 120848 - DNA, 7 bp, Homo sapiens
  chr11:62554242-62554249
  hyper
cggtgac

SEQ ID NO: 120849 - DNA, 127 bp, Homo sapiens
  chr11:62554788-62554915
  hyper
ttgtaaataaatcccgcccccggaaatgacgtctccaccttcgtgggtcgcgccggataaggtgggctttgggcggggtgctgctgcagcggcgcttcctggtggtcagggcgccatggcgctgtcc

SEQ ID NO: 120850 - DNA, 30 bp, Homo sapiens
  chr11:62555246-62555276
  hyper
gtggagtcgggtttcgtggctcctgctgca

SEQ ID NO: 120851 - DNA, 30 bp, Homo sapiens
  chr11:62559085-62559115
  hyper
tgtatagggaaggtcgtgtcccgccacccc

SEQ ID NO: 120852 - DNA, 411 bp, Homo sapiens
  chr11:62572859-62573270
  hyper
gctggccgctacgccggcaaacaacctaactcccaagcgctcaggaccgaagtgtccctacgccgggcgccaccgcatttatacagcaaagcacgtcgcgcgccgctgacgtcccaggctgtgggcggtgccgccgcccggagaaagcgcggccccctgcgcgtgcgcacacttaaggccgtcgttcgaggggcggggcctggccctccacgccccgcccaagacctgaacttgcggaaccccggctggcagccagcatgtccccgcaccttttcatctgtccgctgacgctgccctggcagcttcagagttagtgctagagcacagtgctgccgccgcagcccagaactcagtgaggaagggggccgcacaaagggcttcagaggaatggagaccgcgcctccaggtggg

SEQ ID NO: 120853 - DNA, 30 bp, Homo sapiens
  chr11:62599497-62599527
  hyper
aagccgccgaaacccgaccaaagactggaa

SEQ ID NO: 120854 - DNA, 146 bp, Homo sapiens
  chr11:62609871-62610017
  hyper
ataggggcgaggcacgacccgcaccttgcatttgtactgtccgccagcaaacatctggcccttcactgagagggaaagatgccctgagaaagccatttcagaggctcctgatcctcaaacccgggatcccgcggtgggagaaaggt

SEQ ID NO: 120855 - DNA, 30 bp, Homo sapiens
  chr11:62622970-62623000
  hyper
aactcagggcatttcgaaaacgctattttc

SEQ ID NO: 120856 - DNA, 611 bp, Homo sapiens
  chr11:62623423-62624034
  hyper
ctacggcgagcgcacgcgcatacgttgaccgcatgcgaccccggggagttgtgggtagagagttccagggaaggagggcgtagacaaagcgccacctgaacttgcggcgcgaaaaaggcgcgcatgcgtcctacgggagcgtgctggctcaccgaccgcattgcggcttggttttctcacccagtgcatgtggcaggagcggtgagatcactgcctcacggcgatcctggactgacggtcacgactgcctaccctctaaccctgttctgagctgccccttgcccacacaccccaaacctgtgtgcaggatccgcctccatggagctacagcctcctgaagcctcgatcgccgtcgtgtcgattccgcgccagttgcctggctcacattcggaggctggtgtccagggtctcagcgcgggggacgactcaggtactggatcccgggctaagctcgggaggaggtcccctttggtggggccatttcgggaaagtatgtcaggacgtaagtgcttcactgaagacaggatctgattttttcctaactggttccctatgtcctgccttctggtgcgttttctttagatcttggactactacgggccaacattagc

SEQ ID NO: 120857 - DNA, 30 bp, Homo sapiens; identical to SEQ ID NO: 48554
  chr11:62648262-62648292
  hyper

SEQ ID NO: 120858 - DNA, 30 bp, Homo sapiens; identical to SEQ ID NO: 48555
  chr11:62648808-62648838
  hyper

SEQ ID NO: 120859 - DNA, 30 bp, Homo sapiens; identical to SEQ ID NO: 48556
  chr11:62649145-62649175
  hyper

SEQ ID NO: 120860 - DNA, 421 bp, Homo sapiens
  chr11:63258403-63258824
  hyper
tgggcccggtactggcggttcgcgaggcgggtttggggaggggtgggggaatcctagggaggcggagcgcgtactccccctcggcgcccgggctcaggcccatcccgcctctgcggcctcgccggcccccaggccttgcaggggactacgcccctggcgagttcccagtcggcgcggcccctggtcggcggagccgcggaagcttgggcactgggggcggctcggggaggaaccgcggaggggaaagcgccgcgggctgcaaacggcagaggcgcgcggggtggcgacagtggcgcgggcgcagtgagcgcgtccgagaacagaatgggacgaaacggggcgcttagaggcccgggaatctgtgggtcttttaggcggagaggggcgaaggaggttattcgttttggggaaggtcatggaa

SEQ ID NO: 120861 - DNA, 30 bp, Homo sapiens; identical to SEQ ID NO: 48558
  chr11:63438069-63438099
  hyper

SEQ ID NO: 120862 - DNA, 30 bp, Homo sapiens
  chr11:63438571-63438601
  hyper
ggaccagctgggcccgaagaggggcccccc

SEQ ID NO: 120863 - DNA, 277 bp, Homo sapiens; identical to SEQ ID NO: 48559
  chr11:63438922-63439199
  hyper

SEQ ID NO: 120864 - DNA, 240 bp, Homo sapiens
  chr11:63448767-63449007
  hyper
tggtccccaagggacgctccccaaccctcggcgcgcgaggcgccgcgtgaggccggctttgcccctccttccctgcaagagcgcagaggagcggttcttgcgcctgcgccctgcgccgctgcgcgctttggcacccgcttggggccctttgtgcgcatgcgcgctcgcgctcccgccctctagctgcgctcggctgagtcagtcagtctgtcggagtctgtcctcggagcaggcggagta

SEQ ID NO: 120865 - DNA, 30 bp, Homo sapiens; identical to SEQ ID NO: 48560
  chr11:63449484-63449514
  hyper

SEQ ID NO: 120866 - DNA, 30 bp, Homo sapiens; identical to SEQ ID NO: 8147
  chr11:63536315-63536345
  hyper

SEQ ID NO: 120867 - DNA, 210 bp, Homo sapiens
  chr11:63580538-63580748
  hyper
ggggcatctgctggcggaggaaggcttgtccacggaaaggcaaaagcgactcccgatcaaaatccgggggcacctggtagcgctctccacgccagcagaaacgcccaactgacttcttaatggagggaaaccccgggcttggcccgcagactgaggggcccgcgttgcgggttttgggggcccctctgcctctgcgcaccgggtggcccc

SEQ ID NO: 120868 - DNA, 30 bp, Homo sapiens
  chr11:63581104-63581134
  hyper
cgccgaagcctgcgcgccagtcctccggcc

SEQ ID NO: 120869 - DNA, 145 bp, Homo sapiens
  chr11:63606382-63606527
  hyper
gcttcgtggatttccgtaaacagagccgaagcttcgtcttcggaatcgaggaggagagcgcgtccccggggtttaccttcttcggctgtttccggaattcacccgtagtctgtggccgggaggagaaggcgcgccccacctcccg

SEQ ID NO: 120870 - DNA, 106 bp, Homo sapiens; identical to SEQ ID NO: 8148
  chr11:63655733-63655839
  hyper

SEQ ID NO: 120871 - DNA, 88 bp, Homo sapiens
  chr11:63684091-63684179
  hyper
cctggtagccccagcgctctccacgacccccacgagccagggcgtcagaaaagtttgtgcagaagtgggggacgcaagggatgagcgc

SEQ ID NO: 120872 - DNA, 30 bp, Homo sapiens; identical to SEQ ID NO: 8150
  chr11:63684896-63684926
  hyper

SEQ ID NO: 120873 - DNA, 246 bp, Homo sapiens
  chr11:63705650-63705896
  hyper
tgcacactgcggaagcgcccccggcggtttggattcgggtcacgtgcgggtcactccggtgtgctggggatgggttgaaattaaaactttccgggatgcctggtgttcacgctaacagcactgtccactctctcctaaacagtgcttacgtgcccgtctcccctctaaaccctgaggtgtggcgctgagatggcacctcgctcctctctgtgccccctgggctcagcaccgcgtagatgcgagtta

SEQ ID NO: 120874 - DNA, 30 bp, Homo sapiens
  chr11:63706231-63706261
  hyper
gccatagttacagacgcagccctgcgaggg

SEQ ID NO: 120875 - DNA, 144 bp, Homo sapiens; identical to SEQ ID NO: 48566
  chr11:63741834-63741978
  hyper

SEQ ID NO: 120876 - DNA, 121 bp, Homo sapiens
  chr11:63742038-63742159
  hyper
cgcgccgcagtttccctgcttccccagctccagaacttccggccagcgcagccattttggcttcctgaccttgggctacggctgaccgttttttgtggtgtactccgtgccatcatgtccg

SEQ ID NO: 120877 - DNA, 30 bp, Homo sapiens; identical to SEQ ID NO: 8152
  chr11:63753583-63753613
  hyper

SEQ ID NO: 120878 - DNA, 14 bp, Homo sapiens
  chr11:63767433-63767447
  hyper
acatctgtatgggc

SEQ ID NO: 120879 - DNA, 94 bp, Homo sapiens
  chr11:63803766-63803860
  hyper
ggcgggagatgggacgcccagcctttgggatttggggtgggggtccctgagtcaagagccaagcaccagtagcggtggcgctggccccgccgcg

SEQ ID NO: 120880 - DNA, 207 bp, Homo sapiens
  chr11:63828221-63828428
  hyper
tttcaccggaaaatgcgagactttcatttctacctctcgaatgcccagtctttgagtcctgcagcccccgggtcgcccgggtcccggagccggcgggtgtgaacggggccaaagccctccaggccgggcgtgtcagccccgcccccgaggctctttgcatattcatgaccttggcgggcatgcgcaccgcggcggcggcggcggcgg

SEQ ID NO: 120881 - DNA, 48 bp, Homo sapiens
  chr11:63933981-63934029
  hyper
cgggcttctctccccgcgggtcagcagggcaccgcctccacaccccag

SEQ ID NO: 120882 - DNA, 30 bp, Homo sapiens; identical to SEQ ID NO: 8154
  chr11:63952876-63952906
  hyper

SEQ ID NO: 120883 - DNA, 30 bp, Homo sapiens
  chr11:63993373-63993403
  hyper
taaggccccttccacgtccccatccctccc

SEQ ID NO: 120884 - DNA, 70 bp, Homo sapiens; identical to SEQ ID NO: 48572
  chr11:63993860-63993930
  hyper

SEQ ID NO: 120885 - DNA, 30 bp, Homo sapiens
  chr11:63997946-63997976
  hyper
ggggcctgaatagacgcaggaaatggcgac

SEQ ID NO: 120886 - DNA, 30 bp, Homo sapiens
  chr11:64002620-64002650
  hyper
tgcaggacctgcttcggtgggcactgtgcg

SEQ ID NO: 120887 - DNA, 72 bp, Homo sapiens
  chr11:64008117-64008189
  hyper
aagcccgtgttacacgcctgtattggatgacaaattctaccaagcacacagccgaccgggagttcaaacgtg

SEQ ID NO: 120888 - DNA, 30 bp, Homo sapiens; identical to SEQ ID NO: 8155
  chr11:64008409-64008439
  hyper

SEQ ID NO: 120889 - DNA, 310 bp, Homo sapiens
  chr11:64009404-64009714
  hyper
ccggccccctgcagcggccgcagaggtgttggtgtgctggaccgggggcagctgggtgtggcgtgagtggggccgcccagtcggggcaactgcagtgcagccagatagggtctggactttgcgtaaagggacaggcgggaactgaagagcggaggtggggactgggagggagggaaggtatgggggtgagcaaaggggcgggtccctggctgctgtggcctcccctgaccccctccccccgctgctggggtcctcggccaagcccccttctcactggactggtaagtgtggccccggagcccgggggaga

SEQ ID NO: 120890 - DNA, 30 bp, Homo sapiens
  chr11:64013822-64013852
  hyper
gtggagctgccaggcggaccggcgcgagac

SEQ ID NO: 120891 - DNA, 30 bp, Homo sapiens
  chr11:64014503-64014533
  hyper
ggggagggtctattcggcagggggtggcct

SEQ ID NO: 120892 - DNA, 30 bp, Homo sapiens
  chr11:64014797-64014827
  hyper
ctcctccgcacggaccgacacgtggactgg

SEQ ID NO: 120893 - DNA, 218 bp, Homo sapiens
  chr11:64015093-64015311
  hyper
gcgtcctctgcgcctcgcgacccgagtgcgcacagagggggaaactaaggcgcaaagagctgggcagtgcgggggccgcgacttataataataaaggcggtaattgcggctgaccctaggagcgtgcgtcgggaccgccgcccagtcggctccgcagagagggcgccgtgccggggctcctgcacccccgccctgcggctcctcggtccttcacatag

SEQ ID NO: 120894 - DNA, 30 bp, Homo sapiens; identical to SEQ ID NO: 48576
  chr11:64019640-64019670
  hyper

SEQ ID NO: 120895 - DNA, 46 bp, Homo sapiens; identical to SEQ ID NO: 8156
  chr11:64038084-64038130
  hyper

SEQ ID NO: 120896 - DNA, 227 bp, Homo sapiens
  chr11:64039090-64039317
  hyper
ggagtccacaaactcgtcactcatcctccggagctcgcggccatagcgctgtgctgcccagaggttggggggcgccgagcgcgagcggccccgaaaggggctgggctcctcccccatcccttcgtcgtcctccgtccccgcggggtaggagctgtggcgactccggatctccacagccccagcgcctgcagagggtcagtgggtaggggggcgacgttaatctcagc

SEQ ID NO: 120897 - DNA, 30 bp, Homo sapiens
  chr11:64052593-64052623
  hyper
gttgctattgttaccgctccgcctggactg

SEQ ID NO: 120898 - DNA, 30 bp, Homo sapiens
  chr11:64053466-64053496
  hyper
gctttcgagaattacgaggacaggaggcag

SEQ ID NO: 120899 - DNA, 598 bp, Homo sapiens
  chr11:64059063-64059661
  hyper
ggcgagggcgctgcacggagggaagcgcggcgccggaggggttaaccgcgggaggaggggggcttctgccggcgggaggggggtcccagccccggcggccgcccgctccgcccctgccgcctccgcggcccagtcggcaccggcgaggccgtgctggaacccgggcctcagccgcagccgcagcggggccgacagtaagtgcggtgcgggctccggtgcgcgggcaggactcaggggcagggacgccccaggggcgactggccgggcggggtgcccacctctcgcgcgtgggcgcctccgggagtggtgtggccgccggtcccgccgcccgccacgctccgaggcgtcgctgtgcggacgcgggggaggcggtgggagcgagctgcgggcgctgcgcggtggccctgctgtctggcgtgtgcacgctagtgtccacacacgtgtgcgtgggctctgggtgccctggcgcggccggcacgcccatgggggccggggatgccggggcgtctgcggagagtgcaggtggggtgcgtgcgtgcagcggggcggcgcggcgctgcagcctcgggatggagcgtgggcgcgcgggtctttgtgc

SEQ ID NO: 120900 - DNA, 250 bp, Homo sapiens
  chr11:64059860-64060110
  hyper
aagcccggcggggcgcgggggcaccctggagggccagccaggaagcagggcgaggcgagaggggacggagaagccgcggagatgctgtcacagccgcagcgggcgagcagggacccaccattcccctgtccccgccttgcgctgtccggcctctcctccgggtttcccttcggacgcctccgagccccctcagcctcctcctcgagggccagctccccgcacccccaccaagctccacacatttcctcgc

SEQ ID NO: 120901 - DNA, 33 bp, Homo sapiens
  chr11:64060160-64060193
  hyper
cgccttcctttcccttctcggtgccctcctctc

SEQ ID NO: 120902 - DNA, 96 bp, Homo sapiens
  chr11:64064524-64064620
  hyper
gaaggtgcagggagacggaggggtcccaggtggcccctagacttcctgcatcgcccctctgcccaggctatggcaatgtggccctgcgcacagatg

SEQ ID NO: 120903 - DNA, 379 bp, Homo sapiens
  chr11:64064662-64065041
  hyper
cgctgtttgggatcctactggcaggggtcggggaccggctgggctcctccctgcgccatggcatcggtcacattgaagccatcttcttggtgagctgctccatgccctgcctgcccttgtgctgggctccggctacccttccccatgtccctggcacatgagcgcgcccccaaagaccataagcctctcccacaggctcctgggggcgggagtggggagtatgggagtggggattgttggtgtctcctgggtcctgcctactgccccatcccgcagaagtggcacgtgccaccggagctagtaagagtgctgtcggcgatgcttttcctgctgatcggctgcctgctctttgtcctcacgcccacgttcgtgttctgct

SEQ ID NO: 120904 - DNA, 626 bp, Homo sapiens; identical to SEQ ID NO: 48582
  chr11:64067394-64068020
  hyper

SEQ ID NO: 120905 - DNA, 688 bp, Homo sapiens
  chr11:64068047-64068735
  hyper
cggctcagttccccagcccgctcttccttcccgctccagccatccgcgacccttggctccctccttgtatgtggcccacaggtgtcgctcaagtcttccgaccgccaaggctcggacgaggagagcgtgcatagcgacactcgggacctgtggaccacgaccacgctgtcccaggcacagctgaacatgccgctgtccgaggtctgcgagggcttcgacgaggagggccgcaacattagcaagacccgcgggtggcacagcccggggcggggctcgttggacgaggggtacaaggccagccacaagccggaggaactggacgagcacgcgctggtggagctggagttgcaccgcggcagctccatggaaatcaatctgggggagaaggacactgcatcccagatcgaggccggtcagtgtggcctcgccaggccgtgggcacccgcagggcaataagctggccagggactcaatttctggagctgtaaaatggggggaagctgatgggatccaagtttctaggattctctgggagaggcgcccgcgccaatctttcgccctttaaatccgccaggcattcttggagcgccccctcccgggcaggcgttgtaacaggcctttcggtcgtgacgcgcagagtccggggaaggacgcaccaaataaattgcgcaaagaccccgtggtagga

SEQ ID NO: 120906 - DNA, 30 bp, Homo sapiens; identical to SEQ ID NO: 8158
  chr11:64072074-64072104
  hyper

SEQ ID NO: 120907 - DNA, 30 bp, Homo sapiens; identical to SEQ ID NO: 48585
  chr11:64072676-64072706
  hyper

SEQ ID NO: 120908 - DNA, 167 bp, Homo sapiens
  chr11:64084951-64085118
  hyper
accccccgcacatgcgagctcagcagattgtgggtaagcagtttcatgtcgccgcacaaactctcgccaggccggaaccggaaaaaggtcgtcctccgctgcctcacttccggggatgctcctctcgatgctattggatagccaggagaaccggaagtggcgaactt

SEQ ID NO: 120909 - DNA, 30 bp, Homo sapiens
  chr11:64085406-64085436
  hyper
aggcccatggaagccgagccgcacctcatt

SEQ ID NO: 120910 - DNA, 30 bp, Homo sapiens
  chr11:64085958-64085988
  hyper
ccctcccctccgcccgcccggctcatccct

SEQ ID NO: 120911 - DNA, 50 bp, Homo sapiens
  chr11:64108286-64108336
  hyper
cggagcctgatgctcagtgggcggggcctgagggacggtgggcgaggcct

SEQ ID NO: 120912 - DNA, 30 bp, Homo sapiens; identical to SEQ ID NO: 48586
  chr11:64126325-64126355
  hyper

SEQ ID NO: 120913 - DNA, 30 bp, Homo sapiens
  chr11:64217033-64217063
  hyper
tgctgtcggtgtcgcgaccccaccccactt

SEQ ID NO: 120914 - DNA, 292 bp, Homo sapiens
  chr11:64409892-64410184
  hyper
aggggccaggctcggcgtgcacagctggggtggggcccgcgggggcccagctgcgcacacgggaagcgccccccgcccccgggccaaccgggtggccggcatctacagtgccacttaccgtggccgccgcgggtgaggaagggcatgcggttgatggcgatgggcacggtgccgtgcttgctgtggaagtggtggacgtggtgggtggtgctgaggctggaggagacccgggccccctcggccgcccccagcagcaacagcagcaacagcggcaacagcggcagcagaggtg

SEQ ID NO: 120915 - DNA, 746 bp, Homo sapiens
  chr11:64410203-64410949
  hyper
cggcggcaggggcccagccagggccggggggcggcgcgggcacccccccggcccgctccccccggggggcatttcggcccgggggcgaccgcctcacagccccatggccgggggcggggacgcggggctgcgcagccccgcgaagcccccctccggctccgagctccgggagcggggtagggatgaagcggaggtaaaccagggcccaagcctcggtccggagccaacaaaatcaactggatcccgccgggaaatcgggggtccgcggagcggcaacgccaaggtccaggatgcctgggtccatcgcgaggagctaggggtctctctgcatcccggcggggtcggagcggcgcagagggccgtcagaaacccgggggagcgcccgggggagggggcatggtgccgagtggagagggaggggagcgcgggggccaagcagggaggggagagcgagggaaatcctgcggaaaaaccgagctggggagcggggcggtgcgggctggaggagagaagagggacggagacctggttcccccgaaggcgggagaccgacggcgactggggccggccgcgccgctgctgccgctgccgcccgacggaggccgggggaaaggagggagcggccgggggaggggggggcgggagaagggggaagggaagcaaatccgggtgaggggggaatgaagggataggagaggaggggataggagaggaggggagcggggctgagccgaggaaaggcgcga

SEQ ID NO: 120916 - DNA, 30 bp, Homo sapiens
  chr11:64411157-64411187
  hyper
gctgggcagctcagccgcgcggcacctggc

SEQ ID NO: 120917 - DNA, 30 bp, Homo sapiens; identical to SEQ ID NO: 48588
  chr11:64411489-64411519
  hyper

SEQ ID NO: 120918 - DNA, 199 bp, Homo sapiens
  chr11:64478847-64479046
  hyper
gggcggggagagacgcgcatgcgccgcccccagaccgatgggggagcccctccccacgcccagccagaccctaatggaagaggctcctcccagtgcttcctctcctcagcgccccctgccccccgacaccacagccccgccccgggccgctcagcccaggacccgcccgcacttcaccacttcacggtcttggccagac

SEQ ID NO: 120919 - DNA, 65 bp, Homo sapiens
  chr11:64480265-64480330
  hyper
ccacgcgccctcgcccggacacgcgtccccgcagccctggagcgctcgcacccactcacaagccc

SEQ ID NO: 120920 - DNA, 1117 bp, Homo sapiens
  chr11:64480379-64481496
  hyper
cgaagcgccccaggccctcacccccgcgcccaggcaccgggcggccgctccccggggctcaccttcgctgcagaacttgccgccgaagcccgtgtggctgcagtcgcagcccacctcgccgggggccagcacggtgcagaggccgccgttggcgcaggggttgcgcgcgggcgcgcacagcgggtcggcggtggcgccgcgcaggccctggctgcccagcagcgcggggggccgctcgcccagcttcaggttggccaagaggccgcggaagggcggctcgtacttgacggtgctcagcgtaagcgccgagaggcgcacgtcgggcgggatgccgcccacgaacaggtcgctggccacctgcatctcgcgccgcttggagcgcacctcggcggcgcgggcctcgccgtccaccgccagcgccgtgcggcgcgcgtcgcgggtcagcagcaccatgtgccagcggtcgtcggccaccggcgtgtccagctgcagcgtggccggctcggcgcacgaaagcgtgaagcgcagccgcaggcggccgtccaccagcagcagctccaggaagtcgcagtcgccgccgtcgtccaggtagagcagcagcgcgcgcgtggcgttggtgcgcaggctgaagctgagctcgccgctgctcgccgcgcccgcccagcgcgcgtagcgagcccactgcccggggccgccgccgaactccaggccgtccgcgcgcgccgccagcgccagcagcagcagcaacagcagcggcggcggtgtcggccgccaccggctcccggacgccatgcctacggcggccccggccccgcccggcccccggcccccgctcaggcttcagagccgcgggcgcatggggcgggagggggccgggcgctccccgcgctgagcggggctcccttgcaggctcacagtgccatgggcccggccgcggggcgaggcgcgcagaggcccagatgccggcttccctcaggcggcggcggcggcgcccctcccccgccgcgggctccgacagaagagcagggagggatgcctgcgggagaacagagaggaaagggttaatgagaacagagaggaaaggtccaacgagaggggccgtcggtgccgggctccc

SEQ ID NO: 120921 - DNA, 30 bp, Homo sapiens; identical to SEQ ID NO: 48591
  chr11:64490479-64490509
  hyper

SEQ ID NO: 120922 - DNA, 30 bp, Homo sapiens
  chr11:64490856-64490886
  hyper
tcgaggttctcgggcgcccgggcccccaac

SEQ ID NO: 120923 - DNA, 82 bp, Homo sapiens; identical to SEQ ID NO: 48592
  chr11:64509679-64509761
  hyper

SEQ ID NO: 120924 - DNA, 499 bp, Homo sapiens; identical to SEQ ID NO: 48593
  chr11:64509801-64510300
  hyper

SEQ ID NO: 120925 - DNA, 30 bp, Homo sapiens; identical to SEQ ID NO: 48594
  chr11:64511609-64511639
  hyper

SEQ ID NO: 120926 - DNA, 224 bp, Homo sapiens
  chr11:64511955-64512179
  hyper
tgccaaatgggggtacgcgggggagggccccgctggaaggtggctgggaaaagctgggtgcaccgtggaggtcctccgccctccggggatccagcgcgccttagctctcgtggccgctgccccctctcccagacccgggccgcagactccccacccgctcgccgcccccagcccgcccgcgccgccctgggcggggggggagtcgctgggggccgcgccctcct

SEQ ID NO: 120927 - DNA, 1625 bp, Homo sapiens
  chr11:64512196-64513821
  hyper
cgcgctcgcccactcactcttgggacctgccgcaaggagcccgcaccggcctggccgaccccacctccgtgcgctcccgcccgccggcctcgctgcggctgcggctcccgcccgctctccacgccgcggccccgctccccgccgccccgcccccgcccccgcgccaggctgccccctcccccctccgcccctgcgcggagctccgcaccgccggctgcgccacccccaccgggggctccctctcgccccgcacgcggcggtccctgcggcagcttaacccctcccctgccgcgccgcccgggaggccagggccgcgggcggggggctgcgccactagctgccccgagggcgggcgaccggaggccccgccgcccgggacgcggaggggggaccgaaacgaagagcccctcccccaaccgcggacgccccagtgccccccgccctgcctgggtgtcgggcggaggaagccgggaggggcaggaagcggactgcggtggggaaggggcgccccgcccagcccccagctcgggttcctgttttcgagacaaaccgttcccatggggctaacccggcccgggaccgggcgtcttcctgcaggcagcgggtggcacaggcctagtggaggtcgggggcgtggggacagctggtccttgagatagtctgggggatgggctaggacaagatgggaatattttggggagagggacctgtggggagcgaggaatgaaatcgtggctatctggagacgcggccttgatgtctgggaatgggggcggggggcccagttcacacaggaggaacggggccccggaagcctggctccccacagggtcgaatggaaaggggcagccgcatgtggcggtgggttctccgcagctcggagactggagacctggatgcctggccaacagggaggaacttgggaggggcagccgcaggcggttggggtccccactagccgggcctaggagagcgggtaacggtttccgaccatttggcttcagacacactcactgtgaaaccaccgaccccaaacctcccttccgaggcgtgcccctcccagccttggggcgggggatccaggaccgcccccgcacctcagtcttggtaatgtaagacttagaaacaggacctttctgttcctcagtttccccataatgagggcctagactaggcggtctgcgagtgttccctgccgtaacactcccccgactttggatccagtgtagccacctgctaagagacccttaaacgccgcagtagggcggggctaagggcggagccaagaaggcgccgagcatcctctgcttcctccccctcctgggtcctgccctcgacagcgcggatcctccgtggtccgggaagcctcagcccaagtcccggctcccagccccggtgggccccacccaggcagacgccccgcccccggccagcgaggctggccgctgacctagtatggacacggcactgggaagagaggcgtggagggtgacgccaggaaaggggctggagaggcctaggccccgcccccacgggtcgccccctccacctcccatcaccgtcccgccgtgggacgcacctgccgagggtggaggataagggggtgactgcgcggctgctgttga

SEQ ID NO: 120928 - DNA, 174 bp, Homo sapiens
  chr11:64546209-64546383
  hyper
gaggtgtcgcagcgcgcacttcatttgttactgcgtgaactgagctccgagtccagaaaggaggggatggggtggggcgaactctatgacggagcgacggcgagctctctcattggctgcggtggtggactcaatcaatctcgcctgcgttgtagtgtcgcgggattggctgtc

SEQ ID NO: 120929 - DNA, 247 bp, Homo sapiens
  chr11:64578116-64578363
  hyper
cctggaaatagtggcgggccgggccgctgcgctgtggcttctgggatctctaggtccgcggctccggacacctccttcccgagatactcagggattggcccttcccttcaggccgaccaggcaggaagcgtgcccgcagtgccttctggaaaatgtagtccgggggcactacctgcagactcggggtgggaggtcgccgagcttctgccggttttgctgtcacgggtcggtcggcaagttatgagga

SEQ ID NO: 120930 - DNA, 30 bp, Homo sapiens; identical to SEQ ID NO: 48598
  chr11:64611789-64611819
  hyper

SEQ ID NO: 120931 - DNA, 30 bp, Homo sapiens; identical to SEQ ID NO: 8166
  chr11:64645541-64645571
  hyper

SEQ ID NO: 120932 - DNA, 30 bp, Homo sapiens; identical to SEQ ID NO: 48600
  chr11:64646421-64646451
  hyper

SEQ ID NO: 120933 - DNA, 129 bp, Homo sapiens; identical to SEQ ID NO: 48601
  chr11:64655568-64655697
  hyper

SEQ ID NO: 120934 - DNA, 30 bp, Homo sapiens; identical to SEQ ID NO: 48602
  chr11:64684716-64684746
  hyper

SEQ ID NO: 120935 - DNA, 30 bp, Homo sapiens
  chr11:64692049-64692079
  hyper
ctcactttaaacggcgcggggactacatct

SEQ ID NO: 120936 - DNA, 199 bp, Homo sapiens; identical to SEQ ID NO: 48603
  chr11:64698944-64699143
  hyper

SEQ ID NO: 120937 - DNA, 519 bp, Homo sapiens
  chr11:64739231-64739750
  hyper
gcaggggggactgcacttcggcggcggagggtggagcccggcccggaaacttccctcagaaataaacagaaacgcaaagacaacttcccgagggcccgggccgtcgtgtgccgttacctcagccccaggtggttcccaggctcggccaggctatgtctcacacactgactaggggtccttcggcctcagaaaagtggccccggacggaatacccactaagaagtgctctctgaaaaaggcgggcgccaacctcgaacgaagtcgttttgagggactggctcgccagctcctaagcaacttcggggctcgtgccgcgcacccaccaggccttctgcgcacgcgcaagtgcgcttcccaccgccccttcgggcgcagctccaaggcctggccgcggtctgcgcgtgcgcatttcattgtcgacaccgagaggacgccttggcgccttcaggtccctcctggatttaccagcccattgtttatttcgcgcctgctttagcgtggtgtcgtcgggaactagcg

SEQ ID NO: 120938 - DNA, 31 bp, Homo sapiens; identical to SEQ ID NO: 8168
  chr11:64759021-64759052
  hyper

SEQ ID NO: 120939 - DNA, 30 bp, Homo sapiens
  chr11:64794852-64794882
  hyper
cgggatcggaacagcgctgtcacttgcgac

SEQ ID NO: 120940 - DNA, 30 bp, Homo sapiens
  chr11:64808328-64808358
  hyper
agcgggctggaaggcgtggcctcagccccg

SEQ ID NO: 120941 - DNA, 30 bp, Homo sapiens; identical to SEQ ID NO: 48606
  chr11:64851484-64851514
  hyper

SEQ ID NO: 120942 - DNA, 264 bp, Homo sapiens
  chr11:64863596-64863860
  hyper
gggctgcagggggacgtttcacctgaaggactgcctcgtttcaacaacaactttatggctcccggaagtgcctcctccccgtccccttcctttccagcctcacgcccgtgggctgcagttggaacgatggcggcggcagctgccgccgggcctagcccggggtctggacctggggactccccagaagggcccgagggggaggctccggagcgtcggcggaaggcgcacgggatgctgaagctttactacggcctctcggaaggg

SEQ ID NO: 120943 - DNA, 30 bp, Homo sapiens
  chr11:64879315-64879345
  hyper
taaaaaccctgggacgagagcggtccttgt

SEQ ID NO: 120944 - DNA, 30 bp, Homo sapiens; identical to SEQ ID NO: 8169
  chr11:64880120-64880150
  hyper

SEQ ID NO: 120945 - DNA, 216 bp, Homo sapiens
  chr11:64885144-64885360
  hyper
tacctgcgaacgcacgccggtggtagttcgaaacttccggggcttcttcgattacttccggttcgcagcgcggccgacggcgcgctgtgttttcgcaaagcttccgaggattctcggcaatttccgcccacgcccgaaagccaagccccacccctttccctagtagggcgagagcaggcccagaagccgggcgtcaggtacgagccccgccctatg

SEQ ID NO: 120946 - DNA, 30 bp, Homo sapiens
  chr11:64888917-64888947
  hyper
ccacactcactagacgcttaccggtacttc

SEQ ID NO: 120947 - DNA, 77 bp, Homo sapiens
  chr11:64889775-64889852
  hyper
accagacagttgcgcgcacagaaggctggcgtagcaggtaaagatggcagctaccatgttccgggctacgctgcggg

SEQ ID NO: 120948 - DNA, 92 bp, Homo sapiens
  chr11:64902077-64902169
  hyper
gtcctgccctggctcgcactgcgccctacgtgggcccatagcaatggtgtcaccaccgtatctggggtgatgtctacggggaagggctgggc

SEQ ID NO: 120949 - DNA, 30 bp, Homo sapiens; identical to SEQ ID NO: 8170
  chr11:64902549-64902579
  hyper

SEQ ID NO: 120950 - DNA, 30 bp, Homo sapiens
  chr11:64948296-64948326
  hyper
ctgggctggggctgcgagaccagcgaaaag

SEQ ID NO: 120951 - DNA, 165 bp, Homo sapiens
  chr11:64949023-64949188
  hyper
gcgcgcgtggggtgcggccgtccggccctgcaactcgagctgctgcccctggttaaaaataccccctgcccggccctccccctccgttccccgcggtgcccttccgccgcgccccagcccccccatccccccccgcgctggcccctccccggggactgctctgcc

SEQ ID NO: 120952 - DNA, 72 bp, Homo sapiens
  chr11:65029046-65029118
  hyper
cacgcgcacgacaacgcctgcgcaccacggaacagggcaaaagggtgacaaacatgcgccactgagttttat

SEQ ID NO: 120953 - DNA, 69 bp, Homo sapiens
  chr11:65029370-65029439
  hyper
ggctcccggtttcgcgcatgcgtgcactgcacaaaccatttggcgggtttttccggccactcagttctg

SEQ ID NO: 120954 - DNA, 30 bp, Homo sapiens
  chr11:65030016-65030046
  hyper
tttgaaatgcccaccgggtaccgcttggat

SEQ ID NO: 120955 - DNA, 196 bp, Homo sapiens; identical to SEQ ID NO: 48614
  chr11:65081962-65082158
  hyper

SEQ ID NO: 120956 - DNA, 30 bp, Homo sapiens
  chr11:65101152-65101182
  hyper
gcgcgtcgggctcccgtggggtccacgcat

SEQ ID NO: 120957 - DNA, 74 bp, Homo sapiens; identical to SEQ ID NO: 48615
  chr11:65121846-65121920
  hyper

SEQ ID NO: 120958 - DNA, 92 bp, Homo sapiens
  chr11:65147932-65148024
  hyper
gctggagcccatacccgggtatcccaccgcctatgagccgcgggactctgggagaatcacccaggttcccacctctccgagagctttactct

SEQ ID NO: 120959 - DNA, 30 bp, Homo sapiens; identical to SEQ ID NO: 8171
  chr11:65149402-65149432
  hyper

SEQ ID NO: 120960 - DNA, 30 bp, Homo sapiens; identical to SEQ ID NO: 48617
  chr11:65150068-65150098
  hyper

SEQ ID NO: 120961 - DNA, 146 bp, Homo sapiens
  chr11:65153827-65153973
  hyper
cgtgggcaggccaacgcccctagcctgattctcgaatcttcgccaaaccctcttacaggccaacagtcggggcctttgtgaagggaaactcgctctgggtcactctggtggtggcggggctggtacgtgacgcggccaccccacgg

SEQ ID NO: 120962 - DNA, 30 bp, Homo sapiens
  chr11:65184973-65185003
  hyper
agtgggggcggctggcggtcctgaagacag

SEQ ID NO: 120963 - DNA, 650 bp, Homo sapiens; identical to SEQ ID NO: 48619
  chr11:65185290-65185940
  hyper

SEQ ID NO: 120964 - DNA, 30 bp, Homo sapiens; identical to SEQ ID NO: 8173
  chr11:65188769-65188799
  hyper

SEQ ID NO: 120965 - DNA, 30 bp, Homo sapiens
  chr11:65189060-65189090
  hyper
ctggttacttgaaccggggtcctttttcat

SEQ ID NO: 120966 - DNA, 99 bp, Homo sapiens; identical to SEQ ID NO: 8174
  chr11:65189905-65190004
  hyper

SEQ ID NO: 120967 - DNA, 30 bp, Homo sapiens
  chr11:65190212-65190242
  hyper
tgaccccggtgacgcggctgagggctataa

SEQ ID NO: 120968 - DNA, 30 bp, Homo sapiens; identical to SEQ ID NO: 48622
  chr11:65191692-65191722
  hyper

SEQ ID NO: 120969 - DNA, 30 bp, Homo sapiens
  chr11:65192362-65192392
  hyper
gggacagcttggcaccggtcccgtgggcgt

SEQ ID NO: 120970 - DNA, 254 bp, Homo sapiens
  chr11:65192923-65193177
  hyper
cgtcagacttgcatacgcagcagatcagcatccttcgctgccccttagcaacttaggtggttgatttgaaactgtgaaggtgtgattttttcaggagctggaagtcttagaaaagccttgtaaatgcctatattgtgggcttttaacgtatttaagggaccacttaagacgagattagatgggctcttctggatttgttcctcatttgtcacaggtgtcttgtgattgaaaatcatgagcgaagtgaaattgca

SEQ ID NO: 120971 - DNA, 30 bp, Homo sapiens
  chr11:65193565-65193595
  hyper
cttggttctgagctgcgtctattgaattgg

SEQ ID NO: 120972 - DNA, 222 bp, Homo sapiens
  chr11:65193822-65194044
  hyper
atggggaagtagtctcgggtatgctgttgtgaaattgaaactgtaaaagtagatggttgaaagtactggtatgttgctctgtatggtaagaactaattctgttacgtcatgtacataattactaatcacttttcttcccctttacagcacaaataaagtttgagttctaaactcattagaattgttgtattgctatgttacatttctcgacccctatcacat

SEQ ID NO: 120973 - DNA, 293 bp, Homo sapiens; identical to SEQ ID NO: 48623
  chr11:65197598-65197891
  hyper

SEQ ID NO: 120974 - DNA, 81 bp, Homo sapiens; identical to SEQ ID NO: 48624
  chr11:65264701-65264782
  hyper

SEQ ID NO: 120975 - DNA, 30 bp, Homo sapiens
  chr11:65265194-65265224
  hyper
cccgctctcccctccgcagcctgcagcccg

SEQ ID NO: 120976 - DNA, 317 bp, Homo sapiens; identical to SEQ ID NO: 48625
  chr11:65265756-65266073
  hyper

SEQ ID NO: 120977 - DNA, 211 bp, Homo sapiens; identical to SEQ ID NO: 48626
  chr11:65266387-65266598
  hyper

SEQ ID NO: 120978 - DNA, 242 bp, Homo sapiens; identical to SEQ ID NO: 48627
  chr11:65266933-65267175
  hyper

SEQ ID NO: 120979 - DNA, 325 bp, Homo sapiens; identical to SEQ ID NO: 48628
  chr11:65267948-65268273
  hyper

SEQ ID NO: 120980 - DNA, 31 bp, Homo sapiens; identical to SEQ ID NO: 8178
  chr11:65276133-65276164
  hyper

SEQ ID NO: 120981 - DNA, 1003 bp, Homo sapiens
  chr11:65306212-65307215
  hyper
gctggggtctggcgccgccctgcgcagcccgcgcccacgtcagacgtgaacatcaatttgcttcgaaagccaagggtaaagaggcacgatctgatttatcagtttctaggaaacaccctctgggaggaaggcaggcagcgcccgccggagaccttacaaccgcccgctaaccggggaggggggccggtaggggcgcctcgggtctcaaggcgccgggagggtctgcgggccctgaaggtccctgggtccgagccacaagtcggggcagaagtgaggccgagctcgcggaaatccctcagtgatcaccgaggtctgggccgagggcggcgtcggcggcgtcagcggcggcgctggggaacgcaggccccgtgcgggcggctgcgcgcgaagccggctttgcagacgcagcggaaggagccgctggtgttcacgcagcgctcgctcttgcacagcagcccgcgctggttcagctctcggcactcgtcgatatctgaaggtgagggcgacaggtgcggcttcgctgagcctccaggcggctcctcaccaccggccccgcccctgcccccacccccgaagcccggctcacccacgcagcgggcgcgggaggcgtcgagctggaagccgccgggacactcgcacacggcgccgcccggccgcggcacgcagcggccactcacgcagcgacactcgtctgaatcctcctctgaactgtcctcatctgcgtggcccggaacaatatggacttcaacactgagccccggccaaaggctaccaaccccgccaccgcccgacccggcagcactcacctcttgggggcttccccaacagcagggggcttgtgtcccagaaggaattgctctcgctctgcgatgtcgggcaatgggaccctgggaggagcagaactggtcagcgacgtccgggtccccgggccctggcccccatcctcgctcccggccaactcctccccgactgccttacccgcgccgcgcggcgggcacggtcg

SEQ ID NO: 120982 - DNA, 30 bp, Homo sapiens
  chr11:65307510-65307540
  hyper
cgcggccggagggcccgggcacccagggcg

SEQ ID NO: 120983 - DNA, 30 bp, Homo sapiens; identical to SEQ ID NO: 48631
  chr11:65325857-65325887
  hyper

SEQ ID NO: 120984 - DNA, 30 bp, Homo sapiens
  chr11:65337248-65337278
  hyper
ggaagcgcaatgcgcgtgcccagtacagcg

SEQ ID NO: 120985 - DNA, 30 bp, Homo sapiens
  chr11:65338407-65338437
  hyper
gaactcgactcagacgtggataaagataat

SEQ ID NO: 120986 - DNA, 106 bp, Homo sapiens
  chr11:65339688-65339794
  hyper
agcgtcaggtggcacgttaggcaccaagtgtggacttgccagtctcctgactccactgttagatcattttccttgggtgtgggggcggggcggggcgcggcgggga

SEQ ID NO: 120987 - DNA, 174 bp, Homo sapiens; identical to SEQ ID NO: 8180
  chr11:65342124-65342298
  hyper

SEQ ID NO: 120988 - DNA, 477 bp, Homo sapiens; identical to SEQ ID NO: 48634
  chr11:65343103-65343580
  hyper

SEQ ID NO: 120989 - DNA, 30 bp, Homo sapiens; identical to SEQ ID NO: 8183
  chr11:65343818-65343848
  hyper

SEQ ID NO: 120990 - DNA, 31 bp, Homo sapiens; identical to SEQ ID NO: 8184
  chr11:65344969-65345000
  hyper

SEQ ID NO: 120991 - DNA, 30 bp, Homo sapiens; identical to SEQ ID NO: 48637
  chr11:65381081-65381111
  hyper

SEQ ID NO: 120992 - DNA, 848 bp, Homo sapiens
  chr11:65405360-65406208
  hyper
acgctaggtggcctccgctagccctcccggttggtctggaaggcaggcacaagtttctcaggagaggaaatggccttagaatgagcactgctcggtgctgacctccgccaggcctggaatccccgctgctgcgcttcccgccgcagacagctcccggccggccccgcctcccggcatggccccgcctcccagcatggccccgcccccaggcggagccggcgccgggagcggtagcgggagagcggcagcgggaccccagcgcgggcggcggcggctgggcgggagccccagaggtactggcgggagcaggggacgggaggcactactgtcgggcccgacaggggagaggtggcctagccgtgggcccgggtgatgtgtatgggagtggggtcctcgccacgttcgccgccagcaccctcccaacttccctccgggctccagctcagtcccgagtcaatatgtccagccccctgtctctgaccagccgttcctactctctctgtgtgacggcttagcctggccagccagccggtgagtggaagcggcggctcctgactcctggtggcggcactgtgaccccctccccctcaacactgcaagtgtgtgcggggctcccccttattctgaggctcctcttcttcttaggcggcctccaccccagtccctggcctggcctgggaggaaacatctgtcgcgccccctggcagccgaaatggggtcatgacctccagatgtgctgggaagtggccagctcctcctcctggggcagccaggccttccggatctgtgggggcggggccggccctttccccccacccctagtgacacaggcccggaggaatgtccta

SEQ ID NO: 120993 - DNA, 174 bp, Homo sapiens
  chr11:65419809-65419983
  hyper
tgatggggtcattcacgaatgagagaagaaccaggagaggtcttcgtgggtcacgggaggtcgcgggaccgagaaagccaagaggagggaggcgcagcctgggctgcagggccttggctccctggtttccctctgggcctcgggtcgcggacctccggtcggggtccctgcgca

SEQ ID NO: 120994 - DNA, 101 bp, Homo sapiens; identical to SEQ ID NO: 8187
  chr11:65420273-65420374
  hyper

SEQ ID NO: 120995 - DNA, 63 bp, Homo sapiens
  chr11:65430496-65430559
  hyper
acgaagaggctgcacgcacagccgctgccgggggtcggggccaagtgcgcgcctcgccgagga

SEQ ID NO: 120996 - DNA, 30 bp, Homo sapiens
  chr11:65430853-65430883
  hyper
ctgtctcagaagcacgttaaaatgtcctac

SEQ ID NO: 120997 - DNA, 112 bp, Homo sapiens
  chr11:65479266-65479378
  hyper
agtcctcttgcctacggaatgaagtccacagacttgggggagcgttcgaacccttctaaggccacttcctttctccagcctctcgcgcccagttgactcccggcaacacctc

SEQ ID NO: 120998 - DNA, 111 bp, Homo sapiens
  chr11:65479399-65479510
  hyper
cgaggacttccctccgacaaagccaaaaacggtattgccacgtgacccgctccgcatacacgtgaccagcttcgcacccggtgggcgtcacgtgacggactcagtagaccg

SEQ ID NO: 120999 - DNA, 30 bp, Homo sapiens
  chr11:65480008-65480038
  hyper
tggggcgggcgaggcgcagatactttgatg

SEQ ID NO: 121000 - DNA, 30 bp, Homo sapiens; identical to SEQ ID NO: 8188
  chr11:65487490-65487520
  hyper

SEQ ID NO: 121001 - DNA, 207 bp, Homo sapiens
  chr11:65548871-65549078
  hyper
gggtgaccaaggtgcggtcgcagggcgcccgcaggaaaagcgccccagctgaaccggtccggcgggcgccgcagggcttggcttcgcttccctgacgcctgcccgggcccccagcccgctcggcttgggggcgaggagccggcgccgcggttgcggccagccaggagcttctgacctttgtttgcccgaggccgcgctggcggcccg

SEQ ID NO: 121002 - DNA, 32 bp, Homo sapiens
  chr11:65553780-65553812
  hyper
cgcagttgaagccacttcctccgtgaagccct

SEQ ID NO: 121003 - DNA, 1720 bp, Homo sapiens
  chr11:65554042-65555762
  hyper
ggcggcttcgcgcctccccaggagcctcgggcgcgccgggttgggccggccccagtggggcgagtttcgtgtcatcacccgcggagcgtgccagcgccggtgcaaataacgttgccccctccctcccggctccgctcgctccgaaactcctgtttgcaaacgccagtacgcctggctaggaggtcccgcgggggccgggccggctgggcagccaggggctgagtgcccgaagctcgccccccgaccccgccccgcccggccgccccgcccgggccgcgaggccacctcacccgcagcggaatggaaaccggttcgacaggtaacaaataggtgggttgtcaccgttatttcccaacgcatgcgccgtcgctccccgggccaccccaagctaattagatcagatcaccgccccccacccccacccccccccgccccagccaccaacacacaccgccgcgagccaataaagcgtgaacccgtccgtccggctcgcactttaagacttcccgagcggcggcggggacgccagtcgagccgggagacgcttacctgccgcttccccgcgccgcccggtgcacctggccgcaagggacctcgttctcagggaagacggcgacattccgcggaggtggaaccgccgcgcgccgtccgggctcggaccttccccggaacgtgggggcgccttagcgactccttccctgttgtgcccccgttcccggcgttcagcccggccccgcaaaggtgggacggctcccggcttcagttacggaagcggcccgtgtccagcgacgagggttcgaaaatgccccgcgcgttcctggtgaagaagccgtgcgtctccacgtgcaagaggaactggagcgagctccccgacgaggagcgcggcgagatctacgtgccaggtgaggctccaaccgccctccggcctggggcacccgcggcggcgtcgaggctgcgggcgggcgggcgggcgcaggtccgcggagccaggcggcaggcgcggtgtgggcgccggggctgaatgcggccgcggcctgggctgggtgggcccgcggctctcgacccgggactcggggggcgggggcggggccggcggaagagcgctggtcggggcgggggctgcatggtggaaggggagccgctcccagggccagggggcgcggaaccgcctacccccaccccctgaaccgcggcacagaggaggcagcggggtgtgtcaccgctcaggcgaccctcggctccgacgtcgtaaatccagaaaaccgggactcgcatgaggcgggagaaggcactggagcgatgccactttggggggcggggagcgggctggagtttcggccgagatttgtgttaaaagctcagagcttcagccgctcgcacaggtccttcctcctcccccacaacactggtggccgggtcggagtgagggtcgggccggtggggggcgtgggcccccaaattttcgttgggctccggctgctagtcccgcgcagtgagccgagacggtgggacaggcgcccgctgcgccccgcttgcccttaaagcagaggtgggatcgggtctcacctctgctagaaacgcacttccttcaccttgcggagggcacaattgcatggaaagcagctgcagggagcccaccccacagcggagggccaggcccggggaagctggtgtacccagttatttttggcagacgcctagacagcgtcgactgtgagag

SEQ ID NO: 121004 - DNA, 372 bp, Homo sapiens
  chr11:65582708-65583080
  hyper
gccaccccaatcccccgctttgggcaggtgcatagggaggactcaggaaagaggtgttctgccatggaccagtccaggtccaaaaagtctcgagaagcgcccgggagccaggagaaaagccgagagatgaaaggagatgcctgaggtgccgcagcccaggtctgagccgggctagaaaccgcgtgacaaaacaaagatgcgttcttagccgtgatggaactcccagattagcttggctttcttccttttgttttgttttgttttattcatctctgtcgcatctattttcctctgggcatgtgacacttccactctttctcttctttagtcctcttccagaagttctgttctgtgctggattaggtcaggagt

SEQ ID NO: 121005 - DNA, 30 bp, Homo sapiens; identical to SEQ ID NO: 48647
  chr11:65585349-65585379
  hyper

SEQ ID NO: 121006 - DNA, 848 bp, Homo sapiens; identical to SEQ ID NO: 48648
  chr11:65600723-65601571
  hyper

SEQ ID NO: 121007 - DNA, 30 bp, Homo sapiens; identical to SEQ ID NO: 48649
  chr11:65625138-65625168
  hyper

SEQ ID NO: 121008 - DNA, 30 bp, Homo sapiens
  chr11:65626193-65626223
  hyper
aaggccatgtccaacgtcagtaaaacaaga

SEQ ID NO: 121009 - DNA, 30 bp, Homo sapiens
  chr11:65626719-65626749
  hyper
acattccacagcaccgcccccgcccggact

SEQ ID NO: 121010 - DNA, 30 bp, Homo sapiens; identical to SEQ ID NO: 48650
  chr11:65640432-65640462
  hyper

SEQ ID NO: 121011 - DNA, 30 bp, Homo sapiens; identical to SEQ ID NO: 48651
  chr11:65640924-65640954
  hyper

SEQ ID NO: 121012 - DNA, 90 bp, Homo sapiens
  chr11:65655411-65655501
  hyper
tgagtagtgcctgccgggagggcggaatctggaagatgagctggtgcagtagcttgggcggcgcatgcagcagccgctcgagcatgtgga

SEQ ID NO: 121013 - DNA, 30 bp, Homo sapiens
  chr11:65655880-65655910
  hyper
actggtcatggcgacgcccggggccgcagc

SEQ ID NO: 121014 - DNA, 119 bp, Homo sapiens
  chr11:65657718-65657837
  hyper
gatccttagtgggccgagacttccgaatttgatcaaaggtaaagagggactggagagcggtccatctgacttctgtgggggatgggcaggagtcaggggcggacgcctgaatcttgttt

SEQ ID NO: 121015 - DNA, 30 bp, Homo sapiens
  chr11:65658086-65658116
  hyper
cgcgcgccccgccgcgtgcccagcccgggt

SEQ ID NO: 121016 - DNA, 629 bp, Homo sapiens
  chr11:65658811-65659440
  hyper
cagcgtgggcagtccggatcagttgcccctggcctgttcccccgatgattgaaggcactgcttcctccacgccgacgcccgcccggattgctccccgagccccgggaccgctgtggacctcgggacctggacgccgtcctggctgcgcaggaggggccgctggcatggactaagaaatcctgacaccaagaagggcccctcgctcttgctggcagggcagcagggggactgaaggctggagcggagggacttgctgggggttggattgggggtaataaacccggacggaagcggagcccacggcctgggcagcgtctgtttggtactcgccggggttggggcgagggtggggtgctgatacagggtacaattcccatccagaaggactgcagaactaatgattcccccattacttcgagcctggggtgggatgcggggcagtggtaaaccagacttcccccatcgggcgccgggaccggccttaatccagcccctgaagtggctccagctcccttcccggctccttcctgtccaagacaatggggcaggaagcaggtgctgggggcctagaaccactcggccgcctcctctgaggctggaagggggcataacagcgcccctccgtggca

SEQ ID NO: 121017 - DNA, 410 bp, Homo sapiens; identical to SEQ ID NO: 8194
  chr11:65666907-65667317
  hyper

SEQ ID NO: 121018 - DNA, 58 bp, Homo sapiens
  chr11:65667909-65667967
  hyper
tgaaccactgcgaccgcggggggtgggggcgttgcagcggcgcggtcacctccaggct

SEQ ID NO: 121019 - DNA, 30 bp, Homo sapiens
  chr11:65685988-65686018
  hyper
agggtgaatccaggcgtgggagcaaccagc

SEQ ID NO: 121020 - DNA, 111 bp, Homo sapiens; identical to SEQ ID NO: 48656
  chr11:65728916-65729027
  hyper

SEQ ID NO: 121021 - DNA, 30 bp, Homo sapiens
  chr11:65746237-65746267
  hyper
ctttctgagtggccccgacccctcagctcc

SEQ ID NO: 121022 - DNA, 121 bp, Homo sapiens; identical to SEQ ID NO: 48657
  chr11:65746277-65746398
  hyper

SEQ ID NO: 121023 - DNA, 109 bp, Homo sapiens
  chr11:65769429-65769538
  hyper
ccgtctaggctggacgctgagagaggatcgtccacgactcacttcaaggctgaaccaagaaaacacagtaaaggaacttgccggcggccgcgacggtagcgtcagttag

SEQ ID NO: 121024 - DNA, 30 bp, Homo sapiens; identical to SEQ ID NO: 48659
  chr11:65769852-65769882
  hyper

SEQ ID NO: 121025 - DNA, 348 bp, Homo sapiens
  chr11:65779306-65779654
  hyper
ggaagcgtcttggcacgcgggtgcgcgccgccccctcggcctcctgggctccctgaacctcgcaggaccccggcaacttcgagccccgccccagctccaggccgcgggggcgcatcgcgggcgtcgggcggggcggcccagcgggtaaaagctgcgcggccgcaagctcggcactcacggctctgagggctccgacggcactgacggccatggcgcgttcgaacctcccgctggcgctgggcctggccctggtcgcattctgcctcctggcgctgccacgcgacgcccgggcccggccgcaggagcgcatggtcggagaactccgggacctgtcgcccgacgacccgc

SEQ ID NO: 121026 - DNA, 30 bp, Homo sapiens
  chr11:65837240-65837270
  hyper
ggtccctgagcccccgcttgccctcggggc

SEQ ID NO: 121027 - DNA, 30 bp, Homo sapiens; identical to SEQ ID NO: 48660
  chr11:65838222-65838252
  hyper

SEQ ID NO: 121028 - DNA, 30 bp, Homo sapiens; identical to SEQ ID NO: 48661
  chr11:66024896-66024926
  hyper

SEQ ID NO: 121029 - DNA, 30 bp, Homo sapiens
  chr11:66025690-66025720
  hyper
ggctgggcccggatcgccggaggggccagg

SEQ ID NO: 121030 - DNA, 30 bp, Homo sapiens; identical to SEQ ID NO: 8195
  chr11:66026144-66026174
  hyper

SEQ ID NO: 121031 - DNA, 778 bp, Homo sapiens
  chr11:66035252-66036030
  hyper
ggctccccctgttgcgggtgaggcggctgctctcatattttcagatgttgctgtagaaataaagacggtttaaatctgagctgggcttgttttgagacggaggtcgggggcccccagcgtctctagactggggtggagccgggaagggtcgtgcgtgagtgggggacagtgtgtctcgctcaaccgctgtccgcgcagctgggcccagatattgtgccccaccccggaattgcgtgaggggcccacaagtcaggctttccctaaaacactcacttgtggggttctggagaccgcgggctcttatgagctctgctcctcacaaagtttttgaccttgagtgagtttcccgagactcagttttttcatctatgaaatgcgggtgatgacgcgcggctgcgagttaggactgcccagtacacgaagaaccctggacaaatgtacttttattagtcttactagaacccacattctcatttaatgttcacaacgtgggtattgggagggcaaggatgactacctccgtcagacagatgtgaaacgtgccaagcccagccctaaattgagctttctaaacaccgagtcgcggtcaggctttccagcactgtcctcaagcctgagtgcgtccggagtgcaaactacaagccccagaaggcaatgcgccagcagtgatgggagtgggcgcggaggcgcgggctccccgactacgcctgcgcagcggggctgagttggagaacgtcttagactacaagttccgggaatcagcgcggcgaggcctgag

SEQ ID NO: 121032 - DNA, 30 bp, Homo sapiens
  chr11:66036917-66036947
  hyper
ggtcactccccctgcgggtaggtggcccac

SEQ ID NO: 121033 - DNA, 285 bp, Homo sapiens
  chr11:66045216-66045501
  hyper
cgccgccaactcccgcggggcacacggcagaggtgtggggtcgcgcagccgctgagagggcccccactgcacctggcccaacctccttcagcgccccccaaaaccccactgctcccattcagcccctgtcctggcgtcattgtgtgtcccagccaggtgcttctgccgtctccgacagtgacaagtgcctcgcacttcagcctttgccctgagcgcccgcccgagggggccgagtgcggctgtgccggtggctggagtgccgaggggtgcggggtgccgggggcg

SEQ ID NO: 121034 - DNA, 30 bp, Homo sapiens
  chr11:66046068-66046098
  hyper
ggagggacccagggcgggtggtctcagagc

SEQ ID NO: 121035 - DNA, 107 bp, Homo sapiens; identical to SEQ ID NO: 48666
  chr11:66049840-66049947
  hyper

SEQ ID NO: 121036 - DNA, 30 bp, Homo sapiens
  chr11:66056315-66056345
  hyper
acccccgccctgggcggcggtcccagtcgc

SEQ ID NO: 121037 - DNA, 203 bp, Homo sapiens
  chr11:66056756-66056959
  hyper
ctgggattggatcacgggcttgccagttcacggtgggaacagccaatagaagagttaagaaagaaggtgggcgagaattatttgcgcgcctgcgcggtgaggcacttgacgcaccctgccacgactacaccagggagtcgagaggtaacctgcagccggagtcaggagcaaagcttccttggtgggacgtactccaggaggga

SEQ ID NO: 121038 - DNA, 30 bp, Homo sapiens; identical to SEQ ID NO: 48667
  chr11:66059783-66059813
  hyper

SEQ ID NO: 121039 - DNA, 1106 bp, Homo sapiens
  chr11:66079388-66080494
  hyper
gccctaccgaggcctcgcggtggctgtaagtccgtggggccgaggccaggtggcgccaaaggcccatcgacgccatctgcccggctgtccgggcccagtctccgggctcgcccagagaacccgaaatctggacaaacggaaaccgtaggtggaggaagaagagggctccagggccaggttcaagggcatcgtggtgagagatgaggggttcggaggactggtggatctgggcatatcgcgaaggtggtaagggacccaggggtggagtgggcggtgcttgcgccaagagggtgagcctgagtgtgggcggggcgtgcgataagaggctcgctcggtagcgctcttcgcagagccgtatttgtgcgctacgccgcagccagggcgctctgggtgggcgggactccagggcccccaggggcgtggcttgcatctttcgtgggcggccccgggggcggggctccgtgtaggtgaaccgctacctccgctcgatgtgtgaggtgtgacagtcctacgagggcgcagttcttccacttttgtgagcttgagagggggcggagcttgtagctggggacggagcctgaagaggaggttgaggggaacttcacacgtttccctggagggcggagtttacatcatcccccaacagagttaagacctctgagggattccctgcagtgtccagggctctgtgaggcgaagcttgcagttgtgttgggcggggcctgtagcgccgcgtgaagagaatgtgtaaactcggggcgaagttcatacctcctagaagccgagactaatagttccgccaatctgcgcgcgccgagcggaggaggtggggcttgtaggttgtgggcgggggactgggcggggccaagagggcagggggcgggcacaatcgctgctggaatctttgagttggcaggggcggggcttgtggctttgtgggcggggcctctggagagctcccgggggctctcttctgttctgcagcgagtaggcgtggctcgtagctcccaggtccgggctgataccgctggagtatgcagttcgccgccgcgcccgaatgaggcggggcctgcgagtaagtgggctgagcccgggctgggcgcagg

SEQ ID NO: 121040 - DNA, 31 bp, Homo sapiens; identical to SEQ ID NO: 8198
  chr11:66107464-66107495
  hyper

SEQ ID NO: 121041 - DNA, 236 bp, Homo sapiens
  chr11:66139090-66139326
  hyper
aaaggggcagagaagccgcacctgcacctgcgctggggcggagggccgcagaccggtggggcggggggcgggtctccccagattccggtgcagggcggctggagtcgcacaggtagcctcgggcggatttcggcgtgtctcgcgctccgcaggctgggacctgggctccgccccgaggcggggacagagggtcgcgccacccgtctctccttcccccacccgcctcagggactcga

SEQ ID NO: 121042 - DNA, 404 bp, Homo sapiens
  chr11:66176317-66176721
  hyper
tgagtggggcatcccttcctccgggcgccgggctgcacccccttaccctgggcagccgcggggccgtgacgcctggcggagggggcgcgcatctcggcgcgcgccggtcttcgcagtggctcattcatcgccgccgaggcacgccgttgccatggggacgtgatgcaggcgcggggagcgggagggagagggaggccccgggtgacgtccgcgctcttctcgcagctagtctcccgcggcctcccaattcttgcctaatttggaagagagccgcagcccttctgctgatgcgcgcgcgctggcgcctttttaaggcaactggcggagtggcggctccaccagagcctgggagctgcccccgcccccgagccgcgagccccgcgccgggccggggagtccccggc

SEQ ID NO: 121043 - DNA, 119 bp, Homo sapiens; identical to SEQ ID NO: 48672
  chr11:66186289-66186408
  hyper

SEQ ID NO: 121044 - DNA, 1130 bp, Homo sapiens; identical to SEQ ID NO: 48673
  chr11:66187354-66188484
  hyper

SEQ ID NO: 121045 - DNA, 213 bp, Homo sapiens; identical to SEQ ID NO: 8203
  chr11:66188570-66188783
  hyper

SEQ ID NO: 121046 - DNA, 471 bp, Homo sapiens
  chr11:66188852-66189323
  hyper
cgagctgccaggcgccggagaccctggagctgagggaacccgctggggctgtcgcatgtctagggcagcgtgctggcgagctggggagattcgggactcgggagattcgggactttctacttttcctcctgagctccctccagacctcaccttagttctgaatgagagttagagagcctggacggtgtccctaacaccagattatgagaggataagagccaggacagagcggcctcggtgcccgccagtgcagaagcgctccgggagccggggagggaagcccgggaagttgcagggatggagctgcctgagcctaggggaacatagctactgtccgcggtgctgaaagggatctcctgtcgccttcggggcgctgcccatggtgctgacggctgcgccggccgtgtatggctctgtccatggttctgaacccacagtcggcttcggagctctgtccgcggttctgaaatt

SEQ ID NO: 121047 - DNA, 30 bp, Homo sapiens
  chr11:66205879-66205909
  hyper
tacgcatcttcccacgttatcctcattaca

SEQ ID NO: 121048 - DNA, 200 bp, Homo sapiens
  chr11:66206304-66206504
  hyper
gtcaagggtcctcacgttaggctagggcaggtgaggccaacaaacagcagccttgtttcaaccctattgctcgccaactagtaagacaaggaggatgagaggaggataaaacactttttaacttgttttatgcagataaaggaagggcccgaatggcctaggtacacacattcccacaggaacgcgcacaggcactacct

SEQ ID NO: 121049 - DNA, 30 bp, Homo sapiens; identical to SEQ ID NO: 8206
  chr11:66233890-66233920
  hyper

SEQ ID NO: 121050 - DNA, 30 bp, Homo sapiens
  chr11:66234859-66234889
  hyper
gctgtgctgcagcccgagctcgagggggga

SEQ ID NO: 121051 - DNA, 132 bp, Homo sapiens; identical to SEQ ID NO: 48679
  chr11:66247854-66247986
  hyper

SEQ ID NO: 121052 - DNA, 63 bp, Homo sapiens
  chr11:66277989-66278052
  hyper
aggaaggtggccagcgcgtcctcctgagcctgggtgggaaagcttggcgcccggaacctttgt

SEQ ID NO: 121053 - DNA, 30 bp, Homo sapiens; identical to SEQ ID NO: 48681
  chr11:66313839-66313869
  hyper

SEQ ID NO: 121054 - DNA, 36 bp, Homo sapiens; identical to SEQ ID NO: 48682
  chr11:66314196-66314232
  hyper

SEQ ID NO: 121055 - DNA, 271 bp, Homo sapiens
  chr11:66335703-66335974
  hyper
tggacccgggcctggcgcccccgcccccggcgcgtcctcacccggcggacgcggccgcgcacaaggcccagcacggcccgcgtccccgcagcccggccgcggttgaacatctccagcgcgaagcgggtgggcgccagcagctccggggacggcggcccccaggcctgaaagctggcggctcggggctgggcgggggcggccactgcgcccgggagcagccccagcagcgacaggagctgcagccagggcgccatggcgagggcgaagccgg

SEQ ID NO: 121056 - DNA, 264 bp, Homo sapiens
  chr11:66346490-66346754
  hyper
ctacctctttcttttgaggccaccccttcttcccaccgctaagcgttccagaatccacagtgattaattcgtccgaaagagcaggggagtgagggaggactggattctgagggtgctggcagaacaactggagtcgggggtccacggcggtcatgactatcgacacacggtggcgctgttgaggctcggtcctgcgcattcccgagtgtcaggagccctggaagaagttgcaggcttctcacctcccacgcagccactgcactc

SEQ ID NO: 121057 - DNA, 30 bp, Homo sapiens
  chr11:66360785-66360815
  hyper
ttcgtgtggagcctcgccgggcagagagcc

SEQ ID NO: 121058 - DNA, 30 bp, Homo sapiens
  chr11:66384853-66384883
  hyper
aaattgggaagtgacgggcacaagccggat

SEQ ID NO: 121059 - DNA, 30 bp, Homo sapiens
  chr11:66406297-66406327
  hyper
tgtcctggtaggtccgcagtctccacaccc

SEQ ID NO: 121060 - DNA, 30 bp, Homo sapiens; identical to SEQ ID NO: 48684
  chr11:66406616-66406646
  hyper

SEQ ID NO: 121061 - DNA, 352 bp, Homo sapiens
  chr11:66445297-66445649
  hyper
cgctcgagcctggacgcgaccgggccctttctcgcgcgccagctcacgcacgcgcgagtgcgcgctgcttccctccccttcccctcgcgggagccgagtgaccaatcccgaggctgcatacaaatgaccacgcagcacgggggcggggcctgttggtggtggcgcggcgccgcggaggtcagcccacccccagccccagccagccagtcaccaccctggaaagggtcgccactgctgcgtcagaggggctctgaacgcaaccactgcctagaaaagcggaggccttggggagtcgctcaccacaatgggtcctgctcttgggccctttgaggggggcggggagctaatgaca

SEQ ID NO: 121062 - DNA, 114 bp, Homo sapiens; identical to SEQ ID NO: 48686
  chr11:66494763-66494877
  hyper

SEQ ID NO: 121063 - DNA, 30 bp, Homo sapiens
  chr11:66610221-66610251
  hyper
agcccctcggcgcccgttctcccaggcttc

SEQ ID NO: 121064 - DNA, 141 bp, Homo sapiens
  chr11:66610582-66610723
  hyper
tgcaggccacgggccgctgctgagaggtcctcaccccgggcccccttgttcccgcaggacgtgctgtggctgcaggaggtctccaacctgtcagagtggctgagtcccagccctgggccctgagccgggtccccttccgca

SEQ ID NO: 121065 - DNA, 30 bp, Homo sapiens
  chr11:66611226-66611256
  hyper
tagggaccatcccgcggtcatcaagcgacg

SEQ ID NO: 121066 - DNA, 1025 bp, Homo sapiens; identical to SEQ ID NO: 48687
  chr11:66725361-66726386
  hyper

SEQ ID NO: 121067 - DNA, 537 bp, Homo sapiens; identical to SEQ ID NO: 48688
  chr11:66790580-66791117
  hyper

SEQ ID NO: 121068 - DNA, 15 bp, Homo sapiens
  chr11:66791246-66791261
  hyper
cgccctgactgtcct

SEQ ID NO: 121069 - DNA, 97 bp, Homo sapiens; identical to SEQ ID NO: 48690
  chr11:66824137-66824234
  hyper

SEQ ID NO: 121070 - DNA, 15 bp, Homo sapiens
  chr11:66885224-66885239
  hyper
gatttagaatttaaa

SEQ ID NO: 121071 - DNA, 127 bp, Homo sapiens; identical to SEQ ID NO: 48692
  chr11:66886029-66886156
  hyper

SEQ ID NO: 121072 - DNA, 30 bp, Homo sapiens; identical to SEQ ID NO: 8213
  chr11:66886903-66886933
  hyper

SEQ ID NO: 121073 - DNA, 30 bp, Homo sapiens
  chr11:66887314-66887344
  hyper
acgcctccgactcccggtctccaaagccag

SEQ ID NO: 121074 - DNA, 121 bp, Homo sapiens; identical to SEQ ID NO: 8214
  chr11:66897391-66897512
  hyper

SEQ ID NO: 121075 - DNA, 241 bp, Homo sapiens; identical to SEQ ID NO: 48695
  chr11:66897571-66897812
  hyper

SEQ ID NO: 121076 - DNA, 90 bp, Homo sapiens; identical to SEQ ID NO: 48696
  chr11:67007553-67007643
  hyper

SEQ ID NO: 121077 - DNA, 30 bp, Homo sapiens
  chr11:67044177-67044207
  hyper
cctctctccagcccccggcagccacggatc

SEQ ID NO: 121078 - DNA, 30 bp, Homo sapiens
  chr11:67044683-67044713
  hyper
ggcctgcagcccccacgggctctgggggct

SEQ ID NO: 121079 - DNA, 30 bp, Homo sapiens
  chr11:67044966-67044996
  hyper
gtcgctgcgaccctgcgtgcctccttgccc

SEQ ID NO: 121080 - DNA, 30 bp, Homo sapiens; identical to SEQ ID NO: 8216
  chr11:67084674-67084704
  hyper

SEQ ID NO: 121081 - DNA, 255 bp, Homo sapiens
  chr11:67085194-67085449
  hyper
gaccgcaacgttcgcgcgccaccttgtgtccattcccttagcctccagggacaacccggaaaccacatttcccagcgtgccgagcgcctctgcgcaggcgcaaagagtttccctcgttgccatgggaacctcgccccttctagagtcctggccgcttgactcagctaagcgcgaaggtgttgtttcttcctgaggtgcgctggggctgggacccggtctgcagaaggtccaggggatggcgtcgggggattgagg

SEQ ID NO: 121082 - DNA, 30 bp, Homo sapiens
  chr11:67085961-67085991
  hyper
aacgtctcttcctacggtgcagtatgttac

SEQ ID NO: 121083 - DNA, 176 bp, Homo sapiens
  chr11:67121084-67121260
  hyper
agccaatggcaggccgcctatgcggggcggggccctggcgctagccaatggtaggcagtgtagggtgaggggcggggcggtgcctcagctgtgggccgcgggaggaggggcaggctggggcgggggacctgtcgggatgccccgacttcaccaccttccccggcccccattggtct

SEQ ID NO: 121084 - DNA, 30 bp, Homo sapiens; identical to SEQ ID NO: 48699
  chr11:67139892-67139922
  hyper

SEQ ID NO: 121085 - DNA, 715 bp, Homo sapiens
  chr11:67141092-67141807
  hyper
ctttaataatcccatccgccaggcccactcgcaggtttttttcgctcggtttcggattttttttttttttcggtgtgggacattctgcaaactttttttttttttttctgacgtgtaaagctgtaaccacaaattgtagcggccctccccggggtgggggtaggaggggggaggagggaagggagggcttctggggctccctctccctcccacagcaccgagggggggtgaggtgaggcgaggctgtggcggtaccaccctgggcctcctgggggagggggcggggaggccatcagtccgtctgaggactcccaggagccgggggacagcgccggcttcgggtgggcttctccccaggcgttggcctgggacaccgccccctgccccctgtcccctgccgatgcggggtccctgatccaacctacctctgcctgtgcgaggtccctgctcccaccctacctctgcctcctcatctctaaccttccctcctcctcccccttgagtaaatgcaatgacacattctcccaaatgccagcgagctggcctgggagcaagtgatggtgtttttcctgctgccctttgtctgggctgaccgccccccctgcctattgtcccgccgcttgtcccatttccaaaagctagagctaagcgaggcgctggggctggggcaggtgactaaccagctcacaatgccccctgcgggggaggaagaggg

SEQ ID NO: 121086 - DNA, 30 bp, Homo sapiens
  chr11:67159517-67159547
  hyper
gaagtgcctggtcacgggcggcaacgtgaa

SEQ ID NO: 121087 - DNA, 30 bp, Homo sapiens
  chr11:67169061-67169091
  hyper
ggcagctgcggccacggaacctcgctgccc

SEQ ID NO: 121088 - DNA, 170 bp, Homo sapiens; identical to SEQ ID NO: 8219
  chr11:67183097-67183267
  hyper

SEQ ID NO: 121089 - DNA, 30 bp, Homo sapiens; identical to SEQ ID NO: 48703
  chr11:67188476-67188506
  hyper

SEQ ID NO: 121090 - DNA, 68 bp, Homo sapiens
  chr11:67195791-67195859
  hyper
aaggctaggcgcctcgccactctaggactacaattcccgagaggccttgcgacggaagccatctttgt

SEQ ID NO: 121091 - DNA, 235 bp, Homo sapiens
  chr11:67210769-67211004
  hyper
aaggctcctgggacccgcgatcccccctcagccccctcagcccggcccctgcagccccgcccagcccccagcccgcgcccctagccccggccctgccgcgctcaccgggggcaccgggggcgcagggggctgcggcaccggcttcgggcggctccggatcccggcctctgggaagcaggaagcaggattcaggaagtgacagagggacccggagcgggggcggggcaggggctcg

SEQ ID NO: 121092 - DNA, 103 bp, Homo sapiens
  chr11:67211230-67211333
  hyper
ccgaggccccttcgcgttcttgctcctcataatggcatccgcaggagtctccaggattgggtgaggccccgccttcccggcccccgacggaacgcacacctcc

SEQ ID NO: 121093 - DNA, 324 bp, Homo sapiens
  chr11:67232077-67232401
  hyper
gccgcgatcacttctcgaagtagggcaggtagaagaactggaagccccggtggcccttgaccgcgcagtagatgaagatcacgtgatagactgcggggcggggcctgtcagcgcagaagccccgcccctccccgcaacaccgcccccagtgccgccccacagcccccgccccttccgccccggtgcccgctcgcacctccaggcaccaacaacaggaagcccggcacgaagaagatggcgctggagacacctgcgggagggaccagagcccggtcagggcgagggggcggaggcttcgaggccttccgggctgccgctgactgc

SEQ ID NO: 121094 - DNA, 133 bp, Homo sapiens
  chr11:67232464-67232597
  hyper
cgtggacccgtggacacaagacaggggtgtcctctgcctgtgggggcgggagggtcgctcacctggagagggggtcgcctccagtcccacgccgaccaggatcagcactgcacacagacggagccgcgggggt

SEQ ID NO: 121095 - DNA, 30 bp, Homo sapiens
  chr11:67236588-67236618
  hyper
gggcccagggcccccgtcctccagggacag

SEQ ID NO: 121096 - DNA, 116 bp, Homo sapiens
  chr11:67236851-67236967
  hyper
ttccagacggagcgcgcccgccccgtgacgccactcagtggccgccatggcaagcgacagcccgtgccgggctcggacacatcccccaggcgtgtatgtgcgggggcttggagggg

SEQ ID NO: 121097 - DNA, 30 bp, Homo sapiens
  chr11:67250794-67250824
  hyper
taggcgagaggttgcgcatgcccagagggc

SEQ ID NO: 121098 - DNA, 376 bp, Homo sapiens; identical to SEQ ID NO: 8223
  chr11:67271841-67272217
  hyper

SEQ ID NO: 121099 - DNA, 30 bp, Homo sapiens; identical to SEQ ID NO: 48711
  chr11:67272621-67272651
  hyper

SEQ ID NO: 121100 - DNA, 30 bp, Homo sapiens; identical to SEQ ID NO: 48712
  chr11:67272965-67272995
  hyper

SEQ ID NO: 121101 - DNA, 45 bp, Homo sapiens; identical to SEQ ID NO: 8224
  chr11:67275124-67275169
  hyper

SEQ ID NO: 121102 - DNA, 30 bp, Homo sapiens; identical to SEQ ID NO: 48714
  chr11:67275599-67275629
  hyper

SEQ ID NO: 121103 - DNA, 98 bp, Homo sapiens
  chr11:67276280-67276378
  hyper
taccgttcttcctgcggcttggctcgtcctcaggtctaagggcgacctcaaagacccctttacccgcacccccaaggccccgcgctgctgcctaagtt

SEQ ID NO: 121104 - DNA, 509 bp, Homo sapiens
  chr11:67350961-67351470
  hyper
agggaatttccccccgcgatgtcccggcgcgccagttcgctgcgcacacttcgctgcggtcctcttcctgctgtctgtttactccctaggccccgctggggacctgggaaagagggaaaggcttccccggccagctgcgcggcgactccggggactccagggcgcccctctgcggccgacgcccggggtgcagcggccgccggggctggggccggcgggagtccgcgggaccctccagaagagcggccggcgccgtgactcagcactggggcggagcggggcgggaccacccttataaggctcggaggccgcgaggccttcgctggagtttcgccgccgcagtcttcgccaccagtgagtacgcgcggcccgcgtccccggggatggggctcagagctcccagcatggggccaacccgcagcatcaggcccgggctcccggcagggctcctcgcccacctcgagacccgggacgggggcctaggggacccaggacgtccccagtgccgt

SEQ ID NO: 121105 - DNA, 30 bp, Homo sapiens
  chr11:67398011-67398041
  hyper
gaaaccacgcgaaccgtgaagcgcccggcg

SEQ ID NO: 121106 - DNA, 215 bp, Homo sapiens
  chr11:67406910-67407125
  hyper
cacctctgcttcagaacgtagcctacctgccatggagacagagaggctgtccggctcctggagaaacactgcttggctggggctgggaacctgcctgctggaaggggtggtcaccactcgtccactcggcacctcagctcagccctcaggtgctcacacaagctgtagtctctcggcaggacggtccttgcctcctcgatcgcccttcgtccacg

SEQ ID NO: 121107 - DNA, 30 bp, Homo sapiens
  chr11:67407690-67407720
  hyper
gcacgtgaacccacacgcacagacacatgg

SEQ ID NO: 121108 - DNA, 96 bp, Homo sapiens; identical to SEQ ID NO: 8227
  chr11:67777601-67777697
  hyper

SEQ ID NO: 121109 - DNA, 30 bp, Homo sapiens
  chr11:67798197-67798227
  hyper
aaggtgggtgttcacgttttggccgtgaaa

SEQ ID NO: 121110 - DNA, 361 bp, Homo sapiens
  chr11:67806322-67806683
  hyper
ccaggcctcctctccgggattaagcgcctcaggacccgtccgccaggccacagcctgggctcaacctctcccagacttcctggactccagtggagccttgggccgggggcggggcgtccctggcccctccccgtcgtcccgcctgcccggaaaggagtgagcggcgcctagtcccgggctggcgggagtgcagttctgagtcccgcccggcgtgcgcggagcggggcagccagcagcggaggcgcggcgcgcagcacacccggggtgagtgcccctgccggggtctgcggagccccagaatttcctgcccaccctcttccccctgccccggggaggagatcctggcgccccacccagttgg

SEQ ID NO: 121111 - DNA, 30 bp, Homo sapiens
  chr11:67887963-67887993
  hyper
agacctatcttaagcgtcagtaccacacgc

SEQ ID NO: 121112 - DNA, 387 bp, Homo sapiens
  chr11:67889353-67889740
  hyper
tgtaacatttcccagcgctgccacaggcgcgtctcgccctgtccaacgcggagcccgaagaattactaagaaaccgaggtctgaaggagggaagaggtgacgggctcgaggccacacggtgggccaggctgggcccggctgcacgccggctaccggggcccagccctctgcacgcctcccgcagcctcagtttccctgtccgtggtactgaggatgctcgggcctagaagttcagggctggaggcccagggaccgtcgagggaggggcatcatccccgccatggggccgccgcaactgcccagagcacaggccaaaggtgcgtgccacggggctactggcgttgtggacgctgcccctgcctccccatcccccgcaggaaacagcct

SEQ ID NO: 121113 - DNA, 442 bp, Homo sapiens
  chr11:67895652-67896094
  hyper
cactggcagcccgtccgtgtagccttggccgggcccccaagcttcttagaatgccatctaagaaggcagagggggatgagcggcggcggggaggaggggcaggccttgggaagatccactgggtcacagggaagcgaaggcggaccctcctcccccagcgctactgcccgggccgaattccaaggccagcggctgcccgctgagaaggaatccggaccaacgggattctggcttccctctggcccctcctggcgagagcggcgccgggaggagggggcctcagaaggggcgggcaggggcggggcccgcggggtaggcggagctcccaggaaaacagcgggcggggcctcgcgcgaggggcggggttggcggcgaggcgtcccaggacccccattcctccctccgccccggggcttctggggagcggcgcagcttgactgcc

SEQ ID NO: 121114 - DNA, 30 bp, Homo sapiens
  chr11:67979997-67980027
  hyper
tcctccttccaaggcggaggtgacaacggt

SEQ ID NO: 121115 - DNA, 46 bp, Homo sapiens
  chr11:68039638-68039684
  hyper
gagcaggtctgtggcggaagtgggtgttcccgggtctctgctgccc

SEQ ID NO: 121116 - DNA, 111 bp, Homo sapiens; identical to SEQ ID NO: 48722
  chr11:68080103-68080214
  hyper

SEQ ID NO: 121117 - DNA, 203 bp, Homo sapiens
  chr11:68080740-68080943
  hyper
agttctgagcccgggcgcggggcggcctggccggtggcgctgctcctgtgagccgcgtggctgtgggtttccaagcggactgacacctgccaggtgcccgggcgacccgaatgccccgtgtggccgccgggtccccagatagtgtccatccccgggtcggctacgcggaggtgacgtggtcccagatcgcggggcagtggggg

SEQ ID NO: 121118 - DNA, 333 bp, Homo sapiens
  chr11:68095750-68096083
  hyper
agggattttgtagagcgatgataaatttggcatgtctttattattattattttttcaacacttaaagaaaataaaagctggtacaaaggtatgtttgtttctgaaatgtgtttccttccccagatgttcttttctgccagttctaaaatgcgttctgagctcggtcctccagtttcctccctgtgaggaagaacaatgagacctttgtaaccacacaggggaaacggccgcttccctctgcagtgggcatgggggaggggctgggacgtcccacctcctcccacctcgatggaaaccacgagtctgtgccagcccagccgactgtcggggggt

SEQ ID NO: 121119 - DNA, 211 bp, Homo sapiens
  chr11:68227846-68228057
  hyper
aagcattggccactcggattggtggtccgaagcgtccgtcaagcggaggacctgctgttgctacggcgtagggggtcccagccaggtttctccccgtttctgatttgtttctcaggctccggggtcctagaggttccggatccgtcaagtccatgggaaaagaatgcgcccctcgcgcttgactgacgaggcttgcgggccaatcggaatg

SEQ ID NO: 121120 - DNA, 39 bp, Homo sapiens; identical to SEQ ID NO: 48724
  chr11:68451834-68451873
  hyper

SEQ ID NO: 121121 - DNA, 191 bp, Homo sapiens
  chr11:68518785-68518976
  hyper
cacccgcaggggcccgacccggcccggcagcccccatccccgcctgcagagccgaggcccagcccggggaccgccccgtcattcctcctcggagggacgcacctggggccgccggggctgccgcagcgtggagcgagcgggatggggcgtgggccgggcctcaggcgcaggcggccgttggcggttggaga

SEQ ID NO: 121122 - DNA, 30 bp, Homo sapiens
  chr11:68606358-68606388
  hyper
atcgtatgcttatatcgcttatttgtaaaa

SEQ ID NO: 121123 - DNA, 786 bp, Homo sapiens; identical to SEQ ID NO: 8232
  chr11:68606632-68607418
  hyper

SEQ ID NO: 121124 - DNA, 30 bp, Homo sapiens; identical to SEQ ID NO: 48726
  chr11:68607675-68607705
  hyper

SEQ ID NO: 121125 - DNA, 30 bp, Homo sapiens; identical to SEQ ID NO: 8233
  chr11:68608210-68608240
  hyper

SEQ ID NO: 121126 - DNA, 30 bp, Homo sapiens
  chr11:68608798-68608828
  hyper
cagcatccctcccgcggccacccgcaggct

SEQ ID NO: 121127 - DNA, 30 bp, Homo sapiens
  chr11:68609505-68609535
  hyper
cgagcgggtgctcgcgtcctcgacctctgc

SEQ ID NO: 121128 - DNA, 30 bp, Homo sapiens
  chr11:68610996-68611026
  hyper
acttccactgccacccgcgcgtgcaagcgg

SEQ ID NO: 121129 - DNA, 157 bp, Homo sapiens
  chr11:68611261-68611418
  hyper
cgcggctgcaccccacgagcccgggcggctctcgcgcgtgaggctctccttgcacgtgggccttcgcggtttgcactacggaagctggactgtcattctcaccgcaaatgcccttccctcctttccctggaacctcagccaccgacaggtccccgct

SEQ ID NO: 121130 - DNA, 30 bp, Homo sapiens
  chr11:68611638-68611668
  hyper
cagctgcaacgagcccgcgccggcctgcaa

SEQ ID NO: 121131 - DNA, 30 bp, Homo sapiens
  chr11:68670810-68670840
  hyper
ttttcagaccagctcgcagcctgggggcag

SEQ ID NO: 121132 - DNA, 30 bp, Homo sapiens
  chr11:68671216-68671246
  hyper
atgctgtggctgcacgcggacgccagccgc

SEQ ID NO: 121133 - DNA, 241 bp, Homo sapiens
  chr11:68671471-68671712
  hyper
gagcttgagagagacgcggaggtggaggagcgcaggtacgggaggccgccggcgccgctccctcgcggtcggtcccgccgtgtcccgggcagagtctccgaggggctcggcctcatagtctggggcgggaatttcgtctccgacccttcgagtcaggggcagggatcgtccgtcccctgcttggccacctcccgagttgtcagtctcatcacttcctgggcagcgcgttccgtttggggac

SEQ ID NO: 121134 - DNA, 31 bp, Homo sapiens; identical to SEQ ID NO: 8235
  chr11:68801618-68801649
  hyper

SEQ ID NO: 121135 - DNA, 290 bp, Homo sapiens
  chr11:68816176-68816466
  hyper
tcctccccagccctcggcccttaagccccagaacgctgccccgccctgggtggaacgaagctgagctccaccctagaggggcggggccctttagctccgccccactcaggagaaccccacccctccctccccgttctcattggctgggactgcagggatcccctgcgccacagtgccgtgcgcgcgtcagcaaaaacgccagggacggggtctccgcgcctgcgcagtgaagctgggcgccttcggggcttgagcttctgagggtcgggtccagcgcgtgggctgctgga

SEQ ID NO: 121136 - DNA, 161 bp, Homo sapiens; identical to SEQ ID NO: 8236
  chr11:69062211-69062372
  hyper

SEQ ID NO: 121137 - DNA, 254 bp, Homo sapiens; identical to SEQ ID NO: 48732
  chr11:69331402-69331656
  hyper

SEQ ID NO: 121138 - DNA, 30 bp, Homo sapiens; identical to SEQ ID NO: 48733
  chr11:69379145-69379175
  hyper

SEQ ID NO: 121139 - DNA, 1413 bp, Homo sapiens
  chr11:69451962-69453375
  hyper
agaggcgcggggatgcggggtcctccccgcagtcttccggaaagggcgggggagggcgcggcaagttccggagtggggcatgccgtgggagcccacgagggcctcagcgcggatcctccgccggaaaaccggctcccgcgagccgccgccgcaggtttcctaggccccgcgagtcccgcagcgaagccctgcgtctccgtccgacgcgggggtctgctcagcctcgggtgggccgcggccaggcctgactgcgggggagagggccgaacgtgacctccgaggtcacccccagccagctttctctcctgtggtcggaagtggttttcttctcgatctgggcgcctactccccaccacttggtctgagaggggctggggccggaaggccagggaatctctggtggatttgggggttcatattgctcagggtaccagccgatgcgttttgaggggcgggagtcgaggaattagaatcgcctttaaccctcaagagttgcgccttcagcctcgggatcccagatgcgtcgttggagccagggccgcccccctacctgttgggtttgcgttttaactccagcgcacaccttgccggcagccctcggagctaggggaggggtctcgtttccccgcagcccgccggacagacgactggggcacgggaggggcggtggcagggtggtctgtgtgtggctgaaactaattgatctggagcggaaacgcacgtctgcggttggggcgatggggggggcggtgcggctgtccatgtgccgagcgtgtggctgtctcgggtgggcactggggccggagttcgccccggcccacctcgcagttttggggcgcctgggatcggcgctacgtaagcgaagcagagctgccatagcacgtgggccgccacgcgcaccccaaaagcaagcagtgtggggggaaggggagctcgagcgccttcggagcccaggggccggctttcggaagcgttttcccgggcgacttaagggcttaacaatggaaaactcgcggagcctgagccaagtcctttcaagtcgccgccaggtatgcggctgcaggtgaccccacctgggtgcgcccgcccgccagccgccctggtggaaaagcgggtgcgggaggtcgctggcgaaaggtcgggactggtccctgcaccacccgcccccaacccaagccccgagccccgcggcgcgcagccgcgctgagtcccggggtctgcgtcgcggcgcgccggttcctgaatgaacgcgctcccttcccccgcctgaatgaaggttcccacagccagggacggtggcgaacacgcgcctgcagcggaattcgctttctcctgaccgaccatccgcccaggccgcggtcaccggggcgggggccagggggcgaggaaagcgtgaaggtgatttcagttaat

SEQ ID NO: 121140 - DNA, 508 bp, Homo sapiens
  chr11:69453700-69454208
  hyper
gcagctggcgctccccgccgggccccaaattccagcgccgggccccaaattccagcgcctcccccgcgggttcctggacggctctttacgctcgctaaccgggcttgcaattttgcgctcgtccctgagccgggaaatcaacgaagttcctagtcgagatctgcccggtccgcctagtaacagcgccgcgcccccattggctcatgctaattccagtttcctctgtcttgcgcccgggatgggggggtgaagctccctcctggacccagagccggttgtgccggagtgggcgagcctctttatgccctgctgcccctagccgacttcggcccgcttcgcgcctcgggctgggccagggcgcacgcggggctcggggcccctcgccccacgggatgggagaggccgggtgatagctccgggccccataaatcatccaggcggccgccgggtcgggattttatgaatgaaaaagcagctgggccgcccttgtgcgcgggctgatgctctg

SEQ ID NO: 121141 - DNA, 1169 bp, Homo sapiens
  chr11:69454808-69455977
  hyper
tgccagccccctcacgctcacgaattcagtcccagggcaaattctaaaggtgaagggacgtctacacccccaacaaaaccaattaggaaccttcggtggtcttgtcccaggcagaggggactaatatttccagcaatttaatttcttttttaattaaaaaaaatgagtcagaatggagatcactgtttctcagctttccattcagaggtgtgtttctcccggttaaattgccggcacgggaagggagggggtgcagttggggacccccgcaaggaccgactggtcaaggtaggaaggcagcccgaagagtctccaggctagaaggacaagatgaaggaaatgctggccaccatcttgggctgctgctggaattttcgggcatttattttattttattttttgagcgagcgcatgctaagctgaaatccctttaacttttagggttacccccttgggcatttgcaacgacgcccctgtgcgccggaatgaaacttgcacaggggttgtgtgcccggtcctccccgtccttgcatgctaaattagttcttgcaatttacacgtgttaatgaaaatgaaagaagatgcagtcgctgagattctttggccgtctgtccgcccgtgggtgccctcgtggcgttcttggaaatgcgcccattctgccggcttggatatggggtgtcgccgcgccccagtcaccccttctcgtggtctccccaggctgcgtgtggcctgccggccttcctagttgtcccctactgcagagccacctccacctcaccccctaaatcccgggggacccactcgaggcggacggggccccctgcacccctcttccctggcggggagaaaggctgcagcggggcgatttgcatttctatgaaaaccggactacaggggcaactccgccgcagggcaggcgcggcgcctcagggatggcttttgggctctgcccctcgctgctcccggcgtttggcgcccgcgccccctccccctgcgcccgcccccgcccccctcccgctcccattctctgccgggctttgatctttgcttaacaacagtaacgtcacacggactacaggggagttttgttgaagttgcaaagtcctggagcctccagagggctgtcggcgcagtagcagcgagcagcagagtccgcacgctccggcgag

SEQ ID NO: 121142 - DNA, 30 bp, Homo sapiens
  chr11:69456967-69456997
  hyper
gccggagagcacggcgagctgcaaggtcgc

SEQ ID NO: 121143 - DNA, 30 bp, Homo sapiens; identical to SEQ ID NO: 48737
  chr11:69472531-69472561
  hyper

SEQ ID NO: 121144 - DNA, 32 bp, Homo sapiens; identical to SEQ ID NO: 8239
  chr11:69477504-69477536
  hyper

SEQ ID NO: 121145 - DNA, 30 bp, Homo sapiens; identical to SEQ ID NO: 48739
  chr11:69490301-69490331
  hyper

SEQ ID NO: 121146 - DNA, 30 bp, Homo sapiens; identical to SEQ ID NO: 48740
  chr11:69500733-69500763
  hyper

SEQ ID NO: 121147 - DNA, 2956 bp, Homo sapiens
  chr11:69516890-69519846
  hyper
gttgcaagggtgggtttggagcggctctgggtgggagtcagcgtccagcgtgccgaccaccccctttctctgcagtcctctcacgcaggactccgccataaaacctgaaacaggcgctccgagtacacggagcacggcagaggcaccgagcaattttgagactctaaaatgctttgtcccgctgttcacaaaggagctggttgggccggaggcggccccgcctctgcatcctttctggggtgggggccccgggcaggcgcggccacccccgccctggcccctgctccgccagggagtccggggctgcgtgtgaggcctgcgcgggccgagacctcacacagcctcctctgcgcgcggggccgcgggaggggcgcgggttcgttcctttgaactcccagcctttgttcccggccaccagagccccagcgctcgtacacttccggccccgggacctctgcggttacctgggccttccctgccagcccccaccccctgcccccaccagaaagcgtttacaggacaggtgaggcccgcaggaggaaaagcactcccctggcgcaacatgactccagcgcatctgcgtctaagccacaccgtgctcctggtagattaaaaattaattctaaaaaaaaaatctctcctatcccaaatgcactgttttctgccttgcttgacaattgatttgtttttaaaggaaagttatgggtagatcctcttttttctttcccattctttttttcttcttttatactggagggagggaaacggaggcgaggaccacacacgcgcaggcagaggctgaaaaggcccgaggtgggttttcctgtttaatatcaaaggaggccgaataatgggtttcctcggtccggctaggccggcctttgactcaattggaaatgcaaaggcagcttttgcctattctctggctgctggctgagaccctaaatttccgtaggaaatcgtcggacatgcacttaatcggtctttgcaatctttccctcgaagttgcacgcgggtctgggcggaggaggcgaggaaaccctggattcgaaccagcgcctttctctccttcaggcctccgcccggggacaggcgccggtcccccgccccggcgcatccgccccgtggggacacttaccagcccctgcatcttgccgtcggcgcccatgcagaggtaccgcacgctgtgcacgcccttgatggccacggtccgcagagcgactgccttgatctccagcaaacctaggcgcaggggaagcgagaagctgcagcaaggaccgctgggcccgcaccacgtgggtgcggtcggtccacaagcctgtgcttctccctagcgtcccgcgctgtttggggactaacggagggatcctaacgtccaggtgccaaaacctggggttcccaggagttgaggggtccgcaggagcctaagggtggcaaaggaaggaagggcgctggggtggggcgcgcgcagcggggtggggtgcgcgcggcggggcgggcgggggtgctggcgggcactcactgtgcgcgctctggccccgcgcgcagtccacgacgccgtcggcacggatgcgcaggaagcagctggagagcccgtgggggccggaggtgtacaggtgccgcaggcggatggggtcgccccagccgtagtgcacgtggggccccgcgtccgagaaggcgagggggcgcccggccacggccagccagaggccggccaggatccatacgtggaccaccacacacccgctccgcatggcacctccctggggctctcggcgcagctccggcgatgggggtgcgggaggctgggcggcgaccgggatgcgctgcggggctgtgagtgccgggttgggatggtcgtggccctagatcctggacgcagcgctcctgctctgacggcgcggcggctccgggccggcagccttatatagtagcgccttacgggccccacgggtaggtgcccaagacacccgagcatttcttatcgggattgcatcaagcctccgccccccgcacacacccactcacaccccgcctccggccccagccccagccccctccccgggcccgggcaggcaggcggcggcttcttgtcccagccggggtgaccccgcccaggccgttcggatctgcgggaggaggaggcctcgcttagcggccgggtttcggggaactcctccccaccgcgcagcggccccgaggttcttggctgggagagtttgactttgtaaagcaatcgacaactggggcccttcccccaggcctcaggctcccagtggatgcactcggcgtggggcactagcgggggcggggtcaggaaccccggggccagaggttggggggcaccgagttttgcccccttcaccctctgtcgggaaaagcctcacctcggccttagtgcccttccccttaaaagcccactcgcactccctcccccgactttcgcagccccgcacatctgacgtcaaagccgtcccgtagaattttccccggcagttccgacagtctcaggttctttcagcttcatcttcttgcaattcctgccccgccccttttatccgggtaaattgccccccgacggggggccgggcgcgctctcggccggcggggaaacaatggaagccgcgcggactgtaggtggcgccgcagcctcggcgtccgcctgggctttgcgctcctggccccgcgcccctgcctgctccgcgctcgccccggccccgcggctgtgcgcgagatgcaacctgaaagggggcactgggaaggaggctctcgggcagggtgggcgggccagctgcgggattggtgaaccccagcttctcggctggagggtggtggaggcaggggcgcagggagggaggcctgggcctccgtttcccgttttttgagctgtcttgtgtcgggggtctggtttttgagtccccgagtccctgcgcacggggtcaggaggaacagcacg

SEQ ID NO: 121148 - DNA, 32 bp, Homo sapiens
  chr11:69589107-69589139
  hyper
gtgtaggggacccccggcggccgcacccagtc

SEQ ID NO: 121149 - DNA, 1186 bp, Homo sapiens
  chr11:69589199-69590385
  hyper
cgtgtctcgggccccctgtggctgcaccgcgcgccctgtgcccacgggcgaaggcgctggaattcggcgctcggagcccgagtttctgaaggcgggaggcggcgcccgacctcaggggttgcgctgggctgccggagccaagagtgtctgcgtccccagccccgcgtcagaagggaccggagcccgagtccgccccggttcccggggcccccgagcaggtgcccgccgagggtctcagagtgtgactgagcgggttggcccggcggccgttgccccccgcccccgccccttcgcgcctggccgcgccactcactgtcgcgggtgtccgcgtgcgcgccgccgatgcggccgtcggggagcgcctggaggtggaagccgatgcccacgttgcagtagagccgccgcagccgcttgatgcccagcaggtagtcgccggcgccgctctggacggccgcctccttgggctgcgctgccaccggcaggcgcgccaacgagagcgccaccaggctctcccagcggcgctccagctcggcctccagcgtgccgttgggtgcagtgggtgcggcggcgccccctcggcccgcccagggcgccagcaaggccagcaggaccgccgggagcagcgctaccgcggccgtcccgggccccgacatcccggcccgagggccgtgcgtcggtcaggcggtcagtgcgcccgggaagctggggggcagagctgcgcctgtggcgtcccgcgggagcgcacggccgacctcgggcaggagtgcgcaaccgaggaggtgcgggaggcaagcgacggggcccccgggcgccgggctctaccccggctgcatggagcggcgagccgggcggaaagcgcgcggctggagctgggactctgaggagcagtgcgcgcctccctgagcgccaggcccgcccgaggccgagccgctatatatatagcccggcgccccctcctactcgcccgctcccgcggggggccgttcgcgttctcctgggcgcccggggcgctgtggcgttcgcggctggtcgcaggccgcctgccaatcagggccgggggaagggaggaggctggggactagcgccgcgagtgccacctggagggaccccggcccccacccttggctccgcccggcccacggacctgttcgtcccgccccttggcggctcctacacttctgctttt

SEQ ID NO: 121150 - DNA, 31 bp, Homo sapiens; identical to SEQ ID NO: 8244
  chr11:70016124-70016155
  hyper

SEQ ID NO: 121151 - DNA, 41 bp, Homo sapiens
  chr11:70049090-70049131
  hyper
gtgagggcacgtgacgttcgggctgcgccctccccgccccg

SEQ ID NO: 121152 - DNA, 30 bp, Homo sapiens
  chr11:70049453-70049483
  hyper
tggaatccttgggccgctgggcaagcggcg

SEQ ID NO: 121153 - DNA, 30 bp, Homo sapiens; identical to SEQ ID NO: 8245
  chr11:70049947-70049977
  hyper

SEQ ID NO: 121154 - DNA, 13 bp, Homo sapiens
  chr11:70117414-70117427
  hyper
atccccatcaggt

SEQ ID NO: 121155 - DNA, 104 bp, Homo sapiens; identical to SEQ ID NO: 8246
  chr11:70117684-70117788
  hyper

SEQ ID NO: 121156 - DNA, 87 bp, Homo sapiens
  chr11:71159301-71159388
  hyper
cctggcctcacctgcgcacaccttggccactcacctgcgcacacctcggcccctcacctgcgcccaccttcccctggcctcgcttgc

SEQ ID NO: 121157 - DNA, 53 bp, Homo sapiens
  chr11:71159693-71159746
  hyper
agctgggggtggggcgtggcggagtggccacgtgggccgcgcggagaacgcgc

SEQ ID NO: 121158 - DNA, 30 bp, Homo sapiens; identical to SEQ ID NO: 48750
  chr11:71163463-71163493
  hyper

SEQ ID NO: 121159 - DNA, 218 bp, Homo sapiens
  chr11:71163704-71163922
  hyper
gaaaaggcaaacagtgcgctacctgagctacttacacacgtggtacaggagtgaaaggggcaggagagggttcccaagaattcagcgccatccgcccagggtggcgggattcccagcacggagaatcgattgctatcgtctgctgtcccgcgggcacgatggagcgctcctaccgtactctccacttttggtgtatttggaacgtttcatgccgtatt

SEQ ID NO: 121160 - DNA, 30 bp, Homo sapiens
  chr11:71164250-71164280
  hyper
cccggaaggtccggcgtcccagccgcctac

SEQ ID NO: 121161 - DNA, 31 bp, Homo sapiens; identical to SEQ ID NO: 8248
  chr11:71274923-71274954
  hyper

SEQ ID NO: 121162 - DNA, 447 bp, Homo sapiens; identical to SEQ ID NO: 48753
  chr11:71318341-71318788
  hyper

SEQ ID NO: 121163 - DNA, 356 bp, Homo sapiens
  chr11:71639579-71639935
  hyper
aaaatgagtcctaccgaggcaagatggcaggtgctgcagccaggaaaatacatttccgtgtgttttaatatttattttcactcactacaactctttcgtggagggagcggaatttaaacttccgggtcagcctcagtgcagcttgggaaacgtagttcctagtccccacgtctcgctccttggagcccagactgagggagcgtcgcgaaagttgcccgttttggaacgctcccatttggctctccaaagggaagaattggttaaatagttgcactgaaaataatgcgattcaaatttctcattttccaagaacgctcccttgctgaagcttgcaagggcacggtactcccctctcc

SEQ ID NO: 121164 - DNA, 427 bp, Homo sapiens
  chr11:71751818-71752245
  hyper
gctctgctccacagcgcctgtttctgagtatgtttacttgctctccctcttctctccctcccctttaaggatggcgcaggaaagggaggtgaggggggagaatccaccccaccccctcgtccatgtttgaacaaaaacccagagaaagagtgagggagaaaaagtctcggtgcgggggggccttaccagactcctaaagccaaacgtatctacaggttttaatccgccattagcatttaaatcttgaaaggagaggaggaagggggggccagtggaaagtaaccccacacacaaaagaaaagttgttggttttcttctcagtctgcctggcaggagcgatcttcctggctgacagccagaagtgcgtcacagccaggagtctgctttctttaaaggcacagcaagcttccccgatctgggagcgaca

SEQ ID NO: 121165 - DNA, 47 bp, Homo sapiens
  chr11:71752690-71752737
  hyper
gcaggccctctgatcgggggcaccttcctgccggccccagggcaggc

SEQ ID NO: 121166 - DNA, 30 bp, Homo sapiens
  chr11:71791195-71791225
  hyper
aggacccgacccctcgcttacaagcctttc

SEQ ID NO: 121167 - DNA, 368 bp, Homo sapiens
  chr11:71791550-71791918
  hyper
tcttcgtgggctcgcgccagcgctgtgagcgcacaattagtttaaactatggccccgccccctcgcgctgccctctgattggcctctgtcggcggggcccgcttaaggacccgggaaaaggaagtttgagggccactgggaaagagaaggggtatcaccgcttccggaccccggcctgtacttgaaggcaaagagaactacaaatcccagcgtcacccgcggccttgaagccccgcccctgacaaactgaaggtcccggtaagcatcgcgtcagtacttatggcgcctgccgggttgtggtgacgaaagcagttgccatggagttgctctgagtaaccctgaggcagtgggacgccaagactggagag

SEQ ID NO: 121168 - DNA, 198 bp, Homo sapiens
  chr11:71814205-71814403
  hyper
agccccgcctgccgcggccgcacctggtccgagtcctcgttctcgctgctgtagcagcaccccatggccggggtcgggccgggcgctcaggccgcgccgaggagggacggcgtccgtgaggagcccttccggtcacatgacccgcggcggcctcccgcaggcaaccacccgcccccaccccccgtaccccctgtcccg

SEQ ID NO: 121169 - DNA, 30 bp, Homo sapiens; identical to SEQ ID NO: 48758
  chr11:71823828-71823858
  hyper

SEQ ID NO: 121170 - DNA, 180 bp, Homo sapiens
  chr11:71934495-71934675
  hyper
agctccccgctgggcgtccggcccgcggaggcgcgagtttgctgactcggagggagccgctggggcgggggcgagtgctaataatacccgttcgttccgcagccgcgctttacagtttacacagctgtcaccttcgtttctccttaattaataataaaaatagccgccgttcgggagcgc

SEQ ID NO: 121171 - DNA, 30 bp, Homo sapiens
  chr11:71935831-71935861
  hyper
ggcgctgcaggcagcggcggctgcgcggtg

SEQ ID NO: 121172 - DNA, 30 bp, Homo sapiens
  chr11:71951107-71951137
  hyper
ggactccttggaatcgtcgtcctcggagga

SEQ ID NO: 121173 - DNA, 839 bp, Homo sapiens
  chr11:71951577-71952416
  hyper
cctcctggagtgttccagggccgtggagagcagtttagggcgccagtaaaccttttgtctagggcatccagtcaaggcgggccaactgaacatctgtacacggagttgtacaaatagacaacagtctgctctagcccggctctcttcggccctgtgcctgccacaaactcagcctcccgggctccgggttttcaaagctgcagcgccggggtagggaaccccaggggtgctgactggcctgccccctctcctcctcagctcggccctgaggtcccctgggtctccccctctagcccctcggcctccctcctggcttctcaagcatcactcggaactttctgccctaagagggagacagagcggaggtagcctggagctaaacagatcgggtctcccaagggcctccaagtccgggccctgctgcctcccgtagctgcccaagcaccctgggaccgcgccctgccttcgggctgcatctgcctgtattcccctacccccaggtgttagacattaagctcccacacctccttccatgcgcactctcgtacacacacgtgcatacacgcacctgcacgcgagcctcagtgaggtcgatcttgagcgccagctcctcacgcgtgtaaatgtcggggtagtgggtctcagcgaaaacgcgctccagctccttgagctgcgcgctggtgaacgtggtgcggatgcgccgctgcttgcgcttctcgtgcaggccggatggctctgggaagaacttgtagggcactgcgggtgtgtgcaggggggccggggggggggcaaaaaggatgggggagtgagaagcagagttcaacccgttgtgtccagct

SEQ ID NO: 121174 - DNA, 22 bp, Homo sapiens
  chr11:71954801-71954823
  hyper
gagggagggttgggccggggct

SEQ ID NO: 121175 - DNA, 118 bp, Homo sapiens; identical to SEQ ID NO: 48760
  chr11:71955006-71955124
  hyper

SEQ ID NO: 121176 - DNA, 329 bp, Homo sapiens; identical to SEQ ID NO: 48761
  chr11:71955189-71955518
  hyper

SEQ ID NO: 121177 - DNA, 186 bp, Homo sapiens
  chr11:71955549-71955735
  hyper
cgctcgtgtgaagaagttaattcaattcgctctgataaccgagttattccgatctggcccctcagccccgcccccagcgaggtcccatcccggcggagactgcggaggcggcccaggaagggggatggagaccgggaagagacggagcctgggatggggacagggaagggacgtggatagacagag

SEQ ID NO: 121178 - DNA, 142 bp, Homo sapiens
  chr11:71956131-71956273
  hyper
ggacagccacaagcgcgggagcagaggctgagagcggagagaaaacgcctccggggagcttagacacgagggctggagcgcagaggggcccagggatgatgctggaggctctggggtgcggcctccacggggctgcggagag

SEQ ID NO: 121179 - DNA, 30 bp, Homo sapiens
  chr11:72145340-72145370
  hyper
gcgatgttccagggcgccccccggtggcta

SEQ ID NO: 121180 - DNA, 30 bp, Homo sapiens
  chr11:72145608-72145638
  hyper
acagggtggagttgcgcactacctcacggg

SEQ ID NO: 121181 - DNA, 241 bp, Homo sapiens
  chr11:72301341-72301582
  hyper
gggtccctcaggcgccgctcagctccgcgccgggcccgccgccggctcccgggatcgcctaacccgcccacctcccctccaagttctgcccggccccgccctcgtgacctgtccaggccgggccctcaccgcacagttggaggatcttgcggtcgcggtcggtgtacgccgccccgcccttctggtcttccgccgtcccctccggggggttctggacggctcggggagcctccctgggccc

SEQ ID NO: 121182 - DNA, 30 bp, Homo sapiens; identical to SEQ ID NO: 48763
  chr11:72353328-72353358
  hyper

SEQ ID NO: 121183 - DNA, 860 bp, Homo sapiens
  chr11:72353614-72354474
  hyper
accccaccggacacccggccgctgtcaccccgcttctgtctcgccctgggttccctcggcccttccagctggcctgctgtcagcctgcgctcgctgcccctcgccccgtcgccacttctctcgcatctcgcaggggccgctctcagagcctccaccctgtctgatcgcaccctgtttccccgccaccactctggggtccggggcccggccagagccccaggcagagaccggcgcagtggggtggggtggggagggaaggggaaggggggcaggggccgcggacaccgcaggagcctcgggcttgctcctctccctcagcctaggaggcagggggaagtcgggagaatgttggaggtcgctgtgagacggacaggccctggagcagtcgcccatctgcgagggagacacgtgcgcacagacaccgagcgcacacacggcggccgccactgactggggcccccaggcctgggtgggcaggtctctgtcgccgtccccggagccggagagggtgcaggccccagggccacacggtccgcagttccgcggtgggacccgcgctccgggagcgcgtttctccgcagagcggcttctgggttcaggagcctgcggcagccgcgacgctcctgcgccccctgccgtcccatcgcggcggcgcaatccggcctcagttgccggctgcccggaggggccgcgtccggggattcagcgggtcaccggggtcagctccctgcccggaccgacccggttcttaggcctctgcttggcatgaaagcggttggggcggcaggacgtgtctggactggagggtgcgcttgggtctcgctaggcctttgccagcgacttgccgcatgaccttgctc

SEQ ID NO: 121184 - DNA, 125 bp, Homo sapiens; identical to SEQ ID NO: 48764
  chr11:72388172-72388297
  hyper

SEQ ID NO: 121185 - DNA, 328 bp, Homo sapiens; identical to SEQ ID NO: 8252
  chr11:72432831-72433159
  hyper

SEQ ID NO: 121186 - DNA, 163 bp, Homo sapiens; identical to SEQ ID NO: 48766
  chr11:72433402-72433565
  hyper

SEQ ID NO: 121187 - DNA, 61 bp, Homo sapiens; identical to SEQ ID NO: 48767
  chr11:72463658-72463719
  hyper

SEQ ID NO: 121188 - DNA, 107 bp, Homo sapiens
  chr11:72492446-72492553
  hyper
gaagggcggacgggcgctggacagcctcggggtccccctcccgaggagcgccccagaccccctggggccggcgtggggactgcgtatgggacgcggtggccggcggg

SEQ ID NO: 121189 - DNA, 145 bp, Homo sapiens
  chr11:72525201-72525346
  hyper
ggaggctccgacctcgctcctgcttatgaccctcgcagccacaggagcccccacttaggtgaacatttcggacggggccccggcggttcagacccggaggcggctcctcccggaggcagatcctcccggcgtcggccttcggtcc

SEQ ID NO: 121190 - DNA, 30 bp, Homo sapiens; identical to SEQ ID NO: 48770
  chr11:72852481-72852511
  hyper

SEQ ID NO: 121191 - DNA, 319 bp, Homo sapiens; identical to SEQ ID NO: 48771
  chr11:72853955-72854274
  hyper

SEQ ID NO: 121192 - DNA, 257 bp, Homo sapiens; identical to SEQ ID NO: 48772
  chr11:72929152-72929409
  hyper

SEQ ID NO: 121193 - DNA, 30 bp, Homo sapiens
  chr11:73000420-73000450
  hyper
tggtgctgaccctgtcgtccctgccacgtc

SEQ ID NO: 121194 - DNA, 1422 bp, Homo sapiens; identical to SEQ ID NO: 48773
  chr11:73018831-73020253
  hyper

SEQ ID NO: 121195 - DNA, 218 bp, Homo sapiens; identical to SEQ ID NO: 8257
  chr11:73087924-73088142
  hyper

SEQ ID NO: 121196 - DNA, 43 bp, Homo sapiens; identical to SEQ ID NO: 48775
  chr11:73309241-73309284
  hyper

SEQ ID NO: 121197 - DNA, 115 bp, Homo sapiens; identical to SEQ ID NO: 48776
  chr11:73358557-73358672
  hyper

SEQ ID NO: 121198 - DNA, 281 bp, Homo sapiens; identical to SEQ ID NO: 48777
  chr11:73372053-73372334
  hyper

SEQ ID NO: 121199 - DNA, 30 bp, Homo sapiens
  chr11:73471559-73471589
  hyper
gtgcggggacgctgcggccagctgccagga

SEQ ID NO: 121200 - DNA, 210 bp, Homo sapiens
  chr11:73472196-73472406
  hyper
cgtgcatgcgtgcgcgccaccgccatcgccatcgccttcctggtttggacagctctaccggctcctcccgcacggcggcgacggggcaggttaggtttccactggcgtcaaaagaagccaggaggaggcggggcaagccagggataagttagtgggaggctggagcccttacgtcacttacataatgagccaatcggaaggggctgaggg

SEQ ID NO: 121201 - DNA, 102 bp, Homo sapiens; identical to SEQ ID NO: 48778
  chr11:73490689-73490791
  hyper

SEQ ID NO: 121202 - DNA, 30 bp, Homo sapiens
  chr11:73587900-73587930
  hyper
cccctcgtggggagcgtgcacacggaaggg

SEQ ID NO: 121203 - DNA, 911 bp, Homo sapiens
  chr11:73693755-73694666
  hyper
ccaggctcaccgagccgcagggagaacacggcagtgcgtgcggctgtgtctgtcggctggcggagggcgcgtcggacgagccgggcgagcgtggacagtcaatcccaaggcgcgcgcagctgggcttcgcagtggggctccgcgcaggcggcggcgcggcttaagcctcgggggcggggcccggggtggggcctgcggggcggggccgggcctgccagctcctacttgggtgcggagaccctggagcagccgcctttccgcggggaccgccccgcctagggttctctccatgactttctccactcccgtttccgtgcgtcccatcaccgcgtttactccttcgttccccgagatggtcactcccttgccactccccgcctctgcctcacactctctcgggccgccaacctctgtgaggatggcaagactgaccgccagaaacaagtcttgtccagtcacacacctcttgccttcccagccaggacggtttctaacagcgtccagcggggccgtgtcttaagtgcacttcctcttttatgggcccagcccccctacgctgggcaaactacccaccctcctgcgagcgagcgcgcggctggctcctgcagggcgggactggggcctcgcgaccggcctcgctgtcgattggttacagccgccgcgttgtcgggggaaggaaccaatcagaactgcagcaacaggtggcccggcaaccgacaacagccgttgggctcggctggggttcgcgccttctcccccggtggagcggcctggcgtttagggaccaggacactaaaggccccggcggggcgggagcacccagcgtgacctcacgctcctacacacagacaagcaaacgggccggcccccgcacgtgacaaggcagagccgggcccaggccagctgcctgt

SEQ ID NO: 121204 - DNA, 349 bp, Homo sapiens
  chr11:73882112-73882461
  hyper
agcgcatagggatgcgccctttgtggactccattgcgcagggtgcattgccctgaagagcgctcctccttccggtgaaagtcgtcgggttcccagccgggagtctgcggagttctcatactctgttacccagcttcctttgtatgagtgctgttgcgcacttccggtggaagcgctgaagcgagtgggtggagtttacggagccggtgggcggtaggcggtgctacgggtagctgggtgctgtccaaaggcgacagggcgtcgttaggggagcgagtcgtgaccggttgggccacactcaacgtgggacgaagcttcgcctactgtttgactacgtgcgtgcagcctcc

SEQ ID NO: 121205 - DNA, 398 bp, Homo sapiens
  chr11:74022459-74022857
  hyper
gtcaggtcccgcagccgcgcctcctccccgcgcaggtaccgcctcagcagccccagcagccggcgctcgggcgccagggcgcgcgccacgctggtcagcgccgagaacgtgtcgccccgagccgcagccctttctgggtctcctgtcccgagcgccagcaccgccagcagcgccgccagccgcgccccaggacccatagccagcgctcgcgaacttcccctcagacagtcctggccgcgcggcggcagccgctcccgccctcgcctgccccgcccctgtctccgccccctcccggctcaggccccgccctctggccccggcccggcccgtcccgtccaccgcccagtctcgctccacgccccctgactccttccttgtttcgacgcctcacctcgctc

SEQ ID NO: 121206 - DNA, 30 bp, Homo sapiens
  chr11:74109206-74109236
  hyper
ggcgaccagacaggcgtacgggccgggggc

SEQ ID NO: 121207 - DNA, 30 bp, Homo sapiens
  chr11:74109889-74109919
  hyper
agctcagcggagaccgccgccgagactacg

SEQ ID NO: 121208 - DNA, 30 bp, Homo sapiens
  chr11:74177810-74177840
  hyper
gtggcccaggaaaagcgagcacaaggcgca

SEQ ID NO: 121209 - DNA, 175 bp, Homo sapiens
  chr11:74178230-74178405
  hyper
ccacatgctgctccacgatcactgcgctcgggaggatcggggaggatccgggaggactagcttggtatttgcagcgcccacccctcccccactccccctcggttccacagtctcacggagagcgcgccgtggcccttggaagggaggcgggaagacccctcatttccaccccagg

SEQ ID NO: 121210 - DNA, 132 bp, Homo sapiens; identical to SEQ ID NO: 48783
  chr11:74178470-74178602
  hyper

SEQ ID NO: 121211 - DNA, 30 bp, Homo sapiens; identical to SEQ ID NO: 48784
  chr11:74204090-74204120
  hyper

SEQ ID NO: 121212 - DNA, 32 bp, Homo sapiens; identical to SEQ ID NO: 48785
  chr11:74204885-74204917
  hyper

SEQ ID NO: 121213 - DNA, 134 bp, Homo sapiens
  chr11:74303667-74303801
  hyper
agaggggttagaggcgggtcccagcgctgccgcaccatggcggaccagctttatctggaaaatatagacgagttcgtcacggaccaaaacaagatcgtgagcagctactactggggaacgcgggcgtgcgaccg

SEQ ID NO: 121214 - DNA, 30 bp, Homo sapiens; identical to SEQ ID NO: 8262
  chr11:74304076-74304106
  hyper

SEQ ID NO: 121215 - DNA, 30 bp, Homo sapiens; identical to SEQ ID NO: 48787
  chr11:74345534-74345564
  hyper

SEQ ID NO: 121216 - DNA, 256 bp, Homo sapiens; identical to SEQ ID NO: 48788
  chr11:74394497-74394753
  hyper

SEQ ID NO: 121217 - DNA, 847 bp, Homo sapiens
  chr11:74441795-74442642
  hyper
tcacattccaggggccgcatccctcctctgcccacccagcctcccggtctacttacgggctcgagcgtgggagtccagggggaaccagagcagcgcgagtcccagcaaggaggagaggaccctcacctcgggaaccatcctttccccagggtcaggccgctggtccgggagcggagtcgggaggaagggagacgaaaaggacacggaggcacaggggccacagatcaacccacagaccccaggaggtctgctgctagagcggggtcggagaagggccaggaagcagcggtgggcaggaaaggagggcaggaagggaggtctaaggtgggaagaagagaaaggtggaaagagaacgcggggaaaggagggagagatggagagacgaaggaaggtccagcagaagggagaggcgatcaaagaaagggggaaggtgagagggagaggaggagaaagcagggagaggaccggcgtctgccgagcgcgcagcgccgggcgaggcgcgcgggaccagcgggtgttgcgggcgcgcgggctagaggcggccggcgccccctgctcggtgggctcggggtcgggccgcgggggcctggggcccggcggggcggcggtcccagcagcggcggcggcgcggcggccgcggagggaggctgagcgcgggccggctgtgctcgccaagggcttcaggcgccgcgctcgggcgcatttgtactttgccgcgggaagcaggcagcccggcctggcgctggcctagcgctggcgcctcctctggggcaccgcgggctcggtggattggccacccgagaaacaggcccactttttcccctcctctcttgtgcgggtctccggg

SEQ ID NO: 121218 - DNA, 49 bp, Homo sapiens
  chr11:74442705-74442754
  hyper
cgggccacggggtttaacccctgactccccgcgacgccaagaatgcagg

SEQ ID NO: 121219 - DNA, 215 bp, Homo sapiens; identical to SEQ ID NO: 48791
  chr11:74459625-74459840
  hyper

SEQ ID NO: 121220 - DNA, 30 bp, Homo sapiens
  chr11:74460459-74460489
  hyper
agcgaggccgagcgcgccccggcccggcct

SEQ ID NO: 121221 - DNA, 425 bp, Homo sapiens
  chr11:74659855-74660280
  hyper
gtaagtgccacaaccgggctagaaaaggatgaaggacaagctcctgcccactcctttggaaactccacacctgggccggagaaagactcgaattcgaaaactaagtttcagtcgcacctgcctccggcgtcgcttcagcctccgaggggtctgcggaggcgacgtcccagtcaggagggatgcgcgcctgcgagccccccggggatctcggagccgctccactgcggtgcctgccgctatcttccccacgccttagtaactgcgacgcgacggcagacagtgtaggcggcaaccgacggccgggacgtctaacctcaagtcccagcaagccccgcggccacgtcctctgactacctcgcgccagcaagacccaaactacggatcccgattgactccgcgcggcgcgtcacgctgtcagctccagc

SEQ ID NO: 121222 - DNA, 59 bp, Homo sapiens
  chr11:74851767-74851826
  hyper
ggcagtgtggccccagcgcaagggcatcagctttgggggccaaacgcacctggtctcaa

SEQ ID NO: 121223 - DNA, 1045 bp, Homo sapiens
  chr11:74951683-74952728
  hyper
agaaagcgcagcagccgacagccctgattctcgggagcctcccaccccgcctcccacggcgaggagggcgcggagactccgctgggggcggaggacgagaccgggaggcggggaggggggaggcaaaccctgcccactcggctcggagcccggagcggccgcggaagccggaggccggcgcgcagggcgagggcaccgggggcggggggctccgctccccgtctgacccctcttgcccccggccagtcagccagtaagtgcggctcctcagactttcgagacagcgaacggaccgaccgggactgccagccgctccgggtcaaggactcgccccacccgtgccccccaccaggcgctcccaactcactggtgagcgcggcggcccgggcgctggatgcgggggcggccgcgatggccccgcgcgcgggacagccggggctccaggggctgctgctcgtggcggcggcgctgagccagcccgcggcaccctgccccttccagtgctactgcttcggcggccccaagctgctgctgcgctgcgcgtcgggagccgagctccgccagcctccgcgggacgtgccgcccgacgcgcgcaacctcaccatcgtaggcgccaacctgacggtgctgcgcgcggccgccttcgccggcggggacggggacggcgaccaggcggcgggcgtgcgcctgccgctcctgagcgcgctgcgcctcacgcacaaccacatcgaggtggtggaggacggcgccttcgacgggctgcccagcctggcggcgctcgacctcagccacaacccgctgcgcgccctgggcggcggcgccttccgcgggctgcccgcgctgcgctcgctgcagctcaaccacgcgctggtgcgcggcggccccgcgctgctggccgcgctggacgctgcgctggcaccgctggccgagcttcgcctgctgggcctagcgggcaacgcgctgagccgtctgccgccagccgccctgcgcctggcgcgcctggagcagctggacgtgcgcctcaacgcgctggccggcctggacc

SEQ ID NO: 121224 - DNA, 388 bp, Homo sapiens; identical to SEQ ID NO: 48794
  chr11:74952948-74953336
  hyper

SEQ ID NO: 121225 - DNA, 715 bp, Homo sapiens; identical to SEQ ID NO: 48795
  chr11:75062272-75062987
  hyper

SEQ ID NO: 121226 - DNA, 15 bp, Homo sapiens
  chr11:75095705-75095720
  hyper
cgccccctagcggcg

SEQ ID NO: 121227 - DNA, 30 bp, Homo sapiens
  chr11:75110490-75110520
  hyper
aggcgtgcacgcagcgcagccctccgtcgt

SEQ ID NO: 121228 - DNA, 30 bp, Homo sapiens; identical to SEQ ID NO: 48797
  chr11:75110811-75110841
  hyper

SEQ ID NO: 121229 - DNA, 30 bp, Homo sapiens
  chr11:75111063-75111093
  hyper
ccgtctggggaccccgggaggaagctgcct

SEQ ID NO: 121230 - DNA, 30 bp, Homo sapiens
  chr11:75111440-75111470
  hyper
tgaagagatgatgacgagtctgacttgggg

SEQ ID NO: 121231 - DNA, 38 bp, Homo sapiens; identical to SEQ ID NO: 48798
  chr11:75140839-75140877
  hyper

SEQ ID NO: 121232 - DNA, 930 bp, Homo sapiens; identical to SEQ ID NO: 48799
  chr11:75140939-75141869
  hyper

SEQ ID NO: 121233 - DNA, 30 bp, Homo sapiens; identical to SEQ ID NO: 48800
  chr11:75236444-75236474
  hyper

SEQ ID NO: 121234 - DNA, 31 bp, Homo sapiens; identical to SEQ ID NO: 8270
  chr11:75237128-75237159
  hyper

SEQ ID NO: 121235 - DNA, 453 bp, Homo sapiens; identical to SEQ ID NO: 48802
  chr11:75294168-75294621
  hyper

SEQ ID NO: 121236 - DNA, 89 bp, Homo sapiens; identical to SEQ ID NO: 48803
  chr11:75294662-75294751
  hyper

SEQ ID NO: 121237 - DNA, 853 bp, Homo sapiens; identical to SEQ ID NO: 8271
  chr11:75378395-75379248
  hyper

SEQ ID NO: 121238 - DNA, 935 bp, Homo sapiens; identical to SEQ ID NO: 48805
  chr11:75379282-75380217
  hyper

SEQ ID NO: 121239 - DNA, 30 bp, Homo sapiens
  chr11:75479809-75479839
  hyper
ccgggacgccagcgccgcggctgccgcctc

SEQ ID NO: 121240 - DNA, 135 bp, Homo sapiens
  chr11:75480047-75480182
  hyper
catagccgcctactccggggtcctgcgcggcgagcgtcaggccgaggctgaccggagccagcgctctcacggaggacctgcgctgtcgcgcgaggggtctgggagatggggtgagtgccacggcgcaggggttat

SEQ ID NO: 121241 - DNA, 82 bp, Homo sapiens
  chr11:75526100-75526182
  hyper
tccttgagtccctccgcccccaagtccagtaatgccagcgatggacagaccttctacccaatagcacgccccttttctgccg

SEQ ID NO: 121242 - DNA, 30 bp, Homo sapiens
  chr11:75526894-75526924
  hyper
cctctccctcgttccgcccaggaagggacc

SEQ ID NO: 121243 - DNA, 30 bp, Homo sapiens
  chr11:75566602-75566632
  hyper
tcgtatcttgttggtcggacctattatgac

SEQ ID NO: 121244 - DNA, 464 bp, Homo sapiens
  chr11:75863222-75863686
  hyper
ggaagcagttgggacccggagaagttagtcttggctaagttcacagagctaaaaagtgacagagctaggacttgaaatcaggacctttgagtcacgtctctgcctgacctcagccctgcgggccccgttcccgccattccttcctgcctctcacgttgactgggctccccctgtcggtcggcactggctgaacagccatggagtggcgctttggggaaaccacgggcgaccaggaaagatctcaggcaagcctcgggtaagtgagctgtaaactgagacctgaacccagacacagcccatgccaggccgagcgaagagcctgtgcaggggcttggagtagagaagagcacggctcctgtgaaggattcagaggctggagctgggcgatgggccaccgcgcggaggaggcgcgggcggtggtccgagttcctcaagggatctacagacggcgcccctcctaccca

SEQ ID NO: 121245 - DNA, 30 bp, Homo sapiens
  chr11:75921611-75921641
  hyper
cggctgggcgagcggcgaaggcgccctctt

SEQ ID NO: 121246 - DNA, 254 bp, Homo sapiens
  chr11:75921930-75922184
  hyper
gccactgaccggcggcgcccgccgctccagagaacttagtactctgtcgagttacaaagggggactcgctcactacagctggtgtttactaagcgtgcgtgctgcgtgcctgcgacacgcgtggggcccgggtaaggcccatctcgaatcgtcgcagcaaccaggcaaggagcctcaactggcagggggaagtcagacttgggtctcagtctggagccggggcatccttaggtgttggtcgcgcagcgtggtta

SEQ ID NO: 121247 - DNA, 30 bp, Homo sapiens
  chr11:75947346-75947376
  hyper
tgtcagtccagggccggaggggagggtgcg

SEQ ID NO: 121248 - DNA, 384 bp, Homo sapiens
  chr11:76032906-76033290
  hyper
atgcccgccccacaaggcccacgcttgcgccctcgggctgcgcagggcgagggtttgggggcgcggtactgacgggtgtccaggcctctcctcgaagggttccgcgcgcagaaaggtgggccggggccagaagacgcgctggaaaggcgttttctgccccctccgggcctcgggaatatttgtgggctgccggcggggcaggcggggtgggggaggctgcccggcgggcgggaagccccgcgcactcgggtcccctgcggtccccggcgggggtcggcgcgtgcggaaagcggcccgagcccccaacctcggcccgtccgcaaccgaagaggaggcgaccgcagcctggaaaagaagagcccccagctgtttccttccacccgg

SEQ ID NO: 121249 - DNA, 27 bp, Homo sapiens
  chr11:76033342-76033369
  hyper
cgcctgtgctggcggggtggcagccgg

SEQ ID NO: 121250 - DNA, 30 bp, Homo sapiens
  chr11:76091821-76091851
  hyper
gccaagtcggactgcgtgctcttccgcgtg

SEQ ID NO: 121251 - DNA, 30 bp, Homo sapiens; identical to SEQ ID NO: 48807
  chr11:76155364-76155394
  hyper

SEQ ID NO: 121252 - DNA, 30 bp, Homo sapiens; identical to SEQ ID NO: 8274
  chr11:76155906-76155936
  hyper

SEQ ID NO: 121253 - DNA, 30 bp, Homo sapiens; identical to SEQ ID NO: 48809
  chr11:76156382-76156412
  hyper

SEQ ID NO: 121254 - DNA, 808 bp, Homo sapiens
  chr11:76381507-76382315
  hyper
agccccggctccacgcgcgcagtggggatggcgggaggggagtgtttggggggcgtcccttgggaccagcccccgccttgcgctcgctagaggcgcgcgacagtgcgccccccgagggccggccagcctcgcctgcccggcggctcctacctggctcagcgcggccgcagctcctctcccgggcagtctcggcacattttgcgcaaacccgcccccgggtcccaccccgcgccagaccccggggtcacggcccgaggaggagcaggccgctcagctgccccaccggagcccccgcgctccggctgcaatttaaatacctctcccgccggcccgccccgccacgcccccctctggcgaggccgtggggtcctagcgcctggccccgtgcctcggtttatccggagccggcgggggcggagtggggtggggcggcgaagcatcttcaccaccctgggacctcggccgggaaggggcgggggcccagtgtggggggatgagagggcgggagggagaggggttgcagaggaagcgccgtgggagcgaggcccatcccagcggccgccgcacgtgcagttcgcggccccgcggggtccggaggggggcgcggtggctctaggagccgcaggtccacagaggaaatccggcctggccccgatttcccagctgctggcgccgccgcacttaacgcgggggcaaacaggcgaggtgacggcggggctgaatgcggaaggaaatgacccttcgctggccctggggcggccgcggagggggttccccgcaccaagccgtccactctggtgggtcctgg

SEQ ID NO: 121255 - DNA, 31 bp, Homo sapiens; identical to SEQ ID NO: 48811
  chr11:76466226-76466257
  hyper

SEQ ID NO: 121256 - DNA, 30 bp, Homo sapiens; identical to SEQ ID NO: 48812
  chr11:76493861-76493891
  hyper

SEQ ID NO: 121257 - DNA, 30 bp, Homo sapiens
  chr11:76494193-76494223
  hyper
cctagagtggaacccgggctcggctcaggc

SEQ ID NO: 121258 - DNA, 375 bp, Homo sapiens; identical to SEQ ID NO: 48813
  chr11:76494602-76494977
  hyper

SEQ ID NO: 121259 - DNA, 30 bp, Homo sapiens; identical to SEQ ID NO: 48814
  chr11:76495274-76495304
  hyper

SEQ ID NO: 121260 - DNA, 152 bp, Homo sapiens
  chr11:76510329-76510481
  hyper
aacctgccctgcaccccgcagccctggcctcctgccagccataaggagagcggaagccccggcgggcctcgccgacccgggagtccgcgcggcccctccctgcccgtgcggaggctcccggcccgcagcgccacctcgtgctcacgcatggc

SEQ ID NO: 121261 - DNA, 30 bp, Homo sapiens
  chr11:76572046-76572076
  hyper
ctactggggccccacgacctccacgctgga

SEQ ID NO: 121262 - DNA, 31 bp, Homo sapiens; identical to SEQ ID NO: 48816
  chr11:76682667-76682698
  hyper

SEQ ID NO: 121263 - DNA, 1570 bp, Homo sapiens
  chr11:77184260-77185830
  hyper
gactcggtcccggaccggtactcgtgtggcctcccggctccagcctggcctggccccgccccgccccttccctctcccaggtctctcgaatcgcccggcgtctgagacccgcgaccccgccggtacgcgcacagggggcctttgttggcccgacgggagcgggcctcgcggggcgccgcccgcctcaccttacctggcgcctcctcccgcccaggcgcccggccccgcaacgcgaaataaatgggcccagacccccactccacccgtccccacccccgcgccccagccctggcagcccgggacgcgaggggtactgggcggtaggcccgctctcaccttccgcgctcgctcagctcctctcggctcctcctcctcctcccggcggtgggtgccgcctagccgggagtgagggcgcgagtgtgcgcgagctaccgcttcactttctccctcctgccgccgccgccgcgctgcccgtggcggggctcccctcaggacaggggaactgcgagggaagggatgatgggggggcgggagggagcgaggcgacgcgggcggggggggaaggggggactgaggggcgaggtgcgaagggctcagatggcctctgaggcaggaggtggtaactggatgcggagaccaggttcctcgagggggctcacgaaagcgcggggctccgtggaaaagggaatgagagtccaagggggaaggcgtctgtgggggaggactgcagagcctgtgagggaagcgcgatgggcgagcgagggggcgggagcgtgtgggggaagccgtgagggggcgtctactgtgcagccaccaccttcggctccggctgcagccgcgggagggcagcctcccccgcccacagccgcgctattgtacgccgcccggcaggcctgaccgcctagttcactggctcccctactcctcctcctcccgcctcctcctcccctctgccctttccccttctccccctccccctcccccactccccctccccggcgcggcggcggcggctgcggctccggtggagccgtgcccgccccgcctcccgcaggtgagagggggcggggagggcctgaccgacccgtgggagcgaggccaaaccctggcccgcatgagggcgaacgcctgggattacgtcatcggcgcgtgacgccagaggctggggaatcacccgcttgctgcgtgacgtcatcgcgtcgcgtcactgttctcggtccgctgtccgtggcgggttgtttccgtgcagcctttctatcagacaattttgggacgatttctgggagggctactgtagtagtcaggatggagaaagacggctaacttccggcgctgagggtccttttcaggttaacaaagcaccaccgcatctatgagctcgttgtcaagggctgaatttgaaaactatccgatgtcgtgtgatctcacagccagacatgtattatgttttctttctgtgggagagggggcaggggtgggaggaagacaaagaaattataacggagatgtttgaactaatgtgaactgacatacgaaaagaatgggcttcctttcacgttttttcccctac

SEQ ID NO: 121264 - DNA, 83 bp, Homo sapiens; identical to SEQ ID NO: 48818
  chr11:77300372-77300455
  hyper

SEQ ID NO: 121265 - DNA, 241 bp, Homo sapiens
  chr11:77348585-77348826
  hyper
ggaggagggcggcgcgcaggaggccagcgctggggaccaggaaccctacctctcagcgatgtaaagggtaccagtgccgaggcccttcccgttcagcacagcctcagtgtctggctgctgccgcaggagcccctccgctggcccaggcggcgggaaacttttgaggaagctcatagcagcagagtgcggcaacacaggccctgagggagttggagcacagcaatgcgtgcaccacaccgcc

SEQ ID NO: 121266 - DNA, 30 bp, Homo sapiens; identical to SEQ ID NO: 8282
  chr11:77531376-77531406
  hyper

SEQ ID NO: 121267 - DNA, 30 bp, Homo sapiens
  chr11:77531838-77531868
  hyper
cagacgacaggaggcgctctcaagtgggct

SEQ ID NO: 121268 - DNA, 30 bp, Homo sapiens; identical to SEQ ID NO: 48821
  chr11:77532757-77532787
  hyper

SEQ ID NO: 121269 - DNA, 30 bp, Homo sapiens
  chr11:77751158-77751188
  hyper
ctccaacagacttccggggctgcaggcaag

SEQ ID NO: 121270 - DNA, 304 bp, Homo sapiens
  chr11:77790781-77791085
  hyper
tgcgatcatggtgacgccgtttccacttgaggcctggtctcagaccacgaactacaaggaaaaccacgacgaccactaccccggcctaagcggtcagctttctcctcctcctctgcgcgccggactcacgggcacggcgcagcgcggtgcagcgcccaaacgcttcccggtacgtgttgctgcgggaacccggcacgcgaagttccgggctactaagtttcactttgctcgtccgcccgcgctaattctctggtgggagtgggattcacgggcctggtaacgcggggtcgaggagtaccccaaa

SEQ ID NO: 121271 - DNA, 30 bp, Homo sapiens; identical to SEQ ID NO: 48823
  chr11:77850513-77850543
  hyper

SEQ ID NO: 121272 - DNA, 79 bp, Homo sapiens
  chr11:77850823-77850902
  hyper
cggaagggctcctgcgcaggcgtttgtagccacttttaagttttatcagctagttcatgcttgcgttgaaagagtggtc

SEQ ID NO: 121273 - DNA, 375 bp, Homo sapiens
  chr11:77899550-77899925
  hyper
gctcagtgggcccacgtaccctcgccggtagtccccgagccccgcgaccccggccgtgccgcacccacctcctgccctcgctctgcagcctctccctccgcgagcggccagcgcagctttgcgaggggggcggagggtaggagcccagcccaggggcgtggcggtccggggtctgtgcgctgccttccgggactggtagttctctctgggctcctcgcagctcggcgcgtcgagagcgaactccatctcccaggaggcattgcagcgagttgctctgcgccccgcctcgtccccgccggtgtccggccggctggccttaaaggggacgcggtcagagtggcagctcgcggggtggcccccgctccggctccgccc

SEQ ID NO: 121274 - DNA, 166 bp, Homo sapiens
  chr11:78127713-78127879
  hyper
ccacttccaaactcccgcgactaccccaagaccatttcggccaaatctcagtaactggcaccatcttgtactttgacctcaccaggcaaggcatcctctggggagaggggttaaaaaaaaaaaaaaaaaaagccagaactccacggctcagcgccacgctgttcca

SEQ ID NO: 121275 - DNA, 51 bp, Homo sapiens
  chr11:78128409-78128460
  hyper
ctgtatttagttcacgagcagaccggcttgggaggcgccgcagccgcaccc

SEQ ID NO: 121276 - DNA, 30 bp, Homo sapiens; identical to SEQ ID NO: 48826
  chr11:78129381-78129411
  hyper

SEQ ID NO: 121277 - DNA, 30 bp, Homo sapiens; identical to SEQ ID NO: 48827
  chr11:78285819-78285849
  hyper

SEQ ID NO: 121278 - DNA, 540 bp, Homo sapiens
  chr11:78673011-78673551
  hyper
gccgcggggcaagagcggggctgcctgagcccgcggagccacgtcaggcccccagctcccccggatcccaccacgcaccaggcccctccgcccggcaagtggcccaagcaggcatccgcaacggaaggacaattttaaaaacaaaccctcaaaagtaggaagagagagggacttaccgttcgccgcgacccccaggctggcggagccacttttaactaagaatgaattagggacaaactcttcctcagagtctgagtccggggttggctgggccacaccgttgcctagcaaccgcctctggctctcattggccggaggggaggggggcggggagggggactgctcaataggggttgatgaagcaggatgaacaatgcaagggagcacctgcgaaccacaaagacaaacacagacagaaaaaataatgaaaattgattttgaggcacacggggagggggagggagcaaaataaaacactcatcaacgggaagggggggctcccaacacggggcgatctactgcacacgtgggccgggggcg

SEQ ID NO: 121279 - DNA, 30 bp, Homo sapiens; identical to SEQ ID NO: 48829
  chr11:78789409-78789439
  hyper

SEQ ID NO: 121280 - DNA, 234 bp, Homo sapiens
  chr11:79148413-79148647
  hyper
agcgcgctgtgagtccgcaggaacgcggccgggccggggacgggagaaaggcgcggccgggaccctgcactgtgccgcgcggcgcttgcggctggaacttggcctggaacgcggtcttctcggctccagtttcccgcccaggccccgcccacccggccgccccgctggttcgcaccgctgctccggccaccgaggagcccaaagttggcggcgtcccgcggactccggcggaga

SEQ ID NO: 121281 - DNA, 455 bp, Homo sapiens
  chr11:79148661-79149116
  hyper
cggccgactcctgtaccacgaagacaactggaggccggcgggggaggcgggccacgaggggctggggcgagggagctgggatgcgcgggcccggctcgccgggaaacaggttgccgcggagtcccgtcccctccccctctgcggtccccgccgcgacctgattcccgccctgcccggggagctaacccagccgcctccggggcgccctccttcttcctggattcccacggctggaccagagcccctctggcagccgggttaaaggctccttcagcaaggtcaaggcgcggccggctggcacctggggatttttttccagccgagcactggcttttcaatcgcattgttaaggatcatggcagcggcaggaaatccgaagggccccacaggtctgcgggagggaggatttattttacagcaaggaacagattcagacagatcggggatttcagtgg

SEQ ID NO: 121282 - DNA, 545 bp, Homo sapiens; identical to SEQ ID NO: 48832
  chr11:79149330-79149875
  hyper

SEQ ID NO: 121283 - DNA, 391 bp, Homo sapiens
  chr11:79150290-79150681
  hyper
tggctgcctccctgcgcccctttcactgcgtcgatggtttacagataactgcatttctataaaccctctctccacggttagggggtgggagggagttagagatcgggtgggggcttggcgcggtactgttgagggctctgcacccaactgagcagtaatacactcatccacatggacgcgggtgcataaatcgccttaacattttgccctgaaagcggagccaatttccaaagttaaggaccacgcagctgaatttccagtactttccaacctcgcctaggcgggggcaggcagagaaggggcgggcagcgggcagctaactcgcccgacccccccgccaagaaggactcactaggtgaaccccccgcccttcacccaagtagttggttgt

SEQ ID NO: 121284 - DNA, 1141 bp, Homo sapiens
  chr11:79150740-79151881
  hyper
ccccactaccttccagtctgctcctccaatgtaacgaccgcatttaaaaatggcaattaaaatgactgaggagctcggtgatcacatttcaacccagagcacatttcccgaagctgggggtgagagtagtcatacagtcacactcacacccgggagccctccaagcgtccatctggcggctgcagcctcagttggctcctagacgaacatcaataccgcggccgggcgcccggtgaggagaggcgggcgccccgcgggttgcagagggcgaggagctggggtcgcatctccaggatctgagctccaaccaccgcccgtgcggggctgctgcagccggcacttgccccgcagggcaggctgcagccgctgaagcccggcgccgcctcgcgggctcctccagcgcccgacgggggcctggggcgagctagtctgcagaggggctgcaggcgaccgggccggggcggggaacgggatccgggagaggcagacgaacctggggcgcgccgcctccctcccacccgcttcccacctccctgccctcccccaacccttgctcccaggctccagtccgcggcgggctccgggggctgcggcggctccaggctccagaacagcttgcctcttcggccacccgcgccctagcctccctcctcctgggccaggggagcaagcaaacatctcccggagccctcggcagccgcgtgagctacccgaaccctgcccgggccagcagtgcagagggcgatggagctggcgaggcgtcgccgcggtccccaaggcgcttttccgtagagcggatcacgccgccttaccgtggctgcaggctgctaccgccggggaagcggcgaggacggcggcagggaggcaaggcgccgcgccggtggctcctctctctctcggcggcgcggctcctctgctccgcgagccgtagcggggcgcccaggaaggagcaggtccgggctctgcgctcagctccagcgagaccaacaatagctcccgcggggagcggagccccagcgagcctccagccgcgcgcgcacgaccggctcccgctcccggccgctcccggccggcgtccctgccagcactgctgccccacatgaaacagctgcaatcccgaggcttctggggggttggggcg

SEQ ID NO: 121285 - DNA, 270 bp, Homo sapiens
  chr11:79152000-79152270
  hyper
tacacacagaaagagagggcgagcgagagagagacacacacacacacgcacacgcacacgcaggttacatgaatgggaggcggtagccaatcctacgaggccggcgagccgcgcggcgcactggcgctgggagcagggccgcactccggcgcgggggggcgccacgcaggtgatgggcgcctctccgggggccacgcgcggccgctccctcaccccagtctcggttcctctgtctccttcccccttcctctccgccgccttctccatctt

SEQ ID NO: 121286 - DNA, 195 bp, Homo sapiens; identical to SEQ ID NO: 8285
  chr11:82443373-82443568
  hyper

SEQ ID NO: 121287 - DNA, 285 bp, Homo sapiens; identical to SEQ ID NO: 8286
  chr11:82443651-82443936
  hyper

SEQ ID NO: 121288 - DNA, 1138 bp, Homo sapiens
  chr11:82443948-82445086
  hyper
cggcgccgtagtcgggccccagcagctcaaagaactccacggcctccgcgcccttctccaggtcgcccaagctcacgtccggccccgacgggccacacccgccgccgcctgcccgggacggctccgtgaagaaggacggaggcagattgcgtgcccgcagcgggaccttcctggcccctgggatcgccgtggcccccgcggggcctgccacgtcccctcccgcgcccccagtgcccgcacctcctagcccggccgccggcgcagccacctcaccccccgccggctcggcacccccggggacgtggcgcagcgagtcgaagagcgcggccagacttcggctttgcaagctggcggccgcggcggcctgcgacgcctcccgccggggggcagccttgccgtgggccggggccgcgactgtcggggcgctaggggcggccagcggccgtttggctggcgtgtcggcggcgctcggggagggcgggccggggggcgcggcgcccatgaggccgctgcagcgcttgatctgcttctgcaggtacttgcggtggttcaccttccgcttcgacttgcccggcttgtccagcgccagcttgatgttgctggacgccgagtcaatgaagctgagtagatcgcgggtggcctcgcgcacgtcccctccttcggctcccgacagcagcgcacccgccggagccccggtctcatcgtcctcgaaacagcagcccttgtccagggctccgaaggcgccccctagcccgtccggggagcccccgaagccgaagggcacgaaagggtgcgtgctgaggagcgccgcctgcaccgccatcgccgcggctcccgggctgtccgcagcgctgcccgtgcgcccccgccagctcctgcccgccgcccagacccagctcccgccccggcgcggcgcgcgcggcgcagcctactagttccgggcctggctcgctgcgctgcctcccgggggagctcattaggtcttgtaagcaaggggcggagggagggagcgcgcggcgaccgtcccggtggtagaggggaggggcttacttagcctggcttggaggagtggggggtcgctttagttttctgagctttctgaagctcaacgccttaactccttcgtttccctttgccc

SEQ ID NO: 121289 - DNA, 255 bp, Homo sapiens
  chr11:82782799-82783054
  hyper
caagggaaggtctgcgatgtcctgagtccaagggctggagtcagtccctgccctggtgctgctgctacacttagctcagctggagcgagcggcaatcgcaagcccagcagcagcagggggtggagagaccgtagcacaatgaatgcagtggggcttttgcaatgacatcatccctctgtccaaacgtccccaatagccatgctcgggagcggtgctttctgggaactgtagtcttcttacgtcctgaagggatac

SEQ ID NO: 121290 - DNA, 112 bp, Homo sapiens
  chr11:82867864-82867976
  hyper
tggttgggttgggccgcgggaactgccttcccaggcctattggcttccctgaatgggttgttatggtaacaaatgaccgaacagtcccttatgaatcggccaatgagaaggg

SEQ ID NO: 121291 - DNA, 30 bp, Homo sapiens
  chr11:82868212-82868242
  hyper
ggagccgccactgccgccgccattttgtgt

SEQ ID NO: 121292 - DNA, 30 bp, Homo sapiens; identical to SEQ ID NO: 48840
  chr11:82868540-82868570
  hyper

SEQ ID NO: 121293 - DNA, 30 bp, Homo sapiens; identical to SEQ ID NO: 48841
  chr11:82868916-82868946
  hyper

SEQ ID NO: 121294 - DNA, 128 bp, Homo sapiens
  chr11:82905086-82905214
  hyper
acctcggccactgccgcagcgtctctagggagagagttaggggagatagtggccacagtcacagctgctcttgggagagagttaggggagacagcaccttctgcagcagcgacgtgaattttagtgaa

SEQ ID NO: 121295 - DNA, 149 bp, Homo sapiens
  chr11:82905694-82905843
  hyper
agtcggaggtgttgcgccatgcccggggtggccaattcaggcccctccacttcctctagggagactgcaaacccctgtgagtcagactgtcattggccttcatctctgtcgtattccttttctcacttaagcccgcaacagccttagcc

SEQ ID NO: 121296 - DNA, 30 bp, Homo sapiens; identical to SEQ ID NO: 8289
  chr11:82997453-82997483
  hyper

SEQ ID NO: 121297 - DNA, 522 bp, Homo sapiens
  chr11:84148447-84148969
  hyper
tcctggcattgtgcacgaacctgcgacccagcttcttagcataccagatagaggcaaacatagcgatgccaatggaaggaattcacaatgaagctgccgcacaatcaacttcccacctcggctcagagacgaacagaatcaggctggagctgtcacttgcaggctgttgctttctcagttcctctcatgctggttagctgagggagagggtgggaggagggaggggttgggggagaaaaggcagtcctgtttggccagtctgcaggtatatttacatcctgccagcaggaggtccgggtgaggcaggcgctgcctttgtagccagctcacacacatccagttggctaagtatttgtctgcagttcttcggcaccggcaccgtcgccaccaaactccatgtgtgtcaggaggaagggaagctgcagtcaagtccggaggcagctcacctccctctctaggcttgggcagttacaatcctcgctttggcttccctctatcttgacagtacgtgctggcggcagt

SEQ ID NO: 121298 - DNA, 238 bp, Homo sapiens; identical to SEQ ID NO: 48846
  chr11:84431425-84431663
  hyper

SEQ ID NO: 121299 - DNA, 425 bp, Homo sapiens; identical to SEQ ID NO: 48847
  chr11:84431902-84432327
  hyper

SEQ ID NO: 121300 - DNA, 30 bp, Homo sapiens; identical to SEQ ID NO: 48848
  chr11:85338458-85338488
  hyper

SEQ ID NO: 121301 - DNA, 30 bp, Homo sapiens
  chr11:85338956-85338986
  hyper
tgctgggcatttaacgtgcacaaaacagcg

SEQ ID NO: 121302 - DNA, 43 bp, Homo sapiens
  chr11:85339593-85339636
  hyper
cttcccgcccagggcgttctgggtccccgcccaccggcaagtc

SEQ ID NO: 121303 - DNA, 231 bp, Homo sapiens
  chr11:85359002-85359233
  hyper
gcccgcccacgccgcgtcacgagtcagccaaagatggctgcgcccaggtaatttgagcaaaggccacagtgaactccggcgtggctgaggaaggaggaggcacccacaggctgctgggaggagagcataaggtactggtattccgggggagggggtgaagtaaatgtcccggtgtcaggagaagcacgacgcggtgacacgctagctaccagcagcgctgcgcgtaaatga

SEQ ID NO: 121304 - DNA, 30 bp, Homo sapiens
  chr11:85375922-85375952
  hyper
ggccagcggcgggccgcggtaggccccggc

SEQ ID NO: 121305 - DNA, 183 bp, Homo sapiens
  chr11:85521824-85522007
  hyper
tccccgtgccaaaacgcagttcccattttagaactggttagactaaggaacaacattctacaccacctccctcacttaacagaggaggaagcagagaccaagagagggaaacaaagttgcccgaggtaacacagcgagtgggccaagtagagactggaacccgagtgcgcacctccgagtcgc

SEQ ID NO: 121306 - DNA, 80 bp, Homo sapiens
  chr11:85522510-85522590
  hyper
ggggccttggagcccgagagtgtggagcactaggagcctctgcactccgagaagggacagccaccgcgcagggaaagggg

SEQ ID NO: 121307 - DNA, 30 bp, Homo sapiens
  chr11:85565962-85565992
  hyper
cgccgaaaatcccgcgcggaggaaggcggg

SEQ ID NO: 121308 - DNA, 161 bp, Homo sapiens; identical to SEQ ID NO: 8293
  chr11:85780825-85780986
  hyper

SEQ ID NO: 121309 - DNA, 30 bp, Homo sapiens
  chr11:85929754-85929784
  hyper
ttggtagtagctttcgtaccagttcgttga

SEQ ID NO: 121310 - DNA, 222 bp, Homo sapiens
  chr11:85955559-85955781
  hyper
tgcgcatcccctgacgggtactttccattcgccagatgggggaagccagggggaagcaggttactgtttttgcatttctatcttcaaggaagaattaggttatgaatagttccgtgaatagtcaggaagcgctgtcctccaagttcaagattaaggaaacgtggcatgcacagctaaagcaagaggtgacgtcttgtatcttcccccgtttcctgggacatt

SEQ ID NO: 121311 - DNA, 30 bp, Homo sapiens; identical to SEQ ID NO: 48855
  chr11:86014098-86014128
  hyper

SEQ ID NO: 121312 - DNA, 175 bp, Homo sapiens
  chr11:86085686-86085861
  hyper
ccaacctcgctgcctcgagcttctgaatcgcctgggcaacctggaagccgcccatctaagggggtgaggtcgaatcccagccttgacgccttagcaaccgagcgagcctttctcgcgtcccagcaacgcgcccttccctctgccgggcctattctccctggtgcccctcccttcc

SEQ ID NO: 121313 - DNA, 30 bp, Homo sapiens; identical to SEQ ID NO: 48856
  chr11:86382375-86382405
  hyper

SEQ ID NO: 121314 - DNA, 1002 bp, Homo sapiens
  chr11:86382604-86383606
  hyper
ggtcgcctctctccacgcataaaagggagaggagggacaagaaagccaaaccaagtcacaacaagcccctgcaaggcaaaaacagaaaaaccgctggaagggcgcccgggaggatcctttctgggtccagggggcggggcgcaattttccggcagccacgggatcgcaacgcgggccgtcctgccctctggcccattaccttgttgagatgagggttcctggtgacatcgtatccgcgcttcttcaggggcacagggcgcgccgggccaggcttggagtggcagccttgggcgggcgcggtgggtgtccagcgcgggagggcgccgcaggcccggcccggccagggagccagccgcgtgcctgtccccagcgcggcacccatggtccttggcagacctggcacgggagagaaagcaaggtcagggcctccttccagccagccaggacccacgcgcgctgcggggcaccgggcctgatccggggacgcgccctctgggagagggcaggtgctcccaaagggttaaatgttccagcccccgccactcctcggctgccacctgctcggctccgcgcggggcgccaggcctagccaagagccaggcaaagcgaaaccaagccctggaagcagatccggtgcgggtgacagccggcgccacccctgcccccatccctgtgaaaaagaggcgactgcgcggcgaggggtccccgtacccctaatcccgcgtggtggcttgcctcggtcctctccttccctggcccacctgcgctgctcggggagctgaggtctacgcggtcccgctgcggagcaggcggggtgaggagctgcggtctgtgagtcctctcccgccaatgggtggaccgcgctggcggccgcgagctcgcggagctggtgagttcctcaaagagcggtcccacaacctttgttctcagtgcctggcttcccctgaggacgcgcgtggggcgcctcagcactgcgtgcacgtggttttccccagtgacaag

SEQ ID NO: 121315 - DNA, 30 bp, Homo sapiens; identical to SEQ ID NO: 48858
  chr11:86391915-86391945
  hyper

SEQ ID NO: 121316 - DNA, 30 bp, Homo sapiens; identical to SEQ ID NO: 48859
  chr11:86503647-86503677
  hyper

SEQ ID NO: 121317 - DNA, 1142 bp, Homo sapiens; identical to SEQ ID NO: 48860
  chr11:86510899-86512041
  hyper

SEQ ID NO: 121318 - DNA, 30 bp, Homo sapiens; identical to SEQ ID NO: 8297
  chr11:86512316-86512346
  hyper

SEQ ID NO: 121319 - DNA, 30 bp, Homo sapiens; identical to SEQ ID NO: 48862
  chr11:86512761-86512791
  hyper

SEQ ID NO: 121320 - DNA, 284 bp, Homo sapiens; identical to SEQ ID NO: 48863
  chr11:86513413-86513697
  hyper

SEQ ID NO: 121321 - DNA, 30 bp, Homo sapiens; identical to SEQ ID NO: 8299
  chr11:86514121-86514151
  hyper

SEQ ID NO: 121322 - DNA, 650 bp, Homo sapiens; identical to SEQ ID NO: 48865
  chr11:86665885-86666535
  hyper

SEQ ID NO: 121323 - DNA, 30 bp, Homo sapiens; identical to SEQ ID NO: 48866
  chr11:86667134-86667164
  hyper

SEQ ID NO: 121324 - DNA, 30 bp, Homo sapiens; identical to SEQ ID NO: 48867
  chr11:86748646-86748676
  hyper

SEQ ID NO: 121325 - DNA, 482 bp, Homo sapiens; identical to SEQ ID NO: 8301
  chr11:87908222-87908704
  hyper

SEQ ID NO: 121326 - DNA, 149 bp, Homo sapiens
  chr11:88070646-88070795
  hyper
gactgccgagccggcggcttacccataaccgagcagttgacatcgcgctgggaaccgctggagcccacctggaagacccaggtgcccagcaggtcaagataggtgcagttggcaggtgtgtcgcagcgcacggcgccgtcgccggagag

SEQ ID NO: 121327 - DNA, 32 bp, Homo sapiens
  chr11:88071022-88071054
  hyper
cggggacttgggagcgcgcgctgcccctcact

SEQ ID NO: 121328 - DNA, 191 bp, Homo sapiens; identical to SEQ ID NO: 48870
  chr11:88071605-88071796
  hyper

SEQ ID NO: 121329 - DNA, 261 bp, Homo sapiens
  chr11:88241714-88241975
  hyper
gggctccgctccgcacgcgcaggccggcgtgctttccagggacattcacaacgacgaggagctctgagtgtaatctcttatgataagagtgtcatatttgggagacgacgggatacagagggccgactcggacactggcgagttgggggttgtgctccccgagtccaccgagtctctgaagggggacggcggggtgagagccaccagctcctccaggtctggcttggcggccgcagcctcgggaccggccgcggggctctc

SEQ ID NO: 121330 - DNA, 144 bp, Homo sapiens; identical to SEQ ID NO: 8304
  chr11:88242130-88242274
  hyper

SEQ ID NO: 121331 - DNA, 224 bp, Homo sapiens; identical to SEQ ID NO: 8305
  chr11:88242358-88242582
  hyper

SEQ ID NO: 121332 - DNA, 439 bp, Homo sapiens; identical to SEQ ID NO: 8306
  chr11:89224223-89224662
  hyper

SEQ ID NO: 121333 - DNA, 85 bp, Homo sapiens; identical to SEQ ID NO: 8307
  chr11:89224735-89224820
  hyper

SEQ ID NO: 121334 - DNA, 756 bp, Homo sapiens
  chr11:91957433-91958189
  hyper
ttagtccagaggcacgacatttgatggtttaatcttcacactacaaactagccttgggacgttatataaaccatgttaacctcgatgtgcctcagtttcctctttgtcccaggagagtaacgcgttctctgtcttcacagggatgtggtgcgggtgagactcaatgcactgtgcgaaagctctcccaagccagcaagcaccacgctctccccgcggcaggaaagtacgttggtgtcatcctagagccccagagggctgagggaagactcgagctctaaaattagccgcttccaggcccggcgccgggaatgccctccagttcgccgcgcctcctccgccgccccctcccgcgcgccccctctcccctgcgccacgctcctagatcgctagtcatccccgccgccgaggctcctctccccctcgcccttttcgctcgcggtttgggaggaggagactgcgagagacaagcgcgagggggagactggagaggggcttggccgtgcgtcggcgtcggctgtgatggggagcccggagcagccaggcggcgagcagtagcggcggcggctgcagctcggagcagacaggagagccggcgctcctccccgcaggctgcgctgtgaactggcctgcggattgggatctcgcgcctcccgtccctctcctcccgctgctgttctcttcatctcggctcccctcctccgcttgcgaacccccggcggcggcggcggcggcgtcccgagcgcagagcgcttctgc

SEQ ID NO: 121335 - DNA, 1112 bp, Homo sapiens; identical to SEQ ID NO: 48877
  chr11:91958214-91959326
  hyper

SEQ ID NO: 121336 - DNA, 1095 bp, Homo sapiens
  chr11:91959354-91960449
  hyper
cgccagtgggagtcgctgagctaaagtgcatctggccccccggcttgcatgatggcgagcccggatatttttagctgtgctgtgatctgaattccctcctctcctctctcgttgacttttgtcacatgtgctttccgagatggtttaacattgaacatgattgggctttgcggaaagcaacttttattcactttccaccgttctcctcttgtgggcggggggtggcgggggcgtgcttggggcaaggatgcaggggtggccggagtttggctgcgagctaagagagccgcttgggttgctcgggatgagaggaacaggggtgctcccggggtgtgggtgtgctggcggtgacatcctgaggctgcagctcgctggaataatgggctcaaaccaggcggtggagaggggtccccggaatggacgtcgggggcggggaggctgcggagaccctgcgaggtctccgtgaaggactaggaggggctcccgggagggagtggcgcctgcggcccggagcgtgggcggccggtggctctggcacgcggaatctggtggactcctagcgcctcggccgggagctccagctccatcccgccgccgccgcgcgcccaatgggactcagcttcgggtttgggcgaacctgcagcagccgcggcgggagggagggacgctgggaccgcggtaatgattgaagtctttttcccccctctcccctcctcccgctcctctccgcccccagactctggcgcgtttgttttccaagttggatcccacttccatttacaagtgtcagacaaacccgcgagaacctcccccaacccgccccggccccagccagactagggagggcgcccagggggagggggcgagctgtctgggcagtgcctggggaggtgcgacgcgcccacccggggcttgagcggctggggttcctgtgcgtgggtccttaatgtttaaaagatacacatgaacagcaacaaaacccaaaccactcgtggccacttgttttctgccgcttttctcccacttgcctcggacatattaattttctggccccgacgctagtcttttcaaaggcgagtccggggtagtgggagg

SEQ ID NO: 121337 - DNA, 95 bp, Homo sapiens; identical to SEQ ID NO: 8313
  chr11:92675279-92675374
  hyper

SEQ ID NO: 121338 - DNA, 26 bp, Homo sapiens
  chr11:92930608-92930634
  hyper
cattgggaaaaaaaccgtgagtcacg

SEQ ID NO: 121339 - DNA, 766 bp, Homo sapiens
  chr11:92930674-92931440
  hyper
cgccccactcaacacacacactcacccacacgcgcgcgcgcaaacacacacacacatattttaacgccctattcaggcctgggcttcgtctgaccaagttctcggggtcagataaccggttcctttgcggatgctgaccacggggtcagttagcaatcgggcctcaactcaggccaagcgcggggcccctggaggtgtgggcgcacccgactcccgcacagacccccgcccacgtcagccccggctccctgcccacgcacaacaccgacctagctcctcgcgcctcgccgccccggcagccgccggcgtcgccgccgcttccatctctcgcgggtctccaggacgccgccgcccgagtgctcactctcccgccgctgcgtggccggcgtcaggcccaggcctacctcccctgcccggagggacccgcgcctggtgcccgcctccctgccccggcgctccccaaccgcgcggcgaggagcatgcgcagtgggacagcccggctcggcgggcaccgccggcgaggggcgggaggggccgaagacccgaggactgctgcgaggccgggttgggtaacccgagaggagggttgggtaacctgagatcagcgagggtgggaccttagagctagccgagacccgggcccatagctccctgggggttttaaagatgacggcgaacttaaatttggggcgcctgtccgtatgcaaggcgttagcgttctgtaagtcaccttggagaatgcgaagaaggacgggatttgtcccct

SEQ ID NO: 121340 - DNA, 446 bp, Homo sapiens
  chr11:93063607-93064053
  hyper
gcgggacagcgaggtcgcgctcgcgcggggtgaggttggaggcagccgaggagccgcacagggcagcgcctgccgccgccgccgcgcccatcccccactccgacggccacgagttcgggccgcgacgtccccatggcaacacgcggcggcgccgcgcgcggggagggagaggcccaactgcctcgttggtcgcgcggcgggagggcccaggcggcgggagcgcggcggcgggtggcggggccccttggggcgggcctggcggggcgggaggtgacatacgcggtcctgcgccctcgcctcagacctctcgggcgagcgcggcgcagcgcaggtaatggctcctggccttcccggccccgcctcgcccctgaccctcacccaaaggccaggctgcgcgggtcctcgagcgggacaggggaaccccaaaagggcggccgctctgcggg

SEQ ID NO: 121341 - DNA, 70 bp, Homo sapiens; identical to SEQ ID NO: 48884
  chr11:93275704-93275774
  hyper

SEQ ID NO: 121342 - DNA, 30 bp, Homo sapiens
  chr11:93394666-93394696
  hyper
ggctggggctggcgcgtgcctgtgcgcgtg

SEQ ID NO: 121343 - DNA, 30 bp, Homo sapiens
  chr11:93394895-93394925
  hyper
cttgctctgagctgcggttactgtgtccag

SEQ ID NO: 121344 - DNA, 30 bp, Homo sapiens; identical to SEQ ID NO: 48885
  chr11:93395257-93395287
  hyper

SEQ ID NO: 121345 - DNA, 117 bp, Homo sapiens
  chr11:93474502-93474619
  hyper
agtggccccaaccgcgcacttgctgcttgtaacccaggcctcggcccaaaacccgcgactggcctggtgtcctagagctctgtacacaccaccctcccgacctcagccctccaactc

SEQ ID NO: 121346 - DNA, 218 bp, Homo sapiens
  chr11:93474649-93474867
  hyper
cggaagaaaagggttggctatttccgtggcccaagtaatagtcaggccgaaatctcgcgatacaacttagcttccgggaagaaggcgagcggtgggaggagacgcgacgtgggggcgccatttttctcgccgcgcagggaggactgactaacgtgggcggagctctagctcgcgtattctgaggaggcggggttggcctaggcgaagatccggactct

SEQ ID NO: 121347 - DNA, 30 bp, Homo sapiens
  chr11:93517521-93517551
  hyper
gtttccagtctgagcgttgcgttcggtttc

SEQ ID NO: 121348 - DNA, 30 bp, Homo sapiens
  chr11:93518114-93518144
  hyper
acgtaatactcctgcgggtctccttgaatg

SEQ ID NO: 121349 - DNA, 102 bp, Homo sapiens
  chr11:93861764-93861866
  hyper
tgttgggggtggggcgtaaagggggccatcccatccacagaaagagtcgcttgcagaaatgattttaaaactcccgggtgccaggacgtgaggagaatccgg

SEQ ID NO: 121350 - DNA, 30 bp, Homo sapiens
  chr11:93862579-93862609
  hyper
ggacaagatggtcacgtgcattgcggtggg

SEQ ID NO: 121351 - DNA, 278 bp, Homo sapiens; identical to SEQ ID NO: 48888
  chr11:94134185-94134463
  hyper

SEQ ID NO: 121352 - DNA, 186 bp, Homo sapiens; identical to SEQ ID NO: 48889
  chr11:94134682-94134868
  hyper

SEQ ID NO: 121353 - DNA, 30 bp, Homo sapiens; identical to SEQ ID NO: 48890
  chr11:94227023-94227053
  hyper

SEQ ID NO: 121354 - DNA, 202 bp, Homo sapiens
  chr11:94227396-94227598
  hyper
ggcctgtgagctcccggctggtggcagagtgccggagctggatcccctctccctccctcccagtcgccagaccctctacaggtgtcgcccctaggtccttgagttcagcacatctgcactgctttgtgctgagagcagtaagatgtatagtgcagcgaaaaataatgtagaacttttgaattagaacgtctgccctttcagt

SEQ ID NO: 121355 - DNA, 526 bp, Homo sapiens; identical to SEQ ID NO: 48891
  chr11:94245525-94246051
  hyper

SEQ ID NO: 121356 - DNA, 570 bp, Homo sapiens
  chr11:94277135-94277705
  hyper
cgcggcagctgctttagaaggtctcgagcctcctgtaccttcccagggatgaaccgggccttccctctggaaggcgagggttcgggccacagtgagcgagggccagggcggtgggcgcgcgcagagggaaaccggatcagttgagagagaatcaagagtagcggatgaggcgcttgtggggcgcggcccggaagccctcgggcgcgggctgggagaaggagtgggcggaggcgccgcaggaggctcccggggcctggtcgggccggctgggccccgggcgcagtggaagaaagggacgggcggtgcccggttgggcgtcctggccagctcaccttgccctggcggctcgccccgcccggcacttgggaggagcagggcagggcccgcggcctttgcattctgggaccgcccccttccattcccgggccagcggcgagcggcagcgacggctggagccgcagctacagcatgagagccggtgccgctcctccacgcctgcggacgcgtggcgagcggaggcagcgctgcctgttcgcgccatgggggcaccgtggggctcgccgacggcgg

SEQ ID NO: 121357 - DNA, 132 bp, Homo sapiens
  chr11:94277933-94278065
  hyper
ggctgcgcttcaacatcagcggctgccgcctgctcaccgaccgcgcgtcctacggagaggctcaggccgtgcttttccaccaccgcgacctcgtgaaggggccccccgactggcccccgccctggggcatcc

SEQ ID NO: 121358 - DNA, 299 bp, Homo sapiens; identical to SEQ ID NO: 48893
  chr11:94473469-94473768
  hyper

SEQ ID NO: 121359 - DNA, 968 bp, Homo sapiens
  chr11:94473802-94474770
  hyper
cggcccagcgcccggccgggggagccgcggggtggcacgcggggaaagttggcgcgcgcctgaccgcgcctggaagccgcgcggtgccagggccgagttgtcccccaagtttctgcggcgatttgtcactccctggggatctggcggtctgaatcccgcggggcctccggctcagggattctgagcgctgggagagagaagcccgcgcttttcccggggacctgcgcttgagctggtgcttgtgcgggttcgtcctgaatggtagcgattcgagttgttttctgcttttcttctcccccagacagtgagtttgtggaagcctcgcccgcatcctacagcccagacgagttaggtaagtctgctcattttgtcttttatttcttggtcgcaattctgcccgagaactgcgagtttggggggcgtccataggaactcagctagggatggggctggggttggagggcggagggaaagggtcaggggacacctgctgccttcgcggccggaaccggcctttcctcggcgctgtgctttcgggggtggcagggcaagtgtccaatgagccgtgcgtgtgtgtgtgtgtgcgtgcgtgtgcgtgtgtgtgtgtgtgagtgcgtgtgtgtgcgtgttcgtctggggcagtggtgctgctccgaggagcctggcacagcaaacttccagagctggggcttctgaaacctgcgctcatcttgccgggaggacacagcggcgactggttctgacttgccaagtacctggcacgagaaggacgtcgtgtgggtcgtccttaccctgaatttaatgaagtcaggggctgaaaacggcggtgtaatcattaaactgtaagacctaggagctgcttccctccctgatttctattcctcagttagcctgtaggtgtctcgagataggacattccatcctcatgcctgtcatggtaagtggagatttgcgatgggtgaaccggg

SEQ ID NO: 121360 - DNA, 804 bp, Homo sapiens; identical to SEQ ID NO: 8322
  chr11:94501253-94502057
  hyper

SEQ ID NO: 121361 - DNA, 451 bp, Homo sapiens; identical to SEQ ID NO: 8323
  chr11:94502100-94502551
  hyper

SEQ ID NO: 121362 - DNA, 30 bp, Homo sapiens; identical to SEQ ID NO: 48897
  chr11:94883522-94883552
  hyper

SEQ ID NO: 121363 - DNA, 936 bp, Homo sapiens; identical to SEQ ID NO: 48898
  chr11:94883964-94884900
  hyper

SEQ ID NO: 121364 - DNA, 1067 bp, Homo sapiens
  chr11:94963463-94964530
  hyper
caaggcagaagcaaccgaataaacaaaaacaacactcgcaagagttagccacagcaaagaggggccaggttcctcgggatccgacccagctgctctgatttcacaccgacctccatcaacagctaaactgcacagggaggaggatcgaacggatccctcccgccctccgcccaaggagccgacccggggtagcaaggtagggaaatgagccgtaaaggagagcaaaggcaccaaataaaaggaacaagggaagaaaaaatatcccaacccctccagacttgggtctgtcccggcggaaataaaaagccgcagtagtccaaaccctcctgccctcaacccacgccccctttctcagtccctgcggagggacggtgcccggggatccctctcagcctcccccagtgcgcgcccggggacgagccgcccgagccccggccggcaggaagcgaccctcgccggcaggaccccgggccgaacccgtaccttccgcagcactttccggcagttggtacagagcaggtagttggcggcggccgacgggctgccgccgccccggttcatcgtggctgcgggcgccgaggcgagagcgggcggagggccgggtccgggctgtcactgcggccactgcagggccggtccgtccccccgccgccagccgcgattccgcctcagcctcctcaaggcgggatgtcgggaggagaggcgactgcctgaaagctagcggcactgccagaggcgaccaccgcggcagctgccccagcgacggcggagacggcggcggctgctcctcaccggcccgttgttccacccgcccccatcttccagacccccgcccccgccaggctaggacgagcagccgccaccgctgccaccgccaccaccgccgccgcagcgcctcagtgcggccccgcctccgccgccccaccaccttcaccacctccacgctccggtaccgcccctcccgccaatcggacagctccggctacgcccccagggcgctagcccgcagccaatgagcaacgagagcccgactgggagtcgcgccggccaatcgcaggggccgagga

SEQ ID NO: 121365 - DNA, 30 bp, Homo sapiens; identical to SEQ ID NO: 48899
  chr11:95522931-95522961
  hyper

SEQ ID NO: 121366 - DNA, 34 bp, Homo sapiens; identical to SEQ ID NO: 8325
  chr11:95523018-95523052
  hyper

SEQ ID NO: 121367 - DNA, 30 bp, Homo sapiens
  chr11:95523470-95523500
  hyper
tactggaggaggcccgaccctccgtagaat

SEQ ID NO: 121368 - DNA, 30 bp, Homo sapiens
  chr11:95524027-95524057
  hyper
cctagattgccccgcgctccccaagcttcc

SEQ ID NO: 121369 - DNA, 30 bp, Homo sapiens; identical to SEQ ID NO: 8326
  chr11:95831955-95831985
  hyper

SEQ ID NO: 121370 - DNA, 30 bp, Homo sapiens
  chr11:96076190-96076220
  hyper
tcctgtatttgctccgctttatagatggaa

SEQ ID NO: 121371 - DNA, 30 bp, Homo sapiens; identical to SEQ ID NO: 48902
  chr11:96076456-96076486
  hyper

SEQ ID NO: 121372 - DNA, 1331 bp, Homo sapiens; identical to SEQ ID NO: 8327
  chr11:96122354-96123685
  hyper

SEQ ID NO: 121373 - DNA, 872 bp, Homo sapiens; identical to SEQ ID NO: 48904
  chr11:98891176-98892048
  hyper

SEQ ID NO: 121374 - DNA, 34 bp, Homo sapiens
  chr11:100557939-100557973
  hyper
gcgctctgagcctgcgtccgccgagggggagggt

SEQ ID NO: 121375 - DNA, 604 bp, Homo sapiens
  chr11:100997686-100998290
  hyper
aagtcccacccctcccgggggaacggtgccttaactcctctccaagacaagcactcctggtaaacgtccttcttctaagaaagaagcatttcataaagcccccaactcgccgcgcactttctgccccactgggctacagcggacctagtgtgacgctgcacgttttaaatcggggttggttctgcttcggaatctggaagattcggaaagttaaaaaacaaacaaaaaaacagctttcagggaggcacgccccaaaaatagtatattctgcgcccaccttcgtgtccccaagagtgaggagaggagggaagaagaagggaggcaactgcccctgtgctgtgtcccgctgcccaccctctccggccgccccggggagcgcagcggtgcgctggggctggggctgagggttggcggccgccgccgccaacggaaccgctactcccggacgcgctgggcgtgccccgtcccgggccctcacctcaggtagttgagatagggcgggtagacctgcggcaggccctccttgagcacggcggcctggtagccgagctgcgggagcccgttgaggccgagtgcagggtagagcgcgggggccgccccggcg

SEQ ID NO: 121376 - DNA, 389 bp, Homo sapiens; identical to SEQ ID NO: 8330
  chr11:100998355-100998744
  hyper

SEQ ID NO: 121377 - DNA, 18 bp, Homo sapiens
  chr11:100999022-100999040
  hyper
gcccccggcgggacagcc

SEQ ID NO: 121378 - DNA, 1511 bp, Homo sapiens
  chr11:100999159-101000670
  hyper
cggagacggcttcactggggccccggaccagtgagggctctcagaggccgggagcagcagctgccgggctggtgacaggccccggggcagcactttatgggcagctgccgtcccggagctgtctccaaccttgcacccggaccggctcatgagcggggacaacacccgctgggtggcgggggcagccggtggatcttcgggaagttcggggccaaacaggcaccaagagctggtgacctcgcaggcgggagggctgggttggctctgcccgggacctgagggcgccaacagagtgtccaagacactgtccagcagtccgctgtccttttctgggggactagaactgctgcctccagcaccccttgtagcttcagctctggaatatgcgccctccacgtccgacagcgactgctggtcctgcgtcttttcgtcggaggggtcctgtccctggcagggccgagggaagagtagcccgtccagggagataggtatggccgaaacttcaggcaaggtgtccgaggtctggctccccgggaacggacctgcggctgggcgacacagcagtggggatccgacctcgggggagggcgggccgcccgccacgtggggagcccggggaccctttgccttcagctcagtcatgacgactggactccccttttctcctcccccgtctccaggaggagggaaaagggaaggaggagggggtttcgggaatataggggcagagggaggagaaagtgggtgttgaatgtggctggaccggagggatctccacctcctgggtcgggggcgggggagggcggcgctggtcagctcctgcccttggcctccatcctgtcgtcaggggaactgtggctgtcgtttgtcccagcgagcggcaagtggggagcgcaagaaaaagtagtaattgttaggagatctcgtctcctaactcggggagttctccaagagagttctccaacttctgtccgaggactggagacgcagagtactcacaagtccggcacttgagtggctgcggctgcgacggcaatttagtgacacgcggctcctttatctcccgactttttctctggcatcaaactcgtgcatgctgtgaagctctcagtccctcgctgagttccactgccccctcactaaaaccctggggctagtcggacctctcggtacagcccattcccaggaagggtcggacttctgctggctccgtactgcgggcgacagtcatctccgaagatctcagatcccagtagtgcgggagcactagccgcctcgggttgtagatttcactcaaatgacaagtgaagctagttctcattgagaatgccacccacacgcacaaatacaacaaggcttaccccgattagtgacagctgtggactggccagacagctttctaacaacgcctcctcctctagggaggccccgcccaaagcccctccctaccccaattaccggtaggatctgaaactctggagttggcatttccacccgttattctgaatgct

SEQ ID NO: 121379 - DNA, 567 bp, Homo sapiens
  chr11:101452970-101453537
  hyper
acttcgaaagggcaccgcagcagggcttgaggctgggcagccctgacacagcacccatctatcaggagggtctgccaggcgcctatggggtggaatcctccctccaactaaagctgtttatagagctgagaacctcgggaaaccgcttgcgggtggatgtgacaagtcaggaaacttgactacccaatcacccaaaggggcaatgggacagaaatgctatctgcccgctgcacatgtggtcacagcggtgtcggggaagcggagtcttttcttctggagtccactctgcttactccctacctcccctcccgccacccacccagctaaaaaaaaaaataccctagattcataaacaaaagcttgcagttacccacagcccaatacaaacgacccgacgccctcacttctatagcccgtgagtctcccagcccctaacaggctcgtctccccagacgccccgggtgaaaaggttcgcgccgccggtggagagtcctattggttctatttctgtcttcactccaaggccccaggaccggggagaggtcctggtctaactttggctgtccc

SEQ ID NO: 121380 - DNA, 338 bp, Homo sapiens
  chr11:101453715-101454053
  hyper
cgtagcgatcctgtctcttgtagagcgcaggatgaaggggtctggagaaatcgaccacccatctaatcacctgcaatggtggtgttactatgcggtctcactctcgtgggcaaacatatccatgcgtacctacgaggagcaaacctagacaaccccgcctcccccactccccgcgcgcccctccactcactcaggtcccagccctggctctcgcggacctcccagcaccgtcctaggaggtacacacgcgggttcaggacgcgcgcggacggactcggccactcctgcgagcgcacaacctccctccgcgcagcccgcgcccgatccgccccgcgtcg

SEQ ID NO: 121381 - DNA, 276 bp, Homo sapiens; identical to SEQ ID NO: 48912
  chr11:101454510-101454786
  hyper

SEQ ID NO: 121382 - DNA, 39 bp, Homo sapiens; identical to SEQ ID NO: 48913
  chr11:101785492-101785531
  hyper

SEQ ID NO: 121383 - DNA, 30 bp, Homo sapiens; identical to SEQ ID NO: 48914
  chr11:101786102-101786132
  hyper

SEQ ID NO: 121384 - DNA, 371 bp, Homo sapiens; identical to SEQ ID NO: 48915
  chr11:101918142-101918513
  hyper

SEQ ID NO: 121385 - DNA, 2031 bp, Homo sapiens
  chr11:101980829-101982860
  hyper
ggcgcccgcgttctccgcagacaccacagttcggacccggattggacccatcgtttgcggttcgcggggcagaatacggggcacgcttcgggcccctgcccggctgagcgcgggcgaagggcggaccgggccagggcgagcgggtcacgtgcggccgggagaggcgccgcgggccgggagtgtgcaggaatgtagcaacttgcagcgaaaagtttccctgcgctgccggccgggccgcggtgcgggcgggcgcgcagaggaaggaagagccgagaggaggcggggccgcggcggcgcgggcgggcgcttctcctaactttagttttggcgtttgaggcgagtttctgtctcagtcgggcgcagccgccgccagggaaaagaaagggaggaaggaaggaacaagaaaaggaaataaagagaaaggggaggcggggaaaggcaacgagctgtccggcctccgtcaagggagttggagggaaaaagttctcaggcgccgcaggtccgagtgcctcgcagcccctcccgaggcgcagccgccagaccagtggagccggggcgcagggcgggggcggaggcgccggggcgggggatgcggggccgcggcgcagccccccggccctgagagcgaggacagcgccgcccggcccgcagccgtcgccgcttctccacctcggcccgtggagccggggcgtccgggcgtagccctcgctcgcctgggtcagggggtgcgcgtcgggggaggcagaagccatggatcccgggcagcagccgccgcctcaaccggccccccagggccaagggcagccgccttcgcagcccccgcaggggcagggcccgccgtccggacccgggcaaccggcacccgcggcgacccaggcggcgccgcaggcaccccccgccgggcatcagatcgtgcacgtccgcggggactcggagaccgacctggaggcgctcttcaacgccgtcatgaaccccaagacggccaacgtgccccagaccgtgcccatgaggctccggaagctgcccgactccttcttcaagccgccggagcccaaatcccactcccgacaggtaacctcgttgcccctctccccgtttccccgtcgggcgggcctcagaccgggggggcgctcgggagccgcggccgccagctctggtcaggggaggggggttgcgggaactctagctggggtgggggtcccgaggcgaagtggaactggagtcgtccactccgccgcggtgaccagctccccactcctcccagagtccggggctgagatttgtttttcccttctgagtttctctctgcggttgcagccccggggggcgtgctttccctccttcttcctttctttcttcccggggttcccgagaggttggcgggagtggaggaggggtggggaggaaggaagggggtggggaaaagtcgggcctgggccgcggtgggcttgcacaatgcgcgcgcctccgcgcgctccgcaccttcgctcccgccgggccgggctgggaaagggggaggggggcctctggcatttgtgtgtgggtgtgttgccagcggcggccgagtttgtgaagttgagccctgggcccctttcctttgcggcctctcggtccacttcagtctcctgggggagtcaaataattgttctcttgttttccagtgttgattagaggtgggggtagaaccggtccatttagttttttgctctttctttccttcccccctcccgtttcccctccccctcccgtaagcatttattttcctcgcggctcaggcgatttcggaatacaggtttcgggcttcccctgcccagactttcctggaagttgtttatggagttctttcacccctgctcttcccttgtgtgttggaacttgggccggcttgctcttatcaaacttagtaggtcgcgtgttggtttcccagttgtagactattatttacagtcggctgaaacgcttttgaattagccacatctgtacgttgcgcaggaactgagttgcgctttacagtaccgaggttttaacaca

SEQ ID NO: 121386 - DNA, 30 bp, Homo sapiens; identical to SEQ ID NO: 8336
  chr11:102188131-102188161
  hyper

SEQ ID NO: 121387 - DNA, 30 bp, Homo sapiens
  chr11:102217773-102217803
  hyper
tgactcccgatgagcgtccagttgcgccgg

SEQ ID NO: 121388 - DNA, 32 bp, Homo sapiens; identical to SEQ ID NO: 48919
  chr11:102323922-102323954
  hyper

SEQ ID NO: 121389 - DNA, 1022 bp, Homo sapiens
  chr11:102962154-102963176
  hyper
gtctagaaaaaggcagaggagcgatacgggagtaggggatcgagggtcggttgtggggtgggggtgggggtggggggaagcgcaatttacatatgcatctgttccccaccctgcagggcacgtagactcttaacgtgggcggctcttctagtctctccataaacgccagcgtgcacacactcgaacacgaggtcgggtcgggcgcggagactcgcggtgttcggcacctacagcctagctcgatcaaaggggcctcacctgtctccagccccagcccggcaggccgggcccgactccttttcctccagttgtccagcaaaggagggaggagggaagcttgaagggtggggggagatggtacctggagattttacactttttgaggcctccgtcttccgctactgctgctgccaccccaggggattttctcttcttcttcaccggcatcttccgccctccccggcagggtgggcaggggagccggggaagggggtccctgtccgctggaagcccctcagcgctggcacccagttcccagagacagcagcaagcggaggagcagagtcgccagcccgcaccggcgcggcccagcccggccgccgcccgctcccaggtatcctcgtcgtctttctctgaccgggacagggctggctcctcgccggtggacactgcggttcgttctcaccgggaggagataacgcggacagcgcggcagctccaccagtcacagcaagcaagaggctcagcctaacccggaggcgaatcgctgaggcccggaagtgacgcaatcgcggagccggtcccgggaaggggcgtggttccggttagcctctgccactcgtaggtaggccaggcagagcgaagctgtctgacccgtcgactgcggcagtccgcggaattcttgtatcctgtccagggtatcctgacctttctcatgaagcttctaccgcgctctgatgctggcagtcaccgccaaaaagtgaaactactaatactttgcagttgacgttaaaaacaacctg

SEQ ID NO: 121390 - DNA, 30 bp, Homo sapiens
  chr11:102979935-102979965
  hyper
ctcttctgattatgcgtgataagaaatcag

SEQ ID NO: 121391 - DNA, 107 bp, Homo sapiens; identical to SEQ ID NO: 48921
  chr11:102980416-102980523
  hyper

SEQ ID NO: 121392 - DNA, 1123 bp, Homo sapiens
  chr11:104034043-104035166
  hyper
ctgctagattgaaacgcacgatttctcctctcactcgtaaaaataaataaataaataaataaaatttaaataaacgtctatcacccagggaaagctactcttgactccttccacctatcaaaattgcctaagaaaggttgagtctgaccaaggggcggcgcagcttgcaactttcgccaactccgggatgaggcaccgcatcctggtaccagaggcttggacaccaaaatgacttctctagggtgcagcaaggtgagccacctggcttatcctatccccatcagcacgcgtcccacacctctcagtcccattccggaaatggagctctctcaggactggatacaggcaggagacctccctccccaaacaatgcattcagcccgagttcacattcaagattcaaaaagaaaggggaaaaacatagaaagaacaataacaatagcaaacatgatttttttttcagttaaaaaataaaatgagtctcttaccatctcgcctgaggttggcgttgcgcaaagctttgatggatgcgctctgcggggttgcagaagtgtcccgacagctgcaaaagtttgcgcagattagagtgtagacaaagatgagccggtgcatttgggatcagcgactagagacagcgtcgctccaagaaaaagccgggttctgctcccgggaccgacgccgcgccgccctgcgctctcgccgcctgcgctcgccctgcgctggcccgggtcgctgtgctaatcgccgagctctccccaaacttcctgcatgctgaactttccgagcgcgtgtgggtgccgcacttccttgtggtgctgagctgataaatggtgacgggacaaacaacaggttgacgtttgtttgttcgccccctccggtggccggcagctgcagcacaggctgcagggggcgggcagcgccgaatctagcggggcaggcgagcggagcagcagcgttctccagccccggccgcggcccctgagaggcgcgcactcgggctcagagcggcggcgcgagcacctcagctccccagtttcccaggccgggcctaaacctgctctgccactgagcatgcccagtttaatcgccggccgggactcttcccaccgccctgggctttacc

SEQ ID NO: 121393 - DNA, 65 bp, Homo sapiens
  chr11:105480721-105480786
  hyper
ggctctccagattcccgggctgtttgctggtgagaaatctttgctgcagcgaggaccggagtccc

SEQ ID NO: 121394 - DNA, 1145 bp, Homo sapiens
  chr11:105480858-105482003
  hyper
cgtcctcctcacgaacctgcaaggatgcggcaggggcctgggggcatggggaggtactaaccccccggagcccccgattggggcttgcagacctggcccgtgggcggattttctgcctagcgcagccgagaagcagaggtgccaggaaaaccaagagaggggcgctgggggtgcccatccccagagtcggtccctctgcgaaccgaggaagaaaagaggagggagtcagcgagtggtcagaagggaaaacctgacaccagactggctccggagcgtccgggagactggggcgctccggtgagcacccagggggtgaagccagccgagcggtgggcgaggggcgtgcggagggagtgcgcgctcgaggaggggacgccaggagggcagcgatgctccgggctggtgcaggcttgctgggggatgtcggctgatgcgagctggagagcgcgtgtggcggccgcggcgccagtgtttgtgtgtatgtgagaaagcaaggggcgagcgcgagtgcgagtgaggcaaagatagagcgcatgtctcatccctgcgagcagccactagacgctccaccaccatcttttgcatgtgcaacatttgcagccggacagaaaacctctcccagggctatggagactgcgggaaaaatctggcggctcgcgatggattgctaaggagaactagtcataatcttaaaccaccgaaacctctttccttttttttctttcttttctttcttttctttttttttttttttttttggttgattttaattttagcgccatcgtcttcaatgcttctctgaacagcctttaggaagagtgcgagagaaagagagagagcgcgcgccagggagaggagaaaagaagatgaggattatttccagacagattgtcttgttattttctggattttggggactcgccatgggagcctttccgagcagcgtgcaaataggtaaggtgtgctccgatggggtgtgcatgtggctggttgtagcagatatccgaaagtgagttaaatgagttgctgataagcaattcagggaaaccttcagcagttcccttcccctctgtttccctcctcttcctttctctcctttgcaaaaagacttcctctttagtgcaggttccgttggaatacaccca

SEQ ID NO: 121395 - DNA, 30 bp, Homo sapiens; identical to SEQ ID NO: 8346
  chr11:105892730-105892760
  hyper

SEQ ID NO: 121396 - DNA, 117 bp, Homo sapiens
  chr11:105893006-105893123
  hyper
gcccgcccatctcccgccaccccaatggctcatatggctgccgctcatttgatgagtctcatccattggttagaatggtgtagccattctggctgagagcccgccctaggcctggcc

SEQ ID NO: 121397 - DNA, 30 bp, Homo sapiens
  chr11:105947374-105947404
  hyper
cagggcacttggatcgcgtgggctttcata

SEQ ID NO: 121398 - DNA, 524 bp, Homo sapiens
  chr11:105948197-105948721
  hyper
cctcgcctacttgacgtcatacaatgccgcaaagcgcagggctgatctccgtctccgcccccagctgctttctccgagaggaggtggctgagtcgggggcgggctgggagggctgtcggtgggccagtctgcgtagcgacggcccgtcccctgcgcacggacgccgggaagaagggggtggggccacgtttgcgtccgcgccatcaggcccgagatagcggcgaggtccgctttcagtgtatggttttccctgccaaacggttctgcttggtgccatccatggagggcgtgcgctgggccttttcctgcggcacttggctgccgagccgagccgaatggctgctggcagtgcgatcgattcagcccgaggagaaggagcgcattggccagttcgtctttgcccgggacgctaaggcagccatggtactacaggtcttttttggtatttagagcctaggaagcagatcttgggggaggcgggccgggctgtggagacccgacactcccgcgctggccgcgaccct

SEQ ID NO: 121399 - DNA, 1039 bp, Homo sapiens; identical to SEQ ID NO: 48928
  chr11:106888277-106889316
  hyper

SEQ ID NO: 121400 - DNA, 705 bp, Homo sapiens; identical to SEQ ID NO: 48929
  chr11:106889400-106890105
  hyper

SEQ ID NO: 121401 - DNA, 128 bp, Homo sapiens; identical to SEQ ID NO: 48930
  chr11:107328544-107328672
  hyper

SEQ ID NO: 121402 - DNA, 30 bp, Homo sapiens
  chr11:107436266-107436296
  hyper
ctgaaaagaggaagcggtgatttgctgccc

SEQ ID NO: 121403 - DNA, 30 bp, Homo sapiens; identical to SEQ ID NO: 48931
  chr11:107461311-107461341
  hyper

SEQ ID NO: 121404 - DNA, 1348 bp, Homo sapiens; identical to SEQ ID NO: 48932
  chr11:107461569-107462917
  hyper

SEQ ID NO: 121405 - DNA, 30 bp, Homo sapiens
  chr11:107729774-107729804
  hyper
gccttattgttgagcggcacccagtgtgcc

SEQ ID NO: 121406 - DNA, 30 bp, Homo sapiens; identical to SEQ ID NO: 8350
  chr11:107730474-107730504
  hyper

SEQ ID NO: 121407 - DNA, 1155 bp, Homo sapiens
  chr11:107798897-107800052
  hyper
attggctgaccctcccggagttgagaccttgcttcattttccttggttgttgctgctgtcacgtcttcccgccacgcccactttcctgccggcgcccagtgagcgttgagggagagtgatttgcagccggtcaggggcgggagttcgcggcagcaaacctgcttccccctcccacgcgccaccgcccccgccccgcccccgtccagaggccccgcccctagccgggcctggccccgcctctctctcccgagagggcgggcaccaggcggcggccgcagccgcaggaatatgctggaaggcggcgggcgggcgcccgcgaggtgctgaaaggacagttcccgccgccgaacttagcccgcgggtggggcggcccgggagccagcggggcacgtgagcgatggagaccatctggatctaccagttccgcctcatcgtgatcggggactccaccgtgggcaagtcctgcctcctgcaccgcttcacccagggccgcttccccgggctgcgctcccccgcctgcgaccccaccgtcggcgtggacttcttctcccgcctgctggagatcgagccgggcaagaggatcaagctacagctctgggacacggcgggacaggagcggttcaggtagggaccccggggaccttgggcaccgcgccgccccctcagcccgcccggacgccccttccccaggcgtccgccccgccggccctggtcgggagaggctctggcccttccctctcgaaagtgcaaacactccattctcgcttcccctttgcccctcctcttccagggacgacttcctcctccgcaatttctcacttctttctttggcgcccatttcctgcgccccctttccatctttcctttcccgcctgaaccggggtcgtcctcgccgccccctcttccccaactctttcagcccctgtgggtatttttatcccctccggctccccggctgccttcttcccaaactcggcttccctggctgcgcacagcatgacccgaccaccctcctccaagcaggcgccccttttcctaccctaacccagcggctcccacgctgtgtggccggggagaaccgcgagggagggttcccagattcgtgatggatcctttagcttcacagcaaggagcgctccaacccaggttcctgca

SEQ ID NO: 121408 - DNA, 128 bp, Homo sapiens
  chr11:107992140-107992268
  hyper
cctggcccaggctgcggtgtcccagcgccaggctccgccccgcccttggctgccggccaatcgccgccgactgagaggcgactattggaggaagcgggatgggcggtgcccgcgccgggccgctaggg

SEQ ID NO: 121409 - DNA, 30 bp, Homo sapiens; identical to SEQ ID NO: 48935
  chr11:107992752-107992782
  hyper

SEQ ID NO: 121410 - DNA, 128 bp, Homo sapiens
  chr11:108092857-108092985
  hyper
aaccaaggaaattgcgcccaaggttgaagcacacgcaatccgtccgtcatgcagacaaatgctctttcaggggtcctaattaagtgtggaggcctgactttccttccgaatccgccccaggtgttcca

SEQ ID NO: 121411 - DNA, 133 bp, Homo sapiens
  chr11:108093203-108093336
  hyper
ctccatcccgcgtccgcgcttacccaatacaagccgggctacgtccgagggtaacaacatgatcaaaaccacagcaggaaccacaataaggaacaagactcaggttaaagcaaacacagcgacagctcctgcg

SEQ ID NO: 121412 - DNA, 49 bp, Homo sapiens
  chr11:108093385-108093434
  hyper
cgcctctttcgcttcacggcagccaatcgcttccgccagagaaagaaag

SEQ ID NO: 121413 - DNA, 30 bp, Homo sapiens; identical to SEQ ID NO: 48938
  chr11:108094096-108094126
  hyper

SEQ ID NO: 121414 - DNA, 30 bp, Homo sapiens
  chr11:108338349-108338379
  hyper
ggatatagaccaaccgcttgtgaaggctgc

SEQ ID NO: 121415 - DNA, 30 bp, Homo sapiens; identical to SEQ ID NO: 48939
  chr11:108345500-108345530
  hyper

SEQ ID NO: 121416 - DNA, 30 bp, Homo sapiens; identical to SEQ ID NO: 48940
  chr11:108357121-108357151
  hyper

SEQ ID NO: 121417 - DNA, 645 bp, Homo sapiens
  chr11:108368604-108369249
  hyper
cacactccttgtaacgcccgggcgccgtccattcgcaacatcagtccctgcacattaaatgcggaagggcccttcaagttcattcattcattcattccacaaactttcgtggtgatttttgcccgctttgagtatgggcgggaggagggaagaggagctgaccagacccaaaaaggggcgacacacgccggggagggacgccacgcaggccgcgggcggactcccgggcggcggggacgcgcggggacccggccgcgggacgagggaggccggcggctggacactacctgcgggagagcgagtgaggttctggccctccgagttgaccgcctgcaggtagaaatagcggaccggcaggacgacggccgcctgcagcccgggcccccacaccaggctccgcggcgcgctgaccagcacctccggggcccccgcggccaccagcagggcgaggcgcagctgcagcagcagggcccgcgggaggcggcgcatggtcggcggggcacaactgcggtccagctccgcggcggcgaggaggggccggcagcgccgcggaccgggcggggactggggcccaccgcggggcgggtctttcgggcgggaaagattgcggcgcaggctccctttcccgcccgctgtcccgcctcg

SEQ ID NO: 121418 - DNA, 1043 bp, Homo sapiens
  chr11:108463470-108464513
  hyper
tccccacagcaccacgcacaagaagacccacccattccagccaaccccgtgtgtccaagtcccattcgcccacataagcctctatttgacaaattcctcgagctcctacccttggggtggggacctttcgcctcccgtgaggtgccggctctcccgtgcttcgctgactgcccgcattgggtggggagattcgcctctggtgccgagggaaaactgcgttaggcgagggtggaagctctgtcggacccgtgcgagcacgtgggtgcgcgcgggccgcggagtgagcagcagccaggattcctctccagatcgcgcccccgccgcatttcattgcctgaaacggcccacgccccgcgatggcccagcagacacccggcacagcacagcgtcactgcgcggcccccgcagcgcacggacccccccaccctgcccgaccccagacccgcagccgagcccgtctggtatgtggtgggtggagagggtaccaactaagcatcccaaagtccttcagggagcaactccgcgcagttttctcttcccgacccgcagcctccgcagcagccgctcggagcacccccgggcaggtgccccgcgcgagctcagcgccttccccgcggatccccggcccctgcgggacccaggcccaggacaaaagaaatgaatttgctctgtacctgatcctgtccttctcggccctctgtaactcctcattcctttccagcacctgaaggatcttcctggcctcttcgtcatttaagaaactgaaatcaaacgccggaggaactttcgtcattttctttactgtgtgtgagttacacttaagctccttggcgcctcctgttaggaaggcatttttcaacctgtacaagaccagtttcacgaacttgatcccacagccaataataagtccgcccctttgaaagtctaaaaccacaaacctagggaacgcccacacctgaagggctcatattgacaataccttaatgacatgtttctctcaacctgtccaaccgagatgcaaagtgaacggctaaagggagaga

SEQ ID NO: 121419 - DNA, 91 bp, Homo sapiens; identical to SEQ ID NO: 48943
  chr11:108535764-108535855
  hyper

SEQ ID NO: 121420 - DNA, 30 bp, Homo sapiens
  chr11:108536180-108536210
  hyper
atgagaggtcacgccgggtgccacagctca

SEQ ID NO: 121421 - DNA, 48 bp, Homo sapiens; identical to SEQ ID NO: 48944
  chr11:109292781-109292829
  hyper

SEQ ID NO: 121422 - DNA, 378 bp, Homo sapiens
  chr11:109292891-109293269
  hyper
cgcggctcggtctctggtccattcactccacgctttctgcagccgccactgcagccgcgcggcgggggctccctccttgcagccagccggcggtccaggtaagagacaaggtgtgagtaaaggcttctgatggccgggtggcctgacggccaggtgcgagtggggaggacagctcacgcggcctgagcagccacccctggccatagctccagcccccgcccctgcccccggcccctgccctggcttgcttgcgcgctacctcgctactccgcagtgcaacagtttgcagctgcctcttgggagcagcaaggaggctctcctgtgcgctgcgggtctaccggctccagtatgccggaaaagcctcggggcctttgggct

SEQ ID NO: 121423 - DNA, 240 bp, Homo sapiens
  chr11:109293523-109293763
  hyper
ttcctgcgcgtcagccgcggtcgcggacagaggcagagtgggatgtggtgccaggggtatccccctgggaatgggacccaagggatctgacgctgtccagggagggcgagtctggacggggagggaaaggaagggaggactgcgtacccggagcccgcgcggcggcccggagtgggtgctgggaagggtaggatccaggcgaagacatcaaccgagagggcgcagaaaagaggagagccg

SEQ ID NO: 121424 - DNA, 598 bp, Homo sapiens
  chr11:109293873-109294471
  hyper
cgcggtgccggcgcagaccccatcctgtcgagtggcatgagcaggctgctggtggctctggtgcacggccacgggccggcaggctggggtccgctgaccgaaaatacaggcagcgcccagctcaggcagtgtgcccagagggccgctttgcggtggtggttgatctttcccgacagcactcccctgggcagcggccgagattctaactaagctttgtgtctttgcagcctggtgcctctgcaaaggaaaggggagcgtggagacgtgttcgaggtggtatcggcgaggatctctcgggcgccgctcactccttggtcgccttgcttgccagcagttgctcccttagtccttggctcgctcgcacaccccctcccgctacagggagcagttttgggtggcgtgggctccgtcctcttcttggctggtaggaacggtgtgcccaagaggggaagcctagtgggcctggcccctcccagccccgcgccaatgagtgccagggcgccgaaggagctgaggctggcgttgccgccgtgtctcctcaaccggacctttgcttcccccaacgccagcggcagcggcaacacgggtgcccgcggcc

SEQ ID NO: 121425 - DNA, 30 bp, Homo sapiens
  chr11:109295741-109295771
  hyper
tttcattccctgccccgcccccacccgtac

SEQ ID NO: 121426 - DNA, 1272 bp, Homo sapiens
  chr11:110166500-110167772
  hyper
gcggcctcaagggcccgagaaagttacagggctccgagagctgcaacagcagcaggtagagctgcggccgggaaccgcggccctggcctggcgggtgcgagcggcgggagcgactggcgccccaaagcctgtcatgcaacatcccctttgccactggggcggaacgcacgctctctagtaatttaacacccctcctttcaaactggaggccggggaacaagttctaataaatgtaaaatcgaattctacctacgctgaatatctggattttcaaacaacccttgggaccatgccagcccgggcccggggcccagtccaggcagcgggagcccaccgtccccagggcgctgggggtccgacaccggcgctgaaggcagactccgcgccccgaggaaaggagaatcccgcggcggcgaaggtcgactttggcccggccaggcacgttcgggccgcggctcagccacgactcgggcagggcctcgcggcccctaccagccccgggaggagcctggccggccgggccgttaccacagtggcgcctcggccagctgggcgcgagcggaggcgcgccaagccctggcggcggcgccacggccgggcagcacgggccccgcaacttcgcgccgccaccttagcgtctccggaggaaccgggagcggggagtgggggaagggagggcgccgcgccttacccggagagcgggcggcttctgcccgccggcgtgtggctggggcgctgcgcggcggcgcggctgcgacagggagggagaagcggtggtgcgagcgctggcccgcgggagacgagaggcgccgccgccaccgcagacagctccgcaatatggccgctcggcgcctccgcgggaaaaggcggggctgcccggcgcccccccgcctccccctgccggccggccgtcctcgcgccgcggactgagcgccaacgccgccgctgggggccgcccccgccccgcccctcccgcaggctcgcagccgcaggcctggctccgggcgtggccgggggtcgcggtctggggccggccaacgcgaggtgggtggctgcgggctcgggagcgcccagggaaatagggcgaatgcgccggagggtcgagcccttccagagagcgctgggctccagctaaacctgcggtcgagggaagcggagccgcccagcccaaagctcggagtgtgcccgccgcctccccaacgagtggaaacttgaaactcccgctggtgccagcaaactcactgagggcgttgccgtcgcccccagaggagg

SEQ ID NO: 121427 - DNA, 233 bp, Homo sapiens; identical to SEQ ID NO: 48949
  chr11:110300414-110300647
  hyper

SEQ ID NO: 121428 - DNA, 1254 bp, Homo sapiens
  chr11:110581774-110583028
  hyper
cgggggtggggaggcgggggacaggcagacagggctagaaacacccaaatcaattcctcagggagcgaaacggcagaggccggcagcccgcggcccacgtgcacttgctcagggaaccgttccagcgaaacctgacccggatcggaatcctcccgcagcacagcggccgtgtttatcggaatggaacgctacaagttgtcacctgcatccctctcccagctttgacagggaacacgcgctgcccccacgcccacaccgacacccggatccctatccagcccggccagagtcccaggggccagggaccagtgcagggagaaggtcccccacctcagccctcaggacccccaaccacagcccacccgcccccaccctgctcggttctaggcccagccgaacctacatgtccccgtagtgtcgagcgttatcatccacagtcgcccctcaaactgtgacccccacctgggagacccggaatcatccaggaccctggtgtggggggcagtactccccatatctgccccccgaaaactgctatggagcagccgcgcctcggcgggcaggtgagggggccgagcccaccagcgccgcagccccgctgcctaccttcttcagcgccggctgccgctcccgggcagacatcgccggccctgactttggggctgacaccgccaaagggcagtcagtgctcgcccaggccacttcgggaggcccaggggcacggcgaggggtcggggaaaggcgatcgcccactacagcccgcgcgcctagactgagggaggagccgggctgcagaaccggcggcggatggagacgggagggaggctgcgaggtcgctcgaggagagactaaggctctagaaacggagaagcgggcgctctgcgggaggcggcggcgctgccgctggccgtcaagggcgggaagtgttctgggactctcattaggggccgcgagcctcgagcgtcaaattcccgcggcgtccgcctagcgcgctgctgtggcgggcgcggagggcgcgcgccggcagtgggggctgcggcggcggagggcacgggcccccgctcagcgtcctcaccttcttggtgcagctgcctcccgcgagccgagacactcctgtcagggaagaggagcgccccggctgtccccctagagtctcctgctggggggacatcgcttccatgaagaaaatcttcaaacaaatcccagcccaggaggaggctacacgatcatgtccgcgggctgccggccggaggg

SEQ ID NO: 121429 - DNA, 1035 bp, Homo sapiens; identical to SEQ ID NO: 48951
  chr11:110583043-110584078
  hyper

SEQ ID NO: 121430 - DNA, 1046 bp, Homo sapiens
  chr11:111169519-111170565
  hyper
gttggccgctccggacgtccgcgtaccccaggcccccgcccgccctcccacgtatccactgttgtgtcctgagacacgcggtgcggaccctgcgcgcccagaagctgctacggggggagctagaggctcacagtgagcctgggacgggggcagagcgcaccgactgcactgagccgagctgtggcggtccctgcgcggaccccgaggggcgcccgctgcccgcggagtccggagccgatcggggaacggggtggtggggctgcggtaggctggagcgcggagagggcgcggcgcctgggccctgcgggcggggcacgggattccctgggtccgggctaggaagagcgcaatctcctttcctggggagaccctaactcctggaacccggcttgagggggatccctgctgtccagctgcggtccccgcagtgaccaggcgaggcgctggcatcctggcactatctccaggcgtccaggctgaacgcgcggtcaccctcggccgccgcacccagcgcacttcccggcgcgattcctggacgcacactgcagggtagtggtcagggccggagccgccccggactcctgcggccacctccaccttgaaagctcgcccggctcggcttggcctaacagccagtccccaacctactcactgcggcttttcggggcccggggctgaggctgcccctgctcccagcgctcaggggtccctcccagcgaacccctcttgagcgcgcccgccacctcccgcgagccggggcagtccgaccgggccccgccagccccggggcggcccctaccgaagggcggcctcccggcggagtgcagggtcatcgggagccccggacggctttccccagctcgcgctgcgcggactcgccccggagcctcagtgcgcctcggagaaacgcctgccccagaaagggagggggtagggagagaggggaagaaggggagagtaggagcgggggcgaaggagggaggagggcaagatggagcgcggaaaaggcggagaaaagggacgagggagagcgggcagaaggcaaa

SEQ ID NO: 121431 - DNA, 30 bp, Homo sapiens; identical to SEQ ID NO: 48953
  chr11:111171693-111171723
  hyper

SEQ ID NO: 121432 - DNA, 362 bp, Homo sapiens; identical to SEQ ID NO: 48954
  chr11:111383169-111383531
  hyper

SEQ ID NO: 121433 - DNA, 347 bp, Homo sapiens; identical to SEQ ID NO: 48955
  chr11:111383557-111383904
  hyper

SEQ ID NO: 121434 - DNA, 41 bp, Homo sapiens; identical to SEQ ID NO: 48956
  chr11:111385435-111385476
  hyper

SEQ ID NO: 121435 - DNA, 488 bp, Homo sapiens
  chr11:111411093-111411581
  hyper
cacccgcacagctggcgaacttggctaaggtcagcgggagaggaggggtgagatgtggtgctagttttaggcacactgtgctcgttatcagattgcctaggggcccgactgaagtattcctccgcccagcgcctcgggcaaacgcgggatctcccagggaagctcggagggggacagggagctggttcccctctgcgactcgcccctctctggctggccgagtgtctggcgccaacctcgctggaggaggctgtcgggggcgggccagccagcggggctgccctcctcgcagtgacgtcccagggggcggaggggcgaccgactgactccgcgccctcccccccgcctcccgtgcggtccgtcggtggcctagagatgctgctgccgcggttgcagttgtcgcgcacgcctctgcccgccagcccgctccaccgccgtagcgcccgagtgtcggggggcgcacccgagtcgggccatgaggccgggaa

SEQ ID NO: 121436 - DNA, 865 bp, Homo sapiens
  chr11:111411821-111412686
  hyper
cgtctgagacccacgccagttcccggagctgcgcagttccctgcgcgtcctggaacgctcgaagcccgttcccagtccagagttatgggggtgggttggagaatgtaggagaggtggggcagtgggcaaacctgccccagtgggtgccccttcggcccgctcctttacacgcatcgaatcagtccttgggaccacccccgcggggcaggcttgccagctggcccccgcctaccgcccgctccgggaggcggccgcagagacagcggggtagggatgctggatccccggtgccgtgggaaccctgcctgttactcctcgtctcttctgcggggttggatggctgggtcgagcgcccggtatgagagcgcttagagatcgggaaagaactccagttagtgtgggacgagccccacctgactccggggaatgactctctgcttccttcctcctgttgtgtcactgcagcctcggatttggacctcagaggaggtaaagtgctctggcttctggcttctttcagttgttctgcatgtcggggggagaacatccgtgcccttttctcagatcctttttgcgggtgccaacagcttgaccaaacgggacagaggagactgggaacctcctctactctggcatcctggcttgcgaaactaatttaaagaatgtaaagttggtttcaggatgggggcggggcggcaaaagaggtgggaagctgaattgagctgcttgggttagggctgcgtgggctctgtccttggtcgcggggaacagaaggccctcccacccttcgccttcctgcaaatgagaagagaaggacacttcctgaaggcaggagaaccagataggcccgcgggcctccttccag

SEQ ID NO: 121437 - DNA, 141 bp, Homo sapiens; identical to SEQ ID NO: 48959
  chr11:111472615-111472756
  hyper

SEQ ID NO: 121438 - DNA, 31 bp, Homo sapiens; identical to SEQ ID NO: 8367
  chr11:111945412-111945443
  hyper

SEQ ID NO: 121439 - DNA, 30 bp, Homo sapiens
  chr11:111957222-111957252
  hyper
ataactttgtctttcgtgaggggaatggga

SEQ ID NO: 121440 - DNA, 30 bp, Homo sapiens
  chr11:111957581-111957611
  hyper
cgcctaagtggttccgggttggtggatgac

SEQ ID NO: 121441 - DNA, 30 bp, Homo sapiens
  chr11:111957857-111957887
  hyper
ttgctgtgagctgacgagttgagggaataa

SEQ ID NO: 121442 - DNA, 30 bp, Homo sapiens; identical to SEQ ID NO: 8368
  chr11:112045967-112045997
  hyper

SEQ ID NO: 121443 - DNA, 31 bp, Homo sapiens; identical to SEQ ID NO: 8369
  chr11:112046231-112046262
  hyper

SEQ ID NO: 121444 - DNA, 423 bp, Homo sapiens
  chr11:112096872-112097295
  hyper
ccctaactacgtggcgtgacctcaggcggggcaaacagatcaaggacacagggtccccacccaccctgaccactccagggtatgcttaggtatcccaaatcttgctctccgaagagattcagatagcgagagacacccttaactgtctcccgaggccgggattggccagagcggaagcggagacgcacttcctaggggcgcgtctggcacgcactgcgcagccgcggtgggaggaggcaccggccgcgcggcgggaggaggtgccggccgagcaccgcagacagcgccgggaagatgagcacggaaggtggtggccgtcgctgccaggcacaagtgtcccgccgcatctccttcagcgcgagccaccgattgtacaggtagggtgtgcacacaggtacagcggcgggcggtgggcgccgggcc

SEQ ID NO: 121445 - DNA, 30 bp, Homo sapiens
  chr11:112489406-112489436
  hyper
gggctcccccgaacccgcctgtgcgtactg

SEQ ID NO: 121446 - DNA, 279 bp, Homo sapiens
  chr11:113258497-113258776
  hyper
cccattcccctctcccggacccgaggagcaggaagcggcggctccttcggccacccaggcagcagccacagcggggagtgcgcggcgcggggacaggaagagaggggcaatggctgccgaccccaccgagctgcggctgggcagcctccccgtcttcacccgcgacgacttcgagggcgactggcgcctagtggccagcggcggcttcagccaggtgttccaggcgcggcacaggcgctggcggacggagtacgccatcaagtgcgccccctgccttcc

SEQ ID NO: 121447 - DNA, 1228 bp, Homo sapiens
  chr11:113345085-113346313
  hyper
gggccgagagccgggcggtcaccctccgctactgccgccaccgtcgcctgcactgccgggtagaaacgggtctggcacccaagcctccctccccgactaggtgtcaacccaagagaaggcgaaggagaacgaaagttcaggaccaaggacagcggcaaccgtgggagcgggagaatccagccagaatctgcctctcccccatccttagcttctgccttagaaactgaaaagggtcaggtcgcaccaacacagagttgccaaaaacagcccttcttcctccggaagaagtcggaaactctggccgcgagccccgggtctcgcgcttgggtgctgggggaagtgccctcccgagattgtggggagcggcctccctcccgccctccgatgccgcggctccgccgtgctgccctgggcgccccgcggggaggctgccccagctgcgcccgctcgtgctcggggagaggattcccttctaagtggcgaggaggctactgagaaggagggagaggggatagcagccgcgggctccagacgccctctgcccccgcccgacggggagcccatgcagagccggatcccaggcgggcgctcccgagcaggcggccaggagtggccgcacaaacttctggtcctggcctcgctccccttggaggtccctcctcctctccccgtgacactgagtcgcccgccgctccatccggccggtgcttaccttcaagccatagggcgcccgggggcagagacggcgccggctgcttgaggcttccagctcccgccgcatccacgcgcggccgcccctccggcagccgtccggggccgccactctcctcggccggtccctggctcccggccccgccgcgccgttcagagccccggcgggcagcagctcggccggctctggcccgcggggagcagtggacgggccgcggcggggcggggcggggcggggccgggcgcggggcgggcgggcaggagggagcgcggggacggggcggaggcggcgcggtgcgcgcgtgaggctgccggttcggcactgaagctggacagctctgcggcgcccgagcgcggggagcgcgggagggaggtgccccggtccccgcccctgagacaggccccgcccccgccccccaccaaaggagctgtacctcctcggcgatccccggcctgaacgggtaggaggggttgggggattccgccatcccttgttttgaggcgggaacgcaaccct

SEQ ID NO: 121448 - DNA, 252 bp, Homo sapiens
  chr11:113644419-113644671
  hyper
actctcgtagccagcgccgcagctcccgtcccgccggccgtcttgacgcgaggcctgccgggaaacggagtctcgcgggcctcagaccgccgcccggaaggcgaggggcgcactacaactcccagcaggcaccgcgccaatcccgagatgggatttccacggtgtcccgtagttggcaaactgtaagcagacgcgttttcttccttagttgttttcaaagttcgttgcttcccgcccgtttttcactggagg

SEQ ID NO: 121449 - DNA, 30 bp, Homo sapiens; identical to SEQ ID NO: 8372
  chr11:113745707-113745737
  hyper

SEQ ID NO: 121450 - DNA, 25 bp, Homo sapiens
  chr11:113745941-113745966
  hyper
ctacaacttcagctcgcccacggac

SEQ ID NO: 121451 - DNA, 109 bp, Homo sapiens
  chr11:113746573-113746682
  hyper
tcctgagtcttctccgctctctgccctcaaaacctcatttgtaggactgacctccggctccaccctccccacgggcgagttaaaactgttcccccgccgtgggaaactg

SEQ ID NO: 121452 - DNA, 30 bp, Homo sapiens; identical to SEQ ID NO: 8374
  chr11:113907091-113907121
  hyper

SEQ ID NO: 121453 - DNA, 521 bp, Homo sapiens
  chr11:113929592-113930113
  hyper
agaaaagtttctcccaggactcgaccttggcctccagcaatcgcgacagctaaaaacgggtgtctcgcttcgacaatagatccccgcggaccttctggcacctggttcactagcgcccgcgaactctgcctcgggagacttattgaaatccggatgctcaagccgggaggcgcgcagtaaccaggaggatgagagggccgggtttgggctaggaaagcggccttttaaaacagatgtcagggggactgcagccccgagccatgagaaaaaagttaaaggcgagatgacacgcactgaattggggcaaacattggaagaggagacaaaactgcgtgcttgagcaccggggtgcggggagggggggacaaaacccgtatccagtgcaaattaaaatcttgggagtaggtgggggctgctgcgcgcccttcaccctcagttcccctattaaggattctgagtccccatgcactcctgtcctctggctccttccttcctctccgctcggccggtgagaggcggcc

SEQ ID NO: 121454 - DNA, 1925 bp, Homo sapiens
  chr11:113930325-113932250
  hyper
ccagcactaaagatggagaggcgccggggccttgcaggggagggggctcggcgttgacgtgggacgcggcggaggcgcagcagccggtggtgatttgctaacctcgcagcagagaggagttgagggcgatgagagcgggtactgcgaactgccgggcgatgctgtcgctgccgccgtgatacggagagcaacagttccccagcaacacccctccccgacacaggcacacaccccccgacaggcacgcacacccaccccacagtgcccggctcggctgcggtgagtgaggggccgggaagaggcgcaccgcccagcgagcgccgcgcgccggggcttcccggggctggagaggtctggggggcgcgcgctcgcttcggccactcggccgctgggcttgtgccttttttatttggcgtgttcccttcctgccgctgcagccgtcgccgccaccggttgggggtcggctagaagggggagccccggctgtcagcctgggcgcagctgcctccccagcccttcctcttcagggcacggtcggggtgagaggtggggggcgtagcggtgtgcgggggctgagggcgtgagcagaggggtcggggatccggaggctttgtaccgccaggggctggcggagcaacagagcccgtgggtgctcttatgtatgcggaccggtgcgcgggcgcaagataaggttgtggtttatttatttgtgtgtttattcgccggccggctgggaagctagaatcggaggagctgacgagtagatctgggggcggaggggagcaggactgggactgcttacgttttgtttctctttgagaaaacgtggtgggctttttcttgattggacttgatccccaccccccttttgcaggggagggagggaagctccagagggtctgcagcgctgcgggccctcctcggctctcggcgggaccggcggtgacaccggagctcgccgtgcgctcccggccgctctcggtgggtgccggtctctgcacctgatgcgttcgggatgcctttcccaccctggcgcgcccgccgctagctcgcacagcgcctcgcacactcccgcacgcgcttgaaatgcgcacggtcccgccggcccgcggaaccacccggacgcacggagcgctccgcaccgactcgctcgccgcctccccgagacgctcgcaccgtgcttgggccgggcgcgctggccgctggcgccgctggccagaggcctgggacccagccggtcgctcccagggggtcacggccctgggtcggagagggagggcgggcagaccccttctcgcctttcctcccacaactcgctgcggggcttttgtgcttccccttcgccgcggggcgggtccgcctcccctgccgctctcgccgcggagtccagcccgcccggactgtcgccgttcctccccgtctctttcgctttccctcgtccctagctcagctctccttctttcaggagtctagctcctcgggaaaagttgcttccccaagtttgctgaagtcgtctccaagtctcggtgggggtcgctgggaactgggggggtgtgagagcgcggtcgatccccggagctcgggcgggttatcgccggctcttccccgcgccgcctggctggacgctgcagccagcgccagccggatcgcgggcgccgagcggcgggtgggggagacggctgcccgtgggcgcccagatttccctcaggacccaaaaggcttgtttcagggcgccaagcttccattcttttggctgttccctcctagttctcagaaaccccgatgtctgcgggaaagcacgcggtggctcggctcggctgaatgctcatcccaaccttgacggcctccgtccccaccccggggcgggcagcaaaaatgtcttgaccagccgtcctgtgaatcctttctgcgtgagcttggtggct

SEQ ID NO: 121455 - DNA, 30 bp, Homo sapiens
  chr11:113948291-113948321
  hyper
acgttccagtgggtccgaaatctcagaaaa

SEQ ID NO: 121456 - DNA, 30 bp, Homo sapiens
  chr11:113953339-113953369
  hyper
aaaaggagtttagtgcgtgatcatcagctc

SEQ ID NO: 121457 - DNA, 30 bp, Homo sapiens
  chr11:113953631-113953661
  hyper
cccgcgggccagtctcggctgtggtcgtag

SEQ ID NO: 121458 - DNA, 30 bp, Homo sapiens
  chr11:114178444-114178474
  hyper
tgtttcctgccaccacgtggcctttgcact

SEQ ID NO: 121459 - DNA, 30 bp, Homo sapiens
  chr11:114270548-114270578
  hyper
tcatataactcccacgtattaaatgaaaat

SEQ ID NO: 121460 - DNA, 247 bp, Homo sapiens
  chr11:114271096-114271343
  hyper
aggcaggcccttcgcggctccccagatcagtccagcctgtgtcggacccgatgactaagcacacaggaacccataactgagcctgcggaagagccagaagccgccttgcctttaacgaggggtatcctggcgagcatgcgcagaccgtccgcgcacgtcgtcgcccgctgagagcaagcgcaacgggcgttttcgtttgtgacgccagggagcgtgaggacgtggggcttccgtgaatgcgcagtgg

SEQ ID NO: 121461 - DNA, 30 bp, Homo sapiens
  chr11:114271614-114271644
  hyper
gcgggtctgggttgcgaaacgctcgctggg

SEQ ID NO: 121462 - DNA, 155 bp, Homo sapiens
  chr11:114309917-114310072
  hyper
ttcttttttaactgcgcggttacaactaaccaaaactcaggaaataactcctggaagcaaacaaacttagcagtgaaaaacaagcgcgtccagtaacaccagaaaaacacgtggcgggggtggggcatctggtcgcaaccgcaggtgagactcta

SEQ ID NO: 121463 - DNA, 3238 bp, Homo sapiens
  chr11:115372959-115376197
  hyper
acttctgctgccaagcgtcattgcacgactcccatttttagtcaaaaagcaatatccccgaccacagctttccaccgccccccggcttttttttttttttttttttttttttttgcagccaatacaagtctattgttgcctctattatgcgccagttaccgagcctttactcacgctcacgtttaactgacactggcgctttttacaatgcagcagcacgagggatctctttcaggaacattttattgaacccatccagtcagaggcatcacctgaaatgaagttgtaaccacaccggcatcggctgaacccaattatctcgtaactcataaattaagaattcacagaggaaaaacacataaacaacatccggagacagtggcatggaggaaaaaaaccctcagcgctggaattgacgctgctgccagacgccccccaataggtttcccaagccgagctcctttgcaagcctattttgggggcaagcagccaacccggcgtcccccaaatctcaagctagcacccccacacatcccccgtctcctacagcgtgtctcctgcggtgtttacataactgtgtgtcctctagcgtgtaaacaaaaggcacagcccaagcggagaggcgcccctgaagcagcaccgtggccccaacgctgtgcccgcccgggcctggggctccgcaggtgggggctgagctctcggcgtcctccgccacttgttgctcccgggtcctgcagctctggagctgcaaggaggggctttgcaggctcagagccctgctgcatcccctcctgcatcgccgctcgcaccccgcggccccgtgccactcggtcccggcgcccgcctggagcctgcagcaggggccagaggacgccgcgcggctgccaagcgcggcgaggtggcgggaagggaggctgggtgcagcacagccggcctctccgctgaggaagagctccggctcccttttgttagcaaaagcaaacactgccctcttctttcccgaccgcgccaacgcgcccggcacacgggcagccacacatcgggctccagccgagtgctcggtgtcttcagggaaggcaccgggcgtgcagagccgcccctgggcaaattcccaagactgctcttcacgcagggagcgcgcggaggcccgcagggtgcccgcctggccgcagaggccgcgacgccccctccgccaccctcgggccgccgaaagaacgggcagccgggaaatcccgtgtccccactcgtggcagaggacgctgtggggcgggcgggctgcgggctcccggcgccttcccgcagaggcggcgacagcggccgccccccccgcggggccgggccggggaactttccccgcctggagccgggccaaaaagacccgcagcagagccgagggggcggagggctgcgaacggccggagggaaacacgagaggcgtgcagtttggggacaggggagaaaggcagagcgcgttgggggaaggggcaggggagatcagacaagtctggggatgtcctggggaccggggagaaatcacgccgcgggcggctgggagtcagccaccaggaggcttcggggatggagaactgggggggccctctggagaggtgggggcgaatggacagccctgggaggtgggaggacctgcaagttacggggagaacggcgagtttagaagggtccggaagggttgaggttgtctttgaaccatccccttcccccatgctttacagcccccgggccccccattctcactccactctgcaccccgcgccaagccggggagagaaggtgtgggtgcagccatccctggggactctcattcacacttagccgggcaggggagaaggggctcacagatgccctcagccccttccctctcagccctgagtttcctctccacactccctccgcttcggatgtaggaagtggggggaggttgtcatggaaacgtttcccccctctgtggccaaggctactggggtgccttcggagatttaggggccaaccggtcggtgcccacacctacctgtggggatcagtgccgcggcggagaagagcaacagcagaagccggagccggagcccgggaggcgccgccgccgccgctgccgccgcacactgggatccgctcggcagcactacactcgccatgtcgggcacctgcctcagactggcggcgttggctgcctccggagcccgagcggacagctaatgagatgctaatgacatgcgctggaggcggagtccgggcagaccaatcacagcgccgcgagcccaacccggctctcggagggcctcgctccctcccccaccccgccccctggcgctggcgttcggcggcgcgcccgcgccacctaggggcggggccaaggggaggggcgtatgcaaatatgtttatgttaaaattcgggttttgctttccccggatcaaggaaaaagtgttctcccgggcgcctggcgtgcaaggactcgggctccagggggcgggtctagcttcttgtacacctttattaggaatgtttatagcaatcgctgtatcagaccgacgactggagaatctcccttaagagggtcctctgtcccgcacaccgagtgcatctggcctagcgaaccagacgttgcaaatttccgtcactcaccttgcaccgaaggaatagatctttgggaacgggggctgtgcgggagtggagagtaagaaggcaggtccccggattgacaaaacaatctgggagaagtgcatgcgtgctttgcacgtccggcggagcgggagagcccgctcaacagcctagcggtagactcggggatagttggagaaggcagccgtagagtcgggttctgagattttccagtcggtctttttgcggcagaatctcgggaaaggtagatcgaggagggtatgctcaggctcctccgcttgtcgagggtctcctccctggttttaatatataggtgtgtgttgaatatatgtgtgaaatatttgtaatattagatatttaagattacacaacaacggaaaaaattagtcaaggcttcaggtgaagagcgggggtggtgggagttggggagagggagtgtggtgaaggcagggtctgccgtgttcctccttcggggctcaaaccctctcactcctcctctgcgcccccagcccttcctaaggaagctggggaccaacaggtgctccgagcttcccctgtctctgggagagcctctcctgctaaagcgacttgcatctccgg

SEQ ID NO: 121464 - DNA, 178 bp, Homo sapiens
  chr11:115529917-115530095
  hyper
ccaccgagcacagaccgtgggaggggaccctgcgggaggaggctgcttcagtctccagagaccatctcccatctctacagcgactcccctatgaccgtcccccacccggtgctctcgggccacggggaagggacactcgggaaagacaccagagaccgggagggtgcagctgggctct

SEQ ID NO: 121465 - DNA, 402 bp, Homo sapiens; identical to SEQ ID NO: 8381
  chr11:115530221-115530623
  hyper

SEQ ID NO: 121466 - DNA, 31 bp, Homo sapiens
  chr11:115630442-115630473
  hyper
ttcccgcctctgcatcgccgccggccccttc

SEQ ID NO: 121467 - DNA, 878 bp, Homo sapiens
  chr11:115630530-115631408
  hyper
cgaggtcgccggagctcctcctctcgcggctgagtgagggtctgggaggccagatgaagggagctgctcggctgagctgcggaccagcgcgagagcagcgggcagtggcggaccagcgccagggcagggcaggggtggacagagggctctccccacccttccctcctccagtgaaagtaccagaagagatggcggccgctccgccgagtgtcattaccgcggaagcagcagaagccggcggcaggagcgggcccgagagcccgcggccagtggcctgcgcaccccgcgcccagcgcccccgccgcgggtcatcagtgtcagcgttgaggggtcccggggagcggttgcagggcggcggcggcggccgggtcatcagaagcacagtggagccgccccctgctttgggaggagcaaaagagcctctcgcttgcctcccgctcgagctccttctcctcttccttttcctagcgcttctctccctccctcggcggggtccgcagagacagctgggcaggcggaggctgcgcgcctctcgcacctccacgcccaccctcccgccgcccccccctcggcctgaaagatctgcgtccacaccaccctgcacccagggcccgtcaggttttgcagaagtttgctgagggtcctcacagggggtctcccaggggaaggggtggagggctggaggggccgcggtgggaagaggtggcagacgccgcctggcaacggagaccctaccctttctagaaattcagaacgcagagaaaccagtgcccagccctgctcttcagcaaacggtgtatttcagcccgagtttccttccgggggtttggctgtgagtgtgtgtgacctcccagatggcggcacggttcagatcccat

SEQ ID NO: 121468 - DNA, 30 bp, Homo sapiens; identical to SEQ ID NO: 8383
  chr11:115791602-115791632
  hyper

SEQ ID NO: 121469 - DNA, 161 bp, Homo sapiens; identical to SEQ ID NO: 48978
  chr11:115846300-115846461
  hyper

SEQ ID NO: 121470 - DNA, 31 bp, Homo sapiens; identical to SEQ ID NO: 8384
  chr11:115936675-115936706
  hyper

SEQ ID NO: 121471 - DNA, 31 bp, Homo sapiens; identical to SEQ ID NO: 48980
  chr11:116064587-116064618
  hyper

SEQ ID NO: 121472 - DNA, 616 bp, Homo sapiens
  chr11:116450734-116451350
  hyper
gagcagatcctagaccgaggaaaaacagtcccccaacacagccccgggtgggcagggggcacggtttattttagagccggcgactcgcagcccagggagcggcgctaaaacccgcggacccggcgggcgcagcgggtccgaggagcggcgggggcggccggcaaagttaacttggcaccaccggcgcttcaaagcggtgcagctgtggctagcagagccggcgccgctttcttctcgccgcttccttctccccgattaatcagcggctacagccgtcgctttgatccccgaaatcaaaccctccgtctgatgggtgacttgatgttatgctaatccaagctgattgagctgagataattacacttcatccaggtttcctgggagttccgaataaatattgatgcacatctgtcccccgctcaggtgtagaggggagctttgcgctcgcaacagtttccgcccacccggcagcgcgcgctccgccgcccgccttcgtccctgcgcccggaggccacgagccgggcgtttgccccgagcctccccgcgcagggcccgcgaggcgcccggggaaagcgaccaagacctggagctttgcggttcgcggcccgggttggag

SEQ ID NO: 121473 - DNA, 187 bp, Homo sapiens
  chr11:116643251-116643438
  hyper
tctatgggagaggacggaagtctaccaaggcgggaaaagagtaatcaaagttacaccccggctttaacgcactgacgctactgctcagaggctcgagatgtaagcggggcggcagaggcaaggcggggggcctcaagcgatgtgagtggggccctgagcatgagcaggggtcggcggagaagccgag

SEQ ID NO: 121474 - DNA, 254 bp, Homo sapiens; identical to SEQ ID NO: 48982
  chr11:116643718-116643972
  hyper

SEQ ID NO: 121475 - DNA, 30 bp, Homo sapiens
  chr11:116658513-116658543
  hyper
cgcggccgcgcccccgcctcacattgcagt

SEQ ID NO: 121476 - DNA, 30 bp, Homo sapiens
  chr11:116658872-116658902
  hyper
ctcgaaccttacatcgccagccggatccac

SEQ ID NO: 121477 - DNA, 30 bp, Homo sapiens
  chr11:116706305-116706335
  hyper
cagcaggtcctccaacgtcgatcttggccc

SEQ ID NO: 121478 - DNA, 614 bp, Homo sapiens
  chr11:116706356-116706970
  hyper
ggagttgttgagatccggcaggaagtccctgctccagggccaaaggccccacccgggctcccccggatgtccccgcacccccctctattctcccaaaagaaagaagctgcttcccactttggaaacgtttattctgagcaccgggaaggggggcggcggcgggcgcctcactgggtgttgagcttcttagtgtactcctcgagagcgctcaggaagctgaccttgaagctctccagcacgggcagcaggccttggcggaggtcctcgagcgcgggcttggccttctcgctgagcgtgctcagatgctcggtggccttggcgtggtactcggccagtctggcgccgccgttctccttgagagcctcaaggcgcgcggccaagcgctggcgcagctcgtcgctgtagggggccagatgcgtgcgcagcgcgtccacatgggcgcgcgcgcggtcgcgcatctcctcgcccagtgggctcagcttctcttgcagctcgtgcagcttctggcgcgcgccctcttggagctctgcgcgcagcggctccaccttctggcggtagagctccatctcctcctgccacttcttctggaagtcgtccaggtagggctgcacctt

SEQ ID NO: 121479 - DNA, 30 bp, Homo sapiens
  chr11:116968290-116968320
  hyper
ttagatgatcaaatgcggattcctgtctct

SEQ ID NO: 121480 - DNA, 506 bp, Homo sapiens
  chr11:117014685-117015191
  hyper
tgtgaagggaatggcgtcagtgtgacttcacgccacatcgtcccgaatgccagctccacactgcggtggcacgaacgcaggattgagagatgcagctggagtaaagagagaagcccatgtccctcagacgccacacaaaatgggggtaaccgcgagaacaaagcagggtacccaacggggtgtggcgggacacctgggcgcacgccgccagcgcccgggagagcgaaggcggggagagaggaaccacgctgaggcgtggcaggatgggggcgggacttccggaagccatttggctgagtggcaggggaaccggaagtggaggagctgctgctggtgctggggccggaggagggacgcgccggagcgggaccgacgggaccgagcgagcgaccgacgcgccacccgccgacgcctcagccgcttggggcccgcacggaccctctacttcagtgagtgcatccagggtcgcagggaaccggtggcttagaggcgggggtcggaagggg

SEQ ID NO: 121481 - DNA, 30 bp, Homo sapiens
  chr11:117049521-117049551
  hyper
gcagcccagcacggcgtcgggtagctacca

SEQ ID NO: 121482 - DNA, 370 bp, Homo sapiens
  chr11:117049878-117050248
  hyper
ctggaagctgcggccgcagccgcaacccgtcccggaggtgtcctgtctcctgtcgccgccgccgccgccaccaccgctgccactgccgccctgccggggccatgttcgctctgggcttgcccttcttggtgctcttggtggcctcggtcgagagccatctgggggttctggggcccaagaacgtctcgcagaaagacgccgagtttgagcgcacctacgtggacgaggtcaacagcgagctggtcaacatctacaccttcaaccatactgtgacccgcaacagggtgagggctgggggcttaggggccagaggcgagtggggaagccgacgagggctaggcgattctgccgccccgctacccttttggga

SEQ ID NO: 121483 - DNA, 30 bp, Homo sapiens
  chr11:117103186-117103216
  hyper
tcttccccgcgccccgggagagtccacttg

SEQ ID NO: 121484 - DNA, 84 bp, Homo sapiens
  chr11:117103811-117103895
  hyper
gtcgccccgggttgcggagttctttttggtacactcgaccctccagccagctgttcctacccgcgccacgggctctctagccac

SEQ ID NO: 121485 - DNA, 680 bp, Homo sapiens
  chr11:117186457-117187137
  hyper
aggcagcactcccgcgcccatccacagcaggagccagggcagggcttgggccatggtgggccccggccttcgggccctctgggctcgcactggcccacgtccgtccctggcgcctgcccccaagtctgggtggtgctggtggcttctcaggagagggagcttgggggcatcaggacgccagggcctgcagggccctgggccagcccccgggtccgggctgtggagagcggtcaggggagatccgcagagcacgggagcaggggagaggctgggatccggagcccgctacatcggcacggcggcggccagcctgggcagcgggcgcgggctcccggcggggctgggaggggcgggcatggcgggccggtggcggcttccctggtccccccggcgggcggcggcgcgggcaggggcaagggctccgggctcctgcggctgcgttggctgctcaggccaccataatccagctcgcggctcgcagctcccgggcgggctggggaggcggaaagacttgtggcggcggctgtcaaagccaaaaggttttcgcttttccctgggatcgctgggaagtgtagtcttcccatggcaggcaatccggcttccggggctggagaggggtctgggatgccctctgccgaggtggagtccgccctgcaaggccctggcgggaagggccagac

SEQ ID NO: 121486 - DNA, 66 bp, Homo sapiens
  chr11:117198409-117198475
  hyper
aactacactcccatcgtgcaacggaaaacggacagagctcctgcgtgcaccgaagggacttcgagc

SEQ ID NO: 121487 - DNA, 251 bp, Homo sapiens
  chr11:117352703-117352954
  hyper
cgttgtccttggtggcgatggcataccgcatgacgcggtcagggtcgatgactgtgtcccccttctcccagcggatgatgatgggccgctcaccccgtgccgtgcagtttagctccttcgcatggcccttgatggcgatggtggtgttggggtgggaagtgatcatggccgggactggggggcggaggcagagaaggcccagtgaaggtcgggagaccagcctggaggaggcacgcgtgccctgcgcagaa

SEQ ID NO: 121488 - DNA, 1384 bp, Homo sapiens
  chr11:117666745-117668129
  hyper
cgccatctgcgcgcccgggggcacgtcctctgcgatagcctggaacccagactacctgcgcctgcctggtcccgactcagtgcccaggtggcttcagtcggaaatgtctgccctcttccaacctcccgatcccggctgcctcgcggatcaggtacgcagcgccccagccgcaggtctggacatgccggacacctggacccacccctagcaaccccctctctccgggaagagggacacgccccccagcctgaagacttgtccccaggtccaactggccaggcgcggaagcggagaatctcgcatcttggggcgcgctgcccgaggtggccacggtggcgcaccaagccggggctaaagccggggcagaggggtggggtagggccgggggagggtgacctctgggtttggagaacaaacttgctatccgagggacctccagctctcgggactctcactatccccaccctgcctccagccaatgcgcggataagcgccatgcggtgcgccaacattcgcgccagggctggggtccgcggcgggagagggacgcacggacatagcggaggaatcagccgccgagtccgaggcctgaataagcaaggactcctaggtcaagagtcacggcctgaggacccctcgactcggagggcactccggggtcccagtgccaccaagccgcaggaagagggcaaggggctgggggaggggtccagggcagaactgccgccgtgcagggagcagggagatgaggggctcctttgccaccacccctacgggcgcgccccaaaacggcagacgcgggtggctggcggagcggtcgggggctgactctcactcggcccctgtcagggtgcctgcccctccccgctgcgccccacccggggccttgcaccccggtcggttcccccacgcacctggagcccgccgggcaccccgcctcgccgccagccgcgccaccctggccccgccgcctccgccgcccagccgcccgcgcaggtctcacctttgtgtaaagagtccaggagcaggaggaaagttaccagccacatgccataaagaggccctattctccggggaggtggtcctgtggccggccgtgcggcagcgcctctcccccgctcagcgcgctcccagccgcccgcactcggcgccccgctctctctgctcctcagcccagcgctcggctgcggcggcggctcctccctcctcggctccccggctcctgtcatccgcggggctgggctaggcggccgctctccccgcccccccgcggcaccccgggtggtgagcgccgcgcgagcccggagcccagacggaccccagccccacaagcccaggaacaggagcggcggcccgggccagaccgccccgacccggctccgct

SEQ ID NO: 121489 - DNA, 198 bp, Homo sapiens
  chr11:117746422-117746620
  hyper
gggagaagcctccagtagccacggtcccgcgagcgtgcaggcttgcagcaggtgacgcggcagacccatgtttccagcgaggctgctcccagctcccaccctcgggtgcctcctctaccagccaccacttgtaagagccagaagccagcgctgggagctccaggctgcacacccaactctccacggaagcccgggaga

SEQ ID NO: 121490 - DNA, 165 bp, Homo sapiens
  chr11:117747015-117747180
  hyper
gctcaaggcagcaccgagagcaattcccagccaccagcgtcacccccagcgccacagcctgcctcccctagaggctcctctctcttccgacgccgatctccttgtttacatccccagcccggtttcccgctgcccaggcggggaccgcggcgcagctgaccgcgg

SEQ ID NO: 121491 - DNA, 30 bp, Homo sapiens; identical to SEQ ID NO: 8387
  chr11:117789330-117789360
  hyper

SEQ ID NO: 121492 - DNA, 277 bp, Homo sapiens
  chr11:117856649-117856926
  hyper
acaccggcgtcctggcgcctttgccctcaagggcctgcaactacctcctccccattcggagcggccgcggccacatccttaacgccaagccggcacgccaggcaaaagcggctcggacgccctcaccccaccttccgcactcagggccgaggctgtgcctggccacctgcttcccagcacatgcacacacgcgcgcgcgcacacacccacacacacgtacccacggccggccgggctacccggaccactttgatccgaaggcactggaggcccagag

SEQ ID NO: 121493 - DNA, 34 bp, Homo sapiens
  chr11:117857278-117857312
  hyper
ccctgccctctccgcgcccgctccattaaagttc

SEQ ID NO: 121494 - DNA, 58 bp, Homo sapiens
  chr11:118013642-118013700
  hyper
gataacctctggctccgcccttgcatactcgagattgaactcacgggtgtctccctct

SEQ ID NO: 121495 - DNA, 30 bp, Homo sapiens
  chr11:118016788-118016818
  hyper
cgggacggggagggcgctggacccgcggtc

SEQ ID NO: 121496 - DNA, 89 bp, Homo sapiens; identical to SEQ ID NO: 48997
  chr11:118023498-118023587
  hyper

SEQ ID NO: 121497 - DNA, 30 bp, Homo sapiens
  chr11:118023981-118024011
  hyper
tgcttgggggaacacgggaaggttagcggc

SEQ ID NO: 121498 - DNA, 47 bp, Homo sapiens
  chr11:118230309-118230356
  hyper
ttgctgtgctgagtcggaagtgggaacccttcggccgctgagattct

SEQ ID NO: 121499 - DNA, 71 bp, Homo sapiens
  chr11:118230634-118230705
  hyper
ggaagaggccggagcgctatcattgcattatcttttgacttaactttctctagaacgtgccccgggcgggt

SEQ ID NO: 121500 - DNA, 35 bp, Homo sapiens
  chr11:118662151-118662186
  hyper
tgcttttccacagccgcgacgtgattgagaaatgg

SEQ ID NO: 121501 - DNA, 163 bp, Homo sapiens
  chr11:118662850-118663013
  hyper
gtgcgccgggagaggacggcgggggaccggactgtgagggcgtatcttgggggacctgtctaggaggaaccgggaggtgaaggcacaactgggggtgaggcgggggcaggggccgggctgtgagagtgcgactgaggggggattactccggagagcacggagc

SEQ ID NO: 121502 - DNA, 318 bp, Homo sapiens
  chr11:118663552-118663870
  hyper
gacttaatctttaaccggcagcttccctatttcttgcccctgcttccagctctgggccaatcagagaaagccaaatgtgctcctcacaccaatcgcgtaagaagccctgcttctagtatagccctcctccaacttcccgatgccaacatcctccaatcagagccaacctgaagtttctcccttttttcagtatatgtaaagcttttccactcccctgcctgcctatgagtctgttaaatcaagtgatgggtcgcggctgactcttgccagctctgagtaaatagcctattctcatttggtggtcgttatttctacaca

SEQ ID NO: 121503 - DNA, 30 bp, Homo sapiens; identical to SEQ ID NO: 49001
  chr11:118796410-118796440
  hyper

SEQ ID NO: 121504 - DNA, 30 bp, Homo sapiens
  chr11:118796706-118796736
  hyper
gagctcccccatctcgcttgcctcctcgcc

SEQ ID NO: 121505 - DNA, 63 bp, Homo sapiens
  chr11:118799387-118799450
  hyper
cagaggtctgggggcggggtttgtggggcctccatctgactgcccagcgcccctcacttgccc

SEQ ID NO: 121506 - DNA, 30 bp, Homo sapiens
  chr11:118800502-118800532
  hyper
ctggagtcgccacacgcaaaacaaggcacc

SEQ ID NO: 121507 - DNA, 131 bp, Homo sapiens
  chr11:118800837-118800968
  hyper
acggaggcagggaacgctagcctcccctagctccagcgaggactaaggacctgagtagctggaaacctgacttcacctctaccctagcccctcccctagcgaacagcccctcccccgtcctctgtgaccct

SEQ ID NO: 121508 - DNA, 125 bp, Homo sapiens
  chr11:118811077-118811202
  hyper
gaggtagagaggccccggggggtggggggaagctccaaggcccagccatttccggcagagcagaaactcccagcatgggccacgtggggagctggggaagctgcaagtctcggagtggtgaggga

SEQ ID NO: 121509 - DNA, 30 bp, Homo sapiens
  chr11:118966298-118966328
  hyper
ctcggctgagggagcgcgcccgctgattgg

SEQ ID NO: 121510 - DNA, 23 bp, Homo sapiens
  chr11:118972130-118972153
  hyper
cggttcccgcccctgccctagcc

SEQ ID NO: 121511 - DNA, 189 bp, Homo sapiens
  chr11:118972864-118973053
  hyper
cacgtgtctgacaccgctcacattccggttccacgtcagttttagctccgtccgcctccataggtcaagcttaaagggcccgtacctctcccttaatctgggatgcctccggctccaggaagatggctattgaaaggcagggggtggggaggagggacgagggtgtggagacgcgcctgtttcttgcag

SEQ ID NO: 121512 - DNA, 141 bp, Homo sapiens; identical to SEQ ID NO: 49003
  chr11:118977771-118977912
  hyper

SEQ ID NO: 121513 - DNA, 30 bp, Homo sapiens; identical to SEQ ID NO: 49004
  chr11:118978940-118978970
  hyper

SEQ ID NO: 121514 - DNA, 399 bp, Homo sapiens
  chr11:118992029-118992428
  hyper
ggaggccgagcctgcgcagttaggggaactcaggcccataggctccccgcctttgcgttgccctgagcagcgaggcgcggtcacgtgctaccttttgcacgtatcctgtcgcccctctgtccgcccgggacgcctagccccacccactgttcccgccccttccgtgttttggtgcgcacgggttccgccagacacagctaccattggctgtcagtcggatccgagaacgacgattggctttccttgaccgtccctcaagcgcctctccggagatggtctgaggtgggagaagagctgaagagacctggagccgacagacggtaagctggggtatgtgctctgcaggggctgcaggaggccaagctcttcccgagccacctcggcgagtattcttgccgc

SEQ ID NO: 121515 - DNA, 30 bp, Homo sapiens
  chr11:119019830-119019860
  hyper
cagcagagtcagggcgcgaccccaaccgcc

SEQ ID NO: 121516 - DNA, 30 bp, Homo sapiens
  chr11:119039415-119039445
  hyper
gagggcagtactagcggcagtgcccgcggg

SEQ ID NO: 121517 - DNA, 65 bp, Homo sapiens; identical to SEQ ID NO: 8391
  chr11:119039731-119039796
  hyper

SEQ ID NO: 121518 - DNA, 196 bp, Homo sapiens; identical to SEQ ID NO: 49008
  chr11:119039917-119040113
  hyper

SEQ ID NO: 121519 - DNA, 30 bp, Homo sapiens; identical to SEQ ID NO: 8392
  chr11:119077264-119077294
  hyper

SEQ ID NO: 121520 - DNA, 237 bp, Homo sapiens; identical to SEQ ID NO: 8393
  chr11:119103175-119103412
  hyper

SEQ ID NO: 121521 - DNA, 84 bp, Homo sapiens; identical to SEQ ID NO: 8394
  chr11:119142430-119142514
  hyper

SEQ ID NO: 121522 - DNA, 107 bp, Homo sapiens; identical to SEQ ID NO: 8395
  chr11:119144574-119144681
  hyper

SEQ ID NO: 121523 - DNA, 131 bp, Homo sapiens; identical to SEQ ID NO: 8396
  chr11:119145546-119145677
  hyper

SEQ ID NO: 121524 - DNA, 143 bp, Homo sapiens; identical to SEQ ID NO: 8397
  chr11:119146701-119146844
  hyper

SEQ ID NO: 121525 - DNA, 103 bp, Homo sapiens; identical to SEQ ID NO: 8398
  chr11:119148461-119148564
  hyper

SEQ ID NO: 121526 - DNA, 563 bp, Homo sapiens; identical to SEQ ID NO: 8399
  chr11:119148860-119149423
  hyper

SEQ ID NO: 121527 - DNA, 493 bp, Homo sapiens; identical to SEQ ID NO: 8400
  chr11:119155747-119156240
  hyper

SEQ ID NO: 121528 - DNA, 127 bp, Homo sapiens; identical to SEQ ID NO: 8401
  chr11:119167630-119167757
  hyper

SEQ ID NO: 121529 - DNA, 87 bp, Homo sapiens; identical to SEQ ID NO: 8402
  chr11:119168097-119168184
  hyper

SEQ ID NO: 121530 - DNA, 176 bp, Homo sapiens; identical to SEQ ID NO: 8403
  chr11:119169060-119169236
  hyper

SEQ ID NO: 121531 - DNA, 101 bp, Homo sapiens; identical to SEQ ID NO: 8404
  chr11:119170360-119170461
  hyper

SEQ ID NO: 121532 - DNA, 30 bp, Homo sapiens; identical to SEQ ID NO: 49022
  chr11:119186499-119186529
  hyper

SEQ ID NO: 121533 - DNA, 30 bp, Homo sapiens; identical to SEQ ID NO: 49023
  chr11:119187376-119187406
  hyper

SEQ ID NO: 121534 - DNA, 31 bp, Homo sapiens; identical to SEQ ID NO: 8405
  chr11:119187862-119187893
  hyper

SEQ ID NO: 121535 - DNA, 30 bp, Homo sapiens; identical to SEQ ID NO: 8406
  chr11:119192140-119192170
  hyper

SEQ ID NO: 121536 - DNA, 363 bp, Homo sapiens
  chr11:119204861-119205224
  hyper
gcaggctgcgaaggcggtgctattccaaagcccagcccagaggcagtgacctccgacccaagccaaaaaaaaaacctcgcgttcagaggccgggagaaagaacagctcccaaattgaggggagtccaagaccctgctcttttagagggtggggctaggagagcgtatttcgacgctgcccgccaacgaaccaatccccgcctaaagggggaggggatttaatctgtcgcctctccttccctttggaaagtaaatacgttcgggcgccattcaaacggaccaatgagtgatcgacgtttttgtggttggccttcaccgattggctggagtttgtcgtccctccctcctcgtcacgcctctggct

SEQ ID NO: 121537 - DNA, 46 bp, Homo sapiens; identical to SEQ ID NO: 8407
  chr11:119209336-119209382
  hyper

SEQ ID NO: 121538 - DNA, 30 bp, Homo sapiens; identical to SEQ ID NO: 8408
  chr11:119211032-119211062
  hyper

SEQ ID NO: 121539 - DNA, 356 bp, Homo sapiens
  chr11:119234721-119235077
  hyper
cgggctttggccctcgcttaacgttggcagcgggggcgcggggggagtccccgcgcggtgccacagtccggacgccgaggccggcgagaccgctacaggacagcgtccgcggcgcccgaacgcgcgctcctccgcctcaacctccccggcgtgcgccgccaacagcccgggtcccggctctcgcgctccggccgactggcggccccgccggcgcctcgggccccgcgacgtcagcgctggggcggggccaggccctaagccccgccccacctcgcctctaccccgcccccggcgccggcacgcggacccgaacgaggcgacaaggtcggtcctcccccgccgggccttccccgcgc

SEQ ID NO: 121540 - DNA, 30 bp, Homo sapiens; identical to SEQ ID NO: 49030
  chr11:119251839-119251869
  hyper

SEQ ID NO: 121541 - DNA, 30 bp, Homo sapiens
  chr11:119252195-119252225
  hyper
gagtatggacgagtcgaaccgggcacaagc

SEQ ID NO: 121542 - DNA, 403 bp, Homo sapiens
  chr11:119252459-119252862
  hyper
tgttcctactgtggcgtcattagagcccggcctccggctggggccacccaggcaaccgatatacacagagaaccacgtggaggaaaagcacgcgagtttggagcgggtggagcaggaacagaggtggactggaatgtcacacgacggggcagctggaaggtattgggaaagaagaggcgtcatgggagaaggctcggaacttgagccctggggcgtatcaactttcagtttttagggaaggctaaacgtcccccactccccttctcactgggctgggggaggtcctgttcctcagcctcttctctttttctctgctgtcaaagacactctccgctcattttactttcatgggaccagtgattagtgatgaatgcctgagtgggtaaacggaggcactgagtca

SEQ ID NO: 121543 - DNA, 140 bp, Homo sapiens
  chr11:119292764-119292904
  hyper
gcacccgcgagagcgcgcagggcattgcctcggttgagtgcgcccgggtgcgcagggcgcaccactagacgagttcagggtccctggcgctcagccccttgacgggtgaggctaggatcccgcggcggctgcagctacaa

SEQ ID NO: 121544 - DNA, 116 bp, Homo sapiens
  chr11:119293203-119293319
  hyper
tccctctcaagcccccggcgggcctcatccttaatccatttccgtattccaatcctctcctttcccaaatgagtcccccttccccctctctcatccttttccagctctcccctccc

SEQ ID NO: 121545 - DNA, 782 bp, Homo sapiens
  chr11:119293352-119294134
  hyper
cggcactgcggcttccttctcctccggtgccccgcacccagcccgccgcgaggtcacccggcagattccctctagctcgccatcctccatcctctccccgcagtttcatccgtcctcctccccgcctctgcgagctgggtttggggacgtctgggtggaatgtagacccacaggctgtccttggtgcccttcctccctgttctccagcgccccagccccagacaccagtcccccagcgggcgaaagcccgggagcgccttccccgaaagacatcagggtgccacgcggcccctgccctgcagaagcatccccctcccgcccctgcctggaaagcaggcccctccctaagctctgcgcccttcttccctgggcgccctcggaccgtggcccgaagcctagtgttgggaagtcttgcatgggcgcctgacggcggtccccgagccccaggtcccaccggctccagttcccacctggactggggtcttccgctgctgcagcctcctccagacgcgccgccgcctccggttgctgcacccagctcggagcccgcagttttcaccggggatggaggagagggggagcggggagccgggggctcagccaatcagaggcggagattgggggagaaaggacggcagggtggggtggggggtggggaaggaagagaaggcggtcccgcattggtgtgagagtggcaggttgcggcggaagggggccctcaccctgtggctggcaggcctggccagggacgggagggttcgggaccccggggatcagggtgc

SEQ ID NO: 121546 - DNA, 773 bp, Homo sapiens; identical to SEQ ID NO: 49033
  chr11:119455153-119455926
  hyper

SEQ ID NO: 121547 - DNA, 30 bp, Homo sapiens
  chr11:119587580-119587610
  hyper
cacacacacacagcacgtgacctcatacac

SEQ ID NO: 121548 - DNA, 313 bp, Homo sapiens; identical to SEQ ID NO: 49034
  chr11:119587837-119588150
  hyper

SEQ ID NO: 121549 - DNA, 270 bp, Homo sapiens
  chr11:119598242-119598512
  hyper
gggttaaatccaggcgaggggactcggtcggatttgcctcctaaacgcattttccagttcattccccagcacaatatgcctgggctggtcccagcctccgtccccaccccacccgtcagaatgggccaccagggccaccccggggtcgggcgcgaggttaacccctcggctgccggcagcccgcacctcgaggaaggacacgcggggcaccctcgggaaagtgggtcatgcagctacttggatggcaggaagcccgcggtgtctcctcca

SEQ ID NO: 121550 - DNA, 15 bp, Homo sapiens
  chr11:119598929-119598944
  hyper
tttgtaaagaactga

SEQ ID NO: 121551 - DNA, 314 bp, Homo sapiens; identical to SEQ ID NO: 8414
  chr11:119599011-119599325
  hyper

SEQ ID NO: 121552 - DNA, 58 bp, Homo sapiens; identical to SEQ ID NO: 8415
  chr11:119600031-119600089
  hyper

SEQ ID NO: 121553 - DNA, 419 bp, Homo sapiens
  chr11:119600420-119600839
  hyper
acagaacccagtctccggagatccctctcctctgcaccacttggacgttccacggagaggcagcggtgcgcggggcgacggggagctgccagagaagtcagtggtgggcatgagtgggtgagacgggcccactgaggtttctggtagagtttcttttctaatccctgctcccttcgggggttccttttccaaaaattgaagcaccccgcgccccgcccttgcccaaacatagcctgaaaacgagctctcctccagtttccaggaccttagttttgagagatttgtgggattcccgcgaaagtggatcgtccagtcagtgtccctggcagggcagggactctccgccccatcccgttcaccacccactacatccgggtgtggtaggatttctgccaaggcgactgcgccctccgggcctt

SEQ ID NO: 121554 - DNA, 145 bp, Homo sapiens; identical to SEQ ID NO: 8416
  chr11:119612122-119612267
  hyper

SEQ ID NO: 121555 - DNA, 212 bp, Homo sapiens
  chr11:119612323-119612535
  hyper
cgtacttttactggggtacggggagccctgccccacggctgtcagctcgggtcgggcgcgccgggtgcccaggaggcagcctcccaccctcccccgcacacgtcgttccagtccctccgccacaaagagaccattgattgggaagagcggccgggttgtggtaggaaggctggtggggacacgcacgcacacacacgcgcgcacacagaggc

SEQ ID NO: 121556 - DNA, 469 bp, Homo sapiens
  chr11:119613000-119613469
  hyper
caccccgcctcctgccgcgcctgacactccgcagggcccgggggtgggtgggcaggggtgcgagggggcgtggggctgggcgcgccggcctggggggaaagccccgcctcccggatgtcgtctcttcgccccctactagctcttgtctcctccccaacccctcgccccaccccctgcctaatttttgccagtggatcatcggcctttggatgaatccgcagcaaatggctcattcggggcgggcccgcctccccatccccccagtgtgcggtctcctctccccagcaaagatgttcggtggcacttacggcccctttttaacaccaggcgaagccaatattgttaggaaggaagaactgctgtggcagctgctgcaaagacaaatcatatgcagtaatgcatcacgggctgagggagggtctgagtgtgcggcagggcagcgcgggcttatcagcgcggaatggctaat

SEQ ID NO: 121557 - DNA, 31 bp, Homo sapiens
  chr11:119884358-119884389
  hyper
ctgttttgcctgttgccggaggctggggggt

SEQ ID NO: 121558 - DNA, 517 bp, Homo sapiens
  chr11:120039672-120040189
  hyper
tgctagcctaggaagcgcatcgagggagcccgctcaagctgaagcgctgcacgagctgtgtcttccttctctccgccgcgaatgcgggcaggatgcgagcaaaagacccggcaaagagggcgccgagggggcgcagccggggcgctgggcggacccagaggggacatggagaggaacgcggaaggtacgcggtagagacggggaggtggcgcgaggcgggacatggtgagcgacccgaggggcgcgcggactgggctcgcggacggggctcgcggacgtagagcagtcgaggcgcggagggggagcgcgcccccgtgtggccaggcggggaggcgccacggccggggccgtgggggcggtgggaagcgctccgcgtccgggctctcagcgttccctggcctgccccggctcgctaggctttgatggctgcttccgctccccataaaggcctgtttcatggccgacgccggcatgggctttacgtctgccctcgggctccctgcgggctgcagagggc

SEQ ID NO: 121559 - DNA, 30 bp, Homo sapiens
  chr11:120081074-120081104
  hyper
gaatgcgggaagcacgggaggcaggactga

SEQ ID NO: 121560 - DNA, 30 bp, Homo sapiens
  chr11:120081630-120081660
  hyper
ggccgcgaggtgcgcggtctctttaaggcg

SEQ ID NO: 121561 - DNA, 30 bp, Homo sapiens
  chr11:120081875-120081905
  hyper
gagcggctcccgggcgccccgaactagccc

SEQ ID NO: 121562 - DNA, 513 bp, Homo sapiens
  chr11:120110623-120111136
  hyper
tggcgccactccgggcgcggtgaggaggtgctgccaggctgggttggagcaggcaggtgttccgcgggatcgagacccgccccggcagcacccccggccccctccccaggtccccagctccatgtatgcaaatcactgctttgcatgggcctggggccaggcgcggggctcctgccagggggcgtggccggcggcccccgccccgcgccgcgtgctcacctggggagtgtggcaatcctggcggcgccgagtgttgcccgggccggagcagcggagcgcgcgacagtggcggcgacggctccggcagcggctcccgcggcggcggcggccgggaactggaggaaggagaccctggcttcgcaggggccccggctggggcagaggcgaggggcctgggggggcgctggctttggccccgcctggggcaggatggtgaatctggagtccatgcacacaggtgaggggcggagggaatgagctctgacaggtgtcactgcgcgtgggcaggggtga

SEQ ID NO: 121563 - DNA, 30 bp, Homo sapiens
  chr11:120126120-120126150
  hyper
acgatggggtctcggcgcccaatttgcata

SEQ ID NO: 121564 - DNA, 630 bp, Homo sapiens
  chr11:120195890-120196520
  hyper
cggtggcccggctccggctctgcgctccatcctcccagccagcaggtgcccccagacccccggctcctcctccgccgccgtcacagcctcgtcctccgcctctggctcctccgcttcctgttgccgcgatccgggccgggagctgcgggcgcccgggcgcccgaggcttcccggtgcgctccgccaggtaaccgctcggcgcgaactgcccggccggggtgggcacggggcccgcgcggcccattggtggggaaggaggcggcagagggcccgggctcgcctccgaaggggagcgggcctcctcctgcctcggacgcccgaggccttcctgcgccaggctgcggcgccagcgggatgcggggataacggtgcctggctccggctcttggtccgggcgtggccgagcgtcgcaggcaccgccgcgcggagatgcgatcgccgtccctgcgaggccccggggcccgcgctcgccgccagccacgcctgctccaaggctcctcctcgccagtctggccctggaacgggagaaaccaggagaggagccttggacctctgagccgcgatggccttccaaatgcccttccgttctttggcaaaaaccaagagcaaaaagccgaaacccacacaggg

SEQ ID NO: 121565 - DNA, 143 bp, Homo sapiens
  chr11:120206446-120206589
  hyper
cccagctgctctcccgcagccctgcgcctccggctcatgcagcgctctccccccggagccggcaggtgcccaggtgagcggggcctgcggaggcagcgaggggcgccggccgggaaccggcagaacgcgtgcagccagaagac

SEQ ID NO: 121566 - DNA, 520 bp, Homo sapiens
  chr11:120207765-120208285
  hyper
gttttgctccaagccgcatccgttgaccccttacagtcggatggtctagatgactgaatggagttttgagttggacttttgtgtccctgacggagttgggcctgatcccagagcactgggggtggggaggaggtgttactgtaaaatgcaagttggataaaaggaggacctctcgccaagggccccaatgagtggcacacagtctactatcaccgacaggttggtatgaattcctccttcgttcggcctcccggaatcgggcccgacctagcaggggagtcggtgattgcagattgcctttggccagcgaagttgacaggcagaggaaagagggttgtttcggagctgtgcagttagcctggggttgctgccgagttatccagttgattggcttttggaaatgtaatttttccggagagaaacttcccttccgattctcagagaagggggaggcaaaaccatgattgtggttttccgcctgtagtgtgcattaggattgtgtactcgtctggaaatcaga

SEQ ID NO: 121567 - DNA, 558 bp, Homo sapiens
  chr11:120382096-120382654
  hyper
gcccctagcctctgccgggcgccgctccccagccgggcgcctctcgctcggccccgggcccccgggcagccgcaagtttgcccccggccgcgcggacccgcgcccgccctgcccgcagcagcccccgccgttcccgccgcccccgccgcccccgcgcctgggctcccgggcgacgctccgaggggcgctggggggcgcgtgcagctgcccgcggggctccggcccggccccgaaggggcgcccccccggccggccgtgcgcggggccgcagcagttccccagctgcccgccgggcggcgccccgcgcctcgctgcgctcctcccgcgctccccgcgccgggctcgctcgcagccggacacagactgccttcagctgcgggcggatcgggctggagccgccacggctgctgcggaagaggaaaaacggccaacagcagccccgcggccggcccggcagcgcccggcccccggctcagcccccggagtgcggagccgaccaggtaagggcagcggccccccgcggcgcccccggcccgctccctgcgctgcccccgcgcc

SEQ ID NO: 121568 - DNA, 974 bp, Homo sapiens; identical to SEQ ID NO: 49047
  chr11:120435028-120436002
  hyper

SEQ ID NO: 121569 - DNA, 507 bp, Homo sapiens; identical to SEQ ID NO: 8422
  chr11:120894618-120895125
  hyper

SEQ ID NO: 121570 - DNA, 189 bp, Homo sapiens
  chr11:121163080-121163269
  hyper
cttgagggagaaaacgacccagacattcgcgtcaaaggaagtgtcgtctatttccctcaacgcagggcacccgttctaggaatgtttgtataaacaccgtaaacctgcctggtaccaccatgaatgacacaagagctagtttaaaaagaaagcaaagaaacaaacgcaaaacccgaaaccgcatcctcc

SEQ ID NO: 121571 - DNA, 190 bp, Homo sapiens
  chr11:121163482-121163672
  hyper
ttgcagagcagtggcgtgcggagcggcggcggaccacctccaggtggggacggtgggtgggcggggaaggaagcggaatacacctgagcgggctgggccggggggcgatggaataaaagaagatggagagacttcagcgcctgggactcgggtgggcgaggcggaaggtgtcctcgcagcacggcttttc

SEQ ID NO: 121572 - DNA, 317 bp, Homo sapiens
  chr11:121323529-121323846
  hyper
tattccaggtaactcgccgggtgcagtgcgtattaccccagggtgtgtgcagagagatgtagtttccggcaggtataggaggggtgcagcttcattttacatctggataaaaaacgggctttctttagtgtatcatcagttggcagtggaggcgagcaccctgcagttgcggtacacttacacagaacagcacgaggtgggggtttccacacttagcattattagcacaataaaagtgggcaaacctgaaagcttgtcgactatctctgtacagtcagacaagaggtgtgtgtatgtgtgtgcgtgtgtaaaggctg

SEQ ID NO: 121573 - DNA, 827 bp, Homo sapiens; identical to SEQ ID NO: 49049
  chr11:121526133-121526960
  hyper

SEQ ID NO: 121574 - DNA, 554 bp, Homo sapiens; identical to SEQ ID NO: 49050
  chr11:121593319-121593873
  hyper

SEQ ID NO: 121575 - DNA, 68 bp, Homo sapiens
  chr11:121800444-121800512
  hyper
cccctctgatttcacgctcacacattaacgagagctgacactggagattagacgcagacagctggaat

SEQ ID NO: 121576 - DNA, 30 bp, Homo sapiens; identical to SEQ ID NO: 49052
  chr11:122086251-122086281
  hyper

SEQ ID NO: 121577 - DNA, 30 bp, Homo sapiens; identical to SEQ ID NO: 8425
  chr11:122311278-122311308
  hyper

SEQ ID NO: 121578 - DNA, 207 bp, Homo sapiens; identical to SEQ ID NO: 49054
  chr11:122526546-122526753
  hyper

SEQ ID NO: 121579 - DNA, 31 bp, Homo sapiens; identical to SEQ ID NO: 8426
  chr11:122626283-122626314
  hyper

SEQ ID NO: 121580 - DNA, 30 bp, Homo sapiens
  chr11:122753414-122753444
  hyper
agcctctcccggggcgttcgggctcctccg

SEQ ID NO: 121581 - DNA, 1086 bp, Homo sapiens
  chr11:122847226-122848312
  hyper
ccattcctggaaacgcgtgatcattcccagttttgccctgcgagcctacaaacccggtaaaagaataagagacctcccaggggaaaaggagaggggtaaagcgcaaagtcaatcagacccccgccccatctattccccaaacaggtgcacgcccggaacgcctttagccttaaccctttggccttcatcttgatttcctaaaatgcactgagaatgaatatttccacacacaacccgaggaacactcacttttaaaatatcagtagcccgtggaacgtggaagcgttgcgggacaggagcgcaacaagttcgggaagcagaaattgctctaggggttttctgtgcccaagtttcccgccgcgcgctggcgccgcgcagtacgcgggaggcagggcgtaaggggcgtctgcgcctgggggctacaaactcaggaagggtgccaggatgcagaaccgcgagctctagaggagaacagggacgggagaggatggaagcgccgcccagagaaggagggagtcgccttagtatttgagtcagagatgggactctggggatgggggatgggggcgagtgggaggttagtgacgagcagtgcacgagtctgtcctgaaactggacgttttaaagatcagattgtggttctatctggatctcggcggagcggaggccccagagacctggtccctttgcagccaaacggactgcccaagaacgggcaaggacttggcgtggagaggaaagaacagagctaggggcaagttgctgaaaggcgagggagaaaggggtctatgatcggagaaaacagagagccgagagctgaatttccagtctgggacgcggtacttgggctggtccctgaccccaaggacgacggacgcaggaaaatgggcgcccgggcgcacagtctcccgtggctgggaccgggagggctagaggggaggcgggaggccgggccgcgggccgtgctggctccgcaccggcctggaggacaggtgggttttgtttgtcttccaggagcggatttccaaggcccgccacgagactggagtctgagtcttccggtccaggagggaaccgcgctcggcc

SEQ ID NO: 121582 - DNA, 260 bp, Homo sapiens; identical to SEQ ID NO: 49057
  chr11:122848368-122848628
  hyper

SEQ ID NO: 121583 - DNA, 30 bp, Homo sapiens; identical to SEQ ID NO: 49058
  chr11:122848985-122849015
  hyper

SEQ ID NO: 121584 - DNA, 96 bp, Homo sapiens; identical to SEQ ID NO: 49059
  chr11:122849413-122849509
  hyper

SEQ ID NO: 121585 - DNA, 315 bp, Homo sapiens; identical to SEQ ID NO: 8429
  chr11:122849808-122850123
  hyper

SEQ ID NO: 121586 - DNA, 356 bp, Homo sapiens
  chr11:122850148-122850504
  hyper
cgctgggactggcatccctgcagagagaagagcaaccaagtgggcagagcgtgggtcgccggagagcaatctccgctccgctcccctcccctcccctagcccccagtgccttcctccgcccctcgcctccgtcagtctgctcgccccaaagcccctcaagcctttctctcaggaatccagggcagaggaagaaaaaaaaaaaaagccgcaagaatagcgcttggagatctttatctggaaagtcatctagaaatacaaacaacaaacagtaaataaaacagaaaagaaaatcggaaaatagatccggaggctgtttaaaaatgtcttcttggagagacttccgtagggtcggccag

SEQ ID NO: 121587 - DNA, 436 bp, Homo sapiens
  chr11:122850771-122851207
  hyper
atttctcgcctctcacgtctcctcgtccgtttcggggtcgcgctagggacccagctacctaatatagtcctcattctttttctcattctttccctctcactccaagcccagcgaagcagaagggtttgaggggtttttccatggccgggtccggggagacttgtctttcctgaccctcgcaggcttgactctgtctgagacgcaccaagcagagagaagctgccacaagcaacatcggccaatcccagagaaaataaacaaacataacaacaaccagtgcgggtacttagggctttggccactgctgtatgggaggaccaccggagcagctgagaatagattgtcaccggcgggtggtgaagccagtgcagagatgcggacctggatttacaaacacttttagctttgttctggattccagcgcgcacaaactgcc

SEQ ID NO: 121588 - DNA, 411 bp, Homo sapiens
  chr11:122852370-122852781
  hyper
gagattcatcttgagcggagcacctgccacaggacaagggccgggacgaagtggaggacgcaggcagagtctccaagcctgctcgaaagccggcaaccaccctccgaggctcgaatctccgctgctctctcccgggcctgggctaccccgggcgctggagaggcaagaagacaagctcctgggtaggttgggtctctgtgttggagaattggcagcttggagaggggggccgggagagccaatgacgaggctgccagaggcagaggggagggtgcgggaggctcggggcggggcggggagctgtccgcggtgctgaacaccaccggccgagcctgggaacaacagagcccgcagggttcttgttcctaccaggtttctcgacctcaatttctgccccgtcactgcaggggc

SEQ ID NO: 121589 - DNA, 884 bp, Homo sapiens; identical to SEQ ID NO: 49065
  chr11:122854781-122855665
  hyper

SEQ ID NO: 121590 - DNA, 188 bp, Homo sapiens
  chr11:122932839-122933027
  hyper
atgagaccggtttccgcccgccaccctgcctcttataccctatcttagaaccttccagaaggggcccgcccctgctgcctgccattacggcttccccggccaatagacgcccggctgcccttacaagacccaatcacaagcccggctccactcctcgggcctcgcccccttccgcacccaccccaccg

SEQ ID NO: 121591 - DNA, 30 bp, Homo sapiens
  chr11:122934099-122934129
  hyper
cgacgctttgaaaacgtgactgagctggtg

SEQ ID NO: 121592 - DNA, 1185 bp, Homo sapiens
  chr11:123065522-123066707
  hyper
ggctgcagggacacccggtcagaaccggcgtctttcccggacgcagggctgcgtttgcccacggccatccaaactcccgccctcccagaggcactcacctagcaagaggagaaggaggagggacatcccgatccccggacgcgggcgcttccccgctcagctgctgcttggctccggggcggccgggcgcctccgacggacctcgggcgagctgggcgcggcgcctcggggtgcgcgcgaggtggctgcagccatgtgccgggcgggagccggccccgcgccccgtgcccctgggggcagatgggctcccggcgctcgccccaccagctggcgcccggacgggagccgggaccagggtcagggaggaaaacgcgaggcgaaaaggcgctaccgcttcgtggaacacttttccctgtttggaaagaaaaaggagtgaagaaagagagagggaaaaaaaaaattcagctggaaccacatggttgcctcctaccgcagcccctccctctctctctcgctgttccctccttccctccctccctcccgcgcggcgtttggggtttgcggtgggggccggtcggggagaagcgtgagctggccgggcagggagggccgggggagacctggggccgtgcagaggcgggtgggttgagaggcgccgggcgtaggattgattctttgcaggaggcattggtgacacctcggctgagagcccatggacgaggccttgtccgttcctagagctctgctctcacttggtccttctctccacttctctctcgcttcttttttactctcgtttctctctgcttccacgtctctcacaaatctggcgtttctctcttccatctcttcctctctaggtctccttgttcgcattcttgcctctccctcctcgtctcctcatgccctctcccctctgtcctctgcgctcttctcgcctctcctctccctccccgtctggttctgttagtgtaaagccaccagactgaccaggccgacggcggggcgcggaagtgggtgcgaaggcagccagcggccggccgaccagggctctccccaccgactgcctgctttggcacccggctaccccccttggcctggctttcctggggcctttcgcgttcgctcgctttctactgtcggtatttgcagcagcgctccctcaggtcccgagcagagctaagc

SEQ ID NO: 121593 - DNA, 30 bp, Homo sapiens
  chr11:123066948-123066978
  hyper
tgggttccgcggagccgagcagccccgccc

SEQ ID NO: 121594 - DNA, 31 bp, Homo sapiens; identical to SEQ ID NO: 8436
  chr11:123084067-123084098
  hyper

SEQ ID NO: 121595 - DNA, 450 bp, Homo sapiens; identical to SEQ ID NO: 49068
  chr11:123172412-123172862
  hyper

SEQ ID NO: 121596 - DNA, 149 bp, Homo sapiens
  chr11:123172915-123173064
  hyper
cgtggttgacgaagccattccctccttgctacttgccttgtgtgatacactgtcacggcccgggcttctggcttggtggaggggacaccaccgcggctccggctgcggacttcgggctcctcccctgagccaggcggagagcgctgccc

SEQ ID NO: 121597 - DNA, 618 bp, Homo sapiens
  chr11:123228788-123229406
  hyper
cgttggtttccgcactaaacttgatggtctgattttaaaggttgattttaaagaaactgtctggttgtatgtccccgagttacactgcagtgctaaatgttggagcgaggcaataccgggagaatccaggctgcaggcttcacccagagagggagggtgaggggaggagagagacggagagaggagagagggggaatgaaaggggagagagagggaccaagaccggcgagcgggagacaggagcggaaaccacagaggtagagtcagggccgacactgaagaaacgtagatgcacagggaggggccaatattagtgtacagagagaaagagggaacacggtgcggtgacacctagcctcggagacagtgggagctccgagcccacggagagcgggggagttccgcttcctcccgccccagcggctcccgccccgcctgggcgcagccggccgtcccggctccgagggtgcagcgcgcccgggcgcagcgcgagtgcgtggagccgggctccagcacgaccccgccgctcgggtttgggtgtcctcaggctccgcgctcctcctcccctcctccagatgggactggctctcctctttgcaaagccaggctcgcggggag

SEQ ID NO: 121598 - DNA, 31 bp, Homo sapiens; identical to SEQ ID NO: 49071
  chr11:123229461-123229492
  hyper

SEQ ID NO: 121599 - DNA, 205 bp, Homo sapiens; identical to SEQ ID NO: 8440
  chr11:123300823-123301028
  hyper

SEQ ID NO: 121600 - DNA, 1044 bp, Homo sapiens; identical to SEQ ID NO: 49073
  chr11:123301082-123302126
  hyper

SEQ ID NO: 121601 - DNA, 31 bp, Homo sapiens; identical to SEQ ID NO: 8442
  chr11:123326582-123326613
  hyper

SEQ ID NO: 121602 - DNA, 918 bp, Homo sapiens
  chr11:123524694-123525612
  hyper
gctttgggccctaagcgaccccactggacctccccagttcgagggagccgatcagccgctccgcgcccgctctcgccggcgctcagcaccacggacagtcgcctccccgcccaccccggaactccagcttccactcgcgcccctgcctcgctcgtttgcgcccagggtaagctcagctcggaagggagtcgcactgctggcctagcagccaggctgtggaagggtccaggttgattcacctctcgcctccccaggatcggttgcgttccgactggaatcctcccagccccgcggctcctgcttcgtccgccctaactgcttctccagctgggcgtgaccccactcccgaagccgccggggccgcccgtctgggctacagaatgcgttccacgtcggtcccgtccacgcccgccctcggctccctggggaggtgcagcggggccgggaaggaagcggcagctcccgttcggccggcgatgtcagaggttggggggtgggtgtagaggcggagccccttcccgggagctcgcccccggatggtgcggggccccgaccctgggtggcaggtgatcagcaacccttctctaggcccccaggccgtgtgtgctgtcagccctgacatgcgcaggcggctctccgccaccaccaccgccccggaccctccccctagtgcacactccccaccccctgatgggcgtgcccctcccaggcccagcgccgcgccgagcgggggcggagccgggagcggcgcagacacttccagccgggatatctttgctcgcgcgctcgctggtctctccaggtctccctctcgcgcctccgcacctcccccgagctcgggcgcaccgccgccctcggctcacgccctccaggcaaacccactccgctcccgcacggacttgccgggtgtagctccgg

SEQ ID NO: 121603 - DNA, 30 bp, Homo sapiens
  chr11:123612005-123612035
  hyper
aaggaagccgggagcgccatccgtgtcccc

SEQ ID NO: 121604 - DNA, 30 bp, Homo sapiens; identical to SEQ ID NO: 49076
  chr11:123612523-123612553
  hyper

SEQ ID NO: 121605 - DNA, 161 bp, Homo sapiens
  chr11:124492593-124492754
  hyper
gctaagcacacggccgccggccctccctcctctcctcatccagcactagcccccagctgtctctttcctcccggtgcccacgatcgcaccgcccagaccaccctactctccctgccccggaagttacacactgccgacaccgggacgtaacttccgggaag

SEQ ID NO: 121606 - DNA, 30 bp, Homo sapiens
  chr11:124493227-124493257
  hyper
agtgttggcttttccgtatacgttactact

SEQ ID NO: 121607 - DNA, 30 bp, Homo sapiens
  chr11:124543510-124543540
  hyper
gggtccggccgagccgggccgcctcacctg

SEQ ID NO: 121608 - DNA, 406 bp, Homo sapiens; identical to SEQ ID NO: 49077
  chr11:124587804-124588210
  hyper

SEQ ID NO: 121609 - DNA, 30 bp, Homo sapiens; identical to SEQ ID NO: 49078
  chr11:124588469-124588499
  hyper

SEQ ID NO: 121610 - DNA, 30 bp, Homo sapiens
  chr11:124609926-124609956
  hyper
ccacccccgccctgcgccagccttcgtccc

SEQ ID NO: 121611 - DNA, 250 bp, Homo sapiens; identical to SEQ ID NO: 8444
  chr11:124616910-124617160
  hyper

SEQ ID NO: 121612 - DNA, 30 bp, Homo sapiens; identical to SEQ ID NO: 49080
  chr11:124629785-124629815
  hyper

SEQ ID NO: 121613 - DNA, 259 bp, Homo sapiens; identical to SEQ ID NO: 49081
  chr11:124630112-124630371
  hyper

SEQ ID NO: 121614 - DNA, 162 bp, Homo sapiens; identical to SEQ ID NO: 49082
  chr11:124630410-124630572
  hyper

SEQ ID NO: 121615 - DNA, 493 bp, Homo sapiens
  chr11:124631502-124631995
  hyper
gctggggaattgacacgaagtgcgtgtgtcaagcctggggaccaggggtatttccccgggggatcttcctcatcagcttgtatgtggggtcggggatgagagggggctagagttaagtccttaagctctttagccagtgtctcatctagcggctcagctcatccggctctgctgggtggggggtggggagtggacagggtgaggaatggttccgataactcaccccagaggtatccaggtcttccgagagatgcccttacctccccccgccatccgcccccacacccaaactgggggctgtccccgacaaagcgagaagtcagcgccagccagtgatgccctggagtgggattaggaggtcaggggaggagggcgagtcgtgggacccagttccgcagcagtggccaaagttctccctcagggtcgaactcaccccatcccgcatcccaagtcccctccaggtccgggtttcactcaccgagggcactcagcc

SEQ ID NO: 121616 - DNA, 30 bp, Homo sapiens; identical to SEQ ID NO: 49084
  chr11:124669465-124669495
  hyper

SEQ ID NO: 121617 - DNA, 30 bp, Homo sapiens
  chr11:124669890-124669920
  hyper
agctgctggtaccgcgcctccaccagccgc

SEQ ID NO: 121618 - DNA, 30 bp, Homo sapiens
  chr11:124670162-124670192
  hyper
cagcgatggatttccgtcgctcaggccacc

SEQ ID NO: 121619 - DNA, 30 bp, Homo sapiens
  chr11:124670411-124670441
  hyper
tgccgggcggaggtcgtccactcccctggg

SEQ ID NO: 121620 - DNA, 30 bp, Homo sapiens
  chr11:124670730-124670760
  hyper
tccaggatggggaccggggaagcctctgga

SEQ ID NO: 121621 - DNA, 122 bp, Homo sapiens
  chr11:124709069-124709191
  hyper
tgtgtccaaagtcccgggtcacctcggcctggaatccatctaactcagctgcaaaccagaagacgcggcctgggaggggcgtagagccctcccccacctccccgggctgggtgactgtcagg

SEQ ID NO: 121622 - DNA, 833 bp, Homo sapiens; identical to SEQ ID NO: 49085
  chr11:124709233-124710066
  hyper

SEQ ID NO: 121623 - DNA, 30 bp, Homo sapiens
  chr11:124710324-124710354
  hyper
tctgccacactaccgcgttccctgtgggat

SEQ ID NO: 121624 - DNA, 346 bp, Homo sapiens
  chr11:124713063-124713409
  hyper
tcccgctgggaggataattaaagcgccaaacggcggagcgggcgggcagcgttcccgggggcgcatttcatcggggctgattaatgaggccggggagttaatgaggagaaagctaaacgcagggagctgagccgcggaaggcctctccgaggccctggagggggtcctccgaaggcatctcccgccctctctttctagtagcggcttagcgcaagccacatggtgccccaggctcctctcgccgcctcaagccaggggcgggggggaggaggggtcgccccaagtcataccggccgcactgaagtcggtctcctccgcttgtggctaacccggctaaacagcaaaa

SEQ ID NO: 121625 - DNA, 30 bp, Homo sapiens
  chr11:124733312-124733342
  hyper
cagggcattaggaccgggcaggagccgcat

SEQ ID NO: 121626 - DNA, 278 bp, Homo sapiens
  chr11:124735073-124735351
  hyper
gcgtccagaacggaacgctgggcttggggtgcggggcggggactccaactcgcgcgctacgctactcgtgtctcctgctcggatagtgactgtagaggtaagggtgggagggtggagggaggcggattaatcccttaattacgccgtgatcggcgtggcacctgctttccgcctgcccagctcccaggggactccggcactagggggtggagagaaggacgagggaaggaggagggcacgaagaggcaccgaccgtacccaggcgcaccggcaggaga

SEQ ID NO: 121627 - DNA, 1131 bp, Homo sapiens
  chr11:124735374-124736505
  hyper
cgcagaggctgtggaggggcttacggctcccagcccacgggtctcagacccaggggctgggcccccagcccccagtcccgatcccagctgggtcgagccatgctgcgctacctgctgaaaacgctgctgcagatgaacttgttcgcggactctctggccggggacatctccaactccagcgagctgctcttgggcttcaactcctcgctggcggcgctcaaccacaccctgctgcctcccggcgatccctctctcaacggtgagaccctgcctcttggggatatgggatcctgggatggggatgaggtgagagggcggcgtggaagggaaggagaagcgctcctgtcccgaggtccgggattgagtggcgcctcccagcgcctccctgggtcgtggggtctaagggataatttggagcttcgagcacatgagtgggggtacccgcgggaggtcgagggcttgggagaagatggctactgagtctttttacacctccttcccttcccctacaacgcccaccccaggtgagaagaaccgttgctggtaacgggcagggaagtccgagctaagaaaggcccgggcccagcgcagggagggcagaggagggggcacagtctcccgccggcctcggccaagccaggtcactcggtgacccacccaggcagctggtcttcggaaccccgaagtttcccaagaactcacttaggaccagaggaagccaaaatgctggatgtgtttgctacggaggggataggggcggcgatcattttaaggaaacttagaagtttgtctttcagcggcgggactctcagccggcccaccccggcagagctgtggcgggcgggcggagctggcggcgaggtcgttaccgctaattacggtgattaataaatgactgggacagcgcgctctcccctagcgccgcggggaagctgcgggagccggccgccgccagcctgcggagaggccggagcgcgccccctgcctgccgcatcgggaacccccgctttaccgggcgctttcgcgtgtggttccctccaggtgcacgcggtccccatccctctgcctcgacccactcgagtctagtgacgagcactgtgctggggactcgaaggtggagagaaaggagac

SEQ ID NO: 121628 - DNA, 670 bp, Homo sapiens
  chr11:124738425-124739095
  hyper
ggtggtccagaaagccggcctagaagtttgtgtcccgatccctctactaaccggcctgtctgtaggcatcttcctttgagacgaggaacgcggaacgtctgccaataaggacatattggatcctgcagagggagagggtaggcaggtggggactgagctccgcagagaagcataggagatggaacgaccagaggattctctttccctctggagcctcaatctctccccacaatttccctgtctgaacgctctgcgccaccccctgtccccagggtcaagggtaggaccggaggacgctatgccccgcatcgtggagcagccgccagatctgctggtctcccgaggcgagcccgccacgttgccctgccgcgctgaaggccgaccccgacccaacattgagtggtacaagaacggggcgcgtgtggccactgtgcgggaggatccgcgtgcgcaccgcctgctgctgcccagcggcgccctcttcttcccgcgcatcgtgcacgggcgccgcgcgcggccggacgaaggtgtctacacttgcgtggctcgcaactacctgggggcagcagcgagcagaaacgcctcgctggaagtggcaggtgagagtcagttgaccgtcagctggttgcttccagagcctggggtaggcgggagggcactgggcaatcag

SEQ ID NO: 121629 - DNA, 31 bp, Homo sapiens
  chr11:124739415-124739446
  hyper
atgcgtgcccccccgcggccacccggagcct

SEQ ID NO: 121630 - DNA, 43 bp, Homo sapiens; identical to SEQ ID NO: 49092
  chr11:124746303-124746346
  hyper

SEQ ID NO: 121631 - DNA, 30 bp, Homo sapiens; identical to SEQ ID NO: 49093
  chr11:124824110-124824140
  hyper

SEQ ID NO: 121632 - DNA, 792 bp, Homo sapiens; identical to SEQ ID NO: 49094
  chr11:124932778-124933570
  hyper

SEQ ID NO: 121633 - DNA, 30 bp, Homo sapiens
  chr11:124981565-124981595
  hyper
gattcactaatcagcgttgctctttcaacg

SEQ ID NO: 121634 - DNA, 30 bp, Homo sapiens
  chr11:124981854-124981884
  hyper
agagagacttcttccggcctcactcgctgt

SEQ ID NO: 121635 - DNA, 42 bp, Homo sapiens
  chr11:125034412-125034454
  hyper
gcaggagcaggcccgcgcccgccgcccgagagcctccggtag

SEQ ID NO: 121636 - DNA, 1625 bp, Homo sapiens
  chr11:125034711-125036336
  hyper
aggcggcggcggcggcgcggcggcggctgctgctgcgggcggctgcctcagagcgcgtgtgttttattccagtccccaagccagagtattattcattgcgacagggcaaggaggagagagggagagagggaggcagcagggaggagagagagggaggcagcagggaggagggaggcagggagcagcgagggacggcgggagcgtgcagagagaagctggggaagcgccgggagagcgcggagcggagcagcgcgaggggcggcgaggccgggcacggaggctgcgagagccccgcgggccgcccgctcccctgcccggccagcgctcagccccgccgccgccgccgccgccgcctcgccgcgcttgggcccgtggccggccgcgcattgtcctcgggtgcaaggagccgggctgcggactcgaatcgccgcgggcccaaccccgtagcgggcgggcggggagctgtgcgccaggagcgccaggggacccgagaataggaacaggcacgccggcccgagcccgggtgcagaaggctcccggccgggcgctccgcggggagaggctgggaaccgcgggcaggctccaggttctctttctcccggcttcgggcgtccttggggccggcgcttactccgcgccaccagcctggagatgctttccagcggctggaggcgggagcggtcccaggctggggccaggtgaccggaggagtcgaggagccgcggccgcggcctggggaggcagggcgaatgagggtttgcagacggatcagtggagacaggggaacaccggcggggcccgggaagccaggatccgaggggctacacgcacggaccctcacccagggaggagcgagaatgtgtagggtcaccggctttccatgattgctggggatctttggtgaggcgggcgtaggggcccgcgcgaggcttgggaatcgggagcccttctggctcgagaactaggggatgagttcgtaaaagagggaactgaaagcgatcgagagcggagagctgagggggatggcgcaggatcccgaatctgccgctcaaagtttgcatttctttcgggttaggagacgggctttcctggctcccgatccccaggaagaaacgagcgaaatgggccgtcctttcccggggctcttcacgggggagccgggggtttccgcgcggtggggagactcgggttgggaattgaggggtaggggcttgtggatcggcctgaattagggctgggttttaggaccagtctagagttcggtttataggatccagactgtttacggaatcgggatcgaggggccgataagtagtttacacgccggccagagcagagggctggaggtcggagttgggggctggaggaacgggtggcgtttttaggattcagtaacaggatcacagctttttcttgtggtggaagctattggaatttggggagggtagcacgaggggtcctgcagctccgcgtgtgaaaaagcgtttaggtaggcgatgaaagtagttgatctgagccatggcaggcgagccccgaatttttgctgcttccccctgaaagtgtttctttaggaggagaggacttgggccacacaggacccggtcctaagagagcgattccgggaa

SEQ ID NO: 121637 - DNA, 30 bp, Homo sapiens
  chr11:125132832-125132862
  hyper
gcccctcgccctccccgaggttgtgccggg

SEQ ID NO: 121638 - DNA, 401 bp, Homo sapiens; identical to SEQ ID NO: 49098
  chr11:125133214-125133615
  hyper

SEQ ID NO: 121639 - DNA, 617 bp, Homo sapiens; identical to SEQ ID NO: 49099
  chr11:125365066-125365683
  hyper

SEQ ID NO: 121640 - DNA, 557 bp, Homo sapiens; identical to SEQ ID NO: 49100
  chr11:125365742-125366299
  hyper

SEQ ID NO: 121641 - DNA, 30 bp, Homo sapiens
  chr11:125439210-125439240
  hyper
tcccgcacgcagcgcgaggcgggaccccgg

SEQ ID NO: 121642 - DNA, 30 bp, Homo sapiens; identical to SEQ ID NO: 49101
  chr11:125439563-125439593
  hyper

SEQ ID NO: 121643 - DNA, 30 bp, Homo sapiens; identical to SEQ ID NO: 49102
  chr11:125462645-125462675
  hyper

SEQ ID NO: 121644 - DNA, 30 bp, Homo sapiens; identical to SEQ ID NO: 49103
  chr11:125495567-125495597
  hyper

SEQ ID NO: 121645 - DNA, 30 bp, Homo sapiens; identical to SEQ ID NO: 49104
  chr11:125495841-125495871
  hyper

SEQ ID NO: 121646 - DNA, 62 bp, Homo sapiens; identical to SEQ ID NO: 49105
  chr11:125757372-125757434
  hyper

SEQ ID NO: 121647 - DNA, 30 bp, Homo sapiens; identical to SEQ ID NO: 49106
  chr11:125773227-125773257
  hyper

SEQ ID NO: 121648 - DNA, 544 bp, Homo sapiens
  chr11:125773516-125774060
  hyper
gaacagagcggggagcgttgcttcagcaccacggagagatcatgactgcagtttcgtgtgggtttttgtatttttgcccccaattccagaaatgctgatcaaaatctcaaaattacaattagaaaactggggggcgggggggaggtggaatttggttctttcgtccaaattgagcggtcattaaatcattagtaccagggatccagggatctataccggattatgcaaacgcatgtaggacgtagaggttataccgaaaggtaatgtttttaacaagagaccacatttcagaataaaagctttaaaaagcctatgtggaacatcacaggtatctagggcaggaacagcagttagagcttgaacagttctgcttcctttccgcaactgtggcattcgaggtcattcgtcatatcaaattcatcagattttgtctccactttgctaaccaattcgctaacctttctgacatcttgtgatgtggaggcggaaatttccagggaaaccgacacggggcgtaaagcgcggcggggagtccggggggctc

SEQ ID NO: 121649 - DNA, 326 bp, Homo sapiens; identical to SEQ ID NO: 49109
  chr11:125774122-125774448
  hyper

SEQ ID NO: 121650 - DNA, 42 bp, Homo sapiens
  chr11:125774480-125774522
  hyper
cgccaccgagccggggggccacagccgcgggggtggagctcc

SEQ ID NO: 121651 - DNA, 180 bp, Homo sapiens
  chr11:125812007-125812187
  hyper
gccgcaccactgcctcgtccaaagacacagggagactcagggagccgccgcttcctctcaggagagccaggtgtgcccagccatcctcaggagccaggggaggcctcaagggggcagtgtagccaacatgccctgatacaggataaacgttagctgagggggatccgtgaaactcagtaa

SEQ ID NO: 121652 - DNA, 30 bp, Homo sapiens
  chr11:125932068-125932098
  hyper
aaatcactgtctctcgcgggcgctctgcag

SEQ ID NO: 121653 - DNA, 56 bp, Homo sapiens; identical to SEQ ID NO: 8455
  chr11:125932493-125932549
  hyper

SEQ ID NO: 121654 - DNA, 436 bp, Homo sapiens; identical to SEQ ID NO: 8456
  chr11:125932556-125932992
  hyper

SEQ ID NO: 121655 - DNA, 128 bp, Homo sapiens; identical to SEQ ID NO: 49112
  chr11:125933200-125933328
  hyper

SEQ ID NO: 121656 - DNA, 208 bp, Homo sapiens
  chr11:126081470-126081678
  hyper
cccgcaaccttggccgtttccccggatccaggggcccgacgcgctccacctgggcgccgccatcttacaaggaagggcggggcgagccaagaccacgtggagaagggcgactacaatgaggcgggagtgggtgggccctgcaggtcacgtggtgcggggtggggcctgggcgagtcacgtggggacggtgcgcgctcagtgcggctgc

SEQ ID NO: 121657 - DNA, 70 bp, Homo sapiens; identical to SEQ ID NO: 49113
  chr11:126138754-126138824
  hyper

SEQ ID NO: 121658 - DNA, 156 bp, Homo sapiens
  chr11:126138866-126139022
  hyper
cgcgcaggactgacgtatcgcaaggccagccaatggcgggtgggagcgggcctgggtggggctccaggagaggtcacggggagacggccacctagagcattgggcggggcagagccctgagggccgctggccaattggcgcgctcgtctgaatggc

SEQ ID NO: 121659 - DNA, 54 bp, Homo sapiens
  chr11:126152944-126152998
  hyper
agtgcggcgggcggcgcttccggagagcggggcctgcgcgctgctcttccccgc

SEQ ID NO: 121660 - DNA, 30 bp, Homo sapiens; identical to SEQ ID NO: 8458
  chr11:126173622-126173652
  hyper

SEQ ID NO: 121661 - DNA, 30 bp, Homo sapiens; identical to SEQ ID NO: 49117
  chr11:126220719-126220749
  hyper

SEQ ID NO: 121662 - DNA, 825 bp, Homo sapiens
  chr11:126225360-126226185
  hyper
ctctggcacccacggcgcccctgcttgcctctgtccgggtctcggaggcgcgaacaccatcccaagcctgcgaccgcgcggcatcacccccgcccttccccctcctccaccccgccctttctacccctcccgggagctcctgggagtcgggccgccgtgtgcgcaagcgtgtccagccccttccccgcccccaacccgggcccgggtccccgcctcccctgcaggcggactcgcccgctcccaggccggacccgcgcccgggacagggacccggccgagtcgagccgtcgcgccagcgctgcgccgccggtcggtgcgcctagcggatcggagctgcgcgcggaaccgtgctgccccgccccgctccacccgtgagggtgagtacgcggcggcggtgcgcgggggcccgcggggcggggcggggcggggagccgcggggtcctcggccgcctgaccccagccggcgccgcgcctcccggagggggtcgggccctgcacgtgggcgcagcgcgggtcggggtggggctgccacagccctgcggagctgctttccggggtccctttccctggaccagattttcgcgggaagccggatcctctccgttcccttggagtgagcaagcgggacagttctgcggaaagtttccgcccccaatcccccagccctgcgcccggactgaagcggcggcccccacctccagcatcctcgagcgatggtttctcccacaactaccccggtcaggtccagcacttgggagctgactgtgctggaggtgacaggctttgcggggtccgcctgtgtgcaggagtcgcaaggtcgctgag

SEQ ID NO: 121663 - DNA, 30 bp, Homo sapiens; identical to SEQ ID NO: 49119
  chr11:126322262-126322292
  hyper

SEQ ID NO: 121664 - DNA, 30 bp, Homo sapiens; identical to SEQ ID NO: 49120
  chr11:126431363-126431393
  hyper

SEQ ID NO: 121665 - DNA, 30 bp, Homo sapiens
  chr11:126479483-126479513
  hyper
ttctggggggacctccgatgcatgctcact

SEQ ID NO: 121666 - DNA, 332 bp, Homo sapiens; identical to SEQ ID NO: 49121
  chr11:126870168-126870500
  hyper

SEQ ID NO: 121667 - DNA, 270 bp, Homo sapiens; identical to SEQ ID NO: 49122
  chr11:126870524-126870794
  hyper

SEQ ID NO: 121668 - DNA, 30 bp, Homo sapiens
  chr11:126871089-126871119
  hyper
tgcgcatctttccctcggaaggacttggcc

SEQ ID NO: 121669 - DNA, 768 bp, Homo sapiens
  chr11:126873030-126873798
  hyper
tggattaagtgatgagctgcccgcctctaaaaggaccaggaggcgtatcaagcctgagtgccggaaaacccacggcaatcttcagcagccaccacgtggggcagagaacgcgagcagtacctgcaggacccacagccggtcgggctctggcgccagcctcgacggcggccccgccatctccgcccggctgcccgcggcctcacctcctccgggggctcggttagcctcctggcgctgcaaggctgcctgcgcgcggttcgctccgggggagggaggaggagggaggcggcgaggagccgacggctccacctgatggagaagcgcggagagtccctagacctcggagtgcgctgcaagaggggagaggagagagaccgccgcccctgctggaagccttcgcgtccgggggcggcgcgcgggggaaggggtctctggacagtcggtggaggcggcagccctacagagacagccgaaagccagcaacttggaaaaccgcccgaattctgggtttctgcacatccaggctggctccaggtctcttgtgcccaccgtgcaagccggcgggatgccagcaggtggcatcctctccagcgtttcttcgccaggcgtggagtccggaggccgaatccatcagtccccagccccctccccaagcctccggtgccaagtgctgggtcctgtgagcccctggcccgccccccacctccgccagcggggcgagccggagctgggtgacccagaccctcgcggaggcgggagcctacagag

SEQ ID NO: 121670 - DNA, 30 bp, Homo sapiens; identical to SEQ ID NO: 8461
  chr11:127423281-127423311
  hyper

SEQ ID NO: 121671 - DNA, 999 bp, Homo sapiens
  chr11:128391754-128392753
  hyper
cccccggcctctggccgagagcttgggtgggggcctcggccgtcgccactcacccggggaggggaaaagctccagatcgactttttccgtcttgatgatggtgagagtcggcttgagatcgacggccgccttcatggtgccaggagtgggggacgtacgggatggtagcaagtttgcagttactgttgtttttctttttaatgaggattagtaacagggggaaggggacgggggaaatccgactttcttcccaaaaatctcaaattcccgctgcctttctttcccccgcgcccggacggtgcgcgcccggcactccaggggaagttggcactttgcggcgaagtgagcgcgctcgggtcccagcctcgcccgcgccgcgcccgctcctcctgcccggccctcgcccgctccctcctctccgccggcggctgcctcgttcgctctcgatctcccggccgctctccctccctctcgccctcccgcgctctcccctcctctttagggcgtttctcgcggcgccgcgtctcggccgctgggtccgcgcgccctgggccgggcgatgtccgcttgggggagcgaggggcggggcgtcggggcagggcggggagccgggggcggggccgagcaccgcggccaatctccgcccgcggcccaaagcgaaaggaagggctggcgagcgcggggccgggccgcgaccgcggaggagcagtgcgtggagccccgggcctcggagcccaggcaggggcgggaagggccgggagcgggtgtgcaggctgggtgcacaggccgcctccaccgtttcgggaaagtccgtctgattctccacgcattcttgagggcttggtcacccgctctcgccccctcccagtagcagcatagttttccaagtgcgtgtacatcattcattcacaaagactgacacacaggacgtgaggcatgtggatgaaggcgagcgtgcaggcaggcgcaggggattcgtgagcccgtgtcctcaaaggg

SEQ ID NO: 121672 - DNA, 127 bp, Homo sapiens
  chr11:128418567-128418694
  hyper
gggcgaggttcgggccgaggcagcccacgcccgtcctctcctccctcctctcctgggagtggaaagctcgtcccgggacgccccagctccgggccggcttcgcctgcgcccgcgttgctggcagcgc

SEQ ID NO: 121673 - DNA, 153 bp, Homo sapiens
  chr11:128419144-128419297
  hyper
ctctcacgcgcccctcgcccctcgcccctcgcccctcgcccctctcctgggctccggctcccacctcatcggcccacccgaagatgtccattcacccagtgccgcggccggagccgagcggggcctgacgccagccggcggcgtccaccgtcc

SEQ ID NO: 121674 - DNA, 30 bp, Homo sapiens
  chr11:128557250-128557280
  hyper
ctggctgggtggggcggggagtgcgcacca

SEQ ID NO: 121675 - DNA, 571 bp, Homo sapiens; identical to SEQ ID NO: 49127
  chr11:128562614-128563185
  hyper

SEQ ID NO: 121676 - DNA, 499 bp, Homo sapiens; identical to SEQ ID NO: 49128
  chr11:128563336-128563835
  hyper

SEQ ID NO: 121677 - DNA, 687 bp, Homo sapiens; identical to SEQ ID NO: 49129
  chr11:128563856-128564543
  hyper

SEQ ID NO: 121678 - DNA, 274 bp, Homo sapiens; identical to SEQ ID NO: 8466
  chr11:128564602-128564876
  hyper

SEQ ID NO: 121679 - DNA, 543 bp, Homo sapiens; identical to SEQ ID NO: 49131
  chr11:128564991-128565534
  hyper

SEQ ID NO: 121680 - DNA, 30 bp, Homo sapiens; identical to SEQ ID NO: 49132
  chr11:128729914-128729944
  hyper

SEQ ID NO: 121681 - DNA, 777 bp, Homo sapiens
  chr11:128760449-128761226
  hyper
ggcgcggaggacgccggctctgcccacgcctgggcaaggttgagctccgttccctccgggctgctcccgcctcctgtccgtgcagggcgcgtttccagccatcgccgcccagccgccgccgcacgccggggagagatcgtccggggtgagcagcgagcccggggacagctagcctgggtcctgtccctggacctactccccctgcagctggcggatcaggcccccggaccctcactccacggcgggaatcagagccgtcgggcgggggatgcagcgcccagactgtggctcccccgccttcccaaaggaatccccccatctgctccatccctctcgggaaacggcgaaatgctgccaaccgtccgcttagcgcaccgcggagcgactgagcagccccgccgaggctccgagccaagatttctgccctaatagtttctcccttctttctgtctgctccaccgcacccactaaatacgcggcgctcacacacggacacgcgtgacacgcggcgctcacacacaggcatgggacgctcacacgcgcgcgcgcgggtctccgtccctggcaccccgcagcaggggtgcagccgggggcagggggagccgggggagggcgcagggggccgcggggacgcgagcggagggctggatgcctgccgggctctctctccgccttcctcttccctcccagtcctgccgagctgacggcgtcccggatcacatggagcccccgccccaccccagcccgccccccgccgccaacgccggtggcccttcc

SEQ ID NO: 121682 - DNA, 30 bp, Homo sapiens; identical to SEQ ID NO: 8469
  chr11:128775011-128775041
  hyper

SEQ ID NO: 121683 - DNA, 541 bp, Homo sapiens; identical to SEQ ID NO: 8470
  chr11:129148498-129149039
  hyper

SEQ ID NO: 121684 - DNA, 835 bp, Homo sapiens; identical to SEQ ID NO: 49138
  chr11:129149096-129149931
  hyper

SEQ ID NO: 121685 - DNA, 162 bp, Homo sapiens
  chr11:129234230-129234392
  hyper
ggcagtagcggccacgctgcaaccctgagaagtggcgggtaccttaggatcctttctgattgcagacgtggtccagagccaaagcggcttggctgggaaggctccgtgagacgccggggcttgattgctaggaggtgaaaaactttcgagaactcagagcaa

SEQ ID NO: 121686 - DNA, 461 bp, Homo sapiens; identical to SEQ ID NO: 49140
  chr11:129242780-129243241
  hyper

SEQ ID NO: 121687 - DNA, 352 bp, Homo sapiens; identical to SEQ ID NO: 8474
  chr11:129243304-129243656
  hyper

SEQ ID NO: 121688 - DNA, 405 bp, Homo sapiens; identical to SEQ ID NO: 8475
  chr11:129243895-129244300
  hyper

SEQ ID NO: 121689 - DNA, 236 bp, Homo sapiens; identical to SEQ ID NO: 49143
  chr11:129244440-129244676
  hyper

SEQ ID NO: 121690 - DNA, 1361 bp, Homo sapiens; identical to SEQ ID NO: 49144
  chr11:129245102-129246463
  hyper

SEQ ID NO: 121691 - DNA, 30 bp, Homo sapiens; identical to SEQ ID NO: 49145
  chr11:129461155-129461185
  hyper

SEQ ID NO: 121692 - DNA, 30 bp, Homo sapiens
  chr11:129565156-129565186
  hyper
ctggccaccacgtaacggagtggacatcaa

SEQ ID NO: 121693 - DNA, 30 bp, Homo sapiens
  chr11:129565651-129565681
  hyper
ggtcgcaggagcctgcgaggaaggtggggt

SEQ ID NO: 121694 - DNA, 545 bp, Homo sapiens
  chr11:129685679-129686224
  hyper
tggagcggggcggggcgcagcggggcggggcgggcctggagctgcacctgcttctgggcggacgcacttggcgcgcggcgcgggctgcagacggctgcgaggcgctgggcacaggtcagacgtccgtacccgcagggggctcgaacctggaggagggctcgaagggagagggggccccgccaaggagcggggctgtgatggagaggaggttccgactcgcaggggacctgcgggggaggggacgcggacagggaggggctctgggacaggggtgaaggctgcgctaggggaggacgggaggggatggagggccctggtgtcgcggaagcccagctggggccccctccgggctgcggaaccggtgcgcacactactcccaccgcccccgagtgcctctgtccggctggccgcggccctggaacgaatattgctcagtcccccgcgagtcaggtctgccgcgttgcccggtgaggggaaggtgtgaagccccgggcctccgtctgcccggtgagtccggggacgcgcgcccccggggatgccatctg

SEQ ID NO: 121695 - DNA, 217 bp, Homo sapiens; identical to SEQ ID NO: 49146
  chr11:129765559-129765776
  hyper

SEQ ID NO: 121696 - DNA, 267 bp, Homo sapiens
  chr11:129793270-129793537
  hyper
agtggaagctgcgcacgtgttttttcacctggtgataagaaccacaggaaaattcaggggacgcaggcaccaaatgaaatgaccaaaggcagcttgtcaacgctagagggagccaaacgcattaccatgggttttcatcaaccccgccgaggaatccaatcagatgtgataattggcctcaataacacatactgtccctgtcacaaagaaataaaacaagtagccagaaagccttagaaatccgaacctccccgatgacttgaaacg

SEQ ID NO: 121697 - DNA, 30 bp, Homo sapiens; identical to SEQ ID NO: 49147
  chr11:129872500-129872530
  hyper

SEQ ID NO: 121698 - DNA, 42 bp, Homo sapiens; identical to SEQ ID NO: 49148
  chr11:129872811-129872853
  hyper

SEQ ID NO: 121699 - DNA, 30 bp, Homo sapiens; identical to SEQ ID NO: 8478
  chr11:129873363-129873393
  hyper

SEQ ID NO: 121700 - DNA, 239 bp, Homo sapiens
  chr11:129939593-129939832
  hyper
gccgggcggggggcgcgcggttggaccgggcgggaggagcaggctcttccatctcctgattgggtctggaccgcaagggggcggggtcttgaggggttctgcgggccggcattgggagccgcagaaggagggcgtggtaatatgaagtcagttccggttggtgtaaaacccccggggcggcggcgaactggctttagatgcttctgggtcgcggtgtgctaagcgaggagtccgagtgt

SEQ ID NO: 121701 - DNA, 172 bp, Homo sapiens; identical to SEQ ID NO: 8479
  chr11:130029946-130030118
  hyper

SEQ ID NO: 121702 - DNA, 31 bp, Homo sapiens; identical to SEQ ID NO: 8480
  chr11:130064639-130064670
  hyper

SEQ ID NO: 121703 - DNA, 42 bp, Homo sapiens; identical to SEQ ID NO: 8481
  chr11:130066273-130066315
  hyper

SEQ ID NO: 121704 - DNA, 54 bp, Homo sapiens
  chr11:130083120-130083174
  hyper
gctgttgttcaggtcgacggccacacggtggcgatgttgcgccgttccagggcg

SEQ ID NO: 121705 - DNA, 264 bp, Homo sapiens; identical to SEQ ID NO: 49153
  chr11:130183473-130183737
  hyper

SEQ ID NO: 121706 - DNA, 1224 bp, Homo sapiens
  chr11:130297484-130298708
  hyper
cagccatggacgcatcggccaccagcagcgtctccacgaagcgcgcctcagacacaaaccgcttggtcctactcgtggcccccaggggcggtggcggctcgctagcgccttctgcctcctcttcttggctctcctcctcgctgtcctcctggtggtctcctctctcctgcctctgaccctctcccgtctccacctcccactcgggtcctcgcgggagggggcgggctccggcgggaccccagcgctgcaggcggtgcggctgagccagggagccccccgcgccctgcggctggatggtgaactcctcgccgtccagcaggaaggagccgctcagcccgcggcacaggctgaccgccgccagcgactcgggctccccattcacggtgccggagaagaagcagccgcgcagcccccgctcgcccccggtcgcccggccggagcccccgaggcgctcgatcttgaactcgggcgctaggaagctgtcgtcgggcgccaggcgcagcacgaagcccttgccgaaggcggacaggtggagcgcgagctcgcccgcgctgccgggcaaccgcgtgggcaccaccagctccgaggcctgccccccggctgcgggccgggccggggcgccgcgggccagcggcagcagcagcagcagcagcagcaggagcggaggccaccggggggcggcgggggcggggagcatgggggctgcggcggtggctgcgcgcaggagagggaagaagcccgccaggcgcgggcaggtgctggcggcccgagcgcggcccggccgctctctccaggaaaagcggaatcaatcgggtgcaaggccgactcggcccgcggggcccggcggcgggagcgctcccccggcggcccctctggctggcgcagcccgctcctcccgcgccgccgcccccgagccgagcgcgagcagctggccccggcccgcgtgcgcccgtcctccgcccctgcccgcgccagccccgcgcagccgcctcctgcctcctccccaccccgggaagcaccgagtgggctgccgagcccttcttatttatacttccttcccggcttgacataagaggtttatttttgatctctcactattcccgtttcccctcccctgggatcagagagagaaactgaaaagagggagagagagtggagaaaaaaaaattgggatgaaatgcaaaaccaatcaggcagcgagacccgtccgccacccgcccccct

SEQ ID NO: 121707 - DNA, 1531 bp, Homo sapiens
  chr11:130318226-130319757
  hyper
agagtgaacgctgtccgcgggggcagaagcgagtgaggcgtcgggacagtggggcataaccaagagcaaaacgcaaactgagacttcagcgccggtttctcgggccagcccacgcctcctgcctcagctcaatgccactccctccccgccaagtggctctccgctctggaggcgggaccgagttctccggtggcccctggaggctccggcagcgagctctgggaggctgggaggggagtgaggggaggggcgctgactgggccgtccaaagaggagggggcctttaataggctcgcccagcgcctggcttgctgcgctgcgagtggctgcggttgcgagaagccgcccggcaccttccgctagttctcggctgcaaatcttcgtccttgcacttgacagcgattgtacttaagctcccagggcgcgctttgcttggaaaggcacaggtaggaagcgcgggctgccgggtgcacgctcgccgccctgggaggagtctccctcccttggctctcctttctgggaactgccggctgtcccgtagcgttggcggttccagagtgcgggctgcacggagaccgcggcagcggccggagagcccggcccagccccttcccacagcgcggcggtgcgctgcccggcgccatgcttctgctgggcatcctaaccctggctttcgccgggcgaaccgctggaggctctgagccagagcgggaggtagtcgttcccatccgactggacccggacattaacggccgccgctactactggcggggtcccgaggactccggggatcagggactcatttttcagatcacagcatttcaggaggacttttacctacacctgacgccggatgctcagttcttggctcccgccttctccactgagcatctgggcgtccccctccaggggctcaccgggggctcttcagacctgcgacgctgcttctattctggggacgtgaacgccgagccggactcgttcgctgctgtgagcctgtgcggggggctccgcggagcctttggctaccgaggcgccgagtatgtcattagcccgctgcccaatgctagcgcgccggcggcgcagcgcaacagccagggcgcacaccttctccagcgccggggtgttccgggcgggccttccggagaccccacctctcgctgcggggtggcctcgggctggaaccccgccatcctacgggccctggacccttacaagccgcggcgggcgggcttcggggagagtcgtagccggcgcaggtctgggcgcgccaagcgtttcgtgtctatcccgcggtacgtggagacgctggtggtcgcggacgagtcaatggtcaagttccacggcgcggacctggaacattatctgctgacgctgctggcaacggcggcgcgactctaccgccatcccagcatcctcaaccccatcaacatcgttgtggtcaaggtgctgcttcttagagatcgtgactccgggcccaaggtcaccggcaatgcggccctgacgctgcgcaacttctgtgcctggcaga

SEQ ID NO: 121708 - DNA, 564 bp, Homo sapiens
  chr11:130786090-130786654
  hyper
tggccttcacactgccccaggcggaaggcctcttcggggcctcggggcgggcgctgcaaggccctggggcccacggacacttacacacgcagcgggcagcggccggcgaagactgggtcacacgccgccgggaaccgcgcgcccacactcagccccgacctgaagtggactcatcgcggtcctctccgggagcctcggccctctgccgccgtaaacctgggcgactgcgctccgcagccgggcctgtgtgaaggctgaccgccggccggccgccggcgacagcttccgggtcgacgtcgacgggagcgaggcatgctgggagagcgtccgcgcgcgccccgaggagcggcgctgcccggcgccctctgctggcgaggagccgccctgacggccctgcgcgaggtagtctctgagcctgagcgtgagcctgagcgcgcacggggcgcgtgctcgccaagagctggcgcagatttccgaagtgccacgaaacagccgccgcagcaatcaccgctaagacccagacttccaggcgctttaaaacgcgtcctagttctggttattaaa

SEQ ID NO: 121709 - DNA, 201 bp, Homo sapiens
  chr11:131056755-131056956
  hyper
ctcttggagccgccccgaaagcctgcctgccacaagagttcctgtccttgcgagaggcggagcagctttgtggctgatctcccatctggttgacaggaatgacagctcagagttgtgctcctggaggggaaagtgctgagggcagagaagaggaaagaaactgcagctaggggttgcccacgcggtcgtggcaggctctaa

SEQ ID NO: 121710 - DNA, 53 bp, Homo sapiens
  chr11:131558064-131558117
  hyper
gggcacccgcgccccccgagccgcgaggctgcctccaccgagctggagaacag

SEQ ID NO: 121711 - DNA, 319 bp, Homo sapiens; identical to SEQ ID NO: 49158
  chr11:131564787-131565106
  hyper

SEQ ID NO: 121712 - DNA, 17 bp, Homo sapiens
  chr11:131780313-131780330
  hyper
tgcacagcctgggcccg

SEQ ID NO: 121713 - DNA, 202 bp, Homo sapiens; identical to SEQ ID NO: 49159
  chr11:131780876-131781078
  hyper

SEQ ID NO: 121714 - DNA, 293 bp, Homo sapiens; identical to SEQ ID NO: 49160
  chr11:131781293-131781586
  hyper

SEQ ID NO: 121715 - DNA, 15 bp, Homo sapiens
  chr11:131781648-131781663
  hyper
cgctggttccctggg

SEQ ID NO: 121716 - DNA, 30 bp, Homo sapiens
  chr11:131996390-131996420
  hyper
atggctggcagtgtgcggggacttcgcagc

SEQ ID NO: 121717 - DNA, 30 bp, Homo sapiens
  chr11:131996745-131996775
  hyper
tgtgacccgcaaagcgtggtttaatttaca

SEQ ID NO: 121718 - DNA, 23 bp, Homo sapiens
  chr11:132812674-132812697
  hyper
cggcagcacgcaagcgggcgccc

SEQ ID NO: 121719 - DNA, 17 bp, Homo sapiens
  chr11:132813045-132813062
  hyper
cgcgcaccagcgggctc

SEQ ID NO: 121720 - DNA, 441 bp, Homo sapiens
  chr11:132813316-132813757
  hyper
ctctgcctctctcttcgagacgctactttaagattcagttgggcacgttctgcagagctctggcatcaaaagtttataacccaaagaagaaggcaagtgtctctgacatacaggagctgtcataaaaagctgcggcttcaaggagaggaggaaatggtttattagatcacacacatggacagatgtacgtgtcccccagccccaggtctcgcatctggaaccccaaggcggcaaaaagttccaaggcggggacgcgcagccggcgcagccagggtcgtccggtcggtggccgtcctctgcagcccggtcggcgactcgcggccagccgggggagcgccgcccggcgcaggctccgggcgcacggggagctgggcggacggcggcccccgcctcctccggggacgcggcacgagacgcggggacgcgcggacgccacgctca

SEQ ID NO: 121721 - DNA, 508 bp, Homo sapiens
  chr11:132813907-132814415
  hyper
cgcggactgcgcgctcatcccgacgggcgggcgcccaccttaacctccgccgcgcccaccgggctggggatgcctgcggggatgagcccgcaccgcgcccacttcgctccgtcccgacacccgcgccagcggagagaacgcggcgcccctcgcagcggcttcccctacagaggggcggggtggggggagcggggagggagaggggagggcgggagagggagttctggggaaagcagcaaactgaaaactgacactggcaccttccctcgccgatgccagcgcagaagttgacaaaccccgccctggagagctgaactaccctgcccacgccagatggggcaccggtgtgcgtgtccatcgcgctgcgaacggctccccgcccagccaagtccagccctgacggcgcgctgtcctgggcccgcgcagaggtggagtgcacccacctccgaggacccacctcggaaacgcccgtgcccctccactggacgcctgtccccaaagtggcaaa

SEQ ID NO: 121722 - DNA, 286 bp, Homo sapiens
  chr11:132864080-132864366
  hyper
gggcgggagtccccgcgccgcagcggctggtgcgctcctgccaggagccggcgcgcgcgggagcacgtccggggcttttacggccggaactcgggctattaaaaagcccaggcgcgattttctaattaaacttttgatacaggaccacacaaaagactaaacctaccaggtcagcgtgagtacacggaggaggagcctaggagagaagagggaagggctggggaaaaggggcggcctcaccggaggagctgctgggggctcgccgtgcaggcgcctcgtgggtacc

SEQ ID NO: 121723 - DNA, 598 bp, Homo sapiens
  chr11:132934076-132934674
  hyper
agggaaggagaggaacgccggcccactagccgaccccagcgcaacccagcgcggttcccagacgctgccgggtaactgatgccgccggcacagcttctgttctcacttgtggagctttgtctcccctcgctgggcagcccctggtaccgcaacccgcctggccgccttcccggctgaggcccccgggcagagctcctccgcagggagcattcccgtggacaaacacccctttccctggtagctgtggcaacagttgatctgtggcagcggaccaggaggagggtcaaatgggagaagggacggccagctggtcctaccagagactgtcgctggcgtcctcaggggccgctgcagggccaccttgtgtgcttgccctttccccacggtagactgccccgggagggggactgtgctgcctgaattcttgtccgggtgggactggcctcggtgaaggatccgggaatgggacttccgggccgggccggaggggaagtgtcaggaagagctcaggctttagcgagcctggagggaagggaaggctgaggtctcctctgcctccgcagccacacggcccggcgcggggcgggccggcagtaaa

SEQ ID NO: 121724 - DNA, 30 bp, Homo sapiens; identical to SEQ ID NO: 49166
  chr11:132948624-132948654
  hyper

SEQ ID NO: 121725 - DNA, 448 bp, Homo sapiens
  chr11:132952552-132953000
  hyper
gccctcggcacggcacggccctgtcagctacgaagccgggcgaggggctcaaggcccctctggagaccgcttctcccccgcggcccgtcccgccgctgcggaccccatgcgcggcctccccgccccggcgcctgggcctcctcgcggcccgggcggggcccaccaacccggagaggtcgccagcctgcagggtgccgggggcccctccgagccgacctcgtcccaggcagacgcgctgcccggagaccgccgcaagggggcgccaggggccggggcggacgtcgcgccagtgcctcgccgggaccgcacctcgtccgcgcggccgccagagggcgcccgtcagcgccggagcccgcggcggacgccccagccgagcccagccactgcctggtggagccacagggcacccgcccggaaacaccgcctgcgccccgacggcacccgtgtg

SEQ ID NO: 121726 - DNA, 95 bp, Homo sapiens; identical to SEQ ID NO: 8491
  chr11:132953232-132953327
  hyper

SEQ ID NO: 121727 - DNA, 421 bp, Homo sapiens
  chr11:133401959-133402380
  hyper
ctgaaagcatctgcgcgcgtgtgagcgagtgagtgtgtgtgtgcgtgcacacagcaagcctacctctttcactcacatgcatctcacactccctgtcctcaccccttcctccttgcctctccatctccccactgcctctcctgctctcacgtcgtacaatcaccccagggagagaaaacacccttcccctgtacggtacctgggatgaagagcagggcagttgtcgccgagaagacgacccagtaggcaggatggtacatctcgacgctgcggtgctctcagctgccgggcttgctactgcttctgctgctgctaccgctgctgccttcctctgtgctgaattctgagcaggtttaaatccaatgtttgcaaagggagggagagagcagaagagagagagagcgcgcgagagatgggagca

SEQ ID NO: 121728 - DNA, 158 bp, Homo sapiens
  chr11:133797627-133797785
  hyper
aactcccagcaaagccggagggctatgggtgcagtgctgccacgtcaccacagggaggagacatggtcctgtgggactggccctctccttgcagccctgagctgtaacctggtgggtgccctccaggatccactcccgggtcccggctcactaccgtg

SEQ ID NO: 121729 - DNA, 1427 bp, Homo sapiens
  chr11:133825231-133826658
  hyper
aatcacccttcgcttcgccctctgctcgttctgttttcagacaccaccacccccctcagaagcagaggcgacatattcattccattccggaaagtttcctgaagcacgcccccctgcacagacgagtgacgaggggaccccgtgagaggcgcctccagcccacccggcgccccatgccgctgggagagggttctctgtcggcgagtcctgcctgctgactcccacccacagcgggttctctcccgccgccatctcctccggcttggtgaacttgcccgcagccgggtcgtgtctgcgcgctgacagccctgagctcacagtcctggcaccctccaggctccgctcccacttccatacaagggccgagagccgggggtgccacccagaggcttgtaggtcgctctgcccatctccaaagcaaaagcccgcgcgctcacgcacgcatcacccaactcggtggctccccccttgcgtctcccccagctcagacccaggaaagcggaaagagaaaatcccccctccgctcggattcacagcgtggggacccccccttccccgcccctcccctcccccgccgccgcccccagccagctctgcctcgcagcctggggagggcggcgtggggcccgcgcggctgcggcgcgctcccggggaacttttgcctggccggggcccaggtgcggctgagaggcgcgggggccggcggggtccagccaaaagcggacacacctcgaagctggcctcatcaatcctcctctcaccgggcgcccctgctagggggatccgacctccagctgccaagatgtgtgggcaggaggggcgcgagcggagcgatggacgcccgcagggccgcgcgaacccggggccttagacgcgggtgccgccagtcccagggatcctccgggtcgcgcctccctgcaggcgctcctcgcggcgcggggctctagcgtgctgcagcctgcccggagaccgcaaactcccgcagccagagtttcccgcagctctgggaggcggccgccgggcaggaggcgacgggctaggcgcgccggtgtgcaccgtggggcccgtggtgggcgaagtcgacccaggttccactgcgtcctttccccgagtgcccggcagcccgtgggctctggccccttcccgcccgcccctccagcccacggcccccaggccctccccggcaatgctcccgggccgcctggcccgcgtcggagcccaagcctcacccgcgggaaggcgcgccggggagctggggaaccggggggccaaggagccgggaaaccgaggggccgggcgcgaggggccgagggcgccgggaggggcaggggagggacgccgcacttcaactcaccttcagccgcaagccctcgggtgccgatcacacttgctatgaaagtggccacataccaaatcatagtactacc

SEQ ID NO: 121730 - DNA, 769 bp, Homo sapiens; identical to SEQ ID NO: 49171
  chr11:133826702-133827471
  hyper

SEQ ID NO: 121731 - DNA, 31 bp, Homo sapiens
  chr11:133906585-133906616
  hyper
cgagcagatcaattgccgctgataacattta

SEQ ID NO: 121732 - DNA, 30 bp, Homo sapiens; identical to SEQ ID NO: 49172
  chr11:133907214-133907244
  hyper

SEQ ID NO: 121733 - DNA, 30 bp, Homo sapiens; identical to SEQ ID NO: 49173
  chr11:133907735-133907765
  hyper

SEQ ID NO: 121734 - DNA, 280 bp, Homo sapiens; identical to SEQ ID NO: 49174
  chr11:133920425-133920705
  hyper

SEQ ID NO: 121735 - DNA, 877 bp, Homo sapiens; identical to SEQ ID NO: 49175
  chr11:133938735-133939612
  hyper

SEQ ID NO: 121736 - DNA, 30 bp, Homo sapiens
  chr11:134093482-134093512
  hyper
aagaaggggaaggccgagaaaacagatgca

SEQ ID NO: 121737 - DNA, 213 bp, Homo sapiens
  chr11:134093742-134093955
  hyper
ctgcatctgctcaccgagtctaagatccagcggacaccagggctgcaggccgctaccaaggccccgcaacgccaccatgatcccagggcaccggctcgccgccgccgtgctcaactttcaaagctcgctcccgcgcgcgcgccgagtcgttcctgtggaccaatcacaacgtacagaatttcccactggccaaccaccgcgccgagccgtttc

SEQ ID NO: 121738 - DNA, 37 bp, Homo sapiens
  chr11:134094347-134094384
  hyper
ttctgtagggactgcgcggcacgcgtgggcccagagc

SEQ ID NO: 121739 - DNA, 61 bp, Homo sapiens; identical to SEQ ID NO: 49177
  chr11:134094605-134094666
  hyper

SEQ ID NO: 121740 - DNA, 233 bp, Homo sapiens
  chr11:134123195-134123428
  hyper
acactctgcagactcgactgcggtccgcctccgctgcgccgcaggctgtgcagcgcgacccccgcggcgcttggtgggcggtgcatctctgcggcgccgaggccccgaggacttctgggaattgtagtcctgtccccttgggagcccgcctggcacctgggttgttagggctcgtgggaggactacaacccccagggtgcagtgggacaggcgttgccgggtcgcaggtcccg

SEQ ID NO: 121741 - DNA, 30 bp, Homo sapiens
  chr11:134123649-134123679
  hyper
cggacatatgtccgcgaggggctgcagtct

SEQ ID NO: 121742 - DNA, 958 bp, Homo sapiens; identical to SEQ ID NO: 8498
  chr11:134145468-134146426
  hyper

SEQ ID NO: 121743 - DNA, 155 bp, Homo sapiens; identical to SEQ ID NO: 8499
  chr11:134146444-134146599
  hyper

SEQ ID NO: 121744 - DNA, 453 bp, Homo sapiens
  chr11:134146621-134147074
  hyper
cggcctggccgcgatgaagtccccgcccctcctcaggtgacggatcgccgctgccgtcccgggctgcccaccaccccggcgcgtgcccgggagcctccaccctccccgggttctgtggccggccacgcgccccaggcacgcgccgcgccgggccgcgccaccaagcccgctgtccccagctttcctcggcagatcccctggctacccccaccctgcggaggggccgttcaccagatgccagaaaatcagggtggggcacgcaggccaggggctccagcggctgggcaccgtgtccttcccgaacctggtgctggaagtgcgcccgcctccgcctctcccaggcacccaccggcactgcccagccctgtctggagggtctaggactgaacgtctgtccccggccttcatcctggctgcagaggactggccgggtgatgccgcgctgtcctggcc

SEQ ID NO: 121745 - DNA, 966 bp, Homo sapiens; identical to SEQ ID NO: 49182
  chr11:134201432-134202398
  hyper

SEQ ID NO: 121746 - DNA, 238 bp, Homo sapiens
  chr11:134230254-134230492
  hyper
gtcagtcaaggacccagacctcgtgtctccggcatggggaggaccagcagtgatccccacggcttccacgcggtggcgccgtctccccacggctgcttccaaggcctgctccgggctccgcagggctgtggctgtgttgggagactcctggtgctggagcacgttttagcgcttggcggcctcccggtttcaggccttgcaaggaagcccgggagccgccactgcttttccctgtggc

SEQ ID NO: 121747 - DNA, 163 bp, Homo sapiens; identical to SEQ ID NO: 49184
  chr11:134281376-134281539
  hyper

SEQ ID NO: 121748 - DNA, 47 bp, Homo sapiens; identical to SEQ ID NO: 49185
  chr11:134281595-134281642
  hyper

SEQ ID NO: 121749 - DNA, 174 bp, Homo sapiens; identical to SEQ ID NO: 49186
  chr11:134281706-134281880
  hyper

SEQ ID NO: 121750 - DNA, 833 bp, Homo sapiens
  chr11:134282100-134282933
  hyper
aggtggcggcggatgcgccggtgccgccgcggctctgccggcgcctcccgccccgcccccacccgctctccgcccccgccccgcccccgccccgagcccgcgccagcgccggcgggacccgagctgctaatggtcggtaccaacctcgccagcctaggcgggggcgcgaggagggaggccggcgaggggacccccccccgggattggtatcacctccccaccgccccccaccctcccccggcaccgtcccccgcggaggcggctcccgcttcaggcggcggagcaggggtggcgggcaggggccgagcgcacccccagatctcggctctcgagagttaaagctcggcccccgcctgcacccccattccaccccgcctccatcctggctgctcctggcgcccagcttggcagcctctctcaaagggtgattgtttccggccgggctgctgcaggagggcggggggcggcgctctgggaccgagaggccgagctgggaagccggtgggggatgcggctccttccttggctccaggcaccccggatgggaggtggccggtgggggcggacggtgccgtgccggggtacggggtctgctgccccgtggaagggcacctcgagccgccgcgcgtcagcctcaccccagcctccccttccgggccggtgcacccggcgttccggagagaggcccgggaggcctgcgtgggcggacgggcgcggggaggccgggggcagcgggatctccaggagtttcccgggcctctgccgcggtgtgttggtcggcgggggacggaggccagtgagtgggcgcgcacttggacgtatgtgggtgcact

SEQ ID NO: 121751 - DNA, 31 bp, Homo sapiens; identical to SEQ ID NO: 8504
  chr11:134738700-134738731
  hyper

SEQ ID NO: 121752 - DNA, 177 bp, Homo sapiens; identical to SEQ ID NO: 49190
  chr12:298328-298505
  hyper

SEQ ID NO: 121753 - DNA, 30 bp, Homo sapiens
  chr12:498463-498493
  hyper
tttccggaagttaccgtgctgtcaaatccc

SEQ ID NO: 121754 - DNA, 30 bp, Homo sapiens
  chr12:510520-510550
  hyper
gcccgaaagtggtgcgttctgaccccaaac

SEQ ID NO: 121755 - DNA, 30 bp, Homo sapiens; identical to SEQ ID NO: 49191
  chr12:511347-511377
  hyper

SEQ ID NO: 121756 - DNA, 73 bp, Homo sapiens; identical to SEQ ID NO: 49192
  chr12:568902-568975
  hyper

SEQ ID NO: 121757 - DNA, 30 bp, Homo sapiens
  chr12:569311-569341
  hyper
gccgggctcggctcccggagagacctgctg

SEQ ID NO: 121758 - DNA, 477 bp, Homo sapiens
  chr12:569664-570141
  hyper
ggaactggtggcgtcggcccaggtcggcgggaaccccctgaaccggagtaagtagcacccaggggaggcgaagggcgcgggggtgggcggcggcggcggctcctgcgttggggggacccgcctctcatcccatcctcagacccgatttcccacccatttctccctcaggtgcccggcgtcgccccgcgcgtactcggggagagctgcgggcgggggaagccgcggggccgagcgcagaattcccgagcccgggcctgcccgccggccacgtgggtccggggcaccctgggggctcctcgcgtctcccctcggagagcgacccggagagaggctccccgcccgtcccgccgagacgctggcggagaccgggcccctccagccgctccgggcttgcggttcccggggaggaggtccgtggggtccacgcgcgagctagggattcgggtgcgggatgccctcggccgtccacacccaggc

SEQ ID NO: 121759 - DNA, 210 bp, Homo sapiens; identical to SEQ ID NO: 8506
  chr12:694939-695149
  hyper

SEQ ID NO: 121760 - DNA, 385 bp, Homo sapiens
  chr12:708873-709258
  hyper
gtcccagcaagtctggaagtgcggaggccctcccagccccacgactgcgcttggcctactgcctctcctcctcagcttggttggacctgcaccccagcacgcccggggggctcacattcctccccgagatgccgccactgattcaccatggtgccagtgtcccattgcccgtctcgggcacaggagtagccgtgcactcaggatacctctgatgccaaggtttgagcagctctggcccagcccgcctccttctgcccagctgccagggccccgatactcagccctcccctgcctggtttctgagtctgaggaatgtgcccagaagcaaattggcgctgagattcacatttactcctttactccttccgaacgcctgagccactgg

SEQ ID NO: 121761 - DNA, 30 bp, Homo sapiens
  chr12:860505-860535
  hyper
ttttcagcgcttcccgctctccaccggttg

SEQ ID NO: 121762 - DNA, 30 bp, Homo sapiens
  chr12:861737-861767
  hyper
aggcttcagactcccggcgccatttagcgc

SEQ ID NO: 121763 - DNA, 210 bp, Homo sapiens
  chr12:1059278-1059488
  hyper
agaccttcccagattccgcccgggccgaggcagcggtggacctggtggttctcgcggcctctcaccaccgccgcgcacatccagtcgtcaccggatggcgccttcggttagcgacgaccgcagggaaatggagaagtgcggcttggggggcgaagtcccctctagaatgtcccctggggccgggcgtggtggctcaggcctgtaatccca

SEQ ID NO: 121764 - DNA, 216 bp, Homo sapiens
  chr12:1099808-1100024
  hyper
taatttcgcggccgcgttccacgaagctaaggggcaaaaaaccagctttcttgggacaaagcgtccccccagcagccagggtcgatcccggcgctgctcccgcggcgcttggctgccccgggcgtaacgggccacgagaagtagggggtggggcgccgcttaggtttgggaagacacgaagcggctcctcgggcttccagcgtccacttcctacgg

SEQ ID NO: 121765 - DNA, 1656 bp, Homo sapiens
  chr12:1639107-1640763
  hyper
cgctcgtgccaggatcgcggggcgcgggtacgggctccttgggcgccccgagggggctgctggccggggtaagagccgcggtttcttcggaggatcgggtcgagttccaggagaagggggcagcaggcgtgcggcgccgggagaagggggccgggcggcggagactccccgtccgcacccccgcggcgaggcccccgggccgctctgcttaggggccgagggagccgggcgggaggcaggtgcggaggtcgcggtcccagcgcctgggaggagccctcgggagggtgtcgcggcccggctggtgggcaggagcgagccggggccggcgcggctgtcgggggcggggaggaggcgcgggaggcggggcggaggcggcggcgcccccaggatccactcgcccagcgccgggccctgcactccgagccgcggccgccacccgccccgcagccaacttgggccgaaacttccccgggtcccgcgctccggagcagggcgcgcagcccggcgagatcgacggcggcctcccgagcccgcgcctcgggcccagggcctccctccggatcggccgcaggctgcgcgcccccgaccgtccccgcccgctgagttcgggggtccccggcgcggagcagggagccctccgggcggcaggagggcgcgcagactccgagcgccggggctgcctggccgggctccggtggacacctcggaggctgccccagcatcggggggggggcccgagacgcctcggcgggaccccgggagccgagcacgcccgcccgcgccgccagccccgcgccccggccgcggatgaagagtcggaggcggcggcccgagcggcccgcgcgctgagaggagcgggcagggtctgccccgggccccgccggccgccccctgcgcccccgcgggccgcgcctcgcccgccgacccagcgcagccgggcgcaggaagagccgggccgggccgagcggcgcccggagcccgcgggcctgacacgcggcgggacatgcaggtaagcgccggccctcgcccccggggacggccccgccgccgccgccgccgccccggctgccgaacctcgcgcggctcctccgccttcccggccccgcggccgcgctgggtgtccgccgggtgggtctgcgcgccgcgggcgtcgggtcggggcgggccggggtcaggtcgggggaagggagtcgccccgggccggggcggcgaacaaagctggggaccgccgggccctcgcgcgggcaggcataggaggctccggggtcggcggcgcaggcggggcggcctctgagcttcgcgctcactctcccgggtctggtcgggcccagccccgaccctccgccgaggtctgcgccggcatcgaggaccccatctgggttactttacccgccggacgcgggtgggagcctgcgtttctgcccggaccgcgcaggtagagcccgagcgccgctcggctttgtgcttctccggtcgctccggcgctccacgtccccgccgtgggagaggcgggacgagacctcctccttcactttcttggagcctcggtggacgcgtagcccgcgctccagtcggagccgaacccccgggtatttgctgcagaccgctgggagaggcagttcggtttgcggggagcctgcccggccctgttttaca

SEQ ID NO: 121766 - DNA, 30 bp, Homo sapiens
  chr12:1702859-1702889
  hyper
tcaggttgagagcgcgcagggagccgatct

SEQ ID NO: 121767 - DNA, 30 bp, Homo sapiens
  chr12:1704141-1704171
  hyper
agctgtcagcagagcgcctccccacccggc

SEQ ID NO: 121768 - DNA, 31 bp, Homo sapiens; identical to SEQ ID NO: 8510
  chr12:1714947-1714978
  hyper

SEQ ID NO: 121769 - DNA, 797 bp, Homo sapiens
  chr12:1739046-1739843
  hyper
cccgggctgggggccggctcacttccgagctggctctgcatgacaaaggggaaggagcaagtgtcttctttgatctgccccctgccggccccacacacctgcctgttggtgcccccgccccagccgaggcttcgagaaggaaaatcaaaagggggcttggggaagggctgtgtcccagctctcctggaccctgctcgggccactgtcctctcctggcggccccaggacaaaaatacttcccgggctgatgacccgaagcacccgccgccccctcccggggagcctggggacgccgacgcgcgagagtggcgcagtgagccggggcgcgcggggctgcgctcgtcaggtccggggccccggggaggccgctgggggcgcgggtcacgcccagacgggggccccggaggaccgcgggggagccgcaggggccgtgtgtcccgaggcgcaggctcgctctagcagcactgacctgctgcgggtcccagggcctggggacaggggctctcgggggcggatagaggaacaggcgtgggttacagcaggcaggaggccaagaggcgggaggcccgggagccagcagggaagggctgtggcatctggaagatgcgtcctcagctcaggcatttgatgccagagctgccgcctggcgtcggcagtgtccccggtgcagctgctgggcaaggtactcggtgccgccctcgaggaccacggtgccgggaggggcaggggccgcctagggaggcaccacctcagccgccagagctttccgggcgggcggttcgcggcgtggcttgtac

SEQ ID NO: 121770 - DNA, 142 bp, Homo sapiens
  chr12:1762093-1762235
  hyper
atcacggccttaggtcggagcaaatgatcagcctggaacccactccagactggtctgcagttctgcatgtgaccacacagtgtcgctatcttctcagttctagccgaatagctctggcccgcaccttggttcaaaaaaacat

SEQ ID NO: 121771 - DNA, 291 bp, Homo sapiens
  chr12:1799860-1800151
  hyper
atccatagagactgcgaaaagcatccgcgagccggggcggccccctcctcctcagctccaaattgcttcctttttcggtgggagaaaaaactccgaggagttgtgtgagcgcctaaggagcgcacgctcctccggccctcaacacccagtatagttttcgctaagttcctggccgaaccacagctcccacgatgcacccaggttttagagcggtcagaggggcggcttccggtttaggacagcgcggctgcgcacggcgtgtggtcttattggctcgaaccgcctcgtgcg

SEQ ID NO: 121772 - DNA, 815 bp, Homo sapiens; identical to SEQ ID NO: 49203
  chr12:1905620-1906435
  hyper

SEQ ID NO: 121773 - DNA, 96 bp, Homo sapiens
  chr12:1906476-1906572
  hyper
cggctgtggagccgtttcccgggggttccggggccctgcccgcacttccgccttgccgagggcgggaggagtgtggcgggacgggcggcgccgccc

SEQ ID NO: 121774 - DNA, 285 bp, Homo sapiens
  chr12:2113104-2113389
  hyper
ctgctctactttctcgagcacatcggtcttccggccataaggtatcaggtccttcctttccttcggctcttatggtgccgtacccgatcggtctggtctcccagcgttgggtacgttagagatttaagtcttttccccaactccaggtagctccacagatccgccttccttcccccaaacccccgagaccccatctccacaacttcggcctcagtccccagatccacccacttccagggcgtcaacgtctcctccccctcaccgggtcctcaagtcctgagtctg

SEQ ID NO: 121775 - DNA, 457 bp, Homo sapiens
  chr12:2113432-2113889
  hyper
cgcgtccgcacgcacccactcgttggcccgatggccgaaggtgtacagagccacctggctggccacgtccacgatgcggttgatataggggtcgtggcgctgcagggccgctaggctgatgtcgcgcccctttcccaccaggccgcctgccgccacggctgccatcttccctccctcccagacataggcacggggctcttggaagccactctcaatagatcgcagaacgagcgagctgcctcgcaaccgagaacccacggcgaccacacggcccgggaggccttccggctccagtcacccccaccctcctgcccgccgacagacgcaaggcctcactaatcgatggccgcgccccgcccactgaggatcgttgccactggcaacgacaagcccaggcctgccctctgcatcccgtttctttctccaagagctgtttttctacgcgctcgagcctttg

SEQ ID NO: 121776 - DNA, 461 bp, Homo sapiens
  chr12:2144045-2144506
  hyper
gtacaggatgctatgggacaccgaatccaactttgcgggacaggggaagaagccttaggagctggcgaggcgagggggtgaagaggagaaggaggtctgggcactggaagcggcacacgtggaaacggtaaaggccgacgccggttcagagccgcaaccgcgacagccccgtcgtccacctcaggtgccggcgccccctgctggtgcgcggagatgcgcggagaccgcaaggcccgggggcgtggcctcccctgcgccggcgcgtgtgcccgggccctccgcggggcgccggcgtctgcgccaaggcacgttctcctgctgctccagaactgccaccttccaagtcctgaaggaggccgttttcctgtcatttgcacctggccggagccattctggatgttttaaggaaacgagaaaaccattctttcctcttaccggatgatgtgcgatgtcatttggaa

SEQ ID NO: 121777 - DNA, 697 bp, Homo sapiens; identical to SEQ ID NO: 49207
  chr12:2161356-2162053
  hyper

SEQ ID NO: 121778 - DNA, 1199 bp, Homo sapiens; identical to SEQ ID NO: 8516
  chr12:2162067-2163266
  hyper

SEQ ID NO: 121779 - DNA, 304 bp, Homo sapiens
  chr12:2163279-2163583
  hyper
cgtccactctcgtccaggcgcccctgccctgggcggcgcgctccaggtggcgggtgggggcggcggtgcagatgtgaagcccagcgcgcccctctggttccccctctgtaggtccccttcttcctctctccctccctcctccgccgctcacctacacccacccacctctccactgctgttgaccccgagcgcgcccacgccgcgtgtgttctcattcgcacccacatgtgggctagcacctgaggatggaagcggcgaggagccgggcggtgtgtgggctttgctgtttcgtgtttgaaggaga

SEQ ID NO: 121780 - DNA, 287 bp, Homo sapiens
  chr12:2692227-2692514
  hyper
agaaccccatggcggcggaggtgggtctgggtggaaacctgcagctttggcatgggtgaggttcaccttcctgaaccctccgggcccgcagcggcgccgcgctccgggcgggctgtcgccgtaatctgggtgagcggcgccccctggcgttgcggcgtgtgcggccactcacaccgcctgcgatagggacgcgcgggagcgggccggctgccctggggccgcggcgtctgctcagaggcgggacgctccgggagggaggatgagccgttgtccttcaagtgaccttc

SEQ ID NO: 121781 - DNA, 278 bp, Homo sapiens; identical to SEQ ID NO: 49211
  chr12:2800166-2800444
  hyper

SEQ ID NO: 121782 - DNA, 237 bp, Homo sapiens; identical to SEQ ID NO: 8520
  chr12:2800603-2800840
  hyper

SEQ ID NO: 121783 - DNA, 259 bp, Homo sapiens; identical to SEQ ID NO: 49213
  chr12:2801019-2801278
  hyper

SEQ ID NO: 121784 - DNA, 358 bp, Homo sapiens
  chr12:2861784-2862142
  hyper
cccttgccgagggcgcggggcatttgtactgaagaagggctgcaggagagtcggtgacccctccttctacttgtatgtagcggccccaagtgtcccgggagctggtggggcgcttgggctgtatgagcccggccgccaggaggctggggctgcgtcaggagctgtccgtggtgcttaagcggcgtctgctcgggcgcggggtgtggcgcggcgggtgagcgctgtccctggtcctggagaggttcctggcccccagtggcaacggtgagagcagtggcccagaaggccagtaccgggaacgacgatggcgggcacaagggtgggcttgcagcagctgctgctggtgctcccacaggct

SEQ ID NO: 121785 - DNA, 171 bp, Homo sapiens
  chr12:2862267-2862438
  hyper
cgcgcaccgggttttccagcaggctctcgatgccacccaccgccgcctgcgccctgcctgcccctgggctggcgcctgggagcgcgagggcgcgggaacccagcagcccagcggtcctctcccacgggcccagcctccctcccgccgccagcgccgcgtcaccgccacccc

SEQ ID NO: 121786 - DNA, 33 bp, Homo sapiens
  chr12:2904078-2904111
  hyper
cagcccctccctcgcggcggggcgggaccaatc

SEQ ID NO: 121787 - DNA, 30 bp, Homo sapiens
  chr12:2904404-2904434
  hyper
ctgaaggtgaggggcggcggggcctgcgga

SEQ ID NO: 121788 - DNA, 30 bp, Homo sapiens
  chr12:2921943-2921973
  hyper
cgtgcagcgcgtggcgctggagttcagcgg

SEQ ID NO: 121789 - DNA, 30 bp, Homo sapiens
  chr12:2986343-2986373
  hyper
gtcacgtgacggaacgtcgccaatcggcgc

SEQ ID NO: 121790 - DNA, 261 bp, Homo sapiens
  chr12:2999767-3000028
  hyper
gcctgctggccgcgcggcgggcgaggcccaggcaaaaacaaagtcttcccgctcagtaccggccccgcgaggcgctccagaggaccaagccttagctcgcgtcaccccacccccgcgcaggcgcgtttaactcccgctcgcctcccgccccttagcaaccctcccgcatcgttgggccccggcaatagccaatgagacaggagccacgagaacacggaccaatcggcggcggcgacagtgtggaacgcggttgccaggagg

SEQ ID NO: 121791 - DNA, 171 bp, Homo sapiens
  chr12:3053921-3054092
  hyper
ggggtgcagtgagaacggcagatggttccatggcgccacccactgtccaggaatgcatgttgcaggtgcgttaaacgggcagaccccgcacaggtgaggaagtcaccaggcgaaaacagcaagccgaccacatgaccatgcagttaccaagcacctcgtgttagaccatgg

SEQ ID NO: 121792 - DNA, 258 bp, Homo sapiens; identical to SEQ ID NO: 49217
  chr12:3067871-3068129
  hyper

SEQ ID NO: 121793 - DNA, 53 bp, Homo sapiens; identical to SEQ ID NO: 49218
  chr12:3068384-3068437
  hyper

SEQ ID NO: 121794 - DNA, 679 bp, Homo sapiens; identical to SEQ ID NO: 49219
  chr12:3068769-3069448
  hyper

SEQ ID NO: 121795 - DNA, 225 bp, Homo sapiens; identical to SEQ ID NO: 49220
  chr12:3129380-3129605
  hyper

SEQ ID NO: 121796 - DNA, 1059 bp, Homo sapiens
  chr12:3186011-3187070
  hyper
cgcgctgtcagcatctcgcacagtccgcccgaaacaccagggaaggggttcgtaggtgtgggggtggggtggcgaggccaggcagcctggcgcgagggagagagccgaggcctgggccaggaaggcccttgggtgccgtgtgggcgcagagcccaggagagcgcactgccaggcccggacctccccgcccctaccccgggaagaggcccgttcgccgcagggggaaggcgggatcatagcacctcggaggagcggccggtccgggcatgcgggcggcggggcggggagggaggcttccggaaccccgagagagcacccgtgcctcgcgggccccgtgccccgtccccgggctccccttcctctaacgcaggggacccagcccggggcagtgccgggcactggcgctggcgccccgctcagccctgcgatccttctccgccccgcccctccccgctccgccccgcccctccccgctccgcccccgggccgccccgccccgcaggctcgccattcccgggcaggccccgccccctgtttccgctggcggcggcggcggcggcggtgccggagcgcgagcagagcggagacccccaggtcctgcgggcgcggtgagtgcggcccgggcggcgggcggcgaggcgggtctcgagagcgtgcggagtcgcgcggccttgagccggcgccgggcgggctgggcacccccaggccgagacccgagaagggggagcggccgggggcgcccacgggaggcagtgtgggcagggcggcggtgggacgagaggacgaggaacagagtaggcgccgtgcgggaagcgggccgggaaggggagggtgggtgcggggcccgggcaccgagcgaagtggggtcctccaggggatggctccgaggaagaccgtttcagaaagggagtaacccggggccggcaagggtttccgactgtgtgaccccgtgcaccgcttgggacagtccatacaaggaccccagagagggccagggggccttcgggcagggctgggatatggcctgcagccccccggcacccgcgaccgctccctggg

SEQ ID NO: 121797 - DNA, 30 bp, Homo sapiens
  chr12:3384772-3384802
  hyper
gaaccagcctggagcgccacctagtggccg

SEQ ID NO: 121798 - DNA, 31 bp, Homo sapiens; identical to SEQ ID NO: 8527
  chr12:3474950-3474981
  hyper

SEQ ID NO: 121799 - DNA, 640 bp, Homo sapiens
  chr12:3474997-3475637
  hyper
ctgcacacaccaacgcgtgctcccacgcgccgcgactcccccgggatgcctgccccacccctatccgcagccagcgtccccctgcccgccggccccgccacggtccatcagggactgcgggcggcggaggtggcggcgccttgccgggacccccagcctccctcccccgcccccggcgccccaccccacgcgggcgcgcttctcccgccgcagccgcccgcgctcacctggcccggacacgggctccgccacgcggtgatggaagctgagcctagagaggcggagagcggcggctcgcagggccacccagcggcacacggcccgcgcctcggcccgccccttccttgccggccgggggagtgtccgcgcgcctccagcccgccccgcgccccgctgcggtgcccagtgcccgccgtcctcacctggccagcgggacgcgcccgggaaccccgcacgcgggcgggccgcctctttgttagcaagtttgcctttctgtgattcagagcacgcggagcgaattaagtggagtgaggggtactgtgcgactgtctgcgggaaacctgcggggagcgcgggaagggatggacttgatgagccgcggcgcagcggctttcaaacctccccgcgctccgcagccccc

SEQ ID NO: 121800 - DNA, 760 bp, Homo sapiens
  chr12:3600022-3600782
  hyper
agagctggggtgggccggggtggggagggtgcgagttaactgtggcccggtctcgcccggacctcgccctaggtgggagcacgcgcaccgggtctgagaacctgcaagagcctcgcccggcgccggctttctctgggccccccgcgcgggcctggcctccacgtaagttgtgtgcagcgccagggagtggaggcggccgagaccctcggagactaggggagggggcgggcccgggggcgctgggggccctcggtctgcgcccagccgccgccggctccagcgaacctcctaccccgcccccactcacccggctcagcccctaggagagacgcgcaggaagcgtgttgcttcgcccagcggatcggcagaagttgagaggagttggcggctgcctccggccggccggactttgcgagcagcctggagaggatccgcgaccgccgccgccgccgccgcggaggcttcggggctgcttccctcgagcttagcccgcagcgcgggtggagaggggcggggagggggtcgggggcacgagaagaacttgaaaccgtgtgaaggaatccggagcagatgagaagggaggaaaataaaagaaagtggagactgcagaacagactccgctgtggctgactgtgccggccgacgctccagctgaggggctgggttggatttttttttttctcccatcctctcgctctctcttttaaagcgacaccagctctctctcctcctctactatctcggtatcaccaaacccttg

SEQ ID NO: 121801 - DNA, 52 bp, Homo sapiens; identical to SEQ ID NO: 49226
  chr12:3600974-3601026
  hyper

SEQ ID NO: 121802 - DNA, 279 bp, Homo sapiens; identical to SEQ ID NO: 49227
  chr12:3601062-3601341
  hyper

SEQ ID NO: 121803 - DNA, 1339 bp, Homo sapiens; identical to SEQ ID NO: 49228
  chr12:3601377-3602716
  hyper

SEQ ID NO: 121804 - DNA, 139 bp, Homo sapiens; identical to SEQ ID NO: 49229
  chr12:3602864-3603003
  hyper

SEQ ID NO: 121805 - DNA, 137 bp, Homo sapiens
  chr12:3862231-3862368
  hyper
cagctgtcaagcagccgcctgctccgcccgactctttccgctccgagccgcgcgggctggaccagcccctcagcggagctgaacgggaagcggcgccccctggacgccctccgggacgtgcgcgcgccaagcggtgg

SEQ ID NO: 121806 - DNA, 30 bp, Homo sapiens
  chr12:3982748-3982778
  hyper
tgatcttaaagccacggctggctgtatttc

SEQ ID NO: 121807 - DNA, 486 bp, Homo sapiens; identical to SEQ ID NO: 49230
  chr12:4140248-4140734
  hyper

SEQ ID NO: 121808 - DNA, 160 bp, Homo sapiens; identical to SEQ ID NO: 49231
  chr12:4273725-4273885
  hyper

SEQ ID NO: 121809 - DNA, 418 bp, Homo sapiens; identical to SEQ ID NO: 8537
  chr12:4274001-4274419
  hyper

SEQ ID NO: 121810 - DNA, 30 bp, Homo sapiens; identical to SEQ ID NO: 49233
  chr12:4368336-4368366
  hyper

SEQ ID NO: 121811 - DNA, 4832 bp, Homo sapiens
  chr12:4377788-4382620
  hyper
aatttaggggaaatgaaggtgcgtgggctcactctgcagctgcagttttcagcccttgcagtttagaagattctgcatgagcacggatgccacgagggtatccagcgagtgggaagggagtcgccctacatgttttcacatcgatttgtaaaactgttttgaaagggtatttctagatccatttgttccaaatgcagcaaaattcatccgatatcgctcacaatgcatgcacgggttatcttacatgtaatagccatcgtattaaccaacccagctgatactgagatggtgaatggggcgggggagcagggaggaatatgtcgcgcatgaaaaactccgggtgtaaaagtcaatgcagaactcactccccgaggaaccgaaaaagacattcacgactctcaagtggagagaggatagaaagtcaagtggcgggggtcgcgaccagtgatcgggatttcagtctgatctcagtacccagcggaacaggaccataacctaaagaaatgagctttttccggagcaaagagcggccccgatttcaaagtagaaaaaataaactgcttgggggtggaagatggcgaggggcggggggcggggagggaggcgggtcgcggcgctggctccggggtccgcggcacggcctcctctgccgcgctgcccagggcccggaccctgcccggcgctgcgcccaccgcgagggtgccagacccgccgcgccgccgccgcgctctcccagccgcggccccctcccccgccgcttcctcttgctctcccagccccttcccccacgtgtggatgacgtcaaaattccgcgaaaaagccgcgtggtggctccccgagcggaggcgcgattccgccgcccagcggccccctcccgggggcgcctggagggggagaagggcggaggcggccggttccttctcctcccgggaggcaggaccccccgacgccgaccgccggacgccccccgccccaaagcttattggaaaattcacttttgtaaagcaaatgtatttccagagctattttcggccgcgtgaggcgtgtcctaagctgaatcagacaggaagagggggaagttcgggtcttttaattttttttttttccgaagggaggggagtgagatgctaggtgggtgacagacggcaggcgctcgccttcttaactcacgcctgtcgcatctgccgcctcagtaatccagccccgtccaagccgaaattcgccgaagggagtgcggatgcacaggcctggcggactctgcccccctccagaacgcagcggcccagcgccccggcgggcgcggctgcgaccagagggtcccggaagcgagtgaacacctgcaatcgcactgcccgtccccacccaccctgctcccccgtgctctccgcttcccgacgttttcctcttctccttgtccgcatttttctactttgcctgcactccctccttcctcttgatgtgcctcctatgtgtcccctcggatttatgtgtcccctcgcattttgccagtcgggttttcggttttgattgaccgtccatccctccacggagaaacacaaacacagctccactctttgggggagccgaggggaaggcagtggctcccatttctgagcctgaactcagtcactacccgctccccacctggcctaggcgcccctgcgcggagaaggcgggactcgaactcgcgctgctcccgggccttgagccgaccgcggaatcacctggctgggaggcatcctccaggtaagcttgggagtatgtgtgcttagtgctgcaggctcctgcagaaaagtgcctataaacacccaacaccctgctgcaccctccacctccaggctttgtacactttccaaccgaaactccaaaacgctagcgtagagggtggggagccggccggaaaaagaataaaagtccaataaaactggcgttcgctaaagtttatcaccagtcctacatgggatatatatatatgtatttttttttccgtgaagggtgaaaaggagataaggaagaaccaacaatctaccccctcccgccgccccccacccccgcgccacggtgatcagtttggacttcaaagccagagcacaggctcttgcgctttttcttgaaaccgaagtctacactgaaagaaagtgtgcacttttgcctagaaggcaacatgcgttttcccgcgtgctaggtggagtgcattttaacaagacattagggttttaacacatggctggagtggcgaccaaaagggaaaactcagtttccagtccaagcctcctagagacattcctgccaacctccgcaccctctcacgccccaccccacgtgtgagagtctgcaaaaccaccggggattggattcgatggcgagcttcacgctcgggaacagtcagtaatcggaaggggaagtggacaggggaacttcaagaggcgagcctgccacgcgggaagcgcccgaacttgcgggtctccatgaatgcagagggcgccgggaagggggggcatccggccgcgaccctctctgcccctcccattcgctgcccccctccccgctggaatttctctgtaaagcaagacggagtagggggagggggagagggaaggggcgagagggccctcggctcactcccgagacgtgaggactcgccacccaggcattctcctcggggtgggctgggccccgggacgaccacccgcttcttcctcgcccccgctgcccccacttcgggagacccagagctctggatgcctttccccggagaagggggggtgtgcggagtcggggtggaagagaccttgctcgcagagctatatcaagtgatgtccagaggctgggagccccggcggcctctgtcccttgcctgtcgggttagatttatactttaaaaatacctcccgccctccctccttctctcgcctctccccgctgcaactttctttgatccgctcaaaggtggcttaggtgaaattggagtaattcccttatgggggtcttaaaatgtaagtgaatgtccttatccggggtgactcaaaagcttaagtcgggaagcccaacgtgactaaaaccaataggtgattgttcggggccgactgtgtgcgggtgtacacggtattcggcccgggtgtcatccgcggcgctggactgtttcattttgagtttgcaacttgggtttttcagcgagctttttttcttcctgaaagctaatggcttccacagcaattagacattttcctcgcccgccccttccctcccctttctttacatataggagatgggatactcattcccgctgctattgataaggtcggaggcggccgggcctctccccagctttcgcccgccccagcgcccgctctccctccgccctcccttggcttccttttgatgtagtggggaacgcgtcctactaaaaaaaaaaaaaaaaaaaaaaaaaaaaagtaatctgcccggtaacaatcagcgcgcagtagcaggagccccagagctattggctatgcaaatagagggaggggagacggcgccccaaactcttcctcacccttttaaagcgatatcccctcctttcccccccaccaccccttccgccccaccctcgtttaaagaggctggctccggggcctgagttaatcgcttgcacctctagtttattcgctcccctcctccgccttgcagggaacctagtgtacggctcacccagcccgcgccccaccccgccttgctggctctccgcgcccctgcccgggccccctctctcggtgagggaggcactcagtcggcctcggtgtgcccagagagctcgagccacgccatgcccgctgcacgtgccagcttggccagcacatcagggcgctggtctctccccttcctcctggagtgaaatacaccaaagggcgcggtgggggtggggggtgacgggaggaaggaggtgaagaaacgccaccagatcgtatctcctgtaaagacagccttgactcaagcatgcgttagagcacgtgtcagggccgaccgtgctggcggcgacttcaccgcagtcggctcccagggagaaagcctggcgagtgaggcgcgaaaccggaggggtcggcgaggatgcgggcgaaggaccgagcgtggaggcctcatgcctccggggaaaggaaggggtggtggtgtttgcgcagggggagcgagggggagccggacctaatccctcactcgccccctccccctcccgggccatttcctagaaagctgcatcggtgtggccacgctcagcgcagacacctcgggcggcttgtcagcagatgcaggggcgaggaagcgggtttttcctgcgtggccgctggccgcgggggaaccgctgggagccctgcccccggcctgcggcggccctagacgctgcaccgcgtcgccccacggcgcccgaagagcccccagaaacacgatggtttctgctcgaggatcacattctatccctccagagaagcaccccccttccttcctaatacccacctctccctccctcttcttcctctgcacacactctgcaggggggggcagaagggacgttgttctggtccctttaatcggggctttcgaaacagcttcgaagttatcaggaacacagacttcagggacatgacctttatctctgggtatgcgaggttgctattttctaaaatcaccccctcccttatttttcacttaagggacctatttctaaattgtctgaggtcaccccatcttcagataatctaccctacattcctggatcttaaatacaagggcaggaggattaggatccgttttgaagaagccaaagttggagggtcgtattttggcgtgctacacctaca

SEQ ID NO: 121812 - DNA, 1734 bp, Homo sapiens; identical to SEQ ID NO: 49236
  chr12:4382899-4384633
  hyper

SEQ ID NO: 121813 - DNA, 51 bp, Homo sapiens
  chr12:4384837-4384888
  hyper
gtgagttagagtgcgcgaaggagtagccaaagggagcgtcgcggagctgcc

SEQ ID NO: 121814 - DNA, 30 bp, Homo sapiens; identical to SEQ ID NO: 8543
  chr12:4429984-4430014
  hyper

SEQ ID NO: 121815 - DNA, 30 bp, Homo sapiens; identical to SEQ ID NO: 49238
  chr12:4492593-4492623
  hyper

SEQ ID NO: 121816 - DNA, 30 bp, Homo sapiens
  chr12:4647545-4647575
  hyper
agggcatcctcactcggttctgggctcacc

SEQ ID NO: 121817 - DNA, 113 bp, Homo sapiens
  chr12:4647830-4647943
  hyper
agacagggcaaatccgccgttgtgacgaaagtgcagggacaaagcacaaactcggctctggtggaccggatacggaaaagcggtgccttggggagggcgggagcaaattcgct

SEQ ID NO: 121818 - DNA, 276 bp, Homo sapiens
  chr12:4758235-4758511
  hyper
cccagcttagcagccgtagtcagccgggagtgctgtcgtgggggattgtgggaaaagatggcggctgccgcacaatcccgggttgtccgggtcctgtcaatgtcacgtaagtgttaccgggaacggcggcccctggtcgggattccgagacggggatttaaggttttggaagtggcaccgtgctgcagcggtcacgccaacttcctaggcacactctggtttctctaggtttggagctgcctcagtctggtttctcctttcgctttccgcttcccc

SEQ ID NO: 121819 - DNA, 30 bp, Homo sapiens; identical to SEQ ID NO: 49241
  chr12:4918321-4918351
  hyper

SEQ ID NO: 121820 - DNA, 125 bp, Homo sapiens; identical to SEQ ID NO: 8545
  chr12:4918557-4918682
  hyper

SEQ ID NO: 121821 - DNA, 175 bp, Homo sapiens; identical to SEQ ID NO: 8546
  chr12:4918713-4918888
  hyper

SEQ ID NO: 121822 - DNA, 30 bp, Homo sapiens
  chr12:4919719-4919749
  hyper
gccggccaggggcatcgccatcgtctccgt

SEQ ID NO: 121823 - DNA, 584 bp, Homo sapiens
  chr12:4920224-4920808
  hyper
atcctccgagtcatccgcctggtccgggtgttccgcatcttcaagctctcccgccactccaaggggctgcagatcctgggcaagaccttgcaggcctccatgagggagctggggctgctcatcttcttcctcttcatcggggtcatcctcttctccagtgccgtctacttcgcagaggctgacgatgacgattcgctttttcccagcatcccggatgccttctggtgggcagtggttacaatgaccacggtaggttacggggacatgtaccccatgactgtggggggaaagatcgtgggctcgctgtgtgccatcgctggggtcctcaccattgccctgcctgtgcccgtcatcgtctccaacttcaactacttctaccaccgggagacggagcaggaggagcaaggccagtatacccacgtcacttgtgggcagcctgcgccggacctgagggcaactgacaacggacttggcaagcctgacttccccgaggctaaccgggaacggagacccagctaccttcctacaccacatcgggcctatgcagagaaaagaatgctcacggaggtctgacccatgcaggc

SEQ ID NO: 121824 - DNA, 172 bp, Homo sapiens
  chr12:4967025-4967197
  hyper
gtgtcccaggtcggcgctatgagcttctgccactagggggaaccagggctatttctctgcaggctccaggctgtgagaagaggaaaagtactgaagagagcgagcaaagcctttcagaaaatactgcaacactgcgtgcccgaggcccccgcacatcgctgcaatcttgatg

SEQ ID NO: 121825 - DNA, 1017 bp, Homo sapiens; identical to SEQ ID NO: 8548
  chr12:5018017-5019034
  hyper

SEQ ID NO: 121826 - DNA, 658 bp, Homo sapiens; identical to SEQ ID NO: 8549
  chr12:5019084-5019742
  hyper

SEQ ID NO: 121827 - DNA, 520 bp, Homo sapiens; identical to SEQ ID NO: 49247
  chr12:5019793-5020313
  hyper

SEQ ID NO: 121828 - DNA, 211 bp, Homo sapiens; identical to SEQ ID NO: 49248
  chr12:5020440-5020651
  hyper

SEQ ID NO: 121829 - DNA, 55 bp, Homo sapiens; identical to SEQ ID NO: 8551
  chr12:5131853-5131908
  hyper

SEQ ID NO: 121830 - DNA, 469 bp, Homo sapiens
  chr12:5152817-5153286
  hyper
gaatttcagcgctgtcggtacaacctgttcctccatcctccccactccttccctccctccgctgggctgcacccttctcagcccctcctttcccttgctaggggccccagctgcgccctccggggagacacccgctgccacgagacccgggaggggaagcgggaggagggggagaggaggggaaggcgggggaggcgccgagggtggaggccaagcgcggcgcagccagagaggggcggctgaaggttgcatctgctggaaggaggcttttcggctgcttggtaacgggctgccagaagagagagaggcagagagcagggcagcggcttcttgacgtcagggccaagcgaggggatcgcgccagcaaccccagctctccccagagaggggccggccgaccgctggagcggagcctgacgccaggcgcccgcggagcgtgagtagggggcgcgggagccggtcagctggg

SEQ ID NO: 121831 - DNA, 103 bp, Homo sapiens
  chr12:5153357-5153460
  hyper
cgtcagaggaggcgatgaggcccgggcaggctgcggccaggccacagggggagagctccagtgtcccccgacggctgggctcagcgatgggcccaaggagccg

SEQ ID NO: 121832 - DNA, 30 bp, Homo sapiens
  chr12:5539646-5539676
  hyper
ctgggcctcggtgggcgcttctggcggttt

SEQ ID NO: 121833 - DNA, 30 bp, Homo sapiens
  chr12:5539887-5539917
  hyper
gccctaaccgaaacgcggaacggcttgctt

SEQ ID NO: 121834 - DNA, 286 bp, Homo sapiens
  chr12:5540358-5540644
  hyper
ggtttgtttgttgctcgcctttcctgcttctcgcgctgtccccgcgtgcagactggtgggtgctgggcgagtgattagctgcagggccccatcctagtttggaaggaaggggtttagaagttggaggatgggtgaaatgggaggctgcgatccatctccctctcccttccacactcaagctcccgcaaacacgcgcgcgcacacacagcccctccctagtccctcggaccacccgcccccacgcccctctaccttgacctcccttgaccgccgacacagcgtcctg

SEQ ID NO: 121835 - DNA, 2100 bp, Homo sapiens; identical to SEQ ID NO: 49252
  chr12:5540931-5543031
  hyper

SEQ ID NO: 121836 - DNA, 31 bp, Homo sapiens; identical to SEQ ID NO: 8557
  chr12:6189830-6189861
  hyper

SEQ ID NO: 121837 - DNA, 824 bp, Homo sapiens; identical to SEQ ID NO: 49254
  chr12:6309397-6310221
  hyper

SEQ ID NO: 121838 - DNA, 30 bp, Homo sapiens; identical to SEQ ID NO: 49255
  chr12:6385711-6385741
  hyper

SEQ ID NO: 121839 - DNA, 30 bp, Homo sapiens; identical to SEQ ID NO: 49256
  chr12:6387593-6387623
  hyper

SEQ ID NO: 121840 - DNA, 185 bp, Homo sapiens; identical to SEQ ID NO: 8559
  chr12:6387949-6388134
  hyper

SEQ ID NO: 121841 - DNA, 525 bp, Homo sapiens
  chr12:6419603-6420128
  hyper
cgcctcgcgggggtctggcccggagtggagggcgcgcggtcccagccctcccgctcggccggcgggtgtcgagttcaggtgcgaccgaaaaggggaaaggagggcaccgccacgtgagctgtcctctccggggaaggcggtggctgcgtgagggcgggggctgctcggtccccagggccccgcccctctgcccctctgccccgagcggtgctggcggtagggaggggccagcccggtccccgccctcctcgcccggacccgcgctgcccggctcccgcgggccgctcgatcccagtcccaggctgggcatcggggctggctggcatcgccggggagccgacggcgacggggagccccgcgggcggggagggcggcgcagggcagcgggtgcggtgacacctgtgggcacaggtgagcggcgggagggctacgcggcccgggggcggggcggccgggacccggggcctggaagccggggcgaaggggaaggaaggcctggcctcccgaaggcgggaggaggggagc

SEQ ID NO: 121842 - DNA, 205 bp, Homo sapiens; identical to SEQ ID NO: 49259
  chr12:6444949-6445154
  hyper

SEQ ID NO: 121843 - DNA, 404 bp, Homo sapiens; identical to SEQ ID NO: 8561
  chr12:6449619-6450023
  hyper

SEQ ID NO: 121844 - DNA, 51 bp, Homo sapiens; identical to SEQ ID NO: 49261
  chr12:6450523-6450574
  hyper

SEQ ID NO: 121845 - DNA, 316 bp, Homo sapiens; identical to SEQ ID NO: 49262
  chr12:6450829-6451145
  hyper

SEQ ID NO: 121846 - DNA, 530 bp, Homo sapiens
  chr12:6472463-6472993
  hyper
ttttttttttgcccgcgagcccacgaggccccgcgtggtgtcactgggctgcgcgggcgggtcaggaaaggagcggagcccatgggtgggcggggccaggggccggcgaggggcggggcgggcccctcggcgctgcgggcctcaccagctggaagccgatcttccagtccttccagtccacctgggggttgttgtcccgcaagctggaggccacgctacgggctcgacgggccccgtgaggcgggggcgggaccctcaggcgctgcaaggggtgcggcagagtcccccgcaggtcgcgacggctgcgggagccggccacgagagtggtgaaggagctgtatttgtacaggtcaaagagcgtctgctctgtgatgcggtccagctcctccagctcctctttaatttccgggtacctgaaggggcgaggggaagagggtcaggccaggggccctggagcgagtgtctggcccctccggggtcagggtcctcatctgtgccccgggaggccggtccatcccggagaagcctgg

SEQ ID NO: 121847 - DNA, 14 bp, Homo sapiens
  chr12:6473162-6473176
  hyper
gcccggacctagaa

SEQ ID NO: 121848 - DNA, 499 bp, Homo sapiens
  chr12:6492949-6493448
  hyper
gccttgcagtccccgcgccctgccctctccatgactgcccgtcctgggcccctcgctttccagatcccgcacccagctgtcccttgcgctctctggaactccctctgctctccctgcgaggcttgtccaagggctgaccccgggcccgccgcccttccctcggctgggccagggctgtccgcagtccgctctcccgatcgggcttccgaagaagggaggaggccggttccggccccgcggccctcacgtgctttcccggccgcccctcccgccccgcatcgaggcagacaagcctgttcctcttccctgggctgcgattgcgacaggccggcctggctcccagcgctccctgtccccgccccgcggccagctcgctccactcccacttcctgagctccgccatgggagccctggaggcccggcctggccgctcccggccctggggtgcacatcggccctgagtcccgtcccaggctctgggctcgggcagccgccgcca

SEQ ID NO: 121849 - DNA, 117 bp, Homo sapiens
  chr12:6493504-6493621
  hyper
cgcctggccgagtggccgccatgctcctgccttgggccacctctgcccccggcctggcctgggggcctctggtgctgggcctcttcgggctcctggcagcatcgcagccccaggcgg

SEQ ID NO: 121850 - DNA, 30 bp, Homo sapiens
  chr12:6493822-6493852
  hyper
cgcatctgctgctcccgctgcccgccaggt

SEQ ID NO: 121851 - DNA, 31 bp, Homo sapiens; identical to SEQ ID NO: 8567
  chr12:6532774-6532805
  hyper

SEQ ID NO: 121852 - DNA, 217 bp, Homo sapiens
  chr12:6560779-6560996
  hyper
gcgctgcaggagggcgggggctctggttgtaaaacacacttcctgctgcgaaagacccacatgctacaagacgggcaaaataaagtgacagatgaccaccctgcagctctccagcttcctctctgaaatcccagtcccaaaatccagtttcctggccgcctcctggctcaggtcaggatctggcagaggaggtttctcagccggttatgttggggcc

SEQ ID NO: 121853 - DNA, 225 bp, Homo sapiens
  chr12:6561337-6561562
  hyper
cttccgccgggcctcgcaagcagcgtaggactgtggagaagggcggtgggcaaggagggaactcgagagcagcctccatgggcacacaggagggctggtgcctgctgctctgcctggctctatctggagcagcagaaaccagtgagtctgggagtcggggagagctggctgggagaagagctactgaagccccagggtgccaccctccccgagattccagaagag

SEQ ID NO: 121854 - DNA, 234 bp, Homo sapiens; identical to SEQ ID NO: 49270
  chr12:6579633-6579867
  hyper

SEQ ID NO: 121855 - DNA, 30 bp, Homo sapiens
  chr12:6580109-6580139
  hyper
gtcccttcggagggcgcttcagcagtttgt

SEQ ID NO: 121856 - DNA, 30 bp, Homo sapiens
  chr12:6602905-6602935
  hyper
tgcccagccagggacgcgacgtctctggcc

SEQ ID NO: 121857 - DNA, 30 bp, Homo sapiens
  chr12:6603241-6603271
  hyper
gtgcgtgttgtgcacgcgtgttttttcctt

SEQ ID NO: 121858 - DNA, 103 bp, Homo sapiens; identical to SEQ ID NO: 8570
  chr12:6664242-6664345
  hyper

SEQ ID NO: 121859 - DNA, 152 bp, Homo sapiens; identical to SEQ ID NO: 8571
  chr12:6664370-6664522
  hyper

SEQ ID NO: 121860 - DNA, 30 bp, Homo sapiens; identical to SEQ ID NO: 49273
  chr12:6676794-6676824
  hyper

SEQ ID NO: 121861 - DNA, 30 bp, Homo sapiens; identical to SEQ ID NO: 49274
  chr12:6677610-6677640
  hyper

SEQ ID NO: 121862 - DNA, 30 bp, Homo sapiens
  chr12:6715715-6715745
  hyper
cctagcagggcacccgaaccgctcaggctg

SEQ ID NO: 121863 - DNA, 260 bp, Homo sapiens
  chr12:6772302-6772562
  hyper
ggaagtgactgtaacgcgacaggggccgaagccattttgcggctaaagcctttccgcccttaaaaggagaacttccgcccttaaaaggagaacttccgcccttaaaggagaacttccgcccttactatattaccgccggtacacatccgcccgacactgaaacttttccttttgcatggtagccacgaccgcccacagtgaggcggctgtagcccgcttccgcccttacagacaccccaggacgcgaccgagacaggtat

SEQ ID NO: 121864 - DNA, 30 bp, Homo sapiens
  chr12:6798103-6798133
  hyper
tccttcccatcgcccgctcctccacaacca

SEQ ID NO: 121865 - DNA, 340 bp, Homo sapiens
  chr12:6798811-6799151
  hyper
tagcttctgcccagcgactgggaagaggggatgtgacgctatagcggaagtgaaggcgggttccgctaggggcaaaagctgaaaccggaggactccggccctgagcttccggaagggacatctggggaaggtgggggggtggaaacgcgacaggttcatgaattatccatcaaggtaggagaggaggtgtgggttcttcagatgctgggaccccgtttctcttccctctggatgttgaataagctgatgtaggaaattaccattattttttctgatacccccaagaatgtctcaatgctttgaatatgcgggaaaggactaggacgtatccttgtttttc

SEQ ID NO: 121866 - DNA, 724 bp, Homo sapiens
  chr12:6809092-6809816
  hyper
agcgaaccagtgaagcggagaagggctcccagggcgcatctgtggccagctgactctaggactatcgcccctccgcctgtgcatccccacccccagccagcgccaacccagtccctgggccccgcacagcttcagccgccccctccaggaagcccgcagtccccgggctggcgcgccacccccacccctctcccagcttctcaccgacctgttgtgcgcaggagacgagctgggggtggggcaggagcctcggggtgcgggagccgggccccagccccagcgtggcccccatcccacccatcccgcaggcccgcactccccgcacagggctggagagcggcgagagtggggggagacgaggaaaaggaggtcggcgaagggaccccgaggcagggagtgccgagagcggactggggacccgaagcaggagactgcgcggagccgcccgccgagccgaggcgggatggaggcagccgcggggacggggacggctgcgccagggagggcgggagcgagccaggaccgcggagggatggagagcccttcggggaaggggcgctgggaggctggaggccttgtcccgggcgagggaccgcgtcgggaggggcaggaggcgcagggcgcggagccgggaagggcagggccgggctccccgcgggtgggggcgtgggggtccctctcactcacctgcatgcttggcgcggcggcgcgacgactgcgggcg

SEQ ID NO: 121867 - DNA, 342 bp, Homo sapiens
  chr12:6832841-6833183
  hyper
ttgtttcctcatcccgtttttttccctcttcttcactccttccgttacagcttttctcttgcctcaggtacccagtgcagtcctgatctccagctctccagcggcttagaacagacacagaatgggccgggaccagggacccaccagagacgtctgtagttaatagctggcgctcttccactaataaagttttattgaaataaagcatttaaaaaggcgcccgtcattcttcccccagcgaccaatcgaagagtagaatgcctgcgtccctcactggagcttcagcggtcggaacgcgggggtggggcatgtcctgccgaaatttgcgtccttagagcggaa

SEQ ID NO: 121868 - DNA, 30 bp, Homo sapiens
  chr12:6862386-6862416
  hyper
ccgagtcccaggggcgccggggccatgggc

SEQ ID NO: 121869 - DNA, 55 bp, Homo sapiens; identical to SEQ ID NO: 49277
  chr12:6862686-6862741
  hyper

SEQ ID NO: 121870 - DNA, 30 bp, Homo sapiens; identical to SEQ ID NO: 8572
  chr12:6863000-6863030
  hyper

SEQ ID NO: 121871 - DNA, 30 bp, Homo sapiens; identical to SEQ ID NO: 49279
  chr12:6874949-6874979
  hyper

SEQ ID NO: 121872 - DNA, 30 bp, Homo sapiens
  chr12:6888413-6888443
  hyper
atatgagtatgtgcccggtgactgtcacat

SEQ ID NO: 121873 - DNA, 550 bp, Homo sapiens; identical to SEQ ID NO: 49280
  chr12:7260778-7261328
  hyper

SEQ ID NO: 121874 - DNA, 506 bp, Homo sapiens
  chr12:7282301-7282807
  hyper
ctcgaacctgccatcgtcccgggcttcagaatccactgggcttggttcatcatggtttaaggtgaaattcggggcgaaggaggcaggacaggtaggcaggaggaggcggccggtcccgacaggtgcgtgcgcgaggggtgcacgacgtcctgcccctccttgggtcccagagcctcgataccgccctgcggaccgccctgtggcttcctcgcagccctgggctacaaatgccaggatttctcaggctcagactgagggttttacttcacccttcccagagggcacgcagcacggatctgtggatggaaggggctgtggaaacaggttatggcagagttggggggcggggtgacgcggtgccacccctcctggccgccctcaggtcccgctgacgtctctcttccccaccccctggcttctggcttctttctccccacgtccctcttctttcccaccccctccgtggctctccagcttcctccccagcccccgcagttcctcggctc

SEQ ID NO: 121875 - DNA, 30 bp, Homo sapiens
  chr12:7342159-7342189
  hyper
ccgtcaggctgcgtcgcagtcttaaggccc

SEQ ID NO: 121876 - DNA, 46 bp, Homo sapiens
  chr12:7342756-7342802
  hyper
gcctttgaggggggcggcaggagagagtaccgacctccctcgaact

SEQ ID NO: 121877 - DNA, 226 bp, Homo sapiens; identical to SEQ ID NO: 8574
  chr12:8088726-8088952
  hyper

SEQ ID NO: 121878 - DNA, 146 bp, Homo sapiens; identical to SEQ ID NO: 49284
  chr12:8113444-8113590
  hyper

SEQ ID NO: 121879 - DNA, 447 bp, Homo sapiens; identical to SEQ ID NO: 49285
  chr12:8123150-8123597
  hyper

SEQ ID NO: 121880 - DNA, 522 bp, Homo sapiens; identical to SEQ ID NO: 8575
  chr12:8171288-8171810
  hyper

SEQ ID NO: 121881 - DNA, 30 bp, Homo sapiens; identical to SEQ ID NO: 8576
  chr12:8185009-8185039
  hyper

SEQ ID NO: 121882 - DNA, 248 bp, Homo sapiens
  chr12:8185698-8185946
  hyper
ctcctgcctagaggcgaggaagacccctgtactggccggggaggagacccccagaagtggaaagaagggagctttccgtagggaagcagagtgagaccaccctagcgcgcccccgcccctccaaacacacactctcaacagttcaggactttggaggcaaagagagacggggctgtgcctgtggagtaggcaccctcggcccaccactattcacaggagacaggagtccttacgttcagaagccactc

SEQ ID NO: 121883 - DNA, 30 bp, Homo sapiens
  chr12:8234632-8234662
  hyper
agagatttccataacgagagtcacgcactt

SEQ ID NO: 121884 - DNA, 30 bp, Homo sapiens; identical to SEQ ID NO: 8577
  chr12:8332866-8332896
  hyper

SEQ ID NO: 121885 - DNA, 1665 bp, Homo sapiens
  chr12:8849729-8851394
  hyper
acaacaaaggctcagaggaagcgtagcaactaacttgtccaaggtttacgccggtttctagggggcagagctggcgctatccaccccgcctgtatctccaaacccgcttcagccaggaaatttatcatgtggttttaaatttgcctctcaatatacagaggtactgtctttactccagtcccggataaagaccttctaggtatgaatgatctttgtctccatatctttgcctaccggagggaggaaccaccgtaagcggagactccgggcggcggccggcggaagggctgggcgggaggcgtcgggatgccggcaggaccctgcgcccgagggggtagggggctcgtgtcggggttccaggcgcagattgatggggcctaagcagggaatgtgagggcggggagggcgtacaacggaagggactaatctcgcggtttcgagttgggagcaaacctcgccccccaccccccccatccgtttccctttctcagtgaagacggtttgggggcgggtggggaggcgcgtcctcggagcgccctcgcgctcccttttcgctccccgcgcgcgatccatcgcctctcttcccccgaggccagcgatggctcgggtgcgggcgaggagctgggagggcggctctcgacgcaggtgtcagatccgctcggcagtgctcggcgcgctggcccggcccccagctcctccggccgccgccccccgcccgccgcgccgcggcgccaggagggcggggccggggcgcgcgccgctcctcagcaagcgggcgggcggcgttcggtctgagggagcggggcggtctccgccggcgtcgcgcgcgctgtgtgtgagcggggtcgcgcgcgcgcgcggcaggcgagtgagggaacgaggagcggccgggtgtgagtgtgtgggagtgagagtgtgtgggagtggggtgagggagaagctgacgggacgcgaggctgtgagaaactgggcgagtgtgcgaggacgcccggccagcctgcgggagccgcagtcggcggaggagaaaggaggcggctcccggtatcccgaccccctccccctcctctccttcccccacttccagccgcccggcggcccgcgcttcctcgaaggccccagcccggctcagtcggccgagagcgagggaggagccccccgacccaggtgagcggtacgaccgctgttgccctcgggtgtagagcagtgaggcgaaggcgcgccctcccgagtgggcgagttcagcggaatggatcccccgattagcgggggctgggccggggaggggaccggcccgagcgcgcccggggtccggggctagttgaggccggtggtcgccgctccgcggagtcggtggggagcgaggcggggcccggccttcgcgcgtgtgccgggaggcgccggcccgtggcgtgtgcgtgcgaccgggcgagccgtgtcgagggggcggcgacttcgggcgtgtaaggagtatggtttccccgccggcgagggggtgtggtaaccccgggaacgccggctggagtcggacccgcgggctgctgacctgtcctcgggattgcggcgacactccccctccccccccttcccacaaattctatggagcgaccgcgggaggaggatcacgtggtgcggtcccgcagctactgtattcgattccacgttttc

SEQ ID NO: 121886 - DNA, 30 bp, Homo sapiens
  chr12:9066969-9066999
  hyper
gccatggcaacgggcgccggcaggaaacga

SEQ ID NO: 121887 - DNA, 30 bp, Homo sapiens
  chr12:9067462-9067492
  hyper
tgggggcttggctgcgcggggatgtatcct

SEQ ID NO: 121888 - DNA, 30 bp, Homo sapiens
  chr12:9102613-9102643
  hyper
tcgccctcgggctccgcgggagttgtagtt

SEQ ID NO: 121889 - DNA, 293 bp, Homo sapiens
  chr12:9216952-9217245
  hyper
gcggcggagcagctgcgggagccgcagtggctgctgtgggacatctgtgcctcgcgtcccctgtgccttgagaccccaaagcagccgactgcgccgccaccatcctcgcgttgccgggtggggcgacgtgctccccggccaggagcctccaccgctccggaccctggccctatgtcgccgctctcgcccgccgccgccgcggagtgggagtggggaggaggggaacagtccttggagccggccccgggagtactcccggagcctgccgccctggaagccgccacgatggaccg

SEQ ID NO: 121890 - DNA, 30 bp, Homo sapiens
  chr12:9436227-9436257
  hyper
cgcgtcccggagtgcgcatgcgcagcggcg

SEQ ID NO: 121891 - DNA, 30 bp, Homo sapiens
  chr12:9600860-9600890
  hyper
agaatccacaggggcgtggtttgcgcgcgc

SEQ ID NO: 121892 - DNA, 30 bp, Homo sapiens; identical to SEQ ID NO: 8579
  chr12:9620959-9620989
  hyper

SEQ ID NO: 121893 - DNA, 30 bp, Homo sapiens
  chr12:9800604-9800634
  hyper
ccaagcaaatctcccgcgggcgcgtgggag

SEQ ID NO: 121894 - DNA, 30 bp, Homo sapiens; identical to SEQ ID NO: 49291
  chr12:9903439-9903469
  hyper

SEQ ID NO: 121895 - DNA, 11 bp, Homo sapiens
  chr12:10022420-10022431
  hyper
cgtgcaaagtc

SEQ ID NO: 121896 - DNA, 489 bp, Homo sapiens
  chr12:10306046-10306535
  hyper
gcgagctcgcaacaacgtcctgtggtgtggcccagcgcggggagctgaccccaccagctccgctctcaagccttcggagagtcctctccagtcactatcgtcattcccgcatttcctttgctaggctgtccgggctgggcagctccctcaggcggacacccatggctggcagaccttccgcgcctgcccctaatctgggcatatcactccctcggttttctgagactcgggactccttgcccgctggagcgcaggccatgaatctgggtcccgcactgcggcgctgcacgccgcagcccagggctttggccccagccagcacatccgccatcctgcaccccaggttccggcacgggctgcgacggggcctcggaactgctcccaagcggctgggaaagaactcagtcaggcatgtcggcctgcaaagcacccaggatgggcagtggagtctgcaccgttgacaggctcctagagcggccaggcagagga

SEQ ID NO: 121897 - DNA, 30 bp, Homo sapiens; identical to SEQ ID NO: 49293
  chr12:10365015-10365045
  hyper

SEQ ID NO: 121898 - DNA, 30 bp, Homo sapiens
  chr12:10365444-10365474
  hyper
gtgacgtcacagcccgacgcgccacccagc

SEQ ID NO: 121899 - DNA, 30 bp, Homo sapiens; identical to SEQ ID NO: 49294
  chr12:10365962-10365992
  hyper

SEQ ID NO: 121900 - DNA, 100 bp, Homo sapiens
  chr12:10516945-10517045
  hyper
gggagcctaactagactcacccgggacatgagagaggctcatttcgtccaatgaggaatcctggggcaaggaaggtgtgtgaaagtgtgtgaaagcgatg

SEQ ID NO: 121901 - DNA, 160 bp, Homo sapiens
  chr12:10517104-10517264
  hyper
ctgtgtgctctgaggcgagtgtggggggaaatcagacctaggacattgcatacagctgataggacgagctttgcagctgtagcaggctgtgacaggggaagacaccttcctggctaagcagtgtccgaaactcctgtaataggaccgggtctgctggacc

SEQ ID NO: 121902 - DNA, 156 bp, Homo sapiens
  chr12:10517554-10517710
  hyper
attgactcatggctaaatgtacgcagccctgcctagcagtttattgtagaatgctcgcagctcacgccgagataaaccaactgtgctggcagctacggagttaaagggaaagtcacagaggcttctagcaccaccgatccaaaagtgaaagtgaaa

SEQ ID NO: 121903 - DNA, 235 bp, Homo sapiens
  chr12:10766265-10766500
  hyper
tgaaagccgagtatcgcgtgagagtccggaggcgctgaagggagggtcgcagcgccgtgactttcgctttactaggaatggaggcacattgttttcaaaataaagattacattatactagcaaagattagaaatgtgagcatatgatagtcttttttatggacttagagctaaaggtttgcaagtcacttttacttttctggtctcccaatccttgcggcgtttgtgaggtgggt

SEQ ID NO: 121904 - DNA, 291 bp, Homo sapiens
  chr12:10826738-10827029
  hyper
cgaagggaagtctgcgggctccgaggtttccgggactcgccacactcgagccacaggaaacctctgctgcaactgtaaaggctggacttgttgctgatctatactcatttcctactctagtgattgctagatgtcaggtatcacggtgactccagtccaggtgaaaacggagtcacgatacagggcaacagcgccacctcacggccggccccgtagcagcggcctccattggcgcctaaaaatggtcaggattcacattcaggtggattattccgcgccaggaacattctc

SEQ ID NO: 121905 - DNA, 30 bp, Homo sapiens; identical to SEQ ID NO: 49298
  chr12:10874719-10874749
  hyper

SEQ ID NO: 121906 - DNA, 904 bp, Homo sapiens
  chr12:10875353-10876257
  hyper
gggtgggagatgtagcgcgagctgcccacacgtgctccgcggccggctgggcccgccccactacggcagcccctgccctccctggcctgactcaccgagaacttttttctccgcgtcttcgctgccggcggcggtggctaaagaggcggcggccgcggtgcccgtggctgcgggggccgcgtccccaccggggtttcctgcgacgtgggcggcgggcgccggggccgcggcctggggcgcaccgctgcccaccgggctcttgggcgcggggtcctggggagccgcggcggccgcctccgtcggagcctgcgggagggtggtggtggtggtggtggtggcctcgcccgcctcactcatgcctcctcctcctctgctctcgctcaggcgcctcggtggcggttggtcggcggttagcgcggctggtggtcgcggcggccggggctcgctctcggggaggccggggcggatctcgcggcgcaggcggcggcggccgaggtggggtcgcgcggcggaggcggctcgagcttcgtgctgcgcgctctctcttgggctcctcgctcgatcttactgccccaaaaatggccccgcacaagtttttctaggcggcgcaccggcccgggagggaagggcgggcgaggggagagggtggggaaacttggctcgggagtcgggccctggactctcattagcatttaaaggcgcccggtgcgctttctatggctccaatccgccgggacgcgagcgcgcgggtcgcgttgcagaaccaaggaaagccagggtgaacggggcgcccgggttgtcttctggagcgttccgaggagcccgcgctgctgaccctttgttggagcggggtgcattggctctcctccctcaacccgtcttgacacccgcagctgacaaggag

SEQ ID NO: 121907 - DNA, 30 bp, Homo sapiens; identical to SEQ ID NO: 8581
  chr12:11053581-11053611
  hyper

SEQ ID NO: 121908 - DNA, 31 bp, Homo sapiens; identical to SEQ ID NO: 8582
  chr12:11653356-11653387
  hyper

SEQ ID NO: 121909 - DNA, 45 bp, Homo sapiens; identical to SEQ ID NO: 8583
  chr12:11801642-11801687
  hyper

SEQ ID NO: 121910 - DNA, 30 bp, Homo sapiens; identical to SEQ ID NO: 49303
  chr12:11802139-11802169
  hyper

SEQ ID NO: 121911 - DNA, 428 bp, Homo sapiens
  chr12:11802786-11803214
  hyper
tgcgtcccgggtccccgcgccgcgccgcgacctgcagaccccgccgccgcgctcgggcccgtctcccacgcccccgccgccccgcgcgcccaactccgccggccgccccgccccgccccgcgcgctccagacccccggggcggctgccgggagagatgctggaagaaacttcttaaatgaccgcgtctggctggccgtggagcctttctgggttggggagaggaaaggaaagtggaaaaaacctgagaacttcctgatctctctcgctgtgagacatgtctgagactcctgctcagtgtagcattaaggtaaaaatcttctcccctccttctacgtggtggaaaccctgagctgcaccggccagggcagtcgtgctgggctcctcagagcaggctgttgcagttgctctgttcgcaggaaattatttg

SEQ ID NO: 121912 - DNA, 199 bp, Homo sapiens; identical to SEQ ID NO: 49305
  chr12:11905382-11905581
  hyper

SEQ ID NO: 121913 - DNA, 166 bp, Homo sapiens; identical to SEQ ID NO: 8586
  chr12:11992072-11992238
  hyper

SEQ ID NO: 121914 - DNA, 383 bp, Homo sapiens; identical to SEQ ID NO: 8587
  chr12:12006112-12006495
  hyper

SEQ ID NO: 121915 - DNA, 30 bp, Homo sapiens; identical to SEQ ID NO: 49308
  chr12:12009725-12009755
  hyper

SEQ ID NO: 121916 - DNA, 547 bp, Homo sapiens; identical to SEQ ID NO: 8588
  chr12:12022356-12022903
  hyper

SEQ ID NO: 121917 - DNA, 148 bp, Homo sapiens; identical to SEQ ID NO: 8589
  chr12:12037377-12037525
  hyper

SEQ ID NO: 121918 - DNA, 102 bp, Homo sapiens; identical to SEQ ID NO: 8590
  chr12:12038858-12038960
  hyper

SEQ ID NO: 121919 - DNA, 2802 bp, Homo sapiens; identical to SEQ ID NO: 8591
  chr12:12043873-12046675
  hyper

SEQ ID NO: 121920 - DNA, 1482 bp, Homo sapiens; identical to SEQ ID NO: 8592
  chr12:12046854-12048336
  hyper

SEQ ID NO: 121921 - DNA, 30 bp, Homo sapiens
  chr12:12186090-12186120
  hyper
gtaaaggactggtgcgccttagcaaccgcc

SEQ ID NO: 121922 - DNA, 499 bp, Homo sapiens
  chr12:12419420-12419919
  hyper
ggtccgcattgtggccgggcggtgcacgcagcccctgctcccgggcccctttctctccccctccccacgaccaggcctctccccgctcctctccccttctcccttcctccgtccctcccctccccctagacacatacaacaaggccacctccccccgaaccccaccaactttccagtgcccccactcttcccacctctcaggagcacacagaagctgcaggccaggaggctcctcaggacggcccccatcttcccttctcgcgttctcttctctcaccggcgaggggtggccagaagtgggggaggcgaggagccggggcggccgccgcagcggcagggctgcacgctcatacttcccagcttcccagcgagagaagaaagaaaggggcacgtcaaggttccgcgcgcgccgccgccgccctctctaccgcgccgctcggccccgggctcgcgcgacgccagcgtctgcttccatcccgccgcctcctcccccggcgcc

SEQ ID NO: 121923 - DNA, 625 bp, Homo sapiens
  chr12:12419964-12420589
  hyper
cggcgcagggatacggtcggcaccgcctcctagggtcgccgcgaccgtgtccctgcgcgcaacgagccccttctcccggtactgcctcctgtacggccagggaagggagtcggcaaccgcacgcacagcctctgcctgagaccctgggagaggttctgggctagcagaggcgaactgggagggaaagcctcctcccggtggcgcattccagcgggattctttcccggaccggccgcttcggccctccccgcggagggcgtgaggcggcgttgaacaacattggagccggcgtggtcgggactactttctgcggctcggccgggcagccgtctgccccgctctttgtgcggccgccgccggcagggccaggtggggctccggtctcgcgcccccagccacctgagactgcccagccgcggtgcacgcgcggggagccacggcggatcccgttgcggggtgatgagctccgtcttcggggttggaaatcggtttcagcatcctttttttgggagggcggaatttttgaacgctgtttacaccggctttcagcgtggatctggtgaacgatattaaaacgccaattcaaaactgagattgtcatttttctcccgccttcccagaaata

SEQ ID NO: 121924 - DNA, 587 bp, Homo sapiens
  chr12:12502884-12503471
  hyper
ggtcctttggatgctcgggtgtgggtgaaggagcctcggcccctggaaaggaggggaccgactctctccgcaggtagcgacgtcgcctgcggccggtcgggggtgggtattggggagacccctttacctggcgtcgagaggaccccggcgcccctgctgccatccaggtgcgaggacagctctgtcgcgcccgcgggaaggaccggcgaatccgcgcgggggtctcggcgaggaccgcagcggatgctccgcagctcccgcaccggcctggcgggttttgtggttagcaagttcctgcttccgtcgcagcgacggcaagtttgccgcgggggaagggcacgttcctgccctgcaacccggagctgcttcccggcaacattagcgcgtccctccccgcggaggctccgggctcccggccccagcgctgagccccgcagggaggtggctccccccaccgccccgcgctcccccccagctcagccacaccgctgaccccgggctgggcgcgctgcgagggggagtgcgtgcctccctgctggtggcccgagggtctgcaggtgagccttgcctcgcggcccgcgcaagtt

SEQ ID NO: 121925 - DNA, 207 bp, Homo sapiens
  chr12:12510049-12510256
  hyper
ccagtgagtgaaagcggcgccgcccgccggccgcaggtgcggcaaagccagtgtcatctgccggttctcttagggctcccggaaagaaggagggctagccgcgtgcgttcgcgccgcgcctccttgcgtttctgttccccaaatagggcctctccttctcccgccgcccaggcccctgcgtgggctggacgcgtcagccccacacat

SEQ ID NO: 121926 - DNA, 220 bp, Homo sapiens
  chr12:12715423-12715643
  hyper
gaggtggtaataatcgtttaaaaactgattaaagccccccaaacactgatacatagaaagagggggaaaggcgggggggtggggtggggggttgggggaaagagaaagagtcgctggtcaggaaacttcaagcgcggatgaggtcattggtttaaaaataaagagatggcgtcacttgaaaccaatcccagtgaatgaactcagcggagccccggggaaa

SEQ ID NO: 121927 - DNA, 293 bp, Homo sapiens
  chr12:12764616-12764909
  hyper
ccccgcctcctcagcgctagctagtaggcaaaaggaaaacagctgccccttaatgaggctatgtggacatcgtagttttttttccagtcagtagcgcagagactgtgataagaaaaatcacaattcccagaatgccgcggtgctacggcagccgaaggggccattccgtgtgcagcgctcccgcccaccctccggtctcggcggctctccagagcgtctgtaaacacccagagactgtcatggagggggaggaggaggcggcggcggcgaagggaggcgtttggggccgcctc

SEQ ID NO: 121928 - DNA, 30 bp, Homo sapiens
  chr12:12765383-12765413
  hyper
cttaacttgcctgtcgagataagaaactac

SEQ ID NO: 121929 - DNA, 203 bp, Homo sapiens
  chr12:12848340-12848543
  hyper
ggccaggaggctccatcggaaggaggcagacacttcaggtgttgggtggtacctttaagatgttgcggggccaaatccaatgccggtgcaggtgtcccatatatcctgagagacaaaaagaggtcagattggtcagatccctcgagacagttcccaaattcctgacttctgttaccgcgactgttcttcgcaattccacctcg

SEQ ID NO: 121930 - DNA, 503 bp, Homo sapiens
  chr12:12869128-12869631
  hyper
ctggaatactagtatcggacgttaggacatggttgtggtgttttaaaaatcatttcatcatctggagtttgaccccgaggggagtattttcacccttcagccctctgaaagcattcactagcatctgaatattgttctgagtttgttggagcagtgaaatctggtgagagagaagggtggaggaaggaaggagctgttgtatttggcggctggactcaggtagaggaaactgctacaatcccgggaaagaacagaaaagtagaaagggacgagttcccacacgcagccaatgtccatggccttaactgtgcttgggaaggaagatcctgggccaggggtgtaccctcgtttttcaaaactaaacgtgtctgagacagctacaaagtttattaagggacttgagagactagagttttttgttttttttttttaatcttgagttcctttcttattttcattgagggagagcttgagttcatgataagtgccgcgtctactcctgg

SEQ ID NO: 121931 - DNA, 422 bp, Homo sapiens
  chr12:12871737-12872159
  hyper
aaaaatttcccctgcgcttagattcttctactcaaaacaaaagagccaacagaacagaagaaaatgtttcagacggttccccaaatgccggttctgtggagcagacgcccaagaagcctggcctcagaagacgtcaaacgtaaacagctcggtgggttgatcactaaaggagcacgcactggaacccggggccttcagacctcacgatacctgatcttactggttgctggcaaattaaaagcttatggggttttgttttgtttatacttcgtgaggtcaaaaaagtagcaatggggaaggctggggatacggtaattcctcagagtttctatgcccagagatactttctcttcaaactgttgaccagagcagctacttgtaacccaggccccatcgggtaggaaggtcgtttccctgtgagt

SEQ ID NO: 121932 - DNA, 30 bp, Homo sapiens
  chr12:12876126-12876156
  hyper
tgggttaaattttttcgctcaaatacctac

SEQ ID NO: 121933 - DNA, 104 bp, Homo sapiens
  chr12:12876592-12876696
  hyper
tgcgttttagttatgcgggccagggagaagtggatgctcgccgcgccaggcacgtccacaggaacgcagccccgagtcaccgtgtccttcgtcctttacccgcc

SEQ ID NO: 121934 - DNA, 287 bp, Homo sapiens
  chr12:12877457-12877744
  hyper
gcgtgggcttcacaggcgaggagcggggcgagaggcctctcaggccggggtgcgcccaccgccccggcctcagggagcgactttcccggaggccgggggacgctgccttcgccatttcatcttcatcatcacagcgcccacacttgctcttctctcaagctctttgcacagaaaaagtgattctaaatctcctctaggatctcctgtctggtgttcagagtatgaatttctttttaaaacttgctgtgtctttcacctgggccacaccctacgcccacccaccccct

SEQ ID NO: 121935 - DNA, 30 bp, Homo sapiens
  chr12:12878196-12878226
  hyper
ccccgcgctccggccgcggccccggagcct

SEQ ID NO: 121936 - DNA, 411 bp, Homo sapiens; identical to SEQ ID NO: 49321
  chr12:12939504-12939915
  hyper

SEQ ID NO: 121937 - DNA, 30 bp, Homo sapiens
  chr12:12966209-12966239
  hyper
gggcgcgcagagcacgtcgtccggggagaa

SEQ ID NO: 121938 - DNA, 444 bp, Homo sapiens
  chr12:13044059-13044503
  hyper
gagctgctgcaatctcgcgggctgggcccttgccccgggtggacccgagtgcctgcggggaggcgggtgtggctcccccgggaggtgacagctggcggggcccgtaaggagctggtctgctccggctcccctctcgtagccggcgccctgggaccagcgcgtgagcacgtctcggaggagtccgatgcgctgggcagggccgggtggtcacccccgcccagcttccaggggtgactgtgcctctgacgtcagacggtttttgggtcattccctggcacggggactttattttcataacagcatgaagtgccgtggaactggaataggcgtgtcctctccctcgaccctccccctccttgtccctctgctcacccctcgctcgttccctccctccggcgagggccgcctttataacaactgctcagagtgcgagggcgggatagc

SEQ ID NO: 121939 - DNA, 71 bp, Homo sapiens
  chr12:13069192-13069263
  hyper
tctcctttgacctaaacgggcgatgatgaaataaaactcaacagcctttctctcatcttgcattgtgagat

SEQ ID NO: 121940 - DNA, 108 bp, Homo sapiens
  chr12:13069316-13069424
  hyper
cggccatgccccatgtttccactagatggcgctgacacttcaggcatcaaccctcatggcctctcagccttgcaaaggcagccacttaaagtcggtgtcctgtgtggg

SEQ ID NO: 121941 - DNA, 448 bp, Homo sapiens
  chr12:13152997-13153445
  hyper
aggccacgtctctacgcttccgaacagcgagttcttgatcatgcccaacatgttgtagccgagacgctcccgacgcacgggaggacgtgaggtggcgggggcgacggagcaccacgggcagcgaccaccggcggcagggcggcagggcggcagggcggcagggcggcagggtggcagggcggcaaggcggcgggacggcgaggcggcgaggcgagaggcggggctagaggcaggggccagagggcgtggctagagggcggggcggcaattcagcccggcggtgaggcaagggggcgggacggcgaggtgaaggggcggagagagagggcggggcggcgaggcgagggggcggagagagggcgggtcagtgatgcgaagggcgggcagcagggcagcagtgcagcagtgcagcagtgcggtgaggcgagggtgcgaggcggctaagcaa

SEQ ID NO: 121942 - DNA, 94 bp, Homo sapiens; identical to SEQ ID NO: 49324
  chr12:13154240-13154334
  hyper

SEQ ID NO: 121943 - DNA, 32 bp, Homo sapiens; identical to SEQ ID NO: 49325
  chr12:13197533-13197565
  hyper

SEQ ID NO: 121944 - DNA, 245 bp, Homo sapiens
  chr12:13254492-13254737
  hyper
ggagctgggccggggcgctaggccacctgaggcgcgtcccctctgccgcctggcgaggctgcgcgggagggcggagagactgggtagtcggagggattccttacacccaggccggtgggccagggctcgggatgtgtcgagctgctggagtccaaagtcaggcatttccctgcctctgcccggtaaagctatgggtcccaggctcccgttctaagggaaggggatgtctgcgtctcattgggaag

SEQ ID NO: 121945 - DNA, 30 bp, Homo sapiens
  chr12:14017065-14017095
  hyper
tgtacctgcacccacgtaaatggaagaata

SEQ ID NO: 121946 - DNA, 2022 bp, Homo sapiens
  chr12:14133240-14135262
  hyper
gccggctccgtccctcggtggagcatggtcattcccaaagcgtccccttcctaagggggaaaaagaggcggtcagggcttgattcgcgtgtcccccggagggtgagaaaaatgcattccgaaaaagatatcaattcgttttaaggaaaggggggaggaaaccccgcatttcccacagagtgcacacgagaggaattgaaaacagctggtaccggtctataaataattcagaaaaggtctggctataccattcctgggacaggcacggatgagaggtgggaaagccaacctgaatggaagaggagagagggagggagcgagcgaaggagggaagtgggaaggaaggaggaagggggggagaagcggcaccatacagcaacacacactcacacacacgcagaaacacaattcccacttaactcgccagcgagtgcggcccccagccccatctgcattgctgctgacttgtctcgctcgctctccccatcgcctccagcagcagcgccgcctcccaccccgggcttgtgctgaatgggttctgattgtgcacggggtgcacactgggcatttcttggaaggggcacactgacgcgcgcacacacgcccccgacgcgcacgcgccccgcgcgcactcacactcacccccgcgcacactcacccccgcgcacactcacgctgccgccgcgctgaggtgcagcgcacggggcttcacctgcaacgtgtcgattggacggatgggctcggcgcgtgggtccggcccggggcgccgctgccctgcccctctgctaggtgaagggatgaaaccccccaaaagaccagagacagccctacccagtcacagcaccccctcccccacaaaaaaaaaaaacctttaaaaaagccacgtccaaattagcaagtgccgggttctgctggatttcagagctttacctcatgccagattcgttcacgatttcacggcttcgaccctttatctgcctgacacccccaaacccctacattcaaaggagagactccaaagcccatctttacgtaccggctccgagcgcctccgcggttgcagtctgcggagaggggtggccggtggctgggaatggagggttttcctttcctgcaaagcaggattaatgatccgtctcgggggttttgaagttcatgactcttctttgcaaggcaaaaggatatgcattcggacgccagcactactggatggtggtgatcaagaatcacccttgacgagcactctcgatagagcgaagccccgagatttcctagaggtgaagaagccggaggaagtggtttttgaaagggggtggggggaaccttcctttctcaaaaagaggtggggggtggagaggcaggagcccagattccagttggtgaggatcggagccgggggaagggaagcgggcgggggcaggctgtgcaagtcaaccgcgcggcagccggagagggagagcaggaggggaggaggggagcgtcagaaaaatgggtattaatcaccggggacggggggaggcgcggggaacgcaggttgcctggtctggatttgggtctcacactcaaaaacgtgccgcgcacacacacacagacacacacacaccccctacctcgcacaccctgactccggggggaggagaaacccacgaagctggggaagatactgcttctgctcccaggggcgggtgtgagcgcgcgtgtcctctttctccacaccccccaccccaccccacccccaagcccctgcaccccctcactcctcttgctaagactctggcggaggcagcttcccacgtcatgtgctggggaagtggggtggtaaggtggatggaagggggacggaagggggaagaagcttagcccgagtccgtggcgcctcctcccggccgcagcggggaacagcaccgacggagagcggctgaggggcgaggggagctagacagtgccccccgtgggcggcccgcgggctgcggaaagcatctccaaggcggagctgtagttcgaaattgaagacccttgctgt

SEQ ID NO: 121947 - DNA, 30 bp, Homo sapiens
  chr12:14410597-14410627
  hyper
aatgaggccggatccgccctaacaaagagg

SEQ ID NO: 121948 - DNA, 44 bp, Homo sapiens; identical to SEQ ID NO: 49328
  chr12:14518511-14518555
  hyper

SEQ ID NO: 121949 - DNA, 258 bp, Homo sapiens
  chr12:14520247-14520505
  hyper
tggatttttaaatgacgtcacatatgagatagaatggaggtaggaaagattcttctttttttctcaagagaatatttgacctgatgtaattcttggatctctgaggtcttctacacagaagtatatttagagagcagttgtgtaattttctcccttttatgtttctggagtggttacctagcagcccctttctaccacatgctatttcaggcattttcgagttgaacatacacataaatatttcggttaacaaaagaa

SEQ ID NO: 121950 - DNA, 426 bp, Homo sapiens; identical to SEQ ID NO: 49329
  chr12:14720394-14720820
  hyper

SEQ ID NO: 121951 - DNA, 56 bp, Homo sapiens; identical to SEQ ID NO: 8604
  chr12:14923204-14923260
  hyper

SEQ ID NO: 121952 - DNA, 151 bp, Homo sapiens
  chr12:14924061-14924212
  hyper
ctgtgattgccagtcgcagaccagggcttatagtctctcgatgcggacctgtttgaaaacatcaaaaaagtgggcggagctctaggccccacctctggagacatgctatagttgttaagtccaggaagcagtcagcgaaaccagcctgatt

SEQ ID NO: 121953 - DNA, 1216 bp, Homo sapiens; identical to SEQ ID NO: 49332
  chr12:14927116-14928332
  hyper

SEQ ID NO: 121954 - DNA, 30 bp, Homo sapiens
  chr12:14956565-14956595
  hyper
agcccgcctcattgcgctcatctagtacaa

SEQ ID NO: 121955 - DNA, 539 bp, Homo sapiens; identical to SEQ ID NO: 8606
  chr12:15374052-15374591
  hyper

SEQ ID NO: 121956 - DNA, 828 bp, Homo sapiens; identical to SEQ ID NO: 49334
  chr12:15475221-15476049
  hyper

SEQ ID NO: 121957 - DNA, 1113 bp, Homo sapiens
  chr12:15941608-15942721
  hyper
aattcgagggggtaaacgggggtgggaccctgccctaaagggtcattttgaaaagaacccctccccatttgaggcgggttggcagagcagcgcacaaatcccaagtctaacgtaataagccgagatcgggatactcggtctgcagtcgccccacggaccagatgagcgcaggtgtatctgcggaagctcaggttaccatgaatatcactgggccacggcgaaccctccctgcccagcctcccggagccctgggcgcgggtctgcacgggccccacagcttgcccggacccggcgagcggacgcctccggccgcagcgccctaccgcacctggctgccaacaccagttgaaagcagtcaaagtgaagggaggcggacgcggctcctggcaccgctccgattccagcacacaaaggcggatttttaaaatcgagaaagtcaaagccgccggaccccgggaccggcgcctttcgccaaggggctcttacctcggatccgccctcggggccacggctttccccggagacgccgcgagcccagacgaggtgggaggggaccgggagaaagccccccaatctgattcgcgcccagccagtcgtccgcgagccgcggagccgccttctgcacccagctaaagagcagcgatctccgaggcgagcacagcgccggcctcgcgccgggcgagaccgcctcgctagctgctgcctgtgaagtctggagccgcccgcccgctcgcagccagtgccaaccgcgcgccgcgcatgcccagtgcccgcgcgaggaacgagcgagcgggcgggcgggcgagtgcgcgccccgcagccaggagcgaaatccgctatccgggtcttgccggcagccgagccgcagagttctggtcgactccagcgcttgaggcgaagtggccggtgaggccgggtgggcgggagagggaccggaggaaaggagacggggcgctgcgccaagttatcaaggccgcgatcaaagtcggaccaaggcagcgagtcgacagcaggtttccagaagtgccctaacaggactgactagcagccaggaggcgcaggaaggggcaaagagcgtgtggagagcttcgcccccggcgaggatggacgccc

SEQ ID NO: 121958 - DNA, 30 bp, Homo sapiens
  chr12:16034917-16034947
  hyper
caaattgcaaaaaacgttgccagacagcgt

SEQ ID NO: 121959 - DNA, 30 bp, Homo sapiens
  chr12:16035162-16035192
  hyper
tctcccttagtcggcgtgggccagcgccag

SEQ ID NO: 121960 - DNA, 30 bp, Homo sapiens
  chr12:16035674-16035704
  hyper
ggccacacgcgacccgtggttgatttggcc

SEQ ID NO: 121961 - DNA, 141 bp, Homo sapiens
  chr12:16064014-16064155
  hyper
gaatatttttattacgtgcaattggcaacttcagtattttttaaagggtgttggtagcattatttccgggagctacttagcgctccggttcggtacctcgtggagaagacgggggaggggagcagcgagatttccttgcgg

SEQ ID NO: 121962 - DNA, 293 bp, Homo sapiens
  chr12:16064518-16064811
  hyper
cggcacgttcgcgccgcttgtctttgcacctaagcttttactcttgtatgcggaaggagtaggaaagggttagattattatcttcctgccttttcgttcactctagctcgctggttggaaaacccaacaacccaaaaaacaaaacccaaaacaaacaacccccaagcaggtaaaaacagataaaaaccttctttctcctccttttaatagaatacttgtgtaatttaatgcagtatttccgtagataattttaaccgtaaccttgaagtggccgtgctcgtggaaaagttgtc

SEQ ID NO: 121963 - DNA, 647 bp, Homo sapiens; identical to SEQ ID NO: 8610
  chr12:16500381-16501028
  hyper

SEQ ID NO: 121964 - DNA, 541 bp, Homo sapiens
  chr12:16757938-16758479
  hyper
tacaccgccgaggaccgactattgtgaagccactttgggagcgggtcggagtggcggcagggggtgggggaagggatgaggacggccagacaagacagggcgcacacacggagcccctcgcagtgtgcaaaatgatggcgaatgacaaagccacatgcttccctaactctgcccgtaatcctaaaatcccagcggccccttttagcttcctggtaacaaatggatttgattaaactgtcacatgcagcgttagcatagcatatcatgttcaatatgaaaaagatcataaatctgacttgtatttcataacagcaatctgagtagtccccgtaaaaaatgtgctgcatcagtttgaatctcaatctattaggatataggcaccttggtccagggaccttccctcttctagccacttctgcccctacccgcctgccccccccccccgcccccatgcccaaacacagccacttttccacggcaaaggaacaacattttgttattatggctgcgtggagagaggcagaagcgtcaacaaggacca

SEQ ID NO: 121965 - DNA, 923 bp, Homo sapiens
  chr12:16758692-16759615
  hyper
gagtcgtacttgagacgttccgcgccgcagccgctctccctccttccatcaacatcttccgcctgcatctatttcatgtctcatcataaaaataatgaagcctcacatgatttaaacaaaaccgtctcagtagagctgcagcccgagtgaaagttgcagtgcggagctgggttgcagctccagtttatgcctcattagcagaggttggggaagaaaaaaatacccacatccgcacacgcacgcgcgcacccgcagacacacacaccacaaataagccgacgcgtgtgtacacagttgctgcacttaccttctcaattaagcgatacagggggaggccgttcagtaagcacagtggctgctttgtagcgcttctccttgggaaaggtcaaaaagaagcattgtttgaaaaaaaaaaaaaagacgggggagggaatgtctatttttttttaagtttaaaataatgaggtcctcaaggatacgccaagcaatggtgttgaccgcatctgagccacaggtgtcctccttttaggcaactgcagtccgaggctgtctctctccgtcctggttcaagacaacttaccccagcagcgtgcgaggagccgagctgaaggaagctccggctctcagctgcaaaatgcaatcccttcccagccagacataatacagccaaagaaaaggtcactcagttattagtgagccggcggagcccaggcagcgcttgtcaagaccacagagaagcagctcccttccgatttaagactatttacctctcgcccccacccctcccctcttctttccttctctccctccctctctcgctggctccctcgctcgctctcgtgtgcctgttctgcagctcagtcaagtacagccgccctcggaaagtgcaaagcagccacgagacagatcgggctttgttgcta

SEQ ID NO: 121966 - DNA, 1777 bp, Homo sapiens; identical to SEQ ID NO: 49341
  chr12:19282246-19284023
  hyper

SEQ ID NO: 121967 - DNA, 30 bp, Homo sapiens
  chr12:19592636-19592666
  hyper
gccgccgctatcaccgacatggccgacctg

SEQ ID NO: 121968 - DNA, 30 bp, Homo sapiens
  chr12:19593020-19593050
  hyper
ggcgggagcagcagcgacgagacccgctcg

SEQ ID NO: 121969 - DNA, 261 bp, Homo sapiens
  chr12:19593438-19593699
  hyper
cggaaatctctcgccgtcgccgccgcgcccctctcgcagcgcatcgcggcttccaactctcaaaccgttcccccccaactctcctttccccgccctctttcccctcggcgcttcgctcctcacggacctcaggacggctctaactcggaaacagtccccaaacgggcccagatcctctggcggagcagaagagggccttgatgtacacacgtcggtactcaaggttagcttcttccaaccgtgttcgggaacacttgtcag

SEQ ID NO: 121970 - DNA, 30 bp, Homo sapiens; identical to SEQ ID NO: 8614
  chr12:20183925-20183955
  hyper

SEQ ID NO: 121971 - DNA, 1160 bp, Homo sapiens
  chr12:20521071-20522231
  hyper
ctgcggtgggctgcgcggtggatcagcctcagcagcccctgctccagcctgtagggtgaaccggccgctttcccagcaaaggagcaatcgagctgagggtagcgcctcctccgcaggagggggcgggagctcggctgagaaagctttcctagggagttgccttaaagaaagaaagcggaattgtcgatcactccagttgccagttttatacaattttaagcagtcgtcgccactcgtttcccctttgcaaaactgcaaatcaccaccaaccttgcatcaaatagaagtggggagggaaaaaaaaagcaaatctccttctcccttctcaccctccctttcttctcaccctcccttcctctcttactcgctccttctccctccctcccttctgcggctgccgctagtctctcggtctggctctctctccgacgggacttagcaacttcttatttctcagccccttgtccatttttttttttccatcctttgccatgaattggattgacagaggcgggggaggctttgctttctgccccagggaatggcgattcgcgtcctggggccgtgccggggagaatcggccgaggagaaagaaagagtgatagaaaaagagctgcaggaaggaggagaagggagacctccatctgccgcgggcccggcgcgctgcagcgcagcgcagcgccgagctgcgcctcggaatggcccggagcccgccctgcgcccccggctcctccagcgtcagcggctcctgcgcgcgggatgcattgggcaatttttgaaatcctgaagtaggaagagaccccggaggatataagtcgggggtgggggtggagcagagaatctgtgaaagatattcaaagagagaaaaggggaatcctgatcgtttctgcccgtgcttgttttcaacttgagcgtgctagcctttaacttgaagaagtctcattggagcatctagcattctccaggagttattcgaaagctgaaactttcagtggattgtgggcctggggagaagaaggattccgagggtggaattgggaagagcgtgcgtgcgtgtgtgtgtgtgtgtgtgtgcgcgcgcgcgcgtgggtcggggcgggggcgtcggggggccactgggaattcagtgaagagggcaccctataccatggcagtgcccg

SEQ ID NO: 121972 - DNA, 932 bp, Homo sapiens
  chr12:20522347-20523279
  hyper
cgtggctgctggggagacctggtgctgcagccgctccggagctctcggaaactttcctccgcgctgtgcgcgggctccctgtcctttctgctggcgctgctggtgaggctggtccgcggggaggtcggctgtgacctggagcagtgtaaggaggcggcggcggcggaggaggaggaagcagccccgggagcagaagggggcgtcttcccggggcctcggggaggtgctcccgggggcggtgcgcggctcagcccctggctgcagccctcggcgctgctcttcagtctcctgtgtgccttcttctggatgggcttgtacctcctgcgcgccggggtgcgcctgcctctggctgtcgcgctgctggccgcctgctgcgggggggaagcgctcgtccagattgggctgggcgtcggggaggatcacttactctcactccccgccgcgggggtggtgctcagctgcttggccgccgcgacatggctggtgctgaggctgaggctgggcgtcctcatgatcgccttgactagcgcggtcaggaccgtgtccctcatttccttagagaggttcaaggtcgcctggagaccttacctggcgtacctggccggcgtgctggggatcctcttggccaggtacgtggaacaaatcttgccgcagtccgcggaggcggctccaagggagcatttggggtcccagctgattgctgggaccaaggaagatatcccggtgtttaagaggaggaggcggtccagctccgtcgtgtccgccgagatgtccggctgcagcagcaagtcccatcggaggacctccctgccctgtataccgagggaacaggtaagcactggcaactcctctctcggctcttggaaacttgaaacacttggcaaccggcgcagagtggagagaatccgagcgctgggaactaaagggaagat

SEQ ID NO: 121973 - DNA, 638 bp, Homo sapiens
  chr12:21590453-21591091
  hyper
aaagctctgaacaccacgagacaattcgttgcttccgaaacgcagccggcagcaggtactcgagatgagtagtgtgagctcccgagcacccgtaggtcggattatctggtaaggcaccggaagtgaccgcctcgcggctgcttcctctcctggagtccagagtcccgttgctccgccgcgatattcagtaaaccactgggagtccggcagcatggaggcagcgcgccctcccccgacggcagggaagttcgtggtggtcggcggcggcatcgcgggcgtcacttgtgcggagcaggtagggcggtgctcaggcggttccgcctctttccccgaccccaaaggggatagcactggaggccttcctcccaccccctccctttttcttcttccgggttccttttttgctgcgcccttttccgcacttattgctcccagattttagaaactgcttggtggtcctcagatgacctcactagctttctcttaggcgcagggaggagtgggaggcaaattatagccgagaaaccaaagctggctgatccgtgctcagatccttgtaatgtcagagcagacatgaggactttgtatttagacaaaaaattcagccccctttctttttatttttttttctttttctt

SEQ ID NO: 121974 - DNA, 30 bp, Homo sapiens; identical to SEQ ID NO: 49347
  chr12:21654272-21654302
  hyper

SEQ ID NO: 121975 - DNA, 30 bp, Homo sapiens; identical to SEQ ID NO: 8620
  chr12:21654649-21654679
  hyper

SEQ ID NO: 121976 - DNA, 793 bp, Homo sapiens; identical to SEQ ID NO: 8621
  chr12:21680358-21681151
  hyper

SEQ ID NO: 121977 - DNA, 564 bp, Homo sapiens
  chr12:21810330-21810894
  hyper
ccagctactcgggcacgtgtcccgactcccgccagcaggccgtgggggtgatgtggccgccatgaacccaccaaggacaagtagggcctggttttagctgcaaatgcaacaagtctctccgctgagccgcagctgctaccctctgccttctgctcctccgccagggcacggccccccctgcgccccaaactgagcggcaaagtcagggcccgcggccggatgctcagagctaaaggccgcggaggacagatgtgcttcttcctccttcccgcgtctccccatacaagtactaccccgcacgtcccatcaggcttgcctgtgggccaggattcagggtcctgagccgaaacctaccaggagagagaaggctctggagacctctgtaacagtcgtgcggagaagacaaagtcagctgcgtgcgtctcctccggcgccggctctgcaaggagggaggagggggcggggccccacaaccaccgcagcctcttaggtttctccattgtgattggaaatccgagtaccgcctacccctcccctcggctcgctcaatccccttcaaggaca

SEQ ID NO: 121978 - DNA, 571 bp, Homo sapiens; identical to SEQ ID NO: 49351
  chr12:21927267-21927838
  hyper

SEQ ID NO: 121979 - DNA, 128 bp, Homo sapiens; identical to SEQ ID NO: 8624
  chr12:21927877-21928005
  hyper

SEQ ID NO: 121980 - DNA, 329 bp, Homo sapiens; identical to SEQ ID NO: 49353
  chr12:22093939-22094268
  hyper

SEQ ID NO: 121981 - DNA, 470 bp, Homo sapiens; identical to SEQ ID NO: 8626
  chr12:22094577-22095047
  hyper

SEQ ID NO: 121982 - DNA, 93 bp, Homo sapiens; identical to SEQ ID NO: 49355
  chr12:22095181-22095274
  hyper

SEQ ID NO: 121983 - DNA, 31 bp, Homo sapiens; identical to SEQ ID NO: 8628
  chr12:22198510-22198541
  hyper

SEQ ID NO: 121984 - DNA, 87 bp, Homo sapiens
  chr12:22199507-22199594
  hyper
gcgagagtgggcggcgcggcctgggcgggggtcgggagagggagtcgggctgctggaggggctggggcctccggggccaccgctctt

SEQ ID NO: 121985 - DNA, 88 bp, Homo sapiens; identical to SEQ ID NO: 8629
  chr12:22486793-22486881
  hyper

SEQ ID NO: 121986 - DNA, 1133 bp, Homo sapiens; identical to SEQ ID NO: 8630
  chr12:22487133-22488266
  hyper

SEQ ID NO: 121987 - DNA, 505 bp, Homo sapiens; identical to SEQ ID NO: 49359
  chr12:22488339-22488844
  hyper

SEQ ID NO: 121988 - DNA, 138 bp, Homo sapiens
  chr12:22529505-22529643
  hyper
gacatagagaccttcacggggatggtgacaaagacgtggggatggttgacatttgctggaatgcttactgtacaccacacactcttctgagtacctgacatatgatggctcaaactggtcctcagcatcgttgtgaga

SEQ ID NO: 121989 - DNA, 30 bp, Homo sapiens; identical to SEQ ID NO: 49360
  chr12:22777805-22777835
  hyper

SEQ ID NO: 121990 - DNA, 268 bp, Homo sapiens
  chr12:22778928-22779196
  hyper
ccttcctctcccctccccctgcgatgtgctttcattgatgcctcacactgcgttttgtcttcccaaaccctagcgtactcaattcccaaagtaatgaccacgaccatgcatcgctaggtcggttcttaggcagcaccacacacattgttttgtttgagtcgatatttctgaattattaaagtcgtcttactgaaattaatacctgatactagaaggagcagtggcttgtgactgtttccttttcatgagacaccgtgttgatagagaa

SEQ ID NO: 121991 - DNA, 200 bp, Homo sapiens
  chr12:24103310-24103510
  hyper
acaacttgtcactcactctgtcggtctcactgttagctcgtgctttccgcaaagtggtgcgaacgtcctggcaacccgaccaaagtttcctcagctctaaactccataaaacacgatgtgcgatgtggaggggaataggtatccacatgccaaaataacatacacgagcgaacaaaaacccaaaacgaaatcaaaacata

SEQ ID NO: 121992 - DNA, 1938 bp, Homo sapiens; identical to SEQ ID NO: 49363
  chr12:24714475-24716413
  hyper

SEQ ID NO: 121993 - DNA, 257 bp, Homo sapiens; identical to SEQ ID NO: 49364
  chr12:24716472-24716729
  hyper

SEQ ID NO: 121994 - DNA, 19 bp, Homo sapiens
  chr12:25055613-25055632
  hyper
gtcctcgccacgctccgga

SEQ ID NO: 121995 - DNA, 288 bp, Homo sapiens
  chr12:25056242-25056530
  hyper
cgcgagcatccttgtttattaaacaacctctaggtgaatggccgggaagcgcccctcggtcaaggctaaggaaacctcggagaaactacattagggcagcttttccaccgactccaaatccaactgacaaaaagcagtttctgccctcgagagtttgcgggcggggattgacatttgtgcgtctgctcttgtctgccactgaccgctatgtgcaaactgaagggggagaacgtgaatccagcttttagatttccctgcgccacctacccaaaccgaatttgtaactcg

SEQ ID NO: 121996 - DNA, 628 bp, Homo sapiens
  chr12:25101369-25101997
  hyper
tgcttttaacagtgaaaagatcgttctccctcccctctccacccgggtcaactcttccagccgctccctcctgcatcacgaacacacgctgcaggaaagcgcatttacagcccgggacatccccagacctcctctccaaaattccccacctcctgtgcataggagaaactgagagaagccctcacttcctttccaaacttcacaagcaggggagggagctgtagcagactttcacctccgttcccaaaagcgaatgtgaaaaagtccgagaaggcacgtcctgcgagtggaggttaaaccgaaatctgaacagaatgcacggtccccgcaaactacgattgataaagaagatactgagacgtttgcgggggatataagccatggttgtctcgccttcctcccctccctgccaactatgtttcttggagaaatcgccggttcgattcacgcacacatttttgtaaaacacggacaaaaccataagtagttaccttcattgttccgtcggccacgagggaagctcgagctgagcggagggcagatcccaagggtcgtagcccctggccgtgtggaccgggtctgcggctgcagagcgcggtcccggctgcagcaagacctggggcagtgc

SEQ ID NO: 121997 - DNA, 323 bp, Homo sapiens; identical to SEQ ID NO: 8636
  chr12:25102009-25102332
  hyper

SEQ ID NO: 121998 - DNA, 62 bp, Homo sapiens; identical to SEQ ID NO: 49368
  chr12:25347648-25347710
  hyper

SEQ ID NO: 121999 - DNA, 309 bp, Homo sapiens
  chr12:25347958-25348267
  hyper
gcagaatcagtggtcgcccctccacctgtctgcctcatttgccttgctcaccattaagagtcaagctccactgcagtagtccgcagagtcggagcagaaattgtgtggacaaacgctcccgggttgcccggacgacaggccccgcccacttgagctccaggaaaagagcgcagccgcgcggaggctcttccggccggcgccccgccccctttactgacaggttgcccacctcccccaacgccaccccgcttcgcagtagacggacagaggagtcgtagcggtcgaggcttttgcggctccggcgtgccg

SEQ ID NO: 122000 - DNA, 224 bp, Homo sapiens
  chr12:25348632-25348856
  hyper
tctgtgcagcgtacgcgtcctttttcctaagagcgccctaaacaagaattgaaaatgaagcaattcctggctaaaatattccttaacatgaagatcgctgaggccccaaagactcattagtttcccgaggtcacagactaattttactaaccacacaacctttagaatttcagtctcctcccacatgaagaaacgccggcaccttacaccgacaggaaaactac

SEQ ID NO: 122001 - DNA, 30 bp, Homo sapiens; identical to SEQ ID NO: 8639
  chr12:25368388-25368418
  hyper

SEQ ID NO: 122002 - DNA, 136 bp, Homo sapiens; identical to SEQ ID NO: 8640
  chr12:25378545-25378681
  hyper

SEQ ID NO: 122003 - DNA, 95 bp, Homo sapiens; identical to SEQ ID NO: 8641
  chr12:25380228-25380323
  hyper

SEQ ID NO: 122004 - DNA, 87 bp, Homo sapiens; identical to SEQ ID NO: 8642
  chr12:25398213-25398300
  hyper

SEQ ID NO: 122005 - DNA, 260 bp, Homo sapiens; identical to SEQ ID NO: 49374
  chr12:25404338-25404598
  hyper

SEQ ID NO: 122006 - DNA, 143 bp, Homo sapiens
  chr12:25538252-25538395
  hyper
tcctaactagcttgccgaggagagcgtagagtgacacgggacgggggcccagggcactgaggccaagagttcccgagtcacgccagtgctcgcccctttggcctttgcctaaaatcctgcgatgcctcgctgacaaagcaccc

SEQ ID NO: 122007 - DNA, 363 bp, Homo sapiens
  chr12:26111917-26112280
  hyper
cagccggtgcggggcgcgcggcgcggggagcgccggggagtgccggggagtgcggcgcggggacgggcgctgggcggccgcggagctccgggtgccgccgcgtccccagcgccccggccggcccctctgggcggcctgcgggggcggcgcagttgcgaaactgagtaagtattaactttacttagcggcggcgatccgggctgcgccggggaccccgcccgtcccgcctgcagcctcggagctgccctccgcccggttgcccctctctccgcaccttgggtacctcgtccgttccgcccccaccctgccccgccgcgggctcccgctccctctgcgttcacctttcctggtgtgtcacccttt

SEQ ID NO: 122008 - DNA, 495 bp, Homo sapiens
  chr12:26112305-26112800
  hyper
cgcggactgaaaagtacgagcttggtctttgcttttctgcttcctcccagtgtccttggcaagggagtttagaggccacttttcttgcaaagggaattttatgtctggtttttaaaatattttttcctccggatggaaatcggatgctcgcttgccgggtggcggtttggtgaacgcttttctcctctaaaaaaatattggtttataggtttttaaatttcatttgaactattaaccatctgcattctattctcctttgccgccagtccctttggggaggggagtccagaagaggggacgttcaaagtaattctgacttgcaaactagaaagtttgagagggtaaatcgcacaaagccggaagattcaacttgaagggacgcgagctttgaatgtgggtcctggtgcggcactgggttttaaaagatgagtacttgggttcggaatccagtgttgcgttgttattttagcatcatagagccgcctggtgttgcta

SEQ ID NO: 122009 - DNA, 30 bp, Homo sapiens; identical to SEQ ID NO: 49376
  chr12:26267574-26267604
  hyper

SEQ ID NO: 122010 - DNA, 30 bp, Homo sapiens; identical to SEQ ID NO: 49377
  chr12:26275035-26275065
  hyper

SEQ ID NO: 122011 - DNA, 30 bp, Homo sapiens
  chr12:26276314-26276344
  hyper
aaaccaaagtggagcgggtgcaaccgccac

SEQ ID NO: 122012 - DNA, 233 bp, Homo sapiens
  chr12:26277910-26278143
  hyper
acgcacactcgcgccggccccactgcgctggtagtttgctctcactccaggcagtgtttggccacagggcacgcgcgtcgccggccagaccagcacccagctcacgtgcggaacgtaccatccgcggtccagcccggaggggggcgggggaggaggggccgggccgggcgggggcgtcgggagaaggcggcgagagaaggcgaacggcaggagggggcggggacacctgatca

SEQ ID NO: 122013 - DNA, 30 bp, Homo sapiens
  chr12:26279145-26279175
  hyper
ctagtgagagttaccgggaggtgcccgggg

SEQ ID NO: 122014 - DNA, 30 bp, Homo sapiens; identical to SEQ ID NO: 49378
  chr12:26348102-26348132
  hyper

SEQ ID NO: 122015 - DNA, 30 bp, Homo sapiens
  chr12:26349114-26349144
  hyper
gggcctgactctgacgctctggagctgggg

SEQ ID NO: 122016 - DNA, 449 bp, Homo sapiens; identical to SEQ ID NO: 49379
  chr12:26379637-26380086
  hyper

SEQ ID NO: 122017 - DNA, 31 bp, Homo sapiens; identical to SEQ ID NO: 49380
  chr12:26808252-26808283
  hyper

SEQ ID NO: 122018 - DNA, 30 bp, Homo sapiens
  chr12:26985397-26985427
  hyper
tgagcttgagattacgaagttgctgagaaa

SEQ ID NO: 122019 - DNA, 30 bp, Homo sapiens; identical to SEQ ID NO: 49381
  chr12:26986104-26986134
  hyper

SEQ ID NO: 122020 - DNA, 89 bp, Homo sapiens; identical to SEQ ID NO: 49382
  chr12:26986790-26986879
  hyper

SEQ ID NO: 122021 - DNA, 47 bp, Homo sapiens; identical to SEQ ID NO: 8647
  chr12:27038032-27038079
  hyper

SEQ ID NO: 122022 - DNA, 30 bp, Homo sapiens; identical to SEQ ID NO: 49384
  chr12:27090790-27090820
  hyper

SEQ ID NO: 122023 - DNA, 30 bp, Homo sapiens
  chr12:27091031-27091061
  hyper
gaacaggaagagggcggggccaaggaggaa

SEQ ID NO: 122024 - DNA, 137 bp, Homo sapiens
  chr12:27091341-27091478
  hyper
aagcggagagtggtcggttctgccccacagtaacgcgaggaaagaaatctcgcgaggctggagttctccgggagcgccggtcggaggcggtcggcggaggtgtctaccccgccggtgatggcgttgaacgccactgg

SEQ ID NO: 122025 - DNA, 30 bp, Homo sapiens
  chr12:27091841-27091871
  hyper
atggagatgcggtgcggaaagttcaatgaa

SEQ ID NO: 122026 - DNA, 164 bp, Homo sapiens
  chr12:27166928-27167092
  hyper
tgacagacccctggcggattttgacctcgcaagaaatgcaaaagcaactttgggttgcagaagccaggcgccccgaccttaccctcgctggaattcccgaagacctcggctgcaccagccacccggtgttcggatgccagcaccgctacgaccagcagctgcag

SEQ ID NO: 122027 - DNA, 30 bp, Homo sapiens; identical to SEQ ID NO: 49387
  chr12:27167561-27167591
  hyper

SEQ ID NO: 122028 - DNA, 279 bp, Homo sapiens
  chr12:27175265-27175544
  hyper
actgtatttcaaagcgattggaccccagaccattcccccagttactcaaaagatccagcctctcctcaggtgtagcccgctctagaaaggccgcctcgggagtaccacccactcctgacggggcggggagttctctccgaccccacccgttccaaggacgcagccctgtgattggccatgacgcgtgccagagctgcccagtcgcggaagagcagctgttttggcgtctgtttgctgcggtaggaacatggcggatcggctcacgcagcttcaggacgc

SEQ ID NO: 122029 - DNA, 30 bp, Homo sapiens
  chr12:27175827-27175857
  hyper
ctgcgcggtcctgtcgtgttccctgaggac

SEQ ID NO: 122030 - DNA, 30 bp, Homo sapiens; identical to SEQ ID NO: 49389
  chr12:27397037-27397067
  hyper

SEQ ID NO: 122031 - DNA, 94 bp, Homo sapiens
  chr12:27397407-27397501
  hyper
cggggaacctgcggcgacggccttggccctcttattccccggggtgatactggccccatgtgtccagagagggagcctcgcacccggggaggaa

SEQ ID NO: 122032 - DNA, 31 bp, Homo sapiens; identical to SEQ ID NO: 8648
  chr12:27485803-27485834
  hyper

SEQ ID NO: 122033 - DNA, 179 bp, Homo sapiens
  chr12:27486616-27486795
  hyper
gatcgcagcccgctccgcgacagccctccataagcgacaggcggctcgtgtctttcaccgctgaagcttcaggaaagccgtcagtggagttagcttgttcgattatgtatttctgtggtatttttgtgaatggagttggaagtttgcggtgctttttccttctcgctagtattcactgg

SEQ ID NO: 122034 - DNA, 30 bp, Homo sapiens
  chr12:27676524-27676554
  hyper
caaagctcggtcaccgttttcaggagtctc

SEQ ID NO: 122035 - DNA, 30 bp, Homo sapiens
  chr12:27677004-27677034
  hyper
ggcgcccccggccccgccccactgctgact

SEQ ID NO: 122036 - DNA, 30 bp, Homo sapiens
  chr12:27863444-27863474
  hyper
gaccgcctgactctcggatcaactgaggtt

SEQ ID NO: 122037 - DNA, 30 bp, Homo sapiens
  chr12:27864246-27864276
  hyper
ttaagagagtcatacggctgtgctaggaca

SEQ ID NO: 122038 - DNA, 30 bp, Homo sapiens
  chr12:28121961-28121991
  hyper
ccgctcagcttcctccgagtttcagaagct

SEQ ID NO: 122039 - DNA, 425 bp, Homo sapiens
  chr12:28122216-28122641
  hyper
ccgggcaaggagcatcggtgaccgctgcaagccctcggcagcatcccagcttggcagcccctccccctggcctccccaacccggcgccctggggaggatggggcacttacaggcggcggctgagaccctccaccgagcgcccgcaggagggcaccgcgtagctcagcaggaacaccgcgacgctccactgctgaaccagtctccgctgcatcgtctccgctcgcgctcgggacctgcaacagaagggaatgggacccgagtgtcagtctggactctccatctccccgcactactccgctccccctttttagcccgctctcaaaaagcctcttcaacatcaagggcatctcccaagttgaaaagaaaaaaaatttctctggagcctctcagcacttacttatttagcaaccggctactccaactgt

SEQ ID NO: 122040 - DNA, 1274 bp, Homo sapiens
  chr12:28122886-28124160
  hyper
cgaaccaggccctttcgttccagagccacttgtagcgaaacccacatatatatacatagctgtctgtctacctcctctggtgggctggttgcttccggaaagttgattccacacaccctgagaacaagtttcaagtgcgtgtgtcgtcgatcaggagggccaggtggcggcgagggcgggtcgttagtggcagccggagcggcagggaggcggcagccccgcttcacgggcggggagacatgctggccgggcggcgcaggttggaggcgagttgaaaaccgagcggaggaatgttcacacgctccgaggcaaacctgccggagaagtgagctagtcgcaaagaggtggcgccctaggaacgcgcgcggggcgagcgagggcgcaggcgggctggcgggcgggcgcgcggggggcgggggcggcgacgggcggcccgaacgggccccgcgccgcccgagcgagtggaggggagccccgagccgggaatgagcggcgagcggcggagctcccccctcccgcgctgccgaccccggagctgtcaggagctctgccgagccccaccccggagcccgggccctgtcgcgccatccccgtgccgggggcgtgggcgcatccgcttgctccctccaggcccggccggctcctgccggcgcggcggatccgggagccgagatccccgagggcgtgcggactgccccgggcagccggcggtccccggcgcgccgagctggacgagcgggcgccaagaccaccaggggcggaccgacgaggaggaggccaaggagctgggccggggaccgcgggcaaccgggagcctgcgcggagaggacgcgggctgttggcctgtgaatttaaggagcccgaagctcgcctggcagctcggggcgatgcatgagaaccttcctccctggcccattcccgggatgaactgagtggggagcatcggctagagagagggagatcttttgcttagaagaacaaaaacagttccagatttcatatctaaattgcactttttgctgtttcagaactgctgggagacatctggagccggtcccaaaaaacccgcgcacaggagagatcccccttttgaattgcagagggggaccgacactcctggagcacgcacacggcccttttcactcatggtcgggagtctaacccatcctttctctgataccctacctgcttgtcccctccccctcaaaagtcccaggttacagattcttggaagactgtatccgagtcgctgcagccagcggacagatgcagtg

SEQ ID NO: 122041 - DNA, 1414 bp, Homo sapiens; identical to SEQ ID NO: 49394
  chr12:28127761-28129175
  hyper

SEQ ID NO: 122042 - DNA, 30 bp, Homo sapiens; identical to SEQ ID NO: 49395
  chr12:28155064-28155094
  hyper

SEQ ID NO: 122043 - DNA, 30 bp, Homo sapiens; identical to SEQ ID NO: 49396
  chr12:28174801-28174831
  hyper

SEQ ID NO: 122044 - DNA, 204 bp, Homo sapiens
  chr12:29301530-29301734
  hyper
tgggtcactgcagggcgcctccgcaatgtctttagcagatacaagagcatccctcccacgggatgtgcagtgtagtcaagctgagtaaactgggatttttggctgccttttctgctagggtgggtggggaaaggtatgtcccccaagcgttcagttcagactagaacctttgaatctctctcctgtctcggtctctccctccac

SEQ ID NO: 122045 - DNA, 787 bp, Homo sapiens
  chr12:29301985-29302772
  hyper
gaacgaatggaagcgcggggcgggcctgcgcgcgcggccgccctgcccacgatgctgtcgcccccgcgacctgtagggccttcgctggcccctcaccctcctcccgccccgggctgaggctgccgccggtttcgcgcccagtgccgaggcagcggcggagccggggaaggtcggagggagggtggtttcctcccgccccacacccagtctccgagccggatatatagagtgtcacgtttgggagccgaaagactggagccgtttccttgtggctggagcgcttcccgtagcctcggggaaggagcaggatttagaggaccactagttggaccccatcctcgtgctggaggaacaggtattccagggtccccagccctggcgctcgcagagcccacgcgctccaaaagcagagaccggactgggggtggcccaggagggagggctcggctgggttcgcagggcggggcggttcccggcgggacctcgaggagggtgggtgtgaggccgggtgggaggagagaagcatttgcggaggctctgccccctgaagctgcccccggctgcaccccaatcgtcaccggccgtttacgcgcggttggcgtcggcggagcccgccaaggtggggcgcgcgggggttgcaaagggcagaaagccgggaaggacccagcaaggttaatgtggggggccgcgccttggggactggggacccgggaagagaggcgcggggccgagtcccacccaggcctcctgggcccttggggctattcctggagagagcgcgaaaatg

SEQ ID NO: 122046 - DNA, 122 bp, Homo sapiens; identical to SEQ ID NO: 49398
  chr12:29534143-29534265
  hyper

SEQ ID NO: 122047 - DNA, 30 bp, Homo sapiens
  chr12:29935375-29935405
  hyper
ggttcctattacacccgttgcaaaaaggct

SEQ ID NO: 122048 - DNA, 157 bp, Homo sapiens
  chr12:29935681-29935838
  hyper
aaagaaaaactatttcggctggggccccagggtccctggagaagcctaggctctgcgttacctctctctgcaccttctaaagtctagatccagagaagtctggcagattggagagcctctgggagcagccaagggtgcaaggcgggggctggggggc

SEQ ID NO: 122049 - DNA, 420 bp, Homo sapiens; identical to SEQ ID NO: 8652
  chr12:29935902-29936322
  hyper

SEQ ID NO: 122050 - DNA, 120 bp, Homo sapiens; identical to SEQ ID NO: 8653
  chr12:29936395-29936515
  hyper

SEQ ID NO: 122051 - DNA, 100 bp, Homo sapiens; identical to SEQ ID NO: 8654
  chr12:29936542-29936642
  hyper

SEQ ID NO: 122052 - DNA, 170 bp, Homo sapiens; identical to SEQ ID NO: 8655
  chr12:29936661-29936831
  hyper

SEQ ID NO: 122053 - DNA, 425 bp, Homo sapiens; identical to SEQ ID NO: 8656
  chr12:29936976-29937401
  hyper

SEQ ID NO: 122054 - DNA, 24 bp, Homo sapiens
  chr12:29937496-29937520
  hyper
cgccctgcccgggtgtgttcagag

SEQ ID NO: 122055 - DNA, 52 bp, Homo sapiens; identical to SEQ ID NO: 49405
  chr12:30322872-30322924
  hyper

SEQ ID NO: 122056 - DNA, 425 bp, Homo sapiens; identical to SEQ ID NO: 8658
  chr12:30323014-30323439
  hyper

SEQ ID NO: 122057 - DNA, 1 bp, Homo sapiens
  chr12:30323502-30323503
  hyper
c

SEQ ID NO: 122058 - DNA, 11 bp, Homo sapiens
  chr12:30353909-30353920
  hyper
agagcacggag

SEQ ID NO: 122059 - DNA, 502 bp, Homo sapiens
  chr12:30353956-30354458
  hyper
cgtctcccctgcgccaatgctgttgttccgggtgctgaaaagccgggaacttcccggaaagcagcggcacttttctccctggaaggtgggtgtgggggttccaggcttcgcacctgctaaacctgcctcgtcacctgggaggggtccgccagatgtgcccctcctcagccccattttggggagaacgatgggggcgggggcgtgggggtgagcacagccgggcacccccgcacacccgcaggcgggaccccggggtgcccttgccctcctctcctgggcagccgcacgccgggatccccactccacctgcgcgcgaactttcgccatctgggactcaagcgcccgcggcttgagcgctgcggtaaacagaaggcacccgcgtgggttcccaagggtgtttgtgtgttgggtctgggggagcatgatcggggcattcgcagtggggaggaagaggtgctgctggccggggcgagctgcctgtgctaaggccgctccctgcagg

SEQ ID NO: 122060 - DNA, 30 bp, Homo sapiens; identical to SEQ ID NO: 49407
  chr12:30908295-30908325
  hyper

SEQ ID NO: 122061 - DNA, 405 bp, Homo sapiens
  chr12:30948571-30948976
  hyper
ccccacttgtctcgacgcaggggacgcccacttgtctgacgcaggggacgtggctgaagtcagtcgggccgcccgcttgctgcacggcagccgtgggactggcacaggctcctcggcagcattatgggcagctggtagagcggccacttctgagagccggatgggccttccgaggtcgggccgtgccccgctgggcagcgcagagggggtgtgtagggcacgcgacttggagccaggtccagacccatcctggctcctctcagggctccttcccctgcccccattccaccccagccctgctggctgtcccgcaggacccagcgccgcggtagccttctctgaactgcggctcaggcggaggtgtcactcctgcctccagcccaggagggcaggtcaggttatgca

SEQ ID NO: 122062 - DNA, 962 bp, Homo sapiens
  chr12:30948988-30949950
  hyper
cgatctccccccacctccaacccccttttctcccgggtccacaccgcagttcccaccgctccgggtgtcctccccagtgcgccgcgatttttgtgtccaagccccagagtccctctgagaccaacccccagccagcacagacttcctgccttcccagctcgggtgagtagccctgaaacgcccgcccccgccgccccgcggccgcagcatcctctcgatggccgcgcctccgggacgacgtggtcccctcgagtagtacaggagctgcaagagaggcgcgccggggccagcaagctctagaacagcaggagcggccccagttgggaccccgggacgacgagtggccggcaacgcggcgcccgcatggcccaagcagtgtccgggaggggtcggggccccggactaggggcgcagcgaggaccgcccggaggctttcccttgggcagctaagtccgagtcagctctactcggatttccagcttccagccccggctctggtggggaccatgcctaggagagtaatctgagctggggactgggctctcctcccgcccctcccggcccgtgcgccccaggcatgcgctcctcccgctgctcccttggcccccagcgcacagctccaaacccgcggggcgagccgtcaccttactctctagccttagccggcccccaaatttaatttctgccctggccgtcaagccataaaagtcgattataatcgccgcccccccccgaccaccccaaccccctgcctttgctctcgcccccgtttcagacttctcttctcttcttgaagtcaagccctcaagtcgggactctaggaagtccgttttcttcgtcctaacccctttgtatcctctcccatccccacccctttcactctgccctctggctctgatttctcggcctttccgttttttctctccaggtagagacagctccgggccgggggtggaggatgg

SEQ ID NO: 122063 - DNA, 20 bp, Homo sapiens
  chr12:30975304-30975324
  hyper
tcaaaccacaaaacaaaaga

SEQ ID NO: 122064 - DNA, 493 bp, Homo sapiens
  chr12:30975388-30975881
  hyper
cgccagctcctttctcggctgcctgcccagctgctgggctggagctccgcgtgctgggtgtaggtcaagtgatcccgtcgcgggcgggcggaggtggccgggcagccgccgctgtgcccgggtctggggtgagctgcactgctgccctgggccccggctcccacgcctgtttcccggagctccgcggctccggctgcttcgccctccctctgtgggctgggctggggtcctcgcgagaagtcctgccccgctcccttctccaaatccacaggccctgtttctctggagacagggaggctcatacaggatatgtgcaaatgcttttattacaagctgagttgaaagacacccgtttgctctcgggtccttttggtgagcgccgcaggaagccgggctcctctctccccagaggcggccgcaggttcgcggcgcagggcctgcagtgccaggagcaggcaggggcctctgccctccccttcgtccctgatctccc

SEQ ID NO: 122065 - DNA, 145 bp, Homo sapiens; identical to SEQ ID NO: 49413
  chr12:31079222-31079367
  hyper

SEQ ID NO: 122066 - DNA, 246 bp, Homo sapiens; identical to SEQ ID NO: 8663
  chr12:31079417-31079663
  hyper

SEQ ID NO: 122067 - DNA, 153 bp, Homo sapiens
  chr12:31079693-31079846
  hyper
cgcagctcccttcgccgcttccggagcccctggcagggtaagtgcagaagcgcgcccgaggagtgggggcgccgcgggagggggctgggggtccaggagaggcgcctccacctccgctgcccgccccgccggcagtcccgagctagactgtcc

SEQ ID NO: 122068 - DNA, 30 bp, Homo sapiens
  chr12:31226591-31226621
  hyper
agggaaccatccagcgcttagtacacctgg

SEQ ID NO: 122069 - DNA, 30 bp, Homo sapiens
  chr12:31477213-31477243
  hyper
ttcgacttcaaaggcgaacccacagacctc

SEQ ID NO: 122070 - DNA, 252 bp, Homo sapiens
  chr12:31479081-31479333
  hyper
tctgcagttgctaccgctggccgggaaggtgtagattccgctttccctctgcgcacgcgcggctcccggcacaaaattctcttgaatcgaacttatttgcatacgggcgcgcgcacgttgcgggctgggagggggagaagtcccggcgaccgcgcgcgctcccgaggcctctattgtccttttaaggggagaagctccgcggcgcgggaaacgcggcggccagagggaaacgggggcggggactgcttacta

SEQ ID NO: 122071 - DNA, 30 bp, Homo sapiens; identical to SEQ ID NO: 49417
  chr12:31742964-31742994
  hyper

SEQ ID NO: 122072 - DNA, 30 bp, Homo sapiens; identical to SEQ ID NO: 8666
  chr12:31743352-31743382
  hyper

SEQ ID NO: 122073 - DNA, 30 bp, Homo sapiens; identical to SEQ ID NO: 49419
  chr12:31744421-31744451
  hyper

SEQ ID NO: 122074 - DNA, 30 bp, Homo sapiens
  chr12:31812490-31812520
  hyper
acgggagagggaagcgccgatctaaatgac

SEQ ID NO: 122075 - DNA, 139 bp, Homo sapiens
  chr12:32112314-32112453
  hyper
ctggctcctcgacccgcccctggaggcggaccccacttgacttaaactctggggcccgggaggccgccggttttctccccgcttgccggggtggtcctcttccctttgtcggtaagtgtgagacgagcaccccgaggtc

SEQ ID NO: 122076 - DNA, 30 bp, Homo sapiens
  chr12:32112748-32112778
  hyper
attgcctggctctgcgcggtagaggtcgcg

SEQ ID NO: 122077 - DNA, 30 bp, Homo sapiens
  chr12:32112989-32113019
  hyper
atctccaagtggtccgcgaacgcttctgcg

SEQ ID NO: 122078 - DNA, 30 bp, Homo sapiens
  chr12:32260088-32260118
  hyper
ggcggtgtagctgccgctgccaccagagcc

SEQ ID NO: 122079 - DNA, 30 bp, Homo sapiens; identical to SEQ ID NO: 49420
  chr12:32260427-32260457
  hyper

SEQ ID NO: 122080 - DNA, 30 bp, Homo sapiens; identical to SEQ ID NO: 8667
  chr12:32552264-32552294
  hyper

SEQ ID NO: 122081 - DNA, 30 bp, Homo sapiens; identical to SEQ ID NO: 8668
  chr12:32553018-32553048
  hyper

SEQ ID NO: 122082 - DNA, 106 bp, Homo sapiens
  chr12:32831954-32832060
  hyper
cggccttcctcctgcgctcccggcctgctcctagcctttgactagagcctgcgcagcatcccagtcccaggctagggcccaccggtgccgcgcagcctcctggaag

SEQ ID NO: 122083 - DNA, 30 bp, Homo sapiens
  chr12:32832321-32832351
  hyper
aacaagctccaggacgtcttcaacacggtg

SEQ ID NO: 122084 - DNA, 81 bp, Homo sapiens
  chr12:32908756-32908837
  hyper
gggtaccagaccaccggccccaggaaaaggaccgcaagatgggcgccgccatcttggtagcggcacgaagggaatgctggg

SEQ ID NO: 122085 - DNA, 34 bp, Homo sapiens; identical to SEQ ID NO: 49424
  chr12:33048898-33048932
  hyper

SEQ ID NO: 122086 - DNA, 486 bp, Homo sapiens; identical to SEQ ID NO: 49425
  chr12:33049137-33049623
  hyper

SEQ ID NO: 122087 - DNA, 683 bp, Homo sapiens; identical to SEQ ID NO: 8672
  chr12:33049652-33050335
  hyper

SEQ ID NO: 122088 - DNA, 30 bp, Homo sapiens
  chr12:33368916-33368946
  hyper
aggcgtgagccatcgcgcccgccgatatcc

SEQ ID NO: 122089 - DNA, 438 bp, Homo sapiens; identical to SEQ ID NO: 49427
  chr12:33591574-33592012
  hyper

SEQ ID NO: 122090 - DNA, 196 bp, Homo sapiens; identical to SEQ ID NO: 8674
  chr12:33592057-33592253
  hyper

SEQ ID NO: 122091 - DNA, 563 bp, Homo sapiens; identical to SEQ ID NO: 8675
  chr12:33592284-33592847
  hyper

SEQ ID NO: 122092 - DNA, 101 bp, Homo sapiens; identical to SEQ ID NO: 8676
  chr12:33592932-33593033
  hyper

SEQ ID NO: 122093 - DNA, 71 bp, Homo sapiens; identical to SEQ ID NO: 8677
  chr12:34260769-34260840
  hyper

SEQ ID NO: 122094 - DNA, 157 bp, Homo sapiens; identical to SEQ ID NO: 8678
  chr12:34260905-34261062
  hyper

SEQ ID NO: 122095 - DNA, 97 bp, Homo sapiens
  chr12:34261299-34261396
  hyper
cctggcggccgctggcggctgacccactgcgcgggtttccgtagagctcgctgtccacccggccctgcggcctcggctcttgcgtgtgcgctgtggt

SEQ ID NO: 122096 - DNA, 30 bp, Homo sapiens
  chr12:38532599-38532629
  hyper
acgtctgcggcgagcgttggaactgaccat

SEQ ID NO: 122097 - DNA, 30 bp, Homo sapiens; identical to SEQ ID NO: 49433
  chr12:38710418-38710448
  hyper

SEQ ID NO: 122098 - DNA, 2296 bp, Homo sapiens
  chr12:39298515-39300811
  hyper
gccttggcctcccaaagtgctgggaatacaggcgtataaactgtactgagccactgcgcccggccgagagtcagtttttacaagcactcagatgtgggcccgaaaacaaatcaaaacaaaagtcgtgacttcccagatcttaggtaaggcatagattcgtctgcaaggagggccgaaatctctacctatcaggcaaaaggcaaaaagcccggaagggtcggggagaagcaagctggaaggctccaggaagtgggtggggaggaagctgccggggttggagccaaccctagcaacagcaggtttgcacacgcctagcagaggaagtcccgggcctaagcgtgcagcggtcacaagagcttttggcagtgctgtccccttcgattccggtcatcacccaaccatccagcccgggtttggggcggaaaaccggcttgtaaagtgggcggcggccggtgttcccacagctgagtcacagcccagccaacttttacagcgtttcccagaaagaaaatacaaagtctcagtcccggagcccaccgcttctaattcccgctcccctgtgtcacctgacccggggtaactccagccccactactgagatatttcccactcatggcgcaacttcttgcctgcgcaaagcctcgtggtaccccgagcgctctccaagtgctaccaaccccacagatgagagggcaggagagaggggaagggctgcgtcctcacctgcaggacacggacacctccacccgcgtggccgggatggcagcgctcagctggttcaagtccccgatgcccgcagtgctgttgtagcggctgtccatattgggaggaggcgccttggacttgtccggcgcccacaaccacagctcgggcggactgagggctagctcccgtcaggcggggatgggggttgagggtggaggcagaagaaggaggcggaggcagcgcgcgggatgggggagggaagggaggaggcggacctccgcgcagagccacgagggaaccgctagccagtcctgggtgaaactgacgctgccaggcaagtggcgcgcggggatcccggtttcccagcccccttccggcaggcagcagcccgggcgggggacacactccgtgatcccctcctggctggaggggtcaggcttggtggacccagcaagcagcctgatggagaaggtggcaccagacgcagacccctaccgtccaggaccgcaagccctcgccggctctgcgtgcttttaggttttgtctccacctctgcacacccacactcgcctcctgggccgcgacagcttccttctgtcaatcaggtgtggacgggaaggtctcgaagtttcctcgcctgagttgaaagctggaggtgggggcacctctgcccgttcctaactgccccgttataaggtccccctccccacaattggttctcacctcgccctcggagctcttgggagatccctccgtccctcctactgtgccctcgggcagatgagtctggtcccagcttctggactgcccactgtcggccacttgagagttggggacggtggggcattgtgacgctctccaaccttggaacacggtggcaaagtggccgatcaatatatgggacaagtgggggcgggggggcggactctaaggtggaaaaaacaatactacttgggatttaaggaagcaatctggattctgtctccccttggttcttcggagcttagaggtctaacggcgacattcctcctacagtaagggctcttctgggtccctcgtttccaaaggcatgaaagttctgacctgaaaatgggggccggggagggtgatgtcacaaccatataacgcagctccttcagccgactcccacccgcaagaactgagacctgacggataaaagcagagaggagtcagagtgagcgctgcgtttgggaaactgcattccagggcagcaagactggtgccaagacggagtcgtggcaaaagcatccggaggtagacgaggcgcccctccactgcagggacctttgttccccgcgccttccctcctgcctcacccgagcgcctgcgggtcccgggagctcgccaccaggcggcgacggagaacaggatgcggcgcagctggaaggcagagggtggagagggggcgggtgtccgtccgatttaacgctccaagcacggagtttccagctggttgggctaagtctgggaggagcagtttttgcggtggaggacttgccttgcgttgtaacattttaatccacttgcagcctcctgcctagagaatctatagaggcgggtgagagtgtgt

SEQ ID NO: 122099 - DNA, 126 bp, Homo sapiens; identical to SEQ ID NO: 49435
  chr12:39539283-39539409
  hyper

SEQ ID NO: 122100 - DNA, 167 bp, Homo sapiens
  chr12:39836133-39836300
  hyper
cctctacccacacgcgggggcatgtctagatccccgtgatgctgaaaaagatgtctcatttgcacagacatcagaacccgagtgggcgcgcggcgggccctgcggtcgccggcgctgatagtcagatgctttgtctcctgcctgggaaggccggagctgcatggaca

SEQ ID NO: 122101 - DNA, 328 bp, Homo sapiens
  chr12:39837347-39837675
  hyper
gcgaccagcctgtgcgcccttccaggctcttctgggagaaggaagcagctagtgcacgcgctgctgccaggtcccttctcaaatcgaagcttgattcagcggcgcgccgggagccaggcagctgctgctgcggttcggctttgtgtcccacgcatagccttattgtcctctctgcagcttggactttgacccccttccctagcccccagctgaacgccctccctcctccctccccggagtcagtcattcatgctaaacggactcccaggtttgtccactgtctctggacagctgggctgttctacagttcatcgcccgtttaccagct

SEQ ID NO: 122102 - DNA, 843 bp, Homo sapiens
  chr12:40618248-40619091
  hyper
aaaggggccatctgggcggtgtcctcttttcccagcgccctgatttctattcttagatctggagataggcggctttcatttttcctgctcccagttcccagaccttccgtggggccgcaggatccccggctggcgggtcgcggagggtggccggccgggctgcgcactgcgcgcctccgctgcggggctccgggcctgtggactcagcggagtccgctgagtcagtttcttcccgcgcgactcccggccgcgccgccgctgcggtggaatctggtcccaggaggcggcgtccgcccggggtccggtctaggcgtgcgtgggggccacggtcacggtcatcccagccaggcccggctccagcagccccacggccgccgccagagttctgcgcggcccgtcgcctcggcggagcctctggcaggcccctgagctcgtttttggggcctgagtgggggaggaggaagccgagcaggagggctccggagagggagggcaacgcggggcggggagctgcctccttcctcataaacaggcgggcgtgggcgccgatggggcccgcggggagcgctggctgcgggcggtgagctgagctcgcccccggggagctgtggccggcgcccctgccggttccctgagcagcggacgttcatgctgggagggcggcgggttggaagcaggtgccaccatggctagtggcagctgtcaggggtgcgaagaggacgaggaaactctgaagaagttgatagtcaggctgaacaatgtccaggaaggaaaacagatagaaacgctggtccaaatcctggaggatctgctggtgttcacgtactccgagcgcggtaatca

SEQ ID NO: 122103 - DNA, 549 bp, Homo sapiens
  chr12:41086114-41086663
  hyper
caagtctgcagcctgcgctggtcctgggggtgagagtgatatccctgttgtccaatcagagaagcgggtttccctgtggtccccgccccactttccctgctgccccaataaccgccctaaaaggccgggcttctgctgtcaagtagccagggtgggctccgccgaggcgaggaggggcgccggtggggagatgcgctcccaggtgtttgcagcggaagtgggaaacctgtagggtatggtccagctgtgccgcaccgaggcgagcaggagcagggaacaggtaggaagctggacttttccttctttgcagataaaataaagaatgcgcatttccatgctgttgcttcccttcccccagccccgcccagccctcgtcacccccaaatctcctgtggtccctgcagctctcgccgtgcggcgcgggaaggactggggcggaggtggctggggtgcggggaagcaggggtgcgggatgccggagccctggggtgccgggcaaggcaggacggcagtgccctagaagagggctccgagctcggggtctgtgtc

SEQ ID NO: 122104 - DNA, 500 bp, Homo sapiens
  chr12:41086692-41087192
  hyper
cgccagcgccgggaactcgccccagggatgccatatcgcctcggcaggggaggggtggggaagcagagaggtcggcagcccggggcctgcaggtctttttctcccgacgccggcccgcacctgctcatctttcccatcccacctgggcgcctggctagcgcatcccggaaaacctgggagcggttgcggagaggggaggaagcgacttgtttgtcccctgacccctctgttaagatctagctcccttcaggagatgggggtggggaagaatccctgcaactcgaagggcacgttccgattaattacgtctccgttgagaaggcaccggcccttctccacgatctgcggcaggtgggagggagagaccgcggagccacggccccttccctcctagcctggcgctgtctacgggaaccaccttcacacctagtttctgaaaggtggatttggcttcagggatttccagggagtcaagtgattgtgcccggatgggctccgag

SEQ ID NO: 122105 - DNA, 60 bp, Homo sapiens
  chr12:41582146-41582206
  hyper
ctccactgccgccgccgcgagacggctgccccgggggtggcccggggaaggcaggggggc

SEQ ID NO: 122106 - DNA, 984 bp, Homo sapiens
  chr12:41582398-41583382
  hyper
cggaggcgccggtgcccgctgcagtgccagcccttggcgcccggcgagctgtaccgggtgctgccgctgcgcagcctcatccagaagctgcgagtccagtgcgactaccgcgcccgcggctgcggccactcggtcaggctgcacgagctggaggcgcacgtcgagcactgcgacttcggccctgcccgccggctccgcagccgcgggggctgcgcttcggggctgggcggtggtgaggtgcccgcgcgggggggctgcggtccgacacccagggctggccggggcgggggcgcgcgcggggggccgccgggcggccgctggggccgcgggcggggacccgggcctcgggtcctcgcctggaggcggcgcgagaaggcgctgctggcgcagctctgggcgctgcagggcgaggtgcagctcacggcgcgcaggtaccaggagaagttcacccaatacatggctcacgtccgcaacttcgtcggcgacctcggtggcggccaccgcagggtaagcaaaggggggtgggcaccgcgggcatggtcgattggggtgggaaaaggagcggttctttctgacgcttcaggattcctttggaattgggcatccttcctcactatgcagcaggaaacatccacaccctgatcatactttcctgtcattatcttacgaatggattggcgtcgaagttaaggattgtcccttttctgattatattacgattggaaagagttaaacagattcgattctaactttcccccgggaaagtaggaattgtgaaaactcattttccatccagactctcgttttccatctttcaccctcctgcccaccgtctctgcctattttttgagcacttgtcccgtgcctgaagcaaatccgagaaggaaagacagaaagcgaagactttcccggcccagcctttcctctcccgcggccaccagcatccccgcggccctggcagccgcgcacgcacacctgggactg

SEQ ID NO: 122107 - DNA, 145 bp, Homo sapiens
  chr12:41583648-41583793
  hyper
gtcagaccggccctgcgagcccccaggcagcggttgtttcccttctttgtctaagctgctggccccgaactgcgctcctggtcctcccgccggctttcataccgaataaacaagcctctttgcagcatcccgtgtgaagaggctt

SEQ ID NO: 122108 - DNA, 30 bp, Homo sapiens; identical to SEQ ID NO: 8688
  chr12:41699787-41699817
  hyper

SEQ ID NO: 122109 - DNA, 30 bp, Homo sapiens; identical to SEQ ID NO: 49447
  chr12:42326665-42326695
  hyper

SEQ ID NO: 122110 - DNA, 30 bp, Homo sapiens
  chr12:42631386-42631416
  hyper
ggcccgggactcaccgggtggaggtgccct

SEQ ID NO: 122111 - DNA, 30 bp, Homo sapiens
  chr12:42632310-42632340
  hyper
gcgccgcctctccgcgctgttcccccgttg

SEQ ID NO: 122112 - DNA, 54 bp, Homo sapiens
  chr12:42719559-42719613
  hyper
catttgaaactatgcgttacacgttctgctgagagccgcgaaggcaggcagagg

SEQ ID NO: 122113 - DNA, 30 bp, Homo sapiens; identical to SEQ ID NO: 49448
  chr12:42719888-42719918
  hyper

SEQ ID NO: 122114 - DNA, 30 bp, Homo sapiens; identical to SEQ ID NO: 49449
  chr12:42876640-42876670
  hyper

SEQ ID NO: 122115 - DNA, 30 bp, Homo sapiens
  chr12:42877546-42877576
  hyper
cggcgatcctcacccgctgcagcccctcag

SEQ ID NO: 122116 - DNA, 30 bp, Homo sapiens
  chr12:42878161-42878191
  hyper
ctcccgcaggtgcacgcgcgggccacgaaa

SEQ ID NO: 122117 - DNA, 121 bp, Homo sapiens; identical to SEQ ID NO: 49450
  chr12:42982744-42982865
  hyper

SEQ ID NO: 122118 - DNA, 1308 bp, Homo sapiens
  chr12:42982950-42984258
  hyper
cgggctacagaacctgtttccacgccggagaaaaccaagggaagagttggttgtgatgcagcaaacaggagccatgcggagagcctctgcggagccctggcgatgctgcagccaatatctgctttccctgtctacacagcccaacaaaccgattatgaccttctccctgatcttctgcgacaccgacccagtctgggtgtcacagactccggcggtgccagcgaaggtgcccggccctacccctgcggcgctcgccccccaccaccgcgccgcagccccctctgcggaatccgccgggatccaggctgccactcacctcgcgcgagggagacgcaactcggctgcactgtcctcggcgccgctgcggggctgctgggctgcggggctgcggggctgaggagctgcggtccgcggcgtcaggggtgggcgagggtgagcagcgcacgaaccatccagagcccagaaagtctccgtgccgaccgcggcgcgtctcggggaagtcagcgcaggctgcgcgaggctggcatgttccgggcgcgctgtcgggcggcggcggccgcgggagacggcgctggcagctgggctgcaggcggagtgcgctcgggctccggagccgcgcgctgcggcgccgccgcgcaccccgccctcggccgcggggcccggcgcgagcgaaaacgcggagcgcggacgccgccgcgggatcgaggccgctgggcgcgcgcccacgcgtaccccggctcggccctgaaagcgaggtcgggcccggctcgggccgcgcccgggggcagggctgcgagcaggcctgggaccggctccacgcgcagccagtggggcagagcagcaggcggattatgcgcagggagaaaaaagttcaccaaccgcggtccagagtcgcaagtgcggctcgctcggagcctctgccccgcccccgattataagcctttttttttttttttttttaaccaacaatcccgatggactgaaacacaggaagagtgaagggacggggtggggggtgggggagagacaaacccaatttcctctgatcaaacgatttgggtaggggtgcctatttgagttccttctccttcggggggtgtgtgaagggggcagttaattaaacacttagattccttccggcgcgccttgccgagctggggacccgtttggactcgatcctgtctcgtgtaatcccacaggctggtctgagtctctgccccggaaccggaggagtgatctttcagagcaagaagccaaagttcagcctctagtccgttcccttccccgcctcgacggccctggtcgtct

SEQ ID NO: 122119 - DNA, 161 bp, Homo sapiens
  chr12:43944719-43944880
  hyper
cgcataagctgacgacggccttgtaatcctcctgtgagttgacctggccgcggtagaagcagtggcgcaggtccgagggccctgcgtcgctctcccaggccccgcgctccggggttcccaagtgcacctcggtgtagccggcggccagaaaggatgcatcg

SEQ ID NO: 122120 - DNA, 270 bp, Homo sapiens
  chr12:43945109-43945379
  hyper
cgttcctcattgtccaactctaaacttcttccaccaaacgtccccgctaaaggtcccaggtcccagtacagccaggggcaagacaaatgcacacatgctgatgcgcacgcacacacacacacgtgcactgggacggttagtgctctgctttcccacacccccaacttgccctaccctccccaagcaaagaccctaccactaatggccctaagcaacccacttccttccccagtacctcctaacctccccgcagcccccaactcgttccct

SEQ ID NO: 122121 - DNA, 364 bp, Homo sapiens
  chr12:43945416-43945780
  hyper
cgtgtggtcctgggagtgcgatgcgtcttaggcgcgcgcgattcctcgaaacccggcgcagtcgcgacctctccggctgactggtccgggagtcccgggagctccagcagggccagcgttccccaacgggctgagccgctcgtccccgcgacctgcatgtcccactcgggccccgcgcccccacttagccgctgaaggcgtctcgcggtgactttaccttgcctggggtggaagtcaacttcccaagacctggtgatgaagagcgagagatggtagagcagcccagtcagccacttggccacccacatggttccaccctggggaccccgatcggggaggcccaccagagccgccggcagccaag

SEQ ID NO: 122122 - DNA, 97 bp, Homo sapiens; identical to SEQ ID NO: 49456
  chr12:43946202-43946299
  hyper

SEQ ID NO: 122123 - DNA, 121 bp, Homo sapiens
  chr12:44200418-44200539
  hyper
ggggtgctcaaaaacggaagtgatcattttaccaaataggcattttccagcttaaaaaagatgtgcacattatttttcttggtttactcttcctataatcgataccgtttagtgtagaaaa

SEQ ID NO: 122124 - DNA, 30 bp, Homo sapiens
  chr12:44229865-44229895
  hyper
cgtgacagcagcagcggcagcgacgccgcc

SEQ ID NO: 122125 - DNA, 470 bp, Homo sapiens; identical to SEQ ID NO: 49458
  chr12:45268916-45269386
  hyper

SEQ ID NO: 122126 - DNA, 1495 bp, Homo sapiens; identical to SEQ ID NO: 49459
  chr12:45269416-45270911
  hyper

SEQ ID NO: 122127 - DNA, 30 bp, Homo sapiens
  chr12:45443859-45443889
  hyper
ccccaagttgggccgcgcaaagctctcctt

SEQ ID NO: 122128 - DNA, 569 bp, Homo sapiens; identical to SEQ ID NO: 8692
  chr12:45444112-45444681
  hyper

SEQ ID NO: 122129 - DNA, 692 bp, Homo sapiens; identical to SEQ ID NO: 8693
  chr12:45444714-45445406
  hyper

SEQ ID NO: 122130 - DNA, 166 bp, Homo sapiens
  chr12:45609638-45609804
  hyper
tgtgtgtccacagacgaccttggaacgaaaagctgccctgtttgggatcaatgctcagggaacccagtccactcccgcactcacgtgttcccgccttgccctccagctagttcccccgcgcgcaggatcgcactactccctctgcagtctcgcctgccgacttcct

SEQ ID NO: 122131 - DNA, 30 bp, Homo sapiens
  chr12:45610431-45610461
  hyper
aagcctggcagctgcggggacgcctctgcg

SEQ ID NO: 122132 - DNA, 30 bp, Homo sapiens
  chr12:45610736-45610766
  hyper
accggagctgtgatcggaggaggaattccc

SEQ ID NO: 122133 - DNA, 151 bp, Homo sapiens
  chr12:46120763-46120914
  hyper
gggccgccggagtccgcgaataccgcccgctcccagcaacgaagctccccggctcccggccgaccgcgagttcctggagcagcagcctccaaggttcccaaagcccacgattcaggcgagcggtgccgaccgggccgtggactgtggcatt

SEQ ID NO: 122134 - DNA, 30 bp, Homo sapiens
  chr12:46121791-46121821
  hyper
tgttcccattggaacgactacctgaaataa

SEQ ID NO: 122135 - DNA, 30 bp, Homo sapiens
  chr12:46123148-46123178
  hyper
cgctcgcgcgcccccggcagcagcaccatg

SEQ ID NO: 122136 - DNA, 131 bp, Homo sapiens
  chr12:46123554-46123685
  hyper
ctgggagcggggggcgcttttaaaacaccgatctgggttttttaaaaacctcctttgaaaaaataatggcaaactcgacggggaaggcgcctccggacgagcggagaaagggactcgctttcctggacgag

SEQ ID NO: 122137 - DNA, 30 bp, Homo sapiens; identical to SEQ ID NO: 8694
  chr12:46124283-46124313
  hyper

SEQ ID NO: 122138 - DNA, 30 bp, Homo sapiens; identical to SEQ ID NO: 49463
  chr12:46383586-46383616
  hyper

SEQ ID NO: 122139 - DNA, 30 bp, Homo sapiens; identical to SEQ ID NO: 49464
  chr12:46384554-46384584
  hyper

SEQ ID NO: 122140 - DNA, 30 bp, Homo sapiens; identical to SEQ ID NO: 8695
  chr12:46385510-46385540
  hyper

SEQ ID NO: 122141 - DNA, 30 bp, Homo sapiens; identical to SEQ ID NO: 49466
  chr12:46386000-46386030
  hyper

SEQ ID NO: 122142 - DNA, 30 bp, Homo sapiens; identical to SEQ ID NO: 49467
  chr12:46661290-46661320
  hyper

SEQ ID NO: 122143 - DNA, 30 bp, Homo sapiens
  chr12:46661703-46661733
  hyper
tagtaatttctccccgcgccctcctacttc

SEQ ID NO: 122144 - DNA, 30 bp, Homo sapiens
  chr12:46662406-46662436
  hyper
ctggctgcggaggccgggaaaatgtggccc

SEQ ID NO: 122145 - DNA, 76 bp, Homo sapiens; identical to SEQ ID NO: 49468
  chr12:46663346-46663422
  hyper

SEQ ID NO: 122146 - DNA, 30 bp, Homo sapiens; identical to SEQ ID NO: 49469
  chr12:46765120-46765150
  hyper

SEQ ID NO: 122147 - DNA, 473 bp, Homo sapiens; identical to SEQ ID NO: 49470
  chr12:46766924-46767397
  hyper

SEQ ID NO: 122148 - DNA, 30 bp, Homo sapiens; identical to SEQ ID NO: 49471
  chr12:46776820-46776850
  hyper

SEQ ID NO: 122149 - DNA, 30 bp, Homo sapiens
  chr12:46777574-46777604
  hyper
agctgagaggctgtcgggtgcgctccagtt

SEQ ID NO: 122150 - DNA, 57 bp, Homo sapiens; identical to SEQ ID NO: 49472
  chr12:47224916-47224973
  hyper

SEQ ID NO: 122151 - DNA, 275 bp, Homo sapiens; identical to SEQ ID NO: 8699
  chr12:47225027-47225302
  hyper

SEQ ID NO: 122152 - DNA, 157 bp, Homo sapiens; identical to SEQ ID NO: 8700
  chr12:47225319-47225476
  hyper

SEQ ID NO: 122153 - DNA, 80 bp, Homo sapiens; identical to SEQ ID NO: 49475
  chr12:47225550-47225630
  hyper

SEQ ID NO: 122154 - DNA, 212 bp, Homo sapiens; identical to SEQ ID NO: 49476
  chr12:47473960-47474172
  hyper

SEQ ID NO: 122155 - DNA, 31 bp, Homo sapiens; identical to SEQ ID NO: 49477
  chr12:47500470-47500501
  hyper

SEQ ID NO: 122156 - DNA, 225 bp, Homo sapiens
  chr12:48099379-48099604
  hyper
acccgctgtcccggcgaacaccgcacacccacgccgcaagggggcgggccccacctcggtctttgcgggagggcggctctgccttcccgagcactgcaaaatcgcagcagggtggagggtccgcctgcaaagcagagcgcgcaggcccgggttgcgggggcgagcccctccgggaacgcgcgacccgagacgccgctgccctggacaccgacgcgccgcctcaac

SEQ ID NO: 122157 - DNA, 116 bp, Homo sapiens
  chr12:48099674-48099790
  hyper
cggccaccccaaggatctcctacgctgctccgggcagcgagaaccgcaacgcccgctcacctgaccaggccgtaacccgccgcactgccaccccgtcagccccgcagcgactcacg

SEQ ID NO: 122158 - DNA, 75 bp, Homo sapiens; identical to SEQ ID NO: 49480
  chr12:48099829-48099904
  hyper

SEQ ID NO: 122159 - DNA, 30 bp, Homo sapiens; identical to SEQ ID NO: 49481
  chr12:48153373-48153403
  hyper

SEQ ID NO: 122160 - DNA, 30 bp, Homo sapiens
  chr12:48167080-48167110
  hyper
cagccccatggccccgtccaggctgcagct

SEQ ID NO: 122161 - DNA, 30 bp, Homo sapiens
  chr12:48167347-48167377
  hyper
acagcggttggcggcggcaggccccacgcg

SEQ ID NO: 122162 - DNA, 92 bp, Homo sapiens; identical to SEQ ID NO: 49482
  chr12:48206705-48206797
  hyper

SEQ ID NO: 122163 - DNA, 321 bp, Homo sapiens
  chr12:48299193-48299514
  hyper
aggccaggacttcgtcgtccgcgggacgctggggggcgcctgccgactggcaccggcggctagctccgcacgaatgggaaatcccgggctccgctcgccaacctgttactgctgcagaacgccaggaagctcagcctgatcccacagattagggtaaaatatcccggggggccgaagtggaaaccggagttgcgtcattgctcccacccgatatcaccttggcagcgaccgcggctgaccacgttcccggcctgtcgcgaatctcacccaagggagctgagtctcagcttccctggtccctggtcccgagttccgccttcc

SEQ ID NO: 122164 - DNA, 30 bp, Homo sapiens
  chr12:48357219-48357249
  hyper
aacagcaagggtcgcggctccccggcgctc

SEQ ID NO: 122165 - DNA, 49 bp, Homo sapiens
  chr12:48395456-48395505
  hyper
agtgactctgtggctgcggctctggacacggctcgctcacagacaccgg

SEQ ID NO: 122166 - DNA, 30 bp, Homo sapiens
  chr12:48395705-48395735
  hyper
aaagctacctctttcggggaactgttttgc

SEQ ID NO: 122167 - DNA, 2349 bp, Homo sapiens
  chr12:48396585-48398934
  hyper
agcttagcgcactaccgggtgacccggccagagtctcctgctcccggctcctcgcagctgcgccgcaggctccagccctgcccccgctgcgctaatgaccggaaagcccgcctgagcccgccgccttccacgctatccctggaaacagcctggtggcaggagagggcccacagagcctcgaaggcagagaacttttattccccccgccgaagagtttccctctgcgattgatttacaatctgtaacatacaaagacagggctggaatcccagccgtcggaaacgtgcccaaacacgtggaaaaaaaaatcctctctacctaatacactttccaggcttcgtttgtcctgaatataatcccagacagtggaccttaccaaaggaggggtagaaaggtgcagtccgaacagcatttggacccgactacaagagccatctctaactataccggttgaaatagttgtagcaaccgtagcaatcgaccagcctgctccccttccctgacacacacatacacacacacacacgcacacacacacacaccacgcagcctggctcggtgagttccagaatttagaaaagtaactcattgtagtacctcggggcggcggggaatggggtaagaccgcggggaagggggcgctattttcgggggcatttgaaaagcacggtctggttggaatgttatcgtctttcagatggcctctcctactggaagtttctgtaccctttatcagaagagaggcgcaggcggacggagggaagtcgagatgagcgctagggctgcaccttgctccagggccagctgggagggggagggtaccctaaagaggcgctgaggtctcagagggcctatcggaagccgttctttgtggcctgggatttcagcccaccagtgtcagagtgttagtcccctttgtctaactctgctttgagcccaccagccaccaagccttggacaggctgtgaagtcaaccctttggcgtttgcttgctccctcgctcgcgctctctctttcctacttcacctaagttcgatgagttgagatctgtttttgctgaactcgaagtgcttcgaagaggcgagctgtgtgcatgtgcgcctaattatcaaagctggtggaaaagagcccatttatatctgtgcgcaaacttctccgagccaacactttgcaagttcagtattctagcgcaacgtagggacctgcaaatacttgcaactgcgatgggcaccgaggaccctgggacagagtccttgattggcagaactcttcttggtgaacttctgcgtgtcctgtgcctaagtcggcgcgctacgaccccgggagccgttttagcccggagccgcgggctccagagctggagcgggccggggagaaggatgctgagggacgcatggaaagcaggcaggcaggcaggggcgggggaagacttacggacatcctggccctgacaccgaaggacagcggcgacgagcagcgtcagcagcaccagcgtctggggagccccgaggcgaatcatggctcaccgcggggcctggctgagccgggcccgggcggagcgcagcgaaacggcaggagcacggcgcgggtccgggtctctaccgcgccctcatgcaggaggcccttggagcaggagggggaagcgggagacccggcagcccagcagcgctctgcgtcttctccccgccgcggcgcccgttatatgcgcccggcccctttcgaggctggcgaactcgcccaaaccgcgggccgccccctgccccccgctgggctgtaacctgaaccgcccgcccccggagcccgcctgggccctgccagtgcccgcacctgcccaagccggacccccctctctgggagtcacgcttcccgccctccacccctagtgcgccgagtggcctgatcgggcggggcgcagagatggcccctgccccccaaacccggggctgcggcgctgcccccctctgaccacaggcgggaagggtggcctccggcccctcccctcggagttctgccggagttggaggggagggggtgtttgcagaggcgcaggccgagagccctagaccaaggacggaaaagacatgggagggaggagggaaagcggtagaaaggagcagcggagggcgagggggcaccgcgtcaggcgtttgggagtggggacagggaggagcccacagagattcagagtcctaaatcttggagacaggctagctgagccagatctgaagggttaccccgacctatcttttagcccttccctgcagtacctggtccccagactcccacctggacgttcacagcgactgccctccacccctcccccatccagctctgcgttgaaggcttcct

SEQ ID NO: 122168 - DNA, 30 bp, Homo sapiens
  chr12:48499845-48499875
  hyper
ggccgggcgcggaacgcaaaacccgggaac

SEQ ID NO: 122169 - DNA, 30 bp, Homo sapiens; identical to SEQ ID NO: 49487
  chr12:48513152-48513182
  hyper

SEQ ID NO: 122170 - DNA, 30 bp, Homo sapiens
  chr12:48550712-48550742
  hyper
gttttcttttgctacgggatccagagaaaa

SEQ ID NO: 122171 - DNA, 268 bp, Homo sapiens; identical to SEQ ID NO: 49488
  chr12:48551341-48551609
  hyper

SEQ ID NO: 122172 - DNA, 1490 bp, Homo sapiens
  chr12:48576834-48578324
  hyper
agtcccatccttcccccgctccggtgatttctatagctagagggctgatttactgcagaaacctccgtagcgccctcctcctgcctctgcaccgtcaggcccggtgggtccggctccagagcgccaccgtgccccagctcaactctgggatcattagcaacagcctctctaccctctccgctttcctgcgcatcgctggaggacagggaggcaggactcgactttagcgccatcctctgagaaaggaatgcgggctggaaaaatctttccagggcagtctcgctgggtctcataccccggctaggggagggacgatctctcccggacttggaggtttctgcagcagacggctctctcatacttccctattaaacattgcgaccacacgctctttccagccttggccgaagccactgtagcgtcccctctcctccccccaccccgctagtccagactccagagccccactgcagcttccagccatcctccctttttcttcgccacttcctggttaccatggagacacacgtcatttacgtgccgtgcgtcgccttggaaacagaggagcatccgcgacacccccgggagacccaccccagctgctgctgccacactcgcgggcgctgcccggtaatggcctgggggagtcccgagtccgacgcgccgctggcctcagcctggacgcggacccctccgcgagcgcgtctgtgacccacggaaccggcaggcgctctctgcttgtggcgcccagagggcggcgctgacacgggcgcgatccgggaggcgaggcagggcagggcactttcgtcccggggcgatcccaagagacgccggctctgggaccctcgccgggtcctcgtcccgcagcctcttctcggcctcccgcgatcctgcctgcgccctctgcccaggactcgtctctcacgtcggctccccgccagtctcgggagcctccgcttccctcggctcccgctagcccctcccgggacctctccccctccaccccctcccccaccccggaggccgggctggacgcgacccagagcctccgccacccgcttctgccactcaatggaggacggtctgctggagatcatgaccaaggacggcggcgacatgccggcgcccctggaggtgtccaccgtgccggcagtgggggacgtgatctccggggagtacaacggcggcatgaaggaactgatggagcacctgaaagcccagctgcaagccctgtttgaggacgtgagggccatgaggggggccctggacgagcaggcctcgcacatccaggtgctctcggacgacgtgtgcgccaaccagcgagccatcgtctccatgtgccagattatgaccactgcgccccgccagggcggcttgggcgtggtcggcggcaaggggagcttccagagcgacccccaagagccggagactccttcgcctgggatcggggacagcggcttgctgggtcgcgatcccgaggacgaggagga

SEQ ID NO: 122173 - DNA, 30 bp, Homo sapiens
  chr12:48578547-48578577
  hyper
gcgagggggactgaacggcgcggtgcggca

SEQ ID NO: 122174 - DNA, 957 bp, Homo sapiens
  chr12:48591591-48592548
  hyper
ttatgggaggtttcacggagtggatacctggaaaggggaggtaaggcagctcaaaggacactgttgttcaacggagggaagcggattcaacaattatacaattcgctgagtcggggctttcactgcgaaagaacttggcttcggatccgtgatcaaggctgggagctatggaggtggatgtgattggcaaagacctctgctcaggtctgcgtcaaaccttgcttcgctcccatcccattctgcgccaatagggcgcagtatcccaaccattccactcggctaggaggggatcctaagcctcaaggtccgcatctcccgctggagggactgagcagccgcactggtgtcccagaatagatcgtgttccccagaggttgtcaggttcccgcaattcggcgcgggcgaggcggccaaagagagggcgctcattggctgccacagccccggtccgagaggccgaagaaggctgattcgtcacaggccgtcagcgcgggccacgcctatttcctctccaggttctaattaggtcaggggccctacagcctcttgggtagtttgcaagtgcgtcgcggagccggcctcggaaatatggcgacagcttcagctttcagtgtgagggagccgagggcccagccaaaccctgcgggaggcaattcctgggtacccttcccatattttcggtctttgggctgcgccgtggtaacctcagagcctggttgcgtgctcaccagcgacaagtgtctttcattgggacatgaaaggggactgggaagtgccgtgcagtttcagggtggtttctggttaattacattttcatgggttttcgcagagtctgggggcaatttgtgtcctccagagaccagggaccagggccgaagctacggcaggggagacgcggccagggccgtggcttctagtgcgagctcggttcgcgtccgttcccgtctggcgcccggg

SEQ ID NO: 122175 - DNA, 404 bp, Homo sapiens
  chr12:48690459-48690863
  hyper
ctccaggacacaggacgccttgagactacatttcccacaggccacagcccagcctcccgtcttctaacagtcttcctagaaaggtgcgcatgttccgaccattagcacacggctggtgcgctcggtgcaggctatcggagcccgggacagggccgatccagccaggcttcagggtgcgggaaacgggtgcgccatgagatagaagctttctgcttccacccactccaggcgcccagtctttctccagcacctcttaagctagccccaggactctgcaaggtacccgaggacaggagtcactgcttgcatcccctcagccttggggcaagaagaaggagccagaatccaggaaaggggctttggcgaaactgcacggaaatcattccttccgtttacgtaatttt

SEQ ID NO: 122176 - DNA, 30 bp, Homo sapiens
  chr12:48744082-48744112
  hyper
ggacgagttggctccgtccatcagagaacc

SEQ ID NO: 122177 - DNA, 30 bp, Homo sapiens
  chr12:48744524-48744554
  hyper
tccctccctccagccgcagctccctccggc

SEQ ID NO: 122178 - DNA, 30 bp, Homo sapiens; identical to SEQ ID NO: 8710
  chr12:48744932-48744962
  hyper

SEQ ID NO: 122179 - DNA, 30 bp, Homo sapiens
  chr12:49110631-49110661
  hyper
tccggaatgcacctcgctacaccccgtagc

SEQ ID NO: 122180 - DNA, 336 bp, Homo sapiens; identical to SEQ ID NO: 8711
  chr12:49182446-49182782
  hyper

SEQ ID NO: 122181 - DNA, 327 bp, Homo sapiens; identical to SEQ ID NO: 49494
  chr12:49183003-49183330
  hyper

SEQ ID NO: 122182 - DNA, 13 bp, Homo sapiens
  chr12:49211852-49211865
  hyper
ggggcaggagctg

SEQ ID NO: 122183 - DNA, 30 bp, Homo sapiens
  chr12:49245992-49246022
  hyper
ttcctggagctgggcggcacaggccgacac

SEQ ID NO: 122184 - DNA, 102 bp, Homo sapiens
  chr12:49259400-49259502
  hyper
agccggccagcgggcgggcgggcagctcacctctggatagcaatccttcgctaacacttgcaacatcgcggtcttcccacactgcacgtccccgaccagaac

SEQ ID NO: 122185 - DNA, 120 bp, Homo sapiens
  chr12:49284754-49284874
  hyper
gggccatcgcccaccgggcagtcttcccaccgacgattaggctttgtcttcaaaacaagttagaggtggtggcttctgctttggagccccctcgcttcttttcccggctctcccgtcttc

SEQ ID NO: 122186 - DNA, 210 bp, Homo sapiens
  chr12:49297806-49298016
  hyper
ctctcaaaaaccgaccgcggtcctccactgggtagggggcgctccaagacagggactcttctagcctgttgcctctccatgttagcgatatcctcgttgctaggagactagacgcgtcttacagtgggagagctcagcctcactgatagccggggatctctcctgttcgagggctgagatctccggtcccacaaccgcccacaaccaggg

SEQ ID NO: 122187 - DNA, 30 bp, Homo sapiens
  chr12:49350498-49350528
  hyper
ctcttcccaacctgcggttccctagactcg

SEQ ID NO: 122188 - DNA, 30 bp, Homo sapiens
  chr12:49350926-49350956
  hyper
tgaagctggcccgacgcaccctctctgagc

SEQ ID NO: 122189 - DNA, 482 bp, Homo sapiens; identical to SEQ ID NO: 49497
  chr12:49351241-49351723
  hyper

SEQ ID NO: 122190 - DNA, 544 bp, Homo sapiens
  chr12:49363693-49364237
  hyper
gcgcaggggcccagacgagtggccagacctggctcagagcggctccggggggggcggggaattccaggagaggcccctcccggagccgcgaaaccatcccttcccgcctccgcgcgcctcgccctgccgcccaccccctagcctccgcggcagcgccgacccgcccagccaggctcaccgcgcttgaggatggcgctgtggtgcggcaggcggccgccgccctcaagcgcggagcagttccagcgctggtcgcgcagctggtgctgacactcgtggaccgcgatgtgcagaccctgaagcgcggacgccgtcacgtcggggttgcgcaggcacaggcctagctgccgcttgctcaggccggacagcgtcaagcacacggtgttggccgtcagcggcggctcgccaggcaacttcaggcccagaatctcattgcttagagccctgggaaccaagaaggcgtctggggtctgcggtccagacccctccaactctccccaccccgggtcggtgtttctatggcctgggagacaaggggaactgctca

SEQ ID NO: 122191 - DNA, 30 bp, Homo sapiens; identical to SEQ ID NO: 8717
  chr12:49366523-49366553
  hyper

SEQ ID NO: 122192 - DNA, 699 bp, Homo sapiens
  chr12:49371613-49372312
  hyper
aggtttctctccaccgctaggctccttttggttagctcacccccacaactcatccccgggatttccctgaccacagccgcactcacgcccccgtctcccctttttccttctctgtccagccatcgggggttcctgggcggttaagcatctccccggagtcgctgcccagaaccacagctttccttccgacactcaggatgggggagagaggggacgtcggaggggcccggggtgacgtcgaggggacaaccccaccgcgggcggcgaggcgggctgggcccctggcgggctctccccgcagcacactctcgccgcgccccctggcggatgctagtcctcgacgggctccggacgctcagctgagtgaggcgggcgcgcgtgggagggtgtcccaaggggaggggtccgcggccagtgcaggcccggaggcgggggccaccgggcagggggcgggggtgagccccgacggccaacccgtcagctctcggctcagacgggcgggaaccacagccccgctcgctgcccattgtctgcgcccctaaccggtgcgccctggtgccacagtgcggcccggaggggcagcctcctcccgtcacttcagccagcgccgcaactataagaggcggtgccgcccgccgtggccgcctcagcccaccagccgggaccgcgagccatgctgtccgccgcccgcccccaggg

SEQ ID NO: 122193 - DNA, 1033 bp, Homo sapiens
  chr12:49373993-49375026
  hyper
agtaaggtgtgattacgcccgtggacgtggctgcgtgcccacgcacctgctttctctactagccctagagaccagctttccagcactgccggccctggctctcaggactcaaagtgcggagtcgggggtgggattccggtcccaagcccttcatgagggtgctggccgcgccccgcgtaccccctcgctgatccccgctcccttctcccacaggctgtcgagaaacggcgtttatcttcgctatcacctccgccggggtcacccattcggtggcgcgctcctgctcagaaggttccatcgaatcctgcacgtgtgactaccggcggcgcggccccgggggccccgactggcactgggggggctgcagcgacaacattgacttcggccgcctcttcggccgggagttcgtggactccggggagaaggggcgggacctgcgcttcctcatgaaccttcacaacaacgaggcaggccgtacggtgagctttgagaggctccgcaccctaagcggagcggcaggggccaacctcgggctggggaagtgacggtcggtgagataaggcaaggggcaccaggagagggcgtcctgggagagccggaggcttggaacgaagacggagaatagaggagacagtggctgagggcaaaggtatgtctggcccgcggacaggtagaagaggttgcaaatcaagcacagtctcttcgctgtacagattcgaaaaataagcctgagaggccgagactgactcgccgcggcggagcagggttgggcagggtttccaaatctcagcggaacatttcgcgcctcccttcccctgggctcagctaggcctgggcctttgctgaggtccggcccccgtggcgtccgggagagggcagtgtctgggagggtgactctggcccggtgccctgggacactctttcttcccctatccccgcagaccgtattctccgagatgcgccaggagtgcaagtgccacgggatgtccggctcatgcacggtgcgcacgtgctggatgcggctgcccacgct

SEQ ID NO: 122194 - DNA, 455 bp, Homo sapiens; identical to SEQ ID NO: 8720
  chr12:49375115-49375570
  hyper

SEQ ID NO: 122195 - DNA, 281 bp, Homo sapiens; identical to SEQ ID NO: 49503
  chr12:49390823-49391104
  hyper

SEQ ID NO: 122196 - DNA, 1796 bp, Homo sapiens
  chr12:49391146-49392942
  hyper
cgtggccccttcaccctcctccttgccgggcttcgattggctgggggaatcccccaccacgcgtgtcaccccagagggcaaaagctgcacctgctgggttcggggggttggaacatattgggatcgtatcactacgcacgtggcgtcaatgacaaagacgccttccccacgggacaggccctgggaactgcggggcaaggtgtgggcacggcgggtcgccttccaaccctccagggtctccggtcctgccccctctccaagacccagagattctctccatccggtgcctccgggagcccagggtctggggagtgtctggctatggcggggcggctgctttttaggggagggaatccagcatttgggaaaccagatctgttctccttctttcccttccctcgagcccttgaggtggtgcctggatctgggagcgggatgcggggcacagggagccgcagttgcagaccccgcaggagctatctcggtgcctgcgctccctgtagctttggcttggggatggctgtcgctaccactgttcaggtcagcagcagccagccccaggcttttctccacgacccccttgccgggctctggccttgctctggccgctccacagcctggggatccccccaagagaccttgcccctgtcggagaccccaagccccgaggacgtcccggtagatccgaggatccagcctcttctttgtgcgccctccgtctgtcctggctggagtcgcagctggggctgatgaagtgggcacctgagagttcccggggcctctcttagtccccaaggtcctatgggggccttcgtaagaaggtggagccacgtagggtggcggccggtcccagcggcgtcgtggggcggtcccggcagaacctctcagcagcaggtgagcctcgtagcttgggggcccgggccgccgacctccccagggccccgcccacgccgaccctgggtcgctctgcggctgcgcggatggacggggcgctcgccccacaggcgccaggcgctccggccgcaagggagcagggagccctgccagctgggccacccgaggggcgttgcggggctccgggcggggtcgacccggggggctccgtcgggccccaccagccttgcgcctttttcgctcggtctccttggcctcccgctcctgcgacgccgctttccttttctcttgctcccgagctcggacctcggccaggggccccgcccgccagttggtcgcctcctgcagcaccctggaggcccagggccggcggggcggcggctgtggggatcccgggcgcggcccacacctgggacaatgagcaggaacccaggtgagcagtttgtgggggaagggagccgaggtccggggagctgggagcactggagaccacttggggcagccatgtgaaggggtgtgtgtgagtgtgtgcgcgtgtgcacgtgcgtatatgttaggactgaagtcgaagcgggactcctcgccatctctccatgcacactttaacagcgtctgccccatctcacctcctgccctttctcacacccacttctgttcccccaaacaacgggatgagtcaggccccagccctcgggagcgggcagaggtggaaggcgtgggaaagagaagggggaccagcagtgctcgctggtgcctgcggggaggtccggaccccactccccgccccaccactctcttcccctcacccctgcttcactcacgtgcggttctggaacccgcgagcccagtggctggcctggaagtccatgggctgtcgagaaggggcgcggcgactataatga

SEQ ID NO: 122197 - DNA, 272 bp, Homo sapiens
  chr12:49393151-49393423
  hyper
cagagccgcgggcccggggactgggaactatatatacccgggcacacgtgtgtgtgcctgtctctgtgtgtgcgcgcgcatgtgacaccgcgcggactgctccgcgctgctacctcccccatgtgcacggccgccccctggggcccgggattggacgccccttcccactgctgttgtcccccaagcctgatgggatcgcacgagtgggcgggggagggacttatgattcttgccaagctgacagtgccccctcccccgcccctatttcttca

SEQ ID NO: 122198 - DNA, 30 bp, Homo sapiens
  chr12:49412125-49412155
  hyper
gagatccctctggacgccccgtgcctcacc

SEQ ID NO: 122199 - DNA, 30 bp, Homo sapiens; identical to SEQ ID NO: 8725
  chr12:49412407-49412437
  hyper

SEQ ID NO: 122200 - DNA, 30 bp, Homo sapiens
  chr12:49412911-49412941
  hyper
ggagggagagagggcgctttaaaaaaggga

SEQ ID NO: 122201 - DNA, 30 bp, Homo sapiens; identical to SEQ ID NO: 49508
  chr12:49454746-49454776
  hyper

SEQ ID NO: 122202 - DNA, 30 bp, Homo sapiens
  chr12:49463491-49463521
  hyper
cgagctctgcagggcggagactcacctaca

SEQ ID NO: 122203 - DNA, 30 bp, Homo sapiens; identical to SEQ ID NO: 49509
  chr12:49463973-49464003
  hyper

SEQ ID NO: 122204 - DNA, 476 bp, Homo sapiens; identical to SEQ ID NO: 49510
  chr12:49483799-49484275
  hyper

SEQ ID NO: 122205 - DNA, 720 bp, Homo sapiens
  chr12:49485546-49486266
  hyper
tttgagcctggcccccgccccaggcaccggctcccctccctccgcctgattcatcttttgtttcattgccttccctggcaccgggcatcgcttccttccttccttcctcctcctcctttgggcccttagcattaaccccttcgtgctctgggtgccccccagagaggtgcccaagaggagctgtgcgggatcaaggctgctggaaaaaggattggggtggcgggggttgcgcgaagtacaatggccattatccgggatgacttaaccgagcgagaatcctgagcccaggccgggaacgcgctgggagaagcggactcagcagctccggccacaaaggcgcttttcagccgccccggctcagggagaggaaagggcagaaagccgcgcccccaatccctgctccgtccgggtaggtcccctccccccgcgcgtccagtcttcccagttccagctaaggctctgccagtccggagagcccctatctctcccatctctgctctagatgcagcccagaagggcgtgggagtagcacctgagaataacggtctccttgtgcggatctggggagccccctgcagggtgagagcggagaagaggaaaagaagctgcggctggaagcctgcacctgggggagtgagaccacagttatcttggccgctccagcctgggagcgggagaccttggcgcgcaccatagcagggacaccgcgggaggaggcgc

SEQ ID NO: 122206 - DNA, 91 bp, Homo sapiens
  chr12:49487979-49488070
  hyper
aggccctccttacctcggtcatcaggcggtcggctccactgttctcctcatccttgaagatgatgtcggggttgtagttgggcacgaggtc

SEQ ID NO: 122207 - DNA, 78 bp, Homo sapiens
  chr12:49488131-49488209
  hyper
cgctctggcacgccgggcacaaattgcttgtagagtagcggcacgagctgcttgcgcgcatagcggcgccggccaacc

SEQ ID NO: 122208 - DNA, 30 bp, Homo sapiens
  chr12:49488694-49488724
  hyper
gctggtccattttgcgactgaagtgtgtcc

SEQ ID NO: 122209 - DNA, 30 bp, Homo sapiens; identical to SEQ ID NO: 49512
  chr12:49504036-49504066
  hyper

SEQ ID NO: 122210 - DNA, 30 bp, Homo sapiens; identical to SEQ ID NO: 49513
  chr12:49504293-49504323
  hyper

SEQ ID NO: 122211 - DNA, 30 bp, Homo sapiens; identical to SEQ ID NO: 49514
  chr12:49504676-49504706
  hyper

SEQ ID NO: 122212 - DNA, 30 bp, Homo sapiens
  chr12:49524526-49524556
  hyper
gttaacaggagacacgccctgtagccctag

SEQ ID NO: 122213 - DNA, 49 bp, Homo sapiens
  chr12:49524763-49524812
  hyper
gggactcgagggaccgcacccaggacacagttacgcgacaaaagagagc

SEQ ID NO: 122214 - DNA, 98 bp, Homo sapiens
  chr12:49525459-49525557
  hyper
cagggaatgggcgacgaggcttgccttaattcggaggaaacccaggacttgagagagccatacaatttgaaagacgaagcaccgtgaaatgcagaaag

SEQ ID NO: 122215 - DNA, 412 bp, Homo sapiens
  chr12:49582692-49583104
  hyper
tttccaagtagagcctgggggcgctgactccacccaacggccacaaagagccgaagccgattctcaccatggttgctgcttcgcgactgccgagctgatggcggagacgaagaggagaggttgttgcttcttacagcgcgactcttaggcggtcgatgtaagagaacctgcggcacataggcggatgcggctccctatatacaactcggtcaccatggggatgggccggggccttttcctgttggtccagacccccaatctgcccagagaagccatgacaggagactggtgattggtgcaagcgacgtgggatgaggtaatctctcccccacccctttttctctagcatccgtagactgtttgcatcctttagacaaagagaccgtgcagaagcagtcggccgagcatccat

SEQ ID NO: 122216 - DNA, 560 bp, Homo sapiens; identical to SEQ ID NO: 49518
  chr12:49658688-49659248
  hyper

SEQ ID NO: 122217 - DNA, 66 bp, Homo sapiens
  chr12:49689030-49689096
  hyper
ataccgccgtaccttcggtccaccgccctcactatcccccggggccttctcctactcgtccagctc

SEQ ID NO: 122218 - DNA, 151 bp, Homo sapiens
  chr12:49689134-49689285
  hyper
cgagctcctcggtgcgcctgggcagcttccgtagcccccgagcgggagcgggcgccctcctgcgcctgccctcggagcgcctcgacttctccatggccgaggccctcaaccaggagttcctggccacgcgcagcaacgagaagcaggagct

SEQ ID NO: 122219 - DNA, 30 bp, Homo sapiens
  chr12:49689485-49689515
  hyper
agcgcgacgggctggcggaggacctggcgg

SEQ ID NO: 122220 - DNA, 30 bp, Homo sapiens
  chr12:49689975-49690005
  hyper
gcgcaagcgggaggacgcggagcacaacct

SEQ ID NO: 122221 - DNA, 1041 bp, Homo sapiens
  chr12:49690391-49691432
  hyper
ccctggggatcaggacgatgctgggtagacgcagcccctccaccctagtctacaggtggttagactcccacccttgcgccacctggcggcgggcagcggggctgtacctccgaaacctggcctctggtctcgcgcccgcgggggcgcagggctgtacgccctgccctccctggcgcccacttctgttcgttcaagcgtttcttctcttttctgtgcacgaactgcgtggcccgcgtggaatttgcgccgctgtccatcctctgcctgctcccggccgtaggagctgcgagacctgcaggtgagtgtggagagccagcaggtgcagcaggtggaggtggaagccacggtgaagcccgagctgacggcagcgctgagggacatccgcgcgcagtacgagagcatcgccgcgaagaacctgcaggaggcggaggagtggtacaagtccaaggtgcaagagccgggagggcctgcgaggcgggacgctggggtggtgtcgcgcgtcccagccgactaaagcctgggttacccccacttctcagtacgcggacctgtccgacgctgccaaccggaaccacgaggccctgcgccaggccaagcaggagatgaacgagtcccgacgccagatccagagtctaacgtgcgaggtggacgggctgcgcggcacggtgagtacgaagctgcgcgctcgggcccggggagcggacgatgaaatgttctgcaactggccccttccactctcctaccccagaacgaggcgctgctcaggcagttgagagagctggaggagcagttcgccctggaggcggggggctaccaggcgggcgctgcgcggctcgaggaggagctgcgacagctaaaagaggagatggcgcggcacctgagggagtaccaggagctcctcaacgtcaagatggccctggacatcgagatcgccacctaccgcaagctgctggagggcgaggagagccggtgagggtggagctgctggggcggggcagggcggggtcgggactgggccgggcagggcggggcctgggcagg

SEQ ID NO: 122222 - DNA, 30 bp, Homo sapiens; identical to SEQ ID NO: 49520
  chr12:49716996-49717026
  hyper

SEQ ID NO: 122223 - DNA, 30 bp, Homo sapiens
  chr12:49728336-49728366
  hyper
ctaatcactatttaccgtccccagggccgc

SEQ ID NO: 122224 - DNA, 547 bp, Homo sapiens
  chr12:49729776-49730323
  hyper
tgagcacgtggtaagcgaagaagtagacgcctggcatggggcaagtaaacttgccgctggctgcctcgtaggcgttgcccacgttggtcaccacgtcgtcgaagcgcagcacctcgtaaccctcgtggggccgccgcaggcccgcgtagaaagcaatgcgaggcacgtagccggcagcgggcgccaccccgcccggacctggaccgggagggcccggggggcctggcctgccgggttctcctgggggccctcttggacctggtggtccagggggcccccgcaggcctgctttcccgcgccggcccacctctcccttggcgcctggcgggaaggggggcacggaagcaggcgcgccgtcgggaccagggccacggggcccatgcgggtcgcacaccatgcggcagcgacccagcatctcgtagtgcgctggcccgcgggagctgtgcaccagcagcgggatggccaccagcagcagcagcaccatggccactccgacggccgcgcccgccaccctcttgcggcggctcagccgcgacgctgccagggc

SEQ ID NO: 122225 - DNA, 67 bp, Homo sapiens
  chr12:49731137-49731204
  hyper
gttcttcagggtttcgcggcccccgctgtatctttacttttaccctttacccggagtttggcattct

SEQ ID NO: 122226 - DNA, 1356 bp, Homo sapiens
  chr12:49735822-49737178
  hyper
cggagccagagaccgctgcccggtgcttcctcccatcttcttccatcccttccctcttgctccccctccctcctgcactccctccccggcggccgcggcctttattagggattccgcggctgtcggtcccgccatccatcctgtccgccggcaattaggcggccagacaaagagcagcttcggatggatgagggtcccagcggatcggaaatgtgaagggtcagcgctgccgcccgcggcgcaccccgctcccccttccgcataatcaccggccgcccgtcactcagccggccgcccagggagctcctgggcccggcccgggagagggcggggtgcggctgcagcctaggcgcccaggacagggcgagggcggacctgcggcaggagcgcctcctgcggggcagtggaggactgtggcctgaggcattggccgaagggtgggggattatggccccgggcactccccgaagggaaactggggctagcggcttggggcctcccagtggggaagagggaacaaaagctgcggagaccggaggcccggggtccagggcgccccctgctgggaagctgggaaccaagccttagaggtccggcaggtacagatggaaccaggcccagggcgacccctcctagggaaaccaagggtttctagcctggcgcgcctcctgccggctttgaatgacactgcgcttctatgcccgctccgttcagtgaaatccaaccaatccgcatccgctcaaaaaaggctccaagtcctggcgaacccgaggggagccgagagggagttcaaggagtccaggttttactgcagattctttggcgctagctcccagctgacaaatcaacatctcaatctgacaattagtggtcaagatgcggggtgaggggctcttacagccccggccgcttagccctcccggcgggaggcagaggggtgggcggtgctggcagtgatgaacgactccaggggggcccgtggccccgagcgcgcattcattactcgactgacaggcgggtggcgggccgggcgggctgcgagtggacgtgccgggaaagaggccagtagcaggaggggactaaggcaagcgtttaacagtcccactgctccatctgctcccggtccttcgccttgaccctgggacttgacttccttgagctcggcctcccagttgttggagctggccctggctgggaagcaagggcggggacctaagccctcttctggggttaggtgatttaaggtctgagatgtcaaggaagggtattaggcaggtctcaagactaggcgattcggcctgacctctgagagattgtgcgtgactgtgcactcagagatggcgtgtatgacaggga

SEQ ID NO: 122227 - DNA, 1825 bp, Homo sapiens
  chr12:49738835-49740660
  hyper
gagccttagagggatcgatgcggcccgggggccccgcccggggtcgatattcctgattgggaagcggccgcttcgcggagcccgcgtgtaaatcacctgggctgggggagggggcgtggggagcctaccacgtcccaggctcgcgaagccaggaggggtcgggacccgggcggtaccggagggcgacggaatgagaacgacaggccttagagaaccagagagaagcccgcccagggcctccccctcccccgctcagccctgccaactcccccagcaggctccagtctcgcttcagcggccgccacccttcgttgcccctggagccgccggggaggccagtgtcggagccagccatgcggcggctcctctctggccgctcccgcggggccggggcttcggcggctgctgtcacggagccgacaggccgggccggccgggaaggggcgggtggcgggggggagaggcggcggggtgaggctggctcagcgctggcactcagtgggcgcgcaacgtatgtttgccgaattgaaaggctgggacaccgagcggcgcagggcagagggtcggagggcacaggcggggtaggagatggcccagaccgggtgagggcagaagcctcactcacgggggaagaaggcactcgaggtcgctctgaggaccgctgggctgggatagaccacccatcccccgccggggagacccgggtagtaaagaacaagacagaatgggacaggcaggacggtttggaccccacctacaagcgcctccaccaccccagcctccgatccttgtcacgctctgctggggaaaccgaggcagccgatgctgagaatagccaaaaagttaaaagcggggtcagcgacgaagctggggcagcaaccagaattcctgcgtgggttttttggattcctccgcccacgcggggccagtttgcgggtaaatgcaccaccgcgccccgcaccacagctcagaccctttcctctcgctgcagtttgtcagatccccccacctcccactctgcaccagtttatagaacaacaatttggggaaaacaatccgggcggagtgacggccccgtaattgtgacaaagtgagtgcgggcggctggagagagcgctaggccgggagcgctgcagggcgaggcggaggcaggggcgcctccccccgccctgccgccccctcgttcttattccggtcacctcccatccctctccttgactcttcaattcctcttctcccggccccttgcgccttccttcgcttgttcctccatcgctcttccctttcctcccggtaacagctcttctcccgctcccccgaccccgtcgcccctcccccggtgcgctttttcctcgctcacttctcccctctcctctgccctccactcgtttcttcagcttttcctcgcgcttacattgcccttgggcccctggctctccccgcacaatccgcttctctccctccccactcctcccttcctgagatcgaaccctgagccccttcccgacccccactctctgggccgccagcgcagccccgcatttctgggttcctcgggaagtaaacctgggggcgcgctgcggccccgggtgccccggcggccagccccttccctctcccttgtatggctgccgcccccgccccaccacctgagccgggagatagtttgtttgtccagcggcggccgccgccgcccacgctgtttgcaaagcttagcgcgccgtcgcgcagtgcgggcccaattaagtctcattcattattcagcgctcctgtccgcccccgccccccagcagtctgaggcgtcgctttggggcccctcccagcc

SEQ ID NO: 122228 - DNA, 198 bp, Homo sapiens; identical to SEQ ID NO: 49526
  chr12:49740981-49741179
  hyper

SEQ ID NO: 122229 - DNA, 126 bp, Homo sapiens
  chr12:49741512-49741638
  hyper
aggtgtctggggaccgcccggacccccccttccatcggcggcagcgccacctggcggccatggtgcggtggtgtgggaggagctgggcccgggctgggcactgagcccaccggagctgcaggcgtc

SEQ ID NO: 122230 - DNA, 30 bp, Homo sapiens
  chr12:49760507-49760537
  hyper
ggaagagtgagcggcgctgtacccggcggc

SEQ ID NO: 122231 - DNA, 302 bp, Homo sapiens; identical to SEQ ID NO: 8732
  chr12:49761540-49761842
  hyper

SEQ ID NO: 122232 - DNA, 461 bp, Homo sapiens; identical to SEQ ID NO: 49529
  chr12:49931602-49932063
  hyper

SEQ ID NO: 122233 - DNA, 93 bp, Homo sapiens
  chr12:49932285-49932378
  hyper
ggccgggcagctgtgcgcgcagaacccccgccccatctgcttttagatttcccgggtgcggctggagcccctctagagcgccggcctccgctg

SEQ ID NO: 122234 - DNA, 293 bp, Homo sapiens
  chr12:49932965-49933258
  hyper
tgtgggcggcgagggcgcgaggggccgcgcgccatgctccgggccccgacggcgcggacgccccctcgcgcgccagcgtccggcgcgaccccggatcccggtctgcgcattgccccccgacggctgcgctagggagcgcggggcccggcggggggcggccgagctgggcgccctcccccggcgcggagtccccgcaccccggagggatggggcgggcagccgcgggcgcctaagatgccggccatgcggggcctcctggcgccgcagaacaccttcctggacaccatcgctac

SEQ ID NO: 122235 - DNA, 215 bp, Homo sapiens; identical to SEQ ID NO: 49531
  chr12:49933289-49933504
  hyper

SEQ ID NO: 122236 - DNA, 31 bp, Homo sapiens; identical to SEQ ID NO: 8733
  chr12:49961129-49961160
  hyper

SEQ ID NO: 122237 - DNA, 545 bp, Homo sapiens
  chr12:49961429-49961974
  hyper
cggaccctccgcccctcgttctcccaagagtgcacacccaaggtaggggatcggtccaggtctgtctcaagaactcggggtaggagcattgatgaagtcacctctgcaactcaaagcagagcaccaagtagccttggtttgagacccacaggctggtggctggggaggtgggggtaaactcgcaagcccattctcaccccacggtctccatgcctttgcgcatgcgtaacacttcgagccagattctaacccggtccggcccacgcatgcgcagcttttcggggcgccactggggcggggccccaaacttggggggtggtcgtccccggcggcactctgcaaaactccatttcatccccaactcctctgagaaccctcagaggcgaaccgcgaggtctcaccattcctagactgccagatccaacaatttctccgcggcgacggtagcagccgcagggccaaagccggcttccgtgaggtacgtctacttccggttaacgaaccagggggctggcaatctcttccggttcgtcttggcaacgtgt

SEQ ID NO: 122238 - DNA, 30 bp, Homo sapiens; identical to SEQ ID NO: 49534
  chr12:49962287-49962317
  hyper

SEQ ID NO: 122239 - DNA, 183 bp, Homo sapiens
  chr12:50016478-50016661
  hyper
tcaggaacctagcacggcatcacgcgagtcccggctcaggtgaggggggaataaagggaacaggaagcgccttttgcggggctttgcaggctggcggtcagcgcctttctgcacccgtgtgcctggggcctgtcactctccagccccaaggccttcagcgcattccccgcagagctccaggtt

SEQ ID NO: 122240 - DNA, 30 bp, Homo sapiens
  chr12:50016969-50016999
  hyper
aattcgctgtgcagcgcaaaggcaccctac

SEQ ID NO: 122241 - DNA, 30 bp, Homo sapiens
  chr12:50017268-50017298
  hyper
gtgcgaccccccgccggccccgccctcccg

SEQ ID NO: 122242 - DNA, 30 bp, Homo sapiens; identical to SEQ ID NO: 49536
  chr12:50100794-50100824
  hyper

SEQ ID NO: 122243 - DNA, 16 bp, Homo sapiens
  chr12:50135166-50135182
  hyper
cgacaagctcaggcct

SEQ ID NO: 122244 - DNA, 30 bp, Homo sapiens
  chr12:50135476-50135506
  hyper
gtagcttccttctgcggacagatggcaccc

SEQ ID NO: 122245 - DNA, 30 bp, Homo sapiens
  chr12:50136090-50136120
  hyper
tgaggttttgtgggcgtctttctaagtctg

SEQ ID NO: 122246 - DNA, 105 bp, Homo sapiens; identical to SEQ ID NO: 8736
  chr12:50202841-50202946
  hyper

SEQ ID NO: 122247 - DNA, 30 bp, Homo sapiens; identical to SEQ ID NO: 8737
  chr12:50221544-50221574
  hyper

SEQ ID NO: 122248 - DNA, 30 bp, Homo sapiens; identical to SEQ ID NO: 49539
  chr12:50222795-50222825
  hyper

SEQ ID NO: 122249 - DNA, 30 bp, Homo sapiens
  chr12:50236977-50237007
  hyper
tggctagaattctgcggtgaatcagaaaag

SEQ ID NO: 122250 - DNA, 21 bp, Homo sapiens
  chr12:50297533-50297554
  hyper
tggtgcaggctggggagatgc

SEQ ID NO: 122251 - DNA, 122 bp, Homo sapiens; identical to SEQ ID NO: 49541
  chr12:50297973-50298095
  hyper

SEQ ID NO: 122252 - DNA, 329 bp, Homo sapiens
  chr12:50339292-50339621
  hyper
ctgctctcttcacttcgtcccgcttcgccccgactgtggatctacccgctcccttctccctcagtccccaaagcaccagactcacaggcctgctgtgtgacccacttttaccgacctttcggggagagtagagggcatttgtgactcagctcagagcaggaaacacatctcacgtcaactgtcagacagcgctgctccgaatcccatcacagtgctccagcagggggcgtcctcaccggccgcggccacagccacggctcaacccggcctagctcccagacaccctccttccaccgcctgttttccaccgtccccgcctgctctttcaa

SEQ ID NO: 122253 - DNA, 69 bp, Homo sapiens
  chr12:50349341-50349410
  hyper
cggtggagctgcactcgccgcagagcctgccacggggtaccaaggcctgagggccgccagcggcctcta

SEQ ID NO: 122254 - DNA, 196 bp, Homo sapiens
  chr12:50355598-50355794
  hyper
ggccccgcgcccggccgcccgccccctatatagcgcgccccagcagggcccgcgccaggccgccagcctcggagtgggcgcgggacagtgcgcggcgccccgcagccaggcccccgcccccgccgcatccacctcctccgccgcctgcgacccaacgggcgccccccgccgcggcagctgccgccgggcccccgcg

SEQ ID NO: 122255 - DNA, 202 bp, Homo sapiens
  chr12:50361386-50361588
  hyper
tggccagcaggggtcgctgtgtctgcgtgtcggatcttgcaggagcggcaggtctgcgggctcacaaagtcccgtgcacacgcgcgcacacacactgaccccacacagtccggggctcgcggccacacactgacctcagtcgtgcccgagggctgcatgttccgggtgtgtgcgtctcctttcctccgcacgttcattcgaa

SEQ ID NO: 122256 - DNA, 79 bp, Homo sapiens
  chr12:50419369-50419448
  hyper
cgggaatgagcatgcgcattctgacaaagcgaagccaaaggtggccattttgactaatgtcaacggtttttcggttttt

SEQ ID NO: 122257 - DNA, 158 bp, Homo sapiens; identical to SEQ ID NO: 49546
  chr12:50426641-50426799
  hyper

SEQ ID NO: 122258 - DNA, 30 bp, Homo sapiens; identical to SEQ ID NO: 8742
  chr12:50444507-50444537
  hyper

SEQ ID NO: 122259 - DNA, 30 bp, Homo sapiens; identical to SEQ ID NO: 8743
  chr12:50450985-50451015
  hyper

SEQ ID NO: 122260 - DNA, 30 bp, Homo sapiens
  chr12:50478872-50478902
  hyper
ccttgtcttcctcccgtcggcctgggggcg

SEQ ID NO: 122261 - DNA, 123 bp, Homo sapiens
  chr12:50505849-50505972
  hyper
ttccctttatagcgcggcaagccgaatcctagaggctaacccggcaggtgggagggagaaagttgctttctgcaccaatagctgaggcgttcagggttgtccagggacgctaccctcacgtgt

SEQ ID NO: 122262 - DNA, 30 bp, Homo sapiens; identical to SEQ ID NO: 49549
  chr12:50506219-50506249
  hyper

SEQ ID NO: 122263 - DNA, 506 bp, Homo sapiens
  chr12:50677033-50677539
  hyper
agaagtgaggaaagaacggaggatcagcgtccctcgaccccttatctcgagggggagggactcacactccttgcactccccccgccccaaaagtcgaaggagaaagagggtgtggagagaagccggggtcttcccgcactctccggttgtggagagagaaggcccttacctggctaaaagccgcctttcctctgcgctgctaccagccctgtcacaggtcccggcgctctacctagcgcacctgtcgcgaccaagctgctaacacctactgctcctgcggccccgccccggaccccgcccaccgccgcgggggcgcgcacgccagacagcctcccgtgcggcctcgggctgagcgtgcgcgccaccggctacgtgcccagcgctcgcgtctgctccagtcgctctggcggtgcggggcgctggcgacgggacagggtttttgctgcccggggcctagtctacctcggcacgcttttctctgaaggagacacgcacttgcacgacgt

SEQ ID NO: 122264 - DNA, 202 bp, Homo sapiens
  chr12:50899498-50899700
  hyper
tcctttaacaatgcgcgatgcctccccagtgacaggagtgagacacaagcgggtgagccatttagggtcctaggaagataagaagcaatggcattaacccagagagacacacggtgctgcttttagaccacctttgtcataagaagtttttttttttcctggtgcctgttattcgggccgaattttccgcatctggtcacct

SEQ ID NO: 122265 - DNA, 96 bp, Homo sapiens
  chr12:50926641-50926737
  hyper
ctgtgtgagaaaaaacgcagagaaacttaagccttgagtgaattagagtaactctttgttagtgactcctctggccctcaccgggctggtttttca

SEQ ID NO: 122266 - DNA, 30 bp, Homo sapiens; identical to SEQ ID NO: 49553
  chr12:51045433-51045463
  hyper

SEQ ID NO: 122267 - DNA, 30 bp, Homo sapiens; identical to SEQ ID NO: 49554
  chr12:51155647-51155677
  hyper

SEQ ID NO: 122268 - DNA, 268 bp, Homo sapiens
  chr12:51157701-51157969
  hyper
ccacaagtcaggaccgcgtacaagatggcggcgcgtcacgtgggcagcgcggtgacgcaggacggcggcccgcgcggaggcagcgccatagcctaccccaaacgcacactagtgctcagttttgcccccctcccctcccccgcccccgcccccgcccccaggcttgtgtagatcatgccgccagtagcggccctgactgccgaggaaacggtagcttaggacagttggctgttaagtgacactgattctccccgccccgcctgacccc

SEQ ID NO: 122269 - DNA, 30 bp, Homo sapiens
  chr12:51158648-51158678
  hyper
gatgcgcctggcagcggagacagagtgggg

SEQ ID NO: 122270 - DNA, 240 bp, Homo sapiens
  chr12:51318415-51318655
  hyper
ccaggctccacccacgaattctgttttcttttagaggtcactggagagcccggtggggtgtaagtacactgcgcttataaaactctagcaggaagctagcagctgtctccaaacccagagaaggggaaacaggaatcgattaggaataaaggattataatccactttccttctgaggaaaagctgggaaccttctcattttgccttatgaaaactaagctgaatcgactgctgccaaaca

SEQ ID NO: 122271 - DNA, 30 bp, Homo sapiens
  chr12:51319047-51319077
  hyper
aagtgggctgtggcacgggggccaacttca

SEQ ID NO: 122272 - DNA, 109 bp, Homo sapiens
  chr12:51419806-51419915
  hyper
catgtgtcctaggccgcggcggggaaggggcgagacccccgcgacctccggcgttccctccctgcccccatctttgggtctttctctgaatggcgcgactccatcagtc

SEQ ID NO: 122273 - DNA, 30 bp, Homo sapiens; identical to SEQ ID NO: 49558
  chr12:51441682-51441712
  hyper

SEQ ID NO: 122274 - DNA, 30 bp, Homo sapiens; identical to SEQ ID NO: 49559
  chr12:51442041-51442071
  hyper

SEQ ID NO: 122275 - DNA, 42 bp, Homo sapiens
  chr12:51477512-51477554
  hyper
tgcaaagccgaagccggcgcgcaaaccggctcccgaggcggc

SEQ ID NO: 122276 - DNA, 33 bp, Homo sapiens
  chr12:51610958-51610991
  hyper
ccagctggccctaaccgccgggaacccaggcgt

SEQ ID NO: 122277 - DNA, 30 bp, Homo sapiens; identical to SEQ ID NO: 49561
  chr12:51611341-51611371
  hyper

SEQ ID NO: 122278 - DNA, 30 bp, Homo sapiens; identical to SEQ ID NO: 8746
  chr12:51611856-51611886
  hyper

SEQ ID NO: 122279 - DNA, 99 bp, Homo sapiens
  chr12:51632360-51632459
  hyper
gttctgcatccgagcgtccaacagagaaaagatcctgtttccagacaatacctgcatttggtttttctccagctgagggacaccggtagggggggggag

SEQ ID NO: 122280 - DNA, 30 bp, Homo sapiens
  chr12:51632975-51633005
  hyper
aggagcaaatagagcgctagcgcaggcatt

SEQ ID NO: 122281 - DNA, 30 bp, Homo sapiens
  chr12:51664379-51664409
  hyper
ccagattggagccgcgggctaactgggatc

SEQ ID NO: 122282 - DNA, 687 bp, Homo sapiens
  chr12:51785148-51785835
  hyper
gctacaggccaccgcgaccagcagagagcgaaggcaggagggaccagcctggcccagccccttcattttactgtcgggggtagtgaggaggaagaggaagaggcgaaggctggcggaggaggaggtgagagcgaggactcggcagaagcgagatccgccgaagggaagtccgagcagtcggggagctcaggggggccctcccggggagagggtcgcgggctccttctgccgcttacctgtcgcgccgaggcaaagccgcagccgcgccgcggggtggctcccgggtttccccaccggacggccgggagggtgggaccggggcgggacctcccccagctgcactaacgcgcccgccccgcccctccctggccaggtgcagcgggtcccgccgtgtcctcagcctgctgcgggcccgggaactcccggcggaccggcagaggggcgccccggcttctctgcgtctcagcccgccccgggggtgcggtctttgcggccaggctttcagcgcggaaaaagattggagggtcctagtcaccccaaagaggacaggcattagcagagccgcgggcggcgggtgcatggaaccggaatgtgctgcgcgccagcctggagcgctcggagcccggaggcctgccccggagggggaaacgcggcggggcggccatgggccccggggtcctgccccag

SEQ ID NO: 122283 - DNA, 690 bp, Homo sapiens
  chr12:51818411-51819101
  hyper
aagcagttggaaggaccttcacgcccagaggcccctgaagggagggaggcggtttccaaggcaaccgggcccgggagcggttggctccccggctcctccccctccccgcggtagcccagggtaccgccggacagcgtcctcccgtgctccgcgccctgattggctgcgcaggcctctcgctgattggttgcggcggatgcctcgcgggccggtggctatggaggcggcggcggttgatggttgaccgttggctccggggtgggggtcgccgttcgagtgatctgctcagacccgaccagagggcgcgggctgctgatgcttggcttggagcccgtgggggagacctagttcggctccgccatgccggccgccgggagtaacgagccggacggcgtcctcagctatcaggtagggccccgcctcccgcgcctcccgctcctccccggggcgcagcctcctcatcctctgcccaccctccttccttctgcccccgagcccaggcttcccaggccgctccctgagggcgaggggaggccagcccgggacaccagggggcgctccgggcggttggggaccaggccagggctgcgagagagtgaccttgggccgaacctgggatctggcccatctctgccgcatcccttgcgccgcccgcccaggagccctgacagccggcgggcggcgacctct

SEQ ID NO: 122284 - DNA, 30 bp, Homo sapiens
  chr12:51985248-51985278
  hyper
tttgccgcagagtgcgcggcggggctccag

SEQ ID NO: 122285 - DNA, 41 bp, Homo sapiens; identical to SEQ ID NO: 49566
  chr12:52207923-52207964
  hyper

SEQ ID NO: 122286 - DNA, 814 bp, Homo sapiens
  chr12:52208001-52208815
  hyper
cggtgaggaggccgagcgccagcggccccgcccaacccatggggctccgctcgtacaggggctgcggcaggcgctccacgatcagctgcagggcgtcccagtccggcgcggggaccgcggcgcgccgggggcgcggggccggggcaaagggcacgcgggcggcggcgccgggccgcggcaggaagcgctgcccgaacttgcgcagctgcagcgtcgcctgctggtggaggttcttgcccagctccctggccacgtccgggcggccgctgcgccgcagggcccgagccaggcggtcccaggacagggacgcggcctggggggccagccaggccgccagcgcctcccggcagccgtcggacacctctccaggcccggctaccctgcccgccgggtcctcggccgcctctcgccgccgccgccggctcggagaccccgacgtggtgttgagcggctcaggccgcgccagccggtcttcagaaagccgggacaactcggcctccacgtcgggctcgggcgcctccaggagcgaccggaaatggccgcactcctccggggtcagcagctcggccagacggacggctgcgtgagggcccatagcgtccacggcccccgccggagccagcgcccaaacccagagcgtgaggaccaaggcgctcgccagagtccgcgccgccatccctggcgggaaccagggaccgaggactgtgcggggacggggacgtggacgggctccgcgccggtgatgggggaggggttccgaacgcccgcggattgtgggagggaggaggctccgaacagtcgggaagcctagtgg

SEQ ID NO: 122287 - DNA, 30 bp, Homo sapiens
  chr12:52241456-52241486
  hyper
ggcagggggaccagcggggctggggaaggg

SEQ ID NO: 122288 - DNA, 30 bp, Homo sapiens
  chr12:52241802-52241832
  hyper
tcctgtcactgccccgtcaccatgctgggg

SEQ ID NO: 122289 - DNA, 30 bp, Homo sapiens; identical to SEQ ID NO: 49568
  chr12:52242151-52242181
  hyper

SEQ ID NO: 122290 - DNA, 30 bp, Homo sapiens; identical to SEQ ID NO: 8749
  chr12:52262950-52262980
  hyper

SEQ ID NO: 122291 - DNA, 231 bp, Homo sapiens
  chr12:52294167-52294398
  hyper
gccaggcgcctcccgcggccaggggcgggcagccgcagagcagcacgctgggccttggctccggtagcagcaagttcgaaccccgctcctgctccgcttcggttctcgctcctcggcccttgggcctccaaacaccatttcctggcagttcgttgcgcattgcgctctccccgccaccaggatgccagtgaccaagaaggatctggcggaggacgcgccgtggaagaagat

SEQ ID NO: 122292 - DNA, 31 bp, Homo sapiens; identical to SEQ ID NO: 8751
  chr12:52300898-52300929
  hyper

SEQ ID NO: 122293 - DNA, 157 bp, Homo sapiens; identical to SEQ ID NO: 8752
  chr12:52301148-52301305
  hyper

SEQ ID NO: 122294 - DNA, 148 bp, Homo sapiens
  chr12:52345763-52345911
  hyper
ccccagtcagcttccccgatctccgaggcgcagccgcccggcggcgacggagctcacgccgggcccctggggacccgagccctgttccaggcggaactggattcgggcagttctcaggggtcgcgctcccagcgccctcgtgttccag

SEQ ID NO: 122295 - DNA, 335 bp, Homo sapiens
  chr12:52400153-52400488
  hyper
cttctggggcagctgcgtcaagggaaaatcctgggccctctccctccctgggggcttctgcgcagtgagttcagggagtctcctccctcctccatcgggcctccacccctactcctgcgcagccccgctgccgctctccctgccctggagtctcctgcagccccttggatctccgtgactctccctacctccccgactccccaggcttcttacagtgacctcttaccgtgccccactccatgaatcgccagagctattcgtccctaaatttcaaaccttgcgcaatgtcccttcacagacccctccaggtatcacgcagccccgagccccgagcc

SEQ ID NO: 122296 - DNA, 1022 bp, Homo sapiens
  chr12:52400516-52401538
  hyper
cgcgtccgcggctcgttttcccccactgagcgcccagctcccgcagtttccccggccgtcgagcgccgtgggcggggctccagggcggcggcgcctcgcggggagggtcctccgtgctgggggcgaggccacccgaggcagctccccgcccgcccccaaccccgccccgctctcggagcctataaagggaggcgacccgcggcccgcccggctggcatcccccagccgccgccagccccgccgaggggagccagcgccgtctctgaggggcgtccggcgccggagccatgaccctccgccgactcaggaagctgcagcagaaggaggaggcggcggccaccccggaccccgccgcccggactcccgactcggaagtcgcgcccgccgctccggtcccgaccccgggaccccctgccgcagccgccacccctgggcccccagcggacgagctgtacgcggcgctggaggactatcaccctgccgagctgtaccgcgcgctcgccgtgtccgggggcaccctgccccgccgaaaggtgcgtcccccgcccgccttcaggatctgctcagcccctctccgactccctacagggcctgctgactccgcagtgccctctcctcggcgtccgcggagtcccccaccttcttccccggcccgctgggtgcctcgactccccgcgttccccgctgctgcgaaggccgtggccctcgcctgcacaccgcgcccaggctcggtggctcttaactccgcgccccatgcacgccccctctctccctccttgactcctcccagcaccccccttctcctacccgctccatctggctttctgccccccatgccccgcctccccgtggccaggtgtcctgggtccccaggagcccctcgcccgagggacagagacagccccaggcaagttgaaggtccgagagcccccggtgggagaagcgggccggtggctgcgccgcgtgcgttctcactctgaggaagtgcgtggggagccgctgactccggatagcacaccctt

SEQ ID NO: 122297 - DNA, 53 bp, Homo sapiens
  chr12:52401605-52401658
  hyper
cgagggccactgctccctggacttctgtcggaaccggacgcagtgggaggggt

SEQ ID NO: 122298 - DNA, 361 bp, Homo sapiens
  chr12:52416803-52417164
  hyper
gccagtgctcaggggcgagcggaatggagaggaggcggggctggggcgcacagccggcaggggatccctgccggagtctgcttttcacgggttcccgtctagaccagagttggggctcagcttggagagatgggacaggtggaggtgctgggggttggagccccacgcgctgctcaagaggctgcaggctggccttcaaggcctgggctagactgcggcggttgggggctggcggtgcggctcgggtggagtccgccgggcaccgccctccctctccaccctcgcccaccccggggccgcgaggctgtgggttgagctgcagaggcgagctccctcctgggcgtgccgccgccgcgagtgg

SEQ ID NO: 122299 - DNA, 30 bp, Homo sapiens
  chr12:52417604-52417634
  hyper
gtcctggtagggggcgtggcctggccgact

SEQ ID NO: 122300 - DNA, 30 bp, Homo sapiens
  chr12:52426654-52426684
  hyper
cagatttgggatggcgagcccccaaaccag

SEQ ID NO: 122301 - DNA, 192 bp, Homo sapiens
  chr12:52427133-52427325
  hyper
ctgggagtgcgattacgggcctctcacttcgtaaatcacgcaggcctgaaacgctcacatttgtttaccacgagcatgtttgattttgtaatttaacaaataaaattgcagaggatttttaagagccctggcctggatttaggggaaatctcgcattaattccagctctgccatttccggtctggagacctt

SEQ ID NO: 122302 - DNA, 30 bp, Homo sapiens
  chr12:52430836-52430866
  hyper
cattgatgaggctgcgtcggccgccgccgc

SEQ ID NO: 122303 - DNA, 30 bp, Homo sapiens; identical to SEQ ID NO: 49576
  chr12:52444539-52444569
  hyper

SEQ ID NO: 122304 - DNA, 16 bp, Homo sapiens
  chr12:52463367-52463383
  hyper
cgtcagcgtctcccgg

SEQ ID NO: 122305 - DNA, 59 bp, Homo sapiens; identical to SEQ ID NO: 49577
  chr12:52463633-52463692
  hyper

SEQ ID NO: 122306 - DNA, 193 bp, Homo sapiens
  chr12:52464066-52464259
  hyper
ggaattccttcctgcgtccgtcccgagtctcttgatatggagccaagtaagttttctggttttgcttttagctggtctcttgtggctcagcgccgtgcggaggttgaagcgtacctgcggaggtcgcaccagggcgtgaggaggaggaggaagggcatgagccgagcttgaggaatccgtgctccaaactcta

SEQ ID NO: 122307 - DNA, 51 bp, Homo sapiens
  chr12:52615993-52616044
  hyper
tgtgcagatagggggcgccagagggagacttcgaggcgttgctttctgtgg

SEQ ID NO: 122308 - DNA, 20 bp, Homo sapiens
  chr12:52626726-52626746
  hyper
ccctctccaagcatcctcct

SEQ ID NO: 122309 - DNA, 216 bp, Homo sapiens; identical to SEQ ID NO: 8756
  chr12:52626830-52627046
  hyper

SEQ ID NO: 122310 - DNA, 318 bp, Homo sapiens
  chr12:52627272-52627590
  hyper
gaggtcaccattaaccagagcctgctggccccgctgcggctggacgccgacccctccctccagcgggtgcgccaggaggagagcgagcagatcaagaccctcaacaacaagtttgcctccttcatcgacaaggtgagcgggactggacctcgcctctcctcgagccgcgctccagaccacaccagccgccctaactagccctgcctgcgcgcgggccaggcgctggggagcactgccgcccttctgtctttccgccagtgttggggacacgatctgggggtccttcctccttcgcatgaaccccgtggctattttatc

SEQ ID NO: 122311 - DNA, 5 bp, Homo sapiens
  chr12:52652599-52652604
  hyper
gagtg

SEQ ID NO: 122312 - DNA, 139 bp, Homo sapiens
  chr12:52672849-52672988
  hyper
cggacagtcgtcctccgttcagccgggctccgcctgcctgctccagccccgagcaggctccggcgccctggagacgagcgcccctggcggcggctacgcgctctgcggctctcccggctgtgtccgtgggctttagcta

SEQ ID NO: 122313 - DNA, 538 bp, Homo sapiens; identical to SEQ ID NO: 49582
  chr12:52702042-52702580
  hyper

SEQ ID NO: 122314 - DNA, 115 bp, Homo sapiens
  chr12:53004285-53004400
  hyper
gtgaagtaaacacatcgccagctcgccgccccctcccccccgcccccaaccacactctgggaaactttaaggtggagacttgcagtttcttccagtccctcggtcccacccacct

SEQ ID NO: 122315 - DNA, 493 bp, Homo sapiens
  chr12:53084859-53085352
  hyper
atgagaggggatcaggaagggcgtggaggggaggagtttgaggagagggcggtgaggggcaggcgtgatgtgtggcagaaacgaggcctctactccaagatccgcctgtgggaggtgttggtggaggtctggatgatctgcacgcgcgaggatccgcggccgcttctgccgctccctccgtagctcccgccaccgccgccgcagccgctgccataaccgcctccactcctgcctcgtgccccgcctccgcggtagcttcttccgccgccatagcccccaccgctgccgccgccgtagcctcctgagccgtagctgccgccgcctcccgcgccgccgttgacgctcacctggctgttctgcacggctgtgggtaggggacagtgcacacggggtcagagggaccgggcaaggcccccacctgcacccgcccctgcacctgcagcctcctccatcctcgatcacccgtggcatcgacttgcaaaccccatacatt

SEQ ID NO: 122316 - DNA, 555 bp, Homo sapiens
  chr12:53107928-53108483
  hyper
cctactcatccttcgcggcaactttcgggctgctgcgatgccagcagtctgggaaggtggggctccggggcacaggtcagaagcagcggagggaaggggccccgcgggggtgcgggggagctcagagcggggcgtgccggagggcgaaggggactggggtccgaggacgcccctggcgcggggttcagaatttgtggcgggaccgccagctctaggaggagctttgttctctctggcggcgctgctgccgccgccgccgccaccccggctgacggcgcaggagtcccggagccagagaagccccccgagcaccgcggagctcccgcccaagccccagccgctgcggccccggctaccgccgcgggcccgggctccgactcctcctcccagggcgcagccgccgccagtgctgctgtggccagtctctgcaaagacggtcggggtcagggagcctggcagtgtccgcccggcacgccagcccctcccacagtcccgagccgcaggtcttcccggggtgacgccccgccgagatccggcaaggcgtggggaggacag

SEQ ID NO: 122317 - DNA, 314 bp, Homo sapiens; identical to SEQ ID NO: 49585
  chr12:53135225-53135539
  hyper

SEQ ID NO: 122318 - DNA, 326 bp, Homo sapiens; identical to SEQ ID NO: 49586
  chr12:53267966-53268292
  hyper

SEQ ID NO: 122319 - DNA, 186 bp, Homo sapiens; identical to SEQ ID NO: 49587
  chr12:53272442-53272628
  hyper

SEQ ID NO: 122320 - DNA, 169 bp, Homo sapiens
  chr12:53273343-53273512
  hyper
ccaggcccgtgcaggcgtggacctcccgcgagggcctcagcagtctccaggacagagagtggaacccgccacctgctggaaaggccggagccggcgcagagctagcgcggggcaatgtggcgccctctgcggggagcccctgctgcctcgcgccggcactcaaacctcc

SEQ ID NO: 122321 - DNA, 193 bp, Homo sapiens
  chr12:53297369-53297562
  hyper
ggcccctcaggcagcggagtcccagggctgcaaaacccggcctggctcctgctgtgtgaaagtggagccaggccgctggggcggagcagggacaggacgcgagaaagggacacgggctgaatgggcgaggggcgttggtgggcgaccgcgttatctgaagccataaacttaacaggacgtaaaccccgggcgg

SEQ ID NO: 122322 - DNA, 30 bp, Homo sapiens; identical to SEQ ID NO: 49590
  chr12:53297804-53297834
  hyper

SEQ ID NO: 122323 - DNA, 278 bp, Homo sapiens; identical to SEQ ID NO: 49591
  chr12:53342669-53342947
  hyper

SEQ ID NO: 122324 - DNA, 78 bp, Homo sapiens; identical to SEQ ID NO: 49592
  chr12:53359385-53359463
  hyper

SEQ ID NO: 122325 - DNA, 30 bp, Homo sapiens
  chr12:53400492-53400522
  hyper
tcaccctttctgcgcgagattggaataggc

SEQ ID NO: 122326 - DNA, 30 bp, Homo sapiens; identical to SEQ ID NO: 49593
  chr12:53440477-53440507
  hyper

SEQ ID NO: 122327 - DNA, 374 bp, Homo sapiens
  chr12:53472777-53473151
  hyper
gtagatgctggttgcgcagaccccacagtcttggcaccggcgagtggcggccctactgggccctgtctcctccccgggcacggcctgatcactgagatgagacccgggagcagccgggccccagcccatccgtgtgcctacgcccagtctccccaggccctgcactgggccgagggtgcagcaacagaagaagcccagtgaccagagcgcagggccccgcccctggccccagagcccccgcccaggacccccgccttccgcttcaggctccggggagatacgaggcctccgggaccccgcccccgatccccgcctaccggggccgccgcgtcctcctcatccataggcctctcagctccgcacacaagctcttc

SEQ ID NO: 122328 - DNA, 30 bp, Homo sapiens; identical to SEQ ID NO: 49595
  chr12:53491618-53491648
  hyper

SEQ ID NO: 122329 - DNA, 237 bp, Homo sapiens
  chr12:53574315-53574552
  hyper
ctccatgccctcggcgcacggcgccgcccactcacccagctgcacctctccgtgcgtccccaagctcacccgctctgaggctgcccccgctagtctagctgccgagcccggaagtggatgcagccgctcggcggagaggacgagggggagggggaagtgcttccggggaaacgggccggggttggtgtttgtaaacttgcctcggtcccggtgggggcagccgcggcggtggggttg

SEQ ID NO: 122330 - DNA, 30 bp, Homo sapiens
  chr12:53575129-53575159
  hyper
aagtgcgagcttttcgggccggcccactgg

SEQ ID NO: 122331 - DNA, 67 bp, Homo sapiens; identical to SEQ ID NO: 49596
  chr12:53607266-53607333
  hyper

SEQ ID NO: 122332 - DNA, 740 bp, Homo sapiens
  chr12:53613775-53614515
  hyper
cggcgaaacaggagccgccggtggctctgcgcagcaagccggccccgggcccggccgccccgtacagccgtcgcggacccggggcaaacgtttccatacagtcgtacatcgcgacccggcttgaagggaaactgggtgctggaaacaccaaggacccgcagccgattccccctcctcccccggcggcgccccgctccagcagggggggagggggagggctagcatagggcgctgggctgcatgcgggtaaggggtgggcggggaagaggggggatccccagcaggggaaagggactgggcggggcgcgaagctggggctgccgctttagcctccgtccagctcttatctgggtgcttcggcagctagcactggggagaccttttttaaaagcgaagcctggaggggtggggggtggggcttggagagcgaagggggccgggcaccgagatgagcaaagctgagagtggagcgcacacatacacatacgtacactcgctccgcggcgcgcgcgcttgcttagacacacatccgtgcatgcatttatcttatcaggcaccaagaatttgcaaatatgcaagagtgaacatacatgtgagcacgcatataaaatcataggtgcacacacgtttgtgcaaacacaccttgctcgggagaatgcttgcaggcatactctccacagctcataggctttgcatgcatttgcactgaggcgcgtgcccaggtcggggttggaagaagg

SEQ ID NO: 122333 - DNA, 30 bp, Homo sapiens
  chr12:53615434-53615464
  hyper
agtttgccctggcccggcagggccgaatgg

SEQ ID NO: 122334 - DNA, 30 bp, Homo sapiens; identical to SEQ ID NO: 8765
  chr12:53645462-53645492
  hyper

SEQ ID NO: 122335 - DNA, 30 bp, Homo sapiens
  chr12:53645760-53645790
  hyper
cagcctcctatggtcgccccttcccgaccc

SEQ ID NO: 122336 - DNA, 356 bp, Homo sapiens
  chr12:53662064-53662420
  hyper
tctggcgcggaaaacgaaggttacattttggatcctcgcggagtactggtcaggcggttaagtcctgtacctaggaaagagggcgagctctggggcggtaaggccggaagggactcgtgagcgtgggtacgtgctgaagtgaaggggatccccagcgctgacgcgaggagaggcgtgggtggctcctggagggagtgtcgggaggccttgggactgccccgggccgctgaagggctgggccgaggcctctggggtagcgcggcgagtggtgtggtagtgcggtcggggatctgcccggaggaaggaagagcggaatcgtccttttataacgggagcacggcgtcctggcgtgggtt

SEQ ID NO: 122337 - DNA, 30 bp, Homo sapiens; identical to SEQ ID NO: 49600
  chr12:53689075-53689105
  hyper

SEQ ID NO: 122338 - DNA, 30 bp, Homo sapiens; identical to SEQ ID NO: 49601
  chr12:53689359-53689389
  hyper

SEQ ID NO: 122339 - DNA, 30 bp, Homo sapiens
  chr12:53693438-53693468
  hyper
gaacggttggcaagcggaagtggggctgcg

SEQ ID NO: 122340 - DNA, 177 bp, Homo sapiens; identical to SEQ ID NO: 49602
  chr12:53714986-53715163
  hyper

SEQ ID NO: 122341 - DNA, 30 bp, Homo sapiens
  chr12:53715619-53715649
  hyper
gcgcttagaaagcccgaaataagccacatt

SEQ ID NO: 122342 - DNA, 30 bp, Homo sapiens
  chr12:53718074-53718104
  hyper
tcctttacaggccaccgacacgacgggccg

SEQ ID NO: 122343 - DNA, 217 bp, Homo sapiens
  chr12:53718311-53718528
  hyper
agcactgaggacccacgatagtttccgtttgtaccttagtcgtaacaccatccaaacccagatacccctaggaaaaatcactccggcctgcaacttgcatccttcgatgaaacctcgattttcaccatcaggttataatgatcggttaggtgcctgcttcttaccctgtaaggtgaactggagagaaggaacagtgctgttccgcccgctgcccccg

SEQ ID NO: 122344 - DNA, 431 bp, Homo sapiens
  chr12:53719361-53719792
  hyper
gggggcgggagtggcgtcagggtggggagggggctcgtaacccgagcccccccaggatcgccggccccctcccacccgtagcagcccctcttgcgacccgtgcggtggacagtccgacgcggggcgcagctgggagtcgggcccaggccggggggagcggcctgtgagccccctcagcccagcggggtaaccttggggggcgggggccgcacaaagccctattgtggctcggggatgctgccacagagtggtttttgttcttcggctaactccgtggcgggcacgactgattgcagacccagggcagggggcgggttacgtgccaggcccagtctgcccgccgggagccgcaccaccgcccgactggggccgcgcaggagtccgcactgcaaccgcggtgcccgcgctcgggtcgcgtcactgccctgacc

SEQ ID NO: 122345 - DNA, 30 bp, Homo sapiens
  chr12:53738685-53738715
  hyper
caattgctgggagtcgcgtcccggagactg

SEQ ID NO: 122346 - DNA, 30 bp, Homo sapiens
  chr12:53738945-53738975
  hyper
gatcttgcagtgcccgaggtcccgacggtg

SEQ ID NO: 122347 - DNA, 30 bp, Homo sapiens
  chr12:53739256-53739286
  hyper
ctttgatctaggagcgtggcaaccccctcc

SEQ ID NO: 122348 - DNA, 139 bp, Homo sapiens
  chr12:53765063-53765202
  hyper
tagcttcttgggctcgagggagggagggcgcgcaaagccggaaggaggggtttgcggctggggagagccagagggcccacccctacccggaaactgggggtggagaggccccaggccagctcacgccagtcttccagct

SEQ ID NO: 122349 - DNA, 142 bp, Homo sapiens
  chr12:53765509-53765651
  hyper
ctctggactctggagcggactcagggctacttgtctcaggagacgaaggagaaaaggaaactgcttcacttctggttaaaagaggaactttttttttttttaaatgctgagctgggccgggccgggccgggcgtggtggtcc

SEQ ID NO: 122350 - DNA, 30 bp, Homo sapiens; identical to SEQ ID NO: 49605
  chr12:53773227-53773257
  hyper

SEQ ID NO: 122351 - DNA, 34 bp, Homo sapiens
  chr12:53815718-53815752
  hyper
agagccggccgggtgcggtggctcacgcctgcaa

SEQ ID NO: 122352 - DNA, 146 bp, Homo sapiens; identical to SEQ ID NO: 49606
  chr12:53835281-53835427
  hyper

SEQ ID NO: 122353 - DNA, 30 bp, Homo sapiens; identical to SEQ ID NO: 49607
  chr12:53845759-53845789
  hyper

SEQ ID NO: 122354 - DNA, 30 bp, Homo sapiens
  chr12:53886673-53886703
  hyper
ggaggagccggggccgtgccctggacagct

SEQ ID NO: 122355 - DNA, 30 bp, Homo sapiens
  chr12:53887055-53887085
  hyper
tgccgggatggctgcgaggatcttaggtgc

SEQ ID NO: 122356 - DNA, 30 bp, Homo sapiens; identical to SEQ ID NO: 49608
  chr12:53887314-53887344
  hyper

SEQ ID NO: 122357 - DNA, 134 bp, Homo sapiens; identical to SEQ ID NO: 49609
  chr12:53892935-53893069
  hyper

SEQ ID NO: 122358 - DNA, 30 bp, Homo sapiens; identical to SEQ ID NO: 49610
  chr12:53894403-53894433
  hyper

SEQ ID NO: 122359 - DNA, 98 bp, Homo sapiens
  chr12:53894677-53894775
  hyper
tgaagcttctcgtgcgtgcttgaccctgcctctccagctgcgacacagatggcgcgcgggctcttgggttctgtagttttctcgcgatccaaaaggct

SEQ ID NO: 122360 - DNA, 137 bp, Homo sapiens
  chr12:53895054-53895191
  hyper
actccatatcccagcgtgccccgcggcgggccctaccggccgcgactccgggcttggccccggccctagctcgtcggctgtgtattggggcgcgtggaggctgcagtcacggtggcgcccgcggggacggaggaggg

SEQ ID NO: 122361 - DNA, 30 bp, Homo sapiens
  chr12:54020048-54020078
  hyper
ttaaaaggacttaccggctggtagctccgt

SEQ ID NO: 122362 - DNA, 30 bp, Homo sapiens
  chr12:54020305-54020335
  hyper
ggagggagactgagcgagtactgtccacac

SEQ ID NO: 122363 - DNA, 30 bp, Homo sapiens; identical to SEQ ID NO: 49612
  chr12:54020696-54020726
  hyper

SEQ ID NO: 122364 - DNA, 30 bp, Homo sapiens
  chr12:54070550-54070580
  hyper
cactccaggcttgcccgagcctctgctcag

SEQ ID NO: 122365 - DNA, 169 bp, Homo sapiens
  chr12:54070830-54070999
  hyper
cgagaaagacgggaaaagctcaccaaaccccataaaaaataaaaaataaaaagaaagccgcggctgtaaataaaggcaaatccgccactctctgaggggccgtttgtcctcccctccttggccccgtccttcccgccgccccctcccggctcccgggccccgcggcgcc

SEQ ID NO: 122366 - DNA, 702 bp, Homo sapiens
  chr12:54088960-54089662
  hyper
cagggcccggccggacgagatttactgggcctcgaacacggcgacagttcaaacctttgattaatcatgtttttctgcctaccccataatttagttgctctttttccctccctgcctttttttttttttttatcagcggaaacagagacggagtcctcatcagcttcaattacaaatattaaggtcccggacagcactttgacagagaggcggccagccccccacttcgtaccacccccctaaatcatctccgaattaacatcacatcggcggctggcgcgtgttcagatttaaatggtggcatattgttcgcggacggtctagctcagaaccgcgagctcgcagctcccgcggcgggccccgcctctgcccacaccggcccctgcggcctcccgggaggctgtgactcaggagtcgcgggaggctccgactcaggagtcgcgggaggctccgggccctgtctccagcagggggctgcaggcgagggcgcgctggggcgggggcgggcgggctgcacagaggggtcggatgtggggcgagttgggcagaggaagaggaaccgcagatgccgggtggcgggagaggggctggggctgcagggagacaggtgggtttggtcggggttgggggttaggaggggaggacatgctctctgcaaattaggtgcaaacgaaggctcagaatgagcgagtttgggaacgc

SEQ ID NO: 122367 - DNA, 384 bp, Homo sapiens
  chr12:54090209-54090593
  hyper
ttaaacctgtcagttcggctcatccttaactgggattggctactcgcagtatgcttatcccaagttttcattggctgacggccacctgtatggaaataagaattacccgggactctcaggcccttctcagccgtaccgacctgtggcttagtgcgctgaaacctgcaaggtcggagccgaaactcctgggcttgcttgttgtcctgccttctcttcctcaaaggagatctcttgaatattgccttttccctctgcgccctgcctaaggcctagtctgaaagaagtccgaccaaataacctgaaataatgcggatttgcatgctttctgtatcttctttgcattctctaggttcaaggtcaagattttgccccttccctccaatg

SEQ ID NO: 122368 - DNA, 25 bp, Homo sapiens
  chr12:54090662-54090687
  hyper
cgtcccgccccgggtttgccaaaac

SEQ ID NO: 122369 - DNA, 183 bp, Homo sapiens; identical to SEQ ID NO: 49616
  chr12:54091027-54091210
  hyper

SEQ ID NO: 122370 - DNA, 57 bp, Homo sapiens; identical to SEQ ID NO: 49617
  chr12:54120861-54120918
  hyper

SEQ ID NO: 122371 - DNA, 30 bp, Homo sapiens
  chr12:54121344-54121374
  hyper
atcccagaaggctgcgcgcaaggagggcgg

SEQ ID NO: 122372 - DNA, 344 bp, Homo sapiens
  chr12:54132239-54132583
  hyper
gacataaattacctgcgaggaggaaagacgcagaggctgcgcactttccttcctctcccccagacccgcgcaaggcgctgagggggtcctccctccggcaaaggcggagggacggcctgacaggaacagtgtgcacttgcctctgtcctcccccgagggacagtggcctggggtgaccgagaaacctggccctcccaaggtccccgggctgccaaggaggacccttcggccttagggcggagcctcccccgccgctcaggggaggtggagctcgttgtggtgggcggggctttctccaggtgggacccatcgcctaggcaggtttccccggccaccctcttcct

SEQ ID NO: 122373 - DNA, 30 bp, Homo sapiens; identical to SEQ ID NO: 8775
  chr12:54133603-54133633
  hyper

SEQ ID NO: 122374 - DNA, 1090 bp, Homo sapiens
  chr12:54144767-54145857
  hyper
gaacattgtaagccccgcgcagactgtccctgtggaggagaaaggcacatgagcagccaaagggacggacactcacacacacacacacgcacacactcactcctgcgcacacaggctgctccgcggacacgcttcacggagcaggtgtgcccacgcgcaataccctcctggcccacaggcctccgcacgcacaggacacacacacacactctctcctggcctccctcccgccgcccctcctctgagccctgcggcccggccttccgcacctcccaacgcctgcaggggttgggggcgctggggctcggggcgctcactcggacctcggagccaatcgccagagatctaatggctcctttggcagtgggaaggggtgtgcgtgggtgtcctctccttcactctttccccagccctgtcgcctcccaccccccttccggccgcggcagtttccgaaatcgcccggcggccgcgaattcattagtggggggcggatgtaaacgcagcgcggtggaacgttttaattaggcctgaacaataaacaagctaaacgaggcgcgcaggactccctggtgggccctcagcctcctccgcgcggcgcggactcattacggctgcagccaatttcatgccagcgccgagcactggctgggccgggagtggggtcgggggtgcgtgcgggtgcgatccgggcctgcagggtgcggagcgggggcgtcccggggcgagggcagcgggccggttcccgcccgcccggggccgcggcttccgcatttctgcaccatccacctgcctttttcagtgtccttgagatgacgctccctccccacaccagagcggccggctggagagtctagcttgctttttagggtctctctcccgcctcttttcctcccccgctccctctctccttgcggctgactccagctccccctcggtgcccgtaaccctcctttcctctttttgccgcagtctccgtctctcttccacagggtctctccctccccctctccccgtggttgtcagactttctcctggactttctccgccccgcaccgcccgccccggatgccgagcgtggtagactctgcag

SEQ ID NO: 122375 - DNA, 86 bp, Homo sapiens; identical to SEQ ID NO: 49621
  chr12:54145880-54145966
  hyper

SEQ ID NO: 122376 - DNA, 205 bp, Homo sapiens
  chr12:54150986-54151191
  hyper
tgatttcattatcgacgtgctgtctgtctcgggctcagcccggttgccagggcgactctgatcgattgccttccggtcttcttggcttggccggctgcttcctttctggagcctggctgttggcgagcactccctagcggccctctctggtactgcagagcttcccggttgcaggcttgagagactcaggcgaggaacagagagc

SEQ ID NO: 122377 - DNA, 30 bp, Homo sapiens; identical to SEQ ID NO: 8778
  chr12:54320917-54320947
  hyper

SEQ ID NO: 122378 - DNA, 674 bp, Homo sapiens; identical to SEQ ID NO: 49624
  chr12:54321244-54321918
  hyper

SEQ ID NO: 122379 - DNA, 45 bp, Homo sapiens
  chr12:54322133-54322178
  hyper
tcgggagcccccacgcgccagtcgagcctacgcagctgtggggtg

SEQ ID NO: 122380 - DNA, 30 bp, Homo sapiens; identical to SEQ ID NO: 49626
  chr12:54322381-54322411
  hyper

SEQ ID NO: 122381 - DNA, 444 bp, Homo sapiens
  chr12:54324528-54324972
  hyper
cgccaggtagtgtcgcgggcgcttcctagtgcgggcactcatcctgccgctctccggtcggccatttattgtcttgtggggaagggctttcgccaagaaacttggtctgggttagtgaaataaaatactaaacaattactatatgtaaaattttaaaaccagcatattaaaataaactaaggaactctctgtcgtgggagaaatccacaggaaaaggaagagaaggagttagatgctggcgccgagttcctggcggagccaggcggcggtgactcctcaggctgagcggaatcgccatccaggcgccggaaacgacccgaatcccaaaatccgtggaagaaaattgcgctgaaagaacagagccaacgcccccgtcctgccaagtttggcgagacggcaagttggcttcaggagcacaatgccgctaaatgatgcctaagagaa

SEQ ID NO: 122382 - DNA, 292 bp, Homo sapiens; identical to SEQ ID NO: 49628
  chr12:54329186-54329478
  hyper

SEQ ID NO: 122383 - DNA, 410 bp, Homo sapiens
  chr12:54329604-54330014
  hyper
cgaaggccggcggggcgcgcccgggtgagcaccgcagccgagggtttcagcgccaggccctggaaaggctttctagggcgagatcgccttggagatgtaattactacgtttctagtggtgcatattctcctggagtgtttaatttgattttacttgtgtctcagcgagatccacatttttttttcgggggagggggaagaaaccaccccaggcttaaagttaattaaccagcaaggctttactttccaccgccctcctgcaggctcttgcctcggcgcctcccttcccgatcccggctcgccccagacttggagactgcgtttgcaggcgcgaaaggtcttggggaaccaagcaaaagaagagggaattgttcagagcaagcggacttccccagccgcctttagcgccct

SEQ ID NO: 122384 - DNA, 352 bp, Homo sapiens
  chr12:54330338-54330690
  hyper
cccaaaggctggggacgtgtctttgagtcctggcccgcggaaaacgggtccggcgttgggcctgaccggggagggagccccaagaatggggtgggcgtttcaggccctttgtttctcctggcagccctgcagaaccctgtccacagcgccccactacttccacctgggagcagcacttcacagaaggggaggccaggatctgggttccacttctactacccgcggctggaaaaaggcaggcgtctccacccacccacccccaccagccaggccttaggcaagggggccaacgtcatacaacccagtctagacttggccaggccctgtttgctctcctcgttttaccttgacc

SEQ ID NO: 122385 - DNA, 30 bp, Homo sapiens; identical to SEQ ID NO: 49631
  chr12:54331067-54331097
  hyper

SEQ ID NO: 122386 - DNA, 223 bp, Homo sapiens
  chr12:54332000-54332223
  hyper
ggttctttccagccgcgagcggaggcgagctgccagggccagagcgctcctgactgttttctattatcttcatttattattttttaaaacctggtttcttccccacccttagcttcaagccccaatccagagacttcagcagtcacagtgatcggcttggcggtagggggtctgtctctccggtgcacatcctatgcctaggcggaggcgcccagttacagcg

SEQ ID NO: 122387 - DNA, 512 bp, Homo sapiens
  chr12:54332434-54332946
  hyper
atcacgtgcgcagagcgggtcacgtgggcgcgggaggggtgctgagaggtggagagcgggagccggcggatttcttaatgaagtgtctccgcatgcgtagagggaatgtagggagggaggtggaagcactaggaggaggggaggggtggagagaaaagaggggagggatggggggaggggaaacaggagcgaggtgtctccctagctcgctgcctctggcaagtggagtttttaaaaagctccagcagatcatgtcatgacgacttcgctgctcctgcatccacgctggccggagagccttatgtacgtctatgaggacagcgcggcggagagcggcatcggcggcggcggcggaggaggaggcggcggcacgggcggagcggggggtggctgcagcggagcgagccccggcaaagccccgagcatggatggtctgggcagcagctgcccggccagccactgccgcgacctgcttccgcaccccgtgctgggccgcccgccggctcccctgg

SEQ ID NO: 122388 - DNA, 875 bp, Homo sapiens; identical to SEQ ID NO: 49633
  chr12:54332963-54333838
  hyper

SEQ ID NO: 122389 - DNA, 322 bp, Homo sapiens
  chr12:54338495-54338817
  hyper
tggatgtttttgtattcgttttgcttttttaaacattgcattaaaatatcgtcttgattactgagtttttggcgccccctcccttaaacttcgagcccagtggcctcatcatagttgtggtcttgctaaaataacagaaatgaaaagcattagggagcttcactatgcagtgcaatcctctggccccgttgagcccctgccagaactctgtgcctaggcagcctcgggtcctctatctcagtccagccgcttgcctcacttcttcccgcttgccttatctccccgcagacgtggttcccctgcagcccgaggtgagcagcta

SEQ ID NO: 122390 - DNA, 325 bp, Homo sapiens; identical to SEQ ID NO: 8786
  chr12:54338978-54339303
  hyper

SEQ ID NO: 122391 - DNA, 71 bp, Homo sapiens; identical to SEQ ID NO: 49636
  chr12:54339504-54339575
  hyper

SEQ ID NO: 122392 - DNA, 338 bp, Homo sapiens; identical to SEQ ID NO: 8787
  chr12:54343491-54343829
  hyper

SEQ ID NO: 122393 - DNA, 30 bp, Homo sapiens
  chr12:54344218-54344248
  hyper
acccagcttagaggtcggtggagacgattc

SEQ ID NO: 122394 - DNA, 30 bp, Homo sapiens
  chr12:54344527-54344557
  hyper
tttctgagaggcaatcgggctggaatcttt

SEQ ID NO: 122395 - DNA, 232 bp, Homo sapiens
  chr12:54345040-54345272
  hyper
ggcctaatttgcatacgaggcagaaccgctttctgcaaactagacagtgaccttgaactgggccgctgcggcctctggacagaccaggggtaaggcagcactgcgcggaatcactcccgaccacgggtcggcgggggagccaaaacgcagtcactcacagccgattccccgcggtctaagccgccagcagccacgttgcctctcccaccagaatcagcgtagattttataat

SEQ ID NO: 122396 - DNA, 139 bp, Homo sapiens; identical to SEQ ID NO: 49639
  chr12:54345519-54345658
  hyper

SEQ ID NO: 122397 - DNA, 291 bp, Homo sapiens
  chr12:54345965-54346256
  hyper
ggtgggtctcagggagcaggacaccggggatgcgaattttgctagtggttgtcgacagctctccctgagaggaatcagggtcagctgcaaagaagaaagaggggtttgtgcgtgcttctttgcccgccgaatccaaaacctggggaaaacggccctctttgatgaggctaaatcaggctagaagaaatgcgtgcctggaagaaggacgccttcacccaatcttcatttctcctgcgttgcatccgccgccctgtggccgctgctcctcacgctcagcggcctggcctggga

SEQ ID NO: 122398 - DNA, 337 bp, Homo sapiens; identical to SEQ ID NO: 8788
  chr12:54346834-54347171
  hyper

SEQ ID NO: 122399 - DNA, 46 bp, Homo sapiens
  chr12:54347923-54347969
  hyper
ctctacctcccttccgcatccttcctctagccgtgagtggaggtgt

SEQ ID NO: 122400 - DNA, 388 bp, Homo sapiens
  chr12:54348691-54349079
  hyper
ctgccggtcgggccccgcggaaatgggcgagcataatctcctgaatcccgggtttgtggggccgctggtaaacatccacacgggagacaccttctacttccccaacttccgcgcgtccggggcgcagcttcccgggctgccttcgctgtcctacccacgccgcgacaacgtgtgctccctgtcctggccgtcggcggagccgtgcaatggctacccgcagccctacctcggcagcccagtgtctctcaaccctcccttcggccgcacgtgcgagctggcgcgcgtggaggacggcaagggttactaccgcgagccgtgcgccgagggtggcggcgggggcctgaagcgtgaggagcgcgggcgcgacccgggagccgggcccggggca

SEQ ID NO: 122401 - DNA, 376 bp, Homo sapiens
  chr12:54349255-54349631
  hyper
cgccggcgcaggcgaccccggcagcttggtatcgccgttgaaccccggcggcgggctctcggccagcggtaaggaccccggccactcaagcggcggattcaaacccgacctcttaccagggcgggcagaacaggactgagctagggacgcccagggtgacagaatgtgtggcgaggaagagcttcttataaaatgaagtgcgggtggggggagcctataaacatgtaaacatccccacaaaagaaatggagagtgttcctttttcgtctgcctgcggctggaggcggcagggattccggagttgggggatcctgacggggactccccaggcctgggggtgaggaggtggggacagaaagcccggccctagttctcc

SEQ ID NO: 122402 - DNA, 108 bp, Homo sapiens
  chr12:54350137-54350245
  hyper
cgctctcggaagaagcgcaagccctattcgaagttgcaactggcagagctggagggcgagtttctggtcaacgagttcatcacacgccagcgccggagggaactctca

SEQ ID NO: 122403 - DNA, 14 bp, Homo sapiens
  chr12:54351310-54351324
  hyper
tctgacagccacag

SEQ ID NO: 122404 - DNA, 53 bp, Homo sapiens
  chr12:54351375-54351428
  hyper
cgggccggccagagggtggaccagcgtaatttacgaggcgggaggagaattca

SEQ ID NO: 122405 - DNA, 30 bp, Homo sapiens
  chr12:54353782-54353812
  hyper
cacagagtgcagcatcgaccgaagacgggc

SEQ ID NO: 122406 - DNA, 207 bp, Homo sapiens
  chr12:54354486-54354693
  hyper
tctgacgtgcacagacgaaattgagtatttaaagccactaagccgctatcgagccggcaggtgatgggtccggccgtctgggttctgtgggtgctaatgtagccggaaatccggcgcgatcgatggctgagacccagagcagagcagggaccgctggccccggtccgcgaacaaagcaaactccggggacttggggttccggccagg

SEQ ID NO: 122407 - DNA, 272 bp, Homo sapiens; identical to SEQ ID NO: 8789
  chr12:54354814-54355086
  hyper

SEQ ID NO: 122408 - DNA, 14 bp, Homo sapiens
  chr12:54355570-54355584
  hyper
ggcttctcatcgct

SEQ ID NO: 122409 - DNA, 200 bp, Homo sapiens
  chr12:54357367-54357567
  hyper
tcccagtccccccaccgaccgctgctcggctgagcgggcgcggctgagatagaggtgcttggccagctctctggtcttgttaacaagcctcatcataaagatggagatgataagaagagcaaggaagccccggtggccgcgaggggcggggcttggtgggcccggtgtggggcagtggctgacccgagccgggtgctgcc

SEQ ID NO: 122410 - DNA, 295 bp, Homo sapiens
  chr12:54357603-54357898
  hyper
cgttcatgtggcgagctaggacccggattattctctctgtactcccgttccctagattttcccttttcctcatggaacaccaaatcagattttaaaaaataaaaatacataaacctctgtctgtgagtgcccgtcttgccctctgccacgtttgttccgggaactgccgccttgctcccttgcctgcatttctctgcgtggttcgctttcaccttcgtctggcgctctcttccctcctctggctctctctctagcttcgtggttgctttttctaccaggtcggtactggcttagg

SEQ ID NO: 122411 - DNA, 39 bp, Homo sapiens
  chr12:54359643-54359682
  hyper
ggcagaagcaagggtcggctgttgctctccctcgcccgg

SEQ ID NO: 122412 - DNA, 177 bp, Homo sapiens
  chr12:54359742-54359919
  hyper
cgtaccttataaggaaggcgccggtcctccatttcagccttttctctgccaggacgcggccgtggcatttctggtcttgtaaacatcagactctttggggccttaaaaaaataaagacgcccctccttcctttaccgggggtgagccggccggggaaagcggcggacagggaaatca

SEQ ID NO: 122413 - DNA, 568 bp, Homo sapiens
  chr12:54360130-54360698
  hyper
cgttccattccactgcgaagcggagcaggacctaagaattggagagaaaattaaacgtcataaagaaaagttcatttacagcttaaatgtctgaatgttacggtttccttcagaaaacaaggcggtacactcggtaaggagaagtgaggcagcaggggtggggagggctggtgcggtaggaggcttggttttatttctttctcagatccagaggcggaaagaaagggggagaagcaggaaagtgcgacagaagcgttttacccgggcagctagcaaagaaagatgctgcagtcggtggaactggaagcaaagcgcataagggcccagtgcgggggcagcgatccccgagcgctgagctggctgcgctgaggcctggcgtgcggagaaacaaatatattggatatttgctggtctaggggaggggtgaggcaagaatggagggagacagggagaccgggagcgtaaggcagcgccgcagccggcccggcgagaccgaaagagccccgtatccgccgcgacagcctttggcggtgggcagtgggcaggctcagctcgaaggctcagggag

SEQ ID NO: 122414 - DNA, 727 bp, Homo sapiens; identical to SEQ ID NO: 49652
  chr12:54366647-54367374
  hyper

SEQ ID NO: 122415 - DNA, 414 bp, Homo sapiens; identical to SEQ ID NO: 8793
  chr12:54367429-54367843
  hyper

SEQ ID NO: 122416 - DNA, 1428 bp, Homo sapiens; identical to SEQ ID NO: 49654
  chr12:54368250-54369678
  hyper

SEQ ID NO: 122417 - DNA, 368 bp, Homo sapiens
  chr12:54371955-54372323
  hyper
cttggggtaatcccctctagccgcagcactgcccgggaacaaaagatcctcgtctagacgctgccataaagcaccccctcacgtttctaaacccagtttcatttcgaccttaacgacccagtctggcctgtattagaaaccacttccgccctaaatagtaaacaaacctgtagtggagggtcttggctctcccaacacactcagacccccacctcctcagcccgttgccccacatttttcctcttttctccagcctttctcagctcccagcaccccagcccctttcctccccgccgcgcccaccccacccccccgccccagtaaataaacctgaggccgagttcaaagtttcccggagctaaggagga

SEQ ID NO: 122418 - DNA, 784 bp, Homo sapiens
  chr12:54377162-54377946
  hyper
gtctcgcccgtttcccgcgggatgggcggtgggacaaatggctccctggattgactgctgcccggactgtcccaagtctggggcctaaacagcctaaccttgccctggataacccccatgctgaggccacggtgaccctgcatatgaaaacacaaaaccatttcaaatctcccctggccggtcctgcaagcaaatcatacactccacatttccttccagttttccggaggttcaggaacccctgcgtcttctctctccacccctggatggggaaattcggcggatttctttctgcggtcttctagccgcagcgggcttgggcctccttagaaacggtctagcctcctcactcctccactccagggcgctgggctccagtcctttccccgccaaactccagcccttcggaaagtctgaaccctaggctctgtccaaggaaaaatgtggggcgacaggaaagacaagttgttctccagattccgtttcctgaggaaggggtggagagtttagttcgctttggaagaaggcgatggagaaacggaaataactgtttgaaacatacggttccccttatttcttccttttatttaaaaacaaccacaaaaatagactggtctgtcttctttcaaacatgctcccagcccgtgcgctctgtaaaggacgcttctctgggtcgggttttgttgcgtcttgtgtgctggtttcccgtgtgatacgtgactcctccaaactgaccgaggctccgcaggttccctctttctttcccggaatattccctgtttta

SEQ ID NO: 122419 - DNA, 1953 bp, Homo sapiens
  chr12:54377977-54379930
  hyper
cgccagggcctgaagtaaagcagcagaaccggctccaaggccaaagccttgtgggcccctgagatggtgacccaggagccgcccaccctgccaggcccaggccacagctctcgggtcggggatcgggtgcctctggtctctggcttcctctttcccctaccccgcgtccattcggaacctccttttccgagcagccatgaagtgaccgtgaccccctccctggcccaccctagaggctggagattcccagtcaacccccacaggaaacttgcaactccagcgccgcggcccccaagcttccagccccgagggccaagcccggggaaaagaggaggcgggagagcagaaactttagtcctgtttggtattccttaactttttttcccctttctctgctcatcagatccccccaaacccccccccccacaaacctcaccccactcccatccccaaggtaagaagtgggagtcgggtccggggatatggaaaggggagatgaagagtggggagaagtacctgattcgtgtctcgaccttttaatttgaatttgactgttttgagccccgggttgcctcgctctctccctctctcccgcatttcccccctctccgcccccttctccccaggagttacaggctggttactggataaacaaaccccactcttcctagaacccccacccccacccccacccccctccacccctctacctcccctgccgcccggggggcgcttcctttgttcgcggggaagggctccggtgcccctaccccgaggcagctgctagatggcgctgttactccactctgcgcgctccgcctgccgacaacttgaccccgctgacgtcacggccgtctgaatcatcaaggccattttcaaatcccattggtctagccgtcacatggtgagaaccgaatgcgcggataattacggagctgatatttccccccctccccttctttttcctccctcccctccaaccgcgccccccctcccggatggggaaaaaaaaagatgtcagctcctccgctgtagtattgctccttaaaaacccctctctctgaaaatgacatgccctcgcaatgtaactccgaactcgtacgcggagcccttggctgcgcccggcggaggagagcgctatagccggagcgcaggcatgtatatgcagtctgggagtgacttcaattgcggggtgatgaggggctgcgggctcgcgccctcgctctccaagagggacgagggcagcagccccagcctcgccctcaacacctatccgtcctacctctcgcagctggactcctggggcgaccccaaagccgcctatcgcctggaacaacctgttggcaggccgctgtcctcctgctcctacccacctagtgtcaaggaggagaatgtctgctgcatgtacagcgcagagaagcgggcgaaaagtggccccgaggcagctctctactcccaccccttgccggagtcctgccttggggagcacgaggtacccgtgcccagctactaccgcgccagcccgagctactccgcgctggacaagacgccccactgttctggggccaacgacttcgaagcccctttcgagcagcgggccagtctcaacccgcgcgccgaacatctggaatcgcctcagctggggggcaaagtgagtttccctgagacccccaagtccgacagccagacccccagccccaatgaaatcaagacggagcagagcctggcgggccctaaagggagcccctcggagagcgaaaaggagagggccaaagctgccgactccagcccagacacctcggataacgaagcgaaaggtaaggccgcctgggccgcgggcgccactgggacgttccggcacttggtcttcgcggccggggaggggggcaggggagagggttgggcccaggaggccccagaccatttcgggaatgcgaccctggctttcgacta

SEQ ID NO: 122420 - DNA, 508 bp, Homo sapiens; identical to SEQ ID NO: 8796
  chr12:54379958-54380466
  hyper

SEQ ID NO: 122421 - DNA, 406 bp, Homo sapiens
  chr12:54383373-54383779
  hyper
aagggacctgtggttcgtgctgcgaagatgcttccacttaaagcatgagaaatggggtgccgggatgtggggtgtggtgtgtgccctcatagatgggggtgggagtgtggctggtgtgtgtgtcaagccctcactcacccacgcactcacacacagcattctgttctccatgcaaagttaagatcgaatccatccgcttgtaggggaaaaaaaggaaaaaaattaaccagagagggtctgtaatctcgcagagcacaggcagaatcgttccttccttgctgcatttcctccttagactaatagacgttttggaaagttcggctagtgttcgtgtgtttgtcgtagcacccagagcctccaccaaaccctctccatgtctttacctcccagtcgctctaagaatctg

SEQ ID NO: 122422 - DNA, 15 bp, Homo sapiens
  chr12:54384649-54384664
  hyper
ggtgtccccaggtgt

SEQ ID NO: 122423 - DNA, 1860 bp, Homo sapiens
  chr12:54387780-54389640
  hyper
tgtatgaatgtttgagacttgcgggaggaagaaaaggcaagagctcgccaaggcgagccttggtctctgagatctctcgtcggctgctggggctccggctcagcctggcagatccgctgtggcctctctgggacctcgccccggcccacggcctgacttcggctcggagatgcagcccttcccgagaacaggtgaagaagacggcggcagcggggactgggggcttcgggtgggaacgccagggctcagggctttgtgtgggtcgtgcagggggcgaggttcgaagtcctgggctggaccgcagcacgagtgtggcccggacggctgcgtggccagaaggggtgttcgggcagggtgcgagagcaccggcaaggtggattgtgtatggactttggccgcagacagagcagagcgggctcccgggctgtggccggcggcgaggcgggcaaccgcatgttgagtctatagaaaggaccttgaggtctgctgggtgtttgggctgccctgggggcggcggcccagagtgtggagcaagcggcgcgcggggcgcggcggtcagcgtgggagaggctgcaggccctgcacgcctctgcagctgccgggccgtgtccgggacgtctgaactgaggccgaccaatggtcacagcatgaaaaataaatgcaatggaaggtctttctgtcttttcttttccgcgtaaaaggtcctttcttttttctctctttcggatatacctggatttggtccagaccaggttgcccgcgggagggccccgcgagcggcagcgcgcgagggagggagagagagggagggcgagaaggagggagggagggaaggagggcgggcggcggcggccgtggtggccggggcttccctccccaggcgggagccgcctgtcctgtatctatggccgtggggagcgaaggaccaggtaacgaaggcgcttccgaagcgggattggaccaaaccagagggacagagtcttctgggtctctctgcctgaggccctggagggagagaaggtagggagatcggcgcccgccgggcctggcaaagaggcctcgggaaatgttgaacctgtatgtgatctcaggctcacactcatgttgtgggtctgtctgcctcaggagatgcggtttgcctttctgtctgagacgccccaaaccctgagctctccttcccaaggctggaaaaaaaatcgggaaaaacggcggaatttgcactttcattcattgggttatctgcaactgagaggggctggttaaggcgtccccaagttggaagggcgctttgcttctgttttctggatgcagagtcctctgactccctctgccacgggctgagtttccggctccaggttcgcgtgtcgccctgaggtttgaggccagacagctcgcagtcgggcagggagggcgggggagagacgagcggctctggccccttaattgtacttcgggctcgtattgtctctcctttcgccacctccgcttcctcagtctgggctccaaagtcactgcaaatttccttgcgacacatacatcacacaaaagatcaggtaacaaggcgctcagggccactggggctccgggcagggcagggagcggctctagctctggggcggctccccctccagccactcccaggctggaaaaccagaccgcgttgggggagccggaaatagccccgcttgctgcggagcgtcagggcgggggcgccggcgggaatgcaggcccggcaggccgtggctttgagagagccacgttcacaggccctggggatttcactcctgctgggcctcgggacctgactcctggtgtgtagggatcccagatacccaccttgggtgggggcaggacgcgggt

SEQ ID NO: 122424 - DNA, 132 bp, Homo sapiens; identical to SEQ ID NO: 49664
  chr12:54391191-54391323
  hyper

SEQ ID NO: 122425 - DNA, 51 bp, Homo sapiens; identical to SEQ ID NO: 49665
  chr12:54391399-54391450
  hyper

SEQ ID NO: 122426 - DNA, 135 bp, Homo sapiens; identical to SEQ ID NO: 49666
  chr12:54392868-54393003
  hyper

SEQ ID NO: 122427 - DNA, 481 bp, Homo sapiens; identical to SEQ ID NO: 49667
  chr12:54393242-54393723
  hyper

SEQ ID NO: 122428 - DNA, 620 bp, Homo sapiens; identical to SEQ ID NO: 8801
  chr12:54393798-54394418
  hyper

SEQ ID NO: 122429 - DNA, 170 bp, Homo sapiens; identical to SEQ ID NO: 49669
  chr12:54394466-54394636
  hyper

SEQ ID NO: 122430 - DNA, 82 bp, Homo sapiens; identical to SEQ ID NO: 8803
  chr12:54398703-54398785
  hyper

SEQ ID NO: 122431 - DNA, 129 bp, Homo sapiens
  chr12:54398888-54399017
  hyper
cgcgggcttggaggaccctgaggaaagcatgggatgcagaacaggcccacccggcccggcccactgttcaatcccagcccagcctgcaggtcaggattggaatcattttttattcgctatcatttacga

SEQ ID NO: 122432 - DNA, 421 bp, Homo sapiens
  chr12:54399253-54399674
  hyper
cgaacaaaacagcagcgcggagctggctagacgtctgggcttaattgttttatggtttaaataaggtggacactttcctttgaaatcggattataggaatgttttgtctatggcccacggagaacaggacctcactggctgagagggagaggtggagagcgcgcgcgcgagagggatgggctacaaaccaggggtcaaacagcctggagaagtccgagtcccaccccaaagtcctgcaggcggcggcggaatagtcggtgcggggccagcatcagggtaagaggagggaggactttagggtgcgcgccgcgggcaagccgtcgtgggagcctcggagcgtgcatccgcgttcgcggagatgttccaagcccagaaatgcgcctgaatggggggagatcgcggcagttgctttgcttagagt

SEQ ID NO: 122433 - DNA, 434 bp, Homo sapiens
  chr12:54400006-54400440
  hyper
ccccgcgcctcggccggcccggccccactggctctgagcaaatcaatcctctcacctgcgaggtgtaaataattcgcgagtggcagcgggagatgggccctcgatctggcagcgggctcggaaggctcaggagggcaggcattaaaaataatcgctttgtggaggagataagtgcaaagcaggcagcgcgtaattaacacaaaaaggcagaatgacccggacaaacgaacataaatccgtggtacctatgagggcggtgcaggcctcggggagagggacagagacggcctcggcgaggatggctgctttcggttcctttatttccaggctcggggagcgaaataaaccagataacgtgtaaaagaaagcaaacaaacaaatgaaagaacggtgagggatccccaaaaggggaaaccaagtccggccaggggttg

SEQ ID NO: 122434 - DNA, 984 bp, Homo sapiens
  chr12:54402683-54403667
  hyper
gtggattgatgaacgcgaatcgcgtgtaagcgccgccaccgccgggagtctgaggaattcgcctgggctgttagaggaaagagctaagtgagagagcgcgagctctacctaccgacagtgaggagcgccgccgccgccgccgccgcccgctcgccgcccgccgccgccgccgcccgcgccccagccccgggagctctgctgatccggccgagctcagcaccgaggcgccccccaacctgcccagcccccagcccaccagcccagcccagtcccggggagccagctggcctggggttcggtcccggggggaggggagtttcgggggtactgggcggggtactcgtgagccagaggggagggggccgcgggttttcatgtacccagcatgagctcctacttcgtcaaccccctgttctccaaatacaaagccggcgagtccctggaaccggcctattacgactgccggttccctcagagcgtgggcaggagccatgcgctggtgtacgggcccggcggctcggcgcccggcttccagcacgcttcgcaccacgttcaagacttcttccaccacggcacctccggcatctccaactcaggctaccagcagaacccgtgctcgcttagctgccacggagacgcctccaaattctatggctacgaggcgctccccagacagtccctttatggggctcagcaagaggcgagcgtggtgcaatatcccgactgtaaatcctccgccaacactaacagtagcgaaggacaaggccacttaaatcaaaactcgtctcccagcctcatgtttccatggatgagaccccacggtgagaagccttttctctttcccccttggtctcccgcgctccagggtttccccccctccctcgcctcctttttgtctgccctcgctttttctcctggctttggggtctctcccgccccacccccgtgcctgtgcctgggtggttttctcgaagttgggaaggc

SEQ ID NO: 122435 - DNA, 30 bp, Homo sapiens
  chr12:54404317-54404347
  hyper
taaagcgacaagttccggcggggatggccc

SEQ ID NO: 122436 - DNA, 231 bp, Homo sapiens
  chr12:54404860-54405091
  hyper
tcttctgtccagctccggggaggcgcagtggacggcaaacttacagccggtatcagaccttggaactagaaaaggagtttctctttaatccttatttgacacgaaaacgtcggattgaagtctctcatgccctgggactgaccgagagacaagtgaagatctggttccagaaccgaaggatgaagtggaaaaaggagaacaacaaggataaactgccgggagcccgagatg

SEQ ID NO: 122437 - DNA, 432 bp, Homo sapiens; identical to SEQ ID NO: 49676
  chr12:54408252-54408684
  hyper

SEQ ID NO: 122438 - DNA, 411 bp, Homo sapiens; identical to SEQ ID NO: 49677
  chr12:54410236-54410647
  hyper

SEQ ID NO: 122439 - DNA, 30 bp, Homo sapiens
  chr12:54411178-54411208
  hyper
gagagtgacagcagcgctcggtaagtgttt

SEQ ID NO: 122440 - DNA, 30 bp, Homo sapiens
  chr12:54411458-54411488
  hyper
tgtggggctcaagccggcggtctagggcgc

SEQ ID NO: 122441 - DNA, 30 bp, Homo sapiens; identical to SEQ ID NO: 8809
  chr12:54411738-54411768
  hyper

SEQ ID NO: 122442 - DNA, 79 bp, Homo sapiens
  chr12:54420507-54420586
  hyper
cacactgtctgcttttgggttcgaaactttatttttcccccctagcgacactccagggaaaccttaacgttacagaaga

SEQ ID NO: 122443 - DNA, 233 bp, Homo sapiens; identical to SEQ ID NO: 49679
  chr12:54422112-54422345
  hyper

SEQ ID NO: 122444 - DNA, 574 bp, Homo sapiens; identical to SEQ ID NO: 8811
  chr12:54422376-54422950
  hyper

SEQ ID NO: 122445 - DNA, 30 bp, Homo sapiens; identical to SEQ ID NO: 49681
  chr12:54423427-54423457
  hyper

SEQ ID NO: 122446 - DNA, 79 bp, Homo sapiens; identical to SEQ ID NO: 49682
  chr12:54423615-54423694
  hyper

SEQ ID NO: 122447 - DNA, 125 bp, Homo sapiens
  chr12:54424623-54424748
  hyper
aattcgctcgcccgccggcctcagggtgagagctggagcaggctccaagcgctcccgcgcctgccggccccctgcaagcccccagccctctgcactcgccttccccggagcccaggcgcccggcc

SEQ ID NO: 122448 - DNA, 109 bp, Homo sapiens
  chr12:54425031-54425140
  hyper
cggggggcgccgtgagagcaagccccaggcccgcgccaagctggctgttgcgaaacgtagcggaggcggagagcggagggaaagagaagaccgcgggactggagccctg

SEQ ID NO: 122449 - DNA, 584 bp, Homo sapiens; identical to SEQ ID NO: 49683
  chr12:54426522-54427106
  hyper

SEQ ID NO: 122450 - DNA, 342 bp, Homo sapiens; identical to SEQ ID NO: 49684
  chr12:54427293-54427635
  hyper

SEQ ID NO: 122451 - DNA, 386 bp, Homo sapiens
  chr12:54427974-54428360
  hyper
cgggtgggggcctgggctggggtggggacgggggaacgctgcaagctattcaccccttcctggcttggggtggggtttatgttccagagacggacggcaagcggtcccgaaccagttacacgcgctaccagactctggaactcgagaaagaattccactttaaccgctacctcactcgccgcaggcgcatagagatcgccaacaacttgtgtctcaatgagagacagatcaagatctggttccagaaccgcaggatgaagtggaagaaagattccaaaatgaaaagcaaagaggctctttagaggcagcgggggaggcccgcagagcgcgcccctagccggttcctgtccctgcgcctttccttttcgcctttcctctctatattt

SEQ ID NO: 122452 - DNA, 36 bp, Homo sapiens
  chr12:54441116-54441152
  hyper
agcctgagagtcccgcgccgcggggccgctgcagag

SEQ ID NO: 122453 - DNA, 92 bp, Homo sapiens
  chr12:54441391-54441483
  hyper
cgaagcccaaggctgggggtcccgggttcggaggaggcggccaaggtgcaggccgaggctggcgagcggcttagggacgtggctcgcccgcc

SEQ ID NO: 122454 - DNA, 225 bp, Homo sapiens; identical to SEQ ID NO: 49688
  chr12:54446873-54447098
  hyper

SEQ ID NO: 122455 - DNA, 233 bp, Homo sapiens; identical to SEQ ID NO: 8819
  chr12:54447599-54447832
  hyper

SEQ ID NO: 122456 - DNA, 418 bp, Homo sapiens; identical to SEQ ID NO: 49690
  chr12:54447898-54448316
  hyper

SEQ ID NO: 122457 - DNA, 190 bp, Homo sapiens
  chr12:54475615-54475805
  hyper
ggggttgagttggggcggctcgtcccgtggccgctgggtcgtctggtttccgctttccgaaagaaatgagaggagaggcaagtggagtcgctgaactttaattaaaccgtagagaagacagtggggggaggggaaaaaaaacgatcggagaaggaggagaaggcggccgagagatcgaggaaaggaagtc

SEQ ID NO: 122458 - DNA, 406 bp, Homo sapiens; identical to SEQ ID NO: 49691
  chr12:54519787-54520193
  hyper

SEQ ID NO: 122459 - DNA, 841 bp, Homo sapiens; identical to SEQ ID NO: 49692
  chr12:54520221-54521062
  hyper

SEQ ID NO: 122460 - DNA, 102 bp, Homo sapiens
  chr12:54582780-54582882
  hyper
aacccaacccccggcgctaaggacagtgggagtcgtagtctacattgtttagggaaggagattggcgtacccgcagccacttccgccggaaatgctccaatc

SEQ ID NO: 122461 - DNA, 56 bp, Homo sapiens
  chr12:54608667-54608723
  hyper
ggcgcaataggaggcgggccgcacccgaagatggctatagcgctgtgcccgagcca

SEQ ID NO: 122462 - DNA, 30 bp, Homo sapiens; identical to SEQ ID NO: 49694
  chr12:54611428-54611458
  hyper

SEQ ID NO: 122463 - DNA, 89 bp, Homo sapiens
  chr12:54674338-54674427
  hyper
gagacggcgtagaacgaccgaaggaatgacgttacacagcaatgtggcaccacaggccaatagcagggggaagcgatttcaagtatcca

SEQ ID NO: 122464 - DNA, 30 bp, Homo sapiens
  chr12:54675453-54675483
  hyper
agtgggaaactggacgactttttataaaag

SEQ ID NO: 122465 - DNA, 42 bp, Homo sapiens; identical to SEQ ID NO: 8824
  chr12:54686413-54686455
  hyper

SEQ ID NO: 122466 - DNA, 30 bp, Homo sapiens
  chr12:54718853-54718883
  hyper
atccttatcctaggcggggcctaatgggaa

SEQ ID NO: 122467 - DNA, 30 bp, Homo sapiens; identical to SEQ ID NO: 49697
  chr12:54753475-54753505
  hyper

SEQ ID NO: 122468 - DNA, 743 bp, Homo sapiens; identical to SEQ ID NO: 49698
  chr12:54811879-54812622
  hyper

SEQ ID NO: 122469 - DNA, 375 bp, Homo sapiens
  chr12:54812829-54813204
  hyper
tactgctggggcctccgcgtctaagttgaagcccccgaccctgggtggcggcggcagcagcagcaacagcagcggcagcagcgggggtcggcgccgggggccccagcgcagctgcacggcgtggagaggggactctggcgtccggctccccatagcgcccgctcttccctgtcctggggccaccgacccggagccgcttcctaaacctcccagaggcgaatgactcaacgcggggaggagtttgccaaactcccggctgagccctccccccgcctgccgagggggctggcgggggggcattcctgggtccctggaactctgagcccgcgtcccccacccctaaggggcgtggggggggggcgcacccctccaacc

SEQ ID NO: 122470 - DNA, 529 bp, Homo sapiens
  chr12:54943098-54943627
  hyper
caccgaagtccagcccgccgcctccgctgcactctgtaaacacgcactcacatccgccagtacagggcacacgcagccactcgtccccggcgcctgtgtgcgtgcgctcgcccttgggcgcttctgtctgtgtgtgcccccggcttccaatcgttcctttgggagggggaggagtggctgtgaggagtgagagactggcgggcaggctgaggagaagggagggagagcagagggaggggggaacccggccgggggaggaggagagaggcgaggaggcggctctggcagcgcgcggcggcggcggcggtagcggcagcagcagcggcggtgcggagagcttggactgggagcccaaagctcggctgggcagcgggagaggaggagccgcaggagctgcagctctgccagcttgggccgagcctagagacaccggcctggctggtccacgccagccgcaggtgggaagggcctgggatggggggtgagggtctctcggctggggctgaagctgagccgaggtgctgtctcc

SEQ ID NO: 122471 - DNA, 601 bp, Homo sapiens
  chr12:54982004-54982605
  hyper
agatgtggctccgacggtgggggaggggacagaagacccccccccgccccccgcaaactgagcgttcgtcctcaaaagggcgcactgctaagggaggactaggcagggatcctgggtcccaccagtccaggggtccctcgtccttggctgggcgagtgccctgccgccccgccctgctccgcacctgctccgccgcctcggggtcaaggtgcggctccagcagcgggaccgtgaactggatctttcgggggctgttgtcttgctccatggctggggcggcggccggtgggcccgcgctgcggcgggagggaaggcggcgggactcggggctggggcgggcgcgctccctctccgctccgctccggccccggccccagcccggcgcgctcggctcccggctcccggcacagcgctcccagctcgcggctccggggactctgccgccgccgattggctccgcacccgcccctcccggccccctccccctcccccagcccggaaccttaaccccgtcgtggctgcaccggcggctgcgggggtcaccgccccgcgggccgccgagtccgggcgtggcccgggagccgtcgtagtggacagctca

SEQ ID NO: 122472 - DNA, 79 bp, Homo sapiens
  chr12:55413595-55413674
  hyper
aacaaacaaacgggcggcaaaactggacctggccggaggagcctttcaagtgggcgtgtctttcggctggggaaaaggg

SEQ ID NO: 122473 - DNA, 245 bp, Homo sapiens
  chr12:56101313-56101558
  hyper
gaggctgcctggctcgccctccttgcgcaaggcacccatcacgtccagattgaaggcgacagcccgtgagaagagcagttcgacgagcagggagccaaaaaggtagcaaatcccggaggccccccaagggtcgcggctccgagccccggccatgggacgatccctgcgcgagctcccagcgaatgcaagggaaatctcgcacgccccaagccccaggtccccccaggcgcgtctctggtctccaa

SEQ ID NO: 122474 - DNA, 30 bp, Homo sapiens
  chr12:56102207-56102237
  hyper
ccccgcccccagcccggcaatgaccacagc

SEQ ID NO: 122475 - DNA, 30 bp, Homo sapiens
  chr12:56110381-56110411
  hyper
ttgtttcctgagtccgggctggaaatctcg

SEQ ID NO: 122476 - DNA, 31 bp, Homo sapiens; identical to SEQ ID NO: 8828
  chr12:56121857-56121888
  hyper

SEQ ID NO: 122477 - DNA, 30 bp, Homo sapiens; identical to SEQ ID NO: 49707
  chr12:56122105-56122135
  hyper

SEQ ID NO: 122478 - DNA, 30 bp, Homo sapiens
  chr12:56122619-56122649
  hyper
gggcggctggagagcgccggacgagtctcc

SEQ ID NO: 122479 - DNA, 94 bp, Homo sapiens
  chr12:56123023-56123117
  hyper
gcaagacctcggggcgcctggggcccccctctggcgctatacctccgtgccaactcggggtaggagagcggggcggagcgcagcctgggtcact

SEQ ID NO: 122480 - DNA, 30 bp, Homo sapiens; identical to SEQ ID NO: 49708
  chr12:56132068-56132098
  hyper

SEQ ID NO: 122481 - DNA, 405 bp, Homo sapiens
  chr12:56137578-56137983
  hyper
ctggctctggccccgcgaagggcgccttctgctccaagcggggcgctccctgctgccccggcccggaagctttttctgcgaaaacttgacgaattagggagcgggggctacttcatagaagttttccgagcggtggagatgggctgcaaagttgtatgcacgcctagttcccggaggttggggcgggggaaatggggcgggtttcgagatagtgccttccacccccagtatgctaaaaagatccttgttggagtccggggaagctggggctgggcagtgactctgtcctgaaaagccgtggtggggaggctggagaacagaatcgggaggctgcaggacccccgcagccccagctggactgcagtgctctctgcttcccagtggccctggcggtaactccccact

SEQ ID NO: 122482 - DNA, 223 bp, Homo sapiens
  chr12:56210928-56211151
  hyper
aattcggcttggggcgtaatcccacctagaaaaggggagtggaagtattttctgagtgtctggtacctatttagacagaaatacacaaaaatgccaccatttgctaacagggaaatctcagcttcggacgacagactggaaacatcatcccagggaagaaaaacggatcctggctccgacatggggcaaaaaggagggaccaactgacgtaatgcagccctga

SEQ ID NO: 122483 - DNA, 30 bp, Homo sapiens
  chr12:56211368-56211398
  hyper
gacgtaggagaaggcgcaagctaccctgta

SEQ ID NO: 122484 - DNA, 97 bp, Homo sapiens
  chr12:56211699-56211796
  hyper
ggcactgtatcttgcgaacgacagaaatggcaaccaactgtgcttctgcattacagaccaccaaccaatgggtggtggcagcgctgattctgttcct

SEQ ID NO: 122485 - DNA, 30 bp, Homo sapiens
  chr12:56223489-56223519
  hyper
agctagggctgcgtcgactccaaggaggcg

SEQ ID NO: 122486 - DNA, 30 bp, Homo sapiens; identical to SEQ ID NO: 49712
  chr12:56224113-56224143
  hyper

SEQ ID NO: 122487 - DNA, 30 bp, Homo sapiens
  chr12:56224396-56224426
  hyper
gctttgagagcttccggttgtcatctccta

SEQ ID NO: 122488 - DNA, 149 bp, Homo sapiens
  chr12:56320836-56320985
  hyper
ggctccgcgcctcccgcactcaccgccggtctcgtcagtaacatagggagtcgccatcttgaaaacgcaaaccacttccggcgtgagcgggctggggtcccgcccccctccccaccggaagtggagtcccgatcgtagcaagccaccat

SEQ ID NO: 122489 - DNA, 30 bp, Homo sapiens
  chr12:56321193-56321223
  hyper
acgtccaggacctgcgagggaaaagggcgc

SEQ ID NO: 122490 - DNA, 30 bp, Homo sapiens
  chr12:56321829-56321859
  hyper
gtcctgccctgcgccgtacctccctattct

SEQ ID NO: 122491 - DNA, 30 bp, Homo sapiens
  chr12:56325490-56325520
  hyper
tgttagcggcccgcccggtatcttggtctc

SEQ ID NO: 122492 - DNA, 43 bp, Homo sapiens
  chr12:56326150-56326193
  hyper
gggatggtgaagcccggttcctgggacccgactcggagggaag

SEQ ID NO: 122493 - DNA, 30 bp, Homo sapiens
  chr12:56334125-56334155
  hyper
gctgtgagtccgggcgctgcgaccgctgtc

SEQ ID NO: 122494 - DNA, 194 bp, Homo sapiens
  chr12:56360050-56360244
  hyper
ctgaaaggcagctgcgtaacacataccagacacaacagtttatcatgggagagtgaattaaaccaggaacttctcaaaaagacagaaacagaaccctgcatcccaaaacagagacagtgtcggggtatgctatgaggcagaggcaacgactcctctgaggcccaggattcctttgcaacgagattcccggcttc

SEQ ID NO: 122495 - DNA, 30 bp, Homo sapiens
  chr12:56360700-56360730
  hyper
ccctcctcggcccccgagagccagggtccg

SEQ ID NO: 122496 - DNA, 139 bp, Homo sapiens
  chr12:56367674-56367813
  hyper
ggccccgcctgtcgcgtcccttgctcgtacttgttggtgacagcgcccaaagagactcgcctttctccagaggattggtggatgagtgcacatatagcccaccctcgaaggtaggcgggtaatcgagctattggctgga

SEQ ID NO: 122497 - DNA, 152 bp, Homo sapiens; identical to SEQ ID NO: 8830
  chr12:56390555-56390707
  hyper

SEQ ID NO: 122498 - DNA, 30 bp, Homo sapiens; identical to SEQ ID NO: 49717
  chr12:56391054-56391084
  hyper

SEQ ID NO: 122499 - DNA, 227 bp, Homo sapiens
  chr12:56401111-56401338
  hyper
aatctttcggcgctcggctactctcccctagctcctctcccattttcccccagcagtctcccgggcttggggacgctcggtgttcggccacgccgcctgtcgcctggtagtgggaccggaagttgttagggggagggggacggctgtgatggggggggatatttgggggggcaagtcccttctcaggtgaagctgctgatggagatggagccgccgccaccgccgcc

SEQ ID NO: 122500 - DNA, 30 bp, Homo sapiens
  chr12:56435654-56435684
  hyper
cttccgagtcggcgcggcgcaaggcttgct

SEQ ID NO: 122501 - DNA, 30 bp, Homo sapiens
  chr12:56436189-56436219
  hyper
ttttcccatcctgtcgcagacaaagaaaag

SEQ ID NO: 122502 - DNA, 305 bp, Homo sapiens
  chr12:56472731-56473036
  hyper
aaggctcaactgttttcgaagtcttcaggcttgaagttctggagaaaacaactaggctctccgggcgagatcccgaataccagtttaagggatttgaaatgcaaggccgtctgggactccactgccacggatgggcaccaggcggcgccggtcggatccgtcccgggactagcagggctttgggcagcaacccgcagggagcccgaccgcctctggccaggtccgggcagctggtgggggaggttccagaggtccacgccattcgtggacgcagtctctagtgtcctctccgcgtcccacttcac

SEQ ID NO: 122503 - DNA, 79 bp, Homo sapiens
  chr12:56473738-56473817
  hyper
gctccgccaagttgcgggaccgcggggcgtggcacgctcggggcaggcggtccgaggctccgcaatccctactccagcc

SEQ ID NO: 122504 - DNA, 130 bp, Homo sapiens
  chr12:56473838-56473968
  hyper
cgtgactcacccccttccctctgcgttcctccctccctctctctctctctctcacacacacacacccctcccctgccatccctccccggactccggctccggctccgattgcaatttgcaacctccgctg

SEQ ID NO: 122505 - DNA, 348 bp, Homo sapiens
  chr12:56473998-56474346
  hyper
cggttcaggtggctcttgcctcgatgtcctagcctaggggcccccgggccggacttggctgggctcccttcaccctctgcggagtcatgagggcgaacgacgctctgcaggtgctgggcttgcttttcagcctggcccggggctccgaggtgggcaactctcaggcaggtaagtggcgcgagagcaccggcgggctcggcacctgggagccggaacccagtgcgcgcagcctcggagggtatgggcacggtctcaggcggcgcggggttgtgggtgctgcccccggtttgccaggaccacctgggagaggggcggtcaggctcgggttatcggcgtggtccggccgag

SEQ ID NO: 122506 - DNA, 202 bp, Homo sapiens
  chr12:56497905-56498107
  hyper
ccgacccagggatccgaagaagggcgcacccagcctccccgacctaggtgtagacactgcccacccgctgcggctccactctactccacccctgcccgctcgactttaaacctatttccccgccgtagctccgcccctctcccctcagcccgcccctctctgttactggctctcgctcagcgttctcggtggaagtggtttt

SEQ ID NO: 122507 - DNA, 30 bp, Homo sapiens
  chr12:56498802-56498832
  hyper
atggaggtgcgggtcggcgaccaggatgag

SEQ ID NO: 122508 - DNA, 30 bp, Homo sapiens
  chr12:56510316-56510346
  hyper
ccattgggtagccccgcccttggggggggc

SEQ ID NO: 122509 - DNA, 30 bp, Homo sapiens
  chr12:56510553-56510583
  hyper
tgtagaaacctctgcgccatgagagccaag

SEQ ID NO: 122510 - DNA, 336 bp, Homo sapiens
  chr12:56511632-56511968
  hyper
ttttatggttccatcgggtgggggttttctgtcattagagtttgccctgtcactacctgtgctatggagggtatcaaagctataaaggcaacagcccgggttacgtggtgtggtttgcatctcgctggagttggatgggatatggtacgtctctggaggcaggttttaggtttcgcgggttattaggggccaatgctggtaccgcccctttccaggagggctgccttggcgactaccgcttagaccatgtcgtgcctttgggttgggttgccatagtgacacgcaaagcgtgctgggaacgccctgcggcatgtcgcacgcgtacttcatacacca

SEQ ID NO: 122511 - DNA, 305 bp, Homo sapiens; identical to SEQ ID NO: 49723
  chr12:56521402-56521707
  hyper

SEQ ID NO: 122512 - DNA, 65 bp, Homo sapiens
  chr12:56522027-56522092
  hyper
ctgggggagctgatcgcaagactaggcaacctccagccagtccctgggtcgggcggatcctccca

SEQ ID NO: 122513 - DNA, 30 bp, Homo sapiens
  chr12:56522965-56522995
  hyper
tatccccgggtacccgctaggacccagccc

SEQ ID NO: 122514 - DNA, 30 bp, Homo sapiens; identical to SEQ ID NO: 49724
  chr12:56523255-56523285
  hyper

SEQ ID NO: 122515 - DNA, 30 bp, Homo sapiens
  chr12:56546388-56546418
  hyper
cccagccccagacacggaccccgcagggtg

SEQ ID NO: 122516 - DNA, 121 bp, Homo sapiens; identical to SEQ ID NO: 49725
  chr12:56552004-56552125
  hyper

SEQ ID NO: 122517 - DNA, 30 bp, Homo sapiens; identical to SEQ ID NO: 8835
  chr12:56583475-56583505
  hyper

SEQ ID NO: 122518 - DNA, 84 bp, Homo sapiens; identical to SEQ ID NO: 49727
  chr12:56614494-56614578
  hyper

SEQ ID NO: 122519 - DNA, 355 bp, Homo sapiens
  chr12:56615720-56616075
  hyper
gcccaccgctgctacgcaacccggcggaagctcgtcaccaaaccccgcctctttgtttaactcagcccctacaccagcagccaggagctgcctacgaggagggacgaaggctggccaggcctccactctagacaggaagtctagtctagagtctatatggtcccagccaggactatgtagccatttaggagggagaactctatgttcttcccggcaaaaacgtgtgggcctggccggccacgcttcgctttggaggggtgcaggtgacttgtgtcttagagctgacgcagattgttgcgagatcattgcggagaggcaggcctgcagcgtgacctgctgcgggtccggcccctct

SEQ ID NO: 122520 - DNA, 214 bp, Homo sapiens
  chr12:56618042-56618256
  hyper
ggcaggcggcgggacgcagggcgcgcccgggcggtgctgattggccggaggaggccagccgggggaaacttccgggaatgtccgcactcccgcgttccacggggcagcatccggcggcagcggagcctgtggctccccctgcgggctgctcagcggcgtgcacagtcctgccggctggcttgggtgggtggtgggctgcgggtaggggagggga

SEQ ID NO: 122521 - DNA, 237 bp, Homo sapiens
  chr12:56652043-56652280
  hyper
ggatccccatggctcggcccgggctccgtccgcatcgagctcccggcggcggcggcggcggctccaccggggacacggagcggcccaggcggcggctgcggtggcggctgcagggagagcgcggccccgcctaccggggggcgggcgagttggaggccgcagcgctccctggcggccgtcctggtcccggcgctccccgcgcaaacggaccccggccgcagcgccctccgccccacc

SEQ ID NO: 122522 - DNA, 63 bp, Homo sapiens
  chr12:56660465-56660528
  hyper
atctgcggtagacacgcccacgaagtcgcctctgtgcctacctatcgggtcctgtgaccacag

SEQ ID NO: 122523 - DNA, 52 bp, Homo sapiens
  chr12:56660589-56660641
  hyper
cgccacaggtgtgaaactacatctcccgacaggcggcgttgtccccttcctt

SEQ ID NO: 122524 - DNA, 53 bp, Homo sapiens
  chr12:56660883-56660936
  hyper
gccaggcagggtcgcgcgcatggcctgggcgggctcgcggcgggtcccagctg

SEQ ID NO: 122525 - DNA, 85 bp, Homo sapiens
  chr12:56694264-56694349
  hyper
gacagcagttgtgacggggaggattggaccgcccggattagggctaattaagggtggatgggtggcgggcggggaagtgcgggtg

SEQ ID NO: 122526 - DNA, 30 bp, Homo sapiens
  chr12:56710081-56710111
  hyper
ccttcaaaacggtgcgctgccggccagcga

SEQ ID NO: 122527 - DNA, 30 bp, Homo sapiens; identical to SEQ ID NO: 49731
  chr12:56727496-56727526
  hyper

SEQ ID NO: 122528 - DNA, 30 bp, Homo sapiens; identical to SEQ ID NO: 49732
  chr12:56727791-56727821
  hyper

SEQ ID NO: 122529 - DNA, 30 bp, Homo sapiens; identical to SEQ ID NO: 49733
  chr12:56753690-56753720
  hyper

SEQ ID NO: 122530 - DNA, 245 bp, Homo sapiens
  chr12:56754008-56754253
  hyper
cccagccgccaccccgacactggctgccattcagtcaagcccttcccagactgcgagctcactggcgccgccgcaactccgcccctccgcagggcgggacaagctgagccgaaaccacacctgcagcttcagcgattggtggagaagttcaagtaggcactttctacgaggggaggagtccaattagtggactagcccaagactgaaacagctgattttcgagaacccgcgcgtgagccccggaa

SEQ ID NO: 122531 - DNA, 389 bp, Homo sapiens
  chr12:56862355-56862744
  hyper
cggttcatccaaggcgcaagatggcgctgctttttgcacgttctttgcgcttgtgccgctggggagccaaacgattgggagttgcctccacagaggcccagagaggtaggattatctctttttactcttttacctccagaatggctgccgtctattattcccagaccccactccgagaagcaactccaaccctctcgggtcttttccttccccacctgccttggtcttaagattccaaacctgtgataccatttggtttctttaaattccgggacttactcaatccgagtttttcagctccgtgagctatccgtagtaaagcgacctcgcgactctcttgcccgcttggcattctgactcttccctagttgctcgtgtatcatggctgc

SEQ ID NO: 122532 - DNA, 193 bp, Homo sapiens
  chr12:56881719-56881912
  hyper
ctgatcctggtgctgcggctggtggctgtgtggcgtctctctgccctgcgccgcggcctcactgaggtggtgccggacgcccccgccaaggagggggctccggctcgggtgaccccagcctcctcgcccgcagtgactgccagcccggctcagggccttctgcagagccttcatggagcgcatgccccagcaa

SEQ ID NO: 122533 - DNA, 144 bp, Homo sapiens
  chr12:56882299-56882443
  hyper
cttgcgacagtctgcggatgcttccgcgtgggcccggcgagcgcgggtatccgcggatgctgagggcgggaaaggcgaggacaagctgaggcgaagccggtgggggcgggaggcgctccccgggaacaccgtggggctgcgaat

SEQ ID NO: 122534 - DNA, 31 bp, Homo sapiens; identical to SEQ ID NO: 8838
  chr12:56958137-56958168
  hyper

SEQ ID NO: 122535 - DNA, 30 bp, Homo sapiens; identical to SEQ ID NO: 8839
  chr12:57022641-57022671
  hyper

SEQ ID NO: 122536 - DNA, 30 bp, Homo sapiens; identical to SEQ ID NO: 8840
  chr12:57026396-57026426
  hyper

SEQ ID NO: 122537 - DNA, 30 bp, Homo sapiens
  chr12:57040046-57040076
  hyper
tttaggaaaggggccgagttcctgttgaaa

SEQ ID NO: 122538 - DNA, 169 bp, Homo sapiens
  chr12:57081171-57081340
  hyper
ctggagttaggaggcggactggaagtacccacactcaagaaacccagacactggagagggaagtatgttgcggcgtgggcatggcttccttctagttgcctagcagtacctgcagctcacggcgaggtccgcgtggggctctcccaggagctccgccaggcacctggcg

SEQ ID NO: 122539 - DNA, 30 bp, Homo sapiens; identical to SEQ ID NO: 49739
  chr12:57081557-57081587
  hyper

SEQ ID NO: 122540 - DNA, 30 bp, Homo sapiens
  chr12:57119194-57119224
  hyper
agtgactgtcaggccgttcccacggcgggg

SEQ ID NO: 122541 - DNA, 30 bp, Homo sapiens
  chr12:57145644-57145674
  hyper
cctcagcagcttcacgctacgccccagtaa

SEQ ID NO: 122542 - DNA, 30 bp, Homo sapiens
  chr12:57146072-57146102
  hyper
acgtctccattgagcgcggaactcgccacg

SEQ ID NO: 122543 - DNA, 30 bp, Homo sapiens
  chr12:57400018-57400048
  hyper
aataaggggccaagcgaggggcggcggggc

SEQ ID NO: 122544 - DNA, 333 bp, Homo sapiens
  chr12:57472540-57472873
  hyper
ccacctcctcctcacgtgccttaccccagcaactaactccgaacgggcaacgacagcagcctatcctctacgaaacccgcccctatcaaccaatgggatgggcagggcttcgagcacccagccctccaagggccctatgagtcccgccccttagcaactgaagagagagggcgggaaaagcagctttcagcctattggaaaatgggttctcaccctagcagtggcgacaggaagatcccaccccgctaacaacatgcttccgtcttcagtttatttacaactggtgtgattgatggtaagtttaaccaatagaaaatcggaatgggagaggcc

SEQ ID NO: 122545 - DNA, 30 bp, Homo sapiens
  chr12:57481355-57481385
  hyper
cccactgtgtttggcgcttaataggttgga

SEQ ID NO: 122546 - DNA, 30 bp, Homo sapiens; identical to SEQ ID NO: 49740
  chr12:57481594-57481624
  hyper

SEQ ID NO: 122547 - DNA, 30 bp, Homo sapiens
  chr12:57482538-57482568
  hyper
gacctcgccccgcccgctgggtccccaagc

SEQ ID NO: 122548 - DNA, 30 bp, Homo sapiens
  chr12:57483093-57483123
  hyper
ggcggaggggacagcgcccgccggaccctg

SEQ ID NO: 122549 - DNA, 30 bp, Homo sapiens
  chr12:57483616-57483646
  hyper
ctttattcacagagcggggaggggagtttc

SEQ ID NO: 122550 - DNA, 384 bp, Homo sapiens
  chr12:57504125-57504509
  hyper
agggaggagccacggcgtgaggggcggggccagtgttacctcccaaactcagaagggaagcgcaaggtctgggatcctcgtccgcccgcttggtggcctaaactcgcttatctcaacccctatctgcccgagtcctctgattgtgggaccacaggatcgaaagttaaaacagcttctctgagttgcccaatgcgtgaatgtggcggtgggggcaggcggggaggtggagccagttcagcacgaggagggttaactcggcgccgccgctgggaaatctcagcgtctacagcagccaagcgtggagcagttttgagggggaaattccccctcgtctgggccaccatgaggtctacatctggggcttgctcacgccccagccacacc

SEQ ID NO: 122551 - DNA, 269 bp, Homo sapiens
  chr12:57504734-57505003
  hyper
attcctccaggagttcgaaactgctaaaacccagtgccaccagccaccaacactagctgaaaccatctcttggggaccatccacccagccaggggaggatcccgagagctccccccacgaatccacccccatgcactcatagaggcccccgcacccacctcggaggcaacccctcacctcggcaacccctctgctgtcttctccctttctcagcgggcacttccaggccccataggtctgtagctctgtccagcgagttcaaggctggc

SEQ ID NO: 122552 - DNA, 30 bp, Homo sapiens; identical to SEQ ID NO: 8844
  chr12:57505514-57505544
  hyper

SEQ ID NO: 122553 - DNA, 30 bp, Homo sapiens
  chr12:57521256-57521286
  hyper
ggacaaaggtccggcgctcagcagacacct

SEQ ID NO: 122554 - DNA, 36 bp, Homo sapiens; identical to SEQ ID NO: 49744
  chr12:57521846-57521882
  hyper

SEQ ID NO: 122555 - DNA, 30 bp, Homo sapiens; identical to SEQ ID NO: 8845
  chr12:57522303-57522333
  hyper

SEQ ID NO: 122556 - DNA, 30 bp, Homo sapiens
  chr12:57610440-57610470
  hyper
gtgaaagtcaccttcggtgcccccagctgg

SEQ ID NO: 122557 - DNA, 332 bp, Homo sapiens
  chr12:57613964-57614296
  hyper
atggggagcagggagcgctgccttgagcgctggaaattggcgcggctccccctctcccccgcctgcccctcctccacctccaccccgcccactccccctccggctccggcttcgggaaattacatccccgctccgcggctccccccaacccccaccgcgccccggagccggcgcctttataggcacatttattgcaataataaagtgaggcgcggggcggggggcgggggggcagtcgttcccgcggggaccgcgctggctccaggaagcagggaaataaaataaaataaaataaaataaaataaaaattcagataacggtgagccttgcgc

SEQ ID NO: 122558 - DNA, 20 bp, Homo sapiens
  chr12:57618690-57618710
  hyper
aggccgcagtacctggggct

SEQ ID NO: 122559 - DNA, 235 bp, Homo sapiens
  chr12:57619110-57619345
  hyper
gggcctgtcccccaccctctgcagtctacgctcgccctggagggggtgcttcctgggctggggcccccgctggggatggcagcagcagcggcggggcccgggcttgggggctccctcgggggcgcactggcggggccgcttgggggcgcgttgggagtgcctggggccaaagagtcacgcgctttcaattgccacgtggagtatgagaagacaaaccgcgcgcgcaagcaccgac

SEQ ID NO: 122560 - DNA, 30 bp, Homo sapiens
  chr12:57623333-57623363
  hyper
cctggggctacagacgggaatcataaagaa

SEQ ID NO: 122561 - DNA, 761 bp, Homo sapiens
  chr12:57631780-57632541
  hyper
ggtggggaggctcacagcccccgtctctggggaatttgggtcttagggacgtaggaaccgagtcctaatatctctccccactcccacgataacctccaccaccccctccctcctcgcagccgatcctgcagagcacctccccctccagagcccgccctgtggagggcgcgggcgggagcgagctatgcacccgtctctgggatcgtcggggtacagggagggagagggcgctttctagggtccgcctccctttccttctcgctgatacttccgccgccccctactctgacaagcgcggctgtaattaggctgcggggtcccgggctctccgcctcactccggcggataatgagataaagtgtcagagacacggcgagaacaaagagacagagactcgctgcgatgtgtgtggggggggcgggggagcggggctgacgggctgttagagcctccagcagcccagccctcccgagagcccgcgcctccagggcccaggaagggagggcgtgtcctgtcacccgcgcaccccagccctccagtctctgggaccaaaaaacaatcccagagctcaaactcgagcggccgcacaactgggctgcacatctggttctctgtggcacagctggggagccaggacgccggaaggggcgcctggtccttgcgcctttgctcacaggccctcgcctgcttccttgtgccctttgttctgagttccggtgaccccggccaggtcccaaattctccgtcgcgctccttttcca

SEQ ID NO: 122562 - DNA, 246 bp, Homo sapiens; identical to SEQ ID NO: 8850
  chr12:57634395-57634641
  hyper

SEQ ID NO: 122563 - DNA, 30 bp, Homo sapiens; identical to SEQ ID NO: 49751
  chr12:57634840-57634870
  hyper

SEQ ID NO: 122564 - DNA, 245 bp, Homo sapiens
  chr12:57635249-57635494
  hyper
gtgtgtgcgcgcgcgcgcgcgctgagtagagtgggcagtggaggaggttggggtgccggttgtcttgtaccccagtaccggcccttcctcggatctgttttcaattcagtctgctccttggcccagacttatgacctttgcagcatgcggcagtatcatccatcacccaggcgccgtttagggggatggagggcgctgggagctcacatagggtcgctgtcacgcctgccgccctctctggggac

SEQ ID NO: 122565 - DNA, 30 bp, Homo sapiens; identical to SEQ ID NO: 49753
  chr12:57635939-57635969
  hyper

SEQ ID NO: 122566 - DNA, 30 bp, Homo sapiens
  chr12:57636965-57636995
  hyper
gcctgcggctaaatcgccaagagcaagggg

SEQ ID NO: 122567 - DNA, 30 bp, Homo sapiens
  chr12:57637559-57637589
  hyper
gtgtgggtgtctcccgcttgcaggcgcccg

SEQ ID NO: 122568 - DNA, 138 bp, Homo sapiens
  chr12:57824119-57824257
  hyper
cttctacacctctccgtcctatttttccatgctccacgctcgaaggaaaaccgccacccaagaaacacacggagctagccaccccgaagcactggaagggcgcaatagtttttaggtcaccccgcaaaggccacaggt

SEQ ID NO: 122569 - DNA, 20 bp, Homo sapiens
  chr12:57824814-57824834
  hyper
gcgctacgtcactacgtccg

SEQ ID NO: 122570 - DNA, 174 bp, Homo sapiens
  chr12:57853381-57853555
  hyper
gcaccaaccaaaggcgactaccctacctccactattatcgttctcggttgaacttctccccctgccccgcaatattttcctcaatctggttgtcggggcctctttggggccagccgatccagaaatccaagccgggatttagtactcaccaacagcagcgtgttcagccggggc

SEQ ID NO: 122571 - DNA, 168 bp, Homo sapiens
  chr12:57855185-57855353
  hyper
aacccttgggaagccggctgctataaccagcaacctaaggtgtccgggcccctcctcctccccatacacacctaattttattgacccagtcactttctctgctttctctcccctatactttctggattcttctccctttctaaccccaccaacggggacccccactct

SEQ ID NO: 122572 - DNA, 122 bp, Homo sapiens; identical to SEQ ID NO: 8852
  chr12:57861191-57861313
  hyper

SEQ ID NO: 122573 - DNA, 30 bp, Homo sapiens
  chr12:57870166-57870196
  hyper
tcggcggtggctctcggtagaacaccaggc

SEQ ID NO: 122574 - DNA, 133 bp, Homo sapiens
  chr12:57881678-57881811
  hyper
cggcctcttcatctcgatgatagtcttttcctgtgtcttagcgttgcatgatgggagaaatagtctactttccggtagcggtgccagggcagtggcctaatacggaactccatttcccggcgtgcctcgcgga

SEQ ID NO: 122575 - DNA, 30 bp, Homo sapiens
  chr12:57913695-57913725
  hyper
aaggttcccctatccgctgcagggtccagt

SEQ ID NO: 122576 - DNA, 30 bp, Homo sapiens; identical to SEQ ID NO: 49759
  chr12:57914291-57914321
  hyper

SEQ ID NO: 122577 - DNA, 30 bp, Homo sapiens; identical to SEQ ID NO: 8853
  chr12:57917374-57917404
  hyper

SEQ ID NO: 122578 - DNA, 189 bp, Homo sapiens; identical to SEQ ID NO: 8854
  chr12:57941135-57941324
  hyper

SEQ ID NO: 122579 - DNA, 30 bp, Homo sapiens
  chr12:57943795-57943825
  hyper
cgcggcgctgcagcgcgaggggcggagagg

SEQ ID NO: 122580 - DNA, 160 bp, Homo sapiens
  chr12:57944028-57944188
  hyper
gtcccagccccacgccggctaccaccatggcggagaccaacaacgaatgtagcatcaaggtgctctgccgattccggcccctgaaccaggctgagattctgcggggagacaagttcatccccattttccaaggggacgacagcgtcgttattggggtgag

SEQ ID NO: 122581 - DNA, 132 bp, Homo sapiens; identical to SEQ ID NO: 49763
  chr12:57984704-57984836
  hyper

SEQ ID NO: 122582 - DNA, 230 bp, Homo sapiens
  chr12:57998566-57998796
  hyper
ttgttgctaaggcccggaccgtcatcccagcaacagcctcagtcatgtgaccggcaatggcggcgctgacgagaggtaggtgagcccggcgccccccacacccaccgcgcgccccccgggccccgctcgcacccctcacgcgccccccgctcccccggcgccccctcctccacctcccctccccgcgcgcggctccgggctccccgctccgtgcccggccgatcatcttt

SEQ ID NO: 122583 - DNA, 291 bp, Homo sapiens; identical to SEQ ID NO: 49764
  chr12:58004716-58005007
  hyper

SEQ ID NO: 122584 - DNA, 931 bp, Homo sapiens
  chr12:58014820-58015751
  hyper
cgctcaacgggttggggtagccgcggccgtggccttcgggagcggggcgttgatggtgagggaggacccggggaggaacccggggggatccctgctgaggggccagggaaattgggccggggaagagggagggaccagctttcggcttgggttcgggagggcggaggtgcgcggggttggtttgctcctcctctagatggtgacagcgcgtcttctcccccacagctggggatgttcgtgctgcagctcggcgtcttgtccacctttttgtccgagcctgtggtcaaggcgctgaccagcggggccgcgctgcacgtgctcttgtcccagctgccgagcctcttggggttgtccctcccgcgccagatcggctgcttctctctcttcaaggtgggggtggaagaagaaaggagaaggggcttctagaggtcccgtgaatagggaaactcgaaaagggaggaaggacggagggtggaggggtagtatgtgacaagggagcaggaaaggaggttggagccacgtggctgaacgagggcgctgaggaggtgtaagccctggtggcactgggtagagagggcctcgctctgggggtcccgcgccggggcgcatgagccctggcacggggccctctgctcatcgcccctgccctcagacgctggcctccttgctgactgcgctgcctcggagcagtccggccgaactgaccatctccgcgctcagcctggcgctgctcgtgccggtcaaggaattgaacgtgagattccgagaccggctacccacgccgatcccgggggaagtcgtcttggtgaggatggccgtgcgcgccggccccctgcccgcgcagaccctgcggtcctgtgggaactggccgctgccgccccctggtggagtgcagagaggccacggaacagagggccggctcacactttcc

SEQ ID NO: 122585 - DNA, 134 bp, Homo sapiens; identical to SEQ ID NO: 8857
  chr12:58021324-58021458
  hyper

SEQ ID NO: 122586 - DNA, 254 bp, Homo sapiens; identical to SEQ ID NO: 49766
  chr12:58021713-58021967
  hyper

SEQ ID NO: 122587 - DNA, 67 bp, Homo sapiens; identical to SEQ ID NO: 8859
  chr12:58025666-58025733
  hyper

SEQ ID NO: 122588 - DNA, 17 bp, Homo sapiens
  chr12:58025869-58025886
  hyper
cgagcagaaggaccaga

SEQ ID NO: 122589 - DNA, 107 bp, Homo sapiens; identical to SEQ ID NO: 8861
  chr12:58025901-58026008
  hyper

SEQ ID NO: 122590 - DNA, 551 bp, Homo sapiens
  chr12:58026065-58026616
  hyper
cgcggttttcccggtacccctcccctcacttcccaggccccagggtctcccggcctcctttcttctcgccctctcctgcatctcggtttcctcacacacccgaggcctggcatcttaatgctgaagacatttggatgccgcggtttcgacgcggccgtgcgtaagcggaaaagccccgctctatcagggcagtggcagtccccaagcccgccgcccgccctggccggcgcgcccccgactcctcagtctgagcatcacctgggccggggtgggctgcggagggcggctccacacctagcctgtcaggaaaaaatgcagaatcatgcccgtgctggcgggcgcccccggcggaggtgacccgatgagtggcctcggcaagcggcgcgggggacagagtggaccgggaagcgcgcctcctcccgcctcctcccgcctcctcctcctcccctcaccaaccaatcccacccccacccacccccgggcactgacctgtctaacgctctaaggcagcggcaaaatttcggtccgggctgtgccgggctctcgccccg

SEQ ID NO: 122591 - DNA, 30 bp, Homo sapiens
  chr12:58138387-58138417
  hyper
taacaaaacaatggcgtcatcgtgaggtca

SEQ ID NO: 122592 - DNA, 30 bp, Homo sapiens
  chr12:58138765-58138795
  hyper
ttagccacgcatttcgccaatccagaggca

SEQ ID NO: 122593 - DNA, 30 bp, Homo sapiens
  chr12:58145903-58145933
  hyper
agctgtgaggggggcgggcactggttctca

SEQ ID NO: 122594 - DNA, 281 bp, Homo sapiens
  chr12:58146165-58146446
  hyper
gggcgaacgccggacgttctgggcacgtgaccgccacccatgcgctgaggggcggacaggaggtgcttcgactgggaggagggcgaagagtgtaagggggcggaggggcgatggcagccacgtgatctgttgctatcacacgtgaccgcttgacattgctctgaggagcagaggtgtggctacgcggcgggcacgtgactggctgccacaacccccgctgcagggggggagcggtgagggggacaagagagggtggagcccgaggcggtgccatggcaacc

SEQ ID NO: 122595 - DNA, 30 bp, Homo sapiens; identical to SEQ ID NO: 49773
  chr12:58148374-58148404
  hyper

SEQ ID NO: 122596 - DNA, 36 bp, Homo sapiens; identical to SEQ ID NO: 49774
  chr12:58158675-58158711
  hyper

SEQ ID NO: 122597 - DNA, 715 bp, Homo sapiens; identical to SEQ ID NO: 49775
  chr12:58158778-58159493
  hyper

SEQ ID NO: 122598 - DNA, 134 bp, Homo sapiens; identical to SEQ ID NO: 49776
  chr12:58159767-58159901
  hyper

SEQ ID NO: 122599 - DNA, 30 bp, Homo sapiens
  chr12:58165377-58165407
  hyper
gtgtttgtgctctgcggggagggaaggtaa

SEQ ID NO: 122600 - DNA, 30 bp, Homo sapiens
  chr12:58165930-58165960
  hyper
gacgcagccatgcgcgttggtggcagttcc

SEQ ID NO: 122601 - DNA, 431 bp, Homo sapiens; identical to SEQ ID NO: 49777
  chr12:58166378-58166809
  hyper

SEQ ID NO: 122602 - DNA, 243 bp, Homo sapiens; identical to SEQ ID NO: 49778
  chr12:58176215-58176458
  hyper

SEQ ID NO: 122603 - DNA, 30 bp, Homo sapiens
  chr12:58230446-58230476
  hyper
acaaacacgtgaacacgtgcacacatacac

SEQ ID NO: 122604 - DNA, 218 bp, Homo sapiens
  chr12:58239309-58239527
  hyper
actttttcgctgcgcgattcagaaccacgccgggtctgatgccatccggcgaattatgtaaccagggacaccgctcccgggctaaacaaacgcggctctgtgtgtgcagcgccggccccgggggagcgcaccgggcagggaggggctctggccgggcctcagggtcgggcttgtttgctcagcgaaactggtcagaggcagccgggagggagcccgac

SEQ ID NO: 122605 - DNA, 30 bp, Homo sapiens; identical to SEQ ID NO: 49780
  chr12:58240427-58240457
  hyper

SEQ ID NO: 122606 - DNA, 30 bp, Homo sapiens
  chr12:58240794-58240824
  hyper
acttgaaaccgttccggtgctccgattggc

SEQ ID NO: 122607 - DNA, 30 bp, Homo sapiens; identical to SEQ ID NO: 8867
  chr12:58241024-58241054
  hyper

SEQ ID NO: 122608 - DNA, 30 bp, Homo sapiens
  chr12:58246341-58246371
  hyper
tggggcggatgaatccggagcagcgcagcc

SEQ ID NO: 122609 - DNA, 375 bp, Homo sapiens
  chr12:58259122-58259497
  hyper
cgaagtttgcggccaccgccggccgtgcagtctcccgcgcttcccccgccggagcgccggccccgcattcctccgggttgagcaacagcttttcctccgagggcggctggccgggcaaggcggggccgccagcgctggggccctcgcggggcgcggcccgagtgtccggggcctctggcagcgccccgggtttaagtggagcgcggccgccagaccctccccggggagccgagctcggagaggggggccgcagagcccaggccccagcctgcccttcctgcagcgccggcgggattgccgaaagaccaagcgggtgccaggcctcacccgaccttgatgttggcgttagtccgggttgaccgcccactctgacgc

SEQ ID NO: 122610 - DNA, 281 bp, Homo sapiens
  chr12:58290226-58290507
  hyper
agcagccgacccagtcgggggagtgggcctcctgcgccctcggaggcacaggaccgcggggccccaccgaggaccccctgaacggcagcccgccgcgaggcagcgtggggaccaaactgccgcgccccagagcccgccgccgcctgtccccgcgtctgaggtccgcaaggaagagctgcgggaatgcacgcccggggaagaggctttgtgaaccgaggctcggcgcgccccccacccgcgcccctcatgggcagccgggcccagcccgccgcccgggcccc

SEQ ID NO: 122611 - DNA, 30 bp, Homo sapiens
  chr12:58290854-58290884
  hyper
tccagcgcctcgcctcggtcagcgatcact

SEQ ID NO: 122612 - DNA, 1072 bp, Homo sapiens; identical to SEQ ID NO: 49783
  chr12:59313473-59314545
  hyper

SEQ ID NO: 122613 - DNA, 1473 bp, Homo sapiens; identical to SEQ ID NO: 49784
  chr12:59989520-59990993
  hyper

SEQ ID NO: 122614 - DNA, 32 bp, Homo sapiens; identical to SEQ ID NO: 49785
  chr12:59991052-59991084
  hyper

SEQ ID NO: 122615 - DNA, 30 bp, Homo sapiens
  chr12:62584395-62584425
  hyper
cattcagtaagaaagcgccccgtcccaaat

SEQ ID NO: 122616 - DNA, 311 bp, Homo sapiens
  chr12:62584701-62585012
  hyper
acccacttcaatcctcgacctggtcgtttgctgttattaggagaaatggggcagagagggagggcaccgctcacggagcctcatttcgcatgctccgatcccctctcggcgtccctctactccgcccctaccctgaccgcccgcgagggagacgccggccgatggacccgcatctgccctcacctctcgccttccccgggcgatccctctacagtcccggacccccgagaaaggggaagggagacgtgtgcacacgggggcttccgggaccgcggtcctgcagttgccgctccggtccccagcgctggccg

SEQ ID NO: 122617 - DNA, 1483 bp, Homo sapiens; identical to SEQ ID NO: 8874
  chr12:62585030-62586513
  hyper

SEQ ID NO: 122618 - DNA, 30 bp, Homo sapiens
  chr12:62654009-62654039
  hyper
cagcagaccatggccgcgcacccagtgcgc

SEQ ID NO: 122619 - DNA, 30 bp, Homo sapiens; identical to SEQ ID NO: 49788
  chr12:62665265-62665295
  hyper

SEQ ID NO: 122620 - DNA, 566 bp, Homo sapiens; identical to SEQ ID NO: 49789
  chr12:62829159-62829725
  hyper

SEQ ID NO: 122621 - DNA, 309 bp, Homo sapiens
  chr12:62860157-62860466
  hyper
aagtgcaccagttgcgtttaaagaaaaaaaatgtatattaacaggaggtagccactgatttggggccactagtccagagattcgaaatgaagcgggaggagacacgttaagattaatctacagggaaacaaattatttacaccgaaatacaatttaacacaaacatacgcaaagagatatgccaaggagtactcgggggctctgttcaggcacttgttaatgaaaacgaagcgaatcttgacgccttaaaccctgtctagcctacttgattccgggggtggggctgtgggaatcgctgcccacccggaa

SEQ ID NO: 122622 - DNA, 30 bp, Homo sapiens
  chr12:62860672-62860702
  hyper
tggctggtgacacccggtgtggctgggccc

SEQ ID NO: 122623 - DNA, 871 bp, Homo sapiens; identical to SEQ ID NO: 49791
  chr12:63025567-63026438
  hyper

SEQ ID NO: 122624 - DNA, 30 bp, Homo sapiens; identical to SEQ ID NO: 8877
  chr12:63138854-63138884
  hyper

SEQ ID NO: 122625 - DNA, 1611 bp, Homo sapiens; identical to SEQ ID NO: 49793
  chr12:63327111-63328722
  hyper

SEQ ID NO: 122626 - DNA, 215 bp, Homo sapiens; identical to SEQ ID NO: 49794
  chr12:63328940-63329155
  hyper

SEQ ID NO: 122627 - DNA, 648 bp, Homo sapiens; identical to SEQ ID NO: 49795
  chr12:63543753-63544401
  hyper

SEQ ID NO: 122628 - DNA, 101 bp, Homo sapiens; identical to SEQ ID NO: 49796
  chr12:63544498-63544599
  hyper

SEQ ID NO: 122629 - DNA, 1307 bp, Homo sapiens; identical to SEQ ID NO: 49797
  chr12:63544728-63546035
  hyper

SEQ ID NO: 122630 - DNA, 1250 bp, Homo sapiens; identical to SEQ ID NO: 49798
  chr12:64061815-64063065
  hyper

SEQ ID NO: 122631 - DNA, 30 bp, Homo sapiens; identical to SEQ ID NO: 49799
  chr12:64173434-64173464
  hyper

SEQ ID NO: 122632 - DNA, 30 bp, Homo sapiens
  chr12:64173736-64173766
  hyper
tgggatgcggctgacgcggaagcggctctg

SEQ ID NO: 122633 - DNA, 330 bp, Homo sapiens; identical to SEQ ID NO: 8882
  chr12:64237614-64237944
  hyper

SEQ ID NO: 122634 - DNA, 111 bp, Homo sapiens; identical to SEQ ID NO: 8883
  chr12:64238194-64238305
  hyper

SEQ ID NO: 122635 - DNA, 99 bp, Homo sapiens
  chr12:64238523-64238622
  hyper
ctctccaaggagaacgggttgtgaccactgaacaaaacttgcccattgaaagcaaacccggaacagctggataatgtccaccccgagccgattcaagaa

SEQ ID NO: 122636 - DNA, 115 bp, Homo sapiens
  chr12:64616269-64616384
  hyper
ggtagaataggaggcggccagttccccgctctaagaagttgcctgcgctctgaggtgagctgacaggcccctctctgtgtggttcgtcagcgctggtgacgtcatgcaaacgtga

SEQ ID NO: 122637 - DNA, 393 bp, Homo sapiens
  chr12:64782915-64783308
  hyper
gacacctgtccccaacggaaaaaccaagaacacacctggagagcagctcagacaaagggagccaggcggggaaaacagtaattggagaggagaccgtgcttccagtctgttgctggtttacaaggtaaatctattcctggacgaaaggggtacaggaacagcacccgaaaaccggcgacaggctgtggcaggcccgacgtctttcaagcccagctcctagcgtcgacgcccctccttccaagacgtttcccagcaggccctgcgcccagtttggatcaagtgagccgcctgagattgccaagcgtcctgtgcgcatctcattaacgcatctgcttattcatgcatttattcttttgctggggagggggtggaggggaacggtgtctcactcat

SEQ ID NO: 122638 - DNA, 36 bp, Homo sapiens
  chr12:64783543-64783579
  hyper
aaggattataggcgtgatccacggcacccggcctta

SEQ ID NO: 122639 - DNA, 474 bp, Homo sapiens
  chr12:64784132-64784606
  hyper
ccggatggacttgggcgggttctcggttaggtagacgagccggtcgcttagcaccacatacttgaggatgtggttctcagagttggacaccacgatgcatggctcgtaggcgcggaccgcgtcgtagacctcgggcggcagatgccgccgcaggaacacatccaggcggctgttcctgcgcgcggggaagccggacggcaaggggctggccatgcccggcgcccgcagcgtggcggagtgctgggactcgaggccctcagctcgccctctccccgcccccgcgctggaacccgcgcgccacaaagccgccggccacgcgtcgcctcctctccaggcgcggggacccgggccgcaactgcaggaatcgacgctaggtcggcttccctggagcgccctccccagccctgtccagcctctcgatctttgtcctaacctcagacggcgatgggcggggcaagacgctggtccttcagg

SEQ ID NO: 122640 - DNA, 30 bp, Homo sapiens; identical to SEQ ID NO: 49806
  chr12:64798724-64798754
  hyper

SEQ ID NO: 122641 - DNA, 112 bp, Homo sapiens; identical to SEQ ID NO: 8885
  chr12:64799098-64799210
  hyper

SEQ ID NO: 122642 - DNA, 397 bp, Homo sapiens
  chr12:64845174-64845571
  hyper
ggcctgttgtgctgtccgtgggcagaagggaccccttcagaaagctattccttattgggaatagcggcttgagattttgactgcacgaatattgcaggacctaattttagtatttaagttttagttcttaaattcttaagtttagagttagatactccaatacggccgttttccaaaataccgagagggaattaaatgaacatttttacattaagaatttaatgtatttctgggtgatgggaaaatgaaaaaaacaatgtaaagtctgaattactgcgagacgataatctggctccactgcagccaaagtgggcccttaaaacatagaatccatccctcccagctctgccggccgtctgtgcctgccccccacgtgtcccacgttctgcacacctgt

SEQ ID NO: 122643 - DNA, 30 bp, Homo sapiens; identical to SEQ ID NO: 8887
  chr12:64845921-64845951
  hyper

SEQ ID NO: 122644 - DNA, 30 bp, Homo sapiens; identical to SEQ ID NO: 49810
  chr12:64846195-64846225
  hyper

SEQ ID NO: 122645 - DNA, 59 bp, Homo sapiens; identical to SEQ ID NO: 8888
  chr12:65002988-65003047
  hyper

SEQ ID NO: 122646 - DNA, 30 bp, Homo sapiens
  chr12:65004274-65004304
  hyper
gattgagcggcggccgcagctgcataagga

SEQ ID NO: 122647 - DNA, 103 bp, Homo sapiens
  chr12:65153388-65153491
  hyper
aaccgggaaaagggcggagaaccgggaaaaggtcaagacctgtacgtacctctcgcgcaggctcgggttgcgttctggtaggacgtacgtgtttctgagcgct

SEQ ID NO: 122648 - DNA, 315 bp, Homo sapiens
  chr12:65174360-65174675
  hyper
aggtagctcagtggcgtggcagtctccttctcgcccggtccggagcggaggggagcggctcaggtgccggctcgggggaggcccgggcacctcggggatccagagcccgctggcgccgcgcccgggagggcaccaccggcgaggacgaagccgcgcctcctcccggaactggccggcgccgcgaggcgggaggagcagcgggagccgggcagccgcgcgccggggaccatggacgtccttcccaccggcgggggccgcccggggctccggacggagctggaattccgcggcggcggtggcgaggcgaggctggag

SEQ ID NO: 122649 - DNA, 30 bp, Homo sapiens; identical to SEQ ID NO: 49814
  chr12:65175281-65175311
  hyper

SEQ ID NO: 122650 - DNA, 231 bp, Homo sapiens; identical to SEQ ID NO: 8890
  chr12:65218319-65218550
  hyper

SEQ ID NO: 122651 - DNA, 627 bp, Homo sapiens; identical to SEQ ID NO: 8891
  chr12:65218900-65219527
  hyper

SEQ ID NO: 122652 - DNA, 186 bp, Homo sapiens; identical to SEQ ID NO: 8892
  chr12:65219605-65219791
  hyper

SEQ ID NO: 122653 - DNA, 368 bp, Homo sapiens
  chr12:65220106-65220474
  hyper
gtttcactatgagaaggcaatcggcatgatgcccagcaggtgccccggaaaagtcagaagagcatattggtcagacatacagggaatccttgtagtgtggcaagaataagtcagcgcgggaccgaatttcctggtctttgttatcaagcaaacgtcatgattatacgctcctccattcagcacctcgcgtccggacagcaacctcacttgttttcagcgtgccttaaagcgtgcgctgggctggaaacactcccgtggccgttgttatcaccgttctatgtttgggcaggacttcgtttaaaccacctcagagagaggcggatccatgtggtacttaatattccttcggagaaaaaaaaaacttatct

SEQ ID NO: 122654 - DNA, 692 bp, Homo sapiens
  chr12:65514781-65515473
  hyper
gaggacataggcaggggaaggcgctggaggcgggggccttacctatgagtactcttgcctggtgagcatcgatccataggtacaggctctcctcctgcggcggcccggcctccgcccgcagtgccagcaggcacaggaggatgctccagagccagagcgcggcggcagggaaggcgctcctccgggccatgctgctcaggacctcctcgctgccgggaaaactcctcgtgccgcacctacgcaacctggcgccgtcagatactctgctgcgctgcagctccctcagccagggctgttcccgtttagacggctgggcgcgtcgcctcccggcctgggtgccaaggagcctgcgagagcaggaggagggggcaggcaggacgcgggaggaggagggggggaccagcgggcgcgagtcgcgcaagaagatggggcgcgggcgggagtgggggcggcagagacgtaagactggcaaagctggcgaggccagcagtcagcggggcaaatagagcgagaacagaagagcgggaagggctggcgcgagcgaggtgcgagcgaggagtggggcccgcgaggcctgggcggccgccacttgggggcgctgtggggcccccccgggggcggggccgcgagggacccccgaggctgcattcacagtgcggtgcgcccagtggagcgcccgcgaagtgggcgtg

SEQ ID NO: 122655 - DNA, 272 bp, Homo sapiens
  chr12:65564380-65564652
  hyper
agaggcggcggccgcggagcagggaggagggtgtgatcaagtggactccagccccgttcctagataccgtgttaacgctaagaaactgacccctctcctgcccccgccacttactgacatggactcaaccttggattcgtcaacaggctcccttctgaaaaccaataatcatattggcggtggggccttcagtgtggactcccccaggatttattctaacagtctccctcccagtgcggcggtggccgcctctagttcactcaggatcaatc

SEQ ID NO: 122656 - DNA, 50 bp, Homo sapiens; identical to SEQ ID NO: 49821
  chr12:65564722-65564772
  hyper

SEQ ID NO: 122657 - DNA, 30 bp, Homo sapiens
  chr12:65672873-65672903
  hyper
ccgccgaagggaggcgtctggcagcctcac

SEQ ID NO: 122658 - DNA, 30 bp, Homo sapiens
  chr12:65673207-65673237
  hyper
ctgcgctgctgccccgctgctgggccagac

SEQ ID NO: 122659 - DNA, 513 bp, Homo sapiens
  chr12:66122482-66122995
  hyper
attaactccataatcgctctgagattgaattcagtgacaccgtttaactgcttctggtttgggggcttttactcgatatttttaggtaaggagctgtcaggctaatctgaggacatttagggaaagccaataaactgtcacgaacttaaaacaagtgaggtttctcgtggtttggtcgaaattttaacacttctcctctcctacccttcacctcttctcctcaaaacacttttttttcttttacaataactgtaaatgccagctctaaatttccctccaatctgggaaagtccaatctcccttcctcgagaggtgtctgggcgcaatactctccggcccgaagcaaggggacgtttgcgaggagggagaaatttaaacccccttcgctccgcgccacctgggagcactttggcgccgcagactcaggagccgacgccatctccaggacggcctcggtggcctcggcaggaggcaccttcggggagcggtcccgcactcctccttcctcagtcc

SEQ ID NO: 122660 - DNA, 15 bp, Homo sapiens
  chr12:66123380-66123395
  hyper
gggaggtggagcacg

SEQ ID NO: 122661 - DNA, 1209 bp, Homo sapiens
  chr12:66135073-66136282
  hyper
ggtgtccgggaccaccggccttagccttctccaagcccagggcagggcgagaagaacatggcccggttcccctcggggtctctggcccagctgcggagggggaaaggtgatcgatcttgctgggggccaccgctagcccaccgcttcctgccgcgacctgccgcggcggccggagcccgggagcttcccattggctcacgggccgacgccatgcagtctgggggggcgtggccgggcggcggggcgtggccaggcggtgcggggaactgcggagagaggagaggagaggagaggaggggaggggaggggagaggagtggagaggagaggaggggaggggagggcaggggcggggcggggccgggcggcgggggcgcacaccccaatctccctagcgctgtgggggtggctgcagctccccgcgcgctccctcctttgggggggtttctgggctcgtgacttttttttaaataaagaatgagcggatgcccgtgacaagttaatagctctcgccgcgctctaaagttaagttgtatctccttcccgccgcgagtctccttccacagacccgccggagctgccgggacgggcgctgcgcgggactgggcgttaggtgctcccggctggttccggcgagcagcccccacccctcgcccacgctcggggttagagaccccagcaccccacgcagacggcccgggcttagacctctccacgtcgctgtggcgcgcgccccgccaacacccccaccccacgcgcagcccgtgtcttctttacccccgcgcacttaacgcagggcgcacgcacgcatcccggccccctcacactcacactgcgtcttctgtcacaccccctgtcgcacacacactgttctctgactcccaccatctcctgtctcacacccactccagtttcgtgttgagcggccgccagttctccctcggtcgcgccggcgcacgctcgtccccttctgccccggagcccgcccgcgccgcacggtggccccttgcgctggcctgatcgtgggaaccaggcggggccccagcgtccctgcccctgcccggtcatccatctccctcccggtcggccagccgagacttcaaaggcgcctcctccggccgggcctgccaaaccccgacgcagcctggatgtgggccgggggcgctccccggcggggggaggccgggccagggcgcgtctggggccggct

SEQ ID NO: 122662 - DNA, 448 bp, Homo sapiens; identical to SEQ ID NO: 49826
  chr12:66216561-66217009
  hyper

SEQ ID NO: 122663 - DNA, 1125 bp, Homo sapiens; identical to SEQ ID NO: 8899
  chr12:66217365-66218490
  hyper

SEQ ID NO: 122664 - DNA, 1785 bp, Homo sapiens
  chr12:66218549-66220334
  hyper
gcagggtggggggaagaggaggaggaattctttccccgcctaacatttcaagggacacaattcactccaagtctcttccctttccaagccgcttccgaagtgctcccggtgcccgcaactcctgatcccaacccgcgagaggagcctctgcgacctcaaagcctctcttccttctccctcgcttccctcctcctcttgctacctccacctccaccgccacctccacctccggcacccacccaccgccgccgccgccaccggcagcgcctcctcctctcctcctcctcctcccctcttctctttttggcagccgctggacgtccggtgttgatggtggcagcggcggcagcctaagcaacagcagccctcgcagcccgccagctcgcgctcgccccgccggcgtccccagccctatcacctcatctcccgaaaggtgctgggcagctccggggcggtcgaggcgaagcggctgcagcggcggtagcggcggcgggaggcaggatgagcgcacgcggtgagggcgcggggcagccgtccacttcagcccagggacaacctgccgccccagcgcctcagaagagaggacgcggccgccccaggaagcagcagcaagtcagtacgagggcgcggtgggggcaccagcccaccccgtccccactgccggggcccagacacgcgcggggcggccggagtgcgggagcccagtcgccgcggccgtcgcacactgcccgccggccggccggggggagcggcgcagaccccacgagtgcgccgcgcggccccggggcgccagcaaccctccgggcggggaggtggggagccgcggcgggcggcccggggaaggcgggaggtggggtcgggcgaagcgcgtcctcggactttcgctattgtgcacggccccgagtggcgcggtgtcgcccagtgactggaagcgaccgggatccgacaaacccgggctcgcaggcgctttccgagttgcttttgcaactgcccgggaggaaggaggtgccggggacccgggcgcttcggccgatctgggctgaaggggctagagtcttgggggccggaggctctttctcccgcctcccggggctgctcgcgggtcgggggctggcgcgccgcagccgcccccttggcgccctcctccaagctctcggtggcccaagactcgcgccctcccgacaaagaacgcatggagacccggctgcctggtcctttttgggctctttaaatatgcggcggccgccggagggagcccggggcaggggctacggggagcctggttccccgcaggacggggttaactcgcccagctaagggcgcgttgaaaggagtgtccaagagagtgcagggtagccagggtcgcttccttgtcaggggcccggtcccccttttgcccctggatctcgcgcctcagagctgcagccattaaatgctcttctccaaggccagtggccgggggttgagtaggggacgatcgaggggcgcccgggaccctgcggagtggagggttttgtctgcggatgcaaccaattaagcgtgcagccggcgcttgcagagctgcgctcagcgcgcagggctgggggttttgttcgctgtaatttccaagccgcggcgggcagagttggagcgggatatgtctattgagaacatttaaactccactttctcgggctttaaaacttgctctctgcttagtcttaaatcgcttccttcatggcaaacacgccgattagaaaataatcctagagtcccaaagttgtccgagagcaaggtggggaaactg

SEQ ID NO: 122665 - DNA, 101 bp, Homo sapiens; identical to SEQ ID NO: 8902
  chr12:66300831-66300932
  hyper

SEQ ID NO: 122666 - DNA, 239 bp, Homo sapiens; identical to SEQ ID NO: 49830
  chr12:66563704-66563943
  hyper

SEQ ID NO: 122667 - DNA, 607 bp, Homo sapiens; identical to SEQ ID NO: 49831
  chr12:66582758-66583365
  hyper

SEQ ID NO: 122668 - DNA, 342 bp, Homo sapiens; identical to SEQ ID NO: 8904
  chr12:66629082-66629424
  hyper

SEQ ID NO: 122669 - DNA, 292 bp, Homo sapiens
  chr12:66696077-66696369
  hyper
ttcctgataatcaccgcccagcaccaggctccaaaaggagcggaagccccgcccatctcccagcccctcgctctcccttccccgcccctaacccgccttgccccgccccttccacatgccctcccctcggcaattcctggaaacttggggcggagcttcgctgcctttcaggttttatgtacgctggcggccgccaggccgttcccggaagttgatggccttacagtcgtagaactgattggctgatcatgaccatgcagttagccagggttttcccgagttgtttgggttg

SEQ ID NO: 122670 - DNA, 528 bp, Homo sapiens
  chr12:68041629-68042157
  hyper
gggaaagagatgtgtcgggtggggtgagaggaattcgaggtgtcgctccctcaccgcagagctgaaaggaaggtgtgtctctcccagtggccgcgcaggggaaaggctcggagttgtaaggaaataggagatgtctctgatgtttatttttgcctagcaacccacagccaactgcttccccagctgccgtccacacgcgcctctctgcctccccttgtcctagcgactggcgagcggtcacttggtgtcagtaaaccggggagggtgtgtggtggaggtgggagggcagccccctctttcgcccctgctcagggtcaacgagctcagcggccgcccctcccgggacttgcctctccgaggtgaccctcgcacaactaagttatctacatgatgaattggggagaggggagtggctaagtcgctgggaccaagaatggggggacggggaagcagtactgtctgtgagcagccattcagttcgaagagctgaaaatgcatttatgtttaggggtgcgcatggcaggggag

SEQ ID NO: 122671 - DNA, 30 bp, Homo sapiens
  chr12:68043546-68043576
  hyper
cttttgtctcctcccgcacgtggcttccag

SEQ ID NO: 122672 - DNA, 30 bp, Homo sapiens
  chr12:68043860-68043890
  hyper
tctctcgtcgacgccgccctggttaagttg

SEQ ID NO: 122673 - DNA, 35 bp, Homo sapiens; identical to SEQ ID NO: 49833
  chr12:68617123-68617158
  hyper

SEQ ID NO: 122674 - DNA, 30 bp, Homo sapiens; identical to SEQ ID NO: 8906
  chr12:68726213-68726243
  hyper

SEQ ID NO: 122675 - DNA, 30 bp, Homo sapiens; identical to SEQ ID NO: 49835
  chr12:68726459-68726489
  hyper

SEQ ID NO: 122676 - DNA, 498 bp, Homo sapiens; identical to SEQ ID NO: 8907
  chr12:68758755-68759253
  hyper

SEQ ID NO: 122677 - DNA, 30 bp, Homo sapiens; identical to SEQ ID NO: 8908
  chr12:68933051-68933081
  hyper

SEQ ID NO: 122678 - DNA, 30 bp, Homo sapiens; identical to SEQ ID NO: 49838
  chr12:69004852-69004882
  hyper

SEQ ID NO: 122679 - DNA, 30 bp, Homo sapiens; identical to SEQ ID NO: 49839
  chr12:69005089-69005119
  hyper

SEQ ID NO: 122680 - DNA, 30 bp, Homo sapiens; identical to SEQ ID NO: 8909
  chr12:69005423-69005453
  hyper

SEQ ID NO: 122681 - DNA, 65 bp, Homo sapiens
  chr12:69080590-69080655
  hyper
gcgtctgggctaaacgcaaccaggaacacattggcaaacttttgcgcctgcgcccaccgggcgtg

SEQ ID NO: 122682 - DNA, 48 bp, Homo sapiens
  chr12:69080865-69080913
  hyper
ggtggcagctgagcccgaagtcttgcccgtctcgcctgttggcgaaac

SEQ ID NO: 122683 - DNA, 30 bp, Homo sapiens; identical to SEQ ID NO: 49843
  chr12:69139773-69139803
  hyper

SEQ ID NO: 122684 - DNA, 30 bp, Homo sapiens
  chr12:69140003-69140033
  hyper
gagtgctactcgcccggggttgatctgtgc

SEQ ID NO: 122685 - DNA, 30 bp, Homo sapiens; identical to SEQ ID NO: 8910
  chr12:69201648-69201678
  hyper

SEQ ID NO: 122686 - DNA, 30 bp, Homo sapiens
  chr12:69202045-69202075
  hyper
ccgaggggcggccgcgacccctctgaccga

SEQ ID NO: 122687 - DNA, 30 bp, Homo sapiens
  chr12:69202443-69202473
  hyper
tggggctaggcagtcgccgccagggaggag

SEQ ID NO: 122688 - DNA, 40 bp, Homo sapiens; identical to SEQ ID NO: 49845
  chr12:69241506-69241546
  hyper

SEQ ID NO: 122689 - DNA, 934 bp, Homo sapiens
  chr12:69326513-69327447
  hyper
acagtcttcaaaaacgcttccatcccttcctggcggtggtagttgaaatccagcgcagctaccaaaggcagcaacagccctagccagaggcacgggaagtccatgttctagagatgaataaaaataagaagaacctgagaacacatgagggcaggcgggggcatcaccagctacgtctcggtactccggtctcagggtctcccgacactgacgctccctgcctcctaaggaggcaaaagctggaagcaacaccttcgggagtgagccgtgcaaccagagaccgggagcacgggcagcctcggtgccctcgacccagccgcccgcgcctccctctcctcctcctcctggcgcctccgccgtccggcagctgccacagctgcgcccggccccgcgcacccccagcctcaccaggtcccaggcgcgcacctctacccacccgcggccgcccggcggggccgggtgttatagcccggtcagagggcgggcgcgcccgggccccgcccccggacgtccctccggcccactccggagccgcgcgggtgcctcccgggcggggcctcagccgccttcgcacctaggagagacggcgcccgcgcggtgcgccctttcgtggcgcggctgctggtgcccgcggccgggcggctgagctgggcggagggctgcgggcatggagtcgccgctcgcggacagtctttgctggagccccaggtcagaagtgtgtcctcgcctcggccacggctgtagcctgggcagccacagggcgctccaccgagggacactctctgtcgcagactgcagccgcttgggagacgtttagggctcggcgggtttcctgcggttggcggtgccggggcccacctggagccgggacgcatgcggagtcctgagtgccctgagccccgcgcgggctcctgcgggacgggcggcgtcggcc

SEQ ID NO: 122690 - DNA, 153 bp, Homo sapiens
  chr12:69548453-69548606
  hyper
tcctcgattttcccgcgtgcgttacacaaactacactttgacatatcacaaagacaactcaagccaccatttcataggctgcatgtgaccttccttccctcaggtttccaggggacacttgaagctaccacaaggtggcgctgcctgccatcc

SEQ ID NO: 122691 - DNA, 166 bp, Homo sapiens
  chr12:69550939-69551105
  hyper
tgaaacagaagcctacggggaggaggaagtcccttccctcctccagccttgcagcctccctcgagtgccccctggaggcagagcctagcagcgagccagcaggctgagcagaaacgcggcttccggagtccgagcctcagcatcacaaagccgaggtagaaaattg

SEQ ID NO: 122692 - DNA, 30 bp, Homo sapiens
  chr12:69633135-69633165
  hyper
tgctaagctggatgcgcgagtaggacaaaa

SEQ ID NO: 122693 - DNA, 359 bp, Homo sapiens
  chr12:69724878-69725237
  hyper
cggcgggtccctgggcggtagctgttttactcttgtaaaagcgctgccttttgcctgtgctggctctgtttctgtgaacttccgggctgccgagcctttctttttatttactgcttgctcggctgcacggctttcggctcctaatgccttttttcttatctttttataaacatacacctgattgccttgccgattctgcattactgggcagagtaagagctctgcttctaatgctgcccgcttaagacagggactgatagctgtagcatatcctaggtcttttttcctatctattggaggaggaggctcaggtataaacccccgtttcctctgttatttcggcccggtgatattagggt

SEQ ID NO: 122694 - DNA, 30 bp, Homo sapiens; identical to SEQ ID NO: 49847
  chr12:69864062-69864092
  hyper

SEQ ID NO: 122695 - DNA, 30 bp, Homo sapiens; identical to SEQ ID NO: 49848
  chr12:69979607-69979637
  hyper

SEQ ID NO: 122696 - DNA, 208 bp, Homo sapiens
  chr12:70133406-70133614
  hyper
aaattccgggcaggcgcccggagtcgcgcccaagtaggcagctccgtgccgccagacttgtgttcgggggagttgagacgaactgcacgggtgggattgcatggctctgccctcccagcgttgacaactcgccccgaccgcccaggaagcgcgagcttactggctccagaagtgatgatgctgggtggaagtcgcagcatgtgaagag

SEQ ID NO: 122697 - DNA, 30 bp, Homo sapiens; identical to SEQ ID NO: 49850
  chr12:70636633-70636663
  hyper

SEQ ID NO: 122698 - DNA, 200 bp, Homo sapiens; identical to SEQ ID NO: 49851
  chr12:70637716-70637916
  hyper

SEQ ID NO: 122699 - DNA, 116 bp, Homo sapiens
  chr12:70759014-70759130
  hyper
agtgggtctgcccggcgctgtcgctttaagcagcgctcctggaaacctcatctacaaatcctggggcgggtcaggggtggcaagactcctaaggagggaaacgacagaaatgattc

SEQ ID NO: 122700 - DNA, 9 bp, Homo sapiens
  chr12:70759855-70759864
  hyper
tctttcatc

SEQ ID NO: 122701 - DNA, 750 bp, Homo sapiens
  chr12:70760475-70761225
  hyper
gggcggggggagcacgccagccgccgagagtggggggcgatggcgaagctccgggtggcttacgagtacacggaagccgaggacaagagcatccggctcggcttgtttctcatcatctccggcgtcgtgtcgctcttcatcttcggcttctgctggctgagtcccgcgctgcaggatctgcaagccacggaggccaattgcacggtgctgtcggtgcagcagatcggcgaggtgttcgagtgcaccttcacctgtggcgccgactgcaggggcacctcgcagtacccctgcgtccaggtctacgtgaacaactctgagtccaactctagggcgctgctgcacagcgacgagcaccagctcctgaccaaccccaaggtaagaacgccccgcgcacccaggggctccccgcgagggaggtttggaggcagcgtcggtgttagactccgcgcggggagggttcggcgtgtgctcgcattgctaggaggagaccaggtggcgcaggctgtgctcaaaccaggaatgactacatcagggagccccagggctccggtcttttcaggtgggtttacgcgcggcgaccagtggtgcccagaggcttactttaaaacctgtcttgcctggtctcagattttgaggcctcgacccagtccgggtcctgcgcctaccggactgggtttggagaagtgcaaggagccaagaaagttaacttttcctccatttaaagccagtggttagcggggatccacctac

SEQ ID NO: 122702 - DNA, 588 bp, Homo sapiens; identical to SEQ ID NO: 8914
  chr12:71003554-71004142
  hyper

SEQ ID NO: 122703 - DNA, 435 bp, Homo sapiens
  chr12:71314192-71314627
  hyper
ggagaaactccaccacgaccccacttcaggtaaagtgctattagaaagagccaccgccaagggtcttctagtctccgggattcaggtcctcggctggggtttgcagagcagtcagtctgtggcgccgacagaaaccagcaccagcttcaacctccctaagagagggagagaggaagagcagtaggaggttgcgggtaaggggaacagaagcgctcagaggcggcaaatgcctggccttctggacgcccagaagccaaggcggagacggcagggtggactccgcgccagcccagcagcccagcagcagcgccgcggctactgagcatgcccagcgccggccctcacgaggcaagggaatttcaaagtgaaattccgcttctccgggtcttagcggcggcttggagcagagtaggctccatcgctggggtggtggtt

SEQ ID NO: 122704 - DNA, 2095 bp, Homo sapiens; identical to SEQ ID NO: 49856
  chr12:71833002-71835097
  hyper

SEQ ID NO: 122705 - DNA, 30 bp, Homo sapiens
  chr12:72056607-72056637
  hyper
agtcttaagaataacgctatagtgtgacac

SEQ ID NO: 122706 - DNA, 30 bp, Homo sapiens; identical to SEQ ID NO: 49857
  chr12:72057675-72057705
  hyper

SEQ ID NO: 122707 - DNA, 30 bp, Homo sapiens
  chr12:72057978-72058008
  hyper
ctccctcttgggggcggggagaaagaacgg

SEQ ID NO: 122708 - DNA, 30 bp, Homo sapiens
  chr12:72058279-72058309
  hyper
ggaaagggaaatgccgaccaattgcgctgc

SEQ ID NO: 122709 - DNA, 30 bp, Homo sapiens
  chr12:72079689-72079719
  hyper
gtttaactttacctcgctagcagccaggag

SEQ ID NO: 122710 - DNA, 30 bp, Homo sapiens
  chr12:72079991-72080021
  hyper
tcagccgcgtcgggcgtgcttcccagactt

SEQ ID NO: 122711 - DNA, 30 bp, Homo sapiens; identical to SEQ ID NO: 8918
  chr12:72080236-72080266
  hyper

SEQ ID NO: 122712 - DNA, 129 bp, Homo sapiens
  chr12:72148401-72148530
  hyper
accagagctgggctcgcctcaaattcctggttccttattcccgctggctcccaccaactgaaaagcagaggtggctcgcaagcggcggggctctgccctagattgccagtaggcgctcgactcacatcc

SEQ ID NO: 122713 - DNA, 30 bp, Homo sapiens
  chr12:72149014-72149044
  hyper
gtgctgcgctactgcgagaacaagtttaac

SEQ ID NO: 122714 - DNA, 167 bp, Homo sapiens; identical to SEQ ID NO: 49859
  chr12:72234298-72234465
  hyper

SEQ ID NO: 122715 - DNA, 249 bp, Homo sapiens; identical to SEQ ID NO: 49860
  chr12:72332524-72332773
  hyper

SEQ ID NO: 122716 - DNA, 796 bp, Homo sapiens
  chr12:72665235-72666031
  hyper
ctgcggggcttgttgcgctgaagatttacaatgtacttcttgcaggcggctcagcaaccccctctgtggctgtgggtgtctggtgtgacagagcggagaaaagctctctaatctcccagtgcctgcctctgccgctcagtcgctcccctccctcccgcctttcctgcctcctcgcgcgctccctctcctttgcctttctctgggagtttcagtccctcaatgcagctggagtagccctggcaatctaaacccgaagcctgtgtatatacacacacgcacacacgcgcacacacatgcacacgcgctcggacatacgcacttcggctctcccccttgggatatggagcaaacccagagcttcatctacctgaaggggatggcccggccggacacttctttctcacttgtcatctccggagggcagagcaagactggaatgagggagtctcgctgtcgggtctgcaacctcctgccgtttgccgccaccgccgcttaaagtgcccagggtggagaaggcttttccaggacggatctccgtcgtagcttcgcggccctgggacttcctcctgctggttcactctagtctctcccacctcggccatccttttctctccagctgcagggtgtatggctcgggtgcctcccgtgctgtggccgccgtcactgctgctgcgagcacattccacccagaggaccgaacgccgccgctggagtggggggagaaagcgaaagccctaacttccctctctacaccctcgctcttcccaccgctcccgtccttctccctagccgagaa

SEQ ID NO: 122717 - DNA, 465 bp, Homo sapiens; identical to SEQ ID NO: 8921
  chr12:72666342-72666807
  hyper

SEQ ID NO: 122718 - DNA, 961 bp, Homo sapiens; identical to SEQ ID NO: 49863
  chr12:72666997-72667958
  hyper

SEQ ID NO: 122719 - DNA, 501 bp, Homo sapiens
  chr12:74931274-74931775
  hyper
ctaaaatgatgtttcgaatcacaccacaacagtgcatataattattaaaattttccacttttcagaggatatcaattaagcgtggctgctgaattcattagcgaatgtttaaatttacaaataaagtaacataaaatagcatcctcgcaattttttaataatcagagataatggaagtcatacactaagttcatcctgttccttttcataaactcaaacgctctcaaagcagcagcgcgttgagaagccccaagagtctgcgcggaaccagtgcgcaggcgctctgaggggcggaagcggagaggcggggctaggcccgacaggggagcggaagaggcccaggaggctgggtgaggcgctgagacggtttggcggtgagtcctgggccaggcgcagctgaaaggcccgcaacccgggaaacgtcaaaacaaacagaaggacttgggattccggagcagtcgcccctatcgctgctcctgcagttgcggacgccaccgaccc

SEQ ID NO: 122720 - DNA, 23 bp, Homo sapiens
  chr12:75601207-75601230
  hyper
ccaggtcctcgtcgtcgccgggg

SEQ ID NO: 122721 - DNA, 121 bp, Homo sapiens; identical to SEQ ID NO: 49865
  chr12:75601378-75601499
  hyper

SEQ ID NO: 122722 - DNA, 254 bp, Homo sapiens
  chr12:75601695-75601949
  hyper
cggtaggtttcgtgccgggtgcccccgacattgaggatcaccctctcgttgttctcgatcttgcccatctctgtgactcagacatgactagggggaggcaaacacagcgccgagttaaagatcttagccgtcaaagacacaccatgacccccaccaccaacccagagcgagtccagggatgcagagttggcagacaggcacggggcaaagaccctccccgggaggggatcagcgtccagcgctgtccccgcctc

SEQ ID NO: 122723 - DNA, 503 bp, Homo sapiens; identical to SEQ ID NO: 8924
  chr12:75602928-75603431
  hyper

SEQ ID NO: 122724 - DNA, 230 bp, Homo sapiens
  chr12:75723897-75724127
  hyper
gacgaaaaggtcgtcggcccaagtcccttgttcgttctacgccacctcccgcccccgccaatctgcctcctcagttccgctgcctggctgaccggaactgagcttgtggccggagaccccgccacgctctcagaagtacttgctggctggaaaacccaaaggggtgaaacctcagctacagccgccgcagcctcccagggaaccggctccgcggcgcccctaaaccccgg

SEQ ID NO: 122725 - DNA, 443 bp, Homo sapiens; identical to SEQ ID NO: 8925
  chr12:75728067-75728510
  hyper

SEQ ID NO: 122726 - DNA, 30 bp, Homo sapiens
  chr12:75904989-75905019
  hyper
cttacaaggttctgcgtcgccctaggcatt

SEQ ID NO: 122727 - DNA, 147 bp, Homo sapiens
  chr12:75905414-75905561
  hyper
ttcttaaaccctaccggctaaaacgcctacactcaaaatgagttccgcggaactcagacgaggagatctgcgcagtctccgtgcgtacgtgcgttaagcccgcgcttttacacaaaccacagcttctcctacgtggccaatgaagag

SEQ ID NO: 122728 - DNA, 30 bp, Homo sapiens
  chr12:76328378-76328408
  hyper
ttcgaaatagccccacgataatgtcaatga

SEQ ID NO: 122729 - DNA, 30 bp, Homo sapiens; identical to SEQ ID NO: 8926
  chr12:76424958-76424988
  hyper

SEQ ID NO: 122730 - DNA, 183 bp, Homo sapiens
  chr12:76425499-76425682
  hyper
cggcagccggcgcacgcctcattaacttggggcctttccaaagcccgctgcgtccacgccctccagcgtctcttgctccgcctctcgccgcccacttgcttccgcgctcgttcccctggaaggcgacccggacccgagccccggaaactcctctcctctacccagggcgatcgcccaaggagc

SEQ ID NO: 122731 - DNA, 158 bp, Homo sapiens
  chr12:76426119-76426277
  hyper
ggacccacgtcaggtcgcatctcgcctgcttttctcgaccccgaccgcaggcgctaacccgtcttcggctttcttcttgacccgtacggtttgcaacgtctcttaaaacagtaactcaactctctacaaaccggggtaatatccggtgctgagatccc

SEQ ID NO: 122732 - DNA, 218 bp, Homo sapiens
  chr12:76742082-76742300
  hyper
tcggccacctgcaacgccgccttcacagaccctgcagcggccatagaacttaacatatctgggccgcttcccctttttgaccagcttgcagaacacccgggccgaccgaaaacaggggtgggaacggccggaaacggaataggcggggagaaaacccggaagccaggagtcgaagccggggtagcacggcttcttggttgggcgagagggctgccctt

SEQ ID NO: 122733 - DNA, 219 bp, Homo sapiens
  chr12:76952932-76953151
  hyper
ccgttcccctgccgcggcttttgtaaggctgcagatgcacctactgtgggcccctaaacactccaccctgccagcctttccaatccccctactccaaaagggaacaaaggagccaaagaactcctcggcgggggtggccaggagtccccgacagcccgagctcagaacgtggcaataagggtgcgcagtcgccctgaggggtgcgaacccagcacccca

SEQ ID NO: 122734 - DNA, 305 bp, Homo sapiens
  chr12:76953528-76953833
  hyper
atccgccgcgtcgccgcctttctgggcacccagaaccgcgaagatccttcacattctagtgccctccccctgccccgcccgccccccggatcacgggcttcggccacgccctcttcccgtcacgtgacggtgcgcggaggcggtggtggagttgcttcccctgctaggcgggctcgaaccgggcgggagtcactgtccaccttgcttcgccagggtgttatcgccagccagtccccttccgcatgcccaagggcagcctcaggaagcgagcccaccaccgtcggcccagcgcctgttgatcggcc

SEQ ID NO: 122735 - DNA, 85 bp, Homo sapiens
  chr12:76954039-76954124
  hyper
tagtggcacattaaccgtggcatttaatttactgctttcctcattagaggtttttttttttttgaggaaacggtgtatttcaatc

SEQ ID NO: 122736 - DNA, 30 bp, Homo sapiens
  chr12:77157461-77157491
  hyper
aatgatgcaggtctcgactcaagcctgacg

SEQ ID NO: 122737 - DNA, 30 bp, Homo sapiens
  chr12:77158129-77158159
  hyper
gattccttgccctgcggccctccagccttt

SEQ ID NO: 122738 - DNA, 30 bp, Homo sapiens
  chr12:77271913-77271943
  hyper
agaaagcccgcccccgcccccagggggtgc

SEQ ID NO: 122739 - DNA, 30 bp, Homo sapiens; identical to SEQ ID NO: 49873
  chr12:77272157-77272187
  hyper

SEQ ID NO: 122740 - DNA, 115 bp, Homo sapiens
  chr12:77272743-77272858
  hyper
gcaggcggagctagcgaggctgggctggagggagggtccagggagtccgagatcccaggcgaagcgcgcgccggtgccttttaaagagcgctcggtgggcgcggcctgtgtccgc

SEQ ID NO: 122741 - DNA, 30 bp, Homo sapiens
  chr12:77273304-77273334
  hyper
acttccctagttaacgcatattctctcgtc

SEQ ID NO: 122742 - DNA, 30 bp, Homo sapiens; identical to SEQ ID NO: 49875
  chr12:77459926-77459956
  hyper

SEQ ID NO: 122743 - DNA, 342 bp, Homo sapiens
  chr12:77718708-77719050
  hyper
gcgggctgctaggtggcggcggcgcggggcggggaggcgcggcccggcggaggagggaagaaagagcgagccgggccgggagaggcgccgcgcccggtcccgcgcccggtcccgcacccgctctcagcggcccaagcagtttctttctgggtgacaagaatgtgcctcggttggtttttcttttttttctccatctccttaagacgatttccatagtaacctgatcaagtggctcaaaatcgcaaacctgaggatttccgcggcccgccggcaagacctcggccaggtaacgctgcgatctcctcctcttccattgcaaaccgctgcgctccttgcaaagtt

SEQ ID NO: 122744 - DNA, 435 bp, Homo sapiens
  chr12:77719311-77719746
  hyper
ggtcctgggagtggcgggttcggatgggctggctgcggtgggccactttgggcatctcggcgtggcctgcgccggggtcacggggagggctgtcagcgccagggcggcggaacccgaggtctccagacgagtgagggagggatgcaggcttgggggtgatggagcgcttggctggtggctggtgagcgtccatacatcatagctctccttcccactcccccgcccctcttcgggattctctctttctctttccccgtcctcatttctttcttcctttactcaccactcgcttcattctcttccttccatttcctctttttttctcccctcatttcctttttttcctttcccttttaaagaaaggggaatcgtttgtaaccctttcgttctaccaacgtggaatagctgtgaaacctgcagcgtggtcacctcagc

SEQ ID NO: 122745 - DNA, 30 bp, Homo sapiens; identical to SEQ ID NO: 8932
  chr12:77928810-77928840
  hyper

SEQ ID NO: 122746 - DNA, 1537 bp, Homo sapiens
  chr12:79257341-79258878
  hyper
ccgcccctagcctggcgcgcggtcccttcccccacccgctgagccttcctgttcggtatttcggtattaccaagctataaattgcctgagagcttagagacaatcaggtcaccaccgccctcacaagagaaaagcttcttacttccgagcagaacggttcagctgggaagagaggaagcagggagagaatctatgctttagtcgtcactgctctggcaaggggtcgagagagatgggggagggaggtggcaaaaaataaaaatgaaaaaataaaaaagcatctccaacaatgttgcacttgacccaagtgtacaaacttattggtcgctgcaatggaaactcccagtgcactctccacggcctggcagccgccgctgatgggtggagtcgcgctcccggccccacctatgggacggagctgcttctcccgcatctcggctccaccgcacccttcgcgggaagtccccaggcttccagcaaagctcagcttatcccgcccccgcttccaacccggaaccccagaagaacagcatgatgagcctccggcagccaggtgggccacctccccgcggctcagtttgaggacacttgtgcggaaccctttcacatccccaccctacccagctttcacaactccgccgggttaaatggccaaagacaaacttctacctctcctgtccccggtcccagcttttcaaaaacccacagctggcgaacccacacacatcgaaactcctaggtcgctgttgcagtctgggcatgctcagtatcagggtaggttttgattgagagtaaaaaaaaaaaaaaaaaagctttgtattatgctctctttctcctgtgcatactgcttgctgaacagcttgtggggcattcctgagtctacctagaggttttatcagacgcccttgattgtgtctccttgggatctgttcccctcttacttcaccccctcccccaacccgcctccaccccgcttcccaggtccctgtccgctgtggggatggagagacactaacagaactgggatgggcgatgttggctgaacggatccacctattattagtgcgcggggattggctccttggcgcagcgtacccgaggtggagccaatcaggatgctggggctcggagatgatgggcggccgcctcctcactggagggattcctggagaagctgcagtgtggggatgctctagaccgagtactgcccccagtgtctttccacctcctcctgcagcagcggcagcggcagcagcagttagcagcggcaacttgaggctgcaccccgggcaagtccccagggtggtgctcagccgagaggggggcttggcgccccgaaggggtgtgtgtagggtgggggcgaccacgtgggaccagctggtggccctggaaaacctcccacacacccacacccacacaccccttttgtgttgcaggctgcccctccaagagcggaggcagcgagagtacgcgtgtgcctcgcgccggtccacgcggggagagcactggggaccgagacccggcaccacctcccggt

SEQ ID NO: 122747 - DNA, 291 bp, Homo sapiens
  chr12:79258965-79259256
  hyper
cgatacacttgggttttagtggtgggagtctgagacctagggagggatccccgggtggcctattgtgagaaatatgagactacatgtgcatctcctggaaaagcactttgcacagcgcccgtgatttagagcctggagttgatgttgggcatcccccatcttcttgcttcctctttccttctcttgttctctctcctccgtcccccacccccaatctcaatcttttctctctttctctcccacacctcccctctcgccctcctcccaccctaagcacgcacagcgtttctt

SEQ ID NO: 122748 - DNA, 31 bp, Homo sapiens; identical to SEQ ID NO: 8935
  chr12:80083437-80083468
  hyper

SEQ ID NO: 122749 - DNA, 856 bp, Homo sapiens
  chr12:80084233-80085089
  hyper
tctgcccccgggctgcgccccttggagtcctcgagcgcgcccaccagtcactaccggccagcagccgccgggtccccaccctgcaaagtttctcccacgcacctacagtacggaccccgacgatcgccgcccctagaagggaggagagaggactgaccccacccccaagtcggcccgcccgccccatccccaccaaggtccgcgccggcggcggtcgagatactagggctagacccgccacctgtcggctcgtcgtatcgcctgctccgcgctctagccaccgccggtccgaggtccccgtcagctacaaccccactcccaaggcgaggcgcggagctcctagccggttcgcagaggaggcggggacccagctgtcccgccgagcgtggaaaggaccgggtgtgagcgagcgccttaccttggaggagcttgtaggggacgaggcgtagggctgggatccggctcccaggtgtgccgaagctggcgcgcgctcttccgccgcgcggaaagtgccgcggcaaactcgcggtgcggagctccaggcaatcccaggacaggagggagggagaagaaggagggagggagggagggagggagccaggggcgggaagggagccgagcggcgccgaagcacgagcggaaaaggccgaggcggcgcgcgaggggcgcggcgcgcggtgggaagggtcgtggccgctgacgccccgcccccggcgctcaggtgcgcggcgtcgcgtccggcccgccgctgcagcctgccctgcgccagccgtcctctgccccgctcccgccgcagaccacagcgcgcccgccgcgctccgcccgcggcctgcgagttagacggcacattcctggg

SEQ ID NO: 122750 - DNA, 30 bp, Homo sapiens; identical to SEQ ID NO: 49883
  chr12:80328507-80328537
  hyper

SEQ ID NO: 122751 - DNA, 30 bp, Homo sapiens
  chr12:80329596-80329626
  hyper
ctttaagcctgtctcgtactacccatgagc

SEQ ID NO: 122752 - DNA, 296 bp, Homo sapiens
  chr12:81102159-81102455
  hyper
gtgacccaagaagaccgggtgcttgcaataggcaggaaatgcgtacccggcccgaggaagcaggaaagccgccccccaccccaccccaaccccggaaccgatgtttctttcctaatctgccgctgccttggttttccctccagcttgagggtgcggatttcctgcgcacctgcagctcccagtggccaagtgtttccgatcattccagggggctcgtgataacggctaaggaaggtaaagtaaaagggctctgggccgcaccagagaaaatccgggaggtggataggatgcttggg

SEQ ID NO: 122753 - DNA, 141 bp, Homo sapiens
  chr12:81102512-81102653
  hyper
cgccgggaccaggcctttcctcgctgccaaagcggcctcgcgcggggcgcggagctgcttcgtgttccttctttgggtgctatgtttgtgtgttgttttttcgctcaggaggagcaagtattgattcgtcagcctcgagta

SEQ ID NO: 122754 - DNA, 1556 bp, Homo sapiens; identical to SEQ ID NO: 49884
  chr12:81330304-81331860
  hyper

SEQ ID NO: 122755 - DNA, 318 bp, Homo sapiens; identical to SEQ ID NO: 8938
  chr12:81471296-81471614
  hyper

SEQ ID NO: 122756 - DNA, 438 bp, Homo sapiens
  chr12:81471753-81472191
  hyper
cggcgactctagtgtggcttccaaacttctgggctctgggctcacttcggaatttgcccccgccccctactcccttccctcaggccccaggaagttgcaagagtaccatttgtcgcacactcggggaccgcgggtggccggaggagatgaaaccgtcttggctgcagtgtcgtaaagtcaccagcgccggggggctcggagggcccttgcctgggtcctctccggcccggggagccggtgcggccctcagggctttagtggtcccgggcccgcggggcggtctcgggggccggggatgcagggcactgtcctccggcagtggcagcgagtacaagacccacttcgcagcctcggtgaccgaccccgagaggttctggggcaaagctgccgagcagatcagctggtacaagccctggaccaaaacgctggagaacaaac

SEQ ID NO: 122757 - DNA, 1040 bp, Homo sapiens
  chr12:82152214-82153254
  hyper
tgatcaatgacaaccgcagtctccggcttgaggagaagggaggctcacacccagcactcctggaccatttccctagcaacgggaggagaaaggcagctcagacacacgcgtgccccggcgccctcccggaacgtgccccggcccggtggcgtggcaggagctcggcatcttcccgtggctccgtcagcagccaaaaggagaagcgtccatcggaaaaatggcatattacaaattttgctttgggaagcaaagctcggttcagaccattgtcaaaggaggagagggggaggcggctcttaaagcagccgcggcccctttgccagaacagccgcagctccccgcgtgcagctggagccccggggcggagaccggagaccggggactgggtttgactttcagaaacttaaccacgcggcgccgctccccctccgcgcccgggccacccggggtgtgtggggcgtccctccaaaagaaagcttggagaaaaggcgtgagaagtatctgggagagaagttctccacccagtctcccctcctggagcccctctggagtttaaggctaaccctgggagttagaaacctaaaggaaaacgagtccctagggatgcaaaaagcaggacaggtctcctcctggcccccagcctgtttccgcgcgctcccgtgtctcgtttcacttaaaggaggcgctttttctctggaaaggcaaacatcaccccacgccgtcccccggccccccttccctcccccccgccgcccccccgccgccacagcacacacacccatttttctcctcccggcctttctgcaagcctctttgcttgcttcaattggccggaagaaccaacctgctggcagccggtgaggacgctacagcatcttctctcctcacttgcctcgtgcggtggctgctactcctcctcctccgtctcctcccctcctcctccttggcagccaccacctcctcttcctctggaacaagggcttcccctggaagctgctgcagtggtttccaccggcccttaaataaattctgaagtaatc

SEQ ID NO: 122758 - DNA, 196 bp, Homo sapiens; identical to SEQ ID NO: 8942
  chr12:82153283-82153479
  hyper

SEQ ID NO: 122759 - DNA, 30 bp, Homo sapiens
  chr12:82751992-82752022
  hyper
cttacataccctcgcgaacgctccccacga

SEQ ID NO: 122760 - DNA, 30 bp, Homo sapiens
  chr12:82752684-82752714
  hyper
agcagaaccaggtgcgtggcggcggaggcg

SEQ ID NO: 122761 - DNA, 30 bp, Homo sapiens
  chr12:83079666-83079696
  hyper
acatcgcggtgcaccggagctactctcctg

SEQ ID NO: 122762 - DNA, 30 bp, Homo sapiens
  chr12:83080193-83080223
  hyper
tgtgcgtgagagatcgccagtgagtttgtg

SEQ ID NO: 122763 - DNA, 125 bp, Homo sapiens; identical to SEQ ID NO: 49890
  chr12:83080815-83080940
  hyper

SEQ ID NO: 122764 - DNA, 414 bp, Homo sapiens
  chr12:83080990-83081404
  hyper
cgagtcccactcctcacctaggacgccccaaactgccatgggttagggtggggatcgcgacccgcgcgaaagaccagccctgcgcttccgccgggggacgcggagcccaaacgccgctcaccgcttgcgggcgccgggcatggggagtgtggtgtgagcccgcacccggggaggacgcaggagctgcggagacgggcgcgaggaggaggagaggagtcgtggattggaaggacccgagggagggagggtggggaagcgagggaaaagtgaagctgggaggagaaggcggcggaaggtggagattgatgcttctgttttttgttgccgctgctgccctcgcgctgggagccgagccggagggaaggcggtggagagatgattgcagagttggtgagcagcgctctggggctcgcc

SEQ ID NO: 122765 - DNA, 1209 bp, Homo sapiens; identical to SEQ ID NO: 49892
  chr12:85305072-85306281
  hyper

SEQ ID NO: 122766 - DNA, 236 bp, Homo sapiens; identical to SEQ ID NO: 8947
  chr12:85306322-85306558
  hyper

SEQ ID NO: 122767 - DNA, 174 bp, Homo sapiens; identical to SEQ ID NO: 8948
  chr12:85306789-85306963
  hyper

SEQ ID NO: 122768 - DNA, 341 bp, Homo sapiens
  chr12:85430010-85430351
  hyper
tccctgaaatgctgcgttcgtttcaatttagaatcgagattgtttgtccttctagagcacctgtagggaaaaaccggtgtctcttccttgtgattggctgttgccatggatacgctttgtgtagcggctatgggcgctgtcttacaacaaagccaaggaatctcgctgctgaggggtgagccggggtcttaagactgggattcccgttgagggaggtgaacagctgtgggagctcaggccgagccgggactctctctgcctggccagacttccagcaaagggagagaccgcgggtcaggggatggctgtgcgactctgcgaagctcgaggctcccttccac

SEQ ID NO: 122769 - DNA, 536 bp, Homo sapiens
  chr12:85667226-85667762
  hyper
agtttccatgagaagcgaaacttcattctctttgctcagaatagagactcctccacctatgcgcgtttaaccacagagttgttcttgattgtaagggacttcgcccacttggttgaagtggagagccggtcctcattccagacgtcccgcacggcagtcgctcatggctccctccaggccgggagccaggaaggtggtccttcaccgaggtgcgcaccaagcggcggtccacccaggcaatggggtgcaccaatttgcctccaaaaatttgctgcgcacacaacctgttcacagttcctgatcagaaagggctaacgagatgtctgtctacagctgtctctgggcgagggcgcaggctttgggaagtggttcagcgcgatcggggacaccgcttgcagcccttggtcctgcacccctaggaggggtgtcccacaagctcggcttcccttttgcgagccacagagagctttttgttccgaaactctcattacgacagatagtatttaaaactcatcaaaattcgcttcagaaatctg

SEQ ID NO: 122770 - DNA, 170 bp, Homo sapiens; identical to SEQ ID NO: 49897
  chr12:85668061-85668231
  hyper

SEQ ID NO: 122771 - DNA, 1788 bp, Homo sapiens
  chr12:85673205-85674993
  hyper
ctctctcccacccatcgccaccgcgtccacactccgccgcattccagagaaaaagaaaaggccacggcctcgtaaagctcccagctggcccggaccccgagctcctcccggttagaagccgaagcggcccctctactacggcggctgcgattaacagttgccaatgcatctggttccttgggcttcggattaatgtgaatcttccacgtaaacgatttacggatgaaataaaagccttttagagcaatatttcctttcaagttcttaagacgcctctaaatctttctggtagtgagtggccggcatgggggcggggtggggacgggtggctcaggaaggcgcaggcagtagggagtggaggtttaactgctttgcgatctcaccaagatcttccgaaatgccagtccactgtcacggcggcaatgaatctgggtgtcaggggctcgtctctcctggcatttgtctgaaatggagctgtctgtctgtctatcctaggcctggacgccctctgcccgggtaagtggggaaaatgggggtggggtaggggcggagggggacctggggtggagttagtcgcccgcctattttcatattcattagaactgggaggctgcccgaggaggccagctgagtttcaagatataaaagcaacttcgggtgctccttttccagccgggacgtattaaagggaccggagcggggcagttcccgacgccgcagcgctcgctttcccttccctcctctctggccctccctcctcccacccactggctccctcccccagcgctctccagtttctgtgccccaggagctacgcgacagtcttccaggattatggagtttctgagcgagaagtttgccctcaagagccctccgagtaaaaacagtgacttttacatgggcgcaggaggtcctctggagcacgttatggagacgctggacaatgagtccttttacagcaaagcgtctgcaggcaaatgcgtgcaggccttcggacccctgccccgcgccgagcatcacgtgcgcttggagaggacctcgccctgtcaggacagcagcggtgagtcgctagcgccccagccggagccgccgcagcccttccgcaatcgaaaatgcaggatcggtctgatcaggcagggagggagaaaggagaaaagtgggagcgagggacctggaaggtggaggaaggtagtggaaggtgctcgctttatgaagcggtgttactgctgctgcagcctttgggggcggagggcggagggagggagagatccagcaccgggttgcctctgagcgattctcctttcgctgtagggtctggtcgcctacggatccctgagtccttctgtaatattggttcctggagtaaactgatagggcgctaaatagagcgtaattgagtcaagacagaacgcttcctctgcgagcccgccttgcagtccgggcggtaggaactgaaatcgatcacagctcgttagagtacgtcactgtcgtcacgagtagggaaaaaaaaaccggaaaacaaaaacaaaaaacaaaaaaccctttgagctcctttaggtaaagataaatctttttaattttccaagacgtggcgatatattttcaaagtttgaggatccctagatttctagcgtgtgtgaatttgtaatttctgcttttttttgcgtttgcaatacaacacgcgttgaatgtttgttaaacactaaagcacactaaatagcttcgggcaaaccatccccggcctaatcactcattcccagattctacgttttgtatttttatgacttc

SEQ ID NO: 122772 - DNA, 30 bp, Homo sapiens; identical to SEQ ID NO: 8954
  chr12:85918797-85918827
  hyper

SEQ ID NO: 122773 - DNA, 58 bp, Homo sapiens
  chr12:88429152-88429210
  hyper
ccgagggtggggggcggaggacgcacgtgggaacccaccaggcgcctcagcttctgca

SEQ ID NO: 122774 - DNA, 30 bp, Homo sapiens
  chr12:88429590-88429620
  hyper
cgagggcggctgggcgctttagaactgccc

SEQ ID NO: 122775 - DNA, 30 bp, Homo sapiens
  chr12:88536123-88536153
  hyper
ggcgggaggagcagcggctcaggcgcctgc

SEQ ID NO: 122776 - DNA, 30 bp, Homo sapiens
  chr12:88827905-88827935
  hyper
atttatacacacacacgcacctgtgtgcag

SEQ ID NO: 122777 - DNA, 1345 bp, Homo sapiens; identical to SEQ ID NO: 49902
  chr12:88973383-88974728
  hyper

SEQ ID NO: 122778 - DNA, 351 bp, Homo sapiens; identical to SEQ ID NO: 49903
  chr12:89744646-89744997
  hyper

SEQ ID NO: 122779 - DNA, 277 bp, Homo sapiens
  chr12:89746243-89746520
  hyper
gcacaccccctgcgcgaggcagctcctcaatggatacaaacagcgagcgtctcaatggatacattctccgggccagccaatgagcgtgctgcggaaggggctgttgccgtggggacgggccggctggaacaggttgtgttgatgaattgttaatgagtttgtcattcacaaaaacggaaaggaatttccgctccggataagccccagtgcaaacaagctgcaacagcgggctcggcgggaggaaggagaaagaaggggaggcggcagcggaggagga

SEQ ID NO: 122780 - DNA, 30 bp, Homo sapiens
  chr12:89746756-89746786
  hyper
cccccttctttaggcggtgtgtggcatttg

SEQ ID NO: 122781 - DNA, 30 bp, Homo sapiens
  chr12:89747074-89747104
  hyper
tgtattccgctccggcggcgtggggagtta

SEQ ID NO: 122782 - DNA, 450 bp, Homo sapiens; identical to SEQ ID NO: 8957
  chr12:89747141-89747591
  hyper

SEQ ID NO: 122783 - DNA, 30 bp, Homo sapiens
  chr12:89919373-89919403
  hyper
ccacggaaaccctccgagaattctgggggc

SEQ ID NO: 122784 - DNA, 238 bp, Homo sapiens
  chr12:89919818-89920056
  hyper
ccagtcaaaccccgcgctccaggcatggccagccgagccccgagacaccgccagccctgtaaagagaggacgggaggtatgcgccgggtcagctgtggccacacaccaagccatgttaactaacactcgcgttctccctggtttgatgtcaggaagtggggtagtaaccaggactggaataagagcgatgaatggaagggcgttgtgagcctgtgatcgatgcgatcagagttctatt

SEQ ID NO: 122785 - DNA, 422 bp, Homo sapiens
  chr12:90101337-90101759
  hyper
ggtggctgtctgcagcgctctaacccaaagaaaaggtaaatatcagcctgtcgaggagggtcgagccctccaagtacctgcagacccctttaacccacccggacgccctgccctcccctccgagccaagcagcgcacagggtgcgagcactcccagcgctgcgagtcccgcagaaaactggtgaatgaaatgcgcacagagaccaacctggctggtgaccgcggcgcagaaccaggggtcgctaaccagcttagccacaggattctcccgcaggatgggataaagagagcacagcccccaccccacacccctgccactggaacgcggtcctcctacagactccttcctcaaaaagggaggtgggggcgcaggcttttttctcttaaactaagtgaataaacacgaatcggaaacaactgtga

SEQ ID NO: 122786 - DNA, 30 bp, Homo sapiens
  chr12:90102462-90102492
  hyper
gaggatgggggctccgtcctcagcgcgtcc

SEQ ID NO: 122787 - DNA, 141 bp, Homo sapiens
  chr12:91502982-91503123
  hyper
gttagattgcgtacacgtgcgcccccttctgggcgagcccagcctaattgttccagtcaatctccaggctcttccttaatgaaatgccttcctgtaagaggtttctgggtggtgttcattgaccaccgaattagactactg

SEQ ID NO: 122788 - DNA, 91 bp, Homo sapiens; identical to SEQ ID NO: 49909
  chr12:91775751-91775842
  hyper

SEQ ID NO: 122789 - DNA, 30 bp, Homo sapiens
  chr12:92539560-92539590
  hyper
tccgcctccagctccgcagcattcgaagat

SEQ ID NO: 122790 - DNA, 30 bp, Homo sapiens
  chr12:92540028-92540058
  hyper
gggtaaataagaaccgcctggcgcaggctg

SEQ ID NO: 122791 - DNA, 30 bp, Homo sapiens; identical to SEQ ID NO: 49910
  chr12:92540469-92540499
  hyper

SEQ ID NO: 122792 - DNA, 36 bp, Homo sapiens
  chr12:93323252-93323288
  hyper
gacaggcggcaggacgctgtcgccgcagcttcttcc

SEQ ID NO: 122793 - DNA, 30 bp, Homo sapiens
  chr12:93323558-93323588
  hyper
ccctgggttgaagccgactagagaatctca

SEQ ID NO: 122794 - DNA, 256 bp, Homo sapiens; identical to SEQ ID NO: 49911
  chr12:93835924-93836180
  hyper

SEQ ID NO: 122795 - DNA, 30 bp, Homo sapiens
  chr12:93861403-93861433
  hyper
ttgtagaggtctcccgcctgtcgttcccgg

SEQ ID NO: 122796 - DNA, 30 bp, Homo sapiens; identical to SEQ ID NO: 8959
  chr12:93963381-93963411
  hyper

SEQ ID NO: 122797 - DNA, 202 bp, Homo sapiens
  chr12:93964216-93964418
  hyper
cgggacgagcacggcgtccccacgccatcgatgtgtcttagagccggagagtctggtttccgaggacccacagtcgctcctgcacgcccaccccccgcaaaagtgcggccaggagggtcgcatcgagggggcgccgccgggatgtttagaggaacccacccccgtggcaggccaagggccaaggatcgctatccttccctga

SEQ ID NO: 122798 - DNA, 30 bp, Homo sapiens
  chr12:93964638-93964668
  hyper
gcagtagcggggcccgcggtcacgtgaggc

SEQ ID NO: 122799 - DNA, 30 bp, Homo sapiens; identical to SEQ ID NO: 49914
  chr12:93965713-93965743
  hyper

SEQ ID NO: 122800 - DNA, 1186 bp, Homo sapiens; identical to SEQ ID NO: 8960
  chr12:93966029-93967215
  hyper

SEQ ID NO: 122801 - DNA, 65 bp, Homo sapiens; identical to SEQ ID NO: 49916
  chr12:93967274-93967339
  hyper

SEQ ID NO: 122802 - DNA, 529 bp, Homo sapiens; identical to SEQ ID NO: 8961
  chr12:93985155-93985684
  hyper

SEQ ID NO: 122803 - DNA, 30 bp, Homo sapiens; identical to SEQ ID NO: 49918
  chr12:94071279-94071309
  hyper

SEQ ID NO: 122804 - DNA, 30 bp, Homo sapiens
  chr12:94136587-94136617
  hyper
ttgttttgaaggggcgagtcaggtgtttgt

SEQ ID NO: 122805 - DNA, 30 bp, Homo sapiens
  chr12:94495973-94496003
  hyper
gaggctgaattagccggtcgggtggccccc

SEQ ID NO: 122806 - DNA, 2369 bp, Homo sapiens
  chr12:94541783-94544152
  hyper
ctcactcatccgacccggggaaacccacaccctgtcacaggggcgccttggtccccggagtctccggctcggccatgtctcccgcgcgcctccccggggcctccctctcgccgctccacacctgtcagccgctctcgcagcagccctgtggcccgagcccggggcctcagctgcaaccccttcgcaccctggatcctcgctccgcgcgcctggcgtatccccgacccggctgctgtcgtaaacaaaaccgggcgttggagcagcaccgcgggcggacgggcgcgggagcccgctccgtgcgccgttagcgcgccccgggagccccaggcgagccaagggggcgatggtggcggccgcggcggccgcggcgggcggctgagctttgttatgaatagatgaaagaggccacctacacagtaacccaaattacgagacctccctcctccctatctcaccgaatcaagaggggaggggagatgggcgtggagggagggcgggcgggcgggcaggaggcggagggcggaggaggaagagaggatgaggaagggggccagttgcatcccactttcacaatgggaaagtgaaacgcacaagcgcacccaacctctccagccctccccgcccgcctcgctcctctccgcccgtcccctcccttcccctccgcgcctccccgcgagcgccagcgctgcacacaggaactctccggcgaaggagggcgaggaggaaacggtgccggagcgcgcagggcttgctgccgccaccgccgctgcacaggctgccggagcgagcctgccgcgcgccgccctccccgctctccttcctgggcgagctgcggggatggggcggccgcgggagcccgagcgcgcgcaggaaccgccgccgccgccgcccgcgtctccgttgccgcgcgcctgagccgccgtcgccgccgcgcgccctgcccgggggcggcccccccagccccatggaggtctcccggaggaaggcgccgccgcgccccccgcgccccgcagcgccactgcccctgctcgcctatctgctggcactggcggctcccggccggggcgcggacgagcccgtgtggcggtcggagcaagccatcggagccatcgcggcgagccaggaggacggcgtgtttgtggcgagcggcagctgcctggaccagctggactacagcctggagcacagcctctcgcgcctgtaccgggaccaagcgggcaactgcacagagccggtctcgctggcgccccccgcgcggccccggcccgggagcagcttcagcaagctgctgctgccctaccgcgagggggcggccggcctcggggggctgctgctcaccggctggaccttcgaccggggcgcctgcgaggtgcggcccctgggcaacctgagccgcaactccctgcgcaacggcaccgaggtggtgtcgtgccacccgcagggctcgacggccggcgtggtgtaccgcgcgggccggaacaaccgctggtacctggcggtggccgccacctacgtgctgcctgagccggagacggcgagccgctgcaaccccgcggcatccgaccacgacacggccatcgcgctcaaggacacggaggggcgcagcctggccacgcaggagctggggcgcctcaagctgtgcgagggcgcgggcagcctgcacttcgtggacgcctttctctggaacggcagcatctacttcccctactacccctacaactacacgagcggcgctgccaccggctggcccagcatggcgcgcatcgcgcagagcaccgaggtgctgttccagggccaggcatccctcgactgcggccacggccaccccgacggccgccgcctgctcctctcctccagcctagtggaggccctggacgtctgggcgggagtgttcagcgcggccgctggagagggccaggagcggcgctcccccaccaccacggcgctctgcctcttcagaatgagtgagatccaggcgcgcgccaagagggtcagctgggacttcaagacggccgagagccactgcgtaagtcctgcccccggggcgccgcggagagcgctgctgccggggagccgccgccgccgccgaggcagaacgagctgggggcgagcggcggggcgggggtacagccgggtgacatttaccaggtctcaggttcacaccgcgggcggccgtccgaaggctcctctcggacggtccccgagacctggagcacggcctgaggtccccaaagggagagtgtaaaaaggggggcggggagggttggagttagactcaaaactctagtggctgcatcccattgccatccttccctgtccaaacggggacgcttgtttggggctgagtctcctcgcgcagcccctctttc

SEQ ID NO: 122807 - DNA, 35 bp, Homo sapiens
  chr12:94544416-94544451
  hyper
acccctggcgtgagccggtgcgagggggcggtgcc

SEQ ID NO: 122808 - DNA, 138 bp, Homo sapiens
  chr12:94853871-94854009
  hyper
gcggggccgggctgcgctcccgaaggcgttcctggagggccctgggatggactcagagatccccagagccccaggggacggaaaatctagccccgggcacttgccttggagtctgagtgatgcgcgtcgttggagcgc

SEQ ID NO: 122809 - DNA, 30 bp, Homo sapiens
  chr12:95043537-95043567
  hyper
actgcaaacaatggcgagggcgcctgctcg

SEQ ID NO: 122810 - DNA, 301 bp, Homo sapiens; identical to SEQ ID NO: 49921
  chr12:95266892-95267193
  hyper

SEQ ID NO: 122811 - DNA, 433 bp, Homo sapiens; identical to SEQ ID NO: 49922
  chr12:95267247-95267680
  hyper

SEQ ID NO: 122812 - DNA, 302 bp, Homo sapiens
  chr12:95267706-95268008
  hyper
cgggccgcttcgcccctctcctcttcctcgagttctggccccaccaggagcggagcgagtctccgatgcctgccccgcggcccccagaactgagctggagaagctttggggtgaaagctgggcccaccctacagggaccccaagtttgcggagcaagagtggattggcggagagcgcagatggcaattctcacccgccttaaaagtaccaccttaaaattctccccatgggatgggaaggtggcccgctaatgtccgttcctactcttcgttttctttttaatttttcagacagggtctcgc

SEQ ID NO: 122813 - DNA, 154 bp, Homo sapiens; identical to SEQ ID NO: 49924
  chr12:95397471-95397625
  hyper

SEQ ID NO: 122814 - DNA, 30 bp, Homo sapiens
  chr12:95466664-95466694
  hyper
acgggagttagtgacgggatgcaggccggg

SEQ ID NO: 122815 - DNA, 32 bp, Homo sapiens; identical to SEQ ID NO: 49925
  chr12:95467507-95467539
  hyper

SEQ ID NO: 122816 - DNA, 30 bp, Homo sapiens; identical to SEQ ID NO: 8965
  chr12:95610976-95611006
  hyper

SEQ ID NO: 122817 - DNA, 30 bp, Homo sapiens
  chr12:95611942-95611972
  hyper
tgggaatggatgtgcggcgggggggactgc

SEQ ID NO: 122818 - DNA, 52 bp, Homo sapiens
  chr12:95867760-95867812
  hyper
gcggggctccaagccgagactcctgcacgcccggcccgaagctagcccgaca

SEQ ID NO: 122819 - DNA, 30 bp, Homo sapiens
  chr12:95868378-95868408
  hyper
gaactcagctcccacgcacatcgtggcacg

SEQ ID NO: 122820 - DNA, 14 bp, Homo sapiens
  chr12:95942964-95942978
  hyper
gcgtggcaaactcc

SEQ ID NO: 122821 - DNA, 30 bp, Homo sapiens; identical to SEQ ID NO: 49928
  chr12:96027743-96027773
  hyper

SEQ ID NO: 122822 - DNA, 89 bp, Homo sapiens; identical to SEQ ID NO: 8966
  chr12:96183451-96183540
  hyper

SEQ ID NO: 122823 - DNA, 110 bp, Homo sapiens
  chr12:96183925-96184035
  hyper
gcagcgctctgcgctcgcagccctggctcccctgcacccccgagtcccgagatgggttagagaagcagcgagggaaggggtgggggccccgccgcgtcaccacccacctg

SEQ ID NO: 122824 - DNA, 30 bp, Homo sapiens
  chr12:96184403-96184433
  hyper
ccggggctcggcgcccgcagccgccgctga

SEQ ID NO: 122825 - DNA, 30 bp, Homo sapiens
  chr12:96184708-96184738
  hyper
ggggggggtcccccgcgccccgaccgacgc

SEQ ID NO: 122826 - DNA, 376 bp, Homo sapiens; identical to SEQ ID NO: 8968
  chr12:96184964-96185340
  hyper

SEQ ID NO: 122827 - DNA, 123 bp, Homo sapiens; identical to SEQ ID NO: 49932
  chr12:96252230-96252353
  hyper

SEQ ID NO: 122828 - DNA, 192 bp, Homo sapiens; identical to SEQ ID NO: 49933
  chr12:96252587-96252779
  hyper

SEQ ID NO: 122829 - DNA, 30 bp, Homo sapiens; identical to SEQ ID NO: 8970
  chr12:96336231-96336261
  hyper

SEQ ID NO: 122830 - DNA, 115 bp, Homo sapiens
  chr12:96336965-96337080
  hyper
tcaggtttattactcgttgccattcttgcaatgattaccgcccccgttgctgtggttgggggaggcgagcaaagggcagcggctgcgagcgcccgcccccgccccaccctcccag

SEQ ID NO: 122831 - DNA, 30 bp, Homo sapiens
  chr12:96429846-96429876
  hyper
ggggttcgattccccgacggggaggcacag

SEQ ID NO: 122832 - DNA, 207 bp, Homo sapiens
  chr12:96587647-96587854
  hyper
aggcgtgagccagcacgcccggccgagggctggcttttaaaacaccgaaaacccagacaggaacggtgtccatctccaaccccagacggaaactgtgcccgcacccacaagaaaagcagtcctttgcccagagcaaccaaaccctgaaccccactctcgattcccctctgccccccaactcttccatcccagcggatgggaaacagc

SEQ ID NO: 122833 - DNA, 34 bp, Homo sapiens; identical to SEQ ID NO: 49937
  chr12:96618051-96618085
  hyper

SEQ ID NO: 122834 - DNA, 30 bp, Homo sapiens
  chr12:96793402-96793432
  hyper
tctttcccctcctccgcctcgcgaggagac

SEQ ID NO: 122835 - DNA, 98 bp, Homo sapiens; identical to SEQ ID NO: 49938
  chr12:96794232-96794330
  hyper

SEQ ID NO: 122836 - DNA, 30 bp, Homo sapiens; identical to SEQ ID NO: 49939
  chr12:96794596-96794626
  hyper

SEQ ID NO: 122837 - DNA, 662 bp, Homo sapiens
  chr12:96883068-96883730
  hyper
tggtcgtcatcattatcgttattaagtggccaacatggataaagagtatagtctggatttgtgaccttaaatttttggctctaatattcgccagcgctctgctcagaacattctctgttcgcatttcatacagcggtgccagcgcacaaccaggcaacgccctcaggagcatcattgttttctggacctggttctttctcgctctgccctccaggggccgctgtgtttctcggaatgcgcgcgggatgcccggttgccacgagaccgtcgccaggcaaccgcgtgtacacatactccaggcgggccggggcgcgtcaatatggcggcgcagggctccccctcgagctctccgtcagacgactctaccacctcggggtctctgccagaactgccgccgacctccaccgcgacttcgaggtcgcccccagagtcgaaggggagctcccggagctcgctgcttcagtggacctgccccgaggactcattgcccctagccgtgttttatgggccgctggacgcgaaaaacccgctcctggcctcttgtgagaaggagatccaggagttgttaggctttatgaggaaaaagaaggctttagccaccacggaggaagagaagcacgaattccgccggcgttggtaagcgctggcggggcactggggag

SEQ ID NO: 122838 - DNA, 80 bp, Homo sapiens
  chr12:97300788-97300868
  hyper
cagttggcagtggccggagctccgtcgctggggcgtggagagggccgccccggcccgcagttcccgccctgacactggga

SEQ ID NO: 122839 - DNA, 30 bp, Homo sapiens; identical to SEQ ID NO: 49941
  chr12:97301646-97301676
  hyper

SEQ ID NO: 122840 - DNA, 391 bp, Homo sapiens
  chr12:97379541-97379932
  hyper
agggctaaccacgtcggccccaaactagctgcctgtctttaaatgtttgctttcatatttggaagtgctgagcgggcacttcagtgcgacctggatatcacctgtgggtttcagggcagtcatccttgagacctcttgttcctcgggagacctcttggcctctttaaggagccaggggtcggcggcgcacttaggggagaaggagcaggagaacttgagttaagaattgccccccggattggaaccagaggtagcgggaagccagcaagggcgaggctctttctaggaactctaggtccaccgcttgcctttggggaagagggaggaaggggccttggggcgtgaagttgcctttgggacatcagccagagcctgcgacgcaagcgcggcc

SEQ ID NO: 122841 - DNA, 30 bp, Homo sapiens
  chr12:98791448-98791478
  hyper
cggaatgaacattccgtgtgacacactgcc

SEQ ID NO: 122842 - DNA, 114 bp, Homo sapiens; identical to SEQ ID NO: 49943
  chr12:98897818-98897932
  hyper

SEQ ID NO: 122843 - DNA, 30 bp, Homo sapiens; identical to SEQ ID NO: 49944
  chr12:98908924-98908954
  hyper

SEQ ID NO: 122844 - DNA, 30 bp, Homo sapiens
  chr12:98909419-98909449
  hyper
gcttccagcttggccgcagttggttcgtag

SEQ ID NO: 122845 - DNA, 104 bp, Homo sapiens
  chr12:98987128-98987232
  hyper
tcacttaagtgaagcgaactgaagcccgtggtcaaggagagacacctgaaggtgaagggacaaagcgagcagggtaagagctcgagcccgacccctctcaaaaa

SEQ ID NO: 122846 - DNA, 40 bp, Homo sapiens; identical to SEQ ID NO: 49945
  chr12:99037821-99037861
  hyper

SEQ ID NO: 122847 - DNA, 85 bp, Homo sapiens
  chr12:99038220-99038305
  hyper
gctggatgttgagccgggtgggagcccaaacagcagggggcccacaggaggccggcccaggcagcctcgcgtccacttaccaggc

SEQ ID NO: 122848 - DNA, 34 bp, Homo sapiens
  chr12:99038996-99039030
  hyper
tttatttgcataagcgggcgcgcgccgtccgggc

SEQ ID NO: 122849 - DNA, 30 bp, Homo sapiens
  chr12:99039280-99039310
  hyper
gtagtggggtccaccggagggcggcccgtg

SEQ ID NO: 122850 - DNA, 30 bp, Homo sapiens
  chr12:99039563-99039593
  hyper
tgtcccggcagtgccgccctccccactaag

SEQ ID NO: 122851 - DNA, 356 bp, Homo sapiens
  chr12:99139525-99139881
  hyper
cgtggtttcatacttggtattaatgcccctcttggcttcttggcccggctccacaatccacggtagattggccagagtcttttgctcagatgggtcgatctgctttaaaacagaaaggctgatgcctgttatacggtcgccgcgcgggtgcgcgcatgcacgcggacgccgctggcgaacccacgcgaggcccctcgccccaggcgcggggcggcgatgctggtctaggcggctcgcgggctcgctctttggacacacatttaccgcataccgactctctgcagggcaccctgagggtgacggtgaataaggcacagcccttgcccttgtgagcacacagacggggagcagacaga

SEQ ID NO: 122852 - DNA, 990 bp, Homo sapiens; identical to SEQ ID NO: 49948
  chr12:99287417-99288407
  hyper

SEQ ID NO: 122853 - DNA, 315 bp, Homo sapiens; identical to SEQ ID NO: 8974
  chr12:99288621-99288936
  hyper

SEQ ID NO: 122854 - DNA, 353 bp, Homo sapiens; identical to SEQ ID NO: 49950
  chr12:99289161-99289514
  hyper

SEQ ID NO: 122855 - DNA, 30 bp, Homo sapiens; identical to SEQ ID NO: 49951
  chr12:100378180-100378210
  hyper

SEQ ID NO: 122856 - DNA, 30 bp, Homo sapiens
  chr12:100535971-100536001
  hyper
aggagcaccgaactcgagttagagcccagc

SEQ ID NO: 122857 - DNA, 30 bp, Homo sapiens; identical to SEQ ID NO: 8976
  chr12:100593408-100593438
  hyper

SEQ ID NO: 122858 - DNA, 30 bp, Homo sapiens; identical to SEQ ID NO: 8977
  chr12:100594371-100594401
  hyper

SEQ ID NO: 122859 - DNA, 190 bp, Homo sapiens
  chr12:100594719-100594909
  hyper
ggacaagatatatacgcctagtggtttcatgtgctacgtttcatctccggacatcaatgaactgcagacacccccgcgcggccctgacttagccagagggattccctggttggagctgggtgggtgattgtgatgctttgaattgaaattgattttggttttagttttgggctgcgaggccccggaagtg

SEQ ID NO: 122860 - DNA, 64 bp, Homo sapiens
  chr12:100660778-100660842
  hyper
gactgacaagtctacggaacctcggagtcaaaagaaccgccataagctcgcgcgctggctcctc

SEQ ID NO: 122861 - DNA, 30 bp, Homo sapiens
  chr12:100661307-100661337
  hyper
gtgttgcctggtgacgggcctgccggcggc

SEQ ID NO: 122862 - DNA, 30 bp, Homo sapiens; identical to SEQ ID NO: 49956
  chr12:100661553-100661583
  hyper

SEQ ID NO: 122863 - DNA, 652 bp, Homo sapiens; identical to SEQ ID NO: 49957
  chr12:100967340-100967992
  hyper

SEQ ID NO: 122864 - DNA, 802 bp, Homo sapiens
  chr12:101110902-101111704
  hyper
ttggcgtgaacccaccggggatcccgcccgacgccggctgcgctgggccaaatccgcggcgcgcctctgccgggcacctcccacctccagcttcgcccctcccctctcccggccgcgcgtcctccgcggctggttcaatccccgcggggacccggagcgcggctgccggtctacgccctctctcctgccgctctcgcggcgcagcccggccgggggcccccgcgcgccggcagctctaggggcgagcgcggcgcgctgactgggcgtgctcagccgcggagcgcccgggcgccgctagagccaagcgcatgcactcgccgggccgggccgtccaggggcgcagcgcgcagggggccgctctagccgacgccctggccagtctgggcaggacgcgggccaggatggcctccctcaccgcatacggtaactggggccgtcgcgggttcctggggcggcggggcggaagggaggggcccagggagccgtcgaaacacccggggaaacttcggggttcgcctctgcggaggggtctggaagggagggagacggcggccgtgcgcgccgctcctgaggggccgatgttccgcggggtttcgggccgcgggtaacccgggaaccgggtgtctgcgggaaaaacgcttcaaaatttgggaggatctgggagcttcgggactctagaaacattcccctcgcttccgaccactcaggggaagggacgcgggtgttaagtcctcctctagcggggtgaggcttggagttgggagatgtgcgttcagccagcgcttatcttgtccctgactga

SEQ ID NO: 122865 - DNA, 118 bp, Homo sapiens
  chr12:101673657-101673775
  hyper
gcacgatgcaggtacgtagtgagggacagtaatgttagttgataacgattacaggtatgttttattttataatgaaaatacatttgtcttctaaacctttaccgaagggagtgaaaag

SEQ ID NO: 122866 - DNA, 255 bp, Homo sapiens
  chr12:101673989-101674244
  hyper
cccctccttactgtcggttgcatcccttcgacactcccgaggccgtcgcgggccactggccctctgcagccatgaagacaaagcccgtttcccacaagaccgagaacacctaccgggtgagcgcgggagcttaggcagggagccgcgggtctccgctgcctcagtcgtgagacaggctctgagcgagactccaggggcctcagacttctgggccgagtgtgtcactttcctggaggctccggcgaaagagggaga

SEQ ID NO: 122867 - DNA, 31 bp, Homo sapiens; identical to SEQ ID NO: 8980
  chr12:101762739-101762770
  hyper

SEQ ID NO: 122868 - DNA, 30 bp, Homo sapiens
  chr12:101800954-101800984
  hyper
gtttttcaaactgacgccgtcccagcgccc

SEQ ID NO: 122869 - DNA, 30 bp, Homo sapiens; identical to SEQ ID NO: 49961
  chr12:101801632-101801662
  hyper

SEQ ID NO: 122870 - DNA, 30 bp, Homo sapiens
  chr12:101802001-101802031
  hyper
gaggtttttgtcttcgctgtggcctgcagg

SEQ ID NO: 122871 - DNA, 30 bp, Homo sapiens; identical to SEQ ID NO: 8981
  chr12:102091039-102091069
  hyper

SEQ ID NO: 122872 - DNA, 30 bp, Homo sapiens
  chr12:102091299-102091329
  hyper
cgataacaagttgccgttggcgggcgccga

SEQ ID NO: 122873 - DNA, 30 bp, Homo sapiens
  chr12:102224450-102224480
  hyper
catcaccccttcaccgccacgccacgcccc

SEQ ID NO: 122874 - DNA, 30 bp, Homo sapiens; identical to SEQ ID NO: 49963
  chr12:102270863-102270893
  hyper

SEQ ID NO: 122875 - DNA, 30 bp, Homo sapiens; identical to SEQ ID NO: 49964
  chr12:102271173-102271203
  hyper

SEQ ID NO: 122876 - DNA, 604 bp, Homo sapiens; identical to SEQ ID NO: 8982
  chr12:102455399-102456003
  hyper

SEQ ID NO: 122877 - DNA, 30 bp, Homo sapiens
  chr12:102513577-102513607
  hyper
ggcctcaccgtacacgttggacaggacttg

SEQ ID NO: 122878 - DNA, 139 bp, Homo sapiens
  chr12:102878314-102878453
  hyper
gagaacttgaggactcgtcacgcttgccccacgttgcataaaatgtggggaaaagagacaccaacgccaaacttcaggggcaggacccacataaatgctttcttggggaataaaaaaatgtgcgcgccctctagtggac

SEQ ID NO: 122879 - DNA, 171 bp, Homo sapiens
  chr12:103218425-103218596
  hyper
gtccgtggttctggccggcgtcgacccgtgggtatttaagggttggggcagcccgcctaccttctgctaaaccgcagggaggagtcgggggctgcagaacctggattggttttaattaacccacgcgcaggcaaggtctgagagccgcgtttctgcgccctttgcagcgca

SEQ ID NO: 122880 - DNA, 573 bp, Homo sapiens; identical to SEQ ID NO: 49967
  chr12:103311038-103311611
  hyper

SEQ ID NO: 122881 - DNA, 338 bp, Homo sapiens
  chr12:103344362-103344700
  hyper
tgacctcagtcacttcggtaaactgcccttgctttccggaggcggcaggaacgtttcaggagctccaaggctctaggcgcctgcattcctcgccccagccggtagtctcctagccctgttgaacgcaagagcatccaagggcgcgcaagtccccaagagctctcagaggttcctgaccctgagcgttaaagcccttcctcgcggatgagacccttggtgcgttccacccgcttgggggctgagactcgccaggacgcactcagaatgaactttccgcgcaggtcagatataggcacccaggggttttgtgacgtcacaatgccgtctgacccggtgaa

SEQ ID NO: 122882 - DNA, 221 bp, Homo sapiens; identical to SEQ ID NO: 49969
  chr12:103350082-103350303
  hyper

SEQ ID NO: 122883 - DNA, 533 bp, Homo sapiens
  chr12:103350383-103350916
  hyper
cgccatcactcaacccccgccccgcatctttcttctccgagggtctgggagtatcccagagcactcccttctttatgatatccgctaagctggtccggaaataatctttatggggagggggtggcggtagggggcgatggtacagggggccagaggtcatcctagggggacgtccctgccatatacacccacctacaggacggctcacaaccactcctcggtgtcgcttccccgcggccccccacacacttgctcagttatggggagcacatcctagtttttagagctgaatgggacattagagaccatattctgtggctgcagacgaggaagcgaaggctcagagaggatgccacttcgaggagccacagagcattgagaggacgccttgggactagaacccacgttttcacatagtccagcactttttttcactgttctggacggagtccctcccccaaccatgtttctaaacttcaatcgtaatttgctccaatttctagggtcaccgaggaacccgaagagaataacag

SEQ ID NO: 122884 - DNA, 842 bp, Homo sapiens; identical to SEQ ID NO: 49971
  chr12:103351143-103351985
  hyper

SEQ ID NO: 122885 - DNA, 103 bp, Homo sapiens; identical to SEQ ID NO: 8987
  chr12:103352051-103352154
  hyper

SEQ ID NO: 122886 - DNA, 112 bp, Homo sapiens; identical to SEQ ID NO: 8988
  chr12:103352170-103352282
  hyper

SEQ ID NO: 122887 - DNA, 469 bp, Homo sapiens; identical to SEQ ID NO: 8989
  chr12:103352313-103352782
  hyper

SEQ ID NO: 122888 - DNA, 213 bp, Homo sapiens; identical to SEQ ID NO: 8990
  chr12:103355122-103355335
  hyper

SEQ ID NO: 122889 - DNA, 149 bp, Homo sapiens
  chr12:103355910-103356059
  hyper
tacatctgctctaatcgcttagcaacacaaagccggggcttgtgcggcgaagggaagccattcacagagctctgacaggccgcattcagcgcgcgttagtcagctccataaatcaccgctgcccattggctgcgcggcgggctttggag

SEQ ID NO: 122890 - DNA, 30 bp, Homo sapiens
  chr12:103356471-103356501
  hyper
agacacgcccgaaatcgacgaggaggagcg

SEQ ID NO: 122891 - DNA, 292 bp, Homo sapiens
  chr12:103358633-103358925
  hyper
ggagggaagtggattcggtgacactaaggttctttacccactgcgaaagcgaatggcttggatctagcgcaggtcgaagttatattccttcttcctttgtatgcaagattaggttgttacaaaagagggtgtgtaggttaatggcaggaagcaagttgcagcgcggagcgcgggccctgagcgcgtgtcaggcttaatgatttattcaagctgcagcgcatccgggcgttgattggctgcaggcatgcgtccgctgtcagctgcgcgcgccgggaactctccaggctacctg

SEQ ID NO: 122892 - DNA, 360 bp, Homo sapiens
  chr12:103359253-103359613
  hyper
tcccagaacgtcccgcgtgcgcccccctctaggcagccagcgggcggccgcttacaaagccgcctttgatgctctggctaccagggctattttggggacgagatgggggaaagccgccaacccacactccttggagggagtcactttctgcaaagtgcgttggagaggactgggccctgggtccgggctgtcgaagcaggaagtggatgtaggggacaaaagctccgcacctgccaaatgcgagaccttagagagagcctccccctcgccgctccctgctcccccgcgggcccgggaagcttgcactaccgggctcagcgcagccagccccaccgcctccggactcgaccccaccatagc

SEQ ID NO: 122893 - DNA, 30 bp, Homo sapiens; identical to SEQ ID NO: 49978
  chr12:103481413-103481443
  hyper

SEQ ID NO: 122894 - DNA, 30 bp, Homo sapiens; identical to SEQ ID NO: 49979
  chr12:103602171-103602201
  hyper

SEQ ID NO: 122895 - DNA, 8 bp, Homo sapiens
  chr12:103696151-103696159
  hyper
cgggattt

SEQ ID NO: 122896 - DNA, 202 bp, Homo sapiens
  chr12:103696193-103696395
  hyper
cggggtgtgcctgagcgcctgctgggactgccatcctctcctccggctcgagctctgtgttactcgggccggtgctctgcagagcgccgggcgtctggctcctcctgcagaggccgatggcagtggaaggtctggcggcagaacctggaaggcaaagcaggaaagcaggacagagatgaggctcaagcgtgcgggaccacac

SEQ ID NO: 122897 - DNA, 575 bp, Homo sapiens; identical to SEQ ID NO: 8993
  chr12:103889138-103889713
  hyper

SEQ ID NO: 122898 - DNA, 310 bp, Homo sapiens; identical to SEQ ID NO: 49981
  chr12:103889788-103890098
  hyper

SEQ ID NO: 122899 - DNA, 30 bp, Homo sapiens; identical to SEQ ID NO: 49982
  chr12:104036483-104036513
  hyper

SEQ ID NO: 122900 - DNA, 476 bp, Homo sapiens; identical to SEQ ID NO: 49983
  chr12:104235215-104235691
  hyper

SEQ ID NO: 122901 - DNA, 797 bp, Homo sapiens; identical to SEQ ID NO: 49984
  chr12:104322591-104323388
  hyper

SEQ ID NO: 122902 - DNA, 310 bp, Homo sapiens
  chr12:104324275-104324585
  hyper
actcaccggccgcacgccatgagggccctgtgggtgctgggcctctgctgcgtcctgctgaccttcggtgagtgattctggaggagcagacgtcccccctccacacacgcggccgcttctcgaaggtcctgggggcgttgaacgtgggaggggggatcccggggcctgcggtgggccaagggacgtcaccattcctcgaaagagggcaagggaattacgtttattctcttcttcctctggaaataaaaaaagagagcaacatcatctaactgccctacagatctaatagtatctcgcccggaggtctcag

SEQ ID NO: 122903 - DNA, 367 bp, Homo sapiens
  chr12:104359126-104359493
  hyper
tatatccaaagtaatgcggagagtggtttatgtagagctttacattttacatagcagctttacattcaccctcatttcacagataaggaaactgaggcccaagatggcacagtggcctcgacgcccaggttttccactttcaaagaccctccctcacatctcattacctgataatgcaacacagtctttaatcggggcgaatttcggggtggaaaggactagataatgctgataagcgtcatcatcccatatacacagcaccccaaggacagcaccctatcgcccacgcgtccaccagcccccgaaaatactggagacaaaagctgacgtcggcagagcgctcctagtccccgtcttctggtcctcc

SEQ ID NO: 122904 - DNA, 241 bp, Homo sapiens; identical to SEQ ID NO: 49987
  chr12:104443910-104444151
  hyper

SEQ ID NO: 122905 - DNA, 30 bp, Homo sapiens
  chr12:104458094-104458124
  hyper
tccaccctaaggtgcgttgctccgggtggc

SEQ ID NO: 122906 - DNA, 99 bp, Homo sapiens
  chr12:104459022-104459121
  hyper
agccgcgctctaaagcggcggggacgtggtgaggcggccttgtgtctgcatactcggtgtggacgcccttctggactggccctcggaaagaggactgtc

SEQ ID NO: 122907 - DNA, 30 bp, Homo sapiens
  chr12:104530926-104530956
  hyper
ctatggggtccatgcgggttagtgggatgc

SEQ ID NO: 122908 - DNA, 30 bp, Homo sapiens; identical to SEQ ID NO: 49989
  chr12:104531876-104531906
  hyper

SEQ ID NO: 122909 - DNA, 68 bp, Homo sapiens
  chr12:104532324-104532392
  hyper
cccttcccccgccacgtggaggtgcctcagccgcctgagctcagcctgcctgcgcctggatttttaag

SEQ ID NO: 122910 - DNA, 420 bp, Homo sapiens; identical to SEQ ID NO: 8999
  chr12:104609376-104609796
  hyper

SEQ ID NO: 122911 - DNA, 116 bp, Homo sapiens
  chr12:104680591-104680707
  hyper
tcttaggttgggggcggctatgagcaggcagaggatgtggtgtcacccaattaggagctctcagcttacgaggcaattagcataggttgccagggctgcacgaggagtggatttct

SEQ ID NO: 122912 - DNA, 30 bp, Homo sapiens
  chr12:104681058-104681088
  hyper
aacccaggcagcttcgtggcgtgtgcggtt

SEQ ID NO: 122913 - DNA, 728 bp, Homo sapiens; identical to SEQ ID NO: 49991
  chr12:104682327-104683055
  hyper

SEQ ID NO: 122914 - DNA, 395 bp, Homo sapiens
  chr12:104850141-104850536
  hyper
ggaaagctcagctgtcgcctgacccgagggtcgtgcagtttccttaaccctgactttaagtcagccctctttaaccccgactcccaagctgggctgtcctttgaaagaaaaacgaaaccgcccagttctgagcgtcggaaaatgggcactcgctccctgggggtttggggcaacttccccgctacgtcgcccagggattttaaataattgccagccaccagaaaccccctaacccttaattcttccctccgagacccagcccgctgcttgccacttccctctccaaacgctggcgggggtgggtggcagcaccgaggcgattttcttcgtctttttttcctccgggttttgtcatggaaacgctgacacaacctccagacggcggccgagcccgg

SEQ ID NO: 122915 - DNA, 2255 bp, Homo sapiens; identical to SEQ ID NO: 49993
  chr12:104850577-104852832
  hyper

SEQ ID NO: 122916 - DNA, 31 bp, Homo sapiens; identical to SEQ ID NO: 9003
  chr12:105110247-105110278
  hyper

SEQ ID NO: 122917 - DNA, 30 bp, Homo sapiens; identical to SEQ ID NO: 9004
  chr12:105380156-105380186
  hyper

SEQ ID NO: 122918 - DNA, 604 bp, Homo sapiens; identical to SEQ ID NO: 49996
  chr12:105477919-105478523
  hyper

SEQ ID NO: 122919 - DNA, 230 bp, Homo sapiens
  chr12:105629077-105629307
  hyper
acttgactctcatctcgagtgtgctaatgaagttcccttgtgcgacaaatggggcaggtactgtatttttctcttcactaatgggaaaacggtgccaaaaggaggcctggtaccgccggaaaagagatccaggccctctgcctctcattctggctggcacaagtctcatcacatcattaggagtagcagtaataagactgactcattatctgtaccggacattgtctgct

SEQ ID NO: 122920 - DNA, 30 bp, Homo sapiens; identical to SEQ ID NO: 49998
  chr12:106216288-106216318
  hyper

SEQ ID NO: 122921 - DNA, 903 bp, Homo sapiens
  chr12:106532091-106532994
  hyper
aagagagccccagggcgcacagacccccgcctcgcacgccctcagtccccggccgcgtccacccagcgccccccgcaccctccaggattgccccactcaccactcggccagaaaacctctcggtggcccgcttgactttgccgtaggtgcctttgcccagggtctcctgcagctcgtagcggtgcttcaagttgtgcttgtggtgatgccgcttcaccccgtgcggcttcctgggctccagggctgcagtcgcccccgccaccgcctctcggggagagcccggcgcccccagccccaagtcggggcggtcccccgccacaggcgcggcggccccttccatgtccaagcgcggggcgagccgggctacagagggcaagaccgggcacagcgctgggatgtcggggtccccaccgagggaagccgctgtacgctcaaggtcgcccccgcagcatcagggaggcggcccgataccgctcggactgcggctcggtcactggcggcggcggggactgcacatctggcgcccgcggcgcgcacggtccgcgcaccgccccccggccgcggcgagctgtggagcgtcgggcgaggtggcggcggtggcaggggaggcggtggtgtttgcaggagggaggggagagggtggctcgcagcgcaggagggggagtgttatgtggggcgccgcgccccccaacccctccccgggaggacgcgcagacggggcgggggcggcgctcgcgcggccccaggggagggggagcgaggggcggtgcagccagggcttcccccacctccctgcagccacccggggccggggccgccgtgagctgggagggggatgggagcgtgtcgcgactcgccctttgtgcggcgcggcgtaggccacggcggcggcggcggcggcgg

SEQ ID NO: 122922 - DNA, 118 bp, Homo sapiens; identical to SEQ ID NO: 50001
  chr12:106533275-106533393
  hyper

SEQ ID NO: 122923 - DNA, 265 bp, Homo sapiens; identical to SEQ ID NO: 50002
  chr12:106640991-106641256
  hyper

SEQ ID NO: 122924 - DNA, 55 bp, Homo sapiens; identical to SEQ ID NO: 9007
  chr12:106641514-106641569
  hyper

SEQ ID NO: 122925 - DNA, 96 bp, Homo sapiens
  chr12:106695917-106696013
  hyper
agttccgattgccccgtctagacaggggtgtgcgggcactcaatgttccacgcgcggccgggagctcgcagtgtggtccacgccagtgcgcctgga

SEQ ID NO: 122926 - DNA, 30 bp, Homo sapiens; identical to SEQ ID NO: 50004
  chr12:106696369-106696399
  hyper

SEQ ID NO: 122927 - DNA, 38 bp, Homo sapiens
  chr12:106751648-106751686
  hyper
gtgagcagcatggacgtgctagcggaggagtttgggaa

SEQ ID NO: 122928 - DNA, 30 bp, Homo sapiens; identical to SEQ ID NO: 50006
  chr12:106751991-106752021
  hyper

SEQ ID NO: 122929 - DNA, 492 bp, Homo sapiens
  chr12:106974458-106974950
  hyper
ccgggcggtggcagccgcccaccctggggacgcgctccttgctgccaccggaacgcccctggccaggctccatctacgcgctgtcagaccctcccgccgtctgaagaaggcttttactcttcagcctattccagtggcagagaagctaaggctacaaaggcgaacgcgaacagtcagatctgacttcgaattccgctgtcattgctgccaggcgcaccacgaggacgcgcggtgaccgccaccatggcattcggctgccaaaggtttccatcgacctctttcccatcaccagcatcgcagcgggaaagaatgtgcctggcgcccttctgggcactgggcatggggtggtgaacaaagtcctccagaaataaaccgggtaatgagcccggcagcggccggggcaggaagggaccttcgcagagagtggtcaggcacagcccctccgaggaggcgacgctcagctgagaccagggtgacgcaaaggtgtcggcc

SEQ ID NO: 122930 - DNA, 560 bp, Homo sapiens
  chr12:106975167-106975727
  hyper
cgggctctgtccagccggtaccgcgcgccgccttcttcctcccgcaccgtgaccttaactcggcacgtgctggcccctcgggctccccagtctccgtacattgtcccactcagctctgattgtggggagggggcggaccgagggggcggggggcgtctttccgaaggatcgcggaaagccgcgcgctgccaggggcccggggttagagacccccactcccgcacggcgttagggactccgcgcttccccgcccccgccgcggcccgccggctctgcctctgtccatggtcaaagcacccggggtaatccgcctttctcttccgcccgccgggccccattcatattctaatcacagcgcggccgacccgcgaacggccactttatcggggcccgcaggagacgcagcttgctccccctcacttccacttccagcaccccccggccctcgcccccctctttctgcactttcaactccgccgaggagggggtccctgggaaaaccgcgtccccacttggatgccggggcttctcacaaacttcgaggccgactgggggacggc

SEQ ID NO: 122931 - DNA, 598 bp, Homo sapiens; identical to SEQ ID NO: 50009
  chr12:106976181-106976779
  hyper

SEQ ID NO: 122932 - DNA, 16 bp, Homo sapiens
  chr12:106976842-106976858
  hyper
cgctttttctctctcc

SEQ ID NO: 122933 - DNA, 282 bp, Homo sapiens; identical to SEQ ID NO: 50011
  chr12:106977374-106977656
  hyper

SEQ ID NO: 122934 - DNA, 312 bp, Homo sapiens
  chr12:106979277-106979589
  hyper
gacttgcaaaaccgacgacaagggaagtgcggctcggcgtggtccagtccagaagccttccctcacctcccttccagagaatttaatccaattagcctttcttctgagtttcccttgttatgtaaagggtcttttctcctggcttgcagagacgcgcgctccatggagcagttcgattctgctccttttgtataagatcgcgcgcgatcagaaccaggaatattgctgttattatatcattccgaaaggactggaacaaccgactcacagcaagtgctggggcgaagtaggaaacgtccaggataagagagg

SEQ ID NO: 122935 - DNA, 1110 bp, Homo sapiens
  chr12:106979636-106980746
  hyper
cgaagtgcctcgggcccgggagaacagttttgcaggggccagggctctagtggcctgctttggggccacttcagcatgacctgcggaaacgcgcccctttgttccgcacactgagccagtaatatattcctcgggtttccccaaaatactcaacaagtgtggagctaagacaatggcccggtcgggggaagctgggcagccggcgcgcgcctcctgggccctaggcgctctcgctgccgagcccgacaaagcaaagcccctctcggaggcaaagccccagcttgccgcgcgccgcggtgctccggcaggaggcaaaggcgacaggcgcgcgcaggggcagtcgacgcaccttctggccggtgcgcggtttgcagtaagcgcaggcgcgcgtcccgctcggcccgcgctacagccccacgccgcgcaaaagtgggtgctgagccccgcgtggcctgcgctccccacgcgggccaccggcagctacgtgtttgtggccgccgggtccaatcagggctgctctgcccgggtgatcgttgctcagttactcaagttatccggaaattcgagaacgatgggggaaagtgggtagaattttaggccaccgagaacttgtgcaaagtgggccgggccgggtcggtcgcctacgcaacagaaggatcatttcttttaaaacgggatggcgcgttagagagggccactgccaagctggagctggaaacttctgcctccatccactttccgctcccatctccagaacccagagctgaggcggccaaagtacttcctggagccggatttgagttccccgggccgcatcggtgggagggcacgctagtttacaggcccccagctcagcacaaattctttctaaaattctaccaccaaattaattatatgcctttgtgggcccggggtagggatgtccagtggccttggcgccgtgcccacaaggcaaagtgcgtcctggagggaacagggcccgagcctcctccattcttgcccaggcacagccctggggaaggagccactgtctgcgggcttgggagagcaaggagccggaggtccgagccttgctccagcgcccaaaccagacagtctcgccctccccgg

SEQ ID NO: 122936 - DNA, 748 bp, Homo sapiens
  chr12:106980911-106981659
  hyper
cgcaggctgggtcctcggagtcccggattcagcacgcgactctgtgcggcagcctgggacagcgcgctttcctacccggcctgcaggtcccagagactcggaaaagtttgcaggggccgcccggcgcctcgggcctgggatttccaaagccgctcccgcccccgtccccagcgcgtcaccatggagactgctggaagttggtggtggaaaacagacctggcgcaaagcaaaatattatgagtgcagttggggtgacttcagggggcggggggaccggagggcaggagcgggagccagaggcagaggccgacaacaaagggcccagtgcgaggaagagagaggagtttgcacggggcctccccgccgctgtgtgagtgctggaccatcctgcttcccagaggctccgaggtctctaatttctctccagcagctataccttttctcagcccgccttggagcccttgctccctccctcctctccgggttctcttccagcctcccccctcacccgtccggaggttaggcgccagctgggcagtgcgcccgcctccccaggagccacaggctcaccaacgtgaaaggttctggcttttcttccccacgacccgtgggtcgcccagggtgagtttctcaccccctatctcaaacccgatctgaaagggtgatgggttagaataaggtgggaacggaacgggaagagaagggagcgtctggccagaaatcttgcgagtggggatgggtaaagagg

SEQ ID NO: 122937 - DNA, 986 bp, Homo sapiens; identical to SEQ ID NO: 50017
  chr12:107167935-107168921
  hyper

SEQ ID NO: 122938 - DNA, 30 bp, Homo sapiens
  chr12:107297463-107297493
  hyper
caggaaaggttcagcgaggtttgtgttcag

SEQ ID NO: 122939 - DNA, 141 bp, Homo sapiens
  chr12:107349515-107349656
  hyper
ggtgggcgtgtgcccggtgggcgcgggaggggcccgggctgcacgagcgcgcgtgcgcgtcggaactggagccgcgggaggaggcgggagctgaggaggcggcggagggggcgggtcgcgtcgggcgccacgtccgcagcc

SEQ ID NO: 122940 - DNA, 30 bp, Homo sapiens
  chr12:107381060-107381090
  hyper
gtcggagtgggaatcggctttccaggcagc

SEQ ID NO: 122941 - DNA, 1526 bp, Homo sapiens; identical to SEQ ID NO: 50018
  chr12:107486363-107487889
  hyper

SEQ ID NO: 122942 - DNA, 94 bp, Homo sapiens
  chr12:107488133-107488227
  hyper
caacctttcacccctcgtctcttacatttaatgtagtttaccggtctctttgaaactggacgtttgtctacttttccagcgacagtgaactgca

SEQ ID NO: 122943 - DNA, 2714 bp, Homo sapiens; identical to SEQ ID NO: 50020
  chr12:107711706-107714420
  hyper

SEQ ID NO: 122944 - DNA, 693 bp, Homo sapiens; identical to SEQ ID NO: 50021
  chr12:107714658-107715351
  hyper

SEQ ID NO: 122945 - DNA, 38 bp, Homo sapiens
  chr12:108079428-108079466
  hyper
cccagaccagcccacgtggattcctcgcccggctgctt

SEQ ID NO: 122946 - DNA, 115 bp, Homo sapiens
  chr12:108079515-108079630
  hyper
cgtctgaaatgagcgccgacgctgcccaaacaggagcctgcgcatgcgctctgccctggcagcggccctgtgcagatccctgagcgtgtggcagcagtgcggtcgtggtccctcc

SEQ ID NO: 122947 - DNA, 30 bp, Homo sapiens; identical to SEQ ID NO: 50022
  chr12:108154514-108154544
  hyper

SEQ ID NO: 122948 - DNA, 30 bp, Homo sapiens
  chr12:108155139-108155169
  hyper
ccatggttgctaggcgaccagggctgctgt

SEQ ID NO: 122949 - DNA, 409 bp, Homo sapiens
  chr12:108169004-108169413
  hyper
cgtaaaccggcggaacggctggccttgccatactcgctgcgcaccgcgcccctgggcgttccggggaccctgcccggactcccgcggagggaccccctcagggtcgccctgcgtctggacgccgcgtgctgggagtgggcgcgcagcggctgcgcacggggatggcagtacttgcccgtgccgctggacagcgccttcgagcccgccttcctccgcaagcgcaacgagcgcgagcggcagcgggtgcgctgcgtgaacgagggctatgcgcgcctccgagaccacctgccccgggagctggcagacaagcgcctcagcaaagtggagacgctccgcgctgccatcgactacatcaagcacctgcaggagctgctggagcgccaggcctgggggctcgagggcgcggccg

SEQ ID NO: 122950 - DNA, 15 bp, Homo sapiens
  chr12:108169549-108169564
  hyper
cgcacagcgcgcagc

SEQ ID NO: 122951 - DNA, 194 bp, Homo sapiens
  chr12:108237330-108237524
  hyper
agctctcaatctcggcggtgctaccaggaatccgagtagaagtggtcagggatggagcccagggccacctcatccttcttcctcctggagccaaacagcttcttcatcgcggcagcttcggagaagcctcagctaccctgcagctccccttcgccttttcgcggaatccggagtccagtcacaattagctaagc

SEQ ID NO: 122952 - DNA, 853 bp, Homo sapiens; identical to SEQ ID NO: 50026
  chr12:108237660-108238513
  hyper

SEQ ID NO: 122953 - DNA, 45 bp, Homo sapiens; identical to SEQ ID NO: 50027
  chr12:108238683-108238728
  hyper

SEQ ID NO: 122954 - DNA, 439 bp, Homo sapiens; identical to SEQ ID NO: 50028
  chr12:108297324-108297763
  hyper

SEQ ID NO: 122955 - DNA, 42 bp, Homo sapiens
  chr12:108298347-108298389
  hyper
ggattacaggcgtgagccaccgcgcccggctccaatgcacct

SEQ ID NO: 122956 - DNA, 31 bp, Homo sapiens; identical to SEQ ID NO: 50029
  chr12:108306543-108306574
  hyper

SEQ ID NO: 122957 - DNA, 591 bp, Homo sapiens; identical to SEQ ID NO: 50030
  chr12:108523021-108523612
  hyper

SEQ ID NO: 122958 - DNA, 30 bp, Homo sapiens; identical to SEQ ID NO: 9021
  chr12:108523873-108523903
  hyper

SEQ ID NO: 122959 - DNA, 30 bp, Homo sapiens; identical to SEQ ID NO: 9022
  chr12:108594027-108594057
  hyper

SEQ ID NO: 122960 - DNA, 93 bp, Homo sapiens
  chr12:108908839-108908932
  hyper
ggccccgcccctcccgctgcttattggctgctacgtgaacgagacaaacgcaagcaacaaccaatgggagtggcccacggcgcgtctttcccg

SEQ ID NO: 122961 - DNA, 16 bp, Homo sapiens
  chr12:108955347-108955363
  hyper
cgcctcaaacgcaaag

SEQ ID NO: 122962 - DNA, 122 bp, Homo sapiens
  chr12:108956082-108956204
  hyper
ccgcattcccgcagcgggatttgtgaaagcgaacttgagccccacactgcagaagccctgaggtcctgtctcaaccagaatccagcacccaggacaagccctccagcgacttcagaccttcc

SEQ ID NO: 122963 - DNA, 30 bp, Homo sapiens; identical to SEQ ID NO: 9024
  chr12:109125490-109125520
  hyper

SEQ ID NO: 122964 - DNA, 276 bp, Homo sapiens
  chr12:109162557-109162833
  hyper
tacacgacggggcgtcgcgcctccagggctaggccgggcggatggagggggtccccggagcccgggggaagtggcgcagtgggcgtctgcatcggcccgaaggcacttgcgcagaggtccggcaggcagcagagcaccttgtgggcgtggtcgctggaggcagcgcctggcacccccatctggcacagagcgtccctgccctgccccctggggctgcggaggccacctccacgcccatttgccatccctgagccgcttctgcgacctgtgggggtg

SEQ ID NO: 122965 - DNA, 117 bp, Homo sapiens
  chr12:109250886-109251003
  hyper
gatgtgggtcacagcgcacacacagtatcctgcagacactcccagaggggtcgcactgcatacacagtccctgcaaagtcgccccccgataggggtcacaccgcacacaaagtcccc

SEQ ID NO: 122966 - DNA, 30 bp, Homo sapiens; identical to SEQ ID NO: 50038
  chr12:109458717-109458747
  hyper

SEQ ID NO: 122967 - DNA, 30 bp, Homo sapiens
  chr12:109490705-109490735
  hyper
tggaggcctgggcccgtaggtgggaggact

SEQ ID NO: 122968 - DNA, 415 bp, Homo sapiens
  chr12:109531039-109531454
  hyper
cccataactgacctcgctgccccccaccagtgttaaaatagatcagtctagtgatgctcaagtggatacgattcagaagcgagacgcaaagaggttaaacacgggtaaaccgcacgcaaaattctgatatcactgcaacacgtccgtggggtgggggtggcaagagtgctctagcatcgcagctccggcgcagatcggaatcccgcagtcaccctggtggcctcgtggtgggaaagacgcgccccagcgaatcggtcgcgtcacttccggagcacgctgggaactacggcaggctagggcgcaaagagagcagccgggcggccccctggtgccacctgctggcctcccgtgtgtggcaagcactgccgctttcccgttgatcacctgttgggccactgtcgagaatcacggctgg

SEQ ID NO: 122969 - DNA, 99 bp, Homo sapiens
  chr12:109535376-109535475
  hyper
gagcatgcgcgggccgcttggcgccaattgctgaccgccacagccacagccagggctagcctcgccggttcccgggtggcgcgcgttcgctgcctcctc

SEQ ID NO: 122970 - DNA, 170 bp, Homo sapiens
  chr12:109592370-109592540
  hyper
ggggcggggctccgtccggaaggcggggccctcctggggcggggtcggtgtgggggcggggcctgggtggggcctaggcgggcgcgatggcccgggactctggcgcgcagggtgcatttcgggatggagcaagcgcagcgcgaagttgggcgcccgccggctgcagcaga

SEQ ID NO: 122971 - DNA, 625 bp, Homo sapiens
  chr12:109746883-109747508
  hyper
cccgggaggagggagcaaagccgaccctgcaaggcggtacctggagccgatcctcgcggggccgccgctgccggcgctccgggggtgggcaggggttccggaggggggctccctcgcgctcgcccctcgcgttccgcaatttggccgccgtcgcagctcgaaccgtttttaaatttccctctctggagctgtccagctcagagcatgcgcagtagccgtgcggggggcttttccccaagggtcagttacagggcagggtcaaggggattgcagcgggcgtttcccagcagccgcgagccttgcacgccccggggttctggggggggggtgtgtgtgaggggggcggggcggaggagtgcaggggtagggacccctcttcaaactttgccaacagtgacaacaactgcatgcccgagagcatgcgttgaggagcagtgggagggtgatttcggccaagggaattaagttgcaaaaggaggctgggtgcattaaaacttgcaatcccgcctggggcaaaggacgtgggcgggcggagagatctgttgcaaccccctctctcccccaaagtggaggacgggccgggaggcagagacggggccccaggtggacgcggattcggtccacc

SEQ ID NO: 122972 - DNA, 137 bp, Homo sapiens
  chr12:109747912-109748049
  hyper
gcctggagccagccgcgggaaaggtggcgcggaccgcggacggcggcggggcccagagcgggcagaggtctccacaggccccttaggaggcttggatgagtttggtcccctggaaagtttgcgtttctggcgcccta

SEQ ID NO: 122973 - DNA, 176 bp, Homo sapiens
  chr12:109915369-109915545
  hyper
gcgaagaagctctgcggaactgtcattttccggaactggatgcttgcttcctggcggggttctgaaagcgaacaccgcggggcaagatggcggtagtgcgtcggctgctgccccgggtctggcagaactcgggtgttttgggctgagacagtggcagctgcggccccgaccccaag

SEQ ID NO: 122974 - DNA, 269 bp, Homo sapiens; identical to SEQ ID NO: 50042
  chr12:110011227-110011496
  hyper

SEQ ID NO: 122975 - DNA, 30 bp, Homo sapiens
  chr12:110318492-110318522
  hyper
cggttcatgggtcccggagggcccaagtga

SEQ ID NO: 122976 - DNA, 30 bp, Homo sapiens
  chr12:110318740-110318770
  hyper
tcacggttctctttcgctacaaccgacgag

SEQ ID NO: 122977 - DNA, 681 bp, Homo sapiens
  chr12:110337996-110338677
  hyper
tctcccgctggccacgacggggcaccagagaaaaacacaggctccctacgcgctgaaggaggcttggcccttgcgacgctccgtcgtcgggctcgttgccggtgcaaacagggaggaaacagccggcgttgctgtagcgcgtctgggaattacaccgggggactggccggcccgcttcgtgcctgcgggaagtcgggccgggggactcttcggaaactccgagcctcagagaaatgtgagtcggagggttggactaggccggatccggcgttagggcgggggcccgcaggcggcccgcgcgggcgggaaccggggcggcagtcagcgggcgcgagctcagggcgcctccggggtcctcactgcgctccccacgcgctgtgaccccatttgttgcacgtgcatgttcaggtcgagagagggatgcgacgtgttcggggagcagcccaccttgtgggtggccaatccgggacgggaatcttaaacttttaactcttggtgcaaagactgatccactggcggctttacgggagcgggaaaaaagtatgtgaagcttgccacggtctcgagaccgaggtcacacgttagcagcctgccggctacatttggaccatagacgcagagtgtttgcccccaaaactggaggacctccagaatgagattcttggcgtgcaccaggccttt

SEQ ID NO: 122978 - DNA, 30 bp, Homo sapiens
  chr12:110433822-110433852
  hyper
tgacaggcccgggacggttcccaccccaag

SEQ ID NO: 122979 - DNA, 30 bp, Homo sapiens
  chr12:110434231-110434261
  hyper
gcactctgccttgtcgccatcttgagtgag

SEQ ID NO: 122980 - DNA, 30 bp, Homo sapiens
  chr12:110436888-110436918
  hyper
ggctgcaagggtgtcggcagctggaatggt

SEQ ID NO: 122981 - DNA, 30 bp, Homo sapiens
  chr12:110437123-110437153
  hyper
ggtgggtgcaatggcgcggaccccggaccc

SEQ ID NO: 122982 - DNA, 30 bp, Homo sapiens
  chr12:110486449-110486479
  hyper
cctaagatttgttccggattaacgttcctc

SEQ ID NO: 122983 - DNA, 166 bp, Homo sapiens
  chr12:110561794-110561960
  hyper
aatgaaacatcacacgcatttaacataggttaatcatgcagagagtattttgtaaactgcgaagtgcaggactttcgggaagcttattgtagcgcgtctaggtcggagtaacagtcccaaatgccctcggctgtctgcagtggctcagcacgtgggcccgctttgc

SEQ ID NO: 122984 - DNA, 31 bp, Homo sapiens; identical to SEQ ID NO: 9031
  chr12:110719374-110719405
  hyper

SEQ ID NO: 122985 - DNA, 30 bp, Homo sapiens
  chr12:110720111-110720141
  hyper
agaagtgatgacatcgctgaaaccactcct

SEQ ID NO: 122986 - DNA, 323 bp, Homo sapiens
  chr12:110841359-110841682
  hyper
agctgctgaggagccgcacgttggagtgcagccccgcggccgccatgtcccgcacgtggtctatcacattcatcctgctctgcaaagccgcgggcagcggcggcagcactgactcgaaaagccggtagaggatccttagggaagactccaaaatggcggcgtcgccggggtccatcgggtccacacgcggcaccacccccaagcaagaggtaactactgaagtgcccgaataaaaagaaactcgagtccctgctcctgtcgtggtccttttcaggtgaaatgagttgttatttttacgcaaaaatcacgttatcatcctaaac

SEQ ID NO: 122987 - DNA, 30 bp, Homo sapiens; identical to SEQ ID NO: 50047
  chr12:110888265-110888295
  hyper

SEQ ID NO: 122988 - DNA, 30 bp, Homo sapiens
  chr12:110906040-110906070
  hyper
tagccttcgcgcgacgcccactgagctccg

SEQ ID NO: 122989 - DNA, 201 bp, Homo sapiens
  chr12:110906302-110906503
  hyper
gctccgcatccttgcgccacgtgcttcggtccgtggtttgcgtgcagacgtttgacctgtatggtgaccctcgcgatttgcaaatgtgctgaggatctggaatactgaagtggaaggcacctcttgttttggggagcatgtatatttccctcctgtgacgcactgcttccacagagaggtgcaaacgtgcaaacgctcagc

SEQ ID NO: 122990 - DNA, 30 bp, Homo sapiens
  chr12:110906712-110906742
  hyper
cggtctcggcgccgcggagatgcccggcca

SEQ ID NO: 122991 - DNA, 30 bp, Homo sapiens
  chr12:110907053-110907083
  hyper
tggtgcagtggccacgaggtgactgcgaca

SEQ ID NO: 122992 - DNA, 48 bp, Homo sapiens
  chr12:110939786-110939834
  hyper
acggctcccaacaacgcagcaccccacccgagagccaggccttggtcg

SEQ ID NO: 122993 - DNA, 102 bp, Homo sapiens
  chr12:110939888-110939990
  hyper
cgtcgccgccctcttcctcaggctcctcggcgacccgcccacttaaccgcaaccaatgagagcagagggagacagaaattgccgtacggaggcccgcacgga

SEQ ID NO: 122994 - DNA, 30 bp, Homo sapiens; identical to SEQ ID NO: 9032
  chr12:111020656-111020686
  hyper

SEQ ID NO: 122995 - DNA, 148 bp, Homo sapiens
  chr12:111021163-111021311
  hyper
cctgcccctagccccgccccgattcaccgctcaggcccaagcccagccccttgggctcgctgccttatgcagtcaccaaggttgaacatgcgcagagggtgcggacgcagtgtctcttgggaattatagtcccggagtcgtagtcact

SEQ ID NO: 122996 - DNA, 45 bp, Homo sapiens; identical to SEQ ID NO: 50050
  chr12:111051730-111051775
  hyper

SEQ ID NO: 122997 - DNA, 66 bp, Homo sapiens; identical to SEQ ID NO: 9034
  chr12:111052027-111052093
  hyper

SEQ ID NO: 122998 - DNA, 218 bp, Homo sapiens
  chr12:111126682-111126900
  hyper
gaagcactgcccgcccgcgccgggacacgccagagccgagggcaaccgagggctggggtcctgctggggctccacggcgaggcctggacagcggagatgcgggggggggtcccctcttctcggaaggatcgggcactgggggtcttgtagaaagggctgcacgccaaacggggtacgccccccgcccggcccgagcacttacccggcgccccacccgc

SEQ ID NO: 122999 - DNA, 283 bp, Homo sapiens; identical to SEQ ID NO: 50052
  chr12:111127124-111127407
  hyper

SEQ ID NO: 123000 - DNA, 30 bp, Homo sapiens
  chr12:111180869-111180899
  hyper
cgcaaccgcgtccccgcatgggatccttcc

SEQ ID NO: 123001 - DNA, 571 bp, Homo sapiens
  chr12:111284504-111285075
  hyper
ccagcgattgcatggcgttggccgagggaggggctaagactgttgattgactcaagaagtcacttagcgtcatgagggtccgggtagtctggtaaggggtcgctggagagtgtgtcgcccctctcccccaaccaaaagcttccctccaaccagctgctcttgtcctctcctcccgagggccctgtgccctcccagcggacttgcaggggagaacgtccatgtttgtgcgagtcacaaaggcgcccgttccaggggtcccagaacgcccgggcgtggggctgggggtgtggcgcagcgaggccgcgcagcaagcagtcctcccggcaccgtcggaagcgcagttgcagcagccgtcggacaagcggccggagcagccacggacaagcagtccgggccccgccactggtaagtttcgccgcccgcccggccgcgcctgctgcgccacagctccccctgccagggaaaaggaaagagcggtcgcggtccccagtccattcatatctcgctgccctaagcgttgaaagtatcagggtctcccgcaatcatgcataaataaattgtagtgtgtaaa

SEQ ID NO: 123002 - DNA, 828 bp, Homo sapiens; identical to SEQ ID NO: 50054
  chr12:111471131-111471959
  hyper

SEQ ID NO: 123003 - DNA, 137 bp, Homo sapiens; identical to SEQ ID NO: 9036
  chr12:111472058-111472195
  hyper

SEQ ID NO: 123004 - DNA, 315 bp, Homo sapiens; identical to SEQ ID NO: 9037
  chr12:111472356-111472671
  hyper

SEQ ID NO: 123005 - DNA, 537 bp, Homo sapiens
  chr12:111472851-111473388
  hyper
cgctcctgcctccagggcggtggagagccgggagcggcgcagagcaggtgactcccagccctcgggcccaagggaacttttaaatgagagatttccttgcttgttctgcctcctgcgtttctccccgctgctcccctcgtctcctctctcccgtctctgcttttcttctgtttctttcctctcttccctgctctttctctctccttccctagggcgactcttcgaaaccccatcactttctccccatcctccctttgtgggagtctgtgtgcctcccctagatttggaggtgttctctgcggaccccgtaggagccggggctgggaggtggaatctcagagaacgcaccgtggaggcgcggctccggcctctgttctttcccggagtgccccggacgcgcctggcaaggccccccagccttggagtctcgcaaagtctcggcgggtgcggcggggatcaggggcgggaaaatggtgcggataacagggcggttagagcatcctgccttgaccgtgacattcgcggaagacgcgagat

SEQ ID NO: 123006 - DNA, 30 bp, Homo sapiens
  chr12:111807099-111807129
  hyper
cgggaagctcattgcgattccaaaggtaag

SEQ ID NO: 123007 - DNA, 101 bp, Homo sapiens
  chr12:111843200-111843301
  hyper
gcgatgatgaaagccgtggtcgctattgcaccgcccagccctgcgggcactgataaggccctgcaggagggagtcagcaagggcgcgccccctggaggcca

SEQ ID NO: 123008 - DNA, 30 bp, Homo sapiens
  chr12:111843924-111843954
  hyper
tcctgcctgagccccgctcgagcgagccgc

SEQ ID NO: 123009 - DNA, 536 bp, Homo sapiens
  chr12:111844274-111844810
  hyper
tacccccacccacacacgtgttagggagagcgttggggtaactgaggccgtgggatgggggagagggcatcgctgacgcccccagcccaccctacggtagcctcgccggttgggggcggccctcccctcaacttgtgcctggggaggagcggtcaggggtcacccattgctaccctgaaagtgaaagtagtcaaactgaggctgtgagcacagatgagcccttgggtgtgggggcagcgggggaggatgcgccggcccctccccactccccattccgggccatgtggctaagagggtagcgccctgattcaggaagcccctctccccagttcctgcactgccgaggtcgaccgggccaggcccccgcatgctgctgaattgggcggttcaccagggctaggcgtcccagagacaggtttctggtattgatcctctcacacctcttgcctggggttccctgggaatcccccgaccaaaaaacgtctggagtgggtgttggtcttctagatccgcacggtagggatggtatttcagag

SEQ ID NO: 123010 - DNA, 30 bp, Homo sapiens; identical to SEQ ID NO: 50061
  chr12:111884592-111884622
  hyper

SEQ ID NO: 123011 - DNA, 30 bp, Homo sapiens
  chr12:112035300-112035330
  hyper
tctggcggcactcccgaagttaaggacacc

SEQ ID NO: 123012 - DNA, 30 bp, Homo sapiens
  chr12:112035665-112035695
  hyper
cagcaccgccaccccggatctccagggtcc

SEQ ID NO: 123013 - DNA, 58 bp, Homo sapiens
  chr12:112036145-112036203
  hyper
catgttccggaaaacgccaccacagcctccagacccctccaacgttcacacctaaacc

SEQ ID NO: 123014 - DNA, 30 bp, Homo sapiens
  chr12:112036842-112036872
  hyper
aggggcccatacaccggctcgcacgccggg

SEQ ID NO: 123015 - DNA, 30 bp, Homo sapiens
  chr12:112037371-112037401
  hyper
tctttaccggaagtcggaggggtcagacgg

SEQ ID NO: 123016 - DNA, 30 bp, Homo sapiens
  chr12:112037631-112037661
  hyper
catcttcacttctgcggggacctagtttgc

SEQ ID NO: 123017 - DNA, 182 bp, Homo sapiens
  chr12:112123543-112123725
  hyper
acaggcgagtgttccgcgagctccaatcggataacaaccagtgacacactcatagggcaggcgctggccggcgcgggccccggcgggctcaggcgaggctggaaggcgagccgagaggccgagcggcccggggccggcagcgccgccaccacctcaatgcagttgccgccgcctcagcagca

SEQ ID NO: 123018 - DNA, 38 bp, Homo sapiens
  chr12:112123941-112123979
  hyper
gagctgcaggttttcgcacagtcgcgagttaacctctg

SEQ ID NO: 123019 - DNA, 30 bp, Homo sapiens; identical to SEQ ID NO: 50065
  chr12:112167993-112168023
  hyper

SEQ ID NO: 123020 - DNA, 806 bp, Homo sapiens
  chr12:112204378-112205184
  hyper
tcgcttttgggtttacggccggtctcttcacctggagcatcagccgggaaggtcagggtcgccctggctcgggcctgttcacattggggtcaaaggcacacattgggggctcaaccaaggcgagctgcgttcgcggggccgggtctttccgcacaggcggagggcggtggcgggcgcggaggcgtcgcgcgagccagggggcagccacgggccgggggtacctagcgccacccgcttcgcttgcatcagctgcgcgccccatcccgaggaatggtagaggcagccccgcccccggcccgcccccgcctttccattggctgccgcgcggggcggggagcggggtcggctcagtggccctgagaccctagctctgctctcggtccgctcgctgtccgctagcccgctgcgatgttgcgcgctgccgcccgcttcgggccccgcctgggccgccgcctcttgtcagccgccgccacccaggccgtgcctgcccccaaccagcagcccgaggtcttctgcaaccaggtgagcccaccggccgggctcgcgctttgttttccggcccgagtcccccgcaggcccctaggaaggccccgcgccgccgtgggccttagtgtactcatctggggctcgaggggtttgcagaggctgacctggaagcacatctgccccctcctctcctgcaagcattttagccccttcgccgcctctgacagtccccgtcccatttccccgtgacttgggccccctctccgtcttcgcccagcctcggtctgttttccagggccaactctcggggttccgttctc

SEQ ID NO: 123021 - DNA, 30 bp, Homo sapiens; identical to SEQ ID NO: 9041
  chr12:112213516-112213546
  hyper

SEQ ID NO: 123022 - DNA, 30 bp, Homo sapiens; identical to SEQ ID NO: 50068
  chr12:112241750-112241780
  hyper

SEQ ID NO: 123023 - DNA, 30 bp, Homo sapiens
  chr12:112280877-112280907
  hyper
actactacacgtttcgatcactccccaagg

SEQ ID NO: 123024 - DNA, 30 bp, Homo sapiens
  chr12:112450632-112450662
  hyper
tctcccaggggaggcgctcacctcagatcg

SEQ ID NO: 123025 - DNA, 30 bp, Homo sapiens
  chr12:112451174-112451204
  hyper
agcgcgcgtgagtccgcccccccagtcacg

SEQ ID NO: 123026 - DNA, 30 bp, Homo sapiens; identical to SEQ ID NO: 50069
  chr12:112546245-112546275
  hyper

SEQ ID NO: 123027 - DNA, 30 bp, Homo sapiens; identical to SEQ ID NO: 50070
  chr12:112546890-112546920
  hyper

SEQ ID NO: 123028 - DNA, 30 bp, Homo sapiens
  chr12:112564050-112564080
  hyper
ggggtatctggacccggcaggggaagctcc

SEQ ID NO: 123029 - DNA, 30 bp, Homo sapiens; identical to SEQ ID NO: 50071
  chr12:112645385-112645415
  hyper

SEQ ID NO: 123030 - DNA, 43 bp, Homo sapiens; identical to SEQ ID NO: 50072
  chr12:112689846-112689889
  hyper

SEQ ID NO: 123031 - DNA, 30 bp, Homo sapiens; identical to SEQ ID NO: 50073
  chr12:112817767-112817797
  hyper

SEQ ID NO: 123032 - DNA, 30 bp, Homo sapiens
  chr12:112819461-112819491
  hyper
aaggccgagccaggcgctagcctaataaaa

SEQ ID NO: 123033 - DNA, 30 bp, Homo sapiens; identical to SEQ ID NO: 9042
  chr12:112842259-112842289
  hyper

SEQ ID NO: 123034 - DNA, 49 bp, Homo sapiens
  chr12:112847007-112847056
  hyper
ttttggcttcagtgcggaaccccaacgtggctgcgacaggctcagtgtc

SEQ ID NO: 123035 - DNA, 56 bp, Homo sapiens
  chr12:112856479-112856535
  hyper
gcagcgggcccggacgggtcggtggcgtagacgcggagcgcgcagctcacacctgg

SEQ ID NO: 123036 - DNA, 30 bp, Homo sapiens
  chr12:112857211-112857241
  hyper
accacgggtgccagcggccaggctcagcgc

SEQ ID NO: 123037 - DNA, 36 bp, Homo sapiens; identical to SEQ ID NO: 9043
  chr12:112884176-112884212
  hyper

SEQ ID NO: 123038 - DNA, 197 bp, Homo sapiens; identical to SEQ ID NO: 9044
  chr12:112888120-112888317
  hyper

SEQ ID NO: 123039 - DNA, 30 bp, Homo sapiens; identical to SEQ ID NO: 9045
  chr12:112891142-112891172
  hyper

SEQ ID NO: 123040 - DNA, 87 bp, Homo sapiens; identical to SEQ ID NO: 9046
  chr12:112915450-112915537
  hyper

SEQ ID NO: 123041 - DNA, 117 bp, Homo sapiens; identical to SEQ ID NO: 9047
  chr12:112924320-112924437
  hyper

SEQ ID NO: 123042 - DNA, 153 bp, Homo sapiens; identical to SEQ ID NO: 9048
  chr12:112926826-112926979
  hyper

SEQ ID NO: 123043 - DNA, 272 bp, Homo sapiens
  chr12:113013006-113013278
  hyper
ggtggtgttagtgctcgagggtcacgcgcgggtggctttgccgcggtggtggcagcggtggcagaggcgacaccgctggaggcggcggagggacgggcccaccaacgctgcaggccggtaaggcgggcgggggctgcgggccaccaggtcctgccctcccaagctgcagcacgcgctggctggggggtcgtgggggctcccgtgggggcgcggccggacgcgggacgctgcctccgggaatggggctgctggagcgggaggatgcgctagaa

SEQ ID NO: 123044 - DNA, 24 bp, Homo sapiens
  chr12:113013320-113013344
  hyper
cgcaggacccgtgctatcctttgg

SEQ ID NO: 123045 - DNA, 402 bp, Homo sapiens
  chr12:113229229-113229631
  hyper
gatgtcgagaagtcccgtcccccacccctccggactccccccttctctgctttaaccatccaattacttaacttctctgcctaggggttcgcttcccacccatcccctcctccaaggcatcttagcgctgtccgtggtgctgaccgccaatcccctggttgccgtttcgaccagctgggatctctggtgcgcccaacctcccctcccggcctcccacctttctttctccaggcaccgcacacataaatcacgggtgggaggcaggcttggttcccgcttggttccccctgcactgggaagctgccgccccgcttcccttgctcacacagggctttgcagtagtggtggcagccgcggcagaaactggctctggggaagcaattgattcgtctactgccagca

SEQ ID NO: 123046 - DNA, 30 bp, Homo sapiens; identical to SEQ ID NO: 50085
  chr12:113376666-113376696
  hyper

SEQ ID NO: 123047 - DNA, 9 bp, Homo sapiens
  chr12:113494406-113494415
  hyper
ggatttggg

SEQ ID NO: 123048 - DNA, 794 bp, Homo sapiens; identical to SEQ ID NO: 50087
  chr12:113494430-113495224
  hyper

SEQ ID NO: 123049 - DNA, 433 bp, Homo sapiens
  chr12:113541666-113542099
  hyper
gcacagccagcccaggcggaagtgggacacccgctgattgacgggtggggagggcggagcctgcagtccgccctgccccctcacctgagcgctcagcctggaggcagcaggtccagcgcgcgctgcggaaggcaccggggtggcaggcggccagcttgttcgggttgggggcgctggccttgcgcaaggccgagagccactggttgagctcattcacattctgcagcgggtgggaggcgatcagggggcgggtgggaacagagggacgccccccgctccccatcgcggtggggtctcaccttgcactggaggtaggtggtgtgcagcgcccccgtgccgtcctgcgtcaccacctgcatcacgtggggcagttggaaggcgccctcgtctacgcgctccacggcgcggatgtgagacacggggatggagtgac

SEQ ID NO: 123050 - DNA, 30 bp, Homo sapiens; identical to SEQ ID NO: 50089
  chr12:113573571-113573601
  hyper

SEQ ID NO: 123051 - DNA, 30 bp, Homo sapiens; identical to SEQ ID NO: 50090
  chr12:113573927-113573957
  hyper

SEQ ID NO: 123052 - DNA, 30 bp, Homo sapiens; identical to SEQ ID NO: 50091
  chr12:113590909-113590939
  hyper

SEQ ID NO: 123053 - DNA, 507 bp, Homo sapiens; identical to SEQ ID NO: 9054
  chr12:113592182-113592689
  hyper

SEQ ID NO: 123054 - DNA, 30 bp, Homo sapiens
  chr12:113623072-113623102
  hyper
acgcgcctaccttccgggcccgggcgtcat

SEQ ID NO: 123055 - DNA, 30 bp, Homo sapiens; identical to SEQ ID NO: 50093
  chr12:113623579-113623609
  hyper

SEQ ID NO: 123056 - DNA, 142 bp, Homo sapiens
  chr12:113658921-113659063
  hyper
tcaatttattgttccgctcagttgtccccacctcctgaagtctgaccaatcagaagcaccgccattttgacctttcaccaatggaaagacttgggactccctctgggttggactcaacgagtaaggcggggaacaagggagg

SEQ ID NO: 123057 - DNA, 31 bp, Homo sapiens; identical to SEQ ID NO: 9055
  chr12:113772605-113772636
  hyper

SEQ ID NO: 123058 - DNA, 30 bp, Homo sapiens
  chr12:113773010-113773040
  hyper
ctcggggctcgccccgcccctgcccttaaa

SEQ ID NO: 123059 - DNA, 638 bp, Homo sapiens
  chr12:113796256-113796894
  hyper
ggtgggtcccgccccgtaggcctcccctcgcgccagcccctcccatcccggaaaggctcagcccaagcccggccccgcccgccctcggccccgcccatggcagagcgcagtcacgtgacccgggctgcggggcgcagcattgtgcggtcatggtgggccagatgtactgctaccccggcagccacctggcccgggcgctgacgcgggcgctggcgctggccctggtgctggccctgctggtcgggccgttcctgagcggcctggcgggggcgatcccagcgccggggggccgctgggcgcgcgatgggcaggtccctccagcctcccgcagccgctcggtgctcctggacgtctcggcgggccagctgcttatggtggacggacgccaccctgacgccgtggcctgggccaacctcaccaacgccatccgcgagactgggtaagggttggcttatccccacgcggggccatcgggggagggggatgcgtgggcgccggacctcgcctgttcccgggaccggcctcttgccgggtgggaacgcccgtttctctgggggtcagctactcccgaggctgcagcaccgccctgcgggccaagtaccctgtttgggagctggctactgcggcatccctcacct

SEQ ID NO: 123060 - DNA, 518 bp, Homo sapiens; identical to SEQ ID NO: 50097
  chr12:113900159-113900677
  hyper

SEQ ID NO: 123061 - DNA, 406 bp, Homo sapiens; identical to SEQ ID NO: 50098
  chr12:113900752-113901158
  hyper

SEQ ID NO: 123062 - DNA, 610 bp, Homo sapiens; identical to SEQ ID NO: 9059
  chr12:113901407-113902017
  hyper

SEQ ID NO: 123063 - DNA, 458 bp, Homo sapiens; identical to SEQ ID NO: 9060
  chr12:113902041-113902499
  hyper

SEQ ID NO: 123064 - DNA, 30 bp, Homo sapiens; identical to SEQ ID NO: 50101
  chr12:113902784-113902814
  hyper

SEQ ID NO: 123065 - DNA, 713 bp, Homo sapiens
  chr12:113903015-113903728
  hyper
aaccattaatttaattctccccgaaagtgaaggggaagatggggagcggcaaatttggagccccaaagggacagggatgggagacggccgcggcccgcggcgagccggaaaaccagcgaaggccgctgcccccgcgccgtgcgcgccgcctccgcccatatggcggccgggccggaggtaattggaacaaacgccgtctgaaaagggcacaaaagccgcagctggggctttgtccgcgctcccacggggagccgccggccccgccgcccggcccctttctcgcccgctgccggtcgccaccgccgggatctcccagcgcggattaggcggggctgcctcgctgggggctggggagtcttccccaccattacggggaacgaggggcccccagtatccagctccccacctcatccagcgcgcagggagaggaggcggtgggataggtcggggcgggggcgaagtggtcctcggggaaaccttggttaattatccaggcggggaaaaattccgggccggtaccgcccccactacctcgctgctccgggcccagattttgtagggaaagaggcaaatttaggtggagagagtcggtgagtggagactccggaagacacgcccaccatccgggctctccagggttgggggtctgtccggggttgggggtctgtccagggttggggggctgtccagggttgggcggctggggcgctcca

SEQ ID NO: 123066 - DNA, 2053 bp, Homo sapiens
  chr12:113904445-113906498
  hyper
tgtgcgcacacaccccgccacatggaacaggagttgctgccttcgatgctagtgagcaggcggcttggaatgaatccagacccccatcccctcccctcacactaccctccagcgctcggaatccacctcatgccaagtacaccaggcacagggcggcaggaaggctgtgcgtctgtccgtgggggccgcatgcatgtggatttgccagtactggcctcagtgtgactggtgggagtgtgcgcgtctgtggagttgtgtctccgtgagtgtacctgtgtgtgagagggtggaatttacctatacgtgatcgtgcgatcgtgtctagacgtgtgtccctggagtctctgaacgcaagtgtgagtgcaccttgtgccctgcgtgggtgaatgtgtcactgtatctcgtgtgtgcttctgtgtgcatcactgtatgggtgagaccatgtatctgattttgtgtccaggacatgtgggtgagtgtacatgtgtctgtgatcgtgtgtccagcgagtgggcgatgttctggagcggcggaaagcgtgctggccgggacccttcgccctcagctcccggaataggacaggtgcggaacagcgaatcccggggcgccccttacctccgtagtaggtgtacggggtggaccccaacatctcagactcgtccaagcggccgcccagcggacgcatgcgccgcggactccggaagaaggcgtgcctccgggcgcctagggcgctcagctgtttcatccggcgttctttggaccgtcggttctgaaaccacacctgggacagaggagggggctgtgaacccaggatcaggagtgtcctctccccccctcttctcccttccctgactgggctgcccctgctgggtccttgcgcctcttccgcaccaggactcccccgaggcggggccgggccggattaggccgggaggggtggagagaggcttcggcgaaccagccaagggtgaaggatttcgcggacccgtggggcgactcataaagacttgggcttcctggtccccggctcgcccgcggcctgacggctctataaaggcctccctcccggcacggctctcgcctcggcccctcggctccggagccagcctctggccgtttgtctgcccgcgcttcggcgcagggagggagggggcatcgcctgtttctctgctcgaaaggtggaggtaaagagggatcccggaccccagagaggcttacaaccttccataagcaaggcggggggcggaattcagagaggtaaagtgacccgcccccaaatcgcaataccaggaggacagcagggctagatggaatctttcggttcacagtccccgacctcgggcaagtgccccactcgggcgcacggtctgctcccagaccagaaccaggcgcgctcgtagccaaggaagcttggcgggagactcctccgaggctcccggctcccaggccagcggggctaaggagctgtgcccgccccgggccgcacctggatgacgcgcatgttgaggccggtctcctgcgccagctgctcgcggatgtggcgcgtgggcttgggcgtggcggcgaaggcagccttgagcgtctccagctgcttggccttgatggtggtgcgggggccgcgccgcttggtgcccgagttctgctcctcgttctcgttgttggccgtctccttgtccgacgaggtcgagttgtccgtctctttggggtcgtcctgcagtgcgtcctggaggtccggggacaaactgcggtccgtacaggatgacactgcgggcggacggatcgggaaggggacagcggcgtcagcgacggccagacgcctcttcagtccagtggcgggttcccgccggcccaagctacggcctgcccaggctacggccagccccgctggattccctcccaaacctgcgacagcccctcccccagggacccggtgcccgcccactctctccaggcggggctgggcctttggaggggcgctcttaagccctctccgcgcgtctcagctagtacctgggtaagggtagggggacgcgtaccctctggagaactccca

SEQ ID NO: 123067 - DNA, 285 bp, Homo sapiens; identical to SEQ ID NO: 50104
  chr12:113906998-113907283
  hyper

SEQ ID NO: 123068 - DNA, 369 bp, Homo sapiens
  chr12:113908945-113909314
  hyper
cctccgcctgggctcgggacctttcctggaccaaggacaggaggagagcaaagtgctgcccgctccccatctaagcttgtgatccggggaggctgggatggggatgggggtatccccttccccagcgccccagtggagcgcgcgcagggtgggcgcgcaggcagcagagcggcgcggcctcttacctgaaaaagtcatttttgcagtagagcttgccctcgcgcgagaagcacttctccgagaggttggttttgcactcgcagcactgaacacatttgatgtgccacgcgcggtccagcacgttcagcagaaagcggtcgaggatgggccgctcgcaaccggcgcagtgcaccatcatagccccgcgcc

SEQ ID NO: 123069 - DNA, 174 bp, Homo sapiens
  chr12:113909328-113909502
  hyper
cgccttgccctccctttgggcccctggccctcgggcctgccgggccctccgctgcccttcgcctcttgtctcagcagctgcagggcgagtctggtccggaccaagactcagccggtccagtccttgggcaatctctggcctggcgctgggctgcccggagtggggtggtggggg

SEQ ID NO: 123070 - DNA, 122 bp, Homo sapiens
  chr12:113909534-113909656
  hyper
cgcacgccccggcgcctgttccgggcttccccaggtatctcgggtggctgctggcctcggcgctgcggagcggctttccccggtggcggaggcgccggcactttcccccactttcaagcggt

SEQ ID NO: 123071 - DNA, 977 bp, Homo sapiens
  chr12:113909717-113910694
  hyper
cgtggcgctgcacgtagggggcccagcggccaatgggcgcaccgtggccatggcaacctcttaaatttatagcatatctaaattggctacagcgttgctgtccggacagagcaaaaaaaacaaggcatcagtattgttgagtattagcttgtacctggttcggaggctaagtaagtatttaccttccagtttggggctgacggggcgggggcagcgcgaaacgaaaattgcgtctctcttcctctctctttctcctcacaaatatttgggggtcacgggttccaaggcctagtccgggaggtacccctgcccccttcgccatccctggaacttgcagaagttgccccacgccccacacttcgctccccttctccagcccagccagcccagattggattcccccacccccgcgccccctctgcgccctgaagctgcgtcagcgcggttctcccggctcctggagccggccccggcttctttttgtcatacacggggctggggcccagccgggcctttctcatggagagagctagtggagaccgcgcggcctgggtagttttccccgcccggccgccgagcccaggcccaggcccagggtggggaggcgggggagcaggaggggtgccatttggcctggtcccgaactccagagtttcaggcctgagtgcgctgctcacggggctctgagggagatgtggacagggggagattcagggtggacgggtcttcccgcagacagctcggaggtggcactcaccacgtctctcctttcctcgctgcaccttccagattccaggtcagcctatggggcactgtggtgagtgggtcgtacggctgaggcgggggacaccagcgactatgagagcgctgtttgtattcacgccgtgcgggctgggtgtgcaagttcgtcccctcattgggcgcaggagaagcggcgcacgtatgttccgtgctcggcagggcgcccagagtgtgag

SEQ ID NO: 123072 - DNA, 140 bp, Homo sapiens; identical to SEQ ID NO: 50108
  chr12:113910972-113911112
  hyper

SEQ ID NO: 123073 - DNA, 30 bp, Homo sapiens
  chr12:113911915-113911945
  hyper
ttggcctcctaggctcggccatgagagact

SEQ ID NO: 123074 - DNA, 679 bp, Homo sapiens
  chr12:113913002-113913681
  hyper
atcccgacctaacagcgctaacagatggcgaccaggcagcgaaatcccctcctatatgtaactaataaaccgcttgtgtcttaacagggtaatgcatggagacgcaatgtcacttatacaagatgttgatggaatttactatataaaaatcttcctcctagagtaaagagtatcaacattacaactcgacagacggcggcgggataagtaaaacagacaaaagacaaacaagataataatctgtttccaatcacttaagccctgtagagttagtaatatgcggtttgcatattcccccttgagttcggtaattaattactggcgaggaggcgcacactagcctggggtgggagttttggggagcgctgagctggggcgtggggcatacctctcttgagttctccagcccgggacaccgggcagcggccggaatgagggcgcttccagaggtttggagctgacccacccgcgggttgaagaggtcgtttcagttgcacctccctattcctcaccggaaagcctccggcctgggagattctgcagccaagcaggaaagggggtcttctctggcagccagtgtctctcctggctcctcttaaagcatcctctccttcgaacggccgggagtggcagctttattgggaaacgcgcgctctgggggcccaggtggctgggggga

SEQ ID NO: 123075 - DNA, 340 bp, Homo sapiens; identical to SEQ ID NO: 50109
  chr12:113913883-113914223
  hyper

SEQ ID NO: 123076 - DNA, 319 bp, Homo sapiens
  chr12:113914300-113914619
  hyper
cgggccagagaggacgccggcggggtgcaatgggtgctcaggcctagacatccgggcagggatgcgagagggatggcgggggtgggagtggggtgggtggggggtggtggtgaattttctggggaacccttgggggtggccgtctgagagcggcccggagcccaggcggggagagtgtcctggcctgggtggaaccctgggaggcgggggcgtcgtggctggtgtgccccactggcgctaggccgtggattgcttggtttccagaacatctctgcggggcgcagggccttcctgtcagttgaatcgtgctcggcttaat

SEQ ID NO: 123077 - DNA, 447 bp, Homo sapiens
  chr12:113916261-113916708
  hyper
ctttggcagccccagcgctgcgtgtgtgtgtgtgtgcctgcgtgtgtgtgtgcgcgtgtgtgtgtgtgtgcctgcgcgtgtatttctcgcttgctaatgattgtgtgttgatagagtgatgcagtggcctcattagcctttgtttagaaggtgttaaaagggaaatctgcatcgggaaagcggcggtttacgcagcagcccggctgaacaccgcgagccaaggggctggggggcggggacggtgcccaccccccaggcccccactcttcccccaggcgcccaccgccgcggaccccgggagggaggaggggtccggggaaagcgaccccagctccttcctcccaaggcgagtatgtttaccctgctgggcacccttccgctccgcggggaccactgcgggatcgcgctctctaaaactcctctcaactgccccgcagtgcgcggcgg

SEQ ID NO: 123078 - DNA, 452 bp, Homo sapiens
  chr12:113917064-113917516
  hyper
tcgggaacaaattccgtgagaataaaatcatagctaggctggcctacttccctaaagcttggtggaagcgagtaactttattgagtctgggctagagggtgtgtgtgtgtttgtgtgtgtgtgcgtgcgtgtgtggtgtttgtttacatatgtgtgtgggatttggcgagtgagcttcgtgcacggcatttttcaccctctggaagaagccagatttcgggcaaggtagaacgtgagaagaatcccttttatactggctcctacgaaaggaaccagaaaaaaaaataatacacattttgagcagcctctgtgggtgcagcttgttgaactcggagccagacgctttttctggcgaaacggagaaaaaacgccgcggaaacggtgcgcagggttggggagtataggttctgattgcaacataattccgcaagcttttttattttttatttttc

SEQ ID NO: 123079 - DNA, 120 bp, Homo sapiens; identical to SEQ ID NO: 50114
  chr12:113917580-113917700
  hyper

SEQ ID NO: 123080 - DNA, 397 bp, Homo sapiens; identical to SEQ ID NO: 50115
  chr12:113917730-113918127
  hyper

SEQ ID NO: 123081 - DNA, 30 bp, Homo sapiens; identical to SEQ ID NO: 50116
  chr12:113957640-113957670
  hyper

SEQ ID NO: 123082 - DNA, 492 bp, Homo sapiens; identical to SEQ ID NO: 50117
  chr12:114029352-114029844
  hyper

SEQ ID NO: 123083 - DNA, 30 bp, Homo sapiens
  chr12:114048857-114048887
  hyper
ccggggtaccagaggcgctgggtccggggc

SEQ ID NO: 123084 - DNA, 46 bp, Homo sapiens; identical to SEQ ID NO: 50118
  chr12:114075829-114075875
  hyper

SEQ ID NO: 123085 - DNA, 150 bp, Homo sapiens
  chr12:114075909-114076059
  hyper
cgcgtttcacacagcgcacaatggccgccctcaaaggcgcgccgcccgcattgttcgggccggcgcccgcgcgtcctacctccgcgcgcgaattaacccccgtcaccccgccattgtcaccgcgcacttcggggccggccacaaaggcgc

SEQ ID NO: 123086 - DNA, 166 bp, Homo sapiens
  chr12:114404166-114404332
  hyper
tgtccggaagtaggcgtggctaatccaaaactactcagggaggtcacaccccacaaggggtgggcctgggcgcttgcattttgcgcaggcgcagggccttgggcggattctgtgagacgccaatgcagcggagaaggcggcagggggcgccggtccctaacatgcg

SEQ ID NO: 123087 - DNA, 360 bp, Homo sapiens
  chr12:114833812-114834172
  hyper
tggcctgctttttcccgggaactgcggaggttgtctctgtgactttgattatttgcattgatgaccctggggcaagattcttggaccaaccctggagtccggccccgatcgagtggaggtagttgggggaggcgagccgcggccgggggcgggggagggacgaggaactcgcgggccccgcggctgcccgaccccgggccgcgcgtctctaatctccggccgccgtggcccggccgcctccccggccgatagcgacgccgaccggggcggcgtggcgacagagagacgcagcggggccccgctggccgccacagtccccggccggcggggccatcggcccggcttagccaaattgctttg

SEQ ID NO: 123088 - DNA, 9 bp, Homo sapiens
  chr12:114834208-114834217
  hyper
cgatctaat

SEQ ID NO: 123089 - DNA, 30 bp, Homo sapiens; identical to SEQ ID NO: 50122
  chr12:114837557-114837587
  hyper

SEQ ID NO: 123090 - DNA, 32 bp, Homo sapiens
  chr12:114837907-114837939
  hyper
ccccagagatgcacacgcgtgggtgcgcccag

SEQ ID NO: 123091 - DNA, 90 bp, Homo sapiens
  chr12:114838221-114838311
  hyper
tctgctgcctttctgcgccctggcgcactccaaatttccctccaccttctgaggaacatgccccagaaagcaaagattctcaaggctggc

SEQ ID NO: 123092 - DNA, 703 bp, Homo sapiens
  chr12:114838368-114839071
  hyper
cgaatggaggcctctccctccgagccccggagccaaagcctcgcagtgtttatcagcctgagcgagcgcgcccggaggcggaggcgcagaagacttcgcaggccttttatagttaaatcctcacggctcaggctcggggggaaagagggactcggacgtgtctttccttcctgggggaataggaagaggactgcagttcgttgatataaacagaacgcgcctcctagttcactcaggccttgggccgagcggggagcagactttgtttaattttaaataataataaatgtcactgttgtcagtttattgagggaggcttcggctggagaacgggggcggggggcgtctggaaaggcggctccaccctcccccttcacacactcggtggcttgggcctaccgttcgcctgctccacacgcctgctcggggcatcctctggctttttgctttgcgggacgcggaagacccgtccagcacgggtagggatgtggccaggacgtccccaggcctgggcgcgcgcgtgcacatgctcacacactcacactgacatacagagctgcaccactctccttcctcctcccccagaagtctagcatttctagctaaaactctgcgagcttttaaggggaactccggggcgagtgtcttggcgaagctgccgtgtttattggtgtctgtatatagagcccggccgagccccggt

SEQ ID NO: 123093 - DNA, 241 bp, Homo sapiens
  chr12:114840976-114841217
  hyper
tctgtgcgctcccagcggccggtgatggcgcgccagccagccaggccccgaccgcaagacaaatggtgcggcgcgcgggtctagtcggcggcgcggaggaggcaggaggaggcaggaggaggcgggaggaggcgaaggctacggaagatcagaagaggggtcaagccatcgctcatgccggcctgaatcggccgctgacctggcccttattaagatgctgggggccgattctacacatagt

SEQ ID NO: 123094 - DNA, 177 bp, Homo sapiens
  chr12:114841463-114841640
  hyper
tttttgttctgtccccgcaagagaagccgagcaggaaagccagactctgactttgatctctgcaaagggacccgaagcgcgaggtctccttacctgctgggtgaaggcggcctgcggggacgacggggacttgctgggggccccgagcgcgctctcgggtttcgaatcgcagggcag

SEQ ID NO: 123095 - DNA, 40 bp, Homo sapiens; identical to SEQ ID NO: 9073
  chr12:114841855-114841895
  hyper

SEQ ID NO: 123096 - DNA, 30 bp, Homo sapiens; identical to SEQ ID NO: 50127
  chr12:114842685-114842715
  hyper

SEQ ID NO: 123097 - DNA, 185 bp, Homo sapiens; identical to SEQ ID NO: 9074
  chr12:114843001-114843186
  hyper

SEQ ID NO: 123098 - DNA, 687 bp, Homo sapiens; identical to SEQ ID NO: 50129
  chr12:114843260-114843947
  hyper

SEQ ID NO: 123099 - DNA, 30 bp, Homo sapiens; identical to SEQ ID NO: 50130
  chr12:114844184-114844214
  hyper

SEQ ID NO: 123100 - DNA, 621 bp, Homo sapiens
  chr12:114845897-114846518
  hyper
gacttggagacgtcacgagtcacgcaaccggcccgcgcgctgtcacgtttggctggggggcagcggcgggaggtaaatttctctccgtcttcgcctatcagtgccgggtctgcgcagccacaggttccggacgtcttggccccgggaataaataaagacataaaccaacccggctttctccggaggaatgagggtgatgaacataagacacaaatagagccaagatcgactttcttaggaagggggagaggagggaactcttcacgaagggaggtgggagtccacctcagacctctattggaaggaaatcgagttgttccgggggactgaggtctcttgcataaggcatgggatccttattattattattattatttttaaatcccccgcggaggagctctgggcaaatgaataccgaggcgccgctctagctggttaggcttgggatgcgataactcagtgccctcttgcagacttgcatagaaataattactgggttgtcgtggaggggacacgagacagagggagttctccgtaatgtgccttgcggagagaaaggtccaagaatgcaattcgtcccagagtggcccggcaggggcggggtgcgagtgggtggtggag

SEQ ID NO: 123101 - DNA, 165 bp, Homo sapiens
  chr12:114846781-114846946
  hyper
agagccggagagcgtcgggccttccggaagggtaagttctccgccaaggggtcccgagggagctggacgtctgaatctggacttgcccccagcttcggggttcgattctgggttttgcgcgtccccaacccccagggctttccgaagcatggcctggctccaggc

SEQ ID NO: 123102 - DNA, 394 bp, Homo sapiens
  chr12:114847042-114847436
  hyper
cgggcagcttccagcgccggccacaagctcccaggccagctgggccgcagacccctttgcttccagagagcacaacccgcgtcctttctctcagccaggctgcagtggctgccccgagcttcgctttcgtttcccaagctgttaataacgatatgtccccaaatccgaggctcgtgtttgctcccagatgccaagaacgcaacccgaaatccttctcccaaaccctaggtcgacgagatgagttcctacttgacctctgagccgaggtgggccggaaaccgaggcctaggccccgccggggctgcaaggaaaaggggaaactccgagcgtagcgtcttttccttgtggttcctttctccggcatcccggactgcgggccctgcagccacctgga

SEQ ID NO: 123103 - DNA, 79 bp, Homo sapiens; identical to SEQ ID NO: 50134
  chr12:114847577-114847656
  hyper

SEQ ID NO: 123104 - DNA, 476 bp, Homo sapiens; identical to SEQ ID NO: 50135
  chr12:114851898-114852374
  hyper

SEQ ID NO: 123105 - DNA, 276 bp, Homo sapiens
  chr12:114877144-114877420
  hyper
attaagtctaattagcgagcccgagctaaaaggccgccacagcggcggggcccagggagaaaaagcagcgttcccaattcccatgcttccagctccaggttgtcggtcttttgtcagcctccgaagccagggtgctcaacctggccccctttctttcctgctggtgaggccacccgctttgggacagaactctgggcctgcgcctcagctctccctcttagcgccccggcgccccggcttcccaagcctggggactgagcccgcagacgcccatgg

SEQ ID NO: 123106 - DNA, 887 bp, Homo sapiens
  chr12:114877706-114878593
  hyper
ctgctacaaataatcgcgtggaagacggccaagaataaccagaaaataaacacagctcccccggccctctgaacgcaggccgcgggtccctccaggccccacctggctcttctccggcctaggggaggcgaggaggccgcgccacgatctctgtactcattgttcccatggcgctgcccttaaccctcgaaggactgctcccggacctcgattccaagcagggtgaccctctggcctttgtccccgctgtctttcctagcaggaaaactgtcgggaattcaacctctgtcaaaaaataaaaacaaaaaacaagaacaaacacccaaaccccaacaacaaagagagaacgcggactccagacagttttctcctttcaactctagaactttcccggaaacataagacacccagtgctcatcgttacacccttaggtctgcgcctgcgggtgggggccacgggctgtgccggagcgcatagccgcgggtgtgcccttaattttcatatatataatgaagtgtctgcgcgctaacgcgcctgcaaataatgtgtgtgcgcaaagacgtttctgtctacagataattacgcgtaaattatccgtggcaaacaacatatgcaaacgacatatgcaaacaacatatgcaaacgattatctatgtgcagataattccatgcccacgagccgacagatttgcaattctcaagtacttctatgtgcatgtaattctacgggcaaattgttccgagtgcaagggatttggtgtgtgtgtcagtgattgcaccgctgaaaacaattctgtagatgtgtcgatgcctttagaagaaagggctccaaagaatcgtgtctcgatggttggtcagcgcgcgcatctgcggcactggctaaatc

SEQ ID NO: 123107 - DNA, 298 bp, Homo sapiens
  chr12:114878808-114879106
  hyper
cgggaattgccacagacgcccgatttcctcggtgccatgtgggctcctagctgccgccacagagcggccggatcctaccagggtttcccagtgcccgggtacctgcaagaatcttcccaggacgggagcagtgggcactgagcagcgctgccgggagaaagatgttgcgttttgccaagcgctcacccgcgcttcaaaaccccagtcggtaagaccttgcgtcccccacgggcactaaaatggcgaagcacgtcctggctaacgcagtctgtctcttacagcacgctcacgtgcgcct

SEQ ID NO: 123108 - DNA, 497 bp, Homo sapiens
  chr12:114881652-114882149
  hyper
tggggtcgctgggcgcgcgcgcgcggagcaaatttgcccgcgcgcacccagaaacgatgacataagtggcgctgatgagcgctgcgcggctgaaacgcgactacataaagggtccgccggcagcgtgggccggagggattgcttcacactccggaattgggcccagacacatttagaaatgttttgctggacgtgtgccccgcaagggcgacagcggcagccggcagcctgggtgaagctgcgccgctggtcacaggctggcgcgcggcggcggccacagaggcgtcctaggtggagaatgcttctgcctttgcctgttctcccctaacccccacgtttgtatgcctcctggggacaggggtctgtctgcagcctgcagcgccccagctgtgaccagagaagcattaaggagcggcgcgggcaagaatttggcatcaaaggaaatactgtaggtttcagcatcggtctctcccgctgatcgtcgggctccgcggggc

SEQ ID NO: 123109 - DNA, 611 bp, Homo sapiens
  chr12:114882412-114883023
  hyper
acctacacttttctacgagctttgcagtcacttaatctcccaacaaccatcggggtagataccgttatatcgccattttacagagaagcaaacgggaggtcaaacaggctgacccaggccgcctagttcctgcggggatttgacgactgtgggaatcccgtgctcggaaggcgggcgttgctacagggcacgatgaatgttgagcccgtgccccaatttcgccagacttaacgacaattcctacacaagtccccccagcaacaaggagggccagccttcgctcctgcttctctcttagttgtatatctggagccaaggagtccaaaacagctcaccagctctaagtgcacacatatcagggctgggagccggaaccgcctgggcatgcgttcctgcgcgcttactcctgaggccagggaaaaaggtttgcctgcgatcctgaccaaggccacgcattaaaagactgcgtggaatccttaaagcctctaagaatctaacgtcctaagaaagaccaccccagaagtagatgtgatgtacctaagccctggcattcgggctctgcgcctcaccagcgtctttacgcacaggcgcaattgcgccgggcactaggg

SEQ ID NO: 123110 - DNA, 110 bp, Homo sapiens; identical to SEQ ID NO: 50143
  chr12:114883301-114883411
  hyper

SEQ ID NO: 123111 - DNA, 38 bp, Homo sapiens
  chr12:114885145-114885183
  hyper
ttggccagagcctggcgggttccgtgcttggctagcca

SEQ ID NO: 123112 - DNA, 265 bp, Homo sapiens
  chr12:114885371-114885636
  hyper
cgctggaagaaacgaactgggggccgagttcgggcggcgatctgccggggacccagtcctgagcggcttgtttgggatactgggattaaggcctcagaggagcacatggctagcctctgcagccctcggagggtcactgacgccccctgcttttccttccaaatgtctttccccgaggctggggacacctgttctgagcagaagagggcaatggttcaacctgtttgaccccgcccgggtctccttctgcgggaacatacgcccc

SEQ ID NO: 123113 - DNA, 415 bp, Homo sapiens
  chr12:114886015-114886430
  hyper
ccaggagtcccaggtcgagctgtgggaaagagaaaatgcggatcggaggtcaggtgcacccttaccggcaacttggggtacacaaccggggtcccagcatcacctcccctcgccccgcgctcatgtccccactctgaggcccgtgggcactgaggtggcaccgacctcccaggacccctgcattgcctcacactttcacttccctccctgctccgcagtgtccataaaataccagccgttcacctgcctatagcgaacggatccgagggtggaggcaatgacttacctggttgtgggtggatggatgaagaaggcctttacttggagcctaagccctggcgcgcgcgcaccacggcgcgaactgctccatcaagcatccactggcctccagccgcgtttccggttgtagcactgg

SEQ ID NO: 123114 - DNA, 320 bp, Homo sapiens
  chr12:114886560-114886880
  hyper
cgagatgcctgcctaggcgtttctggttacaatcacctcacacaccggcctgcattccgcctccccaacccccatccttaccacgaagtctgaagtcacaccttctccctggctgggaagctttgccagggtgggggcgatgagtgccggccgaggttgttaatctaaggagctccagcaggtccgtaaaaaggaatattttcggtggccagaaaaatcaacattgaattaggtgtgtcacccgcacccccccgcccccgcccatccaccaggagttcattctctactcatttagccgggactgccgtgtgttcctgatt

SEQ ID NO: 123115 - DNA, 30 bp, Homo sapiens; identical to SEQ ID NO: 50149
  chr12:114889027-114889057
  hyper

SEQ ID NO: 123116 - DNA, 390 bp, Homo sapiens
  chr12:114917590-114917980
  hyper
taactccatctagcccgtcctccttaatcaataaaacaagaattaggtctcagatccaagagtcgctttctgtcttccagtttatgactttggccacctcgcagtcttttagggtcgccggaccggcttcctggaatacctgaggtcgcagattcaggtagtaaacagatgtggggtccaccctccgccaaatgggcggggcaagttcaacatcccgcctccccgaccttaagtgcgcagggcgcctggtgctcgcttgccgaaaacgttaaacatttttctttgatcccgctctttttttggggggaaaaatgtctggggaagagggaagtagtgggggagtgaggtgcctgcccaagcgaaattttgatgcccgcctgcctctggctc

SEQ ID NO: 123117 - DNA, 77 bp, Homo sapiens
  chr12:114918238-114918315
  hyper
gtaatcgcggcgctgcgtacctttgtaagggtccttaaccttttcacccttttggtggtggcggtggtgggctcctc

SEQ ID NO: 123118 - DNA, 85 bp, Homo sapiens
  chr12:114918623-114918708
  hyper
tgggggtctccgatgcgaccccggactcggagcaggaaatcctgggtgctcctgaagctccgcctgccccgggttccagcgagag

SEQ ID NO: 123119 - DNA, 140 bp, Homo sapiens; identical to SEQ ID NO: 50153
  chr12:114939042-114939182
  hyper

SEQ ID NO: 123120 - DNA, 844 bp, Homo sapiens
  chr12:115106006-115106850
  hyper
gaggcgctggggtgccgagccagctgcggcgacctggacgcattcgtagacgagacagataggtggcactcgaagcccagaaaaaaggcgaaggcgcctgccctgagtggcctctggggcggccgcagccaccataaagcctgcggcgagattgcgaccggcgccaggtgagtaataggcagcaaaatccagagagactgcgagccgttcatcccctccaccccccgcccatcagcgctacaggagttactcattaacatcacaatatacaaatgagatacacaggagattaaaaaaaaaaaaaaaaaaaaaagaggaacgccagtaagagaggctggacacaagtctgagcagggtccccaaatcgggggcggggggagagaagggaggaggtaagcaaatttggactgagaaagaagagaaaagcaaagcatttcttcccttttggaggctgagttcttttttccccaattcgggagagcgcaaccagccaactaccaccttctcagaggcgcggacaccgcgcgttgtcgctggatccagagctgcccccttcaggctgtagccgctgcgcagaaggagcgcgccctggaaatctcccagtcctcgggggagccccagcctcaaaggtccccagggcccgtctcagctcaggccctgccacccccgcagcgcaccccgcccctccccccccccgcgactccgcaccaacatactctggttgtctgtcttccctcccacccccggagacatcgcagaggaggctgtaggggtccccacgtgcctggccagagatggaaggggctttgccccgctctccaaaaggtctcgacctcgatccctt

SEQ ID NO: 123121 - DNA, 2285 bp, Homo sapiens; identical to SEQ ID NO: 9096
  chr12:115120680-115122965
  hyper

SEQ ID NO: 123122 - DNA, 194 bp, Homo sapiens
  chr12:115130545-115130739
  hyper
acggtaaagaccttgcggggagccgtggggggcggggaggagtaaccaaaaatgaaagagaaatgtaggactctctgtctcccaaagtggtggaaaagcaattgcaaggagatggctctcgggagaataacaggctcagagagaacgcagccgagcgggggaatcttcgtgcgcgaagccgggagggttgcggg

SEQ ID NO: 123123 - DNA, 164 bp, Homo sapiens
  chr12:115138444-115138608
  hyper
cgggcgaaatgcctgcgagggagggttggcgaatgggttggttggtggcaagactgcagttcttgtacatggacgggggttggggggtcaacactggaagaactcctgcctgacgccaagagccacccgctttccagctcgtcccactccgcggatgtttaccc

SEQ ID NO: 123124 - DNA, 30 bp, Homo sapiens; identical to SEQ ID NO: 50157
  chr12:115174583-115174613
  hyper

SEQ ID NO: 123125 - DNA, 30 bp, Homo sapiens; identical to SEQ ID NO: 50158
  chr12:115836506-115836536
  hyper

SEQ ID NO: 123126 - DNA, 304 bp, Homo sapiens
  chr12:115889540-115889844
  hyper
gatgttgctcaaacacagcagcgtcgtgacagtgccaatagccagcagtctcctgtccgcgtgggttgcgagccccgggcgtggacggagttgggagcggagggcggcaggtgccagcggggcccgcctctccctgcaggcggccccggcaagttcacggccggcccggggcgaggggcgagcggcgcgcggccgtgcggctcattctaccgccctgcgtgcgaaggggaggccgcgcccccgcgcccctcgctcgcgccgtgcctgccgccgccacccgcccggccgccgggccggccactga

SEQ ID NO: 123127 - DNA, 30 bp, Homo sapiens; identical to SEQ ID NO: 50160
  chr12:116185147-116185177
  hyper

SEQ ID NO: 123128 - DNA, 249 bp, Homo sapiens
  chr12:116354934-116355183
  hyper
gccccgactcagcgcggtcctggcctcacctggtgctgctgaccgcccacgcccgccgcccgcctttcatctcccctgcccgtggctccgggcactgctttcccaattgcccggaccacgccagcgcccgggctctcggcttcgcgcggggctgggcgggcggagcgcggcagcctccaggtagggccgccgccaggtgaagccgcgccgcttcgcctcttcccggtctgtggcgacacctgctggccg

SEQ ID NO: 123129 - DNA, 204 bp, Homo sapiens
  chr12:116713912-116714116
  hyper
atacatttttaatttcgatgaatctagacaccgtcggcgggtgccaggcttccacgagaacaattgacaccctaactgcttcaagattaaggcaggcgattcaaatccgaaggaaaagttgtcaattatcagaaagagagagcgcgagagaggcgaaggcagataaaagcgatgttatcaaaccgaccagcttgttgcttttgt

SEQ ID NO: 123130 - DNA, 144 bp, Homo sapiens
  chr12:116714175-116714319
  hyper
agagaaaaacagtttttaaaagacacaggaggagagaaagaagaaaaagctttctccaccttccgtcggctcggtgcaatggctttacggctctccagcatagtaagccccgagaggcaggcggctgtcgatgtttacaatcgc

SEQ ID NO: 123131 - DNA, 30 bp, Homo sapiens
  chr12:116714585-116714615
  hyper
tgcgacccagaatccgcagctccgagactt

SEQ ID NO: 123132 - DNA, 30 bp, Homo sapiens
  chr12:116715971-116716001
  hyper
gaggctcgcgccgccgtccgccttttgcag

SEQ ID NO: 123133 - DNA, 142 bp, Homo sapiens; identical to SEQ ID NO: 50163
  chr12:116946057-116946199
  hyper

SEQ ID NO: 123134 - DNA, 377 bp, Homo sapiens; identical to SEQ ID NO: 9099
  chr12:116946250-116946627
  hyper

SEQ ID NO: 123135 - DNA, 182 bp, Homo sapiens
  chr12:116971003-116971185
  hyper
gcagtgactttaggaacatctcgaaggcgacagattccagttgttaaggctacgatgaaatagcagaagactctgggaagcagcgtgcaacgagtggcaaaggagcccctaacgctctttcttctgtgctcgccccgccccctccggcgtgggccccgccccgactaagccccagccaggcc

SEQ ID NO: 123136 - DNA, 305 bp, Homo sapiens
  chr12:116971210-116971515
  hyper
cgcctcctcagctcccagccttctgggtccgaggctcccacctgctctaagcgcttggtaccagggagggaatgggaggacgcttgcgggatagggaggcgggggctggaaattggcagggtgagagctggggaaactagtctgggacgcagccctccttgtcccccttcttcattcacccccttgttgaggcccttggcttttgcataatgtaagtacttatttaatgcgtgtgctggctcgagagctctgcatttgtctttctgtccttcatatgccagtgtacctccgccttctgtctgtct

SEQ ID NO: 123137 - DNA, 30 bp, Homo sapiens
  chr12:116971918-116971948
  hyper
cggttacaactagacgcggcccctccccca

SEQ ID NO: 123138 - DNA, 230 bp, Homo sapiens
  chr12:116972229-116972459
  hyper
ctctccccttgctcgcgcgttccctctcttcctccgttttctggtgtgctggaacgttcagcggaatatgatgaatgatcacctgtcacagcttgtttattataatgcaggcaatcaattacacatccccaatgctggccggcccgcaggaaatttatatgctcagcacaaaccaatgtgaaaatggaatctcatttgccaaatgtctttctccccgtacagcacgatga

SEQ ID NO: 123139 - DNA, 30 bp, Homo sapiens; identical to SEQ ID NO: 9101
  chr12:117146994-117147024
  hyper

SEQ ID NO: 123140 - DNA, 30 bp, Homo sapiens
  chr12:117175027-117175057
  hyper
ccgggacaggaatgcgcacctctccccacc

SEQ ID NO: 123141 - DNA, 259 bp, Homo sapiens
  chr12:117175869-117176128
  hyper
gtgaccccgccctacgccccgcctccgctccgcagcgacaagggctagtcgcgcaagatcttctcaccattggtccctaaggaacggcggcctcctattggttaagtgccgggaaagggggcggacaatcgcgtgagtgctgcgggcgtagctgtgcccgggtcctagcgccggacccggcgacgccaagaaaccacccaataggaggccggaagcatcggaagtcacatgctgcccaggctgcgcgggtgattggctt

SEQ ID NO: 123142 - DNA, 30 bp, Homo sapiens
  chr12:117176420-117176450
  hyper
gaaaagtctcggtgcggtccttcaaaggga

SEQ ID NO: 123143 - DNA, 205 bp, Homo sapiens; identical to SEQ ID NO: 50169
  chr12:117316475-117316680
  hyper

SEQ ID NO: 123144 - DNA, 73 bp, Homo sapiens
  chr12:117316908-117316981
  hyper
ccggcccggagtcctcggcctcccgggaggggcacccgacatcccgcacgcctggtgccggaaggggagagcg

SEQ ID NO: 123145 - DNA, 561 bp, Homo sapiens
  chr12:117317224-117317785
  hyper
acgctttgggcttcgcgtctgtcgctcaacttcctttttctgcaccccgcgatccatccaaaatgttcttcctgtccctgggattgggcagcctcagcctggcccctttcagtcgcgggagcccctggcctctccaacaggagagagagaaggtagggagaagtggatgggacccccggcgcccgggagccgggcagagagcgccccgaagcgcgcatttctcttcgccagcgcccgggctgcgcgggcccacgcgacatctgtcgcctgcggtcccggctcacaccccgcgcacccccgcagctccctgggcgctgccaccccccacgctccggctgccgcctttccccgcgggcgcagacgctcgggcctcgccttcaggcgccgctccaacttcccagggtgtctgcggcgcgcggcggggctcgggggcggggacctaagggcggctggctatgtcaccttcgagcttcaccttccggccctagacccatctatggtgggctcagcctgattctctctccctcattctctgcagcgctcctcgctactccaggatcc

SEQ ID NO: 123146 - DNA, 30 bp, Homo sapiens
  chr12:117318236-117318266
  hyper
gaagtctcgagatgcgcttggggtgccaga

SEQ ID NO: 123147 - DNA, 30 bp, Homo sapiens; identical to SEQ ID NO: 50172
  chr12:117319249-117319279
  hyper

SEQ ID NO: 123148 - DNA, 360 bp, Homo sapiens
  chr12:117319769-117320129
  hyper
ctaacgtgcccccagcgcctggctagaaacctgaccctaaagtgcccccagcgcccggtgggaggctggatgggcccacctgagctcgcgtggggcgcggacggaggcattctcgctgcccggcacccgcacccaaaagaccctcgcaaggggctttctaaagggaaacttcttgtctgctttctttgtgaacattattttcctgatggcgttacagttttctgcgatgaccccgatttaatgcgcagtggagaccctaaggggtcggcgagaggaggggcgcgggggactttaattcccccttttccaatccgacagccactcctgtgcacctccagactggagcgtctgcagttgtca

SEQ ID NO: 123149 - DNA, 229 bp, Homo sapiens
  chr12:117348612-117348841
  hyper
ctgaggggcagctgcgtaaacctctgctttgggcgccacaagccacaagccggaccaccacgtgcgtacaggggcagcgccgggggcgtggcgggggcgtggacgcccacccggaaccctagagcggcggcggcagcggcttccggccgcggcggacacttccctgggcgggactgtctcgtggcacccggtggaaccgaggagaacgtggagcgccgggagcggcgaa

SEQ ID NO: 123150 - DNA, 98 bp, Homo sapiens
  chr12:117349181-117349279
  hyper
cccgcccatgcctgcgccggcccccgcccccaggacaaacccctgcagtgatttggagagtaactgtgtgccactagttgcccgagaaaatgagtaga

SEQ ID NO: 123151 - DNA, 1025 bp, Homo sapiens
  chr12:117536374-117537399
  hyper
ggccgatgcggggcgcgcagcctttgctggtcccgggagactcagcgaactcaggggaggacgctgggctccgggcaaagtgctctgcggccgctgcctcgctaagtctcccagccacccgcggggatgaggctgcctgaacccattttacagatgcgaggacgaaagcaggcgccgggcgccggctctcccgactaaggtcacccggccggggagcgtcggagacctgttcccacccaggtccgccgacttcaaaactttccgctctcgcgctcacgaatgcaaacgactctcaggtgtggggcgcgcgcgccagcgggggtgcctgagggacttgcccgcccggcctgaggcacctgccctgcgcttgggaagcctgggccccgctccctccccggtccgcagtcccccggccagggagttcccgggccagtccgaagctgagcggctgcggcactgagcatcgccgcggagctcctcgccgcagcccgcgaggtggccagcggggacccatttgaaagaggaggagactgaggcgcagagagggcccgccactggcccaaggtcacacagcgcggcggcgggccggggtccccaacagtggccgttcggaggtcccgccccggtccccgcgccgccccccgcgggtactcacagccggtcttgccctcgagctcccgcacctcctcagacgcggagtgggcagcgcccatggtgcccgcggcgggggccccggggcgcgcgtccctctcaggccccgcactggcttcggctgcgcagcggcgggactggcctcgggtccggcctcgggtcgggacgccggcgaaggctcggagccgcgggttccgcgtggggccggagcggggcctcatataacggcggagggcggcgcgccgcggtcctagcgcacgccggtttcgcgcactgcgcggctaggggagcgccccgccccgccccggcccggaaaccgccgggaaggggaccccggagcccaccgctctggagtccccgttcgtgcagcagtg

SEQ ID NO: 123152 - DNA, 30 bp, Homo sapiens
  chr12:117627882-117627912
  hyper
tttgtctgtctgtccgcgggaaggggtccg

SEQ ID NO: 123153 - DNA, 152 bp, Homo sapiens
  chr12:117628332-117628484
  hyper
actggtcttgggggcgagtcctgagatcgctccgcccatccgcgggccacacctcccctgcatcggctgggggctgcgcgggtggcagcgccgcaaaagggaggacataattgggctctgtgcttggagccggcagcgcaagccgcctctag

SEQ ID NO: 123154 - DNA, 30 bp, Homo sapiens; identical to SEQ ID NO: 50179
  chr12:117747574-117747604
  hyper

SEQ ID NO: 123155 - DNA, 42 bp, Homo sapiens
  chr12:117797359-117797401
  hyper
agaggtgagatgaggcgcctatgggcgcgctcgcctgcaccg

SEQ ID NO: 123156 - DNA, 399 bp, Homo sapiens; identical to SEQ ID NO: 9108
  chr12:117798055-117798454
  hyper

SEQ ID NO: 123157 - DNA, 192 bp, Homo sapiens; identical to SEQ ID NO: 50182
  chr12:117799086-117799278
  hyper

SEQ ID NO: 123158 - DNA, 138 bp, Homo sapiens; identical to SEQ ID NO: 50183
  chr12:117799330-117799468
  hyper

SEQ ID NO: 123159 - DNA, 30 bp, Homo sapiens; identical to SEQ ID NO: 50184
  chr12:118274656-118274686
  hyper

SEQ ID NO: 123160 - DNA, 30 bp, Homo sapiens
  chr12:118275231-118275261
  hyper
caaacatgacactgcgccatcaagaggtgg

SEQ ID NO: 123161 - DNA, 38 bp, Homo sapiens; identical to SEQ ID NO: 9111
  chr12:118313952-118313990
  hyper

SEQ ID NO: 123162 - DNA, 30 bp, Homo sapiens; identical to SEQ ID NO: 50186
  chr12:118407314-118407344
  hyper

SEQ ID NO: 123163 - DNA, 30 bp, Homo sapiens
  chr12:118454565-118454595
  hyper
ggtcactgtgcaggcgcttgggtgacgcga

SEQ ID NO: 123164 - DNA, 30 bp, Homo sapiens
  chr12:118498653-118498683
  hyper
gaaacaaagctggtcgccgggcgcgcaccc

SEQ ID NO: 123165 - DNA, 368 bp, Homo sapiens
  chr12:118541716-118542084
  hyper
caccccgccccctgcgcccgccagcctactcctgccggcggaaaacaacaggagcgggatccctcccgcctcccagccaggcgggagcccaacttcctctaccttggcccgggaggagggctttctgccgagggcgcgccgagccgggtcccgccgggccaggggcggggcgcggaggctgggccctccccagtccactccgcccgggacagcagtaccgagtcgcggggacagcgggcgggacggagccctgcagctgccgcaggacgcaacccccgccgctgccccgggctgcagaacccggaggaagcggttgccaagctgcagaacgcaggacccccctggcagtccccgctgagcgtctcgag

SEQ ID NO: 123166 - DNA, 614 bp, Homo sapiens; identical to SEQ ID NO: 50188
  chr12:118573923-118574537
  hyper

SEQ ID NO: 123167 - DNA, 30 bp, Homo sapiens
  chr12:118811047-118811077
  hyper
gtcaaagttcatggcgcttctccccacgcc

SEQ ID NO: 123168 - DNA, 30 bp, Homo sapiens
  chr12:118814289-118814319
  hyper
ctcgacccggaagtcgctcgcggcgcgagg

SEQ ID NO: 123169 - DNA, 110 bp, Homo sapiens; identical to SEQ ID NO: 50189
  chr12:119212089-119212199
  hyper

SEQ ID NO: 123170 - DNA, 130 bp, Homo sapiens; identical to SEQ ID NO: 50190
  chr12:119212318-119212448
  hyper

SEQ ID NO: 123171 - DNA, 67 bp, Homo sapiens
  chr12:119417764-119417831
  hyper
ctgcagagcaagtagcgctctcaggcactcaaataagcggacgcaggcgtgtcgaacacacacactt

SEQ ID NO: 123172 - DNA, 978 bp, Homo sapiens; identical to SEQ ID NO: 50191
  chr12:119418345-119419323
  hyper

SEQ ID NO: 123173 - DNA, 590 bp, Homo sapiens; identical to SEQ ID NO: 50192
  chr12:119419368-119419958
  hyper

SEQ ID NO: 123174 - DNA, 30 bp, Homo sapiens; identical to SEQ ID NO: 50193
  chr12:119421330-119421360
  hyper

SEQ ID NO: 123175 - DNA, 30 bp, Homo sapiens; identical to SEQ ID NO: 50194
  chr12:119458732-119458762
  hyper

SEQ ID NO: 123176 - DNA, 130 bp, Homo sapiens; identical to SEQ ID NO: 9115
  chr12:119499107-119499237
  hyper

SEQ ID NO: 123177 - DNA, 32 bp, Homo sapiens; identical to SEQ ID NO: 50196
  chr12:119616601-119616633
  hyper

SEQ ID NO: 123178 - DNA, 178 bp, Homo sapiens; identical to SEQ ID NO: 50197
  chr12:119772413-119772591
  hyper

SEQ ID NO: 123179 - DNA, 806 bp, Homo sapiens
  chr12:120031624-120032430
  hyper
ccgccctcccggcgccgccggcctcgcccatgtctcagtacgcccctagcccggacttcaagagggctttggacagcagtcccgaggccaacactgaagatgacaagaccgaggaggacgtgcccatgcccaagaactacctgtggctcaccatcgtctcgtgtttttgccctgcgtaccccatcaacatcgtggctttggtcttttccatcatggtgagtgaatcacggccagaggcagcctgggaggagagacccgggcggctttgagcccctgcaggggagtccgcgcgctctctgcggctcccttcctcacggcccggcccgcgctaggtgttctttgtcctcgcacctcctcctcacctttctcgggctctcagagctctccccgcaatcatcagcacctcctctgcactcctcgtggtactcagagccctgatcaagcttcccccaggctagctttcctcttctttccagctcccagggtgcgtttcctctccaacccggggaagttcttccgtggactttgctgactcctctgaccttcctaggcacttgcccggggcttctcaaccctcttttctagagccccagtgcgcgccaccctagcgagcgcagtaagctcataccccgagcatgcaggctctacgttcctttccctgccgctccgggggctcctgctctccagcgcccaggactgtctctatctcagcctgtgctcccttctctctttgctgcgcccaagggcaccgcttccgccactctccggggggtccccaggcgattcctgatgccccctccttgatc

SEQ ID NO: 123180 - DNA, 801 bp, Homo sapiens
  chr12:120032454-120033255
  hyper
cgctctgtccaggcaacagtttcctctcgcttcttcctacacccaacttcctctccttgcctccctccggcgccccctttttaacgcgcccgaggctggctcacacccactacctctttaggcctttcttaggctccccgtgtgcccccctcaccagcaaagtgggtgcgcctctcttactctttctacccagcgcgtcgtagttcctccccgtttgctgcgcactggccctaacctctcttctcttggtgtcccccagagctcccaggcgcccctccaccgctctgtcctgcgcccggggctctcccgggaatgaactaggggattccacgcaacgtgcggctccgcccgccctctgcgctcagacctcccgagctgcccgcctctctaggagtggccgctggggcctctagtccgcccttccggagctcagctccctagccctcttcaaccctggtaggaacacccgagcgaaccccaccaggagggcgacgagcgcctgctaggccctcgccttattgactgcagcagctggcccgggggtggcggcggggtgaggttcgtaccggcactgtcccgggacaacccttgcagttgcgctccctcccccaccggctcacctcgcctgcagctgggccacggaactccccggccacagacgcagagccctgattcagcgctgtgaaaatcgctagccacccgtcccccatcaagtccgcccacacttgcccacgggtggtggcaccatattcgattcgtgggcacctgcaaggctccatttgcacccgtaacttgcccttt

SEQ ID NO: 123181 - DNA, 183 bp, Homo sapiens
  chr12:120105357-120105540
  hyper
aaagcgtgagaacacgtgcattaaaagggctttaagaagtggagtttctgaatcagatttgcattttagaaagatccctctggctgcagagtgtagaatcaactataagtgagcaaagatagctaaatggcattattcagcccagcgcatgaacggctcagattgcccgcgcgctggggtgcc

SEQ ID NO: 123182 - DNA, 30 bp, Homo sapiens; identical to SEQ ID NO: 50202
  chr12:120106056-120106086
  hyper

SEQ ID NO: 123183 - DNA, 254 bp, Homo sapiens
  chr12:120315129-120315383
  hyper
gggcgggtctcagccgtgtttggaccaatcagcgtctccgctcctatgatagacatgggcgtctcagccaggccccgcccatgtccctaaaggcatggaggaaagtgaaggggagagccaatcaaattgcatcttcctttgactcgcgaccaacgggaaaaagggaagggcaaaatcagcagggcaggtcttggaagtttgaaattggcggttacgcaggatgctgcgtttgaggacgcgactgttaatctagg

SEQ ID NO: 123184 - DNA, 30 bp, Homo sapiens; identical to SEQ ID NO: 9121
  chr12:120427167-120427197
  hyper

SEQ ID NO: 123185 - DNA, 751 bp, Homo sapiens
  chr12:120524638-120525389
  hyper
tttcccatgaatgacgagcacttattccttggtgagcaaatgtcccaacggtgcagcgcgtggccaggattggaggtcgtccaggcagcccctgcctcagggcgttttttggcaaggaagggaaccccaccatgcccggcgctgcgccgcggctgtagccctgggcccatctgtccctcgccggcaacgttagtcagcacattcctggggctcccgctgctctcggcgccacctgccgggggacgccggaagctcaggaggctgtggctgtcgtggggcaccacgggttctgacgctactggaggggtgtccatggcaaccgatgccgcgtgaggatttccgctgtttgctgccagccaatagcagtgggtgtgacggaggcagccttcggcatctgagccctcagcatccattagacgggctcgggtcccgtcgctgccgcagtgggcggggctgacgcggtggctgagctgtctggagcggtttctctagggaaggcaggcgggccggcgggcggggcgcacttgcggtgtcggcacaggtgactaattgctcggtagacctgaagccaaagaagaagtgctggtcgcagcagtggcctgagcactttgcaagtgggatccacctgttcctttttctggccgcacttcggttagtgcggtcggtgttgtgaagctcgagctaggcggcctctgcaggcggatcctctagctgcccttgagccctgcacattagtcgctggccctgtaca

SEQ ID NO: 123186 - DNA, 30 bp, Homo sapiens
  chr12:120555010-120555040
  hyper
gtagaaggcagagtcgcgcggggaaggccc

SEQ ID NO: 123187 - DNA, 30 bp, Homo sapiens
  chr12:120632757-120632787
  hyper
agcccgcggtgtaacgctatgggcccgcct

SEQ ID NO: 123188 - DNA, 30 bp, Homo sapiens; identical to SEQ ID NO: 50208
  chr12:120638499-120638529
  hyper

SEQ ID NO: 123189 - DNA, 478 bp, Homo sapiens
  chr12:120638747-120639225
  hyper
ccgtcatctcggggcgtgcaagccgccaccgaggccccaggcggaacagaataggactccatgttcccaaaggcccccaaagacccctccatgcttcccgccggcgacccctggcgcccatctaactagcacacgaaccttccacgaggacgcctggcgagagaagggcctcgcgcccgcgcgtgccttttataatgcgaacaaagtagccaatcagaaaccgcggatagcgctcctgtctattggctgcgccatcgcccgtcagacaaagctgaacgaatacaggcaaccattggataatatcgctgccactccagccaacggaaagccgcctttaagtagggtcgcgaaggaaggcgctgcctcgcgttggaggagcttgctctgagctgctgccacctgctgggctggagctggagctggagctgcgaattcggagtcccggttccctgtgccacctggcgagctcagcaaacta

SEQ ID NO: 123190 - DNA, 118 bp, Homo sapiens
  chr12:120703714-120703832
  hyper
gtggcgccccctcgcggctaagcgggcaggtgggcggctcccaggcctccagccactcccatccatctttctgtccctctcaaagtcacttgcctgaccctgcggatgacaaatccgt

SEQ ID NO: 123191 - DNA, 53 bp, Homo sapiens
  chr12:120729779-120729832
  hyper
tgtgtccgtgtatacgacgtgttcccactccaccagccgtatttaaggcccat

SEQ ID NO: 123192 - DNA, 77 bp, Homo sapiens
  chr12:120739995-120740072
  hyper
tgaccagaaagagccgacagggggcgttcctggatgatctggggctgtcaattgcgagacgcggaggattgtgggac

SEQ ID NO: 123193 - DNA, 30 bp, Homo sapiens
  chr12:120755544-120755574
  hyper
ggcggattggggggcgtggactagaggttg

SEQ ID NO: 123194 - DNA, 134 bp, Homo sapiens
  chr12:120763472-120763606
  hyper
gtttccatctctaacggggtgcgttcgctacagggtcctcttggaacatatttgtttatttgacaagaggtgaaaatatgttatccttagcagatatgcaagtcccctttgtatgcctcgtgagatccttggcg

SEQ ID NO: 123195 - DNA, 30 bp, Homo sapiens; identical to SEQ ID NO: 50211
  chr12:120806368-120806398
  hyper

SEQ ID NO: 123196 - DNA, 30 bp, Homo sapiens; identical to SEQ ID NO: 50212
  chr12:120806602-120806632
  hyper

SEQ ID NO: 123197 - DNA, 30 bp, Homo sapiens; identical to SEQ ID NO: 9123
  chr12:120807603-120807633
  hyper

SEQ ID NO: 123198 - DNA, 30 bp, Homo sapiens; identical to SEQ ID NO: 50214
  chr12:120875541-120875571
  hyper

SEQ ID NO: 123199 - DNA, 56 bp, Homo sapiens
  chr12:120875857-120875913
  hyper
ggaggttgtagtaccgcccccagagccaattttccacttccgcttccggcgctgcg

SEQ ID NO: 123200 - DNA, 43 bp, Homo sapiens
  chr12:120884033-120884076
  hyper
cacactgctggtagcgcttgaagaggtcggtgcacgggtcccc

SEQ ID NO: 123201 - DNA, 30 bp, Homo sapiens; identical to SEQ ID NO: 50217
  chr12:120884514-120884544
  hyper

SEQ ID NO: 123202 - DNA, 30 bp, Homo sapiens
  chr12:120906421-120906451
  hyper
ggctcttatttggccggagtggagtgacca

SEQ ID NO: 123203 - DNA, 30 bp, Homo sapiens
  chr12:120906923-120906953
  hyper
tcatttggaccccccgaggccggtgcaggc

SEQ ID NO: 123204 - DNA, 30 bp, Homo sapiens
  chr12:120907839-120907869
  hyper
gagctggagtcaggcggagaccgcaggctg

SEQ ID NO: 123205 - DNA, 30 bp, Homo sapiens
  chr12:120933467-120933497
  hyper
ggtgcgagatcatgcgacctgtcgtggtgg

SEQ ID NO: 123206 - DNA, 49 bp, Homo sapiens
  chr12:120933806-120933855
  hyper
aatgccgtgggctgcgtcaagccaatagggtcgcgcggcgaggggcggg

SEQ ID NO: 123207 - DNA, 30 bp, Homo sapiens
  chr12:120967090-120967120
  hyper
tggtctctaagtatcggaaatcccttcctc

SEQ ID NO: 123208 - DNA, 30 bp, Homo sapiens; identical to SEQ ID NO: 50219
  chr12:121019397-121019427
  hyper

SEQ ID NO: 123209 - DNA, 30 bp, Homo sapiens; identical to SEQ ID NO: 50220
  chr12:121022688-121022718
  hyper

SEQ ID NO: 123210 - DNA, 254 bp, Homo sapiens
  chr12:121077957-121078211
  hyper
ggaggcagccccacacggaggcgctgggagactttcctcccagcagtgtcctgtcactgcattccggcccctgcgtttgtaggcagtgatgtcacagagtgccttcatgctcctcgggtctccggttctccccggacctctgtagtcctcattgccaaagttgtaccccctggggagtgcaccctgcctgcatttctggaggttcgggcggttccggggctctgcaggagcctccaggcgtgataaagagcgct

SEQ ID NO: 123211 - DNA, 91 bp, Homo sapiens
  chr12:121079467-121079558
  hyper
ctccgagcaggtggcgccaaacccactcctctggcctctggccagtaccgccagggagggactcaggagagcaagcggtttggagtctggg

SEQ ID NO: 123212 - DNA, 30 bp, Homo sapiens; identical to SEQ ID NO: 50223
  chr12:121087367-121087397
  hyper

SEQ ID NO: 123213 - DNA, 312 bp, Homo sapiens
  chr12:121124596-121124908
  hyper
accggaagtgctggcgacatgtcagtgcgccctaccctaaaccttccccccccaggccacctttcccattcagctgtgggattccggggccgcctgggcgctgcacccgccacttccgcatcgaaccgccgcttcaaccgaactcactccctctgcgcgcgctccatctggtgcccgactgctgggccggcgcctgggagaagccacgccctttcccgcgcctgacagccaatgagcgggcgcctcccggcggggtggtgggtaattaatgagggccgggcgctgattggctgcagcgtcgtggccgggggc

SEQ ID NO: 123214 - DNA, 30 bp, Homo sapiens
  chr12:121125122-121125152
  hyper
gggaaccgctgtggcgctcctgcgactgct

SEQ ID NO: 123215 - DNA, 30 bp, Homo sapiens
  chr12:121125716-121125746
  hyper
acccaggaatcggccgctttccttgcccct

SEQ ID NO: 123216 - DNA, 30 bp, Homo sapiens
  chr12:121148279-121148309
  hyper
gagcgggtctaacccgaaggctgcggccgc

SEQ ID NO: 123217 - DNA, 30 bp, Homo sapiens; identical to SEQ ID NO: 9127
  chr12:121163872-121163902
  hyper

SEQ ID NO: 123218 - DNA, 30 bp, Homo sapiens; identical to SEQ ID NO: 50227
  chr12:121342273-121342303
  hyper

SEQ ID NO: 123219 - DNA, 19 bp, Homo sapiens
  chr12:121343196-121343215
  hyper
gggcgcggtggctcacgcc

SEQ ID NO: 123220 - DNA, 30 bp, Homo sapiens; identical to SEQ ID NO: 9128
  chr12:121409658-121409688
  hyper

SEQ ID NO: 123221 - DNA, 169 bp, Homo sapiens
  chr12:121454118-121454287
  hyper
acatagtaccctaccggctcttggcttccctgccacgtgcgggcgttgctccaagccccaagccggcattgccgcctcgcggcaccgctccagctcctccgcatcgctactgctgttactactttccgaatcgctcactgtgccactgggcgccgccatcttgaaccac

SEQ ID NO: 123222 - DNA, 201 bp, Homo sapiens; identical to SEQ ID NO: 9130
  chr12:121476534-121476735
  hyper

SEQ ID NO: 123223 - DNA, 30 bp, Homo sapiens
  chr12:121735124-121735154
  hyper
ggccaccaccgactcgggggagcccccttc

SEQ ID NO: 123224 - DNA, 30 bp, Homo sapiens; identical to SEQ ID NO: 50231
  chr12:122110452-122110482
  hyper

SEQ ID NO: 123225 - DNA, 172 bp, Homo sapiens
  chr12:122124825-122124997
  hyper
tttaaatgagcatgcgtgaaggtcgccccggtgcctgagtcacgttcctgtactcaatgcgcctgcgcttcctgaagccagactgggccctcggctccgcccgcctatttaagtgggcggagacagtcgcgtgagttcagtggacccacaatctcccgcgcaattaaccaga

SEQ ID NO: 123226 - DNA, 204 bp, Homo sapiens
  chr12:122150704-122150908
  hyper
gggcggtcggcgagcgcgcgggcgtggggcgctggggggccggtcgggcagcgctgcgggagcagccgccggcaccgccgccttgcaccatcgcatcatgtccgggcagctggagcgttgcgagcgcgaatggcacgagctggagggagaatttcaagaactgcaggtagggccaggccacctggtcccgcaactctgctgccc

SEQ ID NO: 123227 - DNA, 214 bp, Homo sapiens; identical to SEQ ID NO: 50232
  chr12:122214096-122214310
  hyper

SEQ ID NO: 123228 - DNA, 30 bp, Homo sapiens; identical to SEQ ID NO: 9132
  chr12:122231022-122231052
  hyper

SEQ ID NO: 123229 - DNA, 1023 bp, Homo sapiens; identical to SEQ ID NO: 50234
  chr12:122231273-122232296
  hyper

SEQ ID NO: 123230 - DNA, 76 bp, Homo sapiens; identical to SEQ ID NO: 9135
  chr12:122237446-122237522
  hyper

SEQ ID NO: 123231 - DNA, 30 bp, Homo sapiens
  chr12:122241937-122241967
  hyper
gggagccgagcctccgccgccagccgcctc

SEQ ID NO: 123232 - DNA, 141 bp, Homo sapiens
  chr12:122242480-122242621
  hyper
ttggggggagccagcgagacagctcctttcggggcgcgctggcaaggtgggagggggtgggggcctgccgattggattctttcgcgtgtgtgtagaagcggccgccgccgccgccgcggcggagacgacaacaacttgctg

SEQ ID NO: 123233 - DNA, 30 bp, Homo sapiens
  chr12:122242906-122242936
  hyper
ggccaactgtcagacggggccccagccctg

SEQ ID NO: 123234 - DNA, 30 bp, Homo sapiens; identical to SEQ ID NO: 50237
  chr12:122243313-122243343
  hyper

SEQ ID NO: 123235 - DNA, 30 bp, Homo sapiens; identical to SEQ ID NO: 50238
  chr12:122243740-122243770
  hyper

SEQ ID NO: 123236 - DNA, 30 bp, Homo sapiens; identical to SEQ ID NO: 50239
  chr12:122249854-122249884
  hyper

SEQ ID NO: 123237 - DNA, 96 bp, Homo sapiens
  chr12:122326468-122326564
  hyper
tgagtcagctggggcgagatcatcccctagcgttggtgtgcaattgcgtggggatccattgcttccgacgctactcctgccgggtcaccacaggcg

SEQ ID NO: 123238 - DNA, 111 bp, Homo sapiens
  chr12:122459494-122459605
  hyper
acgcgacccccccgcgccccgcagaccggctgtctcccatggacccctcggcacctgcagcctccgaggaagggtcagcgcgcgtgtccgcacgcccgcccccaccgcgcg

SEQ ID NO: 123239 - DNA, 239 bp, Homo sapiens
  chr12:122459881-122460120
  hyper
gtgcgagtgtctgtgcgcgagtgagtgagcggcgggcgggcgcgagtgtggccgccgcggagcgcgagcaggacccggcgggcgcgctccccagcctccgtctccccgccggaaccatgtcgggcaggtcggttcgagccgagacgaggagccgggccaaagatgatatcaagagggtcatggcggcgatcgagaaagtgcgcaaatggtaagcggaggcgcccgccgccagccgcctc

SEQ ID NO: 123240 - DNA, 603 bp, Homo sapiens
  chr12:122460948-122461551
  hyper
ttggtggcggccgcgcgtggttttcgggatcacattagcgtccgcccggcgtggcccggtcgacattaaggggatcgaacctttccgcggcctcgtcggggtctgctcggaatcggcccctgggccaggcccgaggcgcaagcagatcgccaggttgggtcagagttgttgaaaactccccgctgcctgatttcaactttattatttttttcccacgccttcactggggtcccggagggagaggagccgccgcaacgctggctctgagtgtcagcgcccgcgggctcgtctcgaccctttatttcgagcctggaagctgggcaggccctgtggcaggggatgtttacgtttgggggtgtcgtttctcgagtagcgcctcggtctctaaaagccactgggggcgagcctccggtgtggcggtgtcacaagttagctgtcctttctgagtcaaacccaacaaaaaaggcaagaggaaaatcaataaagtccacgtgctccccggcctcctatggaaagggctggctgcgatggccggatgcccggccgtgggctgggtttggctccagtgggacaaagaattttcagaaccgtgagaaggggagg

SEQ ID NO: 123241 - DNA, 31 bp, Homo sapiens; identical to SEQ ID NO: 9137
  chr12:122478893-122478924
  hyper

SEQ ID NO: 123242 - DNA, 276 bp, Homo sapiens
  chr12:122667639-122667915
  hyper
ccctgcccccgcgcacgcgtcctagcggttgccgggcaacgcggcccgggccatggaggcgtcgtacgagtccgagtccgagtccgagtctgaggccgggcctgggactcagcggcccgggaccgggaccgtgagcgcggccgtgcgcgagcacttgcggaagctgtgtctgcgcgagttcccgtgcggtgccggcagctgggtgcgggcgccggggccggaactctgggggcctggaccggctgcggggaggcacgggcccgggcgagcggagcg

SEQ ID NO: 123243 - DNA, 30 bp, Homo sapiens; identical to SEQ ID NO: 50246
  chr12:122687936-122687966
  hyper

SEQ ID NO: 123244 - DNA, 619 bp, Homo sapiens; identical to SEQ ID NO: 50247
  chr12:122688563-122689182
  hyper

SEQ ID NO: 123245 - DNA, 91 bp, Homo sapiens
  chr12:122710554-122710645
  hyper
ccgccattgtgcagcgcgcggacgccagacgcacacgccggaagtgacgcagcttcgtgagcgcggagcggggcacggcctccacctgaga

SEQ ID NO: 123246 - DNA, 30 bp, Homo sapiens
  chr12:122711247-122711277
  hyper
caacagcctcctggacgctcgcttctcggt

SEQ ID NO: 123247 - DNA, 30 bp, Homo sapiens; identical to SEQ ID NO: 50248
  chr12:122750901-122750931
  hyper

SEQ ID NO: 123248 - DNA, 30 bp, Homo sapiens
  chr12:122751165-122751195
  hyper
gccaagacccagagcgcgtttcagagtctg

SEQ ID NO: 123249 - DNA, 30 bp, Homo sapiens
  chr12:122906392-122906422
  hyper
tcatctgccttccgcgccaatcccctgccg

SEQ ID NO: 123250 - DNA, 203 bp, Homo sapiens; identical to SEQ ID NO: 50249
  chr12:122907626-122907829
  hyper

SEQ ID NO: 123251 - DNA, 513 bp, Homo sapiens
  chr12:122907837-122908350
  hyper
tcccagggtttgctccgttcgtttgagaaaagccccttttattcgccctggctgcttggacggaagccctggttagtgtcccatcctccttcccccctgggatttcctttaaaagcttttgaaagggacaggagggaaggctgcaacagcctgctcggggctggggtagcagagggcggccagcatttcactcccatggaccatggcaaccccagaagccttacatctccagggaggaatttgcagctgtcggggaagcccaggattttgtggtggataagggggcaggggcttcctcctccttgccagtagaagagaataatcggcgggtgacccctctagctgacctttattcaaagcaccgtgctgcctggaccagcaggaagagggaactgctctggtaatgcacgaagttctgaactatgtaaatttgtctcctggcccctcctctccattcatgtctgaaatccctcgaaatgctgttacctaattcaacatcgccctaatttacag

SEQ ID NO: 123252 - DNA, 30 bp, Homo sapiens
  chr12:122984765-122984795
  hyper
cgcgtctaagcagccggtatttcatcacct

SEQ ID NO: 123253 - DNA, 30 bp, Homo sapiens
  chr12:122985577-122985607
  hyper
gcagcggggcctatcgggcttgcgattgcc

SEQ ID NO: 123254 - DNA, 30 bp, Homo sapiens
  chr12:123011295-123011325
  hyper
tacacacatacacacgaacaaggttctggg

SEQ ID NO: 123255 - DNA, 205 bp, Homo sapiens
  chr12:123011574-123011779
  hyper
agtttctataacaacgcaattcgaggcggtgattgggtgttctttcataggggagtgtaaagaccgtgaagagggcggggccaagaatacacccccggaatgcgcagtcgggagaacggaatgggcggaactcagggtggggcaacttcctatttcgagtctaaagtaatcttggtctcttccggccgccgtaaaggggttgggt

SEQ ID NO: 123256 - DNA, 30 bp, Homo sapiens; identical to SEQ ID NO: 50251
  chr12:123237067-123237097
  hyper

SEQ ID NO: 123257 - DNA, 30 bp, Homo sapiens
  chr12:123237452-123237482
  hyper
gatagcggcgggagcggagccggcggggcc

SEQ ID NO: 123258 - DNA, 571 bp, Homo sapiens
  chr12:123258811-123259382
  hyper
gagtgctgggggcggcgcagcagcctttattgacttcttcattctctgggtagtggtgaacagccggttctttcaggccttccagcgccggagcctcgggcgtgggcaaaaagcgtccatacgcagcctgagccacttgggagcccccagtttccgaggcagaagaacagtgcccaccagcgcagcggggctgcggcccggaaaccctggcggggagccccgagccccggcgggcgcacgccgcgtgggcaccaggcaggcggttggagtacggggcgggggtcggccgagggcgcggggccccggggctccgggctcgcccccgccgctcggggcaggcgcgccgatggcgtttctgaggtgacgccgcccacaccgggcttctccgggggcggaggaaacacctatgaaccctccggcagccttccttgccgggcgccaggtaagcagcggttccgggcgcggcggggcgccgcgggaacggtgcacattggtcgaaatctattgcttctcaagaacggtgtctacttaaaatgtgaaacaggccgggcgcggtggctcacgcctgtaa

SEQ ID NO: 123259 - DNA, 153 bp, Homo sapiens
  chr12:123319201-123319354
  hyper
cacgccacccctggcggcatctcctcggtgtactttgctgttcagatccgcctgccttctgtgccagcctaacagcgcccggcctcagcccccattgtccctggagctggcgaggtgtccggttgcggagccggcggcgtctctggaaatgca

SEQ ID NO: 123260 - DNA, 110 bp, Homo sapiens
  chr12:123321239-123321349
  hyper
atttgcgtttgtggcggctatttgcaagttccgtcccacttgtccttgcagagagctatgacttctgcggttgccttcacatctagttagcacacgcactctacaacagc

SEQ ID NO: 123261 - DNA, 502 bp, Homo sapiens; identical to SEQ ID NO: 50254
  chr12:123380318-123380820
  hyper

SEQ ID NO: 123262 - DNA, 30 bp, Homo sapiens; identical to SEQ ID NO: 50255
  chr12:123414330-123414360
  hyper

SEQ ID NO: 123263 - DNA, 31 bp, Homo sapiens; identical to SEQ ID NO: 9141
  chr12:123414419-123414450
  hyper

SEQ ID NO: 123264 - DNA, 30 bp, Homo sapiens; identical to SEQ ID NO: 50257
  chr12:123450200-123450230
  hyper

SEQ ID NO: 123265 - DNA, 179 bp, Homo sapiens
  chr12:123451027-123451206
  hyper
gctgatggacggggcggggcctcagtgacggagggggcggggatcctggggcagggaccggcggagcctcccgggaggggcggggcctcaggaggagtgggcgggctttcctggacggggcggggcccccgaggagggggctggcgaagcctccgggtggggacgggcctcctgggggc

SEQ ID NO: 123266 - DNA, 410 bp, Homo sapiens
  chr12:123459137-123459547
  hyper
tcatttgttggctgcggtgagaccacgccccgtcgccctcccacacctgaccccgccctcccgcgtccattgggaacgccaccggaagtaatgcgagacggagcgttttggtggagacactcactggggcaatctgaggtaatccaacagactgtggcggagggaccggaagcgccaggcagggacccggggtagatgctaaatccaaactgaaacgtacagggctggatgattgaagcaccagcgggaactagtcggacctccgagctctttaaactgtcctcagctcggctggttctccacgagctccgggcagacggcggggggtgggtcggcgtttaagtcaaaggccttggggctccgagtcccttcctctccccgtcctgtgaaggcacgacccagttcagctg

SEQ ID NO: 123267 - DNA, 47 bp, Homo sapiens
  chr12:123459788-123459835
  hyper
gtgcttcactatggcgacggtgggggctccgcggcacttctgccgct

SEQ ID NO: 123268 - DNA, 30 bp, Homo sapiens
  chr12:123460144-123460174
  hyper
gcttaggacagggccgggctcagcttgccg

SEQ ID NO: 123269 - DNA, 30 bp, Homo sapiens
  chr12:123464743-123464773
  hyper
ccagccccatgccacgttgcacgtatcagc

SEQ ID NO: 123270 - DNA, 31 bp, Homo sapiens; identical to SEQ ID NO: 50261
  chr12:123497425-123497456
  hyper

SEQ ID NO: 123271 - DNA, 30 bp, Homo sapiens; identical to SEQ ID NO: 50262
  chr12:123634942-123634972
  hyper

SEQ ID NO: 123272 - DNA, 30 bp, Homo sapiens; identical to SEQ ID NO: 50263
  chr12:123636160-123636190
  hyper

SEQ ID NO: 123273 - DNA, 30 bp, Homo sapiens; identical to SEQ ID NO: 50264
  chr12:123717035-123717065
  hyper

SEQ ID NO: 123274 - DNA, 42 bp, Homo sapiens
  chr12:123717761-123717803
  hyper
cgcgtccacctcgccgttccccctcgcgcagctccaaccaaa

SEQ ID NO: 123275 - DNA, 358 bp, Homo sapiens
  chr12:123754845-123755203
  hyper
ccctccgcaccctgacgcttaaccctttcctgcccctacacctcagtgtccaagattttttttaggtatcgtttttatgggtcccacttccgatttggggggttacgaggtcaacgtttgcaaacaaggcccaaaactcgagcaggagagccagcgtggcaccggtgaccaacggggccactcctctccccgtcgagtccttccccccatcccgccccgcaacacaaccgccttttgggaagtctgtttccgaccaagtgtcagagaagaagggccccagtgaggtcacaaagcccggcacctacgaatccctcaatgttgtgcccactccccatggctccctcggtcccctgggctc

SEQ ID NO: 123276 - DNA, 30 bp, Homo sapiens
  chr12:123849298-123849328
  hyper
tgaaggaccagaggcgactggagcggaggc

SEQ ID NO: 123277 - DNA, 256 bp, Homo sapiens
  chr12:123849886-123850142
  hyper
gcgcatgcgccccgcgcctgctttcaaactccggttaggaagggcctggagctattttcagaacctgttagggtggggagctacggcccaggaagttacctagcagcgtttctgtcacttggaagatctcttcattacctagttagtcctagaaacaaaatgtttacatattcattgcttgttaggctcgctcaaagcactttattggcagtgaaaccgcaagtaacccggagccctcggcgcgaccacggctaga

SEQ ID NO: 123278 - DNA, 331 bp, Homo sapiens
  chr12:123868412-123868743
  hyper
tcccaatggcagctcgggtgtcttccatcgcagccattcaacgtctggcgacggtcaaatttaaacacccctcccacctcctccgccgggacctgtcgggaaagcgtttgcagttattgcggcggctggacacgccccgccgccgaagaggcgggagaagggcggggcctttctccgagttggcctatcactacgggcagcctgcggagaggcgggaggcggcgccaatcggggcgagcagctggagcccggcggagcagttggctgagttgttgcaacttttttcgaaagctgggtttcccgggagatcccaggcggtgacagagtggag

SEQ ID NO: 123279 - DNA, 30 bp, Homo sapiens
  chr12:123869045-123869075
  hyper
tttggaaactaaagcgcagggcacctccag

SEQ ID NO: 123280 - DNA, 30 bp, Homo sapiens; identical to SEQ ID NO: 50269
  chr12:123869319-123869349
  hyper

SEQ ID NO: 123281 - DNA, 343 bp, Homo sapiens
  chr12:123874196-123874539
  hyper
ccgggccgcttcctttgctgccgcctggctgggagtggcgcccacacggctccgccatgagcctggcggtgtttgacctcggaaaagtttgactgcgccttcgtggcgtctccgcagcccaagaccctacttccccggaggtggccgcggtcccaggctgtgcggggcctgcgcgggcccctcggagaggtcacgggtctcaccgcctcggtgttgaatggtccccgaggcggcgagggcccggcgttgcttctggggacgccctcctccgtctgtacttactcagaggaggggccccacgcccagaggcgcccgcagtgacctgaaccgccccaccgccccg

SEQ ID NO: 123282 - DNA, 600 bp, Homo sapiens
  chr12:123920538-123921138
  hyper
gaaaagaaaaggaaggcgtctccctgccagtaggtgccctcctacgccccgcaggcgccgtgggcccggaaccctcgctcccacactcacctccccgctggccggagggctctgtctccgcagcccctccacctccttcctgaggtggtccctctccatcttcagctcctccagcgccaggctgccctcattcaccagcgcctccagcatctccaggacgcggacgactttgaactgcagctgcgtcacccgggggtcgctgcccagggccataagctcgcggcccaacaggtaggagatgtcatacacgtcctcggcggtcagctggaaggggctcttgcccagcgccccctcgggcccaacctcgtccctctcctcgtcctcctctccctcctcctcttcctcttctcgcacagggggctcctccatggccacccagacccccgccgacctcggagctgctgtcttggagtctcccaaaggttagacttcctcccggcacccaaaactttccgctgggcagagtccctacctgcccaatcagcgcggcccgggggtgggcccggggggatggtgcaaggggccgcgcacgcgactctt

SEQ ID NO: 123283 - DNA, 30 bp, Homo sapiens
  chr12:123921446-123921476
  hyper
cgtagaatttgcatcgtaggtgatggaaga

SEQ ID NO: 123284 - DNA, 320 bp, Homo sapiens
  chr12:124017663-124017983
  hyper
gcccttgggtccccgcggtcccactgcccggacggacagaccgaggccgccgcccaccttctggtgcttgcgctccttctcgatgcggtccatcctctccaggcgcaggcggtccagctccaggcgcagctcgtccagctcgggcgcgacgtggtggcggctgaccagcacctccaggatctccaggacgcgcacgaccttgggcatgaggcgcgcgatggcctcgcagccgtgctggtcaatgacccgctcgaactcgtggcccacaagcgacgcgatgtcgtacacgtccatgacggtcagctcggccacgttcttct

SEQ ID NO: 123285 - DNA, 30 bp, Homo sapiens; identical to SEQ ID NO: 9145
  chr12:124018978-124019008
  hyper

SEQ ID NO: 123286 - DNA, 67 bp, Homo sapiens
  chr12:124068851-124068918
  hyper
cttccggacactgtcgttttcctgggaagtccacaggaactttagcttggacgagaaaggactaggg

SEQ ID NO: 123287 - DNA, 30 bp, Homo sapiens
  chr12:124069309-124069339
  hyper
atgggcctcatcttcgaggtggcggagggc

SEQ ID NO: 123288 - DNA, 30 bp, Homo sapiens
  chr12:124086203-124086233
  hyper
accaacattcaggacgtaccggccatcgga

SEQ ID NO: 123289 - DNA, 30 bp, Homo sapiens; identical to SEQ ID NO: 50273
  chr12:124086888-124086918
  hyper

SEQ ID NO: 123290 - DNA, 30 bp, Homo sapiens
  chr12:124118037-124118067
  hyper
ggacccctgaacggcgctgctgtagcctag

SEQ ID NO: 123291 - DNA, 198 bp, Homo sapiens
  chr12:124155697-124155895
  hyper
ggcagtggctgctgcgttttcgtgtctgagtccttcctgggttctaatgagggcgcggttctgctgtgcccggcccgcgaggtctaaggcatgggcttccagcctccggccgctcttcttttgaggcttttccttctgcagggcatcctgaggcttctgtggggggacctgggtgtgtacggcgcggcagtgacctcg

SEQ ID NO: 123292 - DNA, 31 bp, Homo sapiens; identical to SEQ ID NO: 9146
  chr12:124156317-124156348
  hyper

SEQ ID NO: 123293 - DNA, 30 bp, Homo sapiens; identical to SEQ ID NO: 50276
  chr12:124196656-124196686
  hyper

SEQ ID NO: 123294 - DNA, 496 bp, Homo sapiens; identical to SEQ ID NO: 50277
  chr12:124246516-124247012
  hyper

SEQ ID NO: 123295 - DNA, 270 bp, Homo sapiens
  chr12:124456336-124456606
  hyper
ttgtgcattctgctccgtttcacgaatcacaggcaaatcgttactcagagtaaactaaagccgcatcaaagcttcaggaaggggctggcaaggtagtgtacttacggaaaggctaccaggacgggaggcgatacaacttgtcagggagggtctctaaggttccccgggtggtaacaagcatttaaaaaggcgatgtggattcagacggcctcctccccacagcatcccagacaaagccgggctaggccccggggcgctcctggtgcacct

SEQ ID NO: 123296 - DNA, 30 bp, Homo sapiens
  chr12:124457926-124457956
  hyper
ctttctttctttcccggagggaggcggggg

SEQ ID NO: 123297 - DNA, 674 bp, Homo sapiens
  chr12:124779558-124780232
  hyper
gcccaccgcgcaggccggggcggggagaggaagggggaggaggaggcgcctagaaaaggaggcgcgggccggggaggtgcggagagggccgggcggcaacgtgcgcctcggggctgggccggcctgcgggatcgcagcgcagcgcagaggcgaggctgggcccggcgggcgggagccgcggagggcggagggcggagggcggcggcgctggcaggagcgcggcccacggcggcgagcaggctgcaggcccgcggggatccggggcgcggggggcgccgggcctgatcgccgcctctcgcggtgcccgcaggtccccgggcgcgcagctctcgccccgccgccgcctgccccgggccccggagcgcggtggagaagcccccggaggagcggggggcccgcgccccgcgccccccagacatggtgggccacctgcatctgcagggcatggaggacagcctgaaggagcagggccgggagggcttgctggacagccccgactccgggctgccccccagccccagccccagcccgcccttctactccctggcgcccggcatcctcgacgcgcgcgcggggggcgccggcgcctcctcggagcccccgggacccagcgaggccagagcggtaaggaggcgctctctctcccaaacgggggaccgcgtgggcgggtgggt

SEQ ID NO: 123298 - DNA, 31 bp, Homo sapiens; identical to SEQ ID NO: 50280
  chr12:124790623-124790654
  hyper

SEQ ID NO: 123299 - DNA, 31 bp, Homo sapiens; identical to SEQ ID NO: 9149
  chr12:124870576-124870607
  hyper

SEQ ID NO: 123300 - DNA, 30 bp, Homo sapiens; identical to SEQ ID NO: 9150
  chr12:125051052-125051082
  hyper

SEQ ID NO: 123301 - DNA, 196 bp, Homo sapiens; identical to SEQ ID NO: 9151
  chr12:125093637-125093833
  hyper

SEQ ID NO: 123302 - DNA, 100 bp, Homo sapiens; identical to SEQ ID NO: 9152
  chr12:125198343-125198443
  hyper

SEQ ID NO: 123303 - DNA, 30 bp, Homo sapiens; identical to SEQ ID NO: 50285
  chr12:125225301-125225331
  hyper

SEQ ID NO: 123304 - DNA, 138 bp, Homo sapiens; identical to SEQ ID NO: 50286
  chr12:125256629-125256767
  hyper

SEQ ID NO: 123305 - DNA, 30 bp, Homo sapiens
  chr12:125348153-125348183
  hyper
tgcttgatgagcgacggcaccatcacgatc

SEQ ID NO: 123306 - DNA, 30 bp, Homo sapiens; identical to SEQ ID NO: 9153
  chr12:125398614-125398644
  hyper

SEQ ID NO: 123307 - DNA, 30 bp, Homo sapiens; identical to SEQ ID NO: 50288
  chr12:125399082-125399112
  hyper

SEQ ID NO: 123308 - DNA, 30 bp, Homo sapiens; identical to SEQ ID NO: 50289
  chr12:125399710-125399740
  hyper

SEQ ID NO: 123309 - DNA, 30 bp, Homo sapiens
  chr12:125412574-125412604
  hyper
gtctgtcaaggccacgacctctgagaagcc

SEQ ID NO: 123310 - DNA, 120 bp, Homo sapiens
  chr12:125473582-125473702
  hyper
ggtgggcgctccagcggccggaccagcagagcaatccgaaacccagcccacgtgggttcccagaccaccaactccggccgtgagacttccgggttgtgttatcgcgagaactgtaactga

SEQ ID NO: 123311 - DNA, 168 bp, Homo sapiens
  chr12:125477527-125477695
  hyper
cttgtcttggcaagaatccatcgcaggtggcgctggtacttcctggcactaagatcgattggcgggaccgggacttcgcggcttagcccctccattttcaagttccccgccaaaccctcccctcttggttgtacccatttctgatgatcatcgcgtgaatccatcatt

SEQ ID NO: 123312 - DNA, 445 bp, Homo sapiens
  chr12:125534027-125534472
  hyper
agtcaagctagaggtcgtgaccccctggagtctcggtggtttcgggttggggagcagagcgggtggggcaggaccgactcgccggtgccagtcaggatatcaaggtgacagcgcccggcactggccttggtcgaagggtgactccgccccattgctaagctccgattgggcacgcccttttctggttcttcttcaggattggctgggaggtgcggcctatgaaccggaacgcgtcgcgattggttggcgctcaggccgatcttccagacgcggaggcctgggccgatgtggcccaactctctgccagccaatcagcgctcgggctgagtgtggcgcgtgagtgtgtccgggatccctccgccgcccgggcgttggggtcgcgggaagggaggggactgggaggggatggggtggggacgcgcaggaggcccgtggggttgacttg

SEQ ID NO: 123313 - DNA, 30 bp, Homo sapiens
  chr12:125549774-125549804
  hyper
ccaaggctcgtgagcgcccctcacccccac

SEQ ID NO: 123314 - DNA, 30 bp, Homo sapiens
  chr12:125550195-125550225
  hyper
cagtaagaagaacacgcagatggaccgctt

SEQ ID NO: 123315 - DNA, 119 bp, Homo sapiens; identical to SEQ ID NO: 50293
  chr12:125670141-125670260
  hyper

SEQ ID NO: 123316 - DNA, 194 bp, Homo sapiens; identical to SEQ ID NO: 50294
  chr12:125670334-125670528
  hyper

SEQ ID NO: 123317 - DNA, 30 bp, Homo sapiens; identical to SEQ ID NO: 50295
  chr12:125672126-125672156
  hyper

SEQ ID NO: 123318 - DNA, 446 bp, Homo sapiens
  chr12:125815549-125815995
  hyper
ctaaaccgcccaaatcggggtttcgtctctggaagaggggagggatgcaccaccggctcctcgtgcagcgctggcggcggcggccactgggtggcggtgttgcccgcgaggcccggggtctgcggaggagggagccggactgggagcggggcggggacagcgccggggagggcctggtccgggtgggctcagtccgggctcccgggtcggtcccctcctccgcgttgctgccccaggagtccgcttcgtcctccgctgactctgagcgacacaggacaagctctgaattgcattccaggaaaaggggactgaggctttgtatttttcctccgcaccaagattcccaaggctgctgttaagggtttttacccagggtggggtccacggcgaagccctggggtctgtgtgaaggggaggtgctgtttctttcccgagttctccgtggc

SEQ ID NO: 123319 - DNA, 294 bp, Homo sapiens
  chr12:126018008-126018302
  hyper
gggaatgttcctaaacgcttgttttccctttgcatagctgattgcagagcccagcaagtctttctctaaatggctttactttgacaaggggtcgcgatggcattttgattggcatccgcctctcctccggggaaggacctcgtgggcgatggtcctggcgcacccgctagatggcgccgcagaccggcttgtacaggccgcgcgccctcccctccccggcggaggctcctggagcccctgcccggcctgactggctgcgtcctcaggccctgcgatttccagggattcccgatt

SEQ ID NO: 123320 - DNA, 30 bp, Homo sapiens; identical to SEQ ID NO: 50298
  chr12:126109505-126109535
  hyper

SEQ ID NO: 123321 - DNA, 144 bp, Homo sapiens
  chr12:126168471-126168615
  hyper
gtccctgtgcagagcgccccctgccggtccctcttggaggctgggccagcgttgcgagtcttgccagggacgcgcgctctagcgccggaggctgggaacgcaccgcggtgccaccgcgtcctgcaggggcggggcgcgcacctg

SEQ ID NO: 123322 - DNA, 173 bp, Homo sapiens
  chr12:126675648-126675821
  hyper
gagctgcgccgcagacggcgaaaaccagaggtggttacagtcaagtttagggactgcaggagcgaattcccgaaggcttgcaggagccgcccggctctgcctccagcctttctctctgggcctagcgggactctcccaggcaggcccctccctgcccgcgggcgcactttccc

SEQ ID NO: 123323 - DNA, 6 bp, Homo sapiens
  chr12:127210928-127210934
  hyper
acctgt

SEQ ID NO: 123324 - DNA, 261 bp, Homo sapiens
  chr12:127211316-127211577
  hyper
cgggcagtggcgggagctggagccgcggtggagacgactcgaggggacgcagcccgcctggcacaaagggccacgggcgcgagggactcgatgagctgggagatcgcggccccggcaggtgcggcgcgctggggcgggtgcttggcgccttccccggcacaggtgagactgggcggagagggcatctgtggcgtggcctctctgggtgcggagtgaggggacgcagtaaacgtggggtttggatcccgcggcggcgctgga

SEQ ID NO: 123325 - DNA, 30 bp, Homo sapiens; identical to SEQ ID NO: 9155
  chr12:127509692-127509722
  hyper

SEQ ID NO: 123326 - DNA, 149 bp, Homo sapiens
  chr12:127765268-127765417
  hyper
gggaaggacggggcgcgcgcggcaggggggcaggcggcctggtgcaggtgcatccccaggtgcgcgccacgcccctgcgggacccggcggcaccgcggtgcgttcccagccgccggcgctagagggcgtgtctgcggaaagactcgctg

SEQ ID NO: 123327 - DNA, 317 bp, Homo sapiens
  chr12:127865647-127865964
  hyper
tgctcacactcaggtggaaaccgggaaggcctggaaatcgcaggtcctgaggacgcggcgagttcacggagaggacctgccgggcaggggctctgggagcctccgcggggaggggagggcgcgcggccggcgcggccacaacccggtctgcggcgccatctagcgggcgcgccgggaccgtcgcccactaggcccttttccggaggagaagctgatgccaatcaaaacgccatctctactccttgtcaaagtcaagtcatttagcgaaaggcctaatgagctctgcaatcagctacgcaagaaaaaggagtgtttag

SEQ ID NO: 123328 - DNA, 248 bp, Homo sapiens
  chr12:127939989-127940237
  hyper
ccctgggaatctggccggaattccacagggctgcagggcccgccgcccagcgccaagaaagcgggtggccacatcgaagtttctcaacgggaggagcggattcgtctggagacgccgccttctccccgcgcctcttcttccagcactgccacacgggtcctggaaggatcctgcaccctctgctcagtccccgctcagtctctgctccgggctgggggctttctccacctgcccgggcgggggcgcca

SEQ ID NO: 123329 - DNA, 90 bp, Homo sapiens
  chr12:127940467-127940557
  hyper
ggcacccgctgcagacgcggtcggcgaaacgtcgtcccggccccagctcgagcagcggctccgggtggacctcgcagggatgcggagcgg

SEQ ID NO: 123330 - DNA, 100 bp, Homo sapiens
  chr12:127940587-127940687
  hyper
cgccccagggtgtgggcggccggcagggaccgcgggtgagcggtgggcaggtctcaggactctctccggacgtgcggtccggggccgcgccgggtgctgg

SEQ ID NO: 123331 - DNA, 31 bp, Homo sapiens; identical to SEQ ID NO: 9158
  chr12:128024229-128024260
  hyper

SEQ ID NO: 123332 - DNA, 1179 bp, Homo sapiens
  chr12:128750698-128751877
  hyper
aaactgctcagaccacgcgtggcagaaagagcagagcatgagcatcaggaaccgcacagggaagccgctgagatcacctgggatcaccaccatgagggaggccagccctggagaaatcagagggaaaagatagagagaacgaagtcgggggggggggggggagggcggatcttccttgtctgagtctgcagagaaattgcctattgcaggagcaagtctagagaggggctattctccacccactgaaaagataataaaacacatgctatgggcggcggggagatgattggggagtggaagccccacagacatgcagtgaaaaatgatcctttcttcccctctgcgttctcgtccccttcccagagacaccgctgtgatctcgtgcctcgccccctccgcacacgcacaggtgcacacccgcatctgtcttgagcccgcaccccgccttcacgctccgctgcgcgctgcttttccgcgctcagtgatccagttaggagctctccccgcagcagctgcgcgggactttgcattccagatgtccccagccctccaggctaaagcagcggccacctgaagttgaggaatggggcgtgacgaccaccaggtcccgcagtgaccacgggagggtggggagaaggagtccagctccgccttgagcgtcgggtccctgggcaggaccctccgggccacgggccgctgtccgttgggcacccgggcaggagtctgcgaacgctgagtttctctggaaaggcgcggacccccggaggagccgtcccagccgcctggggagacgccccctcctctcccggtcttctttcccgggcacaccctccctagcccgggcgggggggttctccatctgccgcccctcccggcgggcaggcgaactctctcctaccgcaccctcaatctgtccgcggtcgcggggctcggcgggggcggggcccgggcgggggcgggggcggggccgggggcggggcgggccggcggctgcggaggctgcggaggctgcgggagaaaagttgtcccggccggagcgcgagcagcggcggagccggagccgccagagccagagccggagctgcggcggcgtggacccggcaggggcgggcctcggacagcagagacgcagcgggcccggccgaccgggctgcgggagtggccccgggcatggggcgg

SEQ ID NO: 123333 - DNA, 1095 bp, Homo sapiens
  chr12:128752114-128753209
  hyper
cgaggggtgcggcgggggcctcggcgggggctcggatcccatcaacagcgcctctgcgggtgccgagccgcccctaatccagaagggcgctcccagctgggcgccgggatccgggcaagttaggctggtcccgagtcccgaatctcccaccccggaccccccagacccagagctgccccgcggatgaggagggggcgtggctgagggacacggtgtttgttccccatccctgagttccgtgcggacctgccccagccccagcacagtcaccctgtggaactggcatccaggagaggtgctccgctctgtgcgctccttcctcccggctgtgtgctccctgtccacagctccccatccacagcttcggcactgtggggctggtgctccaggagggaaggcccggttctttgcatcccctttccgcaaccgctagggtctctgtgcgggccctagaggaacgctcactcatcgcgcagctcaccagggaccccagcttggcagaaaccaggggctctctgcgggttctctcaaatgagtcctttgcggtgggggagcgcggatggggaggtgggtgcgtccctcgcgacgggaactacctcaccagcggtcctgtccggggctccttcacctcagtgtcctcttctctacaatgggagtgacggccctgctttgggttggaggaatttaaaggagttaacgtatggcgcccgcagggctcacgaaaggtagccgtgtggtttttccgaccttttttattatgtgcgtgtgcggccgagtggccgcgcggatgcggcggcgggaagggcggggagaggcggtctccagccccaggagccgcggggcaggcggggagcaaggcctaggctctgccagggcagcagctgcccgagtcccggggcgcgcccagggcgtagaaaaaggagagcgtcgctttcctgctccccgcgccctggcgaaggtctcgggttcatttggttaaacggaggtgcgcacatgggtgccctgagccttcgcgcggcgccgcgggtccagtatcggccccaggctctgagcagagaacactcaaagccacccttctcccgcctaatgctctga

SEQ ID NO: 123334 - DNA, 117 bp, Homo sapiens; identical to SEQ ID NO: 50307
  chr12:128753738-128753855
  hyper

SEQ ID NO: 123335 - DNA, 393 bp, Homo sapiens; identical to SEQ ID NO: 50308
  chr12:128850382-128850775
  hyper

SEQ ID NO: 123336 - DNA, 30 bp, Homo sapiens
  chr12:129308587-129308617
  hyper
ttgggcgggctcgccgctgctcaacgcccc

SEQ ID NO: 123337 - DNA, 15 bp, Homo sapiens
  chr12:129337894-129337909
  hyper
cacggggcacacccg

SEQ ID NO: 123338 - DNA, 238 bp, Homo sapiens; identical to SEQ ID NO: 9163
  chr12:129338587-129338825
  hyper

SEQ ID NO: 123339 - DNA, 31 bp, Homo sapiens; identical to SEQ ID NO: 9164
  chr12:130136921-130136952
  hyper

SEQ ID NO: 123340 - DNA, 87 bp, Homo sapiens
  chr12:130387116-130387203
  hyper
tcaagtcagggctccgctgggaaaattcgggtcacaacttgtagctgaaactccacgtgcaccctgcggggccgctgctgctcccag

SEQ ID NO: 123341 - DNA, 221 bp, Homo sapiens; identical to SEQ ID NO: 9166
  chr12:130387796-130388017
  hyper

SEQ ID NO: 123342 - DNA, 180 bp, Homo sapiens
  chr12:130388254-130388434
  hyper
ggcggctccagctgctcccgggctggctagcgggcgctggcgcaggcggcgccggggtggcggggctgcggagcccgggacgcgggcagaggcggctcggagccccccgggcgggtggccgggctcgctgggcggcccggggctccctggcccgcagcccccatcccaggccggccgctg

SEQ ID NO: 123343 - DNA, 124 bp, Homo sapiens
  chr12:130389012-130389136
  hyper
cgtcatcaaaacctcaggcccaggggaggtcctccagcccgggggcacctgaggctcttcgccagggagagcgcaaggatggctggagaagggccctcgccccgccctgcgcatctcccaggga

SEQ ID NO: 123344 - DNA, 30 bp, Homo sapiens; identical to SEQ ID NO: 50314
  chr12:130396143-130396173
  hyper

SEQ ID NO: 123345 - DNA, 480 bp, Homo sapiens
  chr12:130498553-130499033
  hyper
aagccaaagcagggaagcctccggaaagagggcaaggagagtggcggggtgcgagcggggcgctgcggaggaggctgcagcggcagcggtgcgggcaggagctctgatgcgatgcgatgcgatgcgatgctgcccccctgtgtccttcgacgatattgctgcgggaagctttctgtgctcaagacctcgtccatccctccatcagctcagaccttctctgcgaatagctctccgggtggtaaagagatgcatcacatttaaaacttcgagacgtcctggattcacttagaaagatgggaagaggctcacgcctgtaatcccagaactttgggaggctgagatgggaagattgcttgaagccgggagttcaagataaatgcgaagatcccacaaaactgggagcatcccacatgtggagatagctagactgcctgtttagatggggcaccgcttcccgttcacccccgccctccccgctcc

SEQ ID NO: 123346 - DNA, 73 bp, Homo sapiens; identical to SEQ ID NO: 50316
  chr12:130526814-130526887
  hyper

SEQ ID NO: 123347 - DNA, 189 bp, Homo sapiens
  chr12:130526931-130527120
  hyper
cggcagcttgcagggcccgctgtctccactagggggcggcgtacgcgcgtctctcgaagccgggacccgcgcggggaggctgcactggctggaaacagcgcctgggcgctcccgcggctcccacctcagagatgtccccaggtgccccacgccccccgcgcgagccccgacacgcgagccccaccgcac

SEQ ID NO: 123348 - DNA, 30 bp, Homo sapiens
  chr12:130527625-130527655
  hyper
acatacatgaacacacgtgcacacacatgc

SEQ ID NO: 123349 - DNA, 30 bp, Homo sapiens; identical to SEQ ID NO: 9167
  chr12:130589237-130589267
  hyper

SEQ ID NO: 123350 - DNA, 1467 bp, Homo sapiens
  chr12:130645186-130646653
  hyper
ccccaagtttcttaccgatgtaaaaattgtagggcttgttttaattaaaagccaatactctccgaggaagtggccccctcctgcacggcgtgcagaaagctggtcagtgaggggggttcctggcgggccccatctccttcccgggcgcttcctagggagaccttgccccgtgcgcagcgtccccaccgcgggggcccgtgcagccgccccccacgccgggtggagcgccgccaacgcgggaagccccagcactgcctccaaagatgtccgcacactccaccctgctccctggaactatcctcaaacgggcagggggcaagcgaggccggtggacgcgggactcgctcctctgacctctccccggccccccgggaggtagcgggagattgcacacgcgatcctgcgagtttccgaactttggaagatcgtgacccggagagaccctgggaggagagggccggccacctcctaggggtgctgtttttttaagggtcaacccaggacgctacgggaagcacctggcgcatccttgggaacagtggggcttggcggtgggcgcccaccgcgaacgccctgggcgggggaagggaatggcggggggacgtcgtgtcctaagtgaccccgtcacagacccgccccaatccgaggggggatgagctcagaggacctgcccaggacgctccttctccactttccaggaaaaccgagcggcgtgcgcgcctccgtgtcctcgcgggagctgggggtccccgggcaggcgctgacgcgctcctcccacgacccactccatcccaccctactccgggtcctcctgcggggctgcagccaaggagggcgctggccgggcacatcactcgccaaatcacataaataccccacgagcgaatgacttcctataataaataaactcagccgccaagaaggcatctccagccctgctggcgcgaggccccggctctgcggcttcggagggggcgggggtcaccgcggtacaaaccaagcccgcacttcccgcggggtgggaggcggtgttcaaagtcccgggacgcttcccgcccctcccccttcccgccttcttagaggagacctcggatgagcggccctaaaatccggattctcgagcccctccccctccccttagctcgtctctttgaaatttcaaagaaaatccctcctcggagcccggagcccggggctggtagcacctccccagcctcaggaagatgcgggcaggtttacaagcaagggcctactttatggcccaggctataaaacgcaaatcccacctccctttgaaagcgccctccgcccgggactcaccataaaaggaagagaagatgcaccccgcgcccctcgccgcggaccacccccaaaccccttctcccgccagtccccgaacttcccgtaacctcggcgtcctcggggtgccggggaccatcccggggaccgccgggaaagggggcgccg

SEQ ID NO: 123351 - DNA, 170 bp, Homo sapiens; identical to SEQ ID NO: 9169
  chr12:130646945-130647115
  hyper

SEQ ID NO: 123352 - DNA, 335 bp, Homo sapiens; identical to SEQ ID NO: 50321
  chr12:130647573-130647908
  hyper

SEQ ID NO: 123353 - DNA, 119 bp, Homo sapiens; identical to SEQ ID NO: 50322
  chr12:130647950-130648069
  hyper

SEQ ID NO: 123354 - DNA, 31 bp, Homo sapiens; identical to SEQ ID NO: 9170
  chr12:130709678-130709709
  hyper

SEQ ID NO: 123355 - DNA, 30 bp, Homo sapiens; identical to SEQ ID NO: 50324
  chr12:130765404-130765434
  hyper

SEQ ID NO: 123356 - DNA, 27 bp, Homo sapiens
  chr12:130765888-130765915
  hyper
tattcatcgactccccggcagggggag

SEQ ID NO: 123357 - DNA, 30 bp, Homo sapiens
  chr12:130823616-130823646
  hyper
gccccttcccgcgtccgccgccgctgcgct

SEQ ID NO: 123358 - DNA, 47 bp, Homo sapiens
  chr12:131199252-131199299
  hyper
agaaggggtgcccgccggccttcccctcacaccgtgcccccagggaa

SEQ ID NO: 123359 - DNA, 1239 bp, Homo sapiens
  chr12:131199582-131200821
  hyper
gcagggcccagagcccggacacctcctcttcccaccgatcttccattttcagagggagccgctctccctcctctcaggcctgctccatctgtgacatttcccttccctggacgaagtggggttttcacccttgtgagcagagtctccttcagggctcctccgtgagagaaatatggggctggacagggtccccttccctccctcctcactcaccctaagaacctccagggacccagaggccacgcaggcacggagccagcacccccgcctcccccggggccagtgaccaggccgggaggtgaagcagtcctccctccctccggccagccgccaccccgacctcagccagcgtgcgctccccggggacaggagggaggctgcttccaccgaggcctctgctgacagatgtccgggcccccacctggacctacccagacctaagctcctgggcgggtggtcccgtacgcgctgcctttcccggtgaaatacggtttccactgggagagtctgcccccggccagcagcccgcgcacactgctcacacaggcacacgcatgcacgcacacactctgccggggaacatctgttttgacaaacacattattcaagtcagtccatgggacgtgaattgacagattcctgggcgcagcctgcgggctttgtgcatttgcacctgagccgagctggggactctgatgtgtttgtcccacgtccccttccccccctccaccccgcccccaagaagacaagtccaggccctgagccgctgctgtctgagaagcctggggcgcactccccaggcgagcggggccgtgtccatcgggtgccaaactttgcctggaggggcctttcttaaaagcctggggtgggggccatgacagagccacagcacccctgcagctgacacccggcacccaggaagaagcccgtcagcccttcccttccgagacgatcctgaattccaagcagcaccgacatgccagcagggcgagccgctgctccccgcacccagcgcccccggaccccacgctgaagggcattctccatccgctgcaagataaactttgtctgggcaaagagtttccggctaaccccctgtgatcaacgccgctgcagctcgggtgcagaaaggcgaggggagacgggaagctatttttaggagaaaaaaataaatctcagcctacctttagaagcgagctgtgccaaggctccggaggttcacctcggagacaactgcag

SEQ ID NO: 123360 - DNA, 263 bp, Homo sapiens
  chr12:131201141-131201404
  hyper
acgtcagtgtttgaacgcacacacacacacacacaaatacacatgcacacacacgtgcgcatacacacaccaagatggctatacccctcactgccagtttctttcacagagctgtggtgaaaagctcggacagagatggaggcaaacagctctcagccatgcggggcttggggttggtgcttttctctccatccctgggaaaacagcacaggatcttccctgcaggaggccgggggtctcctgcaaccgacaggcaaccgatc

SEQ ID NO: 123361 - DNA, 204 bp, Homo sapiens; identical to SEQ ID NO: 50328
  chr12:131400788-131400992
  hyper

SEQ ID NO: 123362 - DNA, 47 bp, Homo sapiens; identical to SEQ ID NO: 9171
  chr12:131438508-131438555
  hyper

SEQ ID NO: 123363 - DNA, 334 bp, Homo sapiens
  chr12:132195264-132195598
  hyper
gctcggggtggacccgaggcctccacacatgtggcaggctgcagcaacccgccacccacgaggactcgcccaaggcccagagcgcgccgggcccctccctccgactccgtcgccgcccgactggccgcagcggaagccggcgcgcgatcccacgctgcgctttcgccacgtcctgacggctgcccgataaaacggacattaaaattgcactttccactgaatacagcagcgcctattgtggcggcacacctgaatgcgaaaattaaagccaaaatatttcctagcggctaaaagagctccaagcctaggcgaatctgccggtccgctcgccgga

SEQ ID NO: 123364 - DNA, 30 bp, Homo sapiens; identical to SEQ ID NO: 50330
  chr12:132196021-132196051
  hyper

SEQ ID NO: 123365 - DNA, 384 bp, Homo sapiens
  chr12:132312445-132312829
  hyper
caggcccgcagggaccgcagagcctccgccgaggaccccagcccccccaacacccgccctcgccctccagtcccccgcgccccccaagccccaccctccctctcccgcggtccgcgggctccaccaagcgcccacctgctgcgctgcggcggcggctccggggcctgaacccgggtctgaacccgggcctcggcgccgtggggggtggacccgggagcgcggccggagaggggagtcagggtcagctccccgcaggcgccccgacccccgcctccgcgcccatcccgcgcgtccccgccgccccaagagcgtcctaagacacccggggaaacgccttccctgtgatgccgcggacccagtcccgtcgcggacacggcggggcgg

SEQ ID NO: 123366 - DNA, 1064 bp, Homo sapiens
  chr12:132312856-132313920
  hyper
cgggccctttaaggcggccggcctcgttagcatacatttgcatggccccgccccgccgcttgaggctgccgcgcggggctcagtccggcgggggcgccgcggagagcggagggcgccgggctgcggaacgcgaagcggagggcgcgggaccctgcacgccgcccgcgggcccatgtgagcgccatgcggcgccgcgcagcccggggacccggcccgccgcccccagggcccggactctcgcggctgccgctgccgctgctgctgctgctggcgctggggacccgcgggggctgcgccgcgcccgcacccgcgccgcgcgccgaggacctcagcctgggagtggtgagcgcgcgggcgggacgggcgcggagctcctgggccggagccgggggtctccgcgggccgggtggcggggaccgggaagaccccagcagtgcacgtcggcgtcgcgcgggagccctggcgccctggacccatttcctgggtggggagactgaggcagggacgcgggctgagcgaccgggcgagcgcacgcgagtcctggggaggcgccggctgccgtcccggctccgtgcgctgggagcgcgccgcagccgcaggagcccgtggagttgtgagggggtcgcccacccggagcccgggtcgccggcttgcagcagccccggagcagccgggctgggcgagagcaggcatcgcggccgccccgagctctgcgcgctgcgtgcgttccgggtgggagtggcgggggcaggagcacgcacccacaaagcgaggaagggcaggggctacggagtgggggcaccccgaaagccttgagcccccgagtttgctcggttgagggtgttgggggcacagggatgctggcccccagctccccactggacaaggacctggccctcagcctccttcccctccaccccaggtcggccaggctggccctgccttgccctggtacagtgctgagccgggggcgcggggagagccttcctcactccacacccagtagctgtccccagctcagcttagaaaccctgcctgggggcagcgacgtggcctcttcctac

SEQ ID NO: 123367 - DNA, 96 bp, Homo sapiens
  chr12:132379245-132379341
  hyper
gccctagttggagccggagtcggagtcggagtcggatccggattcggattagcagcccgggaagagtgccgtggcacaggcgccggagggagcgcg

SEQ ID NO: 123368 - DNA, 38 bp, Homo sapiens; identical to SEQ ID NO: 9174
  chr12:132380561-132380599
  hyper

SEQ ID NO: 123369 - DNA, 38 bp, Homo sapiens; identical to SEQ ID NO: 9175
  chr12:132380827-132380865
  hyper

SEQ ID NO: 123370 - DNA, 30 bp, Homo sapiens
  chr12:132414250-132414280
  hyper
gcactggtagcctgcgcatgggcctccagc

SEQ ID NO: 123371 - DNA, 30 bp, Homo sapiens; identical to SEQ ID NO: 9176
  chr12:132414834-132414864
  hyper

SEQ ID NO: 123372 - DNA, 51 bp, Homo sapiens; identical to SEQ ID NO: 50336
  chr12:132480345-132480396
  hyper

SEQ ID NO: 123373 - DNA, 43 bp, Homo sapiens
  chr12:132628952-132628995
  hyper
gacgtcgggttctacgcgcagtggtgacgtcacgggagcgccg

SEQ ID NO: 123374 - DNA, 31 bp, Homo sapiens; identical to SEQ ID NO: 9177
  chr12:132982486-132982517
  hyper

SEQ ID NO: 123375 - DNA, 30 bp, Homo sapiens; identical to SEQ ID NO: 50338
  chr12:133067448-133067478
  hyper

SEQ ID NO: 123376 - DNA, 30 bp, Homo sapiens; identical to SEQ ID NO: 9178
  chr12:133067719-133067749
  hyper

SEQ ID NO: 123377 - DNA, 151 bp, Homo sapiens
  chr12:133136378-133136529
  hyper
gcgctcagtgaggccggcgctgcgcgcctttccccgggtggccgtgatcggaggcagcgcgttcggaccccgggccggcggcgggcgcgggtggatcggcgcctcggggctggattagtcgggtctgcccgcgccccgcccccgccccgcc

SEQ ID NO: 123378 - DNA, 30 bp, Homo sapiens; identical to SEQ ID NO: 50341
  chr12:133137345-133137375
  hyper

SEQ ID NO: 123379 - DNA, 31 bp, Homo sapiens; identical to SEQ ID NO: 9179
  chr12:133175116-133175147
  hyper

SEQ ID NO: 123380 - DNA, 262 bp, Homo sapiens
  chr12:133194966-133195228
  hyper
ttgcgctcgaagccccggcagccgcggcaggaaccggcctggacggggtggggggcgccgcggaggccggcgggacttcccatgtctttctcctcgagctcggaaaaagttcccacccggggaatcccgaccctccaacttcgagaccgccggttccgcgctcggcccccacctggaccaagagctggggctgggctgccgcgcccccggctctgtccccgcgaggccccgctcccagccccacctgggacacccgggactc

SEQ ID NO: 123381 - DNA, 188 bp, Homo sapiens
  chr12:133195428-133195616
  hyper
cgccggggcgaccgcccggcgcctggcccggggctgctggtccgccctctgggactacgagacgcccaaggtgatcgtggtgaggaaccggcgcctgggggtcctgtaccgcgccgtgcagctgctcatcctgctctacttcgtgtggtgcgcggggcgcggggtgcggggcgcggggtgcggggcgc

SEQ ID NO: 123382 - DNA, 12 bp, Homo sapiens
  chr12:133195927-133195939
  hyper
agcggacccggg

SEQ ID NO: 123383 - DNA, 194 bp, Homo sapiens
  chr12:133195965-133196159
  hyper
cgggcgggactcagccttcccagggtcgcctccggagccggcgccgcccctgcccgcaggtacgtattcatcgtgcagaaaagctaccaggagagcgagacgggccccgagagctccatcatcaccaaggtcaaggggatcaccacgtccgagcacaaagtgtgggacgtggaggagtacgtgaagccccccga

SEQ ID NO: 123384 - DNA, 30 bp, Homo sapiens; identical to SEQ ID NO: 9180
  chr12:133263931-133263961
  hyper

SEQ ID NO: 123385 - DNA, 495 bp, Homo sapiens
  chr12:133286718-133287213
  hyper
tggcaacagggcaagcgtccagcaatgggtaagcggtggggtcggtgcacgcaggcgtccagcaatgggtaagcggtggggtcggtccacccagggagcgctggtccccctggaaggaaacccaggctctaacgcggtccctctgaggaccctgctaggcgaaacgcgccggccatagaaagactgtcccgcaggagagggcggtgttcggcccggggtttgaggggtcgggaccaggaggagggacagcccggccgaacctgaacgcacttcaggccgcttgaacagcacacgcaggaactgcgccgacggaaaactttacttcgtgttccgccaccaaaaaaatatcgtttaaacaaacctgcggcagcttcccagctcccttaaaccaggatcccaagttctccgcgtctccgcccctgcacccagcctccggcctcggcaggcgcttccggtgcggaaccttctggaaagtaccgcgccgccctcccggcg

SEQ ID NO: 123386 - DNA, 30 bp, Homo sapiens
  chr12:133405355-133405385
  hyper
gccccgaggcgccgcggcctccgagcccct

SEQ ID NO: 123387 - DNA, 30 bp, Homo sapiens; identical to SEQ ID NO: 50345
  chr12:133405921-133405951
  hyper

SEQ ID NO: 123388 - DNA, 443 bp, Homo sapiens
  chr12:133443617-133444060
  hyper
tcaaaaaaacagaaaataaagagcactctgctgctgaggagctgggctcatccaaaggagcctctgaagaaggaaggagcggatgcaacaaggcctcaagaacatcaacgaacaggagaggtgtggctgcccgtgtgaagacagagcaacggcatacaacggagtaaaaaccacatcaacagaagtggaaacaggcccagagagcgtgagaggtttctggtttcaagaaggcacactgagtccctgcacccgatgccgctccttccccaaatcccactggaatacacagagagacataaaaacaaggagtgtcctgtagcagagcagccaggctggctcatgagacagagggagcagtcttctgggagacatggctcttgctgctgcggatcagccaacagatccatggaaagcaaaggtcccttctccggaggcttcctggt

SEQ ID NO: 123389 - DNA, 1188 bp, Homo sapiens
  chr12:133463690-133464878
  hyper
gagcgcacactgcaccgccgcccgtgtggcctgcccgcaacccggtggctctgcccggccccggcccccggccccggcctcagccccgcacctcgtctccgcccgatggtccactcccgcttcctcaggaggacgtgcggctcgccctcctccgcgcccagacgcaggagccgtccccagggctgcggcggcggcgactgcttgccttcctcgggccgctccatcgggattcacatctgcggagaccccggaaacgcccatggagactcccgaccccagaggccgagactcggcgcccgccccaccccgcgggccccggcccggccgcccgcgcccacgcagccccgcagcccggcctggacgccggcgggcgccccctcccacggccgcaaccaggtcccccttcgccgcccgccgcagccccctcgccagccgcgcttacccccgccccgcgccgaacccggaaccggctgcgccgccgccgctgtcaagagacattgcggctccctcagctgatccgcggggcggggccagaggcctctgcgccccgcgattggctggcggcggcgctcaccaagagcggcagctaaagcggagccgggagtggcccgcgagagtaggcgcgtggagggcgctcggccatctttgatcctgaccaggcgacttcgtcgcctgcggatcacggaagtggctgcggtcggcgccatgttatgttggggcagaagggacggggaacttccggattggaagccccaaggattctgagagccccgctaatctggggatgactcctaggagtagaagacggtccatcttagttgtcacgaggtagtgcacgtggggaccctttcgggtacagttgcacacagtggatcacacagatccgaagtctgaggcacagggcgcggtccgcgagtgggagcggctgcttgtgggcagggtggacgcggggccacgtcttggccggcgttttgcggggtcttcctgttctgaacgcgcgtaacttttgcctcagtatctcacttcttggaatccggcggcgttcacgtgtgtgctccagagaagggcgccagagggtattccctgaaagtgaaaggtcggcgaaagaggagtaaagacggcgagacgcgtccacgcagggggagtctgtgcggtttggaggaacgcgccaatgtctgcactcatgag

SEQ ID NO: 123390 - DNA, 8 bp, Homo sapiens
  chr12:133481374-133481382
  hyper
tttcctca

SEQ ID NO: 123391 - DNA, 173 bp, Homo sapiens; identical to SEQ ID NO: 9185
  chr12:133481489-133481662
  hyper

SEQ ID NO: 123392 - DNA, 252 bp, Homo sapiens; identical to SEQ ID NO: 9186
  chr12:133484600-133484852
  hyper

SEQ ID NO: 123393 - DNA, 186 bp, Homo sapiens; identical to SEQ ID NO: 9187
  chr12:133485161-133485347
  hyper

SEQ ID NO: 123394 - DNA, 250 bp, Homo sapiens; identical to SEQ ID NO: 9188
  chr12:133485439-133485689
  hyper

SEQ ID NO: 123395 - DNA, 62 bp, Homo sapiens; identical to SEQ ID NO: 9189
  chr12:133485815-133485877
  hyper

SEQ ID NO: 123396 - DNA, 242 bp, Homo sapiens
  chr12:133706774-133707016
  hyper
ttgtcccgggtgaacgagccacaggcccgcatgctcacccgtcctcagtgcctgcctccaggcgtccgcggtcccgcccgagggggacgcgaggccgaactacgtttcccaggagctcctgcgccgccccgcagaggggcctggtctgtgcgtcacggacgcgctctgggccgaaggcccgcagggtccggcacagagtggcggctgcggcgccggcgacgaatcgccggctctagggtccc

SEQ ID NO: 123397 - DNA, 31 bp, Homo sapiens; identical to SEQ ID NO: 9191
  chr13:19918627-19918658
  hyper

SEQ ID NO: 123398 - DNA, 30 bp, Homo sapiens; identical to SEQ ID NO: 50356
  chr13:20176071-20176101
  hyper

SEQ ID NO: 123399 - DNA, 6 bp, Homo sapiens
  chr13:20176478-20176484
  hyper
cggaga

SEQ ID NO: 123400 - DNA, 82 bp, Homo sapiens
  chr13:20207703-20207785
  hyper
gcggtgttacgccgcgcccgccttaatatgattggtttttgttcctgtcactctaggatccaagcccgccattggtcggctt

SEQ ID NO: 123401 - DNA, 193 bp, Homo sapiens
  chr13:20357045-20357238
  hyper
ccccaactcacgcccgctgcagctgcacattcaaaatggcgctgccacaaactgcagttagaagaagagacgccggtgcaagtcccacccctccgccaaagccggcgccggaacgacgcgcctgcgcactcgcggcaccaacggaccgttgactgaccgcgcatgcgcataacgctgcgcgtgcaatcgacaa

SEQ ID NO: 123402 - DNA, 30 bp, Homo sapiens; identical to SEQ ID NO: 9192
  chr13:20436972-20437002
  hyper

SEQ ID NO: 123403 - DNA, 30 bp, Homo sapiens
  chr13:20437697-20437727
  hyper
gcggctgcgcggaacgaacaagcccacccc

SEQ ID NO: 123404 - DNA, 30 bp, Homo sapiens
  chr13:20438226-20438256
  hyper
ctcgaggagagcggcggcctggatgcccca

SEQ ID NO: 123405 - DNA, 41 bp, Homo sapiens; identical to SEQ ID NO: 50361
  chr13:20532065-20532106
  hyper

SEQ ID NO: 123406 - DNA, 16 bp, Homo sapiens
  chr13:20532173-20532189
  hyper
cgacaaaatggaggac

SEQ ID NO: 123407 - DNA, 654 bp, Homo sapiens
  chr13:20701840-20702494
  hyper
ctcgggggcgtaccccgagtgggcagcagggccagcccgcgcgtccctcagggtcaatgctggggccctgagggtgaggtcagctgtgaggtgaggtctggtggccgaggggaggtgcccagcgtgcgcgtccgcatccggcgggcgacagagcagccccggaacaggagcttcccggcaccggccgtggcgtggcgccctccgctgggccgttctcccccgcagccgctaagtcagcatcgcctactttcccactctcgagtttgcccctctttgctgcccggcagctgggtgtcccatgtcccctgcccgccagtgtgcgaccgcggcctcccgcggggcggtgacggcccctctccttcagcctgaccgccgccagctccctcggcgtgtccggggtggccaggccttgtttagagtagctccagcgtttgaatcgcgcaggcacaagaaggccgtctcctcaccgcgggccagcggggccggccagggcccgggcggagggggagcccgggttccgcggtcgggttgtggggccggcgctgacctcaccgcatgggcccctgcggccgccgtggcttctcacgcggcctgactttggactcgagtgcaggctcttagctgaatctctgtgtagacagggtgggtgggact

SEQ ID NO: 123408 - DNA, 599 bp, Homo sapiens
  chr13:20702531-20703130
  hyper
cgcaggcctgtcagcggggcgcttcccgtcgattccaggagcgcccgcgtctctgctcagcgccacgagtccaagcgtgggggaggacgagactttcaaggcggggggtgacagtgccatccagcccagaatacccacccccagtggcgggctgccgtgcccaggccctgatccctgcccctgcaaacatcactttctatcgcccacggggctctgcagatgtggccaggctaagggtccagagttagggagattgtcctggatgatccgggcggaccctaaatgtcatcaaagtgtcctcgtaggagagggagaggaggcgaccgtgggggcagaggctggaggaccgcggcgcccgggacctgcccgcacctgactgcagccaggtggcgccgattccggacgcccagaactctgtgggaatgcagctgtactgtgcggcgtgtaaaccaccgcatctgtgggattttgttaaagcagccacgggaccactccaccccctccagctgtggtcctttacccggcggcggccacctggcagcagcccggttccccatcctgcggggttcctcccgcccgcagaccggctcggccataaa

SEQ ID NO: 123409 - DNA, 154 bp, Homo sapiens
  chr13:20711076-20711230
  hyper
ggcgccagcagcaggcgctgtggttccccggcgtccctccggggcctcccgccgcgatttgcggagcgcacttgttcccaggtgtgccagcgccctgcgcagcggcccagccaacccaggctcagactcaggtctgcgccgtttcctcgccacg

SEQ ID NO: 123410 - DNA, 857 bp, Homo sapiens
  chr13:20735266-20736123
  hyper
gcgcgcttcccagcacgcacacctaccgcccccgcatccctaccctgtacgcgcagccacagcactcgcccgcgtccgcattccacaccctaccccgcgcgcacgtccatgcctagcgcctgcatccccatcccgcacctgcgcgggccctggggatgtggacgcgggggctcttccctgccgcctacgcactccggggcatgcccgcgcgggacgtgagaggagagccgagggctgttggggcgggcccgacccgcttgcggggcgcccaccgcacgcagatgcgccagcccgcgccccgctcgcgcctgtcctgggcttcgcaggcccggcgaggtagctgctctccgggcgctcccacggtcggaggcgcgtgggcgtcgggcacctaggtctcgcccgcctgcagccgcctggggacgcgggttccggacggctggcgcggggcggggcggggaccaccgagcaggaagtccccgcggaagcgccgccgggcacagcgtgggtgctgtcgaggagtggcgcccgggcggggcgggaggttataaatagcggccgccatcctgcttctcttcagacacacttaatttagccggcaggcacacggatgcttatttttaaaaaaagaacttgttttattgcgctcgaggtgaccgggaaggtgtccccgcgggtcactcgctccatctggtcctggagacgagatgccagggcgaggcctaacctgcctgctggcgcccaacgaagattttaacgttttctgttcccttcggggtggttttaccacgcttgagagggacgcctaccgcggaaggccgcggaccgagggcggcatcgcgtccttgtctgctgtctgg

SEQ ID NO: 123411 - DNA, 1463 bp, Homo sapiens
  chr13:20766297-20767760
  hyper
gcggggagcacagcccggaaacagaccctcgtgaagtgtttaggaaaaagggaagccactgaaatcttggccccggggtaggccgggatcggctggctccgcgttagttctaggcaaactccgcccaaatctctgcccggggatttttctgcagaagccgctccaagaggtaaaggtcagttcctgcagcgaaggcttcctgcttcaccggcgaaacggagctttgcttcgaagctaagctttcggtgaatttaaaacgtttggtggcagtgggtcaagtagccaggcggctgcgctagagtaccccgaagggacatcggcgacaccacaaacctcgcgctggcggctcgcccgcgcctttttcccctcccgcgcgcgcccggccccactcgcaccccgggcggtgccatcgcgtccacttccccggccgccccattccagctccggagctcggccgcagaaacgcccgctccagaaggcggcccccgccccccggcccaaggacgtgtgttggtccagccccccggttccccgagacccacgcggccgggcaaccgctctgggtctcgcggtccctccccgcgccaggttcctggccgggcagtccggggccggcgggctcacctgcgtcgggaggaagcgcggcggggccggggcgggggtctcggcgttggggtctctgcgctggggctcctgcgctcctaggcgggtcctgggccgggcgccgccgaggggctccgagtcggggagaggagcgcgcgggcgctgcggggccgcaacacctgtctcccgccgtggcgccttttaaccgcaccccacaccccgcctcttccctcggagactgggaaagttacggagggggcggcgccgcgggcggagcgcgcccggcctctgggtcctcagagcttcccgggtccgcgaacccccgaccgcccccgaaagccccgaaccccccaagtccccttcgaggtcccgatctcctagttcctttgagcccccatgagttccccaagtgcccccagcgccctgagtctcccccggttaccccgagcgccgcctcccccagccccttggcggcccgggtgaagcgggggcggctgagagtcgggaccccccaggaagcggcgccccagaccccggctccggcgctgtgccgtgggcggggttcagggatggctgtggtcgttgtcctctgtactccgcatagtgcgagaggacttggcatttatgagcgcttctttaattttttattgttagagaaacaggcattcctccaaggactgaagatctgttcgagtcgcggaggctgcgcgggcccgcgaggctctcgcagggggacctaggctgggtggcggggcagtgccctctggaatgggggttaacggtggccgaggagggggcgccgctggtgccggcgaagtccccgcttctttctcccctcaaaatctcaccaatccgaacga

SEQ ID NO: 123412 - DNA, 88 bp, Homo sapiens
  chr13:20767827-20767915
  hyper
cggtgggagagacaagcctcgtttttgccatggccggcaggggggtcccgccatctgcggagggtgccccccgcggcccccggcccag

SEQ ID NO: 123413 - DNA, 797 bp, Homo sapiens; identical to SEQ ID NO: 50369
  chr13:20805880-20806677
  hyper

SEQ ID NO: 123414 - DNA, 722 bp, Homo sapiens
  chr13:21099486-21100208
  hyper
gggatgagaacacagtcgtcgcaggatcgcagccagaattcgtttcattcaacacggtgcctggcacttctatgtggacctgcgggcagacgcggcgacattcaacagagtccaggaaccgcaggccccgcggcctgggcggtcaacctcggaacctcctgcaacgctggctcccgggaagcagacccaactccgcggggcgcctccacctgccaagcccctccagccgcgcctctccccgagcccgccagcgccgtaggggccgcagggcgcagggcttcggaggaccggaggccggggcggggacagcgacccggcgcccaccccgagggccccacgcgagggcaccacgtccccggcgtctccccgggctccaggggcagcagcgcggctcggagccctttacctgccaacgatcaccacgcagccggccgcggaggacgccatggttgggccggggacgcggcgccgcgggcgctgggaccaggcgccggcggagctgcgagctctgggctccggggagggcgggtcccgcgcccattggctgcgcgcgcggaccgggagggcggggagggccgcttggtccctgagtggggtgcgcgccgcgggcccgagacaccgggagacacacggcgcgccgaccctcgtgggcaggggcaggaccagcgcgggggcacgtcggggggtggaaagcgggaagaccacgcgcttgtgactgtcag

SEQ ID NO: 123415 - DNA, 30 bp, Homo sapiens
  chr13:21140728-21140758
  hyper
cgagttagtgactgcgcggaaaacgggctt

SEQ ID NO: 123416 - DNA, 39 bp, Homo sapiens
  chr13:21141042-21141081
  hyper
gccctctcctccaccgttctacccgcatcgcccggcttc

SEQ ID NO: 123417 - DNA, 30 bp, Homo sapiens; identical to SEQ ID NO: 50371
  chr13:21141310-21141340
  hyper

SEQ ID NO: 123418 - DNA, 112 bp, Homo sapiens
  chr13:21141667-21141779
  hyper
acgggcgtcgctgaccgcttggcgatgtcccaagtcccagtcacgcctgacggggaaacttaaaacccagttagattactgcgccagctctggaatcgcacagcagagatgg

SEQ ID NO: 123419 - DNA, 30 bp, Homo sapiens
  chr13:21277490-21277520
  hyper
tcagctcctggaggcgaaaggtgcagagtc

SEQ ID NO: 123420 - DNA, 31 bp, Homo sapiens; identical to SEQ ID NO: 9200
  chr13:21345744-21345775
  hyper

SEQ ID NO: 123421 - DNA, 310 bp, Homo sapiens
  chr13:21347825-21348135
  hyper
cggcgaccgggacgcgaggcccaacagcgcctaacacagcaaccaggatccactctcaggccggcgccagctccttccctcaggaatccgccagccactgctaattaaactcttccaccactaccaccctggaaaaaaggtgagaaacaaacacacaaaaggcacctaacccagtccaaaacgcctcggcggcgcgcagccaaccctacagctgcgcccgaacccgccactcaccagccgcgcgtgcgcagtcgcccagactcgccgtgtgcagtgggagtggctagccagtctcgctagcgcaggcgca

SEQ ID NO: 123422 - DNA, 30 bp, Homo sapiens
  chr13:21476904-21476934
  hyper
ctgcattctgggagcgggcgccgcggccgg

SEQ ID NO: 123423 - DNA, 1165 bp, Homo sapiens; identical to SEQ ID NO: 50375
  chr13:21634590-21635755
  hyper

SEQ ID NO: 123424 - DNA, 228 bp, Homo sapiens; identical to SEQ ID NO: 9203
  chr13:21635777-21636005
  hyper

SEQ ID NO: 123425 - DNA, 30 bp, Homo sapiens
  chr13:21649327-21649357
  hyper
ctcctacgtccccaccgcatcctgggcaac

SEQ ID NO: 123426 - DNA, 407 bp, Homo sapiens
  chr13:21649636-21650043
  hyper
aacgaatatctgctgcgaagcagtaggaagtgccctgcggtctgtttcccctagcagagactggccttgtggcggaagacccccgcgcgtagggagggccggtgcggcgactccgggcggggcgcgctgttggtgtccagggcgcggagcctgcgccagcttcacaaaagcggtgtggacgcctgagccagtccgctcttgctggacggctccccatagtttagcccaaaaatccccctctgggtggctctggcaggagtgatttagggccacaattaggttggacgaggagtggggacttgccccgagctgcctttgcagacccggcggcggcgttctccccaaggctgcccgcttggctgcgcggctgaggcgagttgaggacccagcccgtccccaactctcct

SEQ ID NO: 123427 - DNA, 248 bp, Homo sapiens
  chr13:21714414-21714662
  hyper
ggttttcgtcattacgcatgaaaacgccaccttaagcttatgtcgcctgtgaatatttaagggaaaaaaacatcccggcaaccaactgctaggcgacggacgctaagcacctcctccccgcggacgtcagcacccgccttttcccgaagtcgcaacacgcaggcgcgctccggctcgctcaccacgcacggaagtgcgcctgcgccaggagacgccccgcccagcccctggccgactataaagtgtcg

SEQ ID NO: 123428 - DNA, 30 bp, Homo sapiens
  chr13:21714991-21715021
  hyper
aacttctgcccttccgttttctctctccct

SEQ ID NO: 123429 - DNA, 148 bp, Homo sapiens
  chr13:21750214-21750362
  hyper
gtctctgtttataacgtaatagtgctactttcattatctcaagagagccgtggggttgtacatgggtctaaaacggacacgcgacaagggttcctaggaataaaccataaacaggcccgggagctacgctaacgccaaacgccgagca

SEQ ID NO: 123430 - DNA, 69 bp, Homo sapiens
  chr13:21872165-21872234
  hyper
ctagagacaggaggcgctatgcagcgacggcggcagagaaagcgtgggagcgacgctcttgctctggac

SEQ ID NO: 123431 - DNA, 179 bp, Homo sapiens
  chr13:21872500-21872679
  hyper
ggtgagcaccagctcgtctccggtgggcgccgccttcaatgtcaagttccagggcagtcgcttggacccgtttggcgagcgcggagtgagcggcgcaggaggagctcccctaggtcccggaagaaagccggcccctgctccgcgcggccagcgacactcagagcgagattgtttgggcc

SEQ ID NO: 123432 - DNA, 30 bp, Homo sapiens
  chr13:22032655-22032685
  hyper
ctccaggtctgacccgcctccagcccgagg

SEQ ID NO: 123433 - DNA, 149 bp, Homo sapiens; identical to SEQ ID NO: 50381
  chr13:22178311-22178460
  hyper

SEQ ID NO: 123434 - DNA, 798 bp, Homo sapiens
  chr13:22243216-22244014
  hyper
ctctgtttcttccatcgcttttttccccactaagtaaccatcccggcgcactgtacccaactggtcgaggaacgcccctgctgtacccatcactgctggctgcctcggagattaatgcgagcgactcgggtggtttatgagaagtgacacttaatacccagcttcttgtatctgccgccgagcagttaacgttaaagcccgctctgtaccaccgcggatgtgactgctgtaaataccacggggcagggctctcatgcttcagaaacacgtaagcaagacgcaccgagccagccccggacacccaatgaccctggactgcggcaaagggggggtgggaaaggaagaggggaggaccactcgctcttctctccttcctcctcgcccgggccggagcacgccttcctccccggagggcaggggaaggtcgctccaggtcgctggcacctccagcgcccccgaaatctgcaaattcatcgctccctttcgtcttcaggcgaagccctcccgtccggagtagggccagccccagttatgcatctccagcctttagctgactactaaggcggatccgacttctcccccataaccaggttttgattcgcttccccaccgcaggggttcagtctctgctttcgactttgcttctcagttgcacgccccgcagtgtggagctgcgctcaagtctcggcaactttcaccatcttgacccgagagtcgggccgtttctaagacaatgtgaacaaagaggagcagggggagggaaggggggccccgcgggagggctgtgggcgagtgtgt

SEQ ID NO: 123435 - DNA, 558 bp, Homo sapiens; identical to SEQ ID NO: 9207
  chr13:22244072-22244630
  hyper

SEQ ID NO: 123436 - DNA, 401 bp, Homo sapiens; identical to SEQ ID NO: 50384
  chr13:22244998-22245399
  hyper

SEQ ID NO: 123437 - DNA, 30 bp, Homo sapiens
  chr13:22245711-22245741
  hyper
ttttttccttattacggtcggatgggatga

SEQ ID NO: 123438 - DNA, 30 bp, Homo sapiens; identical to SEQ ID NO: 9209
  chr13:22247199-22247229
  hyper

SEQ ID NO: 123439 - DNA, 97 bp, Homo sapiens; identical to SEQ ID NO: 9210
  chr13:22247844-22247941
  hyper

SEQ ID NO: 123440 - DNA, 133 bp, Homo sapiens; identical to SEQ ID NO: 50387
  chr13:22248799-22248932
  hyper

SEQ ID NO: 123441 - DNA, 31 bp, Homo sapiens; identical to SEQ ID NO: 9211
  chr13:22553926-22553957
  hyper

SEQ ID NO: 123442 - DNA, 323 bp, Homo sapiens
  chr13:23489698-23490021
  hyper
cgatgcccgcgccggcgcaggggcggataaaaagccgtagcgccacgggagtgggcgggagggagagggggtacccgagggccacaagagtatgacggggctgtaagagctggtgtggcgggtgctgcccccctgctctgtctgcaccgcaagctcacctcctggctccgcgttcggttcggcacttggaactggatctggcgactgtgccggcgcgccgcctctgccgcggtcctagcgccgctcggcttcacgctccgcaagtcccaggcgtctgcaggaaccgccatcaccacccgcacccgcgccgggggtcgtgcctg

SEQ ID NO: 123443 - DNA, 787 bp, Homo sapiens
  chr13:23733510-23734297
  hyper
ttttcaccacagcaaacccttcggggtgcctcctagcggcggatggagaactagcattgcgcgagagtgagtaaactgtgataaacccaaggggtttgcgggggacaggctgggtggcaagacttttaaaggctcgcaaatggaaccactccctccagagggactatctaaatctcctcaggtgctgaccctttctgacagtaaaggacgagggccagaagtgtaaagattgtggtcccgcgctccaagcccaagatgcgttcagcaggagtagttgggttggaaagaaggcacccagcgtctgcagcgaaggactcgcgtgggagcgagaaatgtccctgcccagtgccccgcgcgctggatcgcgggggcgagtctgagggtggagaggccgccgggtggaggcgcgcaggggtgcgtgggtgggtgcggaaggagtgcagggtatggaggggaatcttggggcggcgcgaaggaggagcgcttggaaaggcgcggtgtttggtcacagaggggctcggagtgggagtgcaggggtgcggggagggagtgcagggacgcggggagggagtggaggggtggggacgtgctggaggggcgcgcctcgatagaactggagaaactggaaaagtggaggggcggggcagtggctggaggaacctctgaagcgacgcggggaatatgtgaaggagtgctatgttggaacttggaggggaggggggatgctggagaggcacacggtgatggacatggaaggacccgggaggtgtggagtggtgggcccggc

SEQ ID NO: 123444 - DNA, 22 bp, Homo sapiens
  chr13:23734814-23734836
  hyper
cgccttcagttcccccaattcc

SEQ ID NO: 123445 - DNA, 224 bp, Homo sapiens; identical to SEQ ID NO: 9216
  chr13:23949730-23949954
  hyper

SEQ ID NO: 123446 - DNA, 565 bp, Homo sapiens; identical to SEQ ID NO: 50393
  chr13:24040495-24041060
  hyper

SEQ ID NO: 123447 - DNA, 1321 bp, Homo sapiens
  chr13:24152954-24154275
  hyper
tccgctgcgagggtgcggccgtctcggggcgagtgcttcccggcctgcaggaggcgaactcgggcttccccgggaggcgtccgtgggaacgcgcacctgcgagtccctgccggctgaggagccgaggtctgcgacctctgccgacctgagctcaggcgcagcagcgcagacctggccgccgtatcccctctggctgggatgcgggcccacgcgggaaaggctgaaaggtggggaacaccccggcggaaaggaaccctccctctctgctctgaaggaaagtttcccaacacagccatgttcttggtggtctccggtcccccatccccaagcccccagtcagcctcacactcatccgcttcagtagccgcggagtgggggcctccaaagaacccagctgcagagcaagtccggctgacgcagtgtgcgctgggggcggggctctggacgggggcggagccacggcgagagccgcggtgagggcggggcccgggtgggcggtgccctgagcggggctcctagtgggcggggctctggggtggcggccgttgccgggctacgggagagcgcggagccctgcgctgggaggtgcacggtgtgcacgctggactggacccccatgcaaccccgcgccctgcgccttaaccaggactgctccgcgcgcccctgagcctcgggctccggcccggacctgcagcctcccaggtggctgggaaggtaggtgcgtcgctgtccccggcgcgcggcgtcccgcgaggtcttcagccctcgccctggtggatccccgctgggtgggagccgggagtggaggcggccgccctagggagggaggagcgcaggcgggggctgctcacgggcggagtactgcgcggcgaagggaacccccgaaggggctgaccgggtctcggggccgtgacaggcggcgaggcggtgggaggggagcgtgtgaattcacgccgggtccccgcgggcgacgcgagcgacgcgacctggactcctatccgggatattgtaaatagatctgcttgtgaggctcacgactgggagcctgtcactctgcccaagcccgacccggccccggcgcccgcccgcgtcctgcggaggtcccctgagccagcgcgcggctgcaggggtctcggggccgcatcccggaccagcgccagcggcgggagagcgttgtctgtgagcggcccagggtatattccttctgtgggaaagagttccttagagttcagcaggaattattagtatattgatgagtagagcctgtgatagatttagagagtgagaaagccagctcttacaatgcgtgtaatgccatctc

SEQ ID NO: 123448 - DNA, 30 bp, Homo sapiens; identical to SEQ ID NO: 50395
  chr13:24462963-24462993
  hyper

SEQ ID NO: 123449 - DNA, 30 bp, Homo sapiens
  chr13:24463391-24463421
  hyper
cccgcccggcggggcggcagagctgctgct

SEQ ID NO: 123450 - DNA, 30 bp, Homo sapiens
  chr13:24463661-24463691
  hyper
ccctcccggtttaccgccccctgtgtccag

SEQ ID NO: 123451 - DNA, 520 bp, Homo sapiens
  chr13:24477488-24478008
  hyper
cgggtgggtaccggccgcgcccctgctcggaggcggcgactccctcccccgccttactcacaccgtgcctcagtttccccgtcagtgcagcggacaagacaatgccgaggtcccaggcgggcggcaggatccaattagtccgtgtaaaatgagaggcatctggcttctcccgggcaccccgcagcctgccccgcctcttagtggctaaaggcagggagcccctgagtcccagcgcggctgggggctctcagcagttctggccgagctccctcccgcccgcgtcgcctggcctcgaaccgctgcaccgcgggcggccccgacgggttcccgacctcccgctggggacacctgtcccgccgcccggcccttccccgcctcccgcgcctccgccccaggggagctccgggacaggcccacctaggcagcctgccggcgcagacccagcgagggaaggccagtctcgggcctccaaccggacacgcgctccccattccgggctctcccacgtctgcacactcca

SEQ ID NO: 123452 - DNA, 167 bp, Homo sapiens; identical to SEQ ID NO: 50398
  chr13:24553696-24553863
  hyper

SEQ ID NO: 123453 - DNA, 186 bp, Homo sapiens
  chr13:24553924-24554110
  hyper
cgcagggcatgggggcggcgcgcacccgggacagtttccagtcggcttctccgtgaccttcctcccccttccagctcggagcgggatgctgggatccctccaaggaccctctgaggacgtaggagggatgctgagacaggcaagtgggatttctctacatattgtcacctcgcccgcacttttgga

SEQ ID NO: 123454 - DNA, 1103 bp, Homo sapiens
  chr13:24734666-24735769
  hyper
gccactgcgcctggccggggaactgtttttgatgggtggggtccccggctgtggttggtagtgtgggggcgtggccgagggtgtggcctgagggagtgagctaaccgggggcgtggcctgatatggggcggggggaagagccgggctgggggcgtggcctggtggggagcggggctggggcgtggcttggctgagtgtgctgccgcggcgcgggaggagagtgtgcgttgcgctttctcccgcgatcgccctgccggtcgctagctccgagggcgcgcactggatcccaggctcctccgagagtgcggcgacctcggggctccgccggcaccggaggtggctctgagggcagggacgtgttggacacgctgactttgtaggctccgccaagaggcgccgcaggaggtaagacggcttcgggcgcgcggctctgccgggcgggcgcgggcatgggctgttaggtagaatatcgggaggatttgagtcccagtggactgcctcggggcttcgggatgtccagctcccagctgcttggcctctgcttcccccgccggtggaggctaccgggtgctcacctgttaggtccgtgcgcccgctccctgcccggcggtggctctgcgccctctgggccacccggcaccatcgcttttgggaggacatgcacgtggtgttctcgcaaaaggccgtttccagccggaagcctgcagggaggtcgccttgtaacttcacccgcgctcccagctcgcggggcctggcctacaggggcggccgtgggggtggcagagtctggggagcctggcgcggcggagccctgtaacgctctgctccatcgggtggcgtggctggtgcctccggggacccggagcgatgcggttggagagcttagtttagaaagcaagtttctcttggtaccagcggagtctcgtcccaggggaaagattttgggacccggtgcccatcgtctgtggactgcagggaatgcattggcggagttggtttggtcccattctgtgcaggaggtgggggaattggtactccagccccaggcaggtagaagcccgcgctgctgccagcgtcagggggagctcgggtgacttgggctg

SEQ ID NO: 123455 - DNA, 30 bp, Homo sapiens; identical to SEQ ID NO: 50400
  chr13:25087284-25087314
  hyper

SEQ ID NO: 123456 - DNA, 95 bp, Homo sapiens; identical to SEQ ID NO: 50401
  chr13:25254432-25254527
  hyper

SEQ ID NO: 123457 - DNA, 30 bp, Homo sapiens
  chr13:25254727-25254757
  hyper
gcgtgcagggcccgcgccgccgccggtatc

SEQ ID NO: 123458 - DNA, 87 bp, Homo sapiens
  chr13:25255019-25255106
  hyper
cgcctttcctctgagcgccccccggcctgggcaccgcttctctgactccccgccacggctccgtgcggccgccggggctggctgggg

SEQ ID NO: 123459 - DNA, 4 bp, Homo sapiens
  chr13:25319900-25319904
  hyper
gctc

SEQ ID NO: 123460 - DNA, 152 bp, Homo sapiens; identical to SEQ ID NO: 9219
  chr13:25320387-25320539
  hyper

SEQ ID NO: 123461 - DNA, 415 bp, Homo sapiens; identical to SEQ ID NO: 9220
  chr13:25320613-25321028
  hyper

SEQ ID NO: 123462 - DNA, 1081 bp, Homo sapiens; identical to SEQ ID NO: 9221
  chr13:25321112-25322193
  hyper

SEQ ID NO: 123463 - DNA, 30 bp, Homo sapiens; identical to SEQ ID NO: 50405
  chr13:25322238-25322268
  hyper

SEQ ID NO: 123464 - DNA, 30 bp, Homo sapiens
  chr13:25496590-25496620
  hyper
gactgcggctgccgcgctgcccacaggaac

SEQ ID NO: 123465 - DNA, 309 bp, Homo sapiens
  chr13:25497029-25497338
  hyper
ggatctcacccgcgcgtctgcgctaaagcgcaggcaccgctgagcccagtgaaactacaactcccagtgacgccacagcgacgggcgttgcccggcgggggatggactgcgcgccgccttccgaccagcagcgggccagtggtcgacgtaggcgggcggcgtggcggggcggaaaaccgtttccgggagagaccttccgtggtggacgtcgccccaggctcccacacttagaaaactaaagggaacgcctaacggagcgatggatctccgtgttcccagcaaagcagggagcacggagagtcaaagcta

SEQ ID NO: 123466 - DNA, 191 bp, Homo sapiens; identical to SEQ ID NO: 9222
  chr13:25497657-25497848
  hyper

SEQ ID NO: 123467 - DNA, 391 bp, Homo sapiens
  chr13:25592164-25592555
  hyper
actctcagcgcctcccgcctctcagcagaaacgcccaacagaaccgttagaaccagcgagcacgcgcaccttagccggccccgcccaacaggcccgaggcagagaaaccgccttagcagctctcgcggcgcccagtacaggcggcggttgctgcgcaggtgccgcgggctggcagggctccctggagccgcaaggcgcgccctgccccagggcctgtttgactgtggcccgcgccctcttctcctcttccaacggctcccgatgctcagagacccccgcgctgggccctctgcagcccagggatggggttgagtggtgcttctccacctggtgccgccgctgggcccacagcccgacttcgccactgcgtcgcccccggggtccgcgctga

SEQ ID NO: 123468 - DNA, 30 bp, Homo sapiens
  chr13:25592860-25592890
  hyper
tccatgtgctggtggcggctgcagctgcag

SEQ ID NO: 123469 - DNA, 312 bp, Homo sapiens; identical to SEQ ID NO: 9223
  chr13:25620893-25621205
  hyper

SEQ ID NO: 123470 - DNA, 311 bp, Homo sapiens; identical to SEQ ID NO: 9224
  chr13:25621263-25621574
  hyper

SEQ ID NO: 123471 - DNA, 52 bp, Homo sapiens; identical to SEQ ID NO: 50412
  chr13:25744682-25744734
  hyper

SEQ ID NO: 123472 - DNA, 294 bp, Homo sapiens; identical to SEQ ID NO: 9226
  chr13:25745300-25745594
  hyper

SEQ ID NO: 123473 - DNA, 354 bp, Homo sapiens; identical to SEQ ID NO: 9227
  chr13:25745726-25746080
  hyper

SEQ ID NO: 123474 - DNA, 28 bp, Homo sapiens
  chr13:25746119-25746147
  hyper
cgacaacgcaattcaacccaccacaaaa

SEQ ID NO: 123475 - DNA, 49 bp, Homo sapiens; identical to SEQ ID NO: 50415
  chr13:25861518-25861567
  hyper

SEQ ID NO: 123476 - DNA, 23 bp, Homo sapiens
  chr13:25875818-25875841
  hyper
agagagatgctgcccggcccgcc

SEQ ID NO: 123477 - DNA, 30 bp, Homo sapiens
  chr13:25876320-25876350
  hyper
ccccggagctttagcgatgtgtcagtctta

SEQ ID NO: 123478 - DNA, 30 bp, Homo sapiens
  chr13:25945987-25946017
  hyper
ccccatcgccttccccgacacctaaaagcc

SEQ ID NO: 123479 - DNA, 373 bp, Homo sapiens; identical to SEQ ID NO: 9229
  chr13:25946300-25946673
  hyper

SEQ ID NO: 123480 - DNA, 150 bp, Homo sapiens
  chr13:25946801-25946951
  hyper
cggcgcagagaagatgcagccttccctgccggcggccggcaccgctgtgctgcagagctcaaaagcagagggggaaaaaggcatccgaagggtccctcgagtgattctcaccacttggagccccgggtcctcgcgcgctcacagcggcga

SEQ ID NO: 123481 - DNA, 14 bp, Homo sapiens
  chr13:26042693-26042707
  hyper
cgggactagagggt

SEQ ID NO: 123482 - DNA, 402 bp, Homo sapiens; identical to SEQ ID NO: 50420
  chr13:26042768-26043170
  hyper

SEQ ID NO: 123483 - DNA, 118 bp, Homo sapiens
  chr13:26043340-26043458
  hyper
cgcgcacctggccggcccccgtccatctcccccagagccttcccctgccccctccccaccccactagcccgcggtgcagccccgcgcttccagtagggtcatgcgaatgcagccctca

SEQ ID NO: 123484 - DNA, 30 bp, Homo sapiens; identical to SEQ ID NO: 9232
  chr13:26594656-26594686
  hyper

SEQ ID NO: 123485 - DNA, 175 bp, Homo sapiens
  chr13:26623879-26624054
  hyper
gctcaggatgctagcgaaaagcctcccaggtaaacacaacgggcccacaaagaggaggagccgccccctcggggacacgtttgccattttacctctacacctcccctcccccgaaataaataacacacacacacacacacacacacacacacacacacacggagtgactggtgta

SEQ ID NO: 123486 - DNA, 94 bp, Homo sapiens
  chr13:26624293-26624387
  hyper
gagaagatgggaatccgcggcgtctggcacggggcagcagccccgggaaagccctgaggagctgccttcctttcggggagccttcaggggagca

SEQ ID NO: 123487 - DNA, 4 bp, Homo sapiens
  chr13:26624425-26624429
  hyper
cgtc

SEQ ID NO: 123488 - DNA, 441 bp, Homo sapiens; identical to SEQ ID NO: 50426
  chr13:26624756-26625197
  hyper

SEQ ID NO: 123489 - DNA, 390 bp, Homo sapiens; identical to SEQ ID NO: 9234
  chr13:26625266-26625656
  hyper

SEQ ID NO: 123490 - DNA, 124 bp, Homo sapiens; identical to SEQ ID NO: 9235
  chr13:26626239-26626363
  hyper

SEQ ID NO: 123491 - DNA, 272 bp, Homo sapiens
  chr13:26760407-26760679
  hyper
cacatctggagtgccgtgtggagacgccagggcgcgtggagctttgagcagttaaaaacccagaccgggaggccagtgcgtgtgtaagaccgcgtttctctgcaaggctgtcccgcggcaggaacgcgctcgttgggccgcagagcaagagcgggacgcgccggggggcgtctgcgtggcacgtgggccccgcagccagtcgcgctaccgactggcagtcagcggagacgcttcggagcaggtctgttagggcgcgcgcacacacatgcacg

SEQ ID NO: 123492 - DNA, 30 bp, Homo sapiens
  chr13:26795975-26796005
  hyper
aagcaggtgatagacggtgcatcccaacca

SEQ ID NO: 123493 - DNA, 30 bp, Homo sapiens
  chr13:26828449-26828479
  hyper
agcggcggagccggcgcccagggagcccgc

SEQ ID NO: 123494 - DNA, 51 bp, Homo sapiens
  chr13:26828723-26828774
  hyper
ccacccctgccccccggccccccgacccagctctccggcctcagaggctgt

SEQ ID NO: 123495 - DNA, 30 bp, Homo sapiens; identical to SEQ ID NO: 50432
  chr13:27050497-27050527
  hyper

SEQ ID NO: 123496 - DNA, 359 bp, Homo sapiens; identical to SEQ ID NO: 50433
  chr13:27131469-27131828
  hyper

SEQ ID NO: 123497 - DNA, 450 bp, Homo sapiens; identical to SEQ ID NO: 50434
  chr13:27131859-27132309
  hyper

SEQ ID NO: 123498 - DNA, 47 bp, Homo sapiens
  chr13:27132629-27132676
  hyper
cggggtatcatccccgggggtctttacccgcgcgcctgggctttagc

SEQ ID NO: 123499 - DNA, 1014 bp, Homo sapiens; identical to SEQ ID NO: 50436
  chr13:27334205-27335219
  hyper

SEQ ID NO: 123500 - DNA, 30 bp, Homo sapiens
  chr13:27504584-27504614
  hyper
tgatctgtggtaaccgttccctactcagcg

SEQ ID NO: 123501 - DNA, 295 bp, Homo sapiens
  chr13:27744739-27745034
  hyper
acaccaagttttaaacgcgcccacgttttgcttaattcgggacttccagcgggcattagcacttttcccttacagtctatttaaacgccctaggaaaacaaataccatcgccttggcaggcggtccccgcacagacagacctagctccagccacatacagatgtgtctggtgggctgaagtaaacaaatgacaggaaagctaatgctgcttttcaagattaacgtgcattcccagagacaagactgccacctggacacacggctggaaacgggagagctcgtgcctctcagagga

SEQ ID NO: 123502 - DNA, 115 bp, Homo sapiens
  chr13:27825511-27825626
  hyper
cagcttgtgttggccggttgcctttctttcgcaagaggggaaaatatcctcacagactttctgtgttctcagagacgatcttcttccctagaaagaagtcgcttacggttggcgt

SEQ ID NO: 123503 - DNA, 30 bp, Homo sapiens
  chr13:27826077-27826107
  hyper
ctgtgtgggggccgcgtggcctgatgcctt

SEQ ID NO: 123504 - DNA, 30 bp, Homo sapiens
  chr13:27844603-27844633
  hyper
ttctctcgtcaactcgtaactcctatctca

SEQ ID NO: 123505 - DNA, 30 bp, Homo sapiens; identical to SEQ ID NO: 9240
  chr13:27868706-27868736
  hyper

SEQ ID NO: 123506 - DNA, 30 bp, Homo sapiens; identical to SEQ ID NO: 9241
  chr13:27949036-27949066
  hyper

SEQ ID NO: 123507 - DNA, 30 bp, Homo sapiens
  chr13:27998549-27998579
  hyper
tttaagcagtgcctcgggatttgagttgcc

SEQ ID NO: 123508 - DNA, 292 bp, Homo sapiens; identical to SEQ ID NO: 50441
  chr13:28024611-28024903
  hyper

SEQ ID NO: 123509 - DNA, 30 bp, Homo sapiens
  chr13:28025212-28025242
  hyper
ggggccccagctggcgaaagggaaaacgga

SEQ ID NO: 123510 - DNA, 30 bp, Homo sapiens; identical to SEQ ID NO: 50442
  chr13:28107367-28107397
  hyper

SEQ ID NO: 123511 - DNA, 30 bp, Homo sapiens; identical to SEQ ID NO: 9243
  chr13:28179804-28179834
  hyper

SEQ ID NO: 123512 - DNA, 204 bp, Homo sapiens
  chr13:28194642-28194846
  hyper
cgccgccgccgccgcggatttcctggcaaaaagcaaactccggccaagacttcacttctcaaccgcccctgctgccttcccgggggcagcgccaaggccgagcggcccaacccgcacccgggccaatcggaggtagcacagggcgggaggtgggcggaccagagggcggctccacctatccgagagctcgggaggcgggccaga

SEQ ID NO: 123513 - DNA, 103 bp, Homo sapiens
  chr13:28195533-28195636
  hyper
gtggtgactcatctcgcacgtgacccccctccctcttcaaggtgtgttgaccgactacagtttaagcctgtcgtcccacaaaaggcccgggagggccggggtc

SEQ ID NO: 123514 - DNA, 30 bp, Homo sapiens
  chr13:28196068-28196098
  hyper
cagagcccccgatccgccagcaccacctga

SEQ ID NO: 123515 - DNA, 30 bp, Homo sapiens; identical to SEQ ID NO: 50445
  chr13:28363825-28363855
  hyper

SEQ ID NO: 123516 - DNA, 168 bp, Homo sapiens
  chr13:28364172-28364340
  hyper
ccggccgcggcccgccgggctgagagaccacagattaagtgcgccttggttctctcagggatgctattttgctccggcccgggtctctcccgcgccgagttgcacaacaaaccatttaaacatttcagcacaaaacccgatccattgtggggccgcacattaaaaagt

SEQ ID NO: 123517 - DNA, 12 bp, Homo sapiens
  chr13:28364683-28364695
  hyper
tcctccccgggc

SEQ ID NO: 123518 - DNA, 164 bp, Homo sapiens
  chr13:28364723-28364887
  hyper
cgctggccactcgcgggctcccagctccgggtgcagtgcccgccccttgcacccctgggccccgcccgcccttgcgcccctccagcctgcctctgcccagcggaaagcccctctccccgcccgggtctcgctcttcgcttcctctcagcgacccagcccagctc

SEQ ID NO: 123519 - DNA, 484 bp, Homo sapiens
  chr13:28365571-28366055
  hyper
tggggagagcggaggcgggtcagggtgggcaaaggcagccgatgccaggaatacaaccgcccttcgcgccgttccaaactaagagatggcagcggtttcccagcgcactgctggaagtgtgctccagtagacagggtgtgggcaagatgcgcgggcagacagtccgcactcgccacatgtgctggggtgcgagatctagatctgcgccatctcggctttcattccccattccctgtctctgttcgtaacgctcagagactgtttttcctcttttacatccacggccctgtcatttgaaggaaagggctggttggccagcatctaccgaacaaagactgggcgtcgtaggcagcaccaaaattaagactatttgagaaacttagagaaaaccgagggacagcgatgggtctagggctggataaggaataatgagcccttctcctccctccccacagacgcctccttcacgcgggaacccggtcct

SEQ ID NO: 123520 - DNA, 73 bp, Homo sapiens; identical to SEQ ID NO: 9245
  chr13:28366528-28366601
  hyper

SEQ ID NO: 123521 - DNA, 374 bp, Homo sapiens; identical to SEQ ID NO: 9246
  chr13:28366664-28367038
  hyper

SEQ ID NO: 123522 - DNA, 145 bp, Homo sapiens
  chr13:28367800-28367945
  hyper
tacctgtcccgcctacgtcgcatcgagatcgcgacctacctgaatctgtccgagaagcaggtgaagatctggtttcagaaccgccgagtgaagcacaagaaggagggcaagggcagcaaccatcgtggcggcggcggcgggggtg

SEQ ID NO: 123523 - DNA, 151 bp, Homo sapiens
  chr13:28368349-28368500
  hyper
cagcaccgcggcccccgcccgcaagcctgcttggcgcagcgccttgctggcagccggcgcctcctagcccgccctctctgggctggcttgggcttcctcgcttactctactctcctccgctctcggtcaaggtcggcggccttggatgctc

SEQ ID NO: 123524 - DNA, 30 bp, Homo sapiens; identical to SEQ ID NO: 50450
  chr13:28368805-28368835
  hyper

SEQ ID NO: 123525 - DNA, 5 bp, Homo sapiens
  chr13:28369065-28369070
  hyper
ccgag

SEQ ID NO: 123526 - DNA, 829 bp, Homo sapiens
  chr13:28369161-28369990
  hyper
cgattgtcccgctccggcgtggcgcacaagcgtcgcggagctcagagagctaagccggaagggaaggagagcgctctccttggactgcaccatgggtcccaacccctgcagcgcctccttctcacctgggatccagccccacctccatccctcaccatttcgctgtcctggccaacagccgggagggcagaaaccactccctccataagcacaagaaatccgtccttcactgcgcttggattgataacgattcgttagggacaaatttccattctgcgggatggtgcagacttctctcagagggccctcctctctttgttttaaggcaaattcccttagccgagtccctggtcgcggaacattccgggcaaggaatccgagaatccgaagtgatcctgccccagggagtccccgagagggactctgcatagctggagccagtggctctgggacctcatgttctcaccaattctcgttaaaatcctatatccccctacgacttagaatccacaccccagctccctttgaggacatatgcgggtttttttactctctaagatggatgaggagaaggaagtgcgtgaggttctgcagaaacggagagcgcacagctgcgggaggagtatttctgcagtcagtatttctgcagtcagacctgggaagctaatatccgcgttctcgccgctcccattctgtgtccaggaaacctgatagaccttcttttcctgccagacccctacacacacacacagacacacacacacatacacaccctggggagcgctgaactccccgtgtctaggcaaagcaaatgcgtcttttccagcag

SEQ ID NO: 123527 - DNA, 20 bp, Homo sapiens
  chr13:28370403-28370423
  hyper
tgattttagtcccagtctaa

SEQ ID NO: 123528 - DNA, 45 bp, Homo sapiens; identical to SEQ ID NO: 50454
  chr13:28370502-28370547
  hyper

SEQ ID NO: 123529 - DNA, 713 bp, Homo sapiens
  chr13:28370984-28371697
  hyper
ggatttgggggcgggcggcagcacgattttctggcaacgagttcgttgtgggtctgaaggaccggcttagaactagcacctctcctggattacaggagggggtggtcttgtgcacctgggaaaggccttcgccagcactcagtgtcaggcatcttgatcagaaatgcactttcgagcctgccagggaaccaagtttggaggggatggaaacggcggtgggagacatagaaaggatgaacacacacacccggctctccccgcactcgcctcttctccagctccccctcctctcccgcctaggagtccctcctgttcccagcttctccccagagtccgcagatccacagctgtgagccaggtccgcgtggggccagttttcccaggagtgcacgtttcctcctctcggcttcccagggattcatttccggaagaccaagctttcagctttctagtctgccttagcgagcagcgggaggaaaaaagcaagcctccttgtggcgatcccagttgttgccaaggtggtgacgggagcgcagcgctggggacctggaggcggctgcggcgcaccagagctctcaagcatcccgccgccagcagagactgcgttcaagtcccagcacactttcgctcaaacactcctcaccctgcaacctctgacctgaatgcagaaacagtttgcgtcttgtgctgagctggccgggaggcctccgctc

SEQ ID NO: 123530 - DNA, 559 bp, Homo sapiens
  chr13:28394422-28394981
  hyper
agcccacaccgacccgagccaacagaatggggaggaagcaggtgcagggagtcagcttcatcttccccttctcttgatgatgctcttcagccattagggtttcaaaagagtgggcgtgagcaagcgagaaaagccccttcaattctgggaaacttaaagacagtttcttccagcaggaacacctggagaggcaaaaaaaaaagcaaaaaacaaaacaaaacaaaacaaacaaacaaaaaaagttgtgttggaacccgtggagagaaggaactgtccgtttccaaactctgcttcggcccctctcccctcccacccacggccccaggcagagagggccggaaaggcagcccattcctgcccgcgcattcgggcgcacaagcgcattgcgcatgtactgtggagggggcaccctggtctccacctggaatgcgcttctagccaagtaattgcgtcgcctttgcgcgcagctggcctggggaacctgggcccatcagagccagttactcttggtccccgctttactggagggtcgcaggagactttcgcttccaaaagcaca

SEQ ID NO: 123531 - DNA, 280 bp, Homo sapiens
  chr13:28395256-28395536
  hyper
ttttcagtcaaatgcgcaaagccaggtggctcctttaacacccccagagattgtccccatgatctcctctgcgccatggggcgctgggtgctgggggcgccgtctgtatcctctgcctggtaactgcccccatcgcgccccactgcgccccagcccaggctggaaaactgggccaacagggaggcttggatggggggaaacccagcctgaggctggaaacggctagaagtgaacgggacgagtggctttgcaaaagcagccgctgcgattctctagcgcc

SEQ ID NO: 123532 - DNA, 56 bp, Homo sapiens; identical to SEQ ID NO: 50459
  chr13:28395742-28395798
  hyper

SEQ ID NO: 123533 - DNA, 30 bp, Homo sapiens; identical to SEQ ID NO: 50460
  chr13:28396024-28396054
  hyper

SEQ ID NO: 123534 - DNA, 479 bp, Homo sapiens
  chr13:28396895-28397374
  hyper
gtctgttagacggtgcggtgcctgcagctgatttgatgggttggaaatgcgcacgaaacaaaatacttgaatcctgaaaaagaccctttgtaagtttctttagaaatcaagcaattctgcatgacaaagaacaattaataagccgtcttttcacaaaccagcagctggtttccccgtcaaggaaagttggaaaaaattcaggctgaatgcgcgcagaagctctttgcgcacagacatctctccaaggtgacccatttggcacagctgaaataaataaccccgctcatgcccagagagcgggggaactgtcagaaacatttacgctagaatatcttgaaattgcaaatccttttatgggggaggacgctgccgatgtgggttaaatggacaatgacgctggttaagttggagggtcctttggagacggacacgtggcttctcaatgaaagctgctccgggctcgcgtggccgccttcgcc

SEQ ID NO: 123535 - DNA, 30 bp, Homo sapiens
  chr13:28400909-28400939
  hyper
tgcctgtgcgtggccgccatagctaggaag

SEQ ID NO: 123536 - DNA, 30 bp, Homo sapiens; identical to SEQ ID NO: 50462
  chr13:28476962-28476992
  hyper

SEQ ID NO: 123537 - DNA, 1064 bp, Homo sapiens
  chr13:28491467-28492531
  hyper
aagagctgctgttaaatggctcgggaaggtgctcgcctaatggctcggtatcgctgccgggcctgttgtgggcgaggcggcttggagggggcgcaggcgtcagcggggattcagagcggaaacgcatttcgcctgtaatggactcggcgattttacgataccaggagctagatccacggggaagtacaacacacgaccttactaagcggagggttccgcttgatgcgttttttatacggctgtacgtgataaaattccagataactttgtttcatctaataataataataacaataataaatggttgtttgacctttgctccctgggtcccttctataggtcgcaggcagcagaaaatgctaattgtgaaagtgagaacgcgcctccatggaatacccccggcgatcccctcctcctcccccacagccgcgggtacccgggtttttgccggcgaccgcaaccggcggatttgctttctgctgagagcctcttttctttctgcagggccgagcaaaaatattaaatggaagcaaatgaagcatcgaaatggagaccaatttacagaaatgtgcaattagttgagaagtgcaaagtaaacactccgggggtggcaggcgaggcagggagcaggggagggagagtggggcgcagactgagtccagagtgggtgtaggggtgcccagggaggaggggaagggggaggaaaaggagggggaggggaaaagtggccgatctttgtcctgagcggagcttgccgtccgctcataaccgcgtcgccaagtcaaccctcggcgactcggcagattatctccaagggtcaacacgccgcggccaggcaaccccctccagcctgccctcctgatcgatgtggtcactcgcggccagggtgatagggtagagttctccgcggccgcagacaatggactcattgacgcgggcgcacagagattaggtgcccgggccccacggcctttcactctctgcccccaccaaaactgcaggtggcacttttccctgaagaaatcaccgaaactctccccgcccgccgccgtgcttcccttggc

SEQ ID NO: 123538 - DNA, 2037 bp, Homo sapiens
  chr13:28493980-28496017
  hyper
attggaacaaaagcaggtgctcgcgggtacctgggcctagcctcttagtgcggccagccaggccaatcacggcccccggctgaaccacgtggggccccgcggagcctatggtgcggcggccggcccgccggtccgcgctggctgtgggttccctctgagatcagtgcggagctgtcaaagcgagcaggggtggcgccgggagtgggaacgccacacagtgccaaatccccggctccagctcccgactcccggctcccggctcccggctcccggtgcccaatcccgggccgcagccatgaacggcgaggagcagtactacgcggccacgcagctttacaaggacccatgcgcgttccagcgaggcccggcgccggagttcagcgccagcccccctgcgtgcctgtacatgggccgccagcccccgccgccgccgccgcacccgttccctggcgccctgggcgcgctggagcagggcagccccccggacatctccccgtacgaggtgccccccctcgccgacgaccccgcggtggcgcaccttcaccaccacctcccggctcagctcgcgctcccccacccgcccgccgggcccttcccggagggagccgagccgggcgtcctggaggagcccaaccgcgtccagctgcctttcccatggatgaagtctaccaaagctcacgcgtggaaaggccagtgggcaggtaagcctggctccccacccctttctcctttccggttctcacccggccgccttacctccaagcgctcccaggagccttctctctgttcccggcgccttggattatcccgggtcggactaaactacatcagggagctaccgagcccatccctcacagcagtgcttctctagtccagtttgaagcatctttcccacccagctctcctgggagtgtacactccttccttccctgttcgctgagcccatcttcgccccaggagcccgcgctcccagcgccatccttagagagccgaggctgagtcctgctcagggcttcggacactacagatcctcctccagcaggggatccgggaacccaggactccttggtagtgcacatcgaggaagccgagtagggacatgggtgcctcggacccaggccccagatcgccttcggagccccggagcccctcacttcccgcgcttcgttaaggaagggcaggcatctaggggcgccaggtaggtgcagaaaggcagggagggaaaggaaactgcacccaacccagcagtgtccggctgccctggttgtggaaacaggataggagtaaagaggaaggggctggggcaaggcgggggctcaccgcgaggctgaaagccggcctctcaacgtcagagcctggcagctaggagagcaatctgagaagcgaattcgtttttcaccaaccgaaagcaattgaagctgtctccccgcaccgcttcccaggaagtaatttttcaggagatgggcgctccctgcctagctggtggggaggcgagaggcctggttcctgcggccctccgcgccggcagagaacagaaggtctttcccggagccgggagccggaggcacggggtagcccccgggtcctttgcggccccgcgcgagcggcaagttccggcgcggcctgtgtcgtcgccgctactcactgtcatcgctgccgtgcctcagccacttctggtcacacctgcaccgcaaatagttgccttttcctttcaactggcagccgggagtagggggaagcagctcgagccggcgtcccccggcccaccccgaaaatcctcagcgcccatctgcggggtctggccagccctgcctgacactgaccccaggcgcagccaggaggggctttgtgcgggagagggagggggaccccagcttgcctggggtccacgggactctcttcttcctagttcactttcttgctaaggcgaaggtcctgaggcaggacgagggctgaactgcgctgcaatcgtccccacctccagcgaaacccagttgacaggggcgccagaagctgccgcggcgcctctgcaaattt

SEQ ID NO: 123539 - DNA, 1829 bp, Homo sapiens
  chr13:28527187-28529016
  hyper
ctgctttggaaccagcgcggcttctgtgtggcagctactgagtgcacgctcgacctttgccaccctccgcgctgatggaaactggaggaggatgtggtttagacacaatgtggcccaagcgtccttgtttcctgaatataccccaaagtacaagtcccatctccagttttgaaagaattccccgaggaaaggggcttgagtggagtgggtggaggtgagaggggaagatgaggtgttggagaagcccggcgcacggggcctctattaatattaacttttattaagagttggcctttccccggggcttcacaaagcaggaagtcaagggcagtggaacagggaagggaactggcaggaagagaagaccttgagtaaattatttagctgtgacacgagattaagagtgaccccaccctcctccctgccccacacaccataaagtgggcccaggttggggagcagcgctccagctgccactaatcatggaagcccagaggcgaaatcagcttcccggggacccagaaaattgctggagtctggcgaggggcaaatcaggaagtgtctttgtcggagatgggacggaacccggcttcggggcgcaaccgggctctgggggagaccgcgtttgtccaggtggcaggccgcgccttctgatggctgtgaagagaaggagcgggggttttaagagccacagcgccaccgagagagtggaaaggagtagattagctcgcgcctgctatgcgaggcgactccccccgagacccacccgcagcccagcgcccttggccaggaggcccggaaagccaccgaggcggccgaaaggggccgcggggcacccctcagcccctcctgcggcggctccggctgcccctgctcagcctcccgctccccgcccggagtcccagctctcagatcggccgcagagctgggaacagaggccgcggggtccaggccgttccgcccgctcagccggagcagcagcgccgcctgccgggggcctcgcgcaggcgagacaggccagacgccggaggccgcgggcggctgcagctttgacgggccgaacacaccagcgctcccgttccgccttttgaaaatcaaatcccttgggcctggtgccaccatcgctcagcccaggtcttcgacgacgggtcgaaggccagtgctccaggccttcttcaccgagtggcttcggcgcttgcggcccaggttccccgcacctccgcgccgtagttgcgcgcaccttttgaaaagcttggcgtcttcaggtataaggacaaaaacaaccgcggacatcacaccattccaaagaagaaaaagaaagtgcccggaatctcagggcgcgacttccggggcgacgggcggcggcggagaggcgctccccgggcttcctacccggcaggaggccgcggcgccgggacctcgcctgccctcaccgcgcgccacctctcgggagacgccgcgaatctctccagggaatcccgggcagcggcgcagacccagcaaggaccggcagcaggccgagaccggccgtcttgggcgagagcagcgggacacgagcccccgggcgcccgctgggagcgcggggaggctctgggctcagggaagctgcgctccgagtggccttggaggacggtcaaggagcccgggccccgcggcggccgggagtggacgcgactggtccgcgccggccgcaggggaaggggcgggtcggcgctgcctgagctctatctgctctaatggctggggtagatccgcggagatacttgaataccaggccgaacgcttccccaaggcgtgttgtagacaacgggcccatttgagcatgtgca

SEQ ID NO: 123540 - DNA, 801 bp, Homo sapiens
  chr13:28534468-28535269
  hyper
gggctcagccggagtcggcagaggcgcttgcacctcccaactgggtgaaaactggaacctttccgggttcacgagcccaagccccatctcttcccagagcgcgcgcgccctctggcgcctgaaccggcgactggacgcggtggaggcgtgggattcggaggccgggaccccaagctctgcgctggaggcgtcaggagccgcgaggtcatccggtctcaacctcaggcgcccctgtgcaggcctccctacactcctcaagctgcgctccctactcgtgccacatcccttgttccgtaggtattgcttcgggggtgacacagttggcgttagaagcgcggtggcctcacttgccggagagggtcttggttttgcgcctttttccgtggcccgggaggcttgccaggcgctcgcagcagcgagccgggtgcttgcatctcagagagcagccgagctcccttccctggccccgtacccgcgtgcaaggggaccgagccccgggaaggggaagaacttgtaatcgcttgcagcgggacaatgtcgacttttgaacctctaaccactaagcaaacaacccatgtgctcttgctccactgtccaaacagggtttattgacaggcgtttcacggcaacgcatagcaaccccggcggctagggggcgggcctgtgggcgcggccggggcgcggggagacctgcggggcaccggggctcagaccggccctgacccaggacccctgacccaggacccctcgcccagcggacccggacacggcttcctcctctgcccggcaccccccgacccc

SEQ ID NO: 123541 - DNA, 326 bp, Homo sapiens; identical to SEQ ID NO: 50469
  chr13:28535305-28535631
  hyper

SEQ ID NO: 123542 - DNA, 680 bp, Homo sapiens
  chr13:28540419-28541099
  hyper
atttgaatggggctgcggccccgaccccgcgcctgctatgaaagtaaagggaactaacgcgactttctccgcggtggacgctcggacacgcgtgaccgcctcaaacccactccaggctgccattggtactcgcccctttttacagatgaggaaatggagaatcagaccgggtcacgcagatagtatcaggcggggttggcaccggagcctggctggagccacagaggacacctccggagctgaggcgcagggcagttccctcagccgaacaccccgggagggagactcgcctggaagtgtctcggagcgacccttgctcgggtgctgccccttcagtgtcccggacgtgccgggcaacgcgatgaccagaccctgagcgctcttcgacccatgccccaagggccttggaggcgccccacaccccctgggaacctaggagcggggctatggaggggagggatgagagggacttgtcagaattcattattgactgcgaaagtcaccaccctctttccgggccctaaaagagacaatggcagggctgggaaggtgtatatcaaagcaagccaggccgcgtccccccctccacccccacaccttgacagatgacgctccgcagaggagcccggctccggcccgcgggctgcggccaccccacattaacatcacaagggcacccg

SEQ ID NO: 123543 - DNA, 230 bp, Homo sapiens; identical to SEQ ID NO: 50471
  chr13:28541179-28541409
  hyper

SEQ ID NO: 123544 - DNA, 1563 bp, Homo sapiens
  chr13:28541972-28543535
  hyper
ggggcgcgcccccgtcgccttagcagctggggctagcaccttcttcccagcgacagcagctctccctggtctgcctgctcgctgtaccttgaattggcccgagtggccaaacccggtcccacacacagcctagccatcctccgacccccccaggtcacttctcttcttagatggctcagatggggaaagagagagcggagataaatggcctagacctagcccaagaaggttcgagcctccctctctcctcggcggccaggagccacgcaaggaatgcatgccgcagcaagtgccggaggacgcgattctgccggcgtccagcagtgctcacgccgacattccccggagcttcccgaaggtgtcccggggttgcgaatgaggagctcttggaaagaggacgcctgaacacggtgttgagactcagaatattcactcccaggctcagtaggtcagagaagccccgacgggccagaggcccccgaatttgtctccgggccgtgcccctcctggcgccgagctcccagacagcccgggacgcccctgtgcgcactggacgcgcgacgcgcagcagccactggctcgacccgcgccttcccaagcaccctccgaaggggcgcagcctctgcttaccttggctgccgagggactgctgcgccggcttccgcatccactcgcacaggttccgccgctggccgccgggagacagctgctcggcggcagcggtggcggcgggcccaggagggccggggttgagcgtttgcagcagcccagaagcgcaggaaggcgcggcggccgggtggtgcgggtggtgatgcgggtggtggtgcggatggtagtctgcggggctgctgtagcccatggctgcggccggggagccaccgttgaggccgtgagccacggcgttggcggcggccgcggcgcctccgggcgcgtagccattccagtcctcccggagtggggcgccatacgctgccggccaggatggccccggggactgcgcgctgtccaagttcgctgccgctgcagctgcggccgccacgtggtaaccgccgtagtccgggtactgcggggggctgacgaagttctgcggcgccaggttgaggccgccagagtggcgcacggagctagggtacatgctcacgtccttgtccaggaggtagctcacgtacatggtggcgagggtccgggagcagacctcaccatgctgcctggggaccgacgctggaggctgccggggggcacgaagggaaaggggcgaggggactcgaggagcggcgggtggctgcgccccagcccgcggtgctccgctggctcctcgcggctcttctgcctccgaggcggtccctccctctggcctgcctcctccctccctccctttcttccttctttcctcccacctccttcccactaggctgcagaggcggggaagacccgccacaggctggcgtgcggagccccaggccggcggccttccgtgattaacgagtgtttacaagactctattagtaatgacacagacaccaatggttggagacgtcgaggcgcagcgcgcactctacgcac

SEQ ID NO: 123545 - DNA, 58 bp, Homo sapiens; identical to SEQ ID NO: 50473
  chr13:28544070-28544128
  hyper

SEQ ID NO: 123546 - DNA, 81 bp, Homo sapiens; identical to SEQ ID NO: 9259
  chr13:28544503-28544584
  hyper

SEQ ID NO: 123547 - DNA, 217 bp, Homo sapiens
  chr13:28544665-28544882
  hyper
cgcgtggagtgggcctgcggccgccgttcacctcctaatacaagcctttgacagcgctgccagattcgggaatgaggatcactgcggcgaggcccggcgggctgggcagcctgactcggcggctttgagcgctctcagaacccgcgggcgctcgcggcactcctggagacctgcacttgtctgttctcattgtcaagcgtttcgctcggatatttgt

SEQ ID NO: 123548 - DNA, 317 bp, Homo sapiens; identical to SEQ ID NO: 50476
  chr13:28549574-28549891
  hyper

SEQ ID NO: 123549 - DNA, 176 bp, Homo sapiens; identical to SEQ ID NO: 50477
  chr13:28550239-28550415
  hyper

SEQ ID NO: 123550 - DNA, 49 bp, Homo sapiens
  chr13:28551499-28551548
  hyper
aactgatgggtttcccggggcagtcgagccacccccccaaagccgacct

SEQ ID NO: 123551 - DNA, 726 bp, Homo sapiens
  chr13:28551658-28552384
  hyper
cgcagggctcttcccggcccaccgcctccttcctgcggcttccccggctccccaggccggaccgaggccagcgtttgactttcctggctcccagtctgctcccctagtgcccaagagcgagaacaccgcttccgctcacatgtaaaggtcgggcgcagcaaatgaagtgggaaaagagaaaaacagacaaaccgctgtggcataaaagattccttttccgtccgttttgctttgcagttcgggcttagcaggagagggttggggagaactggataaacgctttggaatccacaaaggccggtggtgtcgggggccgcaaagggagtgaagaattgaagcagtgagctggataaatccggggcaaagcactaaacaatatggatattttggcaacgcgtgcgcgtgtgggtgggcggacaaaaggactcattactcgtatgattgcctcaattctccacttcctttgtgcacgtgtgtggacgctgttccaggcccgagtccgcctcccgcccaggacgcacagctccgggccgtggcccccgcgcgtccggttgtgcgtcccgggtccctggcccgcgcggcagctacagcttggcggggtctgcgcggaggaggtcggccaggcgcaggctgccgatcttcttcacctcgcccagagcagtgcgcagctcctgcgcggacgggcagagcagccggcgcgccagctcgcgcggcaccgccgtccgg

SEQ ID NO: 123552 - DNA, 334 bp, Homo sapiens; identical to SEQ ID NO: 9263
  chr13:28552659-28552993
  hyper

SEQ ID NO: 123553 - DNA, 30 bp, Homo sapiens; identical to SEQ ID NO: 9264
  chr13:28578210-28578240
  hyper

SEQ ID NO: 123554 - DNA, 67 bp, Homo sapiens; identical to SEQ ID NO: 9265
  chr13:28592625-28592692
  hyper

SEQ ID NO: 123555 - DNA, 30 bp, Homo sapiens; identical to SEQ ID NO: 9266
  chr13:28599040-28599070
  hyper

SEQ ID NO: 123556 - DNA, 30 bp, Homo sapiens; identical to SEQ ID NO: 9267
  chr13:28602387-28602417
  hyper

SEQ ID NO: 123557 - DNA, 500 bp, Homo sapiens; identical to SEQ ID NO: 9268
  chr13:28608022-28608522
  hyper

SEQ ID NO: 123558 - DNA, 30 bp, Homo sapiens; identical to SEQ ID NO: 9269
  chr13:28610100-28610130
  hyper

SEQ ID NO: 123559 - DNA, 30 bp, Homo sapiens; identical to SEQ ID NO: 9270
  chr13:28611397-28611427
  hyper

SEQ ID NO: 123560 - DNA, 30 bp, Homo sapiens; identical to SEQ ID NO: 9271
  chr13:28622462-28622492
  hyper

SEQ ID NO: 123561 - DNA, 30 bp, Homo sapiens; identical to SEQ ID NO: 9272
  chr13:28623585-28623615
  hyper

SEQ ID NO: 123562 - DNA, 107 bp, Homo sapiens; identical to SEQ ID NO: 9273
  chr13:28636039-28636146
  hyper

SEQ ID NO: 123563 - DNA, 30 bp, Homo sapiens; identical to SEQ ID NO: 9274
  chr13:28644712-28644742
  hyper

SEQ ID NO: 123564 - DNA, 30 bp, Homo sapiens
  chr13:28673746-28673776
  hyper
acctaggacagggaccggagctgccgggca

SEQ ID NO: 123565 - DNA, 170 bp, Homo sapiens; identical to SEQ ID NO: 9275
  chr13:28674056-28674226
  hyper

SEQ ID NO: 123566 - DNA, 470 bp, Homo sapiens; identical to SEQ ID NO: 9276
  chr13:28674720-28675190
  hyper

SEQ ID NO: 123567 - DNA, 225 bp, Homo sapiens
  chr13:28712327-28712552
  hyper
acgcgcagcggcgacggccgtctcaggaagaggaaaatggaataaacaactcggaggaaccagagcgcgagagagcgagtggaggcagaatttaaaaataaaccggcccctccgccttccccacccgcttgccgctgccgctccctcttcccctgcccgcgccctcgaagtccccgtctgggcccgcgcgctcaccccgtcgtcccgcgcggcccctttaagaaa

SEQ ID NO: 123568 - DNA, 30 bp, Homo sapiens
  chr13:28712935-28712965
  hyper
tactgccgctactacgctaaggataagact

SEQ ID NO: 123569 - DNA, 30 bp, Homo sapiens
  chr13:28713296-28713326
  hyper
acgggagctgagcacggcccgcgggctccc

SEQ ID NO: 123570 - DNA, 30 bp, Homo sapiens; identical to SEQ ID NO: 50495
  chr13:28713752-28713782
  hyper

SEQ ID NO: 123571 - DNA, 1163 bp, Homo sapiens
  chr13:29067822-29068985
  hyper
cgaggcacaaatctccgccactcagccccactgagcagagactgcgagtccgaaccctcaagttcctcggggctttgacccctcaatggcggcggtctaactgctggtaaaacccccggcccctgactgttccaccgcccgtctcccaaacgcccagcgaaggctgacttaggtggcgggcggacctcatcgattcctcaaaccacatcgtttggtcaaaatcgcccgccctctcttcgctcggattttaaaggctaggcttgtaagtcagtaagttaacggtatttgggccctgggctgcccttgtgggtcagggtcactgatgtccgcgacacggactggaccgcgcaccacgcctgctcccggcagaggccccacccgggtggctgagcgcagcgcactggggccccgcggtccgagagcggcggggaggagcgggcgctcgccgagcgttccccgggacagtccggcttggggactcaagcgggtcatgggatgccggcgctggccctctcctgagatcctcctgctcccccgcaggcacgagtcccctccaaatcggctcccctcctacactctcgtgacgcgaggtcgcggccagtgcccaatatcaccaaagtcccggcctcagcccagccccgggcagcctggcaggctttcaggagcctctgctcccggctccgggggaccctgcgtacctgccccaggtcctctgggaatgggctctgggtgccaggcaggtcccggtgcgtgctgctcctagtgcccagggcctcggcagtgagaccccaacccgacagctggataagggatcagcgatcctgtcgcaaacggacagccccagcgcggacccggtctgagcgctgatgctcgcgggtccaggccagccactcctcgaggcgctccctcggagaaagggcgcagcggccccaagcgtgcccgctgcaactagtgtcccaggttctcgccgtagccagcttctccgggctacagcctcgtctccccgcgtgcaccccgccctggcctcggaggctctgccctccggccgccccatcgcagcccgcctcaggccccggcccccagccgcgcctcacctgtgagaagcagacagctgagcagcgcgcacagcaggaccccggtgtcccagtagctgaccatggtga

SEQ ID NO: 123572 - DNA, 916 bp, Homo sapiens; identical to SEQ ID NO: 9278
  chr13:29068993-29069909
  hyper

SEQ ID NO: 123573 - DNA, 203 bp, Homo sapiens
  chr13:29105478-29105681
  hyper
tcccggggtgtgtgcggattctcaataaaaagggaaaagcacgatccaagttaattttccagcgccgacaggaaatgctgtttcctgcatcgtacaacgctggtgccaacaagactgacacaggagcccattgtcccgcgaacaatgtggcgatggggaaggacgcctgagaaaacagaccccggccccgtgagcgcgtttgt

SEQ ID NO: 123574 - DNA, 512 bp, Homo sapiens; identical to SEQ ID NO: 50499
  chr13:29106302-29106814
  hyper

SEQ ID NO: 123575 - DNA, 165 bp, Homo sapiens; identical to SEQ ID NO: 9280
  chr13:29106898-29107063
  hyper

SEQ ID NO: 123576 - DNA, 57 bp, Homo sapiens; identical to SEQ ID NO: 9281
  chr13:29107252-29107309
  hyper

SEQ ID NO: 123577 - DNA, 35 bp, Homo sapiens
  chr13:29233056-29233091
  hyper
cctcccctcaggcacgtctcgtcccgacccctccc

SEQ ID NO: 123578 - DNA, 30 bp, Homo sapiens; identical to SEQ ID NO: 9283
  chr13:29283831-29283861
  hyper

SEQ ID NO: 123579 - DNA, 1128 bp, Homo sapiens; identical to SEQ ID NO: 9284
  chr13:29292470-29293598
  hyper

SEQ ID NO: 123580 - DNA, 315 bp, Homo sapiens; identical to SEQ ID NO: 50505
  chr13:29393538-29393853
  hyper

SEQ ID NO: 123581 - DNA, 118 bp, Homo sapiens
  chr13:29394329-29394447
  hyper
gggagcgcctgggcgtcgtgcgggcggctccggtccccggctgcgccccggccctcgagcgggggcggcggcctgggcggtgcctgcgccgaggtgagtgcgggggcgcggagcggag

SEQ ID NO: 123582 - DNA, 366 bp, Homo sapiens
  chr13:29394546-29394912
  hyper
cggctctcagggcaagtttatctccccccttctgcggaaacccttgaccgcttagcggagtacagacctgtcggtaaatagaaaactcgagctggagaggaggaggaagcagcgtggcggaacccggcccgagatgagcgtctccgtgagggcagtggtggcctcttggacattacatctttcttggctctttttgacccaggtgagcgaatcctctgctgcgcggtccggtggggtcggctggctctgctgccgccctctggacccgccggagacaggtgagcggagttggggagcgcgcagccgggctcggggcagcgccgggctggttcggcttctcgtctccagagcgctgatgcttcctgc

SEQ ID NO: 123583 - DNA, 216 bp, Homo sapiens; identical to SEQ ID NO: 50507
  chr13:30002456-30002672
  hyper

SEQ ID NO: 123584 - DNA, 30 bp, Homo sapiens
  chr13:30170114-30170144
  hyper
atctgagcgcaccgcgccacagcatcctgt

SEQ ID NO: 123585 - DNA, 30 bp, Homo sapiens
  chr13:30424266-30424296
  hyper
cgggggcgaagagccgggccgcggaaaccc

SEQ ID NO: 123586 - DNA, 141 bp, Homo sapiens
  chr13:30424806-30424947
  hyper
cctcgtcctccctccgcggacaccaagtgcgtcaccacggagaccattccctcgagcatcacgggaagtgtagtctacgagggtgggggggggagggagccgccgaacgcctcctcacccagctccgaagccacgcccccc

SEQ ID NO: 123587 - DNA, 30 bp, Homo sapiens; identical to SEQ ID NO: 50509
  chr13:30688850-30688880
  hyper

SEQ ID NO: 123588 - DNA, 226 bp, Homo sapiens
  chr13:30880885-30881111
  hyper
gtgtgacatacatacggttctgcaccgaaaggcagcaacctgcgagggtcagaggcgccgaagacccgaggccctgcagcttgggcggctgctcatccctgagactgtgcagggcggtggcccagccggggtggggctgagcgctgcaactggggcgggcccagctacagggcgggaagcccgaggctcacctccacttccctttcccaacgcacagagcccaggt

SEQ ID NO: 123589 - DNA, 30 bp, Homo sapiens; identical to SEQ ID NO: 50511
  chr13:30881422-30881452
  hyper

SEQ ID NO: 123590 - DNA, 30 bp, Homo sapiens; identical to SEQ ID NO: 50512
  chr13:30881676-30881706
  hyper

SEQ ID NO: 123591 - DNA, 391 bp, Homo sapiens
  chr13:30982477-30982868
  hyper
tgcaaaggagaagcgcgtgcagtcccggcgcggcccgctctgctcagttctccagggcgggccttggcctggactgcgtgtcgggaggactcgcgggccccgcattgccgcatgccaccggcaggtgtctctttcctggcttgggaacctattgtgagttcaccaaatggaggcgcgaggaggagggggcgggcaggggaggggcgccgagagccggagcgggcaccgccccctgcctgcccgctccccgagcgcaccgcggcccagccacgaggctgccggtcctcacctttgaaacgccggcagctgcgcgcgctgcggcaggcgcggagaggagccacctcgtcacgtggggaggaaatgccttgccggcctccaaacctactggctc

SEQ ID NO: 123592 - DNA, 30 bp, Homo sapiens; identical to SEQ ID NO: 50514
  chr13:30995671-30995701
  hyper

SEQ ID NO: 123593 - DNA, 19 bp, Homo sapiens
  chr13:31019964-31019983
  hyper
cagctggctggcttcccgg

SEQ ID NO: 123594 - DNA, 30 bp, Homo sapiens; identical to SEQ ID NO: 50516
  chr13:31039577-31039607
  hyper

SEQ ID NO: 123595 - DNA, 237 bp, Homo sapiens; identical to SEQ ID NO: 50517
  chr13:31039901-31040138
  hyper

SEQ ID NO: 123596 - DNA, 174 bp, Homo sapiens
  chr13:31191665-31191839
  hyper
gctcgcgcggaccacggaacagcgacgcgcaagcaggtctctttcgtcagcgtaatccctccgcagaaagccgcgcactagttttaatcacgccccaccccctggccgctggcgccacctccgccactcgggcgctttccagcagcttccagaaacgtcgcctccccaaaccca

SEQ ID NO: 123597 - DNA, 30 bp, Homo sapiens; identical to SEQ ID NO: 50518
  chr13:31248213-31248243
  hyper

SEQ ID NO: 123598 - DNA, 30 bp, Homo sapiens
  chr13:31248621-31248651
  hyper
ggagggaagaaccacgtgctgtacaggttt

SEQ ID NO: 123599 - DNA, 15 bp, Homo sapiens
  chr13:31272127-31272142
  hyper
aagaccctggcatac

SEQ ID NO: 123600 - DNA, 30 bp, Homo sapiens
  chr13:31735095-31735125
  hyper
cttccagttcatttcgagattcacaatgcg

SEQ ID NO: 123601 - DNA, 30 bp, Homo sapiens; identical to SEQ ID NO: 50519
  chr13:31736222-31736252
  hyper

SEQ ID NO: 123602 - DNA, 30 bp, Homo sapiens; identical to SEQ ID NO: 50520
  chr13:31736623-31736653
  hyper

SEQ ID NO: 123603 - DNA, 30 bp, Homo sapiens
  chr13:31774507-31774537
  hyper
cgctcggcccctttcggtcttgggtccccg

SEQ ID NO: 123604 - DNA, 30 bp, Homo sapiens; identical to SEQ ID NO: 50521
  chr13:31774853-31774883
  hyper

SEQ ID NO: 123605 - DNA, 30 bp, Homo sapiens
  chr13:31996796-31996826
  hyper
taaagtgtcagggtacggcgttaagggcat

SEQ ID NO: 123606 - DNA, 30 bp, Homo sapiens
  chr13:32420464-32420494
  hyper
ctttcctgggcttccgtgagaaacgaattt

SEQ ID NO: 123607 - DNA, 30 bp, Homo sapiens
  chr13:32420805-32420835
  hyper
aatcggggtggcggcgcgtccttggagggt

SEQ ID NO: 123608 - DNA, 296 bp, Homo sapiens; identical to SEQ ID NO: 50522
  chr13:32605028-32605324
  hyper

SEQ ID NO: 123609 - DNA, 181 bp, Homo sapiens; identical to SEQ ID NO: 9289
  chr13:32605442-32605623
  hyper

SEQ ID NO: 123610 - DNA, 299 bp, Homo sapiens; identical to SEQ ID NO: 9290
  chr13:32605674-32605973
  hyper

SEQ ID NO: 123611 - DNA, 304 bp, Homo sapiens
  chr13:32889500-32889804
  hyper
aaggaatttcctttcgccacactgagaaatacccgcagcggcccacccaggcctgacttccgggtggtgcgtgtgctgcgtgtcgcgtcacggcgtcacgtggccagcgcgggcttgtggcgcgagcttctgaaactaggcggcagaggcggagccgctgtggcactgctgcgcctctgctgcgcctcgggtgtcttttgcggcggtgggtcgccgccgggagaagcgtgaggggacagatttgtgaccggcgcggtttttgtcagcttactccggccaaaaaagaactgcacctctggagcgg

SEQ ID NO: 123612 - DNA, 107 bp, Homo sapiens; identical to SEQ ID NO: 50526
  chr13:32890557-32890664
  hyper

SEQ ID NO: 123613 - DNA, 250 bp, Homo sapiens; identical to SEQ ID NO: 50527
  chr13:32893212-32893462
  hyper

SEQ ID NO: 123614 - DNA, 110 bp, Homo sapiens; identical to SEQ ID NO: 50528
  chr13:32899211-32899321
  hyper

SEQ ID NO: 123615 - DNA, 183 bp, Homo sapiens; identical to SEQ ID NO: 50529
  chr13:32900236-32900419
  hyper

SEQ ID NO: 123616 - DNA, 116 bp, Homo sapiens; identical to SEQ ID NO: 50530
  chr13:32900634-32900750
  hyper

SEQ ID NO: 123617 - DNA, 51 bp, Homo sapiens; identical to SEQ ID NO: 50531
  chr13:32903578-32903629
  hyper

SEQ ID NO: 123618 - DNA, 160 bp, Homo sapiens; identical to SEQ ID NO: 50532
  chr13:32905054-32905214
  hyper

SEQ ID NO: 123619 - DNA, 1117 bp, Homo sapiens; identical to SEQ ID NO: 50533
  chr13:32906407-32907524
  hyper

SEQ ID NO: 123620 - DNA, 4933 bp, Homo sapiens; identical to SEQ ID NO: 50534
  chr13:32910400-32915333
  hyper

SEQ ID NO: 123621 - DNA, 97 bp, Homo sapiens; identical to SEQ ID NO: 50535
  chr13:32918693-32918790
  hyper

SEQ ID NO: 123622 - DNA, 71 bp, Homo sapiens; identical to SEQ ID NO: 50536
  chr13:32920962-32921033
  hyper

SEQ ID NO: 123623 - DNA, 429 bp, Homo sapiens; identical to SEQ ID NO: 50537
  chr13:32928996-32929425
  hyper

SEQ ID NO: 123624 - DNA, 183 bp, Homo sapiens; identical to SEQ ID NO: 50538
  chr13:32930563-32930746
  hyper

SEQ ID NO: 123625 - DNA, 189 bp, Homo sapiens; identical to SEQ ID NO: 50539
  chr13:32931877-32932066
  hyper

SEQ ID NO: 123626 - DNA, 172 bp, Homo sapiens; identical to SEQ ID NO: 50540
  chr13:32936658-32936830
  hyper

SEQ ID NO: 123627 - DNA, 356 bp, Homo sapiens; identical to SEQ ID NO: 50541
  chr13:32937314-32937670
  hyper

SEQ ID NO: 123628 - DNA, 157 bp, Homo sapiens; identical to SEQ ID NO: 50542
  chr13:32944537-32944694
  hyper

SEQ ID NO: 123629 - DNA, 146 bp, Homo sapiens; identical to SEQ ID NO: 50543
  chr13:32945091-32945237
  hyper

SEQ ID NO: 123630 - DNA, 123 bp, Homo sapiens; identical to SEQ ID NO: 50544
  chr13:32950805-32950928
  hyper

SEQ ID NO: 123631 - DNA, 200 bp, Homo sapiens; identical to SEQ ID NO: 50545
  chr13:32953452-32953652
  hyper

SEQ ID NO: 123632 - DNA, 397 bp, Homo sapiens; identical to SEQ ID NO: 50546
  chr13:32953885-32954282
  hyper

SEQ ID NO: 123633 - DNA, 246 bp, Homo sapiens; identical to SEQ ID NO: 50547
  chr13:32968824-32969070
  hyper

SEQ ID NO: 123634 - DNA, 148 bp, Homo sapiens; identical to SEQ ID NO: 50548
  chr13:32971033-32971181
  hyper

SEQ ID NO: 123635 - DNA, 877 bp, Homo sapiens; identical to SEQ ID NO: 50549
  chr13:32972297-32973174
  hyper

SEQ ID NO: 123636 - DNA, 516 bp, Homo sapiens; identical to SEQ ID NO: 50550
  chr13:32973293-32973809
  hyper

SEQ ID NO: 123637 - DNA, 553 bp, Homo sapiens
  chr13:33000876-33001429
  hyper
actgaacagctactacgtgccagacaatgtgcttggcagggtaagacatggctcctaccttcaagaaacttacagaaggataagaaaaaccatgtgcaaaaaagtaagcacagtcacgtaggtataaacaggaagccaaggagcccagaagaggggcatatactggcggggtgggatagctgcccggtcttaaaaggcaaaagaaggcgggagggcaagccaggcaggaaggccagcgtcaaggagagaagcggcttggtttacaggagataaaaacagttcgaagttgctggaacatcaagcgcaaggcagggagcggtgggagttcaggctggagcggtggggcctagcaaggtggccacaggcacaagcccgcgtaattcccagaggttgggtaccggagggccgcttacgcaattcgcaagtgaacgaatttgggcgcccatggcgaggctctgtcagtgacggtcggtggtggcgccgccagccagccccccgcccccgtgcacctgtgcgccttcgcagctgccaaagcaaacgcaggctccccgac

SEQ ID NO: 123638 - DNA, 432 bp, Homo sapiens
  chr13:33001995-33002427
  hyper
ggtggccccgggcccgtgcaccggcgcccagaccgctgtcattacctggccagtgtagttttcccggagcccgggaggcctcgcaggaggtagaggtgtttcctaaagctgtggcggcgaggaggtgtcccccgcgggggcggccggggcggccgctgccgctgctgctgctgctggggctggaggctcagcctcccaaaagattgaaggaaactgtcctccatgggcaggagggctggctgcgagagccccgggttccctttactgaagtcacggtcttggccaaagctgttgtttttgtgactctccggccatgtgatggatagaggggcgggcgctgggagcccagcccctcctttccacccgccggaaccgtgctgcgtgggagggggcgtccctacctggaaagctggggacgctgggagactcaca

SEQ ID NO: 123639 - DNA, 30 bp, Homo sapiens
  chr13:33160351-33160381
  hyper
agctgcccttctcgcgggccccgcggcggc

SEQ ID NO: 123640 - DNA, 30 bp, Homo sapiens
  chr13:33161726-33161756
  hyper
gaaacgccgcccctcgccttcggagctgca

SEQ ID NO: 123641 - DNA, 31 bp, Homo sapiens; identical to SEQ ID NO: 9291
  chr13:33162267-33162298
  hyper

SEQ ID NO: 123642 - DNA, 671 bp, Homo sapiens
  chr13:33589986-33590657
  hyper
cctttcagcgcacggcgaagttccccctcggctgtcccacctggcagtccctctaggatttcggccagtccctaattggctccagcaatgtccagccggagcttctttgggcctccgagtgggagaaaagtgagagcaggtgcttccccagcggcgcgctccgctagggcccggcaggatcccgcccccaagtcggggaaagttggtcggcgccttttctccccgacgaagccgctccagggctgctctcagaggacgcgcggcaggcaaagagaatgaacctgagcgtccacgaaacgtcctgcacggctcccgggagctgggagaaacaggtgcctttctccgacgtccgcgggcgacgcctgccgcaccttgcccgctgccgcgcccctcccgggcacccctcgccctcggcgcccctgcccccgcccccagtgccagggcggaggcagtcccggctcgcaggtaattattgccagcggagcccgccggggagcgggggtgggcgcgccggcggtgggcgggcgggcgcggcggggcgcgggcataaaggggcgcggcgcggggccccggagcctggctcccgcgcagcatgcccgccagcgccccgccgcgccgcccgcggccgccgccgccgtcgctgtcgctgctgctggtgctgctgggcctgg

SEQ ID NO: 123643 - DNA, 440 bp, Homo sapiens
  chr13:33591066-33591506
  hyper
cgtccccaaccgcgaggggctgcgctactaccggcgcctgctggagcggctgcgggagctgggcgtgcagcccgtggtcaccctgtaccactgggacctgccccagcgcctgcaggacgcctacggcggctgggccaaccgcgccctggccgaccacttcagggattacgcggagctctgcttccgccacttcggcggtcaggtcaagtactggatcaccatcgacaacccctacgtggtggcctggcacggctacgccaccgggcgcctggcccccggcatccggggcagcccgcggctcgggtacctggtggcgcacaacctcctcctggtgagtgcgaggggccaggcggagggccacgcaggggagacagagggcctccacaggggccagggggaagtgtgggaactgagtctcccccagacgaggcttcacttgg

SEQ ID NO: 123644 - DNA, 530 bp, Homo sapiens; identical to SEQ ID NO: 50556
  chr13:33924390-33924920
  hyper

SEQ ID NO: 123645 - DNA, 30 bp, Homo sapiens
  chr13:34116807-34116837
  hyper
gccccgccctcacgcgggaaccctccagaa

SEQ ID NO: 123646 - DNA, 30 bp, Homo sapiens
  chr13:34392118-34392148
  hyper
agagggcatcgacgcggcagctgattttgt

SEQ ID NO: 123647 - DNA, 30 bp, Homo sapiens
  chr13:35515957-35515987
  hyper
ctagggagggcaggcggacaggactgcgag

SEQ ID NO: 123648 - DNA, 795 bp, Homo sapiens
  chr13:35516208-35517003
  hyper
gccactacccgccccgcctctgccagcttgccccagtgtctggcagcagtccccatgcacctgctcacctgtctatccgttcggggtggttgggggagggacgaggggtgtcggggtgggtgggtgggaagagaaggagggcagggcaaaagagggggtgcaccgagggctccgcccccccggaggctgtgcgcaggcgcagtggctgctaccgcaggcagggggcggcaacatggcggagtgagcggcggcgtcggggcttcacaacaacagtggtggccgtagcagcggcggcagcagcgtcaatagcatcggccacagcctgagcttcagcaccggccagcgtcgtggccagctgctcgcgtcctcgggcttctcggagcggctgcagcatctccgcggggggcgggccgggccggacagaccgggagagggagagagcagaggcagcggcggcggcagcggcagcggcagcggcacacctgctgggcgggcacagccgcttgcccggcagcggttagcggtaccgccaccgccgagaataagcctgcggatcccccgccgcctccgcgggggagagcgccggagcgggccgggctgaggcgcaggcggggagcgggcccggcgccgcggcgctggtggatgctggggctccgaggcgacggccggggggcgggggccgaggcaggtataacggtaccggcggcggcagcgccgctgctcttcccttctcctcaggaggggggccaatggctagcgagaagccgggcccgggcccggggctcgagcctcagc

SEQ ID NO: 123649 - DNA, 320 bp, Homo sapiens; identical to SEQ ID NO: 50558
  chr13:35517052-35517372
  hyper

SEQ ID NO: 123650 - DNA, 123 bp, Homo sapiens
  chr13:35517409-35517532
  hyper
cgcgctgctagagccacgccacctccctcctctcctctttctggtcctctcctgccacctgagcgcagtgcccaacttaacaccgcttcttctcactttttaggaccgcgagtaacccagtac

SEQ ID NO: 123651 - DNA, 32 bp, Homo sapiens
  chr13:36044870-36044902
  hyper
ggattcggaggagggcgcgggaggcaggaggc

SEQ ID NO: 123652 - DNA, 1014 bp, Homo sapiens
  chr13:36704551-36705565
  hyper
atccaggagcaattccgcgcaaacctggttttcaaaagcagcctcttttgtggggcattgcggggctgtgcgtgcgctcccactaggaggaaaaaatgccatttcctctccgcaagcttttagcactgcaggtactaatttgaacatgaggcagcctcgctgtccctgaaggaacttgagaccctgcaaacgtacttgcaacacccacgctgcagccaccaccacgcacgaatcgaccccatccacaagcacacatcactggcccgggcacacggaaaagcacacacacaataagaggccgggcccggccactccttccttggttcccgctccgcagccagttctgacaatgacaagcacctctcccagctcctccgccctggctctccatctccactaacaacgcgaaaagcctgggagggcccgctcgcctgactccaggtttaaagccccatggcaccaaacaaaagaggcaggtgccagcagccccggggccgcccgcacgcaacgcccccgggtcgggccaggctggccagggcagggcggccgcctttcgaggaactgcgggcggggcggcggggccaagctgagcgcccgccctgccctcggcgccccgcggctgcgggcggagcgggctctgcggagtcccccggccgccctccccgcagctcccgtccccagggaaggcaaaccacgcaccggtccgcggagagacgccgccgggggtctttgtggccgcgctgggggccgcctcctggtgctgtcctcgccgggctgggcgcggccggggctgcggggctgcagggctggggggcggcggcggggccgggctgggcggcagcagctgctggagcgcggcgcctcggttgcggccactagtgcagggatgtgcctcggcccgtcctcattgaaatgcggcgcttcgcacagcctcactccagcctctctctccagaggagggcggcggcggcggcggcggcgggcgcgctcccttttcttgtctcactcgctcac

SEQ ID NO: 123653 - DNA, 106 bp, Homo sapiens; identical to SEQ ID NO: 50561
  chr13:36705621-36705727
  hyper

SEQ ID NO: 123654 - DNA, 98 bp, Homo sapiens; identical to SEQ ID NO: 50562
  chr13:36729246-36729344
  hyper

SEQ ID NO: 123655 - DNA, 373 bp, Homo sapiens; identical to SEQ ID NO: 50563
  chr13:36919850-36920223
  hyper

SEQ ID NO: 123656 - DNA, 120 bp, Homo sapiens; identical to SEQ ID NO: 9300
  chr13:36920266-36920386
  hyper

SEQ ID NO: 123657 - DNA, 560 bp, Homo sapiens; identical to SEQ ID NO: 9301
  chr13:36920464-36921024
  hyper

SEQ ID NO: 123658 - DNA, 515 bp, Homo sapiens
  chr13:37004573-37005088
  hyper
aaaagtggatcaaaacgacaggttccacgaacaaacactgcgccggcgcctctactttggagaaaaggaaaagggcgtgaggtttcggtcatttttgtcaaaggaaatcagatgaaaaggggtgtacaaaggaccaggtctcgtgagcgcagccaatcttgtccgctcccaagcgactcaggctcttggcaggacttgctgtagagtcccagacggagttagccactgagtccttcagcgacccaggaaataacaacactgttggcaggtgggggagggcgcccgggaagatatccaatagtggcgtcaggcaagaggacagaaatgctcctttcattcacctttcgaagcagagcatttggtccccgttggcctctgactctctgttgcggcaatctagatgttaccagaattcccgtgtttccttcatattcaaaggcacaggaaatctggggtgcaagcggactgctgtctctcaaggaatagaagtctgtgacaaacgtatagaaatgagt

SEQ ID NO: 123659 - DNA, 150 bp, Homo sapiens; identical to SEQ ID NO: 9303
  chr13:37005430-37005580
  hyper

SEQ ID NO: 123660 - DNA, 163 bp, Homo sapiens; identical to SEQ ID NO: 9304
  chr13:37005899-37006062
  hyper

SEQ ID NO: 123661 - DNA, 224 bp, Homo sapiens; identical to SEQ ID NO: 9305
  chr13:37006433-37006657
  hyper

SEQ ID NO: 123662 - DNA, 64 bp, Homo sapiens; identical to SEQ ID NO: 50570
  chr13:37006733-37006797
  hyper

SEQ ID NO: 123663 - DNA, 214 bp, Homo sapiens
  chr13:37247934-37248148
  hyper
cagatgggctccctgcgcaacgcctcctcgtcctccgagattttccaatggtggcgcaagctcctccctcgcccgagctgggcgccgtcctagagccaagcgcccgctagagccgagactagggggcggtgaggagtgggacccgctcgcggccattggttgtgcggccaggaggggcggagggacgacgcgcgggctgtgcggggccggcagc

SEQ ID NO: 123664 - DNA, 699 bp, Homo sapiens; identical to SEQ ID NO: 50572
  chr13:37248294-37248993
  hyper

SEQ ID NO: 123665 - DNA, 22 bp, Homo sapiens
  chr13:37249039-37249061
  hyper
cgggtctgatgagacactggaa

SEQ ID NO: 123666 - DNA, 30 bp, Homo sapiens; identical to SEQ ID NO: 50574
  chr13:37357329-37357359
  hyper

SEQ ID NO: 123667 - DNA, 305 bp, Homo sapiens
  chr13:37393231-37393536
  hyper
gaaggggccgcggccgcacatgcgcagtcagtcccgttggttgtgcgctcagccccgcccccagaggcgccgcgctccctgacagcccgcgggcgtacacacgctgacgcgcaggctgcggtcgcgcaggcgcagtcggggcgccttcccggtataggcgccttttaccccagcgtgtcctgagtctttggttcgcgaagtgccgttaggccaagcaggtgctaaaagcccggggtcgtggaccccggccaggtcttagcagcatggaggcgcagggtgtagcggagggcgcggggccgggcgcc

SEQ ID NO: 123668 - DNA, 265 bp, Homo sapiens
  chr13:37493430-37493695
  hyper
cgatcacaaagctggcgtcaggcagtctcctgtatctgcttcccacctcgccccctcccctctgcggagagctggcaccgaggggcgggccaaggaaaagacaaacaccccggctccgacacagtccaagcgcgagcccggagacacttcaacaacattcctaactttttttctcagttcgcatgcctcaaaggtaaacaaagcaaaaagcctacgaaacagaaggcaagtgaggccaattcggcgctggcgagtttaaaagtgg

SEQ ID NO: 123669 - DNA, 154 bp, Homo sapiens
  chr13:37493902-37494056
  hyper
gaaggcgagctgcgccgcggccaactccccagagcagtcccctccggccccgcgcccaccccaccccaccccactccaccccagacaggctccaccaaaaaacccgggaacaacgaccgccaaaagccaagcctcacgccgaggagcctcccag

SEQ ID NO: 123670 - DNA, 62 bp, Homo sapiens
  chr13:37572854-37572916
  hyper
gtctcatcgatccacgcatttattcccatttgtaacagatggctgccgtcaaggctccgtca

SEQ ID NO: 123671 - DNA, 120 bp, Homo sapiens; identical to SEQ ID NO: 50577
  chr13:37574642-37574762
  hyper

SEQ ID NO: 123672 - DNA, 30 bp, Homo sapiens
  chr13:37574989-37575019
  hyper
tgtaccctggcggacggcagcttcctttaa

SEQ ID NO: 123673 - DNA, 30 bp, Homo sapiens
  chr13:37633381-37633411
  hyper
gacaccaagaaaaccgccttcgaagacacg

SEQ ID NO: 123674 - DNA, 30 bp, Homo sapiens
  chr13:37633950-37633980
  hyper
gtccgggcgggaggcggggcccaggatctc

SEQ ID NO: 123675 - DNA, 156 bp, Homo sapiens
  chr13:38443275-38443431
  hyper
ccctactttaagtgccggagagctaaggcctcacttatatgcacccagatgcccccgagatctccattttccccaaatgcataaaaggctaaaaacggccacattccccagcaccacggcgtggctgcagctcctttgtttaccatataagtcaca

SEQ ID NO: 123676 - DNA, 236 bp, Homo sapiens; identical to SEQ ID NO: 50579
  chr13:38443479-38443715
  hyper

SEQ ID NO: 123677 - DNA, 142 bp, Homo sapiens
  chr13:38443934-38444076
  hyper
cgaagccatgggaggcgggggaggggcggcccgggagggggaggtaaccgccaggggaggagaacctctcccacccccgcctgcacagatccctctggataaagttaagagttcccacggctgacagcggatgagcccagag

SEQ ID NO: 123678 - DNA, 30 bp, Homo sapiens
  chr13:38444474-38444504
  hyper
agcacccatgaggcccgccgcccgaccgga

SEQ ID NO: 123679 - DNA, 36 bp, Homo sapiens
  chr13:38923589-38923625
  hyper
tagaaactttagagcgcgtccgccccagccccgccc

SEQ ID NO: 123680 - DNA, 30 bp, Homo sapiens; identical to SEQ ID NO: 50582
  chr13:38924123-38924153
  hyper

SEQ ID NO: 123681 - DNA, 139 bp, Homo sapiens
  chr13:38924353-38924492
  hyper
tgcgaggagaggtccgtacttgctcgctaagtgtcagcttggcagcttggccccgtcacgagggtgtgggtgtgtttctgattagtgacctcccctcggaattcatttggtgggcaggtggcgcgggaggacaggtgga

SEQ ID NO: 123682 - DNA, 1381 bp, Homo sapiens
  chr13:39260401-39261782
  hyper
ctaccctaacagagtcggatttgggagcgcctggggccacattccctagaatttattctttggtgcaagactagcaattctgatcagactgcatttctcacgcattccaaatgccctttttcccttttactctgtgaacctcggttgcaaaggaggggcttgttaaaaactcaccaatcggaggactgtgcccattgtaattcacgaggagaaggcagcgtctgggcgcgccgaagggggctgggctggagtgcaacctgctctagctatggcttttaattccagctgtccttttgcaaatatgccccagaatttcttctcaaacgctctgggtttcgcttcaaactcaaaaagcattgcgtctaactttcccctgggtttgcaagtttccttgggaaatggccatgccctgcgcgggatttcattgactagggcggaggggtgggggtggctaaaatgggtaaccctcggtcgccggcagatgaagtgaacccagcacagcagtgtgttccggctcctctgcaggagtaccagatctattaatagcagcccagagagtagcgcaagcaggggtgggcaactcctggccacttcttccctcacttccaggacaacctgttgcgcctctatctcctcccctccccgcagtttccccgccttggcctctaagagctgattggcagaaattactacccaaccctcagctccgcacctcctcccccgaccaacgattggccacctgggaggactggagtaaggggtgcgagcggagggatttccctcaaagcccagggtccggggacctggaaagtagaagtggagggattcaattctccgcgcgattgaggcgctagcggcggagctggacggcctgggaaggcttcggctcctcggctgcggctccagcccggacggcgccgcgcaactttgccatccttctggcccagccccggctacaggaggaccccgcgggcaacgcgcggagttcctggcacttcccggcggtgtctcttgttgtctgcccggggaccgacttcgcatgctctcaggctgacctgtccaagcccgaacaccgggaccatgcactcagccgggactcccgggttatcctcgcgccggacaggcaactccaccagctttcaaccaggaccgccaccgccgccccggctgctgctgctgctgctgcttctcctgtcactggtaagccgcgtcccggcacagcccgctgccttcggcagggcgttgctgtcccctggtctcgcgggggctgcaggggtccctgctgaggaggccatagtgctggcgaaccgcggactccgggtgcctttcggccgtgaagtctggctggatcccctgcatgacctggtgttgcaggtgcagc

SEQ ID NO: 123683 - DNA, 101 bp, Homo sapiens; identical to SEQ ID NO: 50586
  chr13:39261928-39262029
  hyper

SEQ ID NO: 123684 - DNA, 76 bp, Homo sapiens
  chr13:39262129-39262205
  hyper
cgcgtgggcatcctgtccggcttgggcgcgctgcctcgctatggagaactcctccactacccgcaggtccctggag

SEQ ID NO: 123685 - DNA, 102 bp, Homo sapiens; identical to SEQ ID NO: 50588
  chr13:39610512-39610614
  hyper

SEQ ID NO: 123686 - DNA, 346 bp, Homo sapiens; identical to SEQ ID NO: 9310
  chr13:39610816-39611162
  hyper

SEQ ID NO: 123687 - DNA, 30 bp, Homo sapiens
  chr13:39611439-39611469
  hyper
ctggtctgctccgccgatagtaaaaaatat

SEQ ID NO: 123688 - DNA, 34 bp, Homo sapiens; identical to SEQ ID NO: 9311
  chr13:39612008-39612042
  hyper

SEQ ID NO: 123689 - DNA, 30 bp, Homo sapiens
  chr13:39612050-39612080
  hyper
ggcgaagaggggcacggcctcgcatagggg

SEQ ID NO: 123690 - DNA, 121 bp, Homo sapiens
  chr13:39612312-39612433
  hyper
ttcccgaagcctagcggtcattattttgaatgtcatccccaccatacctcgtgtctgagtgtgcgatgttttgattttgccctctggattaaaaagaataaatggcgagcgattaaggcat

SEQ ID NO: 123691 - DNA, 30 bp, Homo sapiens; identical to SEQ ID NO: 50591
  chr13:39612905-39612935
  hyper

SEQ ID NO: 123692 - DNA, 30 bp, Homo sapiens
  chr13:39613312-39613342
  hyper
agaaaattctttaccggctggatgtgggtt

SEQ ID NO: 123693 - DNA, 1234 bp, Homo sapiens
  chr13:40176534-40177768
  hyper
actcaaacgggaggtcggctactacttttttttctaatcttgtcaactgcagtcagggctgaagttgatctatctgggccacgaggctggggaagaccagcagggggtggcctgcgggcagggggcccccatctccaactgcggtgaggcgccctcgccaagacaagcccatatttagccccctgccattgcctcaccgagccactccacccatggagacacacaatgatccctccattctaaaagggggcaagaggcattttccagccggctctggacgaagggaggggataaggatgggaaggcagcaccccccggaggcagacgccaagagcggacgcggctggcaggcagagccgacggatccgccgagctcaggaagtccggagcccgggagcagcccaactccggctccggggcagagagggagcccgggagaaagcagcggagcccacgcccacggggcagccgagtgatttacttacatggctggcgggcggcggccaccttccctcccgcgtcccgggcgcacacacaacttgctgtctttctcgggcgggaacatccacgggaaaccggaccgtcctgcccttctttgcctctgtccctaacagccgcagaaccccggggcccgacctggaagagcaggggttggcaggaggcggagggtctccagaagcgggctggcaccagcggagacccccactcccggcgagtccgcggcggcagctctggcggagcgctgtgggcgcgcgcgggcgccggggatcgcacgcagaggagcggatctccctttggcaggcgaggcacgcaccgcctcctcccctccgctgcccggccctcctctttctccagtcccctcccctcgcgccccggggaactccgcgcagacagacccaggacgcaccggggacgttcctggagcgccgggaagggagtgggggggtgccccgctgtccgcgcgggtccaggcccacccccgggggcagctttcgcggctcctcccctagccccgagccccctcgcgccccctctccctgcgtctcattcaaagctgagtggggaaggcagacagaccgagaagtatgggagaaagttgcttgtcttcctgggtgaccccgaggagccacggaagatgacacactttgcctgttggggcttttctgggtttactgttcgggtttatgctcctgttttcctgccgccgttaaaagaagccgtagacgggaaagag

SEQ ID NO: 123694 - DNA, 254 bp, Homo sapiens; identical to SEQ ID NO: 50594
  chr13:40976491-40976745
  hyper

SEQ ID NO: 123695 - DNA, 284 bp, Homo sapiens
  chr13:41238385-41238669
  hyper
gcgacagagcgagactccgtctcggaggaggggagggaggtgtttagctcaactagacagcctttacagcaattccgccaccggtgacagtgagaaactgtcagcttggggaggccgcgccacgactggaccccgcccccgggaagcctccccggagccgagggcccccgggccttctcctcggagtcgggaagtgcctgcccccacgctaagtctctcctggccacgctctgaaaggcaaaaatggcaaaaatcctccttcaaggcaccgctccctcgacgcg

SEQ ID NO: 123696 - DNA, 30 bp, Homo sapiens
  chr13:41239110-41239140
  hyper
actcgaggccactccggagaaaaccaaaac

SEQ ID NO: 123697 - DNA, 30 bp, Homo sapiens; identical to SEQ ID NO: 50595
  chr13:41241719-41241749
  hyper

SEQ ID NO: 123698 - DNA, 416 bp, Homo sapiens
  chr13:41345168-41345584
  hyper
gtgagtagcataatcgcagccgctgatgtctccgggcttccagaggacaaagggtggcgggaaagggggcgaagaggtaggaacgtcgagactctaggaaacatcgccgagacacgaaatgaaccaagaacacaactgaaatggtgcgtcccgctgccaaacacgtccccgccctctcttccgcttccggcctggcgccttcctccccctttgcgctccggtgggctacaggggcgggtaactgtgttccggactcgcccgcggccgggcggagccagttgcctccaagcgacccgacccaccccgcgattgtagtcctagaggcggagtcctcgccagagttcagcaaaggttcgctggccgaggcgggtcccagaccggcgaacccgacagtggagggcgtgaccagttgtgca

SEQ ID NO: 123699 - DNA, 207 bp, Homo sapiens
  chr13:41364042-41364249
  hyper
ttggctgcggggctccgcgcctcaggggcgccagtgctgggcagcatggagccgcttgtgaatggagacttgctggctgcccaggagtgggcggctgggcaggggcggtgaacgtttagggtccggccaagaaagttggaagtcgtctccctgacctgttccttgcgaggcccgggaggagacgcgcctggccggtccttggcggcg

SEQ ID NO: 123700 - DNA, 226 bp, Homo sapiens
  chr13:41635649-41635875
  hyper
tgggaacagcggaacgctggtcccggggactgagtaaggtgtctggatcggagggaggttcgggtgggcatcgggcggctggaagagctcgactcgtcccgctgggaaagcgcgagtctgagtggaaccctggacgacttgcagagcggctggcgcagtcatgtgagttgggtctcaggccctgaacaacgaggtgttgtttctctgggccgccctttctcgcccg

SEQ ID NO: 123701 - DNA, 30 bp, Homo sapiens
  chr13:41636180-41636210
  hyper
gctgcggcctcccccgcccactggaagcgg

SEQ ID NO: 123702 - DNA, 278 bp, Homo sapiens
  chr13:41706713-41706991
  hyper
ccttccctcgctgacgctaagatagcagcgtctccgaagagacagcagcacgagcccatttactgaattcaaccctaccccgcagaaccgcctcccgttatcgtttagacagtggctgactcaccctctctcactcccgcgtcctttctccgcgtctgctcgccttcacaggacccgctggcttggagccgcagaagccgctactgcagcgtgggcgacaatgctaggcgcccaggagaactaccgctcccaggttgcctttcgcgccccgagggctg

SEQ ID NO: 123703 - DNA, 327 bp, Homo sapiens; identical to SEQ ID NO: 50600
  chr13:41767765-41768092
  hyper

SEQ ID NO: 123704 - DNA, 30 bp, Homo sapiens; identical to SEQ ID NO: 50601
  chr13:41768402-41768432
  hyper

SEQ ID NO: 123705 - DNA, 165 bp, Homo sapiens
  chr13:41837648-41837813
  hyper
ctctttactgaggtcggaaccttccgagacccgccacatttcagcccgacaaacccgagatcacgttcacttcctggttcacttcttccgggttaacgcacgctcccggcccctcctccgccactaccgctctccggaggagttgtcctcgagcatgcctaacaa

SEQ ID NO: 123706 - DNA, 173 bp, Homo sapiens
  chr13:41885137-41885310
  hyper
ggagtcttatgaggcgttctgatgcataggagcaatggtgaatgagggtggtgactcaccaccccatgggactccaaggttttggtgacagctcgcctgagccccagggggtgccgagattgcggcgaggagagccgcagcacaaggcaaatccacgcggttggtccccgcta

SEQ ID NO: 123707 - DNA, 30 bp, Homo sapiens
  chr13:41886496-41886526
  hyper
agtgatgaccgctgcggagccgggtgggca

SEQ ID NO: 123708 - DNA, 40 bp, Homo sapiens; identical to SEQ ID NO: 50604
  chr13:42031266-42031306
  hyper

SEQ ID NO: 123709 - DNA, 745 bp, Homo sapiens
  chr13:42032015-42032760
  hyper
cccggtcttcccgcgcgggcggctgcagcctcctttccggcccgggctggcccccatgtcccaccttccctccaccaccagctccgcgcgcgcccggggttggggggagcggcggggacaggtaaccggcagcgcctggggaggaatctggccgcgccaagtcgctgggtgaccctgggcctggcgaaggctcagttttcttgtctgtaaaacggacttggtaatagaacgcacttcgggggtggtggagaagattacaaggtaacagcgactgcgtggctgtcacttggcagaggcgccaagtgtcagttatcttcgggaaccgtggcggcccctcctggccctgggaggtggtcccgctgcccccctgacttccgtgcactgagcccctggccctgcccgcagccccggccctggactcggcggccgcggaggacctgtcggacgcgctgtgcgagtttgacgcggtgctggccgacttcgcgtcgcccttccacgagcgccacttccactacgaggagcacctggagcgcatgaagcggcgcagcagcgccagtgtcagcgacagcagcggcttcagcgactcggagagtaagtgcggcccccgctaggatggcgccgggatctcccagctcccaggacctgccccgcgaaggctgcggcctcagttttcttatcagtaaactgaggaatggtttcctgaagctcaacgcagtaggccgagtggtggcggggcccctgacga

SEQ ID NO: 123710 - DNA, 30 bp, Homo sapiens
  chr13:42535275-42535305
  hyper
tccttcccccgcggcgcggccggctcagta

SEQ ID NO: 123711 - DNA, 874 bp, Homo sapiens
  chr13:42615144-42616018
  hyper
cgttcaggaaatggcccgggatgaggtccccagctgcttcccagccgggttagcgcttcctccgccgcccgggctcctcctcgcgcgccgcctggagcgcctttgtccggctgatcgaggctctccccgaggaaccgctggcaaaccgctggcgacggccctgcgaggaccgtttcccggcttcaccgactcctcaacttttcacttgctttgagaccgtggaatgtaggcgggggagaggagaagccaggctgcgcggtcagcgtggggagtctgaggagcccggttttccctgtcgagaccgcgccctggtcgtcacctgggcgcgcaggttcccggggacacgcgcctggagaggctgagcgcggcgcggagcccagaaccacgcctccgactcctgccagccgctaaagcttgggcgtctggagggtgcaacgggttttgccggggacgaagcagaaagctgacttcgctttcgcctgggatttcgctgcacacgcaacgcggaggttgagtaattttaggaaccaagagtagtgtgtgtgcgtgtcttaagtgtgcgaggataaggaggaagagaccagggggctttggatttgttccctcaaactccctcaacttccttctctcttccgattcaaacagaaccgtctcacatccctccagggattccaccccggaatccccctctcactcagagctctggaagcctgtgtgggctgccttttccctggcgtcgaattttgactctccacgccctgcctcgatatttgctactccttcttggttgacattgtgagccagtctgaaaagccccgtccgaaatttctggcctcacccatgttccggtcaacgtgttcggatgctgttttcc

SEQ ID NO: 123712 - DNA, 739 bp, Homo sapiens; identical to SEQ ID NO: 50609
  chr13:42621977-42622716
  hyper

SEQ ID NO: 123713 - DNA, 30 bp, Homo sapiens; identical to SEQ ID NO: 50610
  chr13:42623466-42623496
  hyper

SEQ ID NO: 123714 - DNA, 872 bp, Homo sapiens
  chr13:43148495-43149367
  hyper
cggcggccccggagccccgcacgagggccccctgcacgccccgccgccgcctgcgccgcaccagccccctgccgcctcccgctccatgttcgtggccctcctggggctggggctgggccaggttgtctgcagcgtcgccctgttcttctatttcagagcgcaggtgagtggccaccttcccaggggatcgcggctgagagcgcccatctccttcccccgcacttggaaactgagtctggcggcagggctgggccacccagagcttgcatattccggaagggaaagtgactccagaagggagagaggaagtgttgagtttggggacaacctggcgcagggctgtcgggcgcaccctgctctctctccgcccacgcaccccagcttctcggtgctctgggggcggactcccctggccggacgatgggtttgaatctcaccccgtcccttcgctgggaaacaacactggcctctcaccttttctggtagtgattgcatactttttctccctgtcatttctcacttgaagttaagaatcaacttctgttcacgtaggaaaaaagatgagcgccttcacttgggcatctacctttcccttcccgcccaccacccggcgggtttcggttcctgcgcctggctgctctgcaggtgtgctggggccacggtgctggagggctgcgcggagcgggaggtcgcggtgctcgtgcccaggtcgcccaatgggtgggcagaatgacacggcgcgaccagagaggcgcgggctcgggatgggggctctgcggctgtggcgctgtcctgtgggggtgaaggaagagggacagccccacgtgcctgctagggatgtgggcggaggaaggaagcgaggtgagtgtgat

SEQ ID NO: 123715 - DNA, 598 bp, Homo sapiens; identical to SEQ ID NO: 9320
  chr13:43566053-43566651
  hyper

SEQ ID NO: 123716 - DNA, 158 bp, Homo sapiens; identical to SEQ ID NO: 50613
  chr13:44359821-44359979
  hyper

SEQ ID NO: 123717 - DNA, 235 bp, Homo sapiens; identical to SEQ ID NO: 9322
  chr13:44360043-44360278
  hyper

SEQ ID NO: 123718 - DNA, 326 bp, Homo sapiens; identical to SEQ ID NO: 9323
  chr13:44360467-44360793
  hyper

SEQ ID NO: 123719 - DNA, 657 bp, Homo sapiens; identical to SEQ ID NO: 9324
  chr13:44360995-44361652
  hyper

SEQ ID NO: 123720 - DNA, 206 bp, Homo sapiens; identical to SEQ ID NO: 50617
  chr13:44453168-44453374
  hyper

SEQ ID NO: 123721 - DNA, 34 bp, Homo sapiens
  chr13:44453843-44453877
  hyper
gcggggaatctgtgcggccgcggcgaggtaggtg

SEQ ID NO: 123722 - DNA, 30 bp, Homo sapiens; identical to SEQ ID NO: 50618
  chr13:44454164-44454194
  hyper

SEQ ID NO: 123723 - DNA, 313 bp, Homo sapiens; identical to SEQ ID NO: 50619
  chr13:44544246-44544559
  hyper

SEQ ID NO: 123724 - DNA, 30 bp, Homo sapiens
  chr13:44716498-44716528
  hyper
cgtttcgcgacccacggcggacttgcataa

SEQ ID NO: 123725 - DNA, 30 bp, Homo sapiens; identical to SEQ ID NO: 50620
  chr13:44716763-44716793
  hyper

SEQ ID NO: 123726 - DNA, 651 bp, Homo sapiens
  chr13:44947725-44948376
  hyper
cgtccccgtccccgacgcgctcacaaacgccgtggtcgcccgaaccttcggccccgcagcattcggctacaggaccgcgacactgcagggccccggctctgcgcgctgcgctccggccgctcggcgcgggaggacgtgcggtcgcgcctgcctcggtggccgcgcggggtaggtggctgcggggaccggaaggatggcgaggaagtcggaaagggtttcctgagatgagagattacttccgtccgggctgcggcctctctctggagtcggctagccggggctcggggagcggggtgcgcagggctcggggccacgccttgccacctgcagcgcccgggtgggccgcgggggcctcggcgggacgcgctcggccctgtcgcaggagctaacgcagggggaatccttgcaggtgggagcatttcagagcgcacaagccatggtggccaaacagcggatccggatggctaacgagaagcacagcaaaaacatcacccagagggggaacgtagccaaaaccctggtaaggcggggtcggcgccggccaggcagagccctgcagcccggcggggtggggcggaaggtgggggcggggccgggcgggtagcggcgcagggtccggcctcccggctcccggcccgccccttctgcggg

SEQ ID NO: 123727 - DNA, 206 bp, Homo sapiens; identical to SEQ ID NO: 50622
  chr13:44991618-44991824
  hyper

SEQ ID NO: 123728 - DNA, 297 bp, Homo sapiens; identical to SEQ ID NO: 50623
  chr13:45009498-45009795
  hyper

SEQ ID NO: 123729 - DNA, 30 bp, Homo sapiens
  chr13:45010036-45010066
  hyper
ccgaatggagacagcgccggcatttctacg

SEQ ID NO: 123730 - DNA, 60 bp, Homo sapiens
  chr13:45011209-45011269
  hyper
ttcggaggtttccacggcggcctcaaaacactgggccattgcttcggcagaaaatgtgaa

SEQ ID NO: 123731 - DNA, 526 bp, Homo sapiens
  chr13:45149890-45150416
  hyper
tttttcatttgagttccgcctggcgcaagaggctgtgcctgcagctgagcctgcgaaaggaggttcaggctttgtggaggcggaggctgtggtcccgacgtagaagatgctgcagggggcggcggctgaagcagcgacggaggcggaaaatcctcggaagatgtggcattactaccgacgccggtacctgctgcattgagagcagaggcgctgccactaccgctgccccttcgagggaacattgccgggtgcgccatcttcctagcgctaatgtctgcagcggcggcggccgcggcggtggactcaggcggctggtgcattgtgttgggtaccgggggcgcggaggagacgagtgcaatttccttctgcaccgtaatctttgtattggagacgccggagaggaaaacgggacctgacgctccgcctggcgcgattcctccttctcctcctcctcagccaaaggcgccggtcgctcctgccttcgagagcgagcttcggaaaggaggatgaacgagggtgaacaggg

SEQ ID NO: 123732 - DNA, 104 bp, Homo sapiens; identical to SEQ ID NO: 9329
  chr13:45150766-45150870
  hyper

SEQ ID NO: 123733 - DNA, 30 bp, Homo sapiens; identical to SEQ ID NO: 50627
  chr13:45151422-45151452
  hyper

SEQ ID NO: 123734 - DNA, 476 bp, Homo sapiens
  chr13:45491762-45492238
  hyper
gtgtatttcggcatgcgaccgcttggttcccccgctttccttcacctctgacctaatctctcacttcaaaaactgacttcaagctgttgccagatacgtcccttccgccgcctgccgcaggtggctagggtctgagcacacttgaacctcacacccgccccaggggtagctccttggttcccttcagccccgatgtgtccctcgtgctttgaaatggaattacagttttggttaaaaacatgccttttccgagttaggaagaatctaaatcgactgaacgccagtctaaaatttcggcgttcccacaccgggagtcgaacccgggccgcctgggtgaaaaccaggaatcctaaccgctagaccatgtgggagacggcaatagcgactccaagcctagacaaattgagtcttctcggtcggcttccgcccactccatcgcgttcatccgtaggcgtcaaacctgctcctgcgcctgc

SEQ ID NO: 123735 - DNA, 560 bp, Homo sapiens
  chr13:45492271-45492831
  hyper
cgcattctactgtttctctccttgcaggggcccttgaatctttcttcaatctactctcgcgtctttcgtgatctcatccagtctcctggtgctaggtaccatgtcgacaccaatgtagacactagattggatgagtcattgttcacaattcctcacaaaactcctgcaaagtccaaaagaactggggtttgaatgttagaggctggtgaagaagtgaggaccacggggcgtcataacaccgcgcagtggaggccacgctgcactggccggtgtccgccgacagggtgtgtgccacagacgcgcagtgccttgcccgaatctgtccctcccctcagcgctggtccaggctggccacaggcaccaccccgtccctgaaagtggatcttttcctctgaaaaaacaggaatgagaactgcccggaagcctggaacattccaggttctgatgactcagcggctgaaggcaggatttgtgtcaccgaaagcagccagagtggcggtctgtaaatgtagcttagaaaagtggagaaagtctcttactgcaggcgttcatgatagatg

SEQ ID NO: 123736 - DNA, 165 bp, Homo sapiens
  chr13:45563657-45563822
  hyper
aaccacaggctttacgtcatttctcggcgccgggaaacctgccattcttcgctgctgatcgcgggattctttttggatagggttgacgttcgtggatagactcatatctgtgaccagtgtccgccaccgcggatggcaagagacctgatcggaccggccctgccg

SEQ ID NO: 123737 - DNA, 32 bp, Homo sapiens
  chr13:45694565-45694597
  hyper
tttgtctgcaacagcgcgccgtactgacgtag

SEQ ID NO: 123738 - DNA, 30 bp, Homo sapiens
  chr13:45885314-45885344
  hyper
tagagacaggttggcgcttcagtgcatctc

SEQ ID NO: 123739 - DNA, 30 bp, Homo sapiens; identical to SEQ ID NO: 50628
  chr13:45885584-45885614
  hyper

SEQ ID NO: 123740 - DNA, 30 bp, Homo sapiens; identical to SEQ ID NO: 50629
  chr13:45885876-45885906
  hyper

SEQ ID NO: 123741 - DNA, 30 bp, Homo sapiens; identical to SEQ ID NO: 9330
  chr13:45915195-45915225
  hyper

SEQ ID NO: 123742 - DNA, 30 bp, Homo sapiens; identical to SEQ ID NO: 50631
  chr13:45915702-45915732
  hyper

SEQ ID NO: 123743 - DNA, 27 bp, Homo sapiens
  chr13:45991118-45991145
  hyper
gttcgtacttttgaacgctttccaagt

SEQ ID NO: 123744 - DNA, 146 bp, Homo sapiens; identical to SEQ ID NO: 50633
  chr13:45991444-45991590
  hyper

SEQ ID NO: 123745 - DNA, 123 bp, Homo sapiens
  chr13:45992565-45992688
  hyper
ccccgccccgtccgcgcaaacacgcgacctcctcagctcccattggtttctgccagcactagccacacccctgacagccccagatggggacacggaggggcggggcccgtcccaagtgcccct

SEQ ID NO: 123746 - DNA, 136 bp, Homo sapiens
  chr13:46038852-46038988
  hyper
taatctgtacaacacgtaacaataaagttattgatgttgaggaaaagacttccggtaggggcatttctatttccattgggtcctgtcttctccaccttctacgtttcaaccggaaatagtcgtacccatttaaagc

SEQ ID NO: 123747 - DNA, 30 bp, Homo sapiens; identical to SEQ ID NO: 50634
  chr13:46039569-46039599
  hyper

SEQ ID NO: 123748 - DNA, 141 bp, Homo sapiens
  chr13:46189792-46189933
  hyper
cgcattgctaacgtgcgcagcccttacccaagccaggctcccgcgcgtgcatccaccgcgatctcaggccccggcgtttgtggcagctctcggttaccatgggaaccgcactccgcagcctccctgggccccatctaatct

SEQ ID NO: 123749 - DNA, 15 bp, Homo sapiens
  chr13:46190006-46190021
  hyper
cggggaactgtttgg

SEQ ID NO: 123750 - DNA, 190 bp, Homo sapiens; identical to SEQ ID NO: 50636
  chr13:46425364-46425554
  hyper

SEQ ID NO: 123751 - DNA, 46 bp, Homo sapiens; identical to SEQ ID NO: 50637
  chr13:46425575-46425621
  hyper

SEQ ID NO: 123752 - DNA, 205 bp, Homo sapiens
  chr13:46626295-46626500
  hyper
cgaggggtacagcctattgtctgagtctacttatcgcccttagacaaatgccagaatcataatcagagtgagaaattacgcctgagcacagggggctattgcagagttaagggtgggatgctcaaggaaagctcaaaatcccagtgactcaagcaaagacgggggggggtaacccgggcctccgcattacgggtccgctcaatgc

SEQ ID NO: 123753 - DNA, 487 bp, Homo sapiens; identical to SEQ ID NO: 50639
  chr13:46626731-46627218
  hyper

SEQ ID NO: 123754 - DNA, 38 bp, Homo sapiens
  chr13:46756058-46756096
  hyper
tcttggatggccacgcgaggtggcggcagatgtcctgg

SEQ ID NO: 123755 - DNA, 30 bp, Homo sapiens; identical to SEQ ID NO: 9336
  chr13:46785408-46785438
  hyper

SEQ ID NO: 123756 - DNA, 667 bp, Homo sapiens
  chr13:46785660-46786327
  hyper
agaaaaccgaatgcccgcttttcgagagcactgcaaaattagccccgggacccggctgcacaaaagtgcagccttaaagaatgccagcccatattctagacacccaagtaaagcatcctgtaatcgagagaaaataataaataatagtggtcattgccattaagcataaaaatagtaataacaattgtcaccacggcgttccgtacagcagctgcgcgtggagccggcttctcctccggcccccacggcccgcagcttcccctgcagccccacagtgcgtcggaggaaggcgagggctccgcgcgcgctgcaccgtgggctgggcctgcccctcccggcgcccgcctcgcctcgcctgtcccgcgcccgcctcgcctgtcccgcccccgcgcctgcgcgtcaagtggctgggctggcttagcggaccccggttgctagggtgtgtctccttggcctcctagagggtggggatccgtggtgcttcttcgggaacagcctcctgcaggaagaccctcgctggacctttacctcgctgcctagattccgaggaaaaggagataggagacgaaaagccagttggtttggaaagcggccgattatcctaaagggtagtgtgggagtccagcacttccatgcccctctttgggtactacggaagggagatttc

SEQ ID NO: 123757 - DNA, 895 bp, Homo sapiens
  chr13:46960937-46961832
  hyper
gtagtctctgagaatcgccctgcgtaaaagtgtcctgaggtcccgcttctgcgcccttcccggcccaagccgaacacagggtcaacctcactctacaaagtcaaccggatagaaatccgccaccccgcgaggagccccttcctactgtctccaaggggtccccgacactgctctgagcgaccctaagatacctgggtgtctctgctgggcacaaacctctctggcgccacttccaccatccaacctctcccgcggccctcccttccctttctccaaccaccctctccaccccgcgccgctcccatctcgcccccggccccgccagcctcacccagccaaacccgagcggtggaacgctgcgctgggtaaacgccgcgcgtcgggtcctccctcgcgcggctccgggcagcgttccgtggccaccgcgctcccggtaacagcagaaaggggagggaggagagctaccgaggaggggacagcgacgccccgacgccgccacgccccccgcctcccacacgggggccaccgtagctctctagaagctcctcagggaagcaaagcgccgttcccgccgcaggcaccgagacgtcgcccagatggaagaaactctggagatgcgcgctcctacaccggtgccgcggcgcccgggcccagcaccacgcacctatgcgcgcctctgccggtcctcctagaaatcccgccctgcctacccgcggcgcgagacgcaacgacgctttcaggggtcaaagacctggcagaaatgacttcccaaccccagatgcccccagcagcagtatttagcagtcatacaattgcctgaaatgaagaatgagtaatctggatgagtcggccctgaaatcgacctgcaacttacccggaacgtgagctgtctctc

SEQ ID NO: 123758 - DNA, 30 bp, Homo sapiens
  chr13:47127725-47127755
  hyper
cgcgcttgaggaggcggccaactccggggg

SEQ ID NO: 123759 - DNA, 30 bp, Homo sapiens; identical to SEQ ID NO: 50643
  chr13:47128872-47128902
  hyper

SEQ ID NO: 123760 - DNA, 30 bp, Homo sapiens; identical to SEQ ID NO: 50644
  chr13:47371400-47371430
  hyper

SEQ ID NO: 123761 - DNA, 30 bp, Homo sapiens
  chr13:47468139-47468169
  hyper
tatgggggaagccacgctctgtctgttcgg

SEQ ID NO: 123762 - DNA, 30 bp, Homo sapiens
  chr13:48575455-48575485
  hyper
caggcggcccaaggcgcagcctctctgcag

SEQ ID NO: 123763 - DNA, 30 bp, Homo sapiens
  chr13:48612023-48612053
  hyper
ggtcatctggagttcgggtgagcagccgcg

SEQ ID NO: 123764 - DNA, 30 bp, Homo sapiens; identical to SEQ ID NO: 50645
  chr13:48612252-48612282
  hyper

SEQ ID NO: 123765 - DNA, 30 bp, Homo sapiens
  chr13:48668837-48668867
  hyper
tggctggccgcggacgaagaggctcagacc

SEQ ID NO: 123766 - DNA, 30 bp, Homo sapiens
  chr13:48669101-48669131
  hyper
tccaagtcctcaagcgcagacagcagccgc

SEQ ID NO: 123767 - DNA, 319 bp, Homo sapiens
  chr13:48807035-48807354
  hyper
tcccttgtacccggcgaactcaggaaagttcactcgatttcgctacaaacctgcagcactcggcctggaggtaacctggttgggagcgaattcagaactggaaattccaggcggcccagagggacacccatccctctccgaggcgcgccgggatccggcgcccagctgcggggcgagggcagggtcccgcgcagcaccccacccccggccgctggccccgcccccgcccccgccccgcctcccaggggatgtgcgagcagtctccgccctcgcgcgggagctgggaggctgcgagatccctaccgcagtagccgcctct

SEQ ID NO: 123768 - DNA, 30 bp, Homo sapiens; identical to SEQ ID NO: 50646
  chr13:48808172-48808202
  hyper

SEQ ID NO: 123769 - DNA, 219 bp, Homo sapiens; identical to SEQ ID NO: 50647
  chr13:48877515-48877734
  hyper

SEQ ID NO: 123770 - DNA, 30 bp, Homo sapiens; identical to SEQ ID NO: 50648
  chr13:48878451-48878481
  hyper

SEQ ID NO: 123771 - DNA, 30 bp, Homo sapiens
  chr13:49549448-49549478
  hyper
gtaaaaattgaggtcgtggttttccacgcg

SEQ ID NO: 123772 - DNA, 30 bp, Homo sapiens
  chr13:49550800-49550830
  hyper
cgcccggcagccgccgaacttgaacgcttt

SEQ ID NO: 123773 - DNA, 575 bp, Homo sapiens; identical to SEQ ID NO: 50649
  chr13:49794350-49794925
  hyper

SEQ ID NO: 123774 - DNA, 30 bp, Homo sapiens; identical to SEQ ID NO: 9339
  chr13:49821935-49821965
  hyper

SEQ ID NO: 123775 - DNA, 30 bp, Homo sapiens
  chr13:49822369-49822399
  hyper
ggatgtctcctgcccgccctctgcgtgtcc

SEQ ID NO: 123776 - DNA, 500 bp, Homo sapiens
  chr13:50018029-50018529
  hyper
ggacccctccactacggccaggcgctatgtatgttttcaacccccaagaagcccagtcccagccacacacaagatggcagcctcacacctaccggaggaaacagctgcgccaccactccagtgatgccggcctctcgactacgagtaactccattggctcagctacagtgcgcgagacaagccgagagcgctagcagtcaatcgggaggcggcgcgctcgggcgccactgcggtgccagcggtaagtgcgccgagtctctgaggcgtgaaccagtggggagtgcgaccaatcaatgggctcctggctgggtggtgggacggccggcgtccgactcctcccatgtagtgatcggtttaggtaggtcggcctggtccccggcggaggttacgccttccctcatccccggtagaggcagggcgggactgttgtggttgagatgaaggctagtaaatggtgaagtacttcccggccagagggcacctgcgctcgggaggtttgg

SEQ ID NO: 123777 - DNA, 30 bp, Homo sapiens; identical to SEQ ID NO: 50652
  chr13:50069494-50069524
  hyper

SEQ ID NO: 123778 - DNA, 301 bp, Homo sapiens; identical to SEQ ID NO: 9340
  chr13:50070356-50070657
  hyper

SEQ ID NO: 123779 - DNA, 96 bp, Homo sapiens; identical to SEQ ID NO: 50654
  chr13:50070684-50070780
  hyper

SEQ ID NO: 123780 - DNA, 30 bp, Homo sapiens
  chr13:50264616-50264646
  hyper
gtgtgtgtgcgtgcgcgtgtgtggtggggg

SEQ ID NO: 123781 - DNA, 89 bp, Homo sapiens
  chr13:50264905-50264994
  hyper
ttaaactcagtaatgcgcctggcacacattagacacgggtgtttcgtttgtcttggcaaaggcttcgggttttgcgacaatagccttgc

SEQ ID NO: 123782 - DNA, 160 bp, Homo sapiens; identical to SEQ ID NO: 9342
  chr13:50265730-50265890
  hyper

SEQ ID NO: 123783 - DNA, 30 bp, Homo sapiens
  chr13:50366175-50366205
  hyper
ggttgcaccggtggcgggcgcaagcagcgg

SEQ ID NO: 123784 - DNA, 313 bp, Homo sapiens
  chr13:50367042-50367355
  hyper
cctcaggcgcggggcggcggtcgtcaactacagttcccatcatgccacgatccgcctggagtaattctccacgcctagtgagaacgaggagaatgccgggacccttccgcgcgcggctctttgcgcgccgcgctcatgttgctgggcacaaagctccgcccccacaaggccgcctctgggcggggaagagcgggggagcgtccctggcaccttgcgccctatcaggaggaagagggcgggccttcctgggagcgcacctcgctgcctgtagctagaagatcagaaaaggaacaaccgcgagtgctttgcagtc

SEQ ID NO: 123785 - DNA, 183 bp, Homo sapiens
  chr13:50510536-50510719
  hyper
cttaggctggcctgcgaggaagacgcggagaatcaaggggccggggagagaccggacagggcgagcggccgggctgggccggggagacgggtggggctagtggcgcgcggaggcgtggcagggggcgtggcgttgcgggcctgcggatgtgggacggcgtgcgcctgcgcaccagctggtttt

SEQ ID NO: 123786 - DNA, 30 bp, Homo sapiens
  chr13:50511067-50511097
  hyper
caccggggctcacgcgggccctaatgcatt

SEQ ID NO: 123787 - DNA, 30 bp, Homo sapiens
  chr13:50570075-50570105
  hyper
ttgcatccttcacaccgttcactggttaag

SEQ ID NO: 123788 - DNA, 30 bp, Homo sapiens
  chr13:50570378-50570408
  hyper
cttgcccggagcccccggctagagccctgg

SEQ ID NO: 123789 - DNA, 210 bp, Homo sapiens; identical to SEQ ID NO: 9344
  chr13:50570751-50570961
  hyper

SEQ ID NO: 123790 - DNA, 554 bp, Homo sapiens
  chr13:50571188-50571742
  hyper
ggggctgtgcttggcgcgtaccgtgcggtccctgtagttggaggacgggcggtcgcgcggcctttcccactagccggaggtcggagataagtacccgccgcccggctcctctcgggaaagcggggtggtcctcgaaccttcagcgagggtggggagttgcccaggtcagcagggatctgcgtgggttgggggggctggcgaaggccgtctgagctccagtccggcagcgcggcagaaaccagcggggcactgtcatgggcctggggaggagcggcctgcggagggcgccggggcagtgtgtctgtggtccagaaaacctgctccgtccggagccttcctggccccgctaccagcgtctccacatcccctagaaaagaaaagacgggtgtgggccttaggttacagcgcgccgccagcgtttggttgcatggcgccgggggagggcgccctaaccgagaagctgcttaatacaaagagctccaggctcctggcggttcaccaggtctaaacagccgggctttatttgtgggggcgattgaaaaaattgagggtca

SEQ ID NO: 123791 - DNA, 52 bp, Homo sapiens
  chr13:50654634-50654686
  hyper
gcagaaagcatctccggaatatttgcaacccagagccgtgcgccccacacgc

SEQ ID NO: 123792 - DNA, 30 bp, Homo sapiens
  chr13:50655377-50655407
  hyper
acctcacgcttcagcgtcaaaagacaatat

SEQ ID NO: 123793 - DNA, 30 bp, Homo sapiens
  chr13:50656514-50656544
  hyper
ggagaaaagaaaaacgtcttacagccagtg

SEQ ID NO: 123794 - DNA, 30 bp, Homo sapiens
  chr13:50697970-50698000
  hyper
ctctttgcagtcctcgggcggacgaatgga

SEQ ID NO: 123795 - DNA, 30 bp, Homo sapiens; identical to SEQ ID NO: 50660
  chr13:50699329-50699359
  hyper

SEQ ID NO: 123796 - DNA, 30 bp, Homo sapiens; identical to SEQ ID NO: 50661
  chr13:50699701-50699731
  hyper

SEQ ID NO: 123797 - DNA, 85 bp, Homo sapiens
  chr13:50701603-50701688
  hyper
aggacacgcgcttttcgcccctactttgttcttgcgcagtcttcccagctgcggagaggagggagcgaaagcaaaacgaaagcac

SEQ ID NO: 123798 - DNA, 15 bp, Homo sapiens
  chr13:50701959-50701974
  hyper
cgaggcaaaggagta

SEQ ID NO: 123799 - DNA, 951 bp, Homo sapiens
  chr13:50704195-50705146
  hyper
aaggggttaaaatggcgcggctggatgggcgtggggaatgttgccagtgttcggtcccgactcaggggagaaacggggtgggggtgtggggatcccggaaagggccggaaaagccgggagcaccgggaggtgtgaggccagagtttctgctactgggggctcttccagggaagacgctggcgggaataggatggggctggcagctggggagcctcgcggtggctattgcacgtctcggcccccctggacagggttatgtcaggagagcgccctggcaccgagctctggccgctggataagatactccctcgccggctccctccgtgagcggggctgggcgggtgcggaggggcgggcggtgcgcctcgccgagcccggggcgctgaggtcggcaagtcgtcttcggaactggcggcggcgcttctccagtcgacgtggaaaaaaaaatcgtctcaaatagcacccctcggtctgcagccctttaacactggtaaagtagataacaaggaactctgctgaacgagggaaactcagtttagaacgtcccagagtttccaagtttgtcaagcgactgggaatcttggtcgccgcgtggagagctgcgcccatttccccttccagaagaaaactgaaggcgtattcctccaaaggaaggctgcagtcaggcgccacacagaacacaggcagtcctctccggccgatctcgggctcgcctctcccagggccgtagggagcatcttttctgagcagccccgggagggcagctccgggcgctctccgcgctgggccctgccgcggccggtgcgttacatcaggaaacgcttggtccggttttctgtctgctagtcaaaacaattggctgaatctcgaaataacttttttgatagtccggaaaagaaacatgacaaatagactcaccatcaggcttgcgtcagagaaccattttcccca

SEQ ID NO: 123800 - DNA, 30 bp, Homo sapiens; identical to SEQ ID NO: 50663
  chr13:50705368-50705398
  hyper

SEQ ID NO: 123801 - DNA, 140 bp, Homo sapiens
  chr13:51086771-51086911
  hyper
ctgtctcagcagctctcggggggacctgcaggctggggaggcagcttctctctgcaatttggccgctcctggacttgttgcagccaggcttcaaagagaaaccaccgcttcctccccgagccccacgccagcctcagagg

SEQ ID NO: 123802 - DNA, 130 bp, Homo sapiens
  chr13:51417472-51417602
  hyper
ggaagggcagcaactcggcgcccccctcagcgcctcgcactacctcctcctctggggagttcgcccgcgccgcggtccgccgactcctggtccccacgcccccgccccgctcctcgcgcccgggccccgg

SEQ ID NO: 123803 - DNA, 128 bp, Homo sapiens
  chr13:51483754-51483882
  hyper
gggggtgtggcgggcgtcacccgttgtccgggcacacaccccgcagacccaatcctagcccgctggctagaccatggagggccgctgggtgcagccacagagcgcggggccccggcgaccccgccccg

SEQ ID NO: 123804 - DNA, 30 bp, Homo sapiens
  chr13:51797124-51797154
  hyper
agtctttccgaagtcggctaggaggatggc

SEQ ID NO: 123805 - DNA, 30 bp, Homo sapiens
  chr13:52025633-52025663
  hyper
tgcagctgtcccaccggccctcttaggacg

SEQ ID NO: 123806 - DNA, 13 bp, Homo sapiens
  chr13:52027210-52027223
  hyper
ggctgcggaggct

SEQ ID NO: 123807 - DNA, 78 bp, Homo sapiens; identical to SEQ ID NO: 50667
  chr13:52027258-52027336
  hyper

SEQ ID NO: 123808 - DNA, 122 bp, Homo sapiens; identical to SEQ ID NO: 50668
  chr13:52028194-52028316
  hyper

SEQ ID NO: 123809 - DNA, 30 bp, Homo sapiens
  chr13:52097528-52097558
  hyper
cagtctcaatggtgacgccaaaggctgggg

SEQ ID NO: 123810 - DNA, 30 bp, Homo sapiens; identical to SEQ ID NO: 50669
  chr13:52158691-52158721
  hyper

SEQ ID NO: 123811 - DNA, 258 bp, Homo sapiens
  chr13:52159089-52159347
  hyper
catcctggtggtgccggtgttcagctgcgcgccgcctccgctgtgtggctccgggaagcggagccgggacggcggcgagcgctccggcttcaccccgggctgggtagtgcctgcgggagccgggtggccctcgggctaacggtgcgctggagggactttggtccatccctgaggacaggagggaaagaggggaggagccgcccggctttgcaggtgtgtgcttggggaacgatgccctgagccgcctctgcaagataa

SEQ ID NO: 123812 - DNA, 125 bp, Homo sapiens
  chr13:52377715-52377840
  hyper
ctggagccaaaggtcgcagtccaggtgctgcatctttttaaaggaaacacacccaaaggcactaggacagagccttagctagcgatttagatccagccctatctgacgccgccagcagcaccacg

SEQ ID NO: 123813 - DNA, 292 bp, Homo sapiens
  chr13:52585268-52585560
  hyper
gtccttttctcccacgccaagacatccctggagctggggtctggctcggccttccctgcgcaccccctgggggcgagtaagcgccgaacgcggggaggaaaatcctcctggtgggagtgagcacgctgcgcggacgcgggggaacaaaactcactttccgactggccccttctctggctgtgatctgtctctcctgctcaggcatcgtcccgcacggacaccgaattcttctctgatctggctcagagcaaaaggtcacctggtcggtggaggagagcggggtgttaaagtc

SEQ ID NO: 123814 - DNA, 224 bp, Homo sapiens
  chr13:52586274-52586498
  hyper
gagggagggagcgacggctgtcaatcacaggccacgccctcctcagcccaaccccccactgctgtcccgcccacgggggcgggagccgtgtgcgccacgccgaacactagtctacgcctcggcatattctattggctggaaggccgtgggaagcggctaccagtaaccaatagtaacgcacaattggcccgtgggggcggggcgagcacggcttgctttctcag

SEQ ID NO: 123815 - DNA, 86 bp, Homo sapiens
  chr13:52702429-52702515
  hyper
gcgcttcactggccacgctgctcctggtcccggagacccaacaatctgcatttgctgccgtcacgttcaggcgactccccaggcgc

SEQ ID NO: 123816 - DNA, 545 bp, Homo sapiens
  chr13:52702766-52703311
  hyper
cagacaccggaggatcgggttctgagagagacgcatacggacttggggccgggggtgactcgccgggaactgagggcccgcgaccctcccgcccaagtggcaccaaagggtggaagcccccaaattaggaaaattccttctcccctagggccgcccctggaagcggccgcgggtgagtggcaagacgcttacccgtacccgacctccgcgtgtggagcgttgccatagagaccgacgcgccctggacgctacacccacacagcccaggacgctaggccttttctgggccgcccccgccgccccaggccgaaactccatccctttcccccaccctgccgagctcccgaagccctgtggcggctccgggcaagaactaagggcggcccctgcaagcgtacctgctccgccggctccgcggggccaacgaagcgtcccggaaggatccgggttcccggggccgctgcgcctccctgcggccggggcggagccgcgcaaggaaacgcgggcggggcgcgggtctggaatggcctggggaccagtccacc

SEQ ID NO: 123817 - DNA, 71 bp, Homo sapiens
  chr13:52703361-52703432
  hyper
cgcaaccgtcccgttgccttgggtcgggattcctttgctttgcagtctacagtagcgctccccgctcttgc

SEQ ID NO: 123818 - DNA, 650 bp, Homo sapiens; identical to SEQ ID NO: 50675
  chr13:52733270-52733920
  hyper

SEQ ID NO: 123819 - DNA, 529 bp, Homo sapiens
  chr13:52979985-52980514
  hyper
ataccccttaaaagcgtcccctggggccgaggcgggtgtggggaggggccgccaccgtccacctgcgccttcaggctgcggtgaggtggcagagtccggaggcatttcccgaccccagaggagcctccaagagtctcgcggcacgggcgcgaacaccaggatgcggagggcgcttcttacctttcgagactgacgggcagcaaccccaggccgtccgggcgcgtggcgaggcggacgggaaggctcaggggcggcgaggtagagcgccaagcatcccgcgtcccagactgcacgccctgaccccgcggcgttcggctcccacagccccgcggggcccgcccccgacggcgtggggagggcgggcgccgggagggcggggggcacacgggaccgggcgtggtcggttcccgccccttctgggcagcgcatcctttcctgccggtccccagctcgccagctgctggacaggaaacaggcaggaaacgcgcggccagccaaggtcctgcgggagggggtgcggccccggcag

SEQ ID NO: 123820 - DNA, 59 bp, Homo sapiens
  chr13:53024890-53024949
  hyper
gacgtggagacgtgcgtggagcgccccctggcggtccattagccgccggcctttcagaa

SEQ ID NO: 123821 - DNA, 257 bp, Homo sapiens
  chr13:53029196-53029453
  hyper
aaaatacacacgctcgtggtacgccagatcggtgtttacgtcctcgtcagtgaacgcgtcgatgtttaataagaagggcagccaatcaacacttttcttgtctttttctcgtctgccttcctccaaggactgtgagggtctcaagatgtgtcccatctcggttgtttgtcaacctagtcctgctatgtcgtggggactgagcaggccgactcctcccccatcgcacgtccaggatgaagagcgctgtttaggtttga

SEQ ID NO: 123822 - DNA, 30 bp, Homo sapiens
  chr13:53029939-53029969
  hyper
aacaggaaccgctgcgtggtgttactgtgc

SEQ ID NO: 123823 - DNA, 377 bp, Homo sapiens
  chr13:53174027-53174404
  hyper
gcggtaggagctgccggccagctcgccatctagtccccagagcccgggctttagggcgcccggatgcaaaccagttttgccgccaaggaacccggacaggcgcgcctcctccccggcctcgcaaggaacaggttaaggagacatttcccactttctctgcccggccctgaacgctcgccgcccctgcccagccgcccactgtctggcagcctgcaagtctccattcagaagcggctccgtgctgcccagcgatggcgccctggcggcgcggaagcccgcggccaaatgacacgacttgggggcaaaggaggacaacagttcccaccaggtaggcactgggggaaggaggccgatgaccctgagattctccagcgacc

SEQ ID NO: 123824 - DNA, 30 bp, Homo sapiens
  chr13:53191372-53191402
  hyper
tgcacaactgatcacgccctccactatctt

SEQ ID NO: 123825 - DNA, 30 bp, Homo sapiens
  chr13:53191635-53191665
  hyper
tgtttggcgtggggcgcactgttcagttgc

SEQ ID NO: 123826 - DNA, 30 bp, Homo sapiens; identical to SEQ ID NO: 50680
  chr13:53226381-53226411
  hyper

SEQ ID NO: 123827 - DNA, 123 bp, Homo sapiens; identical to SEQ ID NO: 50681
  chr13:53226635-53226758
  hyper

SEQ ID NO: 123828 - DNA, 341 bp, Homo sapiens; identical to SEQ ID NO: 9353
  chr13:53312972-53313313
  hyper

SEQ ID NO: 123829 - DNA, 100 bp, Homo sapiens; identical to SEQ ID NO: 9354
  chr13:53313512-53313612
  hyper

SEQ ID NO: 123830 - DNA, 272 bp, Homo sapiens; identical to SEQ ID NO: 50684
  chr13:53313677-53313949
  hyper

SEQ ID NO: 123831 - DNA, 304 bp, Homo sapiens
  chr13:53419716-53420020
  hyper
cgccacagggggcgccggctcctttccaaaacccggggaggcaccgtagggctgcagcagggaataggggaatgggagtggggggagggttggataagaaacaaacaaaaaacaagtgcgacaggttgtctacctgaatgcacccaccctacccctccagtctcccttcccccagcctgtccgcggagctcggaggggggcgcccagccgaaggaaggcctcacctcggcgtgcgcgccgcggagccgctgctgcccctcgaagtgacaggcgctttccccagtggcgctgccgccctctgagc

SEQ ID NO: 123832 - DNA, 122 bp, Homo sapiens; identical to SEQ ID NO: 50686
  chr13:53420877-53420999
  hyper

SEQ ID NO: 123833 - DNA, 131 bp, Homo sapiens
  chr13:53422120-53422251
  hyper
ccactgccgcaccctcggacacctctaccgggatctgggccctggggaagcgcggcgcgtggtcgttgacgtccctcacctctacctccacgtgcaccagccggaactgctcctgcgagaagctgaccaca

SEQ ID NO: 123834 - DNA, 845 bp, Homo sapiens
  chr13:53422432-53423277
  hyper
cgatgaccgtgccgggggcatcctcctcgaaggtgctgtatcggactgttttgctctgggccactgagagcacccagcagaggctgaagagctgcaaggggaaaaggcaggggctgccccaacgcctcacaggactcatgcctccagcctcaagtgcgatccgaaaggctaaggaagtcttctctggtttccaggtcgggcgtcagtctcaggctctcggaatcacgctctttgcgagccctgtgcgggagaagtctgcgggtagcagctccgagcctccagcgggctctgaggacgcgcggacccgccctcactctgcgcctctccgtctcttacagaagctgcgccgcctcgcgccgcctttgcctttatagccgccgatatgctaatcacccgagccgggtagccaatggccgcctccccctcgcgtcgcccctccgcctgcctctgacaatccctttaatgtggaaaggcttagaggggaaaacaagaaaggaaaattagggaatctttcttttgtttaactccttttgctttttcccccttttcttgtcagcaccctgcatgtagaggagttggcacagggctccaggagtaaaaggagcggatggttttgttaattgtcgcctgcctccctccgtgccgcggctagaactaagtgcgaacacgctggggtttcaccccagtggctcctgattccgccttcccccagcccctgccaacacacacactctgcattttgcacctctgacgcttccaaacccttgcagccccctacccacagacttgctctgctgaatgaggctctgctttccttctctcctagctacggtgcctggaatagc

SEQ ID NO: 123835 - DNA, 243 bp, Homo sapiens
  chr13:53423899-53424142
  hyper
gaagcaacactcgtccggttccagaagaacaaaatcacagcgtgacgttgaaacctggcaggaacgtggggggaacttaaccatctgcttaggaaagtgtggagcttcggcactgccaaaatctgggctgggcggatcctggggctggccgggcgctgcgctgccccacagatagccccctcccatccctgacggccagggagatggagctcggatctgcaacaagacggattcttaatgatt

SEQ ID NO: 123836 - DNA, 1391 bp, Homo sapiens; identical to SEQ ID NO: 50689
  chr13:53424662-53426053
  hyper

SEQ ID NO: 123837 - DNA, 150 bp, Homo sapiens
  chr13:53775398-53775548
  hyper
cgggcgccaaccggcagatgcgctgcgccctctactggcaggtgcacttccggctgcagcgggcctacgcgggcagctgcctggtggtgaccgcggggtcgttggaccgcgagcccatcgcctagtacaacctgacgctggtgaccgcgg

SEQ ID NO: 123838 - DNA, 887 bp, Homo sapiens; identical to SEQ ID NO: 9361
  chr13:58203565-58204452
  hyper

SEQ ID NO: 123839 - DNA, 116 bp, Homo sapiens; identical to SEQ ID NO: 50691
  chr13:58204883-58204999
  hyper

SEQ ID NO: 123840 - DNA, 191 bp, Homo sapiens; identical to SEQ ID NO: 50692
  chr13:58205044-58205235
  hyper

SEQ ID NO: 123841 - DNA, 789 bp, Homo sapiens; identical to SEQ ID NO: 50693
  chr13:58205442-58206231
  hyper

SEQ ID NO: 123842 - DNA, 103 bp, Homo sapiens
  chr13:58206452-58206555
  hyper
cgcagcttctcacccagtgcggatgctgtagatcaacaggttcagggaacttgagcagaataaggagagaccaccgggtgccgcagctcgggtgcagagggaa

SEQ ID NO: 123843 - DNA, 9 bp, Homo sapiens
  chr13:58206762-58206771
  hyper
agcaagggg

SEQ ID NO: 123844 - DNA, 466 bp, Homo sapiens
  chr13:58206861-58207327
  hyper
cgggtagctaccgggtgctggagaactccgcaccgcacctgctggacgtggacgcagacagcgggctcctctacaccaagcagcgcatcgaccgcgagtccctgtgccgccacaatgccaagtgccagctgtccctcgaggtgttcgccaacgacaaggagatctgcatgatcaaggtagagatccaggacatcaacgacaacgcgccctccttctcctcggaccagatcgaaatggacatctcggagaacgctgctccgggcacccgcttccccctcaccagcgcacatgaccccgacgccggcgagaatgggctccgcacctacctgctcacgcgcgacgatcacggcctctttggactggacgttaagtcccgcggcgacggcaccaagttcccagaactggtcatccagaaggctctggaccgcgagcaacagaatcaccatacgctcgtgctgactgccct

SEQ ID NO: 123845 - DNA, 239 bp, Homo sapiens
  chr13:58207574-58207813
  hyper
aagaccggcctaatccgtgtgaagggcaatctggactatgaggaaaacgggatgctggagattgacgtgcaggcccgagacctggggcctaaccctatcccagcccactgcaaagtcacggtcaagctcatcgaccgcaacgacaatgcgccgtccatcggtttcgtctccgtgcgccagggggcgctgagcgaggccgcccctcccggcaccgtcatcgccctggtgcgggtcactga

SEQ ID NO: 123846 - DNA, 263 bp, Homo sapiens
  chr13:58207891-58208154
  hyper
cgggcccgggggttccgtccccttcaagcttgaggagaactacgacaacttctacacggtggtgactgaccgcccgctggaccgcgagacacaagacgagtacaacgtgaccatcgtggcgcgggacgggggctctcctcccctcaactccaccaagtcgttcgcgatcaagattctagacgagaacgacaacccgcctcggttcaccaaagggctctacgtgcttcaggtgcacgagaacaacatcccgggagagtacctgg

SEQ ID NO: 123847 - DNA, 670 bp, Homo sapiens
  chr13:58208367-58209037
  hyper
tggagagcaacgccacggtgagggtgacagtgctagacgtgaatgacaacgcgccagtgatcgtgctccccacgctgcagaacgacaccgcggagctgcaggtgccgcgcaacgctggcctgggctatctggtgagcactgtgcgcgccctagacagcgacttcggcgagagcgggcgtctcacctacgagatcgtggacggcaacgacgaccacctgtttgagatcgacccgtccagcggcgagatccgcacgctgcaccctttctgggaggacgtgacgcccgtggtggagctggtggtgaaggtgaccgaccacggcaagcctaccctgtccgcagtggccaagctcatcatccgctcggtgagcggatcccttcccgagggggtaccacgggtgaatggcgagcagcaccactgggacatgtcgctgccgctcatcgtgactctgagcactatctccatcatcctcctagcggccatgatcaccatcgccgtcaagtgcaagcgcgagaacaaggagatccgcacttacaactgccgcatcgccgagtacagccacccgcagctgggtgggggcaagggcaagaagaagaagatcaacaaaaatgatatcatgctggtgcagagcgaagtggaggagaggaacgccatgaacgtcatgaacgtggt

SEQ ID NO: 123848 - DNA, 30 bp, Homo sapiens; identical to SEQ ID NO: 50697
  chr13:60737568-60737598
  hyper

SEQ ID NO: 123849 - DNA, 150 bp, Homo sapiens
  chr13:60738355-60738505
  hyper
caccatttgagcagcgctgggatataaaaccatctgctagccctctccttgcacgtctggggctggaaaaagtagttctgggactgggtacggtgctggaaggggtactaggcaggatgaaacgacggggcccacgacgctccaaaagga

SEQ ID NO: 123850 - DNA, 187 bp, Homo sapiens
  chr13:60970304-60970491
  hyper
ggggcagcggcaagcggcggagatagggattaagttcctaacagtcttcttcccctgacctggcagatggggacgctgccccttagaagcctttttccccgcaatacgggacgccgcagaggtgaaagaccaagaaggtggagcaaacttttagggagcgcctcttgggcccgcgtacccttccgcc

SEQ ID NO: 123851 - DNA, 30 bp, Homo sapiens
  chr13:60970690-60970720
  hyper
gccgcgctaggacacggatggtcccagggg

SEQ ID NO: 123852 - DNA, 30 bp, Homo sapiens
  chr13:60970991-60971021
  hyper
cgtgacctttttagcgcggtcctggacgcg

SEQ ID NO: 123853 - DNA, 30 bp, Homo sapiens; identical to SEQ ID NO: 50700
  chr13:60971329-60971359
  hyper

SEQ ID NO: 123854 - DNA, 214 bp, Homo sapiens; identical to SEQ ID NO: 50701
  chr13:60972271-60972485
  hyper

SEQ ID NO: 123855 - DNA, 404 bp, Homo sapiens
  chr13:61988788-61989192
  hyper
gaagcaaagtaaacgcggaaaatggctatgcaaaaacaatttgtcaattgcagtaggcattcatagccagacgccagcagcaggaaacgatcccgaacccctgtagctaaagcggattgagcgcacccccgatgccctcgaccttatctggatacatttcttgcttcagaaacttcctctcatgacccacggacttccctattccttgttaaaaggaagacacattatcccaaactccctttccctcccggcgccatccttcccgtgaagtttagataaaggtagaaggtttgaaaaaccatccgagtgggaattgcttcacaatactgcaacttgtcggggtcgcggggttccttgaccctaacccttaccggcaggttcctgtagctggtgctgctcctggg

SEQ ID NO: 123856 - DNA, 393 bp, Homo sapiens
  chr13:61989219-61989612
  hyper
cgggtgccaggtcgccgggcaccagctcactcccagggcctgtgagctgcgcgcattccctcggccgcgcattccctgggaggctgcagtcagagcgctcttgaagggagggcggcagaagacactccctctcggttcatgcaaatcgctgggggaacttcagccaatagtcactggctcttcaattaaggacgggaactcaaagagtggcagaaaggcaagagggcagaagggcacattcatggtttcctgccccggacgcaggtaactccatactctgccagaggagctggaatgggggacttgctcctgaagactgcgaagaggcagctcggggttgggcacagtagcgcttacctaccagcctccttccttgccgcaccagtcagatgc

SEQ ID NO: 123857 - DNA, 30 bp, Homo sapiens; identical to SEQ ID NO: 50704
  chr13:67797088-67797118
  hyper

SEQ ID NO: 123858 - DNA, 30 bp, Homo sapiens; identical to SEQ ID NO: 50705
  chr13:67798990-67799020
  hyper

SEQ ID NO: 123859 - DNA, 244 bp, Homo sapiens; identical to SEQ ID NO: 50706
  chr13:67799456-67799700
  hyper

SEQ ID NO: 123860 - DNA, 33 bp, Homo sapiens; identical to SEQ ID NO: 50707
  chr13:67801106-67801139
  hyper

SEQ ID NO: 123861 - DNA, 255 bp, Homo sapiens; identical to SEQ ID NO: 50708
  chr13:67801446-67801701
  hyper

SEQ ID NO: 123862 - DNA, 30 bp, Homo sapiens; identical to SEQ ID NO: 50709
  chr13:67802379-67802409
  hyper

SEQ ID NO: 123863 - DNA, 783 bp, Homo sapiens; identical to SEQ ID NO: 50710
  chr13:67803747-67804530
  hyper

SEQ ID NO: 123864 - DNA, 123 bp, Homo sapiens; identical to SEQ ID NO: 9370
  chr13:67804644-67804767
  hyper

SEQ ID NO: 123865 - DNA, 422 bp, Homo sapiens; identical to SEQ ID NO: 9371
  chr13:67804863-67805285
  hyper

SEQ ID NO: 123866 - DNA, 276 bp, Homo sapiens; identical to SEQ ID NO: 50713
  chr13:67805379-67805655
  hyper

SEQ ID NO: 123867 - DNA, 30 bp, Homo sapiens; identical to SEQ ID NO: 50714
  chr13:67806732-67806762
  hyper

SEQ ID NO: 123868 - DNA, 125 bp, Homo sapiens
  chr13:70681652-70681777
  hyper
tggcttttgagcaggcgactctggctgggtccccagtgctcaaagctgccactgccgtcctgttgcaggcagcctccccccgccgggccgccggtggaaggagacgggtggctgaagagtttcca

SEQ ID NO: 123869 - DNA, 360 bp, Homo sapiens
  chr13:70681866-70682226
  hyper
cgcaggagtaggctggtcagcaggtgggggaggacagcggggcccgggggcggaggaagaggcgggatgcgccctctgcacccctagagccagaagacgctaggtgggctgcgcgctctgccaggcgaaggctggagcgcagacggcaaagccgcgcgtttcagccgtggtcgggtccgcaggacctgggcgtggggacaccaccaggcaggagcagaggcaggactgggacgccaaaagctgagaatcctcgatgcccgcgcgagagccccgtgttatggcgaggtgggacaacccttaggctggagatgcgcgagggagggaggtctgagcgctccgaagctccggaggcggctgcag

SEQ ID NO: 123870 - DNA, 708 bp, Homo sapiens; identical to SEQ ID NO: 50716
  chr13:72438284-72438992
  hyper

SEQ ID NO: 123871 - DNA, 1236 bp, Homo sapiens
  chr13:72439195-72440431
  hyper
gcttccattgagtctcgggcaatcggtcacctccccctaccgaagaaaacctgctggttgccctcgcatctgccccggggccaccgtacccctttatttcctttgcacacgcactcgctcacacgcggacacacgcacacatgcgcgaacacacagacccctcccctcggctggcttcccctccgggcttcggagctcaagtccccggagcccatcccccgggatggacccggtctctcagcttcgcgggtcatttccctcccgacctcaaagtgccctcctcgggtgctggtccgctccctcgcctttcccagcggggccctcacccggagcgcgtctccccgctccccgagccctgcggagcaggtcacgacctccccccgcccccgggacaccgctcggcgccacagatcagccctgtcggtgccgggaggctggccgtggaacccaggtcctggggagcgcacgaacgcggacagcagcgctgagaggggtctccaggcgcccgcgcgcccggggcagggggctgtggctccagcaaaggcgccgtcctcctccctctcgtcccctccgccccgaggctcggctttcccacatcccacagcagcccatccccgggacccagagggcaaggggaggaccgggccgaagagcgaggtctgggcagggtgaggtgccaacttctcagggggtcgggcgcggctggcgagccccgagcagggagaggagagggccgcgctcgccggggcgcgcggctcgcgggcgcgcagagcgagcggcgccgggaaaggagcgagggcaggcgagcaggctggtgggaaggggcgcgggcggcgggggctatcccccccgactcaccttgcgttggtgcagtcattgtagagggtctcgaagtccttcctggagatgagtttgcagcggttcactcctggctggatggcgcccagtcccctcaggatgcgaacttgttccacattgcacaccaccggcgtgatctccagccgcttcagcttggtgtagaccgtatgcaagccccccaccaagtgcttcaggaacaggtcgaaagcctggggcaggcagatcagctcgcagccctccaccgtgaaggaagccactttggcccccctcagatccaccattttgcactcattattctgaggggtgttttccactggggacggggttgagtacacgggtttcccggggagggggccgcagctgctgctgctactgctg

SEQ ID NO: 123872 - DNA, 696 bp, Homo sapiens
  chr13:72440490-72441186
  hyper
gctggcgttgatgggggtgctggaagcgacgccgccgccagcgctgatgccgccgccgccgccgccgctgccgttgctcgcggccgccaggttggggttgcagttgctgccaccgccgccgccgccaccgccgcctccgttgccgctgctgccgccgccgcctccgctgccgccgccgccgccgccgccgccgccgccggtagaggtgactgtggccgccgccgccgccgccgaagcgatgggctccgggcggaacagagttggcccagaggacgccgggggtccgatggaaggagccggagacgaagtcgccgaagaggtggaggtggtggtgccagaggaggaagcagacgtggagattgggggttgaggggggaccagctgggtcggagggatcaaagccgccggcactgccatggtcacatataaggggaaacagacggaggagaagcgagaggaaaagttgccacacacccccgggaggggaaggggaaaaaaggggggagaaggagcgaggggggcaacaacaactccgggagagaacgagaaggagaaagggagagaagggggagaaaaggaggtgaaggtaataaagagcgagcgcaagaggggcgagcacgagaggcgctctggagaggaacgcacaaaagtgtcccgcaagtcgaaatgcgagtcctctccgggggctgggatcga

SEQ ID NO: 123873 - DNA, 357 bp, Homo sapiens
  chr13:72441409-72441766
  hyper
agaggggaggagctccggaaacttgaaataccctttgaagccgcaaaaacctcactcactagtattaacccaaattatccaaccaggaactcggagcagagactccgagagcgcgagacactggagagggagcgtgcgaggaaaggaggaggggagggggaggatacggaaagaaactgtgggagggacggagaggaaaagccggggacacagaagtggcgatcggaaaaggagagggagatcatctacttctcttctactactaccgttagattgcatgtctcacattccatttcgtccgcggggactggtaattttttccaaagcttctaaacaatcgcccgccaacttaaagag

SEQ ID NO: 123874 - DNA, 30 bp, Homo sapiens; identical to SEQ ID NO: 9374
  chr13:72966642-72966672
  hyper

SEQ ID NO: 123875 - DNA, 30 bp, Homo sapiens
  chr13:73301970-73302000
  hyper
tggttcgcggatggcgggacgacacgattg

SEQ ID NO: 123876 - DNA, 30 bp, Homo sapiens
  chr13:73302377-73302407
  hyper
tttccaccccaccccgccaaggtgtagcct

SEQ ID NO: 123877 - DNA, 30 bp, Homo sapiens
  chr13:73355427-73355457
  hyper
agctgcctgggagtcgcaggctggaggcca

SEQ ID NO: 123878 - DNA, 30 bp, Homo sapiens
  chr13:73356077-73356107
  hyper
ttagtaacacttctcgcgggaaaatgccga

SEQ ID NO: 123879 - DNA, 117 bp, Homo sapiens
  chr13:73632747-73632864
  hyper
cacaacacctaagacgtgcaatactctttttcttcctaatcctggcagagaacagtgcgaagagatctccctccgcgtctccaccctaattccccctcttcccagattccacccgct

SEQ ID NO: 123880 - DNA, 69 bp, Homo sapiens
  chr13:73632890-73632959
  hyper
cgccagcccaatctgtcagagaagttgtgtacaaactgcgcggccgccctgcgcgcgaagctcgtggcc

SEQ ID NO: 123881 - DNA, 30 bp, Homo sapiens
  chr13:73633297-73633327
  hyper
ttgcttttcgtgcgcgccttcgaaaactgc

SEQ ID NO: 123882 - DNA, 30 bp, Homo sapiens; identical to SEQ ID NO: 50722
  chr13:73811863-73811893
  hyper

SEQ ID NO: 123883 - DNA, 30 bp, Homo sapiens; identical to SEQ ID NO: 50723
  chr13:73814875-73814905
  hyper

SEQ ID NO: 123884 - DNA, 30 bp, Homo sapiens; identical to SEQ ID NO: 50724
  chr13:73916612-73916642
  hyper

SEQ ID NO: 123885 - DNA, 30 bp, Homo sapiens; identical to SEQ ID NO: 50725
  chr13:73957665-73957695
  hyper

SEQ ID NO: 123886 - DNA, 1486 bp, Homo sapiens
  chr13:74707108-74708594
  hyper
aagtggctcccaggccggctctgcgggttcccggcccgggtggacgtacaaagttgccccttgtcaactccggccaggtcccccgtaattgaaaataacagccaccggccagcccctggctacttgcatggaccaggcactgtagcaagtgacagttacacatcattacgaccagagacaataatgaatgtagcaccaggagcactattcatgccagcagtgtcatctccgccttaaccccttcccctccactctctccagcgcgcacacacagcccacacggtcccggtgcggagctattcatccaccccgctcgaggccggggggccaactacttccacgagccccccctcccccccaagttcagccctggggttttatttcacatccttggcaactgtcaggcaaacactgcaaccaacaattccactaggggtagaaaaacacttgcttaattcacgttacttgataacttcttctggaaaaaaaaaattaggggaggtggggaagaaacctccttctttcttctccacgaatccgaccgacgctacttgctttgcaacagcatcgcccttccccggccccctcccgcttcccagcactttccccctttaagaacacagaccaaccaaaatgatttaacttgagcagatgacagaaggaaaataaaacacgttaagagaatacggtctgatttgggatggcaaaaaaaaaaaaaaaagaggagggggttgtttattttgataagaaacggaatcggcacagacctgaacagaagctgcagagcaggagaaattgttttctttccctcacacagagtccccctctctctctccctttctctctctcacacgcgcgcgcgcacacacacacacacactcgcacacacacggcgtcacccgcgcacacgcacacgcagagcctctcagcggctctctgcagttctcaggaaatgaatggggggcaacccggggaactgttgtacttgcaaatgacttacccggatcacatgatgcgctaaatgtagggtgggccggtgggtggaggctgccgagttgcgagccccggtctagtgtggggagcctcgccaggcccgcatcgaattaccccggggcccagccgagggggttgcaggacgccgcttctcctccctcgcagcccgcagctcaggaaaccggagaggcgcttggggtggggtggggtggggtgctgtgagggggggggccgaaaacaagaaacccccaaacaaaagagctccgggtcctcctccccagaaacaaagccccgccgctgccggcgagccccggggtggggccgagggcgggggcggcggcggggaggggctcgctcagcaggcgctaagtcgctttattgccataaaatggggcccccgagccgctccgcccgaggattaggaggcgggctctgagtgtgatggttgaaatcccctgtgggaaactaacccctccccgctcgcagaggtaga

SEQ ID NO: 123887 - DNA, 201 bp, Homo sapiens
  chr13:74709333-74709534
  hyper
gatgcgcgcctggcctcgccaccccagcgaaggggcccctgcctgcgccagttctgtgggaaagcacgcaaacttggaggactggggcagaggaagcgggatctgcagacccccgcggggcccgggggcggcggggaagggagtccagctccactgccccacgcccagagcggagccccaagaagcggacggcccggagcc

SEQ ID NO: 123888 - DNA, 372 bp, Homo sapiens
  chr13:75149818-75150190
  hyper
ggcaaatgttcaggcgtgcagcatttcaattgatgaaatttctttgtggaaccctgttcccaagggcagggaaaattggagagtgaacaattagatgctggcgcggcccggagaggctcgcggatgcctggccgcgcgcctccgcgggacgtcagcgcccgcggcacgatctgctgctgtcactatcagtatccggcaggagcccgcccgccccggcccggccccaggccgtggaggaggggggagggtgcggcgcaggaagctgaagataagtctccaaatcgggctaagctgggagtggggacagcgagggggagggccgggaagcaatgaagtcagaggcacagcagcgactgcagctgaatcaatttg

SEQ ID NO: 123889 - DNA, 36 bp, Homo sapiens; identical to SEQ ID NO: 9377
  chr13:75794020-75794056
  hyper

SEQ ID NO: 123890 - DNA, 47 bp, Homo sapiens; identical to SEQ ID NO: 9378
  chr13:76054891-76054938
  hyper

SEQ ID NO: 123891 - DNA, 1104 bp, Homo sapiens; identical to SEQ ID NO: 50731
  chr13:76055017-76056121
  hyper

SEQ ID NO: 123892 - DNA, 32 bp, Homo sapiens
  chr13:76056404-76056436
  hyper
ctgcagggctgcggcgcggtcagtcctcagga

SEQ ID NO: 123893 - DNA, 30 bp, Homo sapiens
  chr13:76112172-76112202
  hyper
tttgagaagagaagcgctaattaaatttag

SEQ ID NO: 123894 - DNA, 30 bp, Homo sapiens
  chr13:76123463-76123493
  hyper
tgcacggcgtcctccggccttgctgcctgg

SEQ ID NO: 123895 - DNA, 102 bp, Homo sapiens
  chr13:76123766-76123868
  hyper
tgacacttgacctacggccctgcacggagcggttaagagggtgagaggcccgtcaaactctttttggtgtttaggcgctcctcctccgggcggtgtgttggg

SEQ ID NO: 123896 - DNA, 30 bp, Homo sapiens; identical to SEQ ID NO: 50733
  chr13:76124409-76124439
  hyper

SEQ ID NO: 123897 - DNA, 30 bp, Homo sapiens; identical to SEQ ID NO: 50734
  chr13:76211036-76211066
  hyper

SEQ ID NO: 123898 - DNA, 135 bp, Homo sapiens; identical to SEQ ID NO: 50735
  chr13:76450654-76450789
  hyper

SEQ ID NO: 123899 - DNA, 1110 bp, Homo sapiens; identical to SEQ ID NO: 50736
  chr13:77459235-77460345
  hyper

SEQ ID NO: 123900 - DNA, 30 bp, Homo sapiens
  chr13:77461041-77461071
  hyper
tgaaagtagagagacgcgaaaaacctggag

SEQ ID NO: 123901 - DNA, 30 bp, Homo sapiens
  chr13:77566238-77566268
  hyper
gcaggaggtagacacggcacagggcgccga

SEQ ID NO: 123902 - DNA, 30 bp, Homo sapiens; identical to SEQ ID NO: 50737
  chr13:77566815-77566845
  hyper

SEQ ID NO: 123903 - DNA, 30 bp, Homo sapiens
  chr13:77600438-77600468
  hyper
ctaagcggcaggggcgtcccctcctccctg

SEQ ID NO: 123904 - DNA, 87 bp, Homo sapiens
  chr13:77601287-77601374
  hyper
cgagtctaaaatggcgcccagggctcgcggccgcgcgcttccctggcgcgtccccgcccaagggggcgggaagggggcggggggggg

SEQ ID NO: 123905 - DNA, 59 bp, Homo sapiens
  chr13:77601407-77601466
  hyper
cgggagcgcgcgctgcggccgccccagtctccttgctgtgggacgagcctctgccttcc

SEQ ID NO: 123906 - DNA, 172 bp, Homo sapiens
  chr13:77901201-77901373
  hyper
ccgccggggctacccgcaatgggaagctgccggcctcacagagcatgcgccactcctcgcacatgctcagtaactgccgccccttttcctccccaccccctctccgccaccactccctccgcctcggggctttgggtttggggctgttgggttgtgcggaatctgaagtagt

SEQ ID NO: 123907 - DNA, 30 bp, Homo sapiens; identical to SEQ ID NO: 50740
  chr13:77904036-77904066
  hyper

SEQ ID NO: 123908 - DNA, 30 bp, Homo sapiens
  chr13:78271485-78271515
  hyper
ggtggtgcactactcgagggccagcacctg

SEQ ID NO: 123909 - DNA, 793 bp, Homo sapiens
  chr13:78271861-78272654
  hyper
ggtggtggctgccgcggccggaggcgagggcccggtgctgatgcgaaccgccggctcggcctcagcccgcgcgtggtcggccccccaggccggggcgacagggaaggagccgtagcctccccgtggcccgaggagccggcgcggcggcgcgcactccccggcggccgcggcgccctcggggcccacgatgatggcggagcaggtgaaatgcgcctcggcaggggtcagctctggagcgggctccgggccggtggtgaacgcggagctggaggtgaagaagctgcaggagctggtgcgcaagctggagaagcagaacgagcagctgcggagtcgagcggccagcgcggccgccgccccgcacctgctgctgctgccgccgccgccgcccgccgcgccgccccccgctggcctgcagcctttgggtcctcggagccccccggccgccacggccaccgccgcggcctcagggggcctggggctcgggctggcgctgggcgcggggggcggtggcggcagcggtagtggcagcggcggtggctccagccccgcgttcccgggcaccttctgcctgcctagccccgcgccctccctgctttgcagcctggcgcagccacccgaggcgcccttcgtctacttcaagccggcagcaggcttcttcggcgcgggcggtggcgggccggagccggggggcgcggggacgccgccaggggcagctgcagcgccgccctcgccgccccccacgctgctggacgaggtggaattgctggatctggagagcgtagccgcctggcgg

SEQ ID NO: 123910 - DNA, 1174 bp, Homo sapiens
  chr13:78492725-78493899
  hyper
aaggcgtccggtggccgctccgcagtttcagagcctagagacaagcagaggaaggaagacaggacacttgggtcagctgcccgagccaagtcgctgcaaacgctaataccgcccgcagcctcttcgccagtatccacgctcaaaagtaactcaagtttgcgcgccagtgggaaacttggcgctcatgactcgccagcgcgggtcgaaactccttcctgatgccctctcagctgtttttcttcccccgcgtggccaggaggggtaaataatatgcagtggggcggggcgttctggaaggggtgtgccagggagggaatgatgggggtcccaggcaaagctccgaactctttcacgtaacgggaggaatacagacacgtcttagttaagcgtgcgtgggaaccgcggaattaaggcacctagaggccaagggcttgtgtcaagctctgcattttgccccgcaggggaacctctataccccgcgattgaactcgaaagactcctcccggcggatgaaagccgctactccctggctggctgagctacagctcccgcagcgcgcccaggagtgcgccggagattcggaaacccgcagagacttctcaagtcagcaggaacttggaaaccgctgttccctccaaacggcttcaaacactcgcgctccttcctttacccaacctaattttaatttgccctctctataggcttaatttttatttttttaaaatcccaaactagtaagccaaaccgaagccccagaataaggttcaatcaatgattttaattcaacaccaagcccgaatgtttacctctcggatctgacaaaccagatgcagagcgacgaatggagaccaccttcccgggaggcggaacccagctgggttccagcctgctctgggagaggagcacgcctcccttgagctgcaggcgggtccggctctgacgaaacgctgcgagaatgccagacagtgtagcctccaccgtttgctcggggtctctgctgccatcagacaagtacttttattcattcatcccttcccatcaatcaccgccagactcctcccgcgccttccgaccccgctgcaacctttccccttgggcgatgcctggacagcatcagtagtagttgcccgagggaggggggcagtcctcgtccggggacaggtcccaaaaggct

SEQ ID NO: 123911 - DNA, 260 bp, Homo sapiens
  chr13:79160899-79161159
  hyper
gaggcaggaagtctgcgaaaagccccagacagccactgcagtgccaagtgtgctgctcactagcgacccctctaggtcttagagagaagagagctcatgcagaagagtactcgggaccattgccgggacgagaagcccatcaggctgactgctccattagggagcatcgcaagctcggggtgcgaaagcttccccgccgccaaccagccagccctgccctgtgtagacgggtcgccagagcgcggcgcagggatcgagct

SEQ ID NO: 123912 - DNA, 154 bp, Homo sapiens
  chr13:79161683-79161837
  hyper
tagcacacacacacacgcacacacacacacacaaacgcgcatccctgagcaagaaggcaaaaaagaatccaaaacttgagcaggtcgccaggcccttttcctctctcagccaaagtatgcccagtctacatccccgccccaccaccccagccac

SEQ ID NO: 123913 - DNA, 30 bp, Homo sapiens
  chr13:79163502-79163532
  hyper
agctgctctcccgcccgctctccccttgac

SEQ ID NO: 123914 - DNA, 30 bp, Homo sapiens; identical to SEQ ID NO: 50746
  chr13:79168029-79168059
  hyper

SEQ ID NO: 123915 - DNA, 17 bp, Homo sapiens
  chr13:79169698-79169715
  hyper
ctccagcccttggttcg

SEQ ID NO: 123916 - DNA, 264 bp, Homo sapiens; identical to SEQ ID NO: 9384
  chr13:79169849-79170113
  hyper

SEQ ID NO: 123917 - DNA, 36 bp, Homo sapiens; identical to SEQ ID NO: 9385
  chr13:79170347-79170383
  hyper

SEQ ID NO: 123918 - DNA, 1162 bp, Homo sapiens
  chr13:79170467-79171629
  hyper
cgccacccggagaaccgcggctggtgcccttgaaggccctgggatgcctgggttgggtgggtgagtgaacgagaaccctgagtgagtgaggggagggcgggtcccctcctggcttcaaattcaacccaatcagctctgccgatggtttgaaactgcacacgccgacccacccgccccgaagtctgaaagttatgccctggagacctgcgagctgcggagtgcagctggagagggagctgccccacgaggaggcctccagaataactcccggagtcggaacagcgctgggctgctgaagtttgcagcctccggatccgcgccccgccctgcagatccaccggatttcggggagggaatcggggggctgcccgtcctcccgtaaagctgacttgacaacaattacgaaagtttttaattagctccttgttataattcattttatttccagaactctccgaccataaattattcaaagagtaagccaacccgagcggggcggccgcgcgccttccccacgcgcgccgggctggctctggccgctcagctcacccgatgccccgtgagccagccccgcgccagaagccgcggtggcaggaaggtttgatcaaacattaaataacgtaatgtttgcgacaaggcttatctcacaagtggaaaagaggacctcgcgagaattagaattcggctgctattttaaaaaatcaattaagcttgcggtcttttttgaaacagctcgaaaggactgcgtggctatcatcgtggcgctaagactgagatggcaataacaccgatggcagaactgtaccagtattaattgtcatcacctttatcatcccgctggccaccaaggccgttcgaatggggtgggaaaggctagttttagccaggatcagaagccccagttccaacttcacggacgaaaaactgcgaaagcctatcaacttgaaagatgagtagggatacttcacgcaggtgccaggtgctatcaggagaggccggggcggcggggcagaggcagagggcagggatcgctgagtgagtcctgcgggcttggggcgccctgttctctcacgtgcgctgccacgtgtaggaggaactggaccgaagtagtctcagtatcacaagaaaacaaaaatcgatacaatcacggcagtgggtgcct

SEQ ID NO: 123919 - DNA, 341 bp, Homo sapiens
  chr13:79175602-79175943
  hyper
accacacccgcaccacgttctttttgaggtccagtttctcggcgatggcggcgatcttctcggacgagggccggggctgcacggcgaagtaggcctcgagggagcgcttctcgggcgcggcgatggaagtccgcttgcgcttcttctcgccgccgttgaagagctcaggcttgttcattttctcgcgctgggcgccctcggcctcctcgagccacgcctgcaggatgggcttgagcgcgatcatgttgttgtgcgagagcgtgagcgactcgaacctgcagatggtgctctggctgagtgagcccacgcccgggatcttgaggttggccagcgccgagccc

SEQ ID NO: 123920 - DNA, 48 bp, Homo sapiens; identical to SEQ ID NO: 50752
  chr13:79176077-79176125
  hyper

SEQ ID NO: 123921 - DNA, 144 bp, Homo sapiens; identical to SEQ ID NO: 9387
  chr13:79176276-79176420
  hyper

SEQ ID NO: 123922 - DNA, 576 bp, Homo sapiens; identical to SEQ ID NO: 9388
  chr13:79176608-79177184
  hyper

SEQ ID NO: 123923 - DNA, 317 bp, Homo sapiens; identical to SEQ ID NO: 9389
  chr13:79177305-79177622
  hyper

SEQ ID NO: 123924 - DNA, 189 bp, Homo sapiens
  chr13:79177885-79178074
  hyper
cgtgggagccgctcttatagtgaccaccagcaaggacagcgcaggtgatgcacctgtagctacccgggcatgcgcactgcccgcctcacctttcccaccgtggtctggaaagatcagaaggtccagctattgtctaagggtgggcaccttttagaataaaaaagacgagatgcgcgcacgcccctctat

SEQ ID NO: 123925 - DNA, 295 bp, Homo sapiens
  chr13:79181159-79181454
  hyper
accttcgttggttggcgtgaggactggcgggagaggttttgtgccaggatccgcactgtctggggtgaacgctcctcacctttgacctgaaccgccaacttcccatcctccacttttggagagcgcgcctgatagctgctgcccacctgggcactgacatcctccttccgaccgggtgcggagaaagttagtatttgactccgcagccactactcgccccaccttctcacctccgaggggttgaacccgagttgtctgttggggtttagggactcaggatcgggtctgagggact

SEQ ID NO: 123926 - DNA, 30 bp, Homo sapiens
  chr13:79183129-79183159
  hyper
aacgctcgccggcgccgccgccagccgccc

SEQ ID NO: 123927 - DNA, 17 bp, Homo sapiens
  chr13:79183406-79183423
  hyper
actctttgttggtttcg

SEQ ID NO: 123928 - DNA, 106 bp, Homo sapiens
  chr13:79183745-79183851
  hyper
ggtgggttaggcgaggtcgccccttcctgccctcaaaaggtcaagtctcgtcttaatggacagatgatgggccagctcgccaccgcctaaacgttccagcgcccag

SEQ ID NO: 123929 - DNA, 30 bp, Homo sapiens
  chr13:79233190-79233220
  hyper
aagcaaatgtggcacgtgatgggcagagtg

SEQ ID NO: 123930 - DNA, 31 bp, Homo sapiens; identical to SEQ ID NO: 9391
  chr13:79979539-79979570
  hyper

SEQ ID NO: 123931 - DNA, 30 bp, Homo sapiens
  chr13:79979901-79979931
  hyper
gaaaccatccacagcggccctaaggcccgt

SEQ ID NO: 123932 - DNA, 45 bp, Homo sapiens; identical to SEQ ID NO: 50759
  chr13:79980676-79980721
  hyper

SEQ ID NO: 123933 - DNA, 43 bp, Homo sapiens; identical to SEQ ID NO: 50760
  chr13:80055213-80055256
  hyper

SEQ ID NO: 123934 - DNA, 51 bp, Homo sapiens
  chr13:80055633-80055684
  hyper
agccggggactgggcgctaccaggtggtgagttcccggcctcctgtgcctc

SEQ ID NO: 123935 - DNA, 725 bp, Homo sapiens
  chr13:80913010-80913735
  hyper
tttcacttagtttatcgcctctctgtgccccaacaccgtccccagcaggtgggacacagccgatccccaggggagtttctccaggcggactgacgctgtccatgggccaggctgcccccctgcttacgatccccagactcagacaggcgggggccgcgggcgcctccgaagggtacgtgtcacgaaatgcaggagcacacttcccccgcctccctctccccagctaagatctcccccaactcaagagaactgccttccagccccaaggagccactccgcccccaggcagaggtcacgccgcccactgccaggctttctgcaaagcccctcggacatccggcacaggtttcccaccccgacactgcgagcacgaaagccctgcctgagacacgcagccaggacgcacaagtccaacccacgcacacacggcgactccacgctgcactgaccgaagggggcattgcctgtaatctgcacacgcctatctccttttgggtcgagagaaaaaaaaaagatatcatatttcttaaagtgaaagaaaaatggctttttaaaaaaagggcattttccagggtcccactgctcactccgggcgcgcaggacccagctcccggagctgtaaactttcggtgcagatttgcttgcagtcaaagtagcatctttgaaataaaagggggcttttttgtttttattttttaagtgatttctgccgatccgatccctgg

SEQ ID NO: 123936 - DNA, 1676 bp, Homo sapiens
  chr13:80913999-80915675
  hyper
taatggaaaatgatcgcgaccgcttgatgactttcttcctgcgctgggtcagcccgagcttccaaaaataaaataagtgtgacccaggctgaccacgaagaacggaagagagagagctgcacttccgaaccgcagagacccggcgccaggcagggcgacgctcccacccgctccgggctagactgtccacacggagcagaggcgggcactccctccacccggcaccctgcctttttctcaccctggaagtctcctgcccccgaggcgggcaacctgtgtcccccagccccaccagcgccccgcctagggacagcctctccctggactttgccttccaccaagaggaagaacaggttagaaatgcgggcgcctgcaaaggcaacctggaaaatacaaagtgtttttctctccctctcccgctctcagcgccgaattcgcggccagtgcacggctgggagcagacttcaggctagctgtcctccgtcccaaccccctagagcgcgggcgcgcggggtcgcctgtcggggacactgcacggggtgcatacagaagtccccgcagaggcaggccgagcccaagccccgggcgaggcaggtccgcggggagcgccccggatcctcgcgaagaccctgcgggatttgagaaagggaggctcggggagagacggacccaactcctggtccggctgcacctactccatgttgcccacaacgcgccggccgcggcgccaggaggggaagagccaaacgtgcctcaccgtgatcgcggctttgcaccaacccctctcccttggattctcttctttctgcgatgtgcaaataaatccagtctcgatgcaaacttttttcctttctttccaacctctgctttagaccaacttccgagcaatcggcgggagaaaaaaagagaattcggagccagattccccgctgatgaacactccggggttcggagctggagacgactccccttctacaagcgcacgcggagtatttcctcttttttctcaatgaacaagaggccgaagcgccaacggcaagtcccttttcctggcagatgagcgaatgggaaaagaaaacggccttacggagaacctaaagccagatcgccaagtggtgcggccggggccgcgtcgtagcggaggcggcgcgggggcgcgggccgggccgggccgggcgggcgcgggggcctgggcgctgcgcgctccgccggcccctctcctccgctagcgctgcggcgcgcagctctcggcggtgcagactgggcgttgtggaggcgaggcagcgaggccgaggcgggggcggtgggtgcggaggaggaggaagaggaggaggaggaggaggaggagggtctggggcccgcccggggggggctcgccgttggcctgcgccctcgcctttccggaggaggcagggagctctgcggcggccgcggcagcagtaaatggcgtcatgtggatccgaggcggaacagagcagttgttgtcccagaggatatatcgcatccggtcccagctcattggctccgcggggctacattcactcacactccagcgcccgccagcgctccgagccgcaggaggcattcaaaagggcaaccgcgccgccccgcgcgtccccaggccggtcctgccgcccgagcgccgtcacgcggggcgcccgcggggccgggctggg

SEQ ID NO: 123937 - DNA, 202 bp, Homo sapiens
  chr13:80915905-80916107
  hyper
ttctgttcccctttgcggagcgggtgacgggggctggggcggggggagaagaagggggaggggaaggggagcgggaagtgaggtgggagggctattggtttattctttgtctactggattaacccgattatacaccaggcaccagcacaaaccgcctcccccacctccgagccttgtacgggaggaacggaatgcagattcg

SEQ ID NO: 123938 - DNA, 30 bp, Homo sapiens
  chr13:80916308-80916338
  hyper
caagattactcagggcgacagcatgggctt

SEQ ID NO: 123939 - DNA, 500 bp, Homo sapiens; identical to SEQ ID NO: 50764
  chr13:80916946-80917446
  hyper

SEQ ID NO: 123940 - DNA, 247 bp, Homo sapiens; identical to SEQ ID NO: 50765
  chr13:84455510-84455757
  hyper

SEQ ID NO: 123941 - DNA, 631 bp, Homo sapiens
  chr13:84456112-84456743
  hyper
tgtgcatggctgtgcgtcggactgaccttgcctctctgatacaaagcagggttttccgcggcttctgttgttgaggctgctggtggagttcttgctgtggttgcgggttgcccagaagtccccccgaggtgctgtccagttcccccggtgctgaaatcacgcccgaccgaaggactcacgctgcccagccaatggcgctggaaaatttccgcaatcgctgcgttttgtggttgtccatccttttcctttcctccccttcggtcctcttaaggcttttttttttcttttctgtgctctcgctctcgcttactagctcttcttttcctgttctccttctctttcttctgctctttcggaattacgtggaggggggcggagggcggggggcgagttgtctgagggaggaagagagcgcgagaatgaggggaggggggcggagaagagagttgctaagaagctctgctcgttccagcctggtgcactctgaaagatctgacaccctctgctgatctgcagtagcaaaaatccatctggctagggaatgctgaaagaaaaaaaaatcaatccacgtacagggcaagcgttaaaaatgtgggcataaaaggctgacgatctacatagatgcttattt

SEQ ID NO: 123942 - DNA, 450 bp, Homo sapiens; identical to SEQ ID NO: 9398
  chr13:88323380-88323830
  hyper

SEQ ID NO: 123943 - DNA, 651 bp, Homo sapiens; identical to SEQ ID NO: 9399
  chr13:88323867-88324518
  hyper

SEQ ID NO: 123944 - DNA, 71 bp, Homo sapiens; identical to SEQ ID NO: 50769
  chr13:88324920-88324991
  hyper

SEQ ID NO: 123945 - DNA, 1515 bp, Homo sapiens; identical to SEQ ID NO: 50770
  chr13:88325192-88326707
  hyper

SEQ ID NO: 123946 - DNA, 85 bp, Homo sapiens; identical to SEQ ID NO: 50771
  chr13:88326936-88327021
  hyper

SEQ ID NO: 123947 - DNA, 31 bp, Homo sapiens; identical to SEQ ID NO: 9403
  chr13:90384876-90384907
  hyper

SEQ ID NO: 123948 - DNA, 30 bp, Homo sapiens
  chr13:91999393-91999423
  hyper
ttctgggtctcaaacgatctttgcagcgag

SEQ ID NO: 123949 - DNA, 354 bp, Homo sapiens
  chr13:92001425-92001779
  hyper
cgggtgttcctgcccggtcttctgttcctaaactgcagcaaagggaaaaggaactgaaaaaggcaggctcgtcgttgcaatatcaccaaaagagaaaattaacggcatgccatcaggaccacagcagttggagaaacaactctttatcccggcttgcagccacgaggtcttgattgggggaggggtggtgaagaatagtctgtgggctgctttttttttttccttttactggagctgtacagtggagtcggtgattgctgctgatcataatcaagtattttaggagcttatttagacatgtatctgatagctaaggatttttcaactttattctcttacgtatttttcaactgt

SEQ ID NO: 123950 - DNA, 853 bp, Homo sapiens
  chr13:92050660-92051513
  hyper
attcttccccagaacggactgggagagcgaggtccgggtttccttctatttatttgcatcgatgtcgctccgagtcttcagcactgggccgcgtatgacagcatcttagtgggtgcggagcgggacagcgcgccgggggcgtggcaggggcgtggcctgtccgcggggcggggagtgcggggcggggcttccgcggagcgcagcgagcgggcacatcccaggttagctgctgcgagccgagccgggcggcggaggcggcggcggcggcggcagtggcggcagtggcggcagtggcggcagcggcagcagttgcagcagtggtggccagagcggatgcttgcgggctccctgcggctccactagttttcttcgccccgcccagccgcccactcttctcggctagggaagaagaccagagggtgctcagctggaaaactctggtgtctcagcttagggcctcctccgggaagagctaactgctcccaggtgaagccggtgcccgcgggcggtccgtacaccccgcagccggctcgcaccgctcgagagcctcggccgctgtgtcttccacgtctgcagctcagccagggcgcgcagggcgagtggggtccactggcgggtaaaggggaccaggacggcgaggatggacgcacagacctggcccgtgggctttcgctgcctcctccttctggccctggttgggtccgcccgcagcgagggcgtgcagacctgcgaagaagttcggaaacttttccagtggcggctgctgggagctgtcagggggctgccggattcgccgcgggcaggtaaggggcaatgagggggtctctggactggcggcgtccgagcccggcct

SEQ ID NO: 123951 - DNA, 30 bp, Homo sapiens; identical to SEQ ID NO: 9406
  chr13:93152311-93152341
  hyper

SEQ ID NO: 123952 - DNA, 440 bp, Homo sapiens; identical to SEQ ID NO: 50777
  chr13:93878954-93879394
  hyper

SEQ ID NO: 123953 - DNA, 173 bp, Homo sapiens; identical to SEQ ID NO: 9409
  chr13:93879602-93879775
  hyper

SEQ ID NO: 123954 - DNA, 298 bp, Homo sapiens; identical to SEQ ID NO: 9410
  chr13:93879918-93880216
  hyper

SEQ ID NO: 123955 - DNA, 204 bp, Homo sapiens; identical to SEQ ID NO: 9411
  chr13:93880533-93880737
  hyper

SEQ ID NO: 123956 - DNA, 332 bp, Homo sapiens; identical to SEQ ID NO: 9412
  chr13:93880793-93881125
  hyper

SEQ ID NO: 123957 - DNA, 819 bp, Homo sapiens; identical to SEQ ID NO: 9413
  chr13:95201108-95201927
  hyper

SEQ ID NO: 123958 - DNA, 612 bp, Homo sapiens; identical to SEQ ID NO: 50783
  chr13:95202013-95202625
  hyper

SEQ ID NO: 123959 - DNA, 30 bp, Homo sapiens
  chr13:95248424-95248454
  hyper
tatggtctgaaaagcgcagggaagttccgc

SEQ ID NO: 123960 - DNA, 30 bp, Homo sapiens
  chr13:95253976-95254006
  hyper
gacgctaggatctgcgcgtcccgcccattt

SEQ ID NO: 123961 - DNA, 30 bp, Homo sapiens; identical to SEQ ID NO: 50784
  chr13:95254325-95254355
  hyper

SEQ ID NO: 123962 - DNA, 30 bp, Homo sapiens; identical to SEQ ID NO: 50785
  chr13:95254675-95254705
  hyper

SEQ ID NO: 123963 - DNA, 460 bp, Homo sapiens
  chr13:95354379-95354839
  hyper
agctttgacacttctcgtaggttccaaagacgaagacacggtggcttcagggagacaagtcgcaagggcgacttttccaagcgggagatggtgaagtctttggacgtgtagtgggtaggtgatgatccccgcagccgcctgtaggcccgcagacttcagaaaacaagggccttctgtgagcgctgtgtcctccccggaatccgcggcttaacacattctttccagctgcggggccaggatctccaccccgcgcatccgtggacacacttagggtcgcctttgttttgcgcagtgattcaagttgggtaacccttgctcaacacttgggaaatggggagaatctcccccacccgcaacctcccgcaccccaggttcccaaaatctgaatctgtatcctagagtggaggcagcgtctagaaagcaaagaaacggtgtccaaagaccccggagagttgagtga

SEQ ID NO: 123964 - DNA, 175 bp, Homo sapiens; identical to SEQ ID NO: 50787
  chr13:95355116-95355291
  hyper

SEQ ID NO: 123965 - DNA, 797 bp, Homo sapiens
  chr13:95355493-95356290
  hyper
aggggttaaattagcggggggagaggccgcacctaatttcagacacttttctttctaatgtggctccagccccagagggaggggtcaccgggactggaggctggggtgtcctctaagaccctctctcccttccagatctctctgttccgtgcggatcctgccagagcccgcgtgatcatcgcctcccacacccctccctccctgacctggccagtctcttctcccagggaggaactttgcggaggggtcagtgttgggaaccctggggtcctccgccgcctcctgatcttccgccagtcccgccactcctccgccctgggcgtgccttccgcaggtgaacctgaaggtgcgtctgcaatgctgctgttgcattctcgttcttgtagattcttcttctattctctctctttgccttccgtttcacccagcacccacttttcctacgctgctctgaagaagttctctatcttctgtctcaggctctccgtgcgtcctttcactcgtcttcacccggccagtctatgcaggcagagtaaggccatatgggcgaccattcggataatccaatttaaaagaaacccccttacaaaaatccagctaagcgagagggggcgagggagagcgctcgcgcaaatgtttgttgtgcagaattcccctgtgtttgtgcgcagtcccaaccccacacagtctcccctggatcctgatgcgcgcccgcatagtgatgacttccaaatctggggtttaccacgtggtgacaaataaacaggggtacactccaaacccgctggatgtctatg

SEQ ID NO: 123966 - DNA, 903 bp, Homo sapiens
  chr13:95357000-95357903
  hyper
gaattaaaaagccaacgccaattttatttcctccagtcaagcgtgagtgatggggcggccgcgcaagggcaacggagtccagcggacaaagcttgcagagaggggcagtggcccggaggcaagggtggcggtggggggggtggggggatgggtcacaaaagtagagcaactgagcttgctgcctagcggtgccacttccctgctctgcgctaaggctatcgtcgaaggcccagagacaccttgaccctggaaacccaatccagcacgtcctgcctccccacaaatatccctcaccccaaatcgctgtgcgttttgtctcctcaaagcgactcccaatggatttggatttattcagatagaactcttcggaagtttttcagatttttcaatttcaagaatttgcatgttttaagtgaagctgaaaccgcgaaggctcaggttacactttaaaatatgcaaggcttccgtgcggccccgacatttggtaaggctcaattgcttaagaaaaaagaaaaaaaaaagaacattgctttgagaatttggggtgccccccccccacttttgtcacaattcagagcttcattccctccggccgtccaggacgtcgagagagcggctggccagagctcagccccggcgcattcgcagggacgtgtcagctgggcaggctataatttgcattattccattaagttaggagcagcgctgataacgactggaaagttcgacggctgggtgggcccgcgacccgcaggcctggcgagcaaccatcgaaaataaaacaattgctgtccttggcggcaaaggcctctatggacgcctccagggcagcgcagggaaccaaagggcaccccagatctctgcgggttcgcgccttgcctcgtgggggacaggaggttctct

SEQ ID NO: 123967 - DNA, 250 bp, Homo sapiens
  chr13:95358190-95358440
  hyper
aagcgaccatcctgcgtggacctttctcccaggggtgggatgatgaaaaaagaaatcctcctggggaagcccctaggtatcccccagcccctacctttattaggaggcccgggtttcccccattaaacttatattcattcattcattcattcattcattcgttcattcattcataccacgactattcagtgagcacctaccatgtgccagacacagtattagactctcaaaaacgcggcataaatggaaa

SEQ ID NO: 123968 - DNA, 314 bp, Homo sapiens
  chr13:95359103-95359417
  hyper
gttgtttcactgtcacgcagtgtcaacttagtctattcaatgggggctacttgaaggccggagggacaaagcgtgtacacattgcaccgctattcattccggccagctggatcggctgaaaaaaaaaccttgtgaaaagaaacgcctcacaatggacacagaagaagtgcacaatgctaacagttttccaaataccactgattggtttcttcacaatgaggagaaagccgccgctttttcttagctccacttcaacaaacaacactctcacaaaacctcccaaccctgcgttttgttctcggacaaaacctcct

SEQ ID NO: 123969 - DNA, 1182 bp, Homo sapiens
  chr13:95359620-95360802
  hyper
gagagattaataaagtttggacggctccctcggcctccgctgggccgcgggcgcaagaaagacgcggaccctcgaggcggacgagttgcgggaacttcgcttgcctggaggacacggcggcccaggcggccgggagcgccggcgccgagccgcgctctgattggctggcgcgaccgtccctatctgctccggggagagtggaatcttctctccatcttctgcgccccgagcctggggtgagagggagatccgcggtgctttctcctatcttcttgggggagggggaggaggaaattgtcaagggaagtaacaatcgcggccagcaaccctgctctcccaaagccaccccctcgcgcgacagcgtccccagcaccagttcttactgcttacacagcgcaattccacctgtttgcacaaagcccgaagcaacatgcctggccccttggatacgaggcttgcttcaagttttgggacaacggtgaataccaaagaaattgcatcatggctttaaaaaaaaccttgaaaagaaacgaaaatagaagaataaaaggaagggaaagaagaaagatggaaggaaggaaggagagagaaggaaagaaagaaaaatggagaaacagggagagagacggagatagataaagagatggagatagagatcgcgagccagcagcagctctctgcccaatcacagcgctgcatttgtgggccactttcagacgcttacaccacccacccccgggcctttctctacgccctcttgccccggagccgctccccccgctccaaccccttacttctgcacagtctaacttggcaggaggctctctgcaggcgcaaaacccgccaacttgttagcaagaccattggagtcagaatgggtgataaacgagtctgtggggcctgtggaggtcctcaaacagccgcacaatctgttggcgatatgacctcggtgctccccctcggcatcctcacccctcctcttacccatctttccagtcctcttctcattcatcaacaactccggagcgtttctcccagaaaacgctgatctttgggaaaaggggagggggcgggaggaggcggggagtcttcaggccgaggaggcggccgagctggaaggctcagggtggtaactaagatttagggctggggtgatttccagcgagccgcaggaagttccgt

SEQ ID NO: 123970 - DNA, 495 bp, Homo sapiens; identical to SEQ ID NO: 50795
  chr13:95362956-95363451
  hyper

SEQ ID NO: 123971 - DNA, 466 bp, Homo sapiens; identical to SEQ ID NO: 9421
  chr13:95363493-95363959
  hyper

SEQ ID NO: 123972 - DNA, 226 bp, Homo sapiens; identical to SEQ ID NO: 9422
  chr13:95364064-95364290
  hyper

SEQ ID NO: 123973 - DNA, 1127 bp, Homo sapiens; identical to SEQ ID NO: 9423
  chr13:95364329-95365456
  hyper

SEQ ID NO: 123974 - DNA, 568 bp, Homo sapiens; identical to SEQ ID NO: 50799
  chr13:95365497-95366065
  hyper

SEQ ID NO: 123975 - DNA, 978 bp, Homo sapiens
  chr13:95619803-95620781
  hyper
agagtgggttttgctcgggcgacttgattgtctttcaagttggcgttaagagttttcaacaggtctccttccctgccagccgggaccccgggggtccctcggagcagggcgggtgggaccgctcggcctccttctctcgcccgcacgggcgccgccgcagacccggagcaggcacccggcggccgccgcgtgggctgcagcttagcctcctctgcgggcgcccggcagggctgcgcggccgagactcggggcgccggcgccggggcggccgggagctctgtcatttggcaactccctgcagactgatgacacggcgctttccatggtcgagccccacaaagtgtagggctgcggggcgcacctggctgggctcctaattacccggcctgggacgcacggggcagccgcggagggtggcgcctggggtcgggccggggtccccttcgccgcagtcccgcccacccgcagcctccgaggggtcccggccagggcgttctccacacgctcggctacctgcaggggttcgccactgcaagccgggccagtagaagtttgggggcgaaggcagagagcatttccttctcggcttttggcgcctccacgctgcacagaggcaggggcgactctgcaggccccgtttcccccatcctcccctccaccccagttccccgcaggacgtaggcgccgtccctagctcccccttctgtcctcgccctaacaccgcagggcctctcctggggatgtggggtcctgcgtgcttttgggggctacaaaaagtgggggccgtcgcagagcagagggaagctaggagcgggcaacgaattgaatcctggagacccgggaggagcgaggctgctgccgtccccggggaaagggcgacttcggcggggataccccgtgccaggccctgcaactcccgggccctcgggaatgggatgggggaggcgcggggtgcgcgcagctcccggtgatgttaag

SEQ ID NO: 123976 - DNA, 215 bp, Homo sapiens
  chr13:95620853-95621068
  hyper
cgctgcggccgctgtgtgcccgaggggcggctctgtaacccggctccaggcatttcttaggtttcccatccccgccctccaagctcccgggagcgcctgctccgctgcccgcagacaggcgtcgttcaaacctcagctctgctcggtctgcattcatggaccccagatcttcaccctaggatttccatctcagcatttcacgttcccggggaaaa

SEQ ID NO: 123977 - DNA, 30 bp, Homo sapiens; identical to SEQ ID NO: 9428
  chr13:96056222-96056252
  hyper

SEQ ID NO: 123978 - DNA, 30 bp, Homo sapiens; identical to SEQ ID NO: 9429
  chr13:96056473-96056503
  hyper

SEQ ID NO: 123979 - DNA, 553 bp, Homo sapiens
  chr13:96204922-96205475
  hyper
cgggaggcggagccccggggttgggagtgcgggggtcgcggcgcagagtgggagccggagagcgagcgcggctgcagccggcggcatggctagcacggcttcggagatcatcgccttcatggtctccatctcaggctgggtactggtgtcctccacgctgcccaccgactactggaaggtgtctaccatcgacggcacggtcatcacaaccgccacctattgggccaacctgtggaaggcgtgcgttaccgactccacgggcgtctccaactgcaaggacttcccctccatgctggcgctggacggtctgcatccccgcggcccccgccctcagccctccttccttgatggccagcccgctaggcgccctctcgcccccaatacccccagcgggacccctagactggactcctctgaggcccgacccgtctctcccaacagggccttagggagccagggacgctcctggtgcccgccctctcctgatggctgtctcgcggggcgcctgttcgagcctgggaccccgggaggggggacacgcagacaggcccgg

SEQ ID NO: 123980 - DNA, 120 bp, Homo sapiens
  chr13:96296225-96296345
  hyper
cactccatcgtggggcgtcgtgccgctgaccacccctttccccttgcgtggatctcggtcacaagatggccggaacaggaaagaagggggcatgctttcccgttccctccctcccccatc

SEQ ID NO: 123981 - DNA, 183 bp, Homo sapiens; identical to SEQ ID NO: 9432
  chr13:96296372-96296555
  hyper

SEQ ID NO: 123982 - DNA, 109 bp, Homo sapiens; identical to SEQ ID NO: 9433
  chr13:96296840-96296949
  hyper

SEQ ID NO: 123983 - DNA, 229 bp, Homo sapiens; identical to SEQ ID NO: 50808
  chr13:96296991-96297220
  hyper

SEQ ID NO: 123984 - DNA, 30 bp, Homo sapiens
  chr13:96329347-96329377
  hyper
cgtcgcccgggccccgcccaccgctgcctt

SEQ ID NO: 123985 - DNA, 30 bp, Homo sapiens; identical to SEQ ID NO: 50809
  chr13:96330037-96330067
  hyper

SEQ ID NO: 123986 - DNA, 626 bp, Homo sapiens
  chr13:96705318-96705944
  hyper
gccagacacccgctgcgagcacgaagaaagcgcggctgagggtggcagcgcgcccacacccgcccggacgagggcccggcccgcacccaccttgcctccagcagcagcggggtctcgggccacttcgcggccaagtgggcagtcaccgacttggacgcggcgaccgtcccggagccgagctgcgaaagccacagcgctgtggagcctagtagcagccgcaccacgttcgtggctttcgctggcgccatggcacggagagaaaagcgcgagtccctcggacccggtacccacagtctgtggccgccacgcttcggccggctcttcccgctgcgcggctgcccacttccggtgggaggagctcgagtccgttactgggtgccgggtccagaccggcgcatgcgtgtcccgctccggcgcggtttagtgggtgcggcctggagagcccacgccagccggacactgggccacgtcggagccgccggggcggcgccgggttgctgagcggcgtcacagatgctcccgcgggtccgctcccgcgggtccattcccaggactttgggttctcggacagaggccttaggacacggggcgggaagctggctctccagaccgaactagggctctgg

SEQ ID NO: 123987 - DNA, 134 bp, Homo sapiens
  chr13:96742302-96742436
  hyper
tttggcgcatgctccgtacctagggcaggtttttgctgcgggtagcagggctcctgtcacaccggctggcgggttgtggcggtgccagcctgtgtgtgcgagtgtgtctgcgtgcctgcgcctgggcggacagc

SEQ ID NO: 123988 - DNA, 982 bp, Homo sapiens
  chr13:96742965-96743947
  hyper
cgccagccagccacacgcctcggcgtcaggggcatggaggaacggcgggctccgagccgcgccccggagtccgcgaaacttccgagcgggcgcccgtccgccctgccgccgccgccgccgccgcttcgcctgccggcctgagagcgggaccatggatgaaaggttcaacaagtggctgctgacgccggtgctcactctcctcttcgtggtcatcatgtaccagtacgtgtccccctcctgcaccagctcctgcaccaacttcggggagcagccccgcgcgggggaggccggcccgcccgccgtcccgggtcccgcccgccgggctcaggcgccgccggaggagtgggagcggcggccccagttgcccccgccgccccgggggccccccgagggacctcggggggccgcggcgccggaggaggaggacgaggagcccggagacccccgggagggggaggaagaggaggaggaagacgagccggaccccgaggccccggaaaacggctccctgccccgattcgtgccgcgcttcaacttcagcctgaaggacctgacccgcttcgtggatttcaacatcaaagggcgcgacgtgatcgtgttcctccacatccagaagacggggggcaccactttcggccggcacctggtgaagaacatccggctggagcagccttgtagctgcaaagcgggtcagaagaagtgcacctgccaccggcctggcaagaaggagacgtggctcttctcccgcttctccaccggctggagctgcgggctgcacgccgactggacggagctcaccaactgcgtgccggccatcatggagaagaaggactgtccccgcaaccacagccacaccaggtactgtcgcccgctgggtctctgttcttcccccccaccccccatccctcttcctcagtcctgacccagagcgaccccgcgctccctgcccctgccgatggtttcctggcgtcttcagcggttg

SEQ ID NO: 123989 - DNA, 30 bp, Homo sapiens
  chr13:97762117-97762147
  hyper
attagcacctcgaacgttggaaagacacaa

SEQ ID NO: 123990 - DNA, 30 bp, Homo sapiens
  chr13:97874616-97874646
  hyper
aaattttccagatacggcagacggctttca

SEQ ID NO: 123991 - DNA, 30 bp, Homo sapiens; identical to SEQ ID NO: 50813
  chr13:97876444-97876474
  hyper

SEQ ID NO: 123992 - DNA, 246 bp, Homo sapiens; identical to SEQ ID NO: 9438
  chr13:98085204-98085450
  hyper

SEQ ID NO: 123993 - DNA, 30 bp, Homo sapiens
  chr13:98085934-98085964
  hyper
gacaaaggccctcgcggcccctcttgggcc

SEQ ID NO: 123994 - DNA, 30 bp, Homo sapiens
  chr13:98086769-98086799
  hyper
aaatccgccctgaccgtgcagttcgtgacc

SEQ ID NO: 123995 - DNA, 30 bp, Homo sapiens
  chr13:98628949-98628979
  hyper
aatggcggcggccgcggcggagcagcaaca

SEQ ID NO: 123996 - DNA, 703 bp, Homo sapiens; identical to SEQ ID NO: 50815
  chr13:98795068-98795771
  hyper

SEQ ID NO: 123997 - DNA, 31 bp, Homo sapiens; identical to SEQ ID NO: 9440
  chr13:99064433-99064464
  hyper

SEQ ID NO: 123998 - DNA, 195 bp, Homo sapiens
  chr13:99128922-99129117
  hyper
cagtgtgggggcaaccgagacagcccttgtcaccgaaaccacagcctgactcatacctggccctgctttccggcccatgggtgagctgtgctgccttggctcgcaggcctgccctggtctacacagcaatcccagggtcagggccactctcagaggtggcctctcctcacacactggcctcgctgggactctggc

SEQ ID NO: 123999 - DNA, 30 bp, Homo sapiens
  chr13:99228305-99228335
  hyper
aaagtccagggtcccggggccgggcccggg

SEQ ID NO: 124000 - DNA, 330 bp, Homo sapiens; identical to SEQ ID NO: 9441
  chr13:99229763-99230093
  hyper

SEQ ID NO: 124001 - DNA, 508 bp, Homo sapiens
  chr13:99404491-99404999
  hyper
gacggtgtttctgccgcccctgccgtcacccgctgggtcccgtcccgctccaagcgcactcccggcccgcagggtgggaatacgaggattacagtgccccacgggcgggcgggccaggatcgcaacctcggcggagtcggcgcctctgggcacctctggcttccgcgccccggccgcacggtgaccacccgggaggggatcccgggcgccccgcaacctcccggcccccgtgggccttcgggtcgccccgcttcccgccgccgcgtacccttcgcgcctcccggccctcggtgccggcccccgccccgcgtagctccgagtctttagcccggccggccccccacccgccgagcgtacccatggcggcggctcccagggctcctgcgacctgccggcgggacgtgctcctggcaggtgctactcctccgacctgacgtccaggcccggccccgttgccccaggtacagccccagctctgcgaggcggggccgccggctccacccggggg

SEQ ID NO: 124002 - DNA, 17 bp, Homo sapiens
  chr13:99405089-99405106
  hyper
cgcgtggcaggccgggg

SEQ ID NO: 124003 - DNA, 355 bp, Homo sapiens; identical to SEQ ID NO: 9443
  chr13:99739097-99739452
  hyper

SEQ ID NO: 124004 - DNA, 39 bp, Homo sapiens; identical to SEQ ID NO: 9444
  chr13:99740139-99740178
  hyper

SEQ ID NO: 124005 - DNA, 101 bp, Homo sapiens
  chr13:99852543-99852644
  hyper
cgggaacaaagaggcggctggacggcccagctctccgcacccggaaggacctgttccacctctccggctcccgtacccctctatccgcatctgagtgacca

SEQ ID NO: 124006 - DNA, 83 bp, Homo sapiens
  chr13:99853141-99853224
  hyper
ggctccgagcccggcgggaccatgttcaccagcaccggctccagtgggctctgtgagtaccggcctccgccatcctggctgcc

SEQ ID NO: 124007 - DNA, 30 bp, Homo sapiens; identical to SEQ ID NO: 50824
  chr13:99853482-99853512
  hyper

SEQ ID NO: 124008 - DNA, 30 bp, Homo sapiens; identical to SEQ ID NO: 9445
  chr13:99853794-99853824
  hyper

SEQ ID NO: 124009 - DNA, 202 bp, Homo sapiens
  chr13:100153679-100153881
  hyper
gttgcggtccgcttcggtttctgttgcgggacccggggtgtctcctagcgcaaccggaactagccttctgggggccggcttcctttatctctggcggccttgtagtcgtctccgagactccccacccctccttccctcttgaccccctaggtttgattgccctttccccgaaacaactatcatgagcgcgaggctgccggtg

SEQ ID NO: 124010 - DNA, 30 bp, Homo sapiens; identical to SEQ ID NO: 50827
  chr13:100154400-100154430
  hyper

SEQ ID NO: 124011 - DNA, 113 bp, Homo sapiens
  chr13:100259204-100259317
  hyper
gccctcgttgcacccggaaaatgggtacacaccttaggtcgaattacctggactcagccccaggaaacaaaactgcctgcctcccccaaatggcaaacgtgaacgcgccagtc

SEQ ID NO: 124012 - DNA, 343 bp, Homo sapiens
  chr13:100608461-100608804
  hyper
ggcacctcctgctcccactcccctctccgcccagccgtgggcagctgaaatggatgtgatttcacgcacttcctgcgcgcgcacacacacatgcacacatggacatacacttgcacacacgcacaacgcgcattccccctccaatgccgcccgcacacgtgcgcgagcctggacgttccccttttgtgctcgttttgcaggcccagagctcctgctgctggttttctcctttctctccttcatcgcctcttccttcgccactttccttctggaccctccgggctggctcctgcccctctgccccggtggcgctctcgcctattcctcccgggaggagccgggg

SEQ ID NO: 124013 - DNA, 646 bp, Homo sapiens
  chr13:100608838-100609484
  hyper
cgagttctgggacggctgggaccaaagggctggcctccggcctgcgccctgtttgttttcctttcgccccctgaatactagattgagacgtaaagattacccgggccgaataatgccgggagtcaacactcgagcaaacaaaagtgcttgcacaactagtcaaccccgctgggacccgggccgcgggctgggggagagaacgcgctcctcgctgctaattacaaataaatgatgatgtgctcactaagtaattgatttaatgaagttcctatgaaactattaaacccgggtggaggtcaggctggaggcgccccagagcgcccattgtgggctgtttaactccaccaggctcctcggaaagacatcggggctaataggtgaagtcacagctgctcgcgctgacttctcggagcgcccggctggccgcgggcaccctcgcgccctcttcttgtagcgcccttgtgccccgccgcccgcgccccgcgccggccagcttacccacgccactcccagccctgtcgccagctcccgagggcctctccaaagggatcccgggtctcgttaagagcgggaagttgagcactgaacttgtgctcaccgccagcagtcggcggcgtgcaccgccgcccacccctccctcctcact

SEQ ID NO: 124014 - DNA, 109 bp, Homo sapiens
  chr13:100611981-100612090
  hyper
gctgggaaagtcccgcgcccggccgcgcgccctagagcgcccctcgccggtgggccctggaggagccgggcctccgctgccaccgagcggagtccgggcccgcagagcc

SEQ ID NO: 124015 - DNA, 193 bp, Homo sapiens
  chr13:100620291-100620484
  hyper
ggcccgcgggacggttataaacgggactgggggcacgtgggtcaggaaaggggccttcggaagtggcccggggattagtccctttgatcaatccgttccgggatcccggataacccccaaaagggagagcggcgtggcagggagggaaagaagtccggatgggccctctcagaacacaatgtccaatagctga

SEQ ID NO: 124016 - DNA, 104 bp, Homo sapiens; identical to SEQ ID NO: 50831
  chr13:100620515-100620619
  hyper

SEQ ID NO: 124017 - DNA, 1399 bp, Homo sapiens; identical to SEQ ID NO: 9447
  chr13:100620631-100622030
  hyper

SEQ ID NO: 124018 - DNA, 505 bp, Homo sapiens; identical to SEQ ID NO: 50833
  chr13:100622155-100622660
  hyper

SEQ ID NO: 124019 - DNA, 1513 bp, Homo sapiens
  chr13:100622719-100624232
  hyper
cggggtcgatccacttgcagatgagctcctgcttgattggctgccgcatgtagcgcaggaaggccccagccgcccctgggaggtgggggtggtgctggtgcgggtgctgcgcgggcgccggcggcggcggcggcgccgggggcggcgcgtggtgctgcaggtggggcccgggcccggccgctgctgcggccgccgcagccgccaggttcaggtttaagttcacggctccgtagccgtgcagggcggccgccgctgcggccgcaaccgccccgtagtgcgcgtccccagagcgcggcgcgaagggcggttcggcgcggccgtacagctcagccgccgcggctgccgctgccgccgccagccccaggcgcatctggccgttgagcgggtgcgggtggccgcctggggcccccggcgtgtcgtgcagcgcggggaagagcgccgggccgccgctgccgtccgggcccgcgtaggtgccgctggcggagatgaacatgccggccgagtggggaggcggggccgggtgctggggggagccggtgccggaccgctgctcccctccgagcggggccccgtgcatggccgccgcgggggccgtggcggaaaggtccctccggaggacgaagtccctgctgtggcctttgccgctgctgccgccgccgccactgttggtggtggtgtagcccgagagggcaggaggaggaggaggcgggggagggggagggggtgaaggggtgggaggaagaggaggggctgggggcgggggcgcggagggctgcgcgccactgctgcccccgccgcaggggtagctgcccgcgccggggtgcgcgaccaaggctgcagcacgggcggcggctgccggagcctccgggtgtgccgggaacgcctgggagggagggctgaggcccagcgtgctcgcctgggccatgtgctcgggtccgagcggagtggtggccacgccggggtcagcgcccaggtcccgcaggcggaggtgcgcgacggcggcccggagttgggagtgggcgggcgggccggccagcgccgggaagcctgtcatattctgaagcggctggacctgagccgttgccaaatccgctaatctcagcgctggcgggttcctcttgctcaaagggggctccatcagaactacacaatcaggcccatagaccctcactggggggactttattccctctgcccgccttcaaaaacatgtatgtattgggcgctctttaacttcttttgtcctggcctcttaactctgcttattcctgttcccactctatcctccagcgattggcagagtgaacaccacatttgagctgcacagtgggaccgagattttggaaatggcacgggtgggattggagggagccgcgtgattggcagtagcctcggctgctcgattggctcccgttcaggccctcgacccagcggggattcgcccccgtgcttgcggccgcctgcgctttcgcttcgcgccccctcctccgctggagccacacgtccccgcctcc

SEQ ID NO: 124020 - DNA, 30 bp, Homo sapiens
  chr13:100626774-100626804
  hyper
tttattttgtagaagcgctttttgttattg

SEQ ID NO: 124021 - DNA, 14 bp, Homo sapiens
  chr13:100630284-100630298
  hyper
gatccgctcaagcc

SEQ ID NO: 124022 - DNA, 146 bp, Homo sapiens; identical to SEQ ID NO: 50837
  chr13:100630673-100630819
  hyper

SEQ ID NO: 124023 - DNA, 1690 bp, Homo sapiens
  chr13:100631530-100633220
  hyper
aacctgcagagactcgcttaagccgggagaggctgcctgagccggcgcaagagagcccgggttctgccagccatagtgagctagaggattcttcccgcgtttttgtttatttcatttcagaacataattctgaaaaatttattattttctcttcgtttaattttatttcaactcctagagatttataaataaaagcagttctccaggccagccaggagaacacgcccgaggcgctggcctcaggctgtcccttcacacctccgcagcctctgggccctccgttccctctctagttacctcgggagcgcgagatttgggcggcgggacaggaaacgtccgcagcggtcagccaggcgcggcgccgggagcggcctcgccgctgggccaccgcccgggtggtactccctgctcctggagaaggagtggatggatatatatgctttctagaaggtttaagccctgccgtgtctgacggcttcttctcccgagaccctgagcctgacccgcagccaaactccggcctgagtctcgcttggtctcgggcgttcccacacttctcagcccaaggatgcgcggcccggcttctgggcatttaccctgagggtgacactgtctttaaacgacttccgaacaacccccttccacgcaggggccgctgcccagtgtttactgctgtaaacggagcaggacgcaagcggcgggtggggagctcagcgcgccgaggggcggacggggacgccgcggggggcggggaaggcggtgtctgggtgggcgtccggagggtgggaagaaggggcatgcctggctttctctgtgcccacggtcctgcacctgtggtttcaatgccacagagcaagtttacaaaggcggggtgaaagtagggagcgtgccaagcgggcagcagaccagccccccgccgctccttgtggcgcgctcccggcgaggccccgggcctgaaatgtccccgcgcgcagagcctcctgccaggcgacccagctgttagccacctctcgagcggcctggagtgctcgggccaggcgtccccggggttttcggtgtccgctgggagctgctcagatcccggggaagtcggtggcctacgcagaaagactggagcgctgggttgcctcccattcctgacccggctgagggcgccctgaccccgcggcccgggcccgcgtccgagccacgctggacgcccggctcccgggagcgccgcggtcggccaggactagaagccgcggcgccgaggtctcgggagaagcgcggcaggatggcaggccgggcccacgggcacgttcggcggctgcctgagccggcagcagctcagggagcgcgaggactgaggggcgggcccggcagcggggcgggggcgcgggactgactaggccgcggcggccaatcgcggcgccgggagggcgggcggggcgggagccgccgttaaaggggcggtttgaccgggggggcccggcctcgagctggagggagggagggaggccggggcgggagactagggggtgcggggggaggggagaggaaaaggaggagacaaaaaataaaaaataaaaggctgccgctgcagcgttggcggcgcccatcgaaatcaacggaggcggtggcgaacgcagcccaccgcagccgagacctgggagcccgcctgggcctcacactccctcgggtcgcggactgc

SEQ ID NO: 124024 - DNA, 467 bp, Homo sapiens
  chr13:100633419-100633886
  hyper
acaacttaaagaaagggggagcggcgcggctgctgccttcatctggggaaattcgtggccactgcaagtttactacgcgaggcgcagccaatgccaagcgccgaggccgaggagggctaaacactgcggccgcggctccgaacaataaccgccgcgcgcggggcggcgcgagtagggccgcgggggagggagctgtcgccgcagagcgccgcggagaggacgcctggactccgcctgccgccccggcgcccccgccgcggtcaggtggagccgctggtgcgctggccccgggtgccgagcgcggagctcgcctcggtcctctcctcgcccgtctgcctggcgtgcgcacggccgccgcggttgtgactgcattctaccggcgctgctcggtgcggccgggctccgggtccgctgggcgtgcgagtgagtgtgtgcgtgcgcgcgcgggtgcgcgcaggggtgggggc

SEQ ID NO: 124025 - DNA, 613 bp, Homo sapiens
  chr13:100634131-100634744
  hyper
cgaggcagatccaggcggcggcggaggcggcgggcgcaggagagcggctcccagggctgaagtggccgccaccaccgccgcctgcgcctggagcccggtggccgccggacgcaccgcgcggatcgggagcgggagtcgaggcggcgcggaggcgcagggctcgcaggggcgggcgggcgcgctggccatgctcctggacgcgggtccgcagttcccggccatcggggtgggcagcttcgcgcgccaccatcaccactccgccgcggcggcggcggcggctgccgccgagatgcaggaccgtgaactgagcctggcggcggcgcagaacggcttcgttgactccgccgccgcgcacatgggagccttcaagctcaacccgggcgcgcacgagctgtccccgggccagagctcggcgttcacgtcgcagggccccggcgcctaccccggctccgctgcggctgccgctgcggccgcagcgctcgggccccacgccgcgcacgttggctcctactctgggccgcccttcaactccacccgggacttcctgttccgcagccgcggcttcggggactcggcgccgggcggcgggcagcacgggctgttcgggccgggc

SEQ ID NO: 124026 - DNA, 389 bp, Homo sapiens; identical to SEQ ID NO: 50841
  chr13:100634940-100635329
  hyper

SEQ ID NO: 124027 - DNA, 119 bp, Homo sapiens; identical to SEQ ID NO: 50842
  chr13:100635398-100635517
  hyper

SEQ ID NO: 124028 - DNA, 513 bp, Homo sapiens
  chr13:100635597-100636110
  hyper
cgagttttgaatgattagcctcacatcaaatgtatgcttgggtcatgcaattgcttcgtttgctcagccccggttaataatttccgttttaagtagaaagcacaaaataaaactgctcgctaattcggtgcccgggaagcgagcctagagaggattttgccagcttgtctgaatgtgcttttctgctcggagtgtatgtctgtctgagtggtttgtgtgttttcccacttcttttactcggggtccaaacgcccttcccgggactgtttcccatgaaatgagtctggtgtgagccgaagctgtaatgcgtttctcatttttaaagtgtttttaaagcccgtctcggggtgggtcgcgggggctttactgtggtttcgcagcagtttgtgaaattctctaatgggcaccacagagtttgcgattcccaacttggacccaggtcagctagagccccaggtcagctagagccccaggcagcgcggccccgcggggggatcgcgtgagaagagagag

SEQ ID NO: 124029 - DNA, 311 bp, Homo sapiens
  chr13:100636130-100636441
  hyper
cgcctcatagattattcatctatgaccaggtctcagccaaaatcgtgccagacgatttcctaaaagaaagccaaatgttttagcaacttcccccgtcaatatttactccgaagtggggatgcgccagcggcctattgttctcttccgggaagggagggagccgaggtgcgagacaagcttttaacaaggtttaaaatttgagaaatttatttgcatgaaatgctcgctttcgagtcctgtgtctgagcggatgtctttaagaaacaatttaggtgctaatggaatttaacgttaaacggtcccctttccaa

SEQ ID NO: 124030 - DNA, 758 bp, Homo sapiens
  chr13:100637156-100637914
  hyper
gctctgggtgtctgcagccagcgccgatgtttgccgtccacaggggagaagccgttccagtgtgagtttgagggctgcgaccggcgcttcgccaacagcagcgacaggaagaagcacatgcacgtccacacctccgataagccctatctctgcaagatgtgcgacaagtcctacacgcaccccagctcgctgcggaagcacatgaaggtaccaccgcggcggccgggaggagggcgaggcaggccgaggcgccggtgcagcactggcccggaccacctcagccggcctgggagggtccccaggggccagggcggcggggggaacatttctgggggtgctctcccccaggggcccggccccacagcagctgcactcacacccagtcccctctggtcccccctcccggcttttgtcttgcaggtccatgagtcctccccgcagggctctgaatcctccccggccgccagctccggctatgagtcgtccacgcccccggggctggtgtcccccagcgccgagccccagagcagctccaacctgtccccagcggcggcggcagcggcggcggcggctgcggcggcggcggccgcggtgtccgcggtgcaccggggcggaggctcgggcagtggcggcgcgggaggcggctcaggcggcggcagcggcagtggcgggggcggcggcggggcgggcggcgggggcggcggcagctctggcgggggcagcgggacagccgggggtcacagcggcctctcctccaa

SEQ ID NO: 124031 - DNA, 253 bp, Homo sapiens
  chr13:100640905-100641158
  hyper
ggagcgggcgggagccgcttttcctcgaaagggctcccagtccctggtccctcgcttcccaaggctttgtccaaacaagtcacggacccgacaaggtggtccattctctctctttggcctttcttttctgcccttcgaatccgaaggactggatggaggggaggggatatggcaatagtgtagaagtgtcaagatgtgaaaattgctcaactgagaacgcacgcgggggctcgcggcccaacagcctgcacca

SEQ ID NO: 124032 - DNA, 447 bp, Homo sapiens
  chr13:100642614-100643061
  hyper
cgggcaaaaaccctcaggctagtccggctgggtgcccgagcatgaaaaggcctccgtggccgtttgaacagggtgttgcaaatgagaacttttgtaagccataaccagggcatcctgagggtctgagttcacggtcaaggctgtgggctactaggtccagcgagtccaggcctcgccccgcccccgagctgccacagccaagatcttcggcagggaattcgagaccagggtcctcccactcctgccccgccccgacagtccgagaactctcggtgctggggccacctcgtcgccctcccacgtttctcttttgttcccaggagccgacgagcttttgaagaggtgacacctcgcttcgccttctcctgctctaggccctgccctcgtccagcatccctcctgccccacgaagcgagaggatgctcagcgcagctgccaggcagagag

SEQ ID NO: 124033 - DNA, 102 bp, Homo sapiens
  chr13:100644067-100644169
  hyper
agtcgcctgggtctgcgtgcccctggccccgtcctcacccccgggctcgtcccccagcctccgccggcccgcctgtgaatggtggatttaatgagcgtttgt

SEQ ID NO: 124034 - DNA, 341 bp, Homo sapiens; identical to SEQ ID NO: 50848
  chr13:100647979-100648320
  hyper

SEQ ID NO: 124035 - DNA, 229 bp, Homo sapiens
  chr13:100649346-100649575
  hyper
gctgtgtgtgcgaggacaattattttcatcagctgcttgctagcccgcgcccgactgctcctctttgcagaaccgacgggctttcaactctggaagtgaagcaggacgaattcctccatggagactccctccttgggaacgtcgaactctctctgccttggggagtggggctcgataaagggtacctaggtcgcaccctggcaggggagcactagagggccgcgaggtc

SEQ ID NO: 124036 - DNA, 85 bp, Homo sapiens
  chr13:100649799-100649884
  hyper
cgggcatgtgagggacttgagtgaatgcagctccctcaactcactcccgcaaaaccacagccaagagggccttaagtcagagaac

SEQ ID NO: 124037 - DNA, 203 bp, Homo sapiens
  chr13:100649944-100650147
  hyper
cggccgagggagcctagagccggtgggagacgggcagcggcctctcctgatcctttcctgcggtcatacaagttcctagggtgggccgaggacagagcgcctcaggcatcgtcggcttcccacggctgcggcccaggcccagcctgcggccttggagccattcgctccaagccccgacaggccgcgaccgcctcgagggccgc

SEQ ID NO: 124038 - DNA, 161 bp, Homo sapiens
  chr13:100740895-100741056
  hyper
tgctttgcaatttacgctttcgaacatgcaggaatgtagtttgggcatttgtctggaacttcggattctcgggactccagggtggccaaggcgcggaggtgactcaatgacattgaccggcctggatgcacgtgggttgctgagccgatgctgggaaggta

SEQ ID NO: 124039 - DNA, 30 bp, Homo sapiens; identical to SEQ ID NO: 50850
  chr13:100741349-100741379
  hyper

SEQ ID NO: 124040 - DNA, 30 bp, Homo sapiens
  chr13:101240639-101240669
  hyper
cctctgaaagccagcgtgtgggctgtcacg

SEQ ID NO: 124041 - DNA, 30 bp, Homo sapiens
  chr13:101326177-101326207
  hyper
tttatttgctctcccggggaaagagcgaag

SEQ ID NO: 124042 - DNA, 30 bp, Homo sapiens; identical to SEQ ID NO: 9456
  chr13:101422012-101422042
  hyper

SEQ ID NO: 124043 - DNA, 30 bp, Homo sapiens; identical to SEQ ID NO: 50852
  chr13:101449976-101450006
  hyper

SEQ ID NO: 124044 - DNA, 31 bp, Homo sapiens; identical to SEQ ID NO: 9457
  chr13:101717570-101717601
  hyper

SEQ ID NO: 124045 - DNA, 199 bp, Homo sapiens
  chr13:102068158-102068357
  hyper
ccccacctccccacccgcgcgttggcccagaggtttacccaggcagcggccctggtgccgagggggcaggtgcagcgctgtagtgatgcccagtggcctcgtcctcagccacctgccccccaacacctgctagatgcccaggcggggcaggcccgaggtgtcgccggccctgggcttcccaagccagcccaggggcatc

SEQ ID NO: 124046 - DNA, 228 bp, Homo sapiens; identical to SEQ ID NO: 9459
  chr13:102068417-102068645
  hyper

SEQ ID NO: 124047 - DNA, 259 bp, Homo sapiens; identical to SEQ ID NO: 9460
  chr13:102068811-102069070
  hyper

SEQ ID NO: 124048 - DNA, 292 bp, Homo sapiens
  chr13:102568280-102568572
  hyper
ttctacagcagctcccgctgggggcaccgccaggatatccacatttgtccaaggtctgggaacccgggaggtttctaggagaccccagagaccaagtgaggccaggcccaccccatggaaacccccaccagctcagatcagactgcgagcggtggctcgaccccgggtgtggcaggaaggggtgccccgcgttccagagccagtgccagtccctatcctcccgggaagccgagactcagggggaacaggtttcccagagcccagcctgcagggacgcggagggcaggagccg

SEQ ID NO: 124049 - DNA, 108 bp, Homo sapiens; identical to SEQ ID NO: 9462
  chr13:102568659-102568767
  hyper

SEQ ID NO: 124050 - DNA, 705 bp, Homo sapiens; identical to SEQ ID NO: 50859
  chr13:102569312-102570017
  hyper

SEQ ID NO: 124051 - DNA, 804 bp, Homo sapiens
  chr13:103046524-103047328
  hyper
cagaatcaccagcaacgccagctcccttccctttccttcagatgggtctcgggtccagagctggcgcccgctagcgggaggccagaccgggagggccaaggcagccacctgtggctttcccatccctcaggtccagcagtgcacatggggtgcccccgcgtcaacgccggaggagtgaccttgcaaacccgcgccccgcgggcggcagagccggccgctcactgcccggtccccggccaccacggaagagcgaagatctctgccagggcaggagccctagccccgacccgcgccccaagtctctcccgcgcggcggcttccggccgccatggtttccatagcaacaacagcacaagctgccgggtcccagagacgccctagggtcagaggtcatctccgtggcaacggaaacttcccgcgctacggcggctccaacgggccgcttccgccgcattgcgtagcgaagcccccggcgagccgaggctgggagcgcggtgatggccggtccccgtgagcagagggcagcggcggcgggaccggggactctgggccaatgggtaaagccaggaggaagcccgtgcctggcccgttgggctccctcctcctcagagccgaagcagtccacactcggaacccagcttcacccggattaccgaggggttccacgcctggaggcagagctgcagcgtgggcccgctcgcggctttgcagaaaacaaataatgacacacttctctggaagcccggggcctgggcccagagccgtggcttctgccaaactttctggtcccggacaccaactccc

SEQ ID NO: 124052 - DNA, 1189 bp, Homo sapiens; identical to SEQ ID NO: 50861
  chr13:103052308-103053497
  hyper

SEQ ID NO: 124053 - DNA, 30 bp, Homo sapiens
  chr13:103054060-103054090
  hyper
agttttttcccctcacgtggtatatttctt

SEQ ID NO: 124054 - DNA, 457 bp, Homo sapiens
  chr13:103054542-103054999
  hyper
ttttttataatcaatcgccagtgctcagtgggatcggtttgaacctgcagttctcaatcaccacgaagaaaagatgcaaatttaggtgccccctccccttgtcagtcttgtagtaggtagagagcgccacaaatccccttcctccttcctctcactcttccagtttccaacaaccgtgagcatgaggaaaatctcccctccggattcctcgcccagcctcggatgtgagttacaggcattagagggaggaggaggaggagttgaagtttgcattgaaaagactggctttccatgacgtagccacgtgctttcagacccgtcaccagtgagatgcttcaaccagcccagggagggcagtgtcactgcagtctctctgctagggcccctcctgaagtctccccacccgccagctccagccccagccccaaacccagacccaacgcgcgaccctctccct

SEQ ID NO: 124055 - DNA, 124 bp, Homo sapiens
  chr13:103248985-103249109
  hyper
ttattcctggctggcggtccatctccttgcccgtctctcggggagtgattcggtccgggacaccaggactctgcttggaggcctgctgttgcctaaaaaccccaagcgcgggcctcttcaaggc

SEQ ID NO: 124056 - DNA, 31 bp, Homo sapiens; identical to SEQ ID NO: 9467
  chr13:103258072-103258103
  hyper

SEQ ID NO: 124057 - DNA, 1778 bp, Homo sapiens
  chr13:103450866-103452644
  hyper
tatagaaatagcgggcgggaaggacgacgtctgcttttagcccgggtccccatatttcgctcttctccgggctcagctgcctttctccgccggtctcggcgagtgctggaactgtcgccagaaagaagcaataaagtagcaaagtgccaaacatttacaagacggactctcgaaatgatccaccgataaatgaagaagtgtaagaggtggacagaagcagccgagccttcggcagggacccgccggccgatcgcagcagccaacgcgactgcaaaggttgccgcccggcgtgcagggcaggcgcgcgggtctccgcgaccccaggacaatcaaagcccgtgccccggcgcgcccaggtgagggtcccctggcgttctgctgtcccggccgagaaccgcgctgctcctctctctcaggacaatgatgaacttgagttgctcctgccactggagcatcatttgggagcgaatccgtctcaggttccagccaaggtgtagggcgaggggattggcccgtgcgtcgggccaggctcagtaacgccttctccaagtggatggcggggtggacacgcgtcccggcgccccgggctccctgggatatgtagttcgcgacaggacgagcggaaatactgccaggattttaccacctctcgcccatttatttacttctcggtcaccgctttcgggggacagataaacaccacagatgcccatcaaaggggcgcacgggtctggaggcgcagctcaggtttttgcgttggtcaccctgccctccgcacgtggagagggcaggcataaagcaccttgaaaggaaggtgctgtcaatgctatccgacgacctgtcgccgggcaccgcagcatcctcgctcgctccgatgggacgagggacgccggccccagggtaacaggaggcgcctcgccggccgcgcgctggatgctgtgatccaggtccggagccgggttccgccgcggccgcagcgacccgaccccacccgacaggccagaggtaccccggggcggggggcaggggccgaggtggcggccggctgtgcgctctgagcgcctggccctccgctgggcacctgggcgccgccagcccggcctgctgccgctctacgcgcagccacctgggcattcaaaatttttacttaattcgataccggcctgggctgccaggggtcatcgcctctccgagccccgtggcgtccagatggaggccactgcatgggtgcgcgctctcccgggaaggagtagggggaagagctgtgtcgcggggggaagagaagcgccagggaaagaagggcctagccctctggtgaacaaagctcgattaggaggtgtccatgtggataccggtgacccctgtgcggccgtcggtctccacgccacgctgggcagggtccgggaaccagcgcgcagcggccgtcgccttcccctgcacgccagcacccgggtctgggccgccgccaggagtcacgggctcaccgccctggtcagcttggcagtcggacccggagccgcctcctctgcctgcctccctcttgccagctgccccgaaaacccagaagagccggtggctccgagccaaggcgggcctggttcggcgccaggaaagggggtttctttcctattttcttttgtgcaattgtcattattaatgataccgactcgtttactcaaacagtcgaatcggagccccagctcttagcccggatgcagcaattgcccgtgggccccctttaacaccaacagcgtccccggggcccggggcaagcatgt

SEQ ID NO: 124058 - DNA, 406 bp, Homo sapiens
  chr13:103452670-103453076
  hyper
cgcgctccccctggcggagagcctcgtcttccggccggtgagggaaggtagaggagggagtaggggcgaggaggcctcggcggcccttgggctctgcgggctggggactcggggtgcccgcgacacgcgcggaggcgcgggctgggttggccacgggcagggagcgcagccgcgctccttcctctctgcccgcgtcgcctccgcgcgcactggttctgcgcggcggggcttggcctgcgcgactgtctactccgtcccggcggcctcggagcccggccgagcggcgagcttgtcagaggacggtggtggaaacgctcccggcctccccaggggcgcgggctggaggctggcgccaggcgcggaggactcccggtatcttttgacaggctggcgcctcggctctggg

SEQ ID NO: 124059 - DNA, 30 bp, Homo sapiens; identical to SEQ ID NO: 9470
  chr13:103454353-103454383
  hyper

SEQ ID NO: 124060 - DNA, 30 bp, Homo sapiens; identical to SEQ ID NO: 50867
  chr13:104332948-104332978
  hyper

SEQ ID NO: 124061 - DNA, 291 bp, Homo sapiens; identical to SEQ ID NO: 50868
  chr13:107001523-107001814
  hyper

SEQ ID NO: 124062 - DNA, 194 bp, Homo sapiens; identical to SEQ ID NO: 50869
  chr13:107185496-107185690
  hyper

SEQ ID NO: 124063 - DNA, 2699 bp, Homo sapiens; identical to SEQ ID NO: 9472
  chr13:107186447-107189146
  hyper

SEQ ID NO: 124064 - DNA, 30 bp, Homo sapiens; identical to SEQ ID NO: 9473
  chr13:107220221-107220251
  hyper

SEQ ID NO: 124065 - DNA, 30 bp, Homo sapiens; identical to SEQ ID NO: 50872
  chr13:107570017-107570047
  hyper

SEQ ID NO: 124066 - DNA, 30 bp, Homo sapiens; identical to SEQ ID NO: 50873
  chr13:107570496-107570526
  hyper

SEQ ID NO: 124067 - DNA, 220 bp, Homo sapiens; identical to SEQ ID NO: 50874
  chr13:108518133-108518353
  hyper

SEQ ID NO: 124068 - DNA, 256 bp, Homo sapiens; identical to SEQ ID NO: 9475
  chr13:108518444-108518700
  hyper

SEQ ID NO: 124069 - DNA, 1037 bp, Homo sapiens; identical to SEQ ID NO: 50876
  chr13:108518708-108519745
  hyper

SEQ ID NO: 124070 - DNA, 195 bp, Homo sapiens; identical to SEQ ID NO: 9478
  chr13:108519901-108520096
  hyper

SEQ ID NO: 124071 - DNA, 225 bp, Homo sapiens; identical to SEQ ID NO: 9479
  chr13:108520309-108520534
  hyper

SEQ ID NO: 124072 - DNA, 124 bp, Homo sapiens; identical to SEQ ID NO: 50879
  chr13:108520701-108520825
  hyper

SEQ ID NO: 124073 - DNA, 168 bp, Homo sapiens; identical to SEQ ID NO: 50880
  chr13:108520915-108521083
  hyper

SEQ ID NO: 124074 - DNA, 85 bp, Homo sapiens; identical to SEQ ID NO: 50881
  chr13:108868006-108868091
  hyper

SEQ ID NO: 124075 - DNA, 30 bp, Homo sapiens
  chr13:108870434-108870464
  hyper
gaagcgctttaaatcgtggacctcattgcg

SEQ ID NO: 124076 - DNA, 30 bp, Homo sapiens
  chr13:108870670-108870700
  hyper
cgaggtatcttttccgtccgggccaccgtc

SEQ ID NO: 124077 - DNA, 30 bp, Homo sapiens; identical to SEQ ID NO: 50882
  chr13:108871152-108871182
  hyper

SEQ ID NO: 124078 - DNA, 84 bp, Homo sapiens; identical to SEQ ID NO: 9482
  chr13:109147713-109147797
  hyper

SEQ ID NO: 124079 - DNA, 124 bp, Homo sapiens; identical to SEQ ID NO: 9483
  chr13:109148154-109148278
  hyper

SEQ ID NO: 124080 - DNA, 709 bp, Homo sapiens
  chr13:109148477-109149186
  hyper
cgtggagaggaggcttgtcggtcccttcctgggaaaggaatcgcggggacttcccaaccgctaggacgcgtaagccgaggctgggagtagaagccttctgaactctggacctaccccagaaggagggggcgaaactggccatttcgagggacgcggaagccccgttgctaggggagatgggggaagcggcgtggtcacctacacaaccgctcccaggcgcgatgggggctctgcttcctcctcctctgtttctttggggatggaaaagagagcagaacaaagatgtagagtgaaggagggctccccagctgttgcctcttgcgcggattctgctgacccctctgcgcgaccccagctgggcagtgtcagctccattgtctcagaggccggcggccaagtgagggaccagtctcacccggggggcgtcgagcctcagcgcatcgccccgtcttccctggctgcagaaaaccactaggccggtggaagtgctccgtttaattggtccctagtacgcccccgaaaggaaatggagacgatttccgtcaagttctcttagtatttctgtcatttacagaaaagcagtagctactcacatgtggctcagatgtctgtgtgggggttgtgagccagggcattaaaattgggtgttaaccgtttgccactcagaagaattattagccattggaggaggagcggtttctcttgctaa

SEQ ID NO: 124081 - DNA, 2107 bp, Homo sapiens; identical to SEQ ID NO: 9486
  chr13:110434418-110436525
  hyper

SEQ ID NO: 124082 - DNA, 11 bp, Homo sapiens
  chr13:110437493-110437504
  hyper
gcggccggaac

SEQ ID NO: 124083 - DNA, 667 bp, Homo sapiens
  chr13:110437578-110438245
  hyper
cgcctgcatccacagctcgccggggcctgtgacggccgagcggcccacctcgatgaagaagaagctgtccgagtggccgcagcggcggatgttcatgagctgcagcgtcaccgacggctgctcgcagttgagcttcacgaagccgatggtgcgcgcagacaggcacagacggtacacccccgtcaggttcttgctctggcccagacccttgggcttcaggttcacctgccacacctcacggtaggcggccgtggcgggagccaccagcccgtagctgtcctcggccccggcggcgccggcagagccgcccagggcgccgggcagggaggcgctgcaggacgcggcgggcgcggcggcggggggcgcgtctccggcggccgcgcggccctcgctgaccaggtcggtgagcgcgcggtaccagccctcctgctcctgctcgttctcggcggccacggcgaagtactcgtccttggtgtagagggcgatcaggtacttgtgcttggcgtcggcgcgcttgttgatgttcaggcagcagtcgagagcgatcacccgtttcggcgcgcctgccttgctccgccactttttctcgctctcgtagtactcgagccgcggcggttgcggcgccgaccccccgcccgccgtcgcctcgtcgccgcccgcgccgggt

SEQ ID NO: 124084 - DNA, 1906 bp, Homo sapiens
  chr13:110438287-110440193
  hyper
cgcaggtagccgcacttgcgcacgctgtggttgttgttgttgttgttgttgttgaggttggggccgtctccgctcgccggcccgggcggcccgtgccgcggcgggctcgccatcgcgggcgcttcaggccgcgcggcccgggcccggcgcccaggggttggggcgaggggcggagggggcgcgggcgggggcggctccctcccacccttgcgcccggccgcccgcccgatcacgcgtccctcgggcccaggcggtggggaaggtccggggaggcccgcgggggccagcaccgctcggcggcgccgcgccctccgcgctctggggctcctgaggatgcccggcgcgggcggtggccgcccccctccccggctgcctgcggccgctgcctcctcgggctctcgggcggcgccgggggacgcgctcgctgggccgggagtcggggtccccgagccgcggggccgagcctaaggcgcgcgcggccgcaccggggctgctgccgccgcgtcgcgctccgggaagccggggtgcgcccgggcgctcggggtccgcgccgccgccggggctgctgctgctgctggtgttgctgctgctgctgccaacggcgacccgggctcgtcgcggtccccgccgcacagtgagtaacacatcgcgcaccgagtgactgaactaagaagagcaaaacaacatgtgactcggcgttacgcaggcacacacagcgcggccgccccgccccgctgcctcgcattggcgccgcgccccccgacggacggcgcgctcggccaatcggcgcggcgctcgcgggggcgggccgcgcgcccccgccccgcccccctttctccccgggccgcgtttcccgccgtcccctccccctcccgcgaaggccccggcccggccgggcggggtggggcggccccggcctcattaatcagcggcttgttgtggatgccggcggaggagatgccacccagggcgggaaaaggggcgcggaagaggggcggggcgggccacggcgcgcagggcccttccctcccgcctcggactcaattaattgggcttgagcttccgccggggagggggcgccgggcggggccgcggctgggcggggcgggggatcgggatcggcggcgggggctgcggccttgcagtggaagcatgggcggcgagccgggccgtgctctcggggcgcggggtccccattttgggcgagggcggccgctcccgcgctcggggtgggcgcgccccatccccgtcccccgtttcccgtccccgtctcccggccgcatctccgtccccccgcagccgcgaaacgcggggaggttccagggcccgcggccgcgggttcgcgagcaccgcgctccagatcgagagcggcgcgcgcccttccgtggaggacagaggggcgcggagggggcgcctgtgtcccacccgctcgcgggcgctttacggggcgtcctctgcgccattcacttgtcagcttgtcgggaagttgaaatcgcgtttgggaggtaataggagaaagagatcggggacggcaggcggagaaagtgcggtttccatagcgccggggagagggcggacccgcgagccagcggtccctgagccgggagaccgcgcgggcgtctctccagcccccgcaggagcgccgccttccttccgcaggggcgtcctctccccccaccgctgcaggagcacccccttccttcctcggaagcgtcctctcaccacaccgcttcaagagcccccccttccttccacaggggcgtcctttccccctccgaggcaggagcgccccttttccccccacaggagcgccctccccaccccaggagcgccctgcgcccagcagacgggcaggtgggcgggcgtccactacctgtgtgcgcggtgcgggcggtgactgccaagt

SEQ ID NO: 124085 - DNA, 30 bp, Homo sapiens; identical to SEQ ID NO: 50890
  chr13:110790389-110790419
  hyper

SEQ ID NO: 124086 - DNA, 187 bp, Homo sapiens
  chr13:110790765-110790952
  hyper
gaatccccctctcccgcgcccttcgcagcgcagccagggagggagggagcgcgccagagcctcctgcaggtgcgcgcggggcaggcgggcgggcgggcggcgcgcgcgcccagggggcccaggtgaccgccttccgcgcgcacacagccggccagggcgcacccggaagcccgttacccaaaggcaa

SEQ ID NO: 124087 - DNA, 30 bp, Homo sapiens
  chr13:110958462-110958492
  hyper
cacggctggaagcctcgactcctgcaaacc

SEQ ID NO: 124088 - DNA, 326 bp, Homo sapiens
  chr13:110958727-110959053
  hyper
gccttaggcagcagtcgtgggaaagctcagatacagctgtttccaggcaaagggcccagagcttttcagcctcagccaccagggtctccagacaaggagaaatacgcccaaagctgctcccaggggctaggagctcggagctcccagtgtgggtctctgagcagcgcggggtgggcgctcccggccctccagcccccaactccctcgcgcacccgggacgggtgaaggcgcccagctgccgagcatacccgcgacgcgggttcaaatcccgccggctcccaggcaccctcaccccgccacagcgcgggctgtttctcctcccttcc

SEQ ID NO: 124089 - DNA, 131 bp, Homo sapiens; identical to SEQ ID NO: 9488
  chr13:110959517-110959648
  hyper

SEQ ID NO: 124090 - DNA, 390 bp, Homo sapiens; identical to SEQ ID NO: 9489
  chr13:110959752-110960142
  hyper

SEQ ID NO: 124091 - DNA, 840 bp, Homo sapiens; identical to SEQ ID NO: 50895
  chr13:110960344-110961184
  hyper

SEQ ID NO: 124092 - DNA, 31 bp, Homo sapiens; identical to SEQ ID NO: 9491
  chr13:111158610-111158641
  hyper

SEQ ID NO: 124093 - DNA, 829 bp, Homo sapiens; identical to SEQ ID NO: 50897
  chr13:111213551-111214380
  hyper

SEQ ID NO: 124094 - DNA, 344 bp, Homo sapiens
  chr13:111267964-111268308
  hyper
gctgtggggcaatccgggcttgcagacgaggtaaggtcgattccatttggcccggggatggtcacacgcgcgggggccggaactgccgtcgccggcgcggtcgttgtcgcattgctctcggccgcactcgcgctgtacgggccgccactggacgcaggtacccgaccgctgaccgcctctgctggctcgcgggggggaagcgccgccgaggggcagcccgcgcgcggggccggggcgccgtgtggcctgcggggcggagtagggagaggacggaggcctcctggaacggcgcggcgacggctgggcgcggcttgggtgatgggagcctccgtgcggggtgacag

SEQ ID NO: 124095 - DNA, 59 bp, Homo sapiens
  chr13:111268658-111268717
  hyper
gtacagaccctgcacgtccttggacgagagggactggatattgcgacgcctgggccgca

SEQ ID NO: 124096 - DNA, 31 bp, Homo sapiens; identical to SEQ ID NO: 9495
  chr13:111305635-111305666
  hyper

SEQ ID NO: 124097 - DNA, 151 bp, Homo sapiens; identical to SEQ ID NO: 50901
  chr13:111358788-111358939
  hyper

SEQ ID NO: 124098 - DNA, 30 bp, Homo sapiens
  chr13:111364619-111364649
  hyper
aactgacaaggcaccgttctccgacttgct

SEQ ID NO: 124099 - DNA, 30 bp, Homo sapiens; identical to SEQ ID NO: 9497
  chr13:111364909-111364939
  hyper

SEQ ID NO: 124100 - DNA, 210 bp, Homo sapiens
  chr13:111365468-111365678
  hyper
gggggcattactcacggtctccccgcctcctcttcatcgtgattgggctgtcaaagtgatgttggcaagtagattggctactgcggttgccagttctgtttcgggccctacttatactgctctgtggggcggggacgaagagtcaggggctgaggagcgagttgcggtagttgctgtgtaccatggtctcggaggtttctgtcccgcggc

SEQ ID NO: 124101 - DNA, 30 bp, Homo sapiens
  chr13:111366042-111366072
  hyper
atttgggttttccacgttggacaagtgcgg

SEQ ID NO: 124102 - DNA, 30 bp, Homo sapiens
  chr13:111367900-111367930
  hyper
tcttttttctttttcggggaggagcggggt

SEQ ID NO: 124103 - DNA, 108 bp, Homo sapiens; identical to SEQ ID NO: 50903
  chr13:111527013-111527121
  hyper

SEQ ID NO: 124104 - DNA, 1252 bp, Homo sapiens
  chr13:111766865-111768117
  hyper
gtgtcatcagttgttcgaggaagctcgcgcatgacgcgacacttgccgtctgggctctccaggttcggcctgctgctttcacagcccagatcttcggcgtccccgagacgcagccaggcgcccggcccggcccggcccggccctctgcacagccccacttcaggccacgccgtttccttgaccttcccccggcagggtctgaagcgtcaccgtccgtctagagcagagtcgcgcaggcccctgccctgccggtgaggtcggcgccgcgctccggagagtcggttcctcccgattcagacccatatggcttcagatggaaccatcatttctgttccgtcatgaccggcttgcaaggtagcaaagcgaaacaaacgtctcgttttcagcctgtccccgccaccttgaaataaaaccggcaaaaataaaaagagcattctgggaagtacttcatcatttcaacgctcacgaattcaaaacataaacaaaggcttccgagtgccccggccaggggcgcggggcgcacggcgggcccggggcaggtaagcgcaggtgcgcgcccgcccccacccccggctccctccccatccgctccccgctccccttcccctttcccttccccgcccgctcccagccgccgccgccgccccgcgcacggcctggagcggaggctgcgcagggcgcggggcggcgcgggccgggcgcgggccgggcggacggccgcgtctttcttctcctggcggtgatgtcattgggcgacggcggccgaggccggggggcggcggcgggcgcccgcaggttcccgagccgctcctgagaaggcgcctgacagcgggccggggcgcacggagaagcgggccgggccggacctgctgggccgcgccgagccaatcgccggcgccggccgctcgatgggcgaggcggcggcggcggcggcgggggccgcgggccgggccgccgctccgaggtgaaggcgcgcgcccctccccgcctgcctcccgggccgcagcgatgaattccgccgagcaaaccgttacgtggctcatcactctgggggtgctggagtcgcccaaaaaaaccatctcggacccggagggctttctgcaggcgtcgctgaaggatggggtggtcctctgcaggctgctggagcgcctgctccccgggaccatcgagaaagtaagtcccggcccgcgcccccgcccgcgccccccggtccggcccgctgcggcccgggatgcgcgcggagcacctgagg

SEQ ID NO: 124105 - DNA, 124 bp, Homo sapiens
  chr13:111768416-111768540
  hyper
cggctcactccgctggctttgtgtggacagttcttgccggtggcgttgcgtgagtttcgcctcccaggttaattgaccggttgctctgtatttttaaagaggcacgcatctgtagctgagggct

SEQ ID NO: 124106 - DNA, 30 bp, Homo sapiens
  chr13:111805624-111805654
  hyper
cacttgggagaggccgaggacctggcgcca

SEQ ID NO: 124107 - DNA, 30 bp, Homo sapiens
  chr13:111805903-111805933
  hyper
agcagggtgggctgcgtccgcgggggcgaa

SEQ ID NO: 124108 - DNA, 85 bp, Homo sapiens
  chr13:111806515-111806600
  hyper
gaggtggcggcgcgcgggccacccccagggcagggtggagtctgcgtgtggaaccccagacattgctctcgttccagtgaggaag

SEQ ID NO: 124109 - DNA, 30 bp, Homo sapiens
  chr13:112157731-112157761
  hyper
cgcttttctttgagccgcatttgttcttct

SEQ ID NO: 124110 - DNA, 30 bp, Homo sapiens
  chr13:112707557-112707587
  hyper
gtcaaatgcaatccacgttgtaaaaatcgg

SEQ ID NO: 124111 - DNA, 205 bp, Homo sapiens
  chr13:112707799-112708004
  hyper
caccccgcagccacgcgcgggcgtaaatcgttctcagcacgagaaacacaaaggccgcaggatcccgcgagccgcagggggttggggtcatttttttgatgccgccgcccttaagagttccagtccttcaggcgaaaggggcagatcaggccttcggggaggacccttgcctgggagagggagggcagtgccccaggggccgcct

SEQ ID NO: 124112 - DNA, 371 bp, Homo sapiens
  chr13:112708307-112708678
  hyper
cgcaggacagcctcgctgcccggggccgagttcggtggacaagggggcagcgcccacagcaagccggaaagagggaggcgcggggccgcgcttggggcctgccgctgcacgccagcctgggcaaagagctgccaccttctgcgggcgaagcgggtcgggacgcaggacggcagcggggctggaggcagctacgtgggtccacacccccatgccctgcaaggctccttggccctgcttctcctctgtctcggcgggagaggagcagcctcggttttacagaatttcagggtcgcgtctccagcgccccgggcgaggccactacgtttaggagcgctcgccttcgctgcgctgtgtaccgtgtacacactggc

SEQ ID NO: 124113 - DNA, 30 bp, Homo sapiens; identical to SEQ ID NO: 50910
  chr13:112709241-112709271
  hyper

SEQ ID NO: 124114 - DNA, 47 bp, Homo sapiens
  chr13:112710205-112710252
  hyper
aattcaggagcccgtcgcagagcaatatttaaaaaggggggggggag

SEQ ID NO: 124115 - DNA, 116 bp, Homo sapiens
  chr13:112710359-112710475
  hyper
cgcggggaccggcgcgggtgggagtgggggcgcggcgcggaaaaccccagggaaggaccgggtggacacgggacgggaggggggtgacatcctcccacccgggggttagaaaaggt

SEQ ID NO: 124116 - DNA, 203 bp, Homo sapiens
  chr13:112710635-112710838
  hyper
cgcaggccaggccggaacgcgggggcgggggcgcgggagggggacccgcggcgggaggcgagagcgagcgaatggggagaggagcggggagcaggaggggacgcaggggagaggggactggggagcggcgagaggaggacgggagacgcggctccacctcccagctcaaaacggcgtcccagctgctcgcaaaccaactgctc

SEQ ID NO: 124117 - DNA, 250 bp, Homo sapiens
  chr13:112711043-112711293
  hyper
tgcgcgcgcgcgaggcgaggagagaggcgcgtgtgcgagtgagtgtgctagcgggggtgcgcgtgtgagtgtgcgcgtgtgtgtgcgtgcgcgtggcaccggcgcccgcggctacggggctggcgctgccggagccgggccggaccggggtccgagatctgcgtcgcgctgggcacgctggccacccggtccggaatgagtcggggctccgggaggtgcccgtgggcagagcgttaggggcgcggccgtg

SEQ ID NO: 124118 - DNA, 1512 bp, Homo sapiens
  chr13:112711375-112712887
  hyper
cgcccggggctgcggagctggccggtaaaggctctcgggagaggggcgcggtgtctccacggtgactttccgtgaaggaggatggggtgtctccgcagctttggggccccaggaaagaacaggtgggtagatgtggtggccacggctagcggactcgccgcggggcacatttgtcattttcttatctgtgcgttcactcctcccccatcctcggcttttgggattggccgccgcccaacggacccagactgtttctctctgggtcgccatttttggggaggggggagggaggtcgagtctgtggatttgggggagaggttcttgtccgccacagctccgcgccccctccccgcccctcgcggctcccccaccctcgcgttcggcagcgccaggctgcgctctccccggtgcacacccggccgcgccgagaactaaatccgcgggctgaaattacgttttaaaaattaacatgttgaagcgtgtgccatttagtgagaggtgttttgggcaaagaatcaatttaactgtgactgaccgacgggcttgactgtattaattctgctaccgaaaaaaaaaaaaaaaaaaaagcaatgagccgcaagccttggactcgcagagctgccggtgcccgtccgagagccccaccagcgcggctcacgcctcagtctcgccgccccaaggtgggatccgacgcccaaaggagggcgccccaaggtgggatccgagcgggccgccctaggaggagtgaaccccgcccgggcgcacagctccgtgcgcctgtcctccctcctccagcgaaatcacacccgctttgcctcctcttgcagcaccgcgcgtgcctaggttctcggtctgcgcagctgggagtctcccccaccagcgccgcggagccgcccgcttccgctccctctttccgcgggtttgagcctcccgtggagaggaaaggtcacgaagtttcaaaggtgaaatggattttcggcggtggctggtgcgggagtcaatgggcagggcggggcaagcctggcagtcatcgacccgagcagggacccggctggccgcctccccttgcaggaaacaggtgtttgaacgcgatagcggccgccagtcaactaaggcattaaaagctcgctttataacatcgatttcctggagtgcggtggggcctgcgttctggaagctcgtttgtgaaaggcggggttgggggaattgccctgatggtaccccagttggcgcagaagatccccaaaagtccctgtcaccgcagcggcggacagcggggctgcccaggcggctgggagggcagcttttccctcccgctggggtggaaagaggagtcctgctccgttccccacccaggacaatggtcttgttaccccggcctcctcccctgcacctagggcctggcatgcagagagcgcccgcagcagagggggaagtctccaacaactggcaggtgtcccccgaggagctccgcttgatttggaagggtggttaaaccgggatccaggagga

SEQ ID NO: 124119 - DNA, 30 bp, Homo sapiens; identical to SEQ ID NO: 50914
  chr13:112714009-112714039
  hyper

SEQ ID NO: 124120 - DNA, 496 bp, Homo sapiens
  chr13:112715222-112715718
  hyper
tttctcctcaaaatccgaggctcgagaaccatctcctctggcagggtccagtctcagctccgcctcttgcctcctcacccacttgggcataacttttgcgggtcctagaaatctgggcagcagaagagggaggggaacgctcccagccggcagccgctctgggcgtgcacccgccacgcgaagccagaggttggacgacgcagccggccaggcgcggctcccgggggaccccgaaaccgcctgtggctcaggccctacttggcaagaagagactggggagtgagaggaggggtcactcttgctctctcgcacaatagacttcccgcaggcgagtgcgaacggccttttgcttcctccttcttttccaggacccttagcgacaggagaggaagagaagcggcccggcggtttaattgccaatttcctgatgcagccacagggcccagcagcggctcagcctaggccaccgggtccaggcctctaggcaataggcccg

SEQ ID NO: 124121 - DNA, 510 bp, Homo sapiens; identical to SEQ ID NO: 50916
  chr13:112715803-112716313
  hyper

SEQ ID NO: 124122 - DNA, 190 bp, Homo sapiens
  chr13:112716638-112716828
  hyper
gcgcgcgtgcgcgcgcgcgcacacacacatacacacacacagttgtttgttcttcgattgtgaatgtgcggctctccacacgaaccgcccgaaagaaagcctgggtcgcttttgaggagaaggagtttcttgacccttccccgcaaacgctactggaacggcctccaaactaggacgcctagtcaggcaa

SEQ ID NO: 124123 - DNA, 118 bp, Homo sapiens
  chr13:112717124-112717242
  hyper
ccgagcgccctggagcgccatcacccgaacgcgcgctccaggccctcgaacaaggcctctggctgccagagcgagtgaggggcgcagaggcggcagagagcggagagccccggtgtct

SEQ ID NO: 124124 - DNA, 654 bp, Homo sapiens; identical to SEQ ID NO: 50919
  chr13:112717322-112717976
  hyper

SEQ ID NO: 124125 - DNA, 974 bp, Homo sapiens
  chr13:112720052-112721026
  hyper
tgaaaatctctttcacgttcccaaatcaaagccactttgaggtttaagaatgataaccacaggtgaatgccttactctttccacgagccaggcctttcctttgcatgacgcagaccggcggctgagacccgtcctgaggccccgcctttcattcggtttatgtggccccgcgcagttcacgcagttttctccgttcttaggcaaccagctcgtgggaaattcactccagaaaagcgtgcgccatatcattattttgcgattcaacaaactttttcaactgttgttcaggaactagattccagatagatcttgttgtgttcggccttcctagaaattccttttccagaggaagaagatccgggttgggaagagtgcgtgactatggccccgggctcattgaaagactcctccccacaaaagtttagggctgatactaaacgaagctatggagccatgcccacacaaatactccccctttacccgaattgtggggcctggactgtgaaggccttcgctgcaagagcgggcactggcgaacttcagtgcacgccgcggccgagaacggatgcagggcgggggatggctgagccgcctgatccttgcagagaacctgcaggggccctcggagggtatcccctgcgtccaagggagcgcccctccttttcagcactcgggggaactgagggcgacgtgccagccccgcactcaactttccccttccctgcaggcacagagttggccggcgggggcagaggaggagctgggtctccactgcgcccgtttaaacctggccaggggctgcgtttcctccccccaccccacgacgatcctttcttagtcttcgcttttcaacccaatcgttaatcattcggaacgcgcgggcggggagcggcgaggagggcgagctcggggttcgccgccgccgccgccgccgcgcgcgcgcgctcaggaagcggtgtggctgtcaccccctc

SEQ ID NO: 124126 - DNA, 92 bp, Homo sapiens; identical to SEQ ID NO: 50921
  chr13:112722128-112722220
  hyper

SEQ ID NO: 124127 - DNA, 128 bp, Homo sapiens; identical to SEQ ID NO: 50922
  chr13:112722274-112722402
  hyper

SEQ ID NO: 124128 - DNA, 384 bp, Homo sapiens
  chr13:112722597-112722981
  hyper
cgcagctggcctacgggcagcacccgggcgcgggcggcgcgcacccgcacgcgcaccccgcgcacccgcacccgcaccacccgcacgcgcacccgcacaacccgcagcccatgcaccgctacgacatgggcgcgctgcagtacagccccatctccaactcgcagggctacatgagcgcgtcgccctcgggctacggcggcctcccctacggcgccgcggccgccgccgccgccgctgcgggcggcgcgcaccagaactcggccgtggcggcggcggcggcggcggcggccgcgtcgtcgggcgccctgggcgcgctgggctctctggtgaagtcggagcccagcggcagcccgcccgccccagcgcactcgcgggcgccgtgcc

SEQ ID NO: 124129 - DNA, 251 bp, Homo sapiens
  chr13:112723292-112723543
  hyper
gggtgacgcgtgtcccccactcaccttccccggagaccctggcgaccgccgggcgctgacaccagacttgggttttagactgaacttcggtgttttcttgagactttttgtacagtatttatcacctacggaggaagcggaaagcgttttctttgctcgaggggacaaaaaagtcaaaacgaggcgagaggcgaagcccacttttgtataccggccggcgcgctcactttcctccgcgttgcttccggacg

SEQ ID NO: 124130 - DNA, 30 bp, Homo sapiens; identical to SEQ ID NO: 50923
  chr13:112724439-112724469
  hyper

SEQ ID NO: 124131 - DNA, 293 bp, Homo sapiens
  chr13:112726435-112726728
  hyper
cgtttcattcccccggcaaagactgggcgccgcagatttctgtctccggaaaattccagttaattcaagaaacccatccccggacgtgtgcccgcccccccccgaaggctcgcttcaggccagcccggactccagcgccccctcgaccccgtcgggctccggccgactcccgccccctccccacccacgctcggcctgggcccgggggcagcggctccagaggcgtcggcggcagaatttaacccccggtctgagtccttggaaacttcaagtgaaaagcagacttggccttg

SEQ ID NO: 124132 - DNA, 379 bp, Homo sapiens; identical to SEQ ID NO: 50925
  chr13:112726796-112727175
  hyper

SEQ ID NO: 124133 - DNA, 41 bp, Homo sapiens; identical to SEQ ID NO: 50926
  chr13:112727837-112727878
  hyper

SEQ ID NO: 124134 - DNA, 239 bp, Homo sapiens; identical to SEQ ID NO: 50927
  chr13:112727961-112728200
  hyper

SEQ ID NO: 124135 - DNA, 115 bp, Homo sapiens
  chr13:112728335-112728450
  hyper
cgctttctccacccgggcagagctgcggctcccgggcgttgcgcgtggcgtttttcatcacggagggaaagccgcggctccgcgggaaaggagtgaaaaccgagtgtgggtgaag

SEQ ID NO: 124136 - DNA, 123 bp, Homo sapiens
  chr13:112728784-112728907
  hyper
gggtgacatgggggcgctgtgatggaaaatgggttctgggttcaaaatcaagccacagaacgctgcctggcgagttgctaagtgtgacttgtggggaaatcgtgtctgcggcagaaacactgg

SEQ ID NO: 124137 - DNA, 347 bp, Homo sapiens
  chr13:112758025-112758372
  hyper
accgcgcgcttggctcgaagaccccgccctgggcaggggacagaaaatatgaaatcagatggggagttatgaataactgtcctcccctcccctctgccgtgtttcctgaatccgtacgctatgcaggaggggggcgggggcgggggcgcggggaggaggagggggccgtttgccattaatctgggaacaagcggctaacctcggtgactggtattttcgcttttcttttctcacttttctcagtgtggggaaagcagtcaagcccgcgcggagcgattgtgaggggctctgctggaatttggcagcgcggaggcttggagagaagccccatgctggctcccattcag

SEQ ID NO: 124138 - DNA, 195 bp, Homo sapiens
  chr13:112758495-112758690
  hyper
cgagggagccccttatcccggtgacagaatgggacaagctgggaaaggcttagaccacacaagtccaaggctcaccaggccgcagaaagcctgccttgggaaccgggggtcattatccgccctattcagcggggcccggggaccctgggggccgagcgaggccagcccgggcgggagcaccgccgccagcgcgcg

SEQ ID NO: 124139 - DNA, 639 bp, Homo sapiens
  chr13:112759141-112759780
  hyper
cggagtcattaacttcgtctcctcgtgctcagggaccagcaacttggtgctgcgggcgccagaaagaaaagggtagcgcctcgcggagcgcgcgggggaagagggactgcggcagcgggacgcgagggcgggaggggcgcagcagcggggagccggagcgcagcggaggggagcgctggggggcggggagcgctcgggcagccaccctgtccccgtctggagccccgcgctgcgtctaggagggcgcaacacgcagtccccgcgggggccagagctcggagccccctagtgcatgccccctctcctcgcgccctgccgaggcctcggccctgcctgccgtgccctgggcctggttgtgcccgggggtccccgcgggcagggcgcggggcaggcagggcgcgcgcgccgacgctcttttgtctgataactaatttgagttaatgcgatctttatgtaaagctaacagcggataattgtctattttctcgccaacagtctccatcacaatcacttatctggaaacctgcggttggattaatcgttatattcccgagatgagcgtcgctgcaatccgcagcgaacgcgggtagggacctggagacgcctcccgggcgctggcggggccggtgtgggccagct

SEQ ID NO: 124140 - DNA, 1371 bp, Homo sapiens
  chr13:112760006-112761377
  hyper
cggggcctgggggggcccaggcgccggaggagccgtcggtgccggaatgcagcgtgtttcacttgggagaaacgttgccctcggtcccttgcctccctcctgttgtctcggtttttctggcttcgtccttcgtcccacccacccgttcccacctcaggtccctcccccaggatcccctccttaaggatccaggtctctgaaaattattggcaacagttacacgccccacgattgaaatccacaagagaagagtcccagttctgcaggccgctccagggctaggggtagagatggtggcaggtggtgcgtcaactctctagggaagaggaacttgcattacaaagacttgtctttctgagctgaagtcaaaacgggggcgtcaagcgcgctccgtttggcggcggtggaggggccgcgcgcccgcgctgtcccagccggagctgccctggctggtgattggaggtttaacgtccggaattcaggcgcttctgcagctcagatttgccggccaaggggcctcagttgcaacttttcaaaatggtgtttctggaaaataacaaattcagactcaactggtgacagcttttggctatagagaatgaaactgcttccctttggcggtggaactcttaaacttcgaagagtgaaagaatacaatgaaataaaatgccataagatcactggatttttcagaaaaaggaagaccccaaattactcccaaaatgaggctttgtaaattcttgttaaaaatctttaaatctcgaatttccccctacaacatctgatgagtgctttaagagcaaacgagcaaatcccacctcgagaatcaacaaacccaagctctggccaaggctctccccgcgttttcttctcgtgacctggggaatgtcccgccccatcgctcacctggctcttgtcatctcgctcatcttgaagtgacccgtggacaatgctgctccctgccgcagctccgccggtcactcaggcagaacggggtatgcaaatggcctggagaggccgaggccgaacactgcgcccattgtcccgggcgctcaaagcgccgagcagctgcgcagactttctgggctcggaccctcggccgccacgctaatgtcatcattgcaaaacatcagattttgagaactatgcagtctgaattcattagcagccttctcggcgaaggttcttttccccgtgacaagtttcaaagtccagaccccctccaacgttggtaggggtaggaagaggaggaggggcccagggaggggggtctttcgcaagtggggcctcgggggatccctgctctccttctggtgcattccgcaactttaaaagccttccttggggttctgagcgcggatgtctgacttg

SEQ ID NO: 124141 - DNA, 30 bp, Homo sapiens
  chr13:112761844-112761874
  hyper
gctagaacccaggagcgcaaaccaccgtta

SEQ ID NO: 124142 - DNA, 30 bp, Homo sapiens
  chr13:113241812-113241842
  hyper
gccctcccacggcgcgtgacaccagagaag

SEQ ID NO: 124143 - DNA, 30 bp, Homo sapiens
  chr13:113242497-113242527
  hyper
ctgcgccgcggccgcgcgtgcggctgccta

SEQ ID NO: 124144 - DNA, 30 bp, Homo sapiens
  chr13:113260897-113260927
  hyper
gcgggaatcgcaaccgatttcagagacgaa

SEQ ID NO: 124145 - DNA, 36 bp, Homo sapiens
  chr13:113261126-113261162
  hyper
tcccagtgccagagacgactccgagcgagatactgc

SEQ ID NO: 124146 - DNA, 101 bp, Homo sapiens
  chr13:113295148-113295249
  hyper
tcccttgggtgttcgcgggcctgggcacagcgcgatgggaaacgcaggtgccgcccacccagtcggcagttccggacctgcacggccgtgcactctgcccc

SEQ ID NO: 124147 - DNA, 30 bp, Homo sapiens
  chr13:113344045-113344075
  hyper
ccctggctgaaactccgggtttccccagtg

SEQ ID NO: 124148 - DNA, 30 bp, Homo sapiens
  chr13:113344430-113344460
  hyper
gcccaaccgagcgggcggaccgacggggag

SEQ ID NO: 124149 - DNA, 30 bp, Homo sapiens
  chr13:113345172-113345202
  hyper
ggcttccgcgcagccgtgtctgtaagatta

SEQ ID NO: 124150 - DNA, 314 bp, Homo sapiens
  chr13:113547076-113547390
  hyper
ggtctctgcagggtttctgcacgctggggagggcaggttccccagtggagccactccctgcgggtctgagtggggcccggggtctctgcacggtcaccgatgctgctgctgctccagggagcgggcttgcaggagcaaggatccagtccctgaacgcacgtgctccccccgggagaaattctgcagccaggcttggtccacgcaccgtcctcccggcccacacaccctcctcccggacctcagtctgtctctgtgtatcacatgcctgttcccagtgttctgacctcaggtgggcacggcgcggtggactgcac

SEQ ID NO: 124151 - DNA, 31 bp, Homo sapiens; identical to SEQ ID NO: 9514
  chr13:113548353-113548384
  hyper

SEQ ID NO: 124152 - DNA, 31 bp, Homo sapiens; identical to SEQ ID NO: 9515
  chr13:113548669-113548700
  hyper

SEQ ID NO: 124153 - DNA, 711 bp, Homo sapiens
  chr13:113597559-113598270
  hyper
cgcctgtgcccgcggcgcctgtgctgagtcccgacgctgtgcgccccactcccgaggctgtggttggggggtcgcggtcgagctctagggcccccggccgcagagcccaggcgcggggagggcggcggctcccagctcccggtccccggctccgcgccgcaggcgtgaacgcccaacggagggcgccggcgcccgggagaggcgccgccttggttgcaggggccggggcgcggcggcccgggctttgagagacgggccgctcttcccggcgcggtgccttccagggaggctgcgcctgcagcaccgcagccagagccgagactccgcgcctttcaaggaggaggccccgtgcaggcgcccaggcgcagaggaggcgcggggggcgggacctgccggccagtcccttacccggggacagacggggaaggcgggagcgctcgcagttccctcctggagggaccacaccgccgggagcccgagcagcctgcggtggctcggctcgggccggcggagatctgggagcattttctggaagcctccacagacttcaggcggaccggaaggacctggcgggaggcgtagtaggcggggtgaggggatctcggtggcagcggggacagcgcggccccgagaactgagaactgagagggagacgctctcgggcctctcagaccagcattgaggagctgagccctgcgggccaggggcgca

SEQ ID NO: 124154 - DNA, 1128 bp, Homo sapiens; identical to SEQ ID NO: 9517
  chr13:113622875-113624003
  hyper

SEQ ID NO: 124155 - DNA, 88 bp, Homo sapiens; identical to SEQ ID NO: 50941
  chr13:113683949-113684037
  hyper

SEQ ID NO: 124156 - DNA, 47 bp, Homo sapiens
  chr13:113807344-113807391
  hyper
agcgttcagaggccgcgctgcctgggtgctgagccgtcccggggttc

SEQ ID NO: 124157 - DNA, 465 bp, Homo sapiens
  chr13:113807542-113808007
  hyper
cgggggcctgtcccacacgggggcctcggcagcaccggcatggctggaggccagtacggccaggtgtggcgggagggagcgccgtctggcttgggtcgtccatcctgacaggacgctgcaagggcaggagccccgcgccccgtgtcctgcgcccccgctcgaggacaagccccagccgccggtctccgctgggttccgacaggccttgctgggaggccttgctgggagctgggggtcgaggctcacagactgcgctgaccccagcaggcacagctgggtccagggactcgggaactcgcagcctgacgcgggccggacccccggggtgggtgctgagggcctcggatgccctccctggctggacgttgtggctgtgctgatactgagcggtaaccctaggaaggagagtcccctgggctcagctacccgggacaaggtcaacagggacaccggccccagttccag

SEQ ID NO: 124158 - DNA, 30 bp, Homo sapiens
  chr13:113862348-113862378
  hyper
caacatctgtcagacgcatgtaccgagcga

SEQ ID NO: 124159 - DNA, 314 bp, Homo sapiens
  chr13:113862928-113863242
  hyper
ttaatggtaatgtgcgccatgggagcgccgccgaacggagagcgccaccccctacgcctcaagcgggccagctggcgtcacttccggccctcggtccgtctgggtcctggcgcccccggccccgccgcgggtgcgcaggttggttccggagggagaacctggggaccggctcggcgacgcgctcgggctgagggggcccggggtctttctgccggggccccgtcctctcagccgggacgccagcggctctgattgtgtgttcgggcccgcccgggctgaggggtttggggtccagtggcgaggacagccccacg

SEQ ID NO: 124160 - DNA, 30 bp, Homo sapiens; identical to SEQ ID NO: 9519
  chr13:113864394-113864424
  hyper

SEQ ID NO: 124161 - DNA, 88 bp, Homo sapiens; identical to SEQ ID NO: 9520
  chr13:113951224-113951312
  hyper

SEQ ID NO: 124162 - DNA, 163 bp, Homo sapiens
  chr13:114017781-114017944
  hyper
agcgctgggattacaggcgtgagccaccgcgcccggcatggatcgagttttgatccatcccgatatggctccctgctgggagggacgggtctccttcgcgtccgacccgccggcccatctcaaagcgggaaaaccggtccctgcggctgccctagctcggagc

SEQ ID NO: 124163 - DNA, 477 bp, Homo sapiens; identical to SEQ ID NO: 50947
  chr13:114017991-114018468
  hyper

SEQ ID NO: 124164 - DNA, 31 bp, Homo sapiens; identical to SEQ ID NO: 9523
  chr13:114048391-114048422
  hyper

SEQ ID NO: 124165 - DNA, 179 bp, Homo sapiens
  chr13:114145957-114146136
  hyper
tgcctaggcgctcttcgctgaggcccacgttctaacctggaatggaacctgcgttcccaccctggccgcccgggtggactcggggcctccagggccggccgcagagatgcagccctgtccctggcccccctcctgtgactcctaacggctcctcacggtgtccatgacccagggtgtgg

SEQ ID NO: 124166 - DNA, 31 bp, Homo sapiens; identical to SEQ ID NO: 50949
  chr13:114238865-114238896
  hyper

SEQ ID NO: 124167 - DNA, 755 bp, Homo sapiens; identical to SEQ ID NO: 50950
  chr13:114285597-114286352
  hyper

SEQ ID NO: 124168 - DNA, 30 bp, Homo sapiens
  chr13:114288477-114288507
  hyper
gcagacgtctccctgcgtttctcagtcttg

SEQ ID NO: 124169 - DNA, 22 bp, Homo sapiens
  chr13:114289075-114289097
  hyper
gccttattcccagagcgaggtt

SEQ ID NO: 124170 - DNA, 30 bp, Homo sapiens
  chr13:114428140-114428170
  hyper
tcgcgccctcccacgcgccccccacgcagc

SEQ ID NO: 124171 - DNA, 301 bp, Homo sapiens; identical to SEQ ID NO: 9525
  chr13:114565969-114566270
  hyper

SEQ ID NO: 124172 - DNA, 113 bp, Homo sapiens
  chr13:114566409-114566522
  hyper
cgggccggggctcctgggaccctgaggccaggcctcgccgcgcggagctggggggcggcagcagcgctgcctctcgggagcggttggaggcgcgcgggcgccaggggttcccc

SEQ ID NO: 124173 - DNA, 139 bp, Homo sapiens; identical to SEQ ID NO: 50953
  chr13:114566903-114567042
  hyper

SEQ ID NO: 124174 - DNA, 241 bp, Homo sapiens
  chr13:114776259-114776500
  hyper
tggggaggagggggccgcgaggggagtagggggctgcgtgacgaggagcctccagcaccgcaacgcccaggaggcgccaggttaggccatctgcctggcctgttcagccgcttcccacacctgacaggtcagatgctgctcctgccacggggccggcgacgagccacaggctcccgaaaaaggcaaggggttcactttaggaggggagaggtgagcgggacggggacgctcaggtcctggg

SEQ ID NO: 124175 - DNA, 269 bp, Homo sapiens
  chr13:114776781-114777050
  hyper
cccagatcgaggggacgaaatgcaggagtcacctcagagctgctgtggcttgtgcatgagctacggagaaacaggggtagcgacgcagatgggactggagggggtgggcgtcccacagtctcaggagctgctgagaccatcccgcaggcaacatccgacggcaccgcggtgacccactctctcggcccagcgtgcagggtgcatctcaaagtcgaaagcatcaggtggggtcatggctctggggcgctgagtctcggggtgctgagtct

SEQ ID NO: 124176 - DNA, 31 bp, Homo sapiens; identical to SEQ ID NO: 50956
  chr13:114976825-114976856
  hyper

SEQ ID NO: 124177 - DNA, 30 bp, Homo sapiens
  chr13:115000260-115000290
  hyper
gccaggagaggcatcggaaccaacaactcg

SEQ ID NO: 124178 - DNA, 30 bp, Homo sapiens; identical to SEQ ID NO: 50957
  chr13:115046752-115046782
  hyper

SEQ ID NO: 124179 - DNA, 30 bp, Homo sapiens
  chr13:115047865-115047895
  hyper
cagcgttgcccgcccggcgcctcccgggct

SEQ ID NO: 124180 - DNA, 30 bp, Homo sapiens; identical to SEQ ID NO: 50958
  chr13:115079952-115079982
  hyper

SEQ ID NO: 124181 - DNA, 30 bp, Homo sapiens
  chr13:115080349-115080379
  hyper
ggctggaaacattgcgtttgaaaccattgg

SEQ ID NO: 124182 - DNA, 31 bp, Homo sapiens; identical to SEQ ID NO: 9529
  chr14:19403466-19403497
  hyper

SEQ ID NO: 124183 - DNA, 314 bp, Homo sapiens
  chr14:20773920-20774234
  hyper
agtaaccacacagacgcacgcagcttcgcgtgtgtgccgaggaattcacgggcagtacataaactggactccctgcttcattcggagtaacaaaaacacatacagaatttaatctacggccccacctgcaatttctgcaagatcggcttgacttcttcctcttcatcagccatcatctcccggccactccacccccaactttataaccacagagacgcacgccctctctcaccgcggaaccacagcgacatctggcgttctggaggcttttctgccccagaagggctttgcttcaaaccgacttaaccatttat

SEQ ID NO: 124184 - DNA, 419 bp, Homo sapiens
  chr14:20811404-20811823
  hyper
ctcgcgcggagccccgttctctgggaactcacctccccgaagctcagggagagccctgttagggccgcctctggccctagtctcagaccttcccaagggacatgggagtggagtgacaggacgcactcagctcgtggccccactgatgagcttccctccgccctatgggaaaaagtggtctcatacagaacttataagattcccaaatccaaagacatttcacgtttatggtgatttcccagaacacatagcgacatgcaaatattgcagggcgccactcccctgtccctcacagccatcttcctgccagggcgcacgcgcgctgggtgttcccgcctagtgacactgggcccgcgattccttggagcgggttgatgacgtcagcgttcgaattccatggcggcgcggcggcgacggag

SEQ ID NO: 124185 - DNA, 30 bp, Homo sapiens
  chr14:20881555-20881585
  hyper
tgcctgacctggggcgtccgattcccgcag

SEQ ID NO: 124186 - DNA, 88 bp, Homo sapiens
  chr14:20922850-20922938
  hyper
ctgggagaaaacgccgacaggactcctggcaatgtcaggagctgtggaggtcctcactagtccgcgctgggccgcagctttccggagc

SEQ ID NO: 124187 - DNA, 30 bp, Homo sapiens
  chr14:20923185-20923215
  hyper
tgcatctggcacaacgataaacagcccgag

SEQ ID NO: 124188 - DNA, 30 bp, Homo sapiens
  chr14:20923785-20923815
  hyper
aagggcgttcgtaacgggaatgccgaagcg

SEQ ID NO: 124189 - DNA, 240 bp, Homo sapiens
  chr14:20929631-20929871
  hyper
ccagtggcctgccccgccccgttccgtctagcagcacgtgataggctatccccgcccgggtcatgctattattcgcgtagataaaccaattcctggtcctgtgaaggcagctctccttttccattggggagcgacgcacaaacgtcaactgtcacatgacctgccagatgctgctgggcttgcaaaacctgcacgtgactagaggttctgcaagctattgggagcgacgcccatcgcgct

SEQ ID NO: 124190 - DNA, 408 bp, Homo sapiens
  chr14:20937479-20937887
  hyper
agacagggccggcccgcgtgctcgcttgccattggctggggactccagggcaagggatataagccagagcctagaccagtgagccaactgtgcgaaccagacccggcagccttgctcagttcagcatagcggagcggatccgatcggatcggagcggatcggagcacaccggagcaggctcatcgagaaggcgtctgcgagaccatggagaacgggtgaggagggcaccaggcccgcaggacccttggggaggggcaggtgctgtgacccgggaacctggcacactgggcccagagggagctggcggagggagcgagcgcccaggggatgcagagaggcctggcactgagcctagtgtcgggagcaaggcggcagagtcatgcggcagccagcgcgggcagggacgca

SEQ ID NO: 124191 - DNA, 30 bp, Homo sapiens
  chr14:21078127-21078157
  hyper
aatttcaaatagtgcggcttaaaagatgaa

SEQ ID NO: 124192 - DNA, 30 bp, Homo sapiens
  chr14:21081860-21081890
  hyper
ccaagcggcagtcacgttgctgccgcgttg

SEQ ID NO: 124193 - DNA, 87 bp, Homo sapiens; identical to SEQ ID NO: 50963
  chr14:21093066-21093153
  hyper

SEQ ID NO: 124194 - DNA, 259 bp, Homo sapiens
  chr14:21093454-21093713
  hyper
aattttgcacttgtacgctggggcaaaatgctgacagaatgaagaaggtaattgcaaactcctataacgtgtgtggtagtgtggccgagcggtctaaggcgctggatttaggctccagtctcttcgggggcgtgggttcgaatcccaccactgccagtggtacgttttagcacaacaaggatcctgaagtactaacactttctaactagtaaaataattaaatcttcctttcccaggattctcccggattacacagcat

SEQ ID NO: 124195 - DNA, 754 bp, Homo sapiens
  chr14:21098603-21099357
  hyper
caccttaaggatggccgtagttggaaattcttagagtcctccgctctaccaggtgagctatcggaaagtgtctgtgacattcgttagcgtagatttttgtgcattgagtagcggctggtgagactcctgacttctttgcatttgggctcagattactgttcaagaagttccagagagccaggtctatagttaactgagtcccgggagcagccttgaggcagtaggaagtgagatctgagtcggaggtagtgagaatggaaacagagcagaagccaccggcttggggtgaatctgcatagcttctgaactaggctgccctcagagtaatctgcgagccagttttcgccccaggagcgcaggaagggaccaccaggcaggctacaagtggagaagtgcgcaggactccgggagtcatggctatcagcagattagattagatctgttccccacaaacacagaggtatggaccaagtgtaacatttttctcccagagacgtgaacagtctagtttcttcctcgcttactgcagcgtacaaacacctattttcccagtatcgttcataggatcccgacgctgtactttttcgtctcaaatccaggatctggctttcatggaaagatcataaaatgcttcctttcttcactagtttgtttcagcgttgaaaaggctaaaaagctcctgctcttttgcttgggaaaagtattcctacagccgaggccccagcgagatttgaactcgcgacccctggtttac

SEQ ID NO: 124196 - DNA, 715 bp, Homo sapiens
  chr14:21099778-21100493
  hyper
cttgctcatcaaaaacgaacaaacaaaccataaaagacatttaatatatattgttatcttaaaaacgcatgctccacgatacatgctccccagcttcaggcttgacaagtcccaagtgccgagcaacatcagggtcagggtgcgtttcattacagaagagaatgcagtagtgatcagagaggttccccccaacccgcttggattcttagtccaactctcttagtctgagattggggttgtttttaaaagggaggcggctgtcttcaagcacaggacgtacccctcggaccttcagagtttgggggtggacgcagtgagggcgccaaggcttccagatctcccccagcctttcagcggagtccggcttggtcacagattcctctaagttacctgaagcagaggtggctagaaggggtccagcccttttcttggtcctttaacactcctcttcctagcatctcggagtcggaaggcagctccttctctttgggcctccaggcttttctaagcgccaacttgaagtccagaaagaataaaagtggcgtcgtcgcatgggaaggttggggcggaagagtttctcttcttttctctcctttggtgtcagcctgaccaggaggctcagtcattcactggacagctcccactggccgggagccagcttggcgcagggcaagcaatgtgatcaaggcagacactgatgcgccctggagaggtt

SEQ ID NO: 124197 - DNA, 285 bp, Homo sapiens; identical to SEQ ID NO: 9536
  chr14:21100725-21101010
  hyper

SEQ ID NO: 124198 - DNA, 138 bp, Homo sapiens; identical to SEQ ID NO: 9537
  chr14:21101037-21101175
  hyper

SEQ ID NO: 124199 - DNA, 89 bp, Homo sapiens; identical to SEQ ID NO: 50969
  chr14:21101234-21101323
  hyper

SEQ ID NO: 124200 - DNA, 42 bp, Homo sapiens; identical to SEQ ID NO: 50970
  chr14:21101618-21101660
  hyper

SEQ ID NO: 124201 - DNA, 317 bp, Homo sapiens
  chr14:21121262-21121579
  hyper
cgagccggaatcgaaccagcgacctaaggatgtccacaaatgtttctacaggctacagtcctccgctctaccagctgagctatcgaagggcgcacgtttctggggttgggtcattgatctttcagcaaatgcaagactccttgcaactctagtcgtccaataagctttaagttggttggaactcgccttagagagataatcctgcgccgatcgccaccgcgctccttttgcggcggaacaaaatcctctggctgtggttgactggctttccccggcatcgataacaacgacccatgaggggcgagccgggtaggggg

SEQ ID NO: 124202 - DNA, 108 bp, Homo sapiens; identical to SEQ ID NO: 50972
  chr14:21131528-21131636
  hyper

SEQ ID NO: 124203 - DNA, 537 bp, Homo sapiens
  chr14:21150138-21150675
  hyper
gtcagcctctgcccacgccctggcttgcggactggcggcgagagccctgctgactgccgggcgggaaatggggacagctaggcgagacaatagccctttaagctattctcaagccccgggtctgggcatatttggagtagagatcaaggttccacttctgaaacgggaagagccagcaatggccgctccggccaggcgtccagaagagagatgcacgttgtgaggcaaggtttcatgtgccagtggggttttgggaaattaagggcccgactttaggggcgagacttgggtcactaaatttgattttaacgcagagaaatgtggccttccttttgaatgagctgcaaatattatctccaaaagcgaattcacacagaaacattgggtttgcccagatgtcctctatttcaggggttcccaacccttgggccgcgcacctgtccatggcctgttagggacccggctgtacagcaggaggtgaactccgggctagctaccagtaccgcctgagctccgcctcctgtgagatcagtggtg

SEQ ID NO: 124204 - DNA, 1321 bp, Homo sapiens
  chr14:21150854-21152175
  hyper
cgaaaccggtccctagtgccaaaaatgttggggaccactgctccattccacaccctctccctcccgtgtctgtggacgtgtaagcggaagagccgagattgggagggaagcgcaggaagtgaggacatcagggagcccgggcctaagcctggaggcccgccctctccggcgttcacagttgcgcagtcagaattgtgtgcgtcccaccgcctcagcccccagttctccgacgcccaggtgccggtccccaccctacacacaaacacacgcatccacgctcgcgaggcccctgggtccgcgcccagtgaggccaacagccctcgggcgcccagaggatgagcagcctcggtatgcccgagtttcaggggcgcctgctctgcttgggagcccctcagtgaggcaggggaatccagatttagaaaggttgtcctcagaacctcggacgcaggactgtcttacaagctggctttgtgactctgcagtaattactttccgggtataaagagatttctttctttcccgtctctggttaaggatgtctcgagtagggatttttaggagagttgtttccgtgcttccttcgatagctcagctggtagagcggaggactgtagtacttaatgtgtggtcatccttaggtcgctggttcgattccggctcgaaggagacgctgctgttttggggtttacggttgctcttcgtttgtgcaaaaaatctctgtatcttgacgtgatcaaatctgtttctgtctctcacccttgtccgaaggaaacagcttagccgcgaggtgggctgcgttaatcgcgtcttgaaaagttggttacctttctgaaagatagtagacccgaatcgtcccaccgttgggggaaggcactgttgtcttaccgaagtgtgttatattttggcttctacgttaagtccaaaggccggcagatatatacgtatcgcgcgtctgtcctggggctcagtaccctacagccttgcaaccgagctcagctctggccctcgatctctatttcagccccctccaggttccctccaggccctagcgggcttaaatcgctccccgggctcagtgagacacaagcatgtgacctaaagtctaaaaagctgccttccttcaccccatcctgcatctggatcgaggagaataagccagagaataagccacacttgaaacttggtgaagatggaaggaataactaaataaggcctaagggaaatgtcacaacagaggaaaagaaacaaaacaaaaaaccttcagaacagcaggcggaaaagagaaattcagagtgataggaagcaccactcagctacagtg

SEQ ID NO: 124205 - DNA, 817 bp, Homo sapiens
  chr14:21152234-21153051
  hyper
ccggacgagccctcgtggctactgtttttccacccccttttgtcaactactgaaaaaaagtctccgttaaatttgaaacacaaactgtctcgcgatgggctgtcctgccaaagaaagcagcagcgaataagtacgtggcagatggtgctgtcgaccagtgtcaagaccaagtttcatgggttcctggacgctcagccaggggtagtctctgaagggccgcctggcaattgggagcagaagccagtttcccgccatctgctctccgtggaggcagtgctctcgcggctgctgcccgttggggtccagctgaggaaggagcgcggatcccaggctcgttctttgcctgggctgcccctgcggcccctggggcgggtgctgctgcggcgccagctccaagggcggatccaggcgggaggggcctcctcggagaagcggggcgcggtcccaactacgcagaggctggcacgccgaccctccacacctcaccacgcccccatctccgtccgtgtacacacactcacacaaggacgccaaccccacctagatgcaaagcaggattcaaaagaacatctttgcgttttctaccggctccccatcatcgtactagggaggaagaagcgggtgagaaacaaaacttctttccattgtcctgcccgtttctgcggacttgttctgaggccgaggtaggttcacactcctgctcctcctcctcctctctggtagcttcataaggggcgtttaggccggggagtcctttcctagtagaggcagcttgggactccttggggaggagtttgcgggacggggctggagaggg

SEQ ID NO: 124206 - DNA, 341 bp, Homo sapiens; identical to SEQ ID NO: 50975
  chr14:21341856-21342197
  hyper

SEQ ID NO: 124207 - DNA, 864 bp, Homo sapiens; identical to SEQ ID NO: 50976
  chr14:21439058-21439922
  hyper

SEQ ID NO: 124208 - DNA, 30 bp, Homo sapiens
  chr14:21458040-21458070
  hyper
acactcgctcttctcgttggctgaaactgt

SEQ ID NO: 124209 - DNA, 160 bp, Homo sapiens
  chr14:21458482-21458642
  hyper
agctgccgcacgtgcggctgccacaggcactggctaacggtgcccagttattgctacttggtgagtaacggcgggaaagcgagaagaaacgggactggacctacatgcaagtgattccgcttttcgtctttggcccatagggagcgctgggcccactatg

SEQ ID NO: 124210 - DNA, 30 bp, Homo sapiens; identical to SEQ ID NO: 9543
  chr14:21492721-21492751
  hyper

SEQ ID NO: 124211 - DNA, 223 bp, Homo sapiens; identical to SEQ ID NO: 50978
  chr14:21492960-21493183
  hyper

SEQ ID NO: 124212 - DNA, 30 bp, Homo sapiens; identical to SEQ ID NO: 50979
  chr14:21493395-21493425
  hyper

SEQ ID NO: 124213 - DNA, 269 bp, Homo sapiens
  chr14:21493800-21494069
  hyper
gagttccgactccctcgtgcccagagtcctggtacctctcctctctttgctgcgtcccgacgcctgctctccggctgctccgggagaagttggacaacaaggcggggaggtgggggcggggaatgcggggggccgctataaatagagggcgatcgcgggcaggcggggggtggggagaggatggccaacagggactctggggtcaatgcctcaaggggcgcgggggaggggccggggacccccagaggctctgactcctgggtaaacag

SEQ ID NO: 124214 - DNA, 105 bp, Homo sapiens
  chr14:21494160-21494265
  hyper
cgccgctaacccctcccagtccggcccagaataggagaccagctcaggcccgctgaatcgcaatgcccgggggatggtctcagggtctgccgcgtccctctcggt

SEQ ID NO: 124215 - DNA, 30 bp, Homo sapiens
  chr14:21538314-21538344
  hyper
ccggcaaggggtcccgcgcggaggcggggg

SEQ ID NO: 124216 - DNA, 65 bp, Homo sapiens; identical to SEQ ID NO: 9545
  chr14:21539065-21539130
  hyper

SEQ ID NO: 124217 - DNA, 626 bp, Homo sapiens
  chr14:21539342-21539968
  hyper
acttggggcgctggacgctggagggtacgctaaggagaagcccacaccaacaggagtgaacactgccctgggaactttcactgcagagtactctgaagcaccgctgcgagagtgggcactgccagagagagcgcccactgcaaagagggcgggggcatggccaaggggccgctcgctgcagagtggaggagggggagaggccttgccagggggagctcaccgcagggagtggaggaggggcaggggcactactggggccgcccctctacggagggaagggcaccctctggcagggaggctggaggaaaaagaaagaggaactgggccagggagagctgactcagtctctctggtctcctctctggtccccgccggcaggaggctgggtctccgtgctcccgcccgccgcctccctccccagacccctcctcccctcctgccgcggccgtttcctgtggctgagactctcgctcagccatgagctcaccgcccctaatgggttgcagctgcctcgctgctcaagccctagctccgcactccctgccttggagcagacggccccactctgcctcacccccgcccatctccaccttccccccacccacgcgcactgcgtccgcctggtc

SEQ ID NO: 124218 - DNA, 5 bp, Homo sapiens
  chr14:21540023-21540028
  hyper
cgctg

SEQ ID NO: 124219 - DNA, 31 bp, Homo sapiens; identical to SEQ ID NO: 9546
  chr14:21553686-21553717
  hyper

SEQ ID NO: 124220 - DNA, 30 bp, Homo sapiens; identical to SEQ ID NO: 9547
  chr14:21566069-21566099
  hyper

SEQ ID NO: 124221 - DNA, 30 bp, Homo sapiens; identical to SEQ ID NO: 50984
  chr14:21567005-21567035
  hyper

SEQ ID NO: 124222 - DNA, 30 bp, Homo sapiens
  chr14:21572119-21572149
  hyper
ttcccagatgctgtcgccgcaccccctcgc

SEQ ID NO: 124223 - DNA, 30 bp, Homo sapiens
  chr14:21572504-21572534
  hyper
acccccaccgtttacgacctttgcaagtgt

SEQ ID NO: 124224 - DNA, 30 bp, Homo sapiens; identical to SEQ ID NO: 50985
  chr14:21737920-21737950
  hyper

SEQ ID NO: 124225 - DNA, 400 bp, Homo sapiens
  chr14:21768994-21769394
  hyper
taaagtgtggttaatagatcacggtagatgaatacatattatagatcaattcgtgattatatgtcccaaataacccgtagaaataataactgtcatgaaaggagaagccacgtgctctatttgtccacaggctgaggaccaccttgctgcggttgaccgctgctggccgggacctgcgggtcgcggaggaggcggcgccgctctcggagaccgcaaggcgcgggcagaaggcgggatggcggcagcgcctctccatgcaccagcgcccccagatgcaccgactgcaagggcatttccactgcgtcggccctgccagcccccgccgcgcccagcctcgcgtccaagtgggacacagacagctccacacagccggtgcaccggtgccggagaaacccaagag

SEQ ID NO: 124226 - DNA, 30 bp, Homo sapiens; identical to SEQ ID NO: 9548
  chr14:21851939-21851969
  hyper

SEQ ID NO: 124227 - DNA, 30 bp, Homo sapiens
  chr14:21852635-21852665
  hyper
tgtaactgggcatgcgcccctcctagaaat

SEQ ID NO: 124228 - DNA, 113 bp, Homo sapiens; identical to SEQ ID NO: 50988
  chr14:21852939-21853052
  hyper

SEQ ID NO: 124229 - DNA, 30 bp, Homo sapiens; identical to SEQ ID NO: 50989
  chr14:21904891-21904921
  hyper

SEQ ID NO: 124230 - DNA, 302 bp, Homo sapiens
  chr14:21905265-21905567
  hyper
cggaagctgcaggccgagaggcccgacaagccctgaaggagaaaacgagctgtgcctcaccccagtggaggagagaggtggctttacctgcagtggctgtggggggccggttcgcccctctccctgtctctccagcaccagttccccctcctcctgcgcaacctaacctgatgctcctgcccgccccgcgccatcattggctgaagcgcactgccactcaccaaaggcgaaaagacgcaaaacagcgcaaagggtgggactataaggagctcccttccccctcccccgcaggttaggttgag

SEQ ID NO: 124231 - DNA, 30 bp, Homo sapiens
  chr14:21923990-21924020
  hyper
gccaccctctcccccggcctctcacaaagg

SEQ ID NO: 124232 - DNA, 169 bp, Homo sapiens
  chr14:21924474-21924643
  hyper
aaaataaaatctggcggcggctcgcctctgacgactcagttcacaggcggccaggcccctcggcatctttttttgacccccgccattgggggcgctgtgaactaaaacaacacttagttacctacttctgggaagccatcttggctcggactccgggactgggtgagag

SEQ ID NO: 124233 - DNA, 65 bp, Homo sapiens
  chr14:21945160-21945225
  hyper
tctagcccagatcacgtctctattgcactccccggaatcatccttaggtcgggagtaccctacgc

SEQ ID NO: 124234 - DNA, 30 bp, Homo sapiens
  chr14:21978783-21978813
  hyper
agtgccactctgtacgggccactaaattgg

SEQ ID NO: 124235 - DNA, 241 bp, Homo sapiens
  chr14:21979449-21979690
  hyper
tcacgcggacaccccgaaggctaaccggaaaatgacccctggagctgagcaagacagaaaagtcatttccggtgtcgcgctttcttggaagctataaagagccacgttaggtgttggcagagcggccggtatagtcctcatacccgctctctcatgcttccggacacagtgaggctgtggttgccatgttggtgactggcagagcggccatgttgcttatagacgcgcatgcggccatgtt

SEQ ID NO: 124236 - DNA, 14 bp, Homo sapiens
  chr14:21994117-21994131
  hyper
cccaccgaaagtct

SEQ ID NO: 124237 - DNA, 645 bp, Homo sapiens
  chr14:21994155-21994800
  hyper
cgcccccacccctgcccagcccgaccgaccctaccgcacctccgagctctgccggctccccgcagggcaccccgagacgagagctcctctcggattcgtgcgccatggttgtgggggaagtggagggccaggtggggtgggagacaatggatattgggattgagggaggcgatggccgctgggtctgcggcagcctctgcacccagcggcccagactgcggagatggagatcggcagcggcgggggcagggagcagcggcggagggggaggggagcgaggaggcggggagaagctggagtgagaaagcggggagaggggagatctgggaggagctgatgaggaggggagtttatggggaggagctgctggggagggaggcgggagctagaggaggcgggagaagggagcgctagcgggggcgtgggggcgggagctcagagctcgggagagtttccggaggcgcagtgacaggtgctgtgaagcactgcgggggtccacctttcccggtccctggccagctccccccatctgcagatgcctttgcccaggcctaccctcctccccccgccctcccctcctaagctctaggggcacagtgggaaacgtagccctgctcagtggagcaaggcgataggcttctctta

SEQ ID NO: 124238 - DNA, 227 bp, Homo sapiens; identical to SEQ ID NO: 50993
  chr14:22004961-22005188
  hyper

SEQ ID NO: 124239 - DNA, 30 bp, Homo sapiens
  chr14:22362395-22362425
  hyper
cacttccttggatccgtggtttcgcctgtg

SEQ ID NO: 124240 - DNA, 30 bp, Homo sapiens; identical to SEQ ID NO: 9553
  chr14:22694049-22694079
  hyper

SEQ ID NO: 124241 - DNA, 30 bp, Homo sapiens
  chr14:23026158-23026188
  hyper
tgtgcccgtcactgcgctgggcgcaaggcc

SEQ ID NO: 124242 - DNA, 163 bp, Homo sapiens
  chr14:23057964-23058127
  hyper
atacagcaggtacgcgtccagcaacttcagacgctgcggagtggagctcaagtactcttctaagaaccgcgaaatgacagacactaccgacgccgacataactgcacgcaaggtactccagtccgcgccccaaactcttggaggacccgtcgaccacaccgga

SEQ ID NO: 124243 - DNA, 363 bp, Homo sapiens
  chr14:23066987-23067350
  hyper
agagacatctctgccgggacacatgccagtgattgaaaacacagcaagggccccactagctgaaaccaagttgcagagttttgagggtcccaccgccgaccgccggcccgccgcgagccctgccccctgcgcggccacgcccccttgctccccgcggcctcccgggtcagctggtgctggcgtcaggcgctgggcgggctcgccaggacctggcaaggcttgtttactatggccgatgatctggagcagcagtgagttaatcctgtccctttctctctttctctctctctctctgggccatgatcctgggactgtctgtggctgaggaacagttgtagacaccttcccgctcttccttttcca

SEQ ID NO: 124244 - DNA, 178 bp, Homo sapiens
  chr14:23067564-23067742
  hyper
gtgggacgcgggtgcggaggtagcagccaggcgtgctcgtctcgacttgccccccagaacggcagtcgtggggatggagagagcctcctccctccgcccggcaaagagaagatgtggagagactggagaggtctccatcgcgctgaaattggtgtggaacaacgggcttgcaagtttc

SEQ ID NO: 124245 - DNA, 30 bp, Homo sapiens
  chr14:23235598-23235628
  hyper
tcagaggacaatcgcgacattagaggaaaa

SEQ ID NO: 124246 - DNA, 30 bp, Homo sapiens
  chr14:23236562-23236592
  hyper
cggcttccggcccccgcagcctcagtacct

SEQ ID NO: 124247 - DNA, 543 bp, Homo sapiens; identical to SEQ ID NO: 50996
  chr14:23291813-23292356
  hyper

SEQ ID NO: 124248 - DNA, 49 bp, Homo sapiens
  chr14:23299070-23299119
  hyper
ggccaccgaggccacgcctacttccggctaccccggctactcctgctca

SEQ ID NO: 124249 - DNA, 30 bp, Homo sapiens; identical to SEQ ID NO: 50998
  chr14:23299454-23299484
  hyper

SEQ ID NO: 124250 - DNA, 30 bp, Homo sapiens; identical to SEQ ID NO: 50999
  chr14:23340562-23340592
  hyper

SEQ ID NO: 124251 - DNA, 30 bp, Homo sapiens
  chr14:23340924-23340954
  hyper
ggcaggggtgggaccgggcttgtcacccgc

SEQ ID NO: 124252 - DNA, 30 bp, Homo sapiens
  chr14:23341465-23341495
  hyper
gaccacagaagctccgggacccttccggca

SEQ ID NO: 124253 - DNA, 197 bp, Homo sapiens
  chr14:23355350-23355547
  hyper
tccgggctgggaggccgcaccacgacctacccgttatcctcgttggaaacaagagcgacttggcccgctcccgggaggtatcactggagggtgtgtatcctgaacagattccatacttgcgatctcaggggaatgctctcccttccaagtcacctcttctccctaaggcctttttaccatcgcggacgcactcactt

SEQ ID NO: 124254 - DNA, 544 bp, Homo sapiens
  chr14:23355772-23356316
  hyper
cccgggtcccgtacagcccagcgggcgcctgagccggtgccttcctgcagagggccgccacctggccgggacgctgagctgcaagcacatcgagacgtcggccgcactgcaccacaacacgagggagctcttcgagggcgcggtgcgccagatccggctgcggcggggccgaaaccacgccggaggccagaggcccgatccgggcagccccgagggccctgcgccacctgcacgccgcgagagcctcaccaagaaagccaagaggttcctcgccaacctggtgccgcgcaacgccaagttcttcaagcagcgctccaggtcgtgtcacgacctctcggtgctctgagccgcggtcgccatggccactgcggtcgccatggtcaccgcgccctccgctcgccccccctcgccccgccccgcccccgtccggcttccttggtggaggccgtctaggaaaccaaaaactcccaggatgccccggtgtgaccgccgggggcggcccggggccgctcggcggcacctccacacccgccccaacgcgttc

SEQ ID NO: 124255 - DNA, 174 bp, Homo sapiens
  chr14:23388420-23388594
  hyper
cctcactggtttcgcggcaaccgtccaaagtacaggttctcattggctaaagtcctaagtatgggtggagcaaactcaaatgcgtcttagcaaccaccgagttcccattgattggctaacctcagagactccagaaaatggaagcgtcctttggtagccgcccatcactctctc

SEQ ID NO: 124256 - DNA, 39 bp, Homo sapiens
  chr14:23388822-23388861
  hyper
ggggatgctgaactcgaaatccccgttctgagccggcta

SEQ ID NO: 124257 - DNA, 286 bp, Homo sapiens
  chr14:23398576-23398862
  hyper
cctcgcgctgtccacgccgggattccttgatactagtagccaatcacaaagtcaaactagtgccccagaaggcgggacgagtcgccttaacaaccagagcgtctgccacagctcccgaacaggagggatggggagtggcttttcctgccaatccgcgggctgcacagtggcgtacggcatggatccaccaatctcagggtctggttcctgacgaacttcaatctcccagaatgcttagtctatctgaagaacgccgttgagagactacaccgcccatgaaaccctg

SEQ ID NO: 124258 - DNA, 30 bp, Homo sapiens
  chr14:23426092-23426122
  hyper
gaagctccgcccgccgaccctctaaagcaa

SEQ ID NO: 124259 - DNA, 1397 bp, Homo sapiens
  chr14:23450223-23451620
  hyper
gagaaacggactcacgagataccaggggggttgaatttagcagaaataaggagccctggttcatctgaaaactagcaggaaggggacagtgctctggggccgcccccatccatccctcttgcttctttcctagtcccgcgtcttcacctcggaccccggggcaccggcactttgggccgtcggggcagtggagaaccgaataccgtgacgggtcccttcccgtccctaaccacttctctcactcaccgaagtagtcctccctggcctctggctcccgcatccgggcccgggcggcctccggaacgaaaggacctggtggctcctccagacccgacggctcaatccccgagggttctccgcgggctccggcttctcgcccaccggtgcccaccgtcaggcgaagcaaagctgttagctcgtcctggtaccgggcgcccacggcgcagtccccgtagccggtcacagagtgtcgtccgggttgcgccccccgtctctccaagggccccgccgctcccactccggccccggctagagctccagggctgcccagggccgggggatacgagtggcggctttcctggcagccgaaccccgcgggccgctgagcgtacaatcggtccagggcggcgtggagctccgggtaggcggacgggacccctccgggagaatagcctgccggtgctccggccaggggtgggccaaacaggcacggccccgctggcaaggggctcccgtggcgctggtcgtagcccatgctgatgccgctggtgcgattgctgcagggccggctacctccagctccgccagcccccgccccgtccagcagcaggctgccccgggggctggacggcttgctcgcgtcgctggccgagctactggcgaagctagagcgggggctgagggccggggccgtgggctccagccgaaaatcggggggcaacgactgaggtagaggcaaggcccgggtgggcggcggccccgcgggaaaagagccttcgtagcgcggcgcctcaaaggagccgcgctgatttcgctcagcgtccagggaaccttgctcccgggccggctccaacggctcatccccaggtcccccagtagctcctcggggccctgacttcctaggtccccccaacccacttaggcgccccttgcccggcccgggggtcccgtcagacccagaccggctagattcaccctttctgcggccgaacttctccagcaggcgactggctttctctcctaaccgctccatgccctcgggcctggggcctctcgccccctccccgcctggcaccctgcggcgtctcggcggccggttctctttccctgcagccggactctggttccccaggggcacaggggaggcacaggggcttagcgggcggcctggatgccct

SEQ ID NO: 124260 - DNA, 480 bp, Homo sapiens; identical to SEQ ID NO: 51006
  chr14:23451828-23452308
  hyper

SEQ ID NO: 124261 - DNA, 187 bp, Homo sapiens
  chr14:23503913-23504100
  hyper
tccatgaagcatttcgattcctggctcttctgggacaccccagcctggcgcggccaggctcagaccatcactgagactccctggacctagatccagcagatctgcacgacccccaagtccgaaaaacccgcgctggttcaccggtagcggtctctccaacacgctggcaagcgccatgtctagtgtg

SEQ ID NO: 124262 - DNA, 30 bp, Homo sapiens; identical to SEQ ID NO: 51008
  chr14:23504301-23504331
  hyper

SEQ ID NO: 124263 - DNA, 30 bp, Homo sapiens
  chr14:23525705-23525735
  hyper
cagataatgactgacggctagactgactca

SEQ ID NO: 124264 - DNA, 131 bp, Homo sapiens
  chr14:23527201-23527332
  hyper
cagctgcaaggcggcggcgttttgagagcccatgcaaagcacggtagcaggtcagctgggggacacttaaggacggcagaagggtccagagagtccgaggcccgggcccagggagcgggtcgggaacagag

SEQ ID NO: 124265 - DNA, 30 bp, Homo sapiens; identical to SEQ ID NO: 51010
  chr14:23527614-23527644
  hyper

SEQ ID NO: 124266 - DNA, 36 bp, Homo sapiens
  chr14:23540714-23540750
  hyper
ttgtattggcggagcggcagcgatcagccggagaca

SEQ ID NO: 124267 - DNA, 30 bp, Homo sapiens; identical to SEQ ID NO: 51011
  chr14:23563700-23563730
  hyper

SEQ ID NO: 124268 - DNA, 30 bp, Homo sapiens
  chr14:23565037-23565067
  hyper
catcgccgtgtcttcggacccagactatga

SEQ ID NO: 124269 - DNA, 30 bp, Homo sapiens
  chr14:23630324-23630354
  hyper
ctcctctccccgacccgctcaggatccggc

SEQ ID NO: 124270 - DNA, 245 bp, Homo sapiens
  chr14:23755248-23755493
  hyper
gcgatggccgaaaccgggactgccccccccaccgtccccgggagcgcgccggtctacccagccctgctcgagcaagttggaggcggggcggatgggtggggtgggcgtccagaggcggtgccaaggtggcccgagtcctgattggtaggcgcaggcgggcgggcacgggcgaagcgcactgggctggccattggctgcgtgggtctcggctgaagtcaggtattggctgcgtgggcctcagctgg

SEQ ID NO: 124271 - DNA, 30 bp, Homo sapiens
  chr14:23755754-23755784
  hyper
gcgcctttcccagccgagagcccaaccgcc

SEQ ID NO: 124272 - DNA, 30 bp, Homo sapiens
  chr14:23756034-23756064
  hyper
tagtatttgtttttcgctagctagaaaggg

SEQ ID NO: 124273 - DNA, 202 bp, Homo sapiens
  chr14:23770437-23770639
  hyper
agcttctttggttccgctcactccccccgcccccacgcccccacgcccccacgcccctgatttccccacccttttcgccctccccggcttgactcccttggaccgctcccgccaatcctggtctctcctactcctccccgccacatcgggtcgccccgcccccgggtgcctttggtgttttccgccgtcggccgcaggcgcc

SEQ ID NO: 124274 - DNA, 145 bp, Homo sapiens
  chr14:23772081-23772226
  hyper
ttccaaggccctcacggcccgggcgcccccgcccacagccctctgacaggtggctccgcttgtcttcgctgctgcaccagggggcggggactccacctttgcggtcccgagtgaagctactcaaccttttaaaaaaaacatccac

SEQ ID NO: 124275 - DNA, 102 bp, Homo sapiens; identical to SEQ ID NO: 51015
  chr14:23775762-23775864
  hyper

SEQ ID NO: 124276 - DNA, 189 bp, Homo sapiens; identical to SEQ ID NO: 9560
  chr14:23776070-23776259
  hyper

SEQ ID NO: 124277 - DNA, 30 bp, Homo sapiens
  chr14:23790210-23790240
  hyper
cccggcagtcctttcgggggcaaggttcac

SEQ ID NO: 124278 - DNA, 126 bp, Homo sapiens
  chr14:23790483-23790609
  hyper
cagatttcccctaccgggatttgagaatttggcgcagtgccccgccttagaggtggggccttatttgattgccaagtaatattccccaatggagtactagctcatggtgacgggcaggcagcttga

SEQ ID NO: 124279 - DNA, 30 bp, Homo sapiens
  chr14:23791396-23791426
  hyper
aagctatcaaagctcgagtcagggagatgg

SEQ ID NO: 124280 - DNA, 11 bp, Homo sapiens
  chr14:23821269-23821280
  hyper
cgacacggctg

SEQ ID NO: 124281 - DNA, 258 bp, Homo sapiens
  chr14:23821317-23821575
  hyper
cgccgctggcattgggaggctgctcccagccagaggcattaggggggaaggccccgtagtggcaatgcagcgggggcgccagcgtgaagatggggtccgaggccatgcccagagccacgaagagcaccggcaggcagcagaggccgagctgcagctgctggccgccgcccagcgcccccacctgggcgagcagcgcctcaaagctgagggggcctgggggcacggccagcgacaggctgctgcccagtccgtcgccgc

SEQ ID NO: 124282 - DNA, 679 bp, Homo sapiens; identical to SEQ ID NO: 51018
  chr14:23821601-23822280
  hyper

SEQ ID NO: 124283 - DNA, 649 bp, Homo sapiens
  chr14:23834138-23834787
  hyper
gcagaaataaagtgacaggagcgcagggcaggccgtggaggtctctccccggcagcctccactccctggtggactcaccgacgtggcaatggccatggctttggcctcccgcgcagcctgcctcaggccaggctcggttttgctgacttcagcggtggctgccccgcaccatggtccgcggcctctagcccccagctgtggcgcctgagtcgtggcctccgccaaggttggaggaggagaaagaaaacccacaaaacttcccaaatgagaggcaggctagccaggcaggaggaggagcggggcgggccggggcgtcgctgcgggacggcatccaagggcgcgcgctgcgtgctgtccccgcggcctcccgggcgccaccggctcggccaggccccgggagctgcccgccctaggccgcgggggcgccccgggctcgcaggatccgaaaattcccttcccgggccggggcgggtgagcaggcgggcgctgggctgcgctcgacgcctctccaggccgctcaggagagcctcgagggctgggagaagccgccggggcggttgggctggacgagcgagtttaggggccaaccgtctccacccgccggccgcgctgcagagcggtgctcccagggctggggtctgcggcgacc

SEQ ID NO: 124284 - DNA, 85 bp, Homo sapiens; identical to SEQ ID NO: 51020
  chr14:23835314-23835399
  hyper

SEQ ID NO: 124285 - DNA, 30 bp, Homo sapiens
  chr14:23835847-23835877
  hyper
atgggagggagcgcgcgccttccgcccagc

SEQ ID NO: 124286 - DNA, 52 bp, Homo sapiens; identical to SEQ ID NO: 51021
  chr14:23938809-23938861
  hyper

SEQ ID NO: 124287 - DNA, 197 bp, Homo sapiens
  chr14:24020942-24021139
  hyper
ggctggagtctaggcgtcccacacaatggaataatcaatacccaggcgcccggggctgccccactgagcaggtgcagcgacccgcccgccgcggcgcatgccgggagttgtagtctgttcgcgcccgcccgcctgcctcgcgggacccagggccgggggcaggccggccagcccaccaggtcgcctccaggttcaag

SEQ ID NO: 124288 - DNA, 285 bp, Homo sapiens
  chr14:24024865-24025150
  hyper
ttacgcgctgcccccgcccccttccctccccccaccccaacccccctcgccaccattgccactggcctgcgcttagctggctgctatagcagatatctgttggacggtgtgaatggcttgtattccaggcccatctgcctgcgttgggggtgcggcggggggtgttggagacgggactggggcttgagctccttgcacccgactctccccgccgccttgtagccccagttcagctttaggtagagtaccgcaggcaccaagtgcagctttcctgtcgccatagcg

SEQ ID NO: 124289 - DNA, 105 bp, Homo sapiens
  chr14:24025214-24025319
  hyper
cggggtgcctggctcagcctcaggcatgagacctgtaccagcccccgggagccgtgcggggccaacaatgaggagcagaatgcaaggggcggcctcgctcccctg

SEQ ID NO: 124290 - DNA, 37 bp, Homo sapiens
  chr14:24025554-24025591
  hyper
gagacctgaagttccgctggccggtagtgtagcagga

SEQ ID NO: 124291 - DNA, 575 bp, Homo sapiens
  chr14:24036494-24037069
  hyper
tcctgaagcttcagcgaaggcaccaccatcctgactggcagagtccgggagtggagaaacactctctggtcgggcgtgcctgggctttcggcccaggcccgtcctgtgtcaagaccctaagagcccgggtcccacaggtaccctaaaattgcgcccgcattttacctttcccgaagtgggtctccaaattccgcgcccaccccaccgcccgagaagcccactacgcatgcgtccgcaccccaccggcgccccttcctattgagcatgcgcgggagccccacctatttctctctaccgtttcctccccctacctggtaccccatccctagctcagccattgcttttttttccacgaccctccgctgtttcttccgcgagcttcctcccccgatttccatctcaggcagcggcagcggcagcgacagcctgcctaccccaggactccagcctcacctggcttctgcctcaactccgctcctctgccccccagcgcttcctggtacggggccgagcaggggttggtgctccgtgcggtccttccctctccccgcctccaccacgggaccccgccctcc

SEQ ID NO: 124292 - DNA, 14 bp, Homo sapiens
  chr14:24045263-24045277
  hyper
ccgagccgggcggt

SEQ ID NO: 124293 - DNA, 32 bp, Homo sapiens
  chr14:24045385-24045417
  hyper
cgaaagaatccgccggccgccggagtgcgctt

SEQ ID NO: 124294 - DNA, 48 bp, Homo sapiens; identical to SEQ ID NO: 51025
  chr14:24505638-24505686
  hyper

SEQ ID NO: 124295 - DNA, 30 bp, Homo sapiens
  chr14:24521311-24521341
  hyper
cccggcggcggcggcggctcctctgcagca

SEQ ID NO: 124296 - DNA, 30 bp, Homo sapiens; identical to SEQ ID NO: 51026
  chr14:24550380-24550410
  hyper

SEQ ID NO: 124297 - DNA, 107 bp, Homo sapiens
  chr14:24550911-24551018
  hyper
cacgcagtctgtttcggtccagagcccgccccaggccccgacgctccccgggccccccagctgaccgttgctccagtcaggcgggcgccccacggtgcagggccggc

SEQ ID NO: 124298 - DNA, 30 bp, Homo sapiens
  chr14:24563175-24563205
  hyper
ctggcctcgcccctcgttcctagcttgttt

SEQ ID NO: 124299 - DNA, 30 bp, Homo sapiens; identical to SEQ ID NO: 51027
  chr14:24583041-24583071
  hyper

SEQ ID NO: 124300 - DNA, 258 bp, Homo sapiens
  chr14:24583739-24583997
  hyper
atacctctcggtagcgaaccaccaaacgtttcttttttaagccccgcctctcagccgttacgcctagttcggctgtctctgattcaggaagctggcagttcccacttactcctccccagcaagagctaacagccctccttgggtgtgcactttctcctcccctcaggcacctcgcgcattctcccgcctacctatcaatcatcgtgctccgctgtccagttggctggccaagggggcggggccgtcgtgtgacgtttg

SEQ ID NO: 124301 - DNA, 30 bp, Homo sapiens
  chr14:24584461-24584491
  hyper
cccaacacccctcccgctccccagtccggg

SEQ ID NO: 124302 - DNA, 224 bp, Homo sapiens
  chr14:24605550-24605774
  hyper
gtggctggagcggccgggggcatccccgacccgccccccaggctcccacgcgagtcgggggcagtcggccgagctggcgcgcccggagcacctgcgccccggggagggcggcgactgctgcctgcggggagaggcgaggcggccgtggttctgcggggtgaggtgaagcggagagctggcgtggaggggaactccgctggcctggggccggggccacacacaga

SEQ ID NO: 124303 - DNA, 104 bp, Homo sapiens
  chr14:24610777-24610881
  hyper
ccctagctggcggccgcgactctgcgcctgcctgggagacagaccaaactgcagctccctgcagaactggctcctggagtcccgcccacgtggtgctccttgat

SEQ ID NO: 124304 - DNA, 101 bp, Homo sapiens
  chr14:24611142-24611243
  hyper
agcagaccgccttgcgcctattatgggttgagtggctctgtactctagatcggctctgtcacttactaatgggccgtgttgccttcgcgactgcaggtttt

SEQ ID NO: 124305 - DNA, 30 bp, Homo sapiens
  chr14:24616605-24616635
  hyper
ctccctcttggccgcgccccctggtttcct

SEQ ID NO: 124306 - DNA, 30 bp, Homo sapiens
  chr14:24617099-24617129
  hyper
gtgaggcccggccccgcttggaagggggac

SEQ ID NO: 124307 - DNA, 30 bp, Homo sapiens
  chr14:24630458-24630488
  hyper
actgtagaaaggggcggagagatcagccgc

SEQ ID NO: 124308 - DNA, 73 bp, Homo sapiens
  chr14:24658234-24658307
  hyper
tgggttggagaactcgagcttcgggcattcagtggccagctcggctttataaaggaccgtgcccttaacagca

SEQ ID NO: 124309 - DNA, 30 bp, Homo sapiens; identical to SEQ ID NO: 51030
  chr14:24665430-24665460
  hyper

SEQ ID NO: 124310 - DNA, 30 bp, Homo sapiens; identical to SEQ ID NO: 9564
  chr14:24682901-24682931
  hyper

SEQ ID NO: 124311 - DNA, 121 bp, Homo sapiens
  chr14:24685266-24685387
  hyper
aatggcgactagagcgtcgccactcggggcgtcatcagcctggagatggcgcaagagtgccatctgatgctgggcggggaagaggattgcagcgaggtaccaacacgaccacacatgcaac

SEQ ID NO: 124312 - DNA, 249 bp, Homo sapiens
  chr14:24701154-24701403
  hyper
tgactgcgggggttcgaatacagtgagacccgacaaaagcgaccccattctgggtgatagcacagtcctggcaaaaaagcaggcatggcaaaataccccagggtcgtcaggtgggacctgggccccgctctcaaagcccttctgggtccccctatttcccaccacccctcgcgcggagccctgaggcagtcagcgtcctccaggctagggaaaggcgtggttttccttccccacgtctcccgtaaggca

SEQ ID NO: 124313 - DNA, 115 bp, Homo sapiens
  chr14:24701639-24701754
  hyper
ttgctcccgcgtttcggttcagtgacgtcgtaaattggaatgaggcatccagtttagcaacagcagagatgacgactctgcgattctgagagtccctggcgagcccgggctagcg

SEQ ID NO: 124314 - DNA, 226 bp, Homo sapiens
  chr14:24702079-24702305
  hyper
ttatgaaccctccccgccccccgtcgccaacattccttcgttcccctaaatcagcctcttgccccattgctctttgcaggggtagaagaaggaagtgtagcggggtaaggaatgcaccgtcagggtctctcacaaccctttcccagctctcctccccaacaaacagtacctgggatggagccctagggtaatcgcagccacgggatgggtcgaggtgacaggcttc

SEQ ID NO: 124315 - DNA, 144 bp, Homo sapiens
  chr14:24711904-24712048
  hyper
gaaccgtgacggtgcgtcagaaggccacgccccagcggagctgtagctgcccgcttcctgcactctctgccggctgacatgagttggcggctgaggctgtcgtggccgctgaggctgttgtggccgttcgtctgggtcctccca

SEQ ID NO: 124316 - DNA, 34 bp, Homo sapiens
  chr14:24740922-24740956
  hyper
acgggcgactgtagcgtgcgtgtgaaatgggggg

SEQ ID NO: 124317 - DNA, 43 bp, Homo sapiens
  chr14:24768606-24768649
  hyper
atatgggaatctggcgcggcagcccctcggggcgcgtccacgc

SEQ ID NO: 124318 - DNA, 92 bp, Homo sapiens; identical to SEQ ID NO: 51035
  chr14:24769097-24769189
  hyper

SEQ ID NO: 124319 - DNA, 30 bp, Homo sapiens
  chr14:24769389-24769419
  hyper
agactggggaagaacgaggtaggcagcaac

SEQ ID NO: 124320 - DNA, 30 bp, Homo sapiens; identical to SEQ ID NO: 51036
  chr14:24802999-24803029
  hyper

SEQ ID NO: 124321 - DNA, 517 bp, Homo sapiens
  chr14:24803605-24804122
  hyper
gcaacgaaaacacatcgaaaagaagaccccacaaaccccaaccccgaaaatgctccccaggtagagaccctcccgcagcagaggctcggctcaccctgccgctggcccaggccactgcgagcagcgccgcgagcgcacagagcacgatccccagcagcagcagcagcagcgggtactgctggctcaggctgtagtaggtctcgtagaagaggtcttcgctggggggcggccgggggctgaagaggcgggccatgatctccccagccccgagccccggggctggctagggccgggcgccgggttacctccttcggcccggcgggccccacctgagcttttctcacccgctcaaagccgctaccaccccgcgcccccaacctcgtggcaatcccgtctcctttttcaggccctccctgcggcctcccagcccgctcccagctggcgatgaggggatccctcagtcctttcctcctcctccctcaaacccggattgtagaggtgccctagaaaagcctca

SEQ ID NO: 124322 - DNA, 329 bp, Homo sapiens; identical to SEQ ID NO: 51038
  chr14:24808628-24808957
  hyper

SEQ ID NO: 124323 - DNA, 30 bp, Homo sapiens; identical to SEQ ID NO: 51039
  chr14:24835089-24835119
  hyper

SEQ ID NO: 124324 - DNA, 30 bp, Homo sapiens; identical to SEQ ID NO: 51040
  chr14:24837169-24837199
  hyper

SEQ ID NO: 124325 - DNA, 357 bp, Homo sapiens
  chr14:24837549-24837906
  hyper
ggggcggccagctgcgaggatgaggagctggaatttaagctggtgttcggggaggaaaaggaggcccccccgctgggcgcggggggattgggggaaggttagtgctgggctgggaaggggtcttggggtcagtgagaggagggccggggatcctgagtctggggaatttaaggcagcgagcctagggtggggggtgagggagtcagaggtcgaagggagtcggggggactcgttggcctgcggaagtgaggctgggggcccgggcaccactttctcctttttaggtcgtgactggggtgggggtgggggtgctgttggctgtgcgccgcctcccggctgggccgcctgtcactgaac

SEQ ID NO: 124326 - DNA, 30 bp, Homo sapiens; identical to SEQ ID NO: 9567
  chr14:24868067-24868097
  hyper

SEQ ID NO: 124327 - DNA, 30 bp, Homo sapiens
  chr14:24911824-24911854
  hyper
gagattcggcttctcgggctaggaggccaa

SEQ ID NO: 124328 - DNA, 30 bp, Homo sapiens
  chr14:24912331-24912361
  hyper
gagaacccttccaccggtaatctggatttc

SEQ ID NO: 124329 - DNA, 220 bp, Homo sapiens; identical to SEQ ID NO: 51042
  chr14:25148243-25148463
  hyper

SEQ ID NO: 124330 - DNA, 1154 bp, Homo sapiens
  chr14:25518429-25519583
  hyper
cccggcggtgttggtgaggctcgatgccggcgtgcacggcaagcgcgaattcggaacctggcgcccttgaccaagcctgagatcggaaagggggcatcgcccagggccagcgccctgggggcagggtgccgtgcccgccagaaaagctcgcctcagttttggcagtaatgattttcctagaagatgccagagttcgcgaagatcggagtgattcgcggatttctgcgctcaagctagaggcgcagcgaccccgagctcccccacactgggagcctcggggcagcattctcggggcccatgccatcgcggggacggtgcggaaaaaaaggctccatcctcaactttctcggaggaaatcgctccgttctgcggcttgcccaatactgcccgcacaacgggtcccagggttggagagaaccagggacacgagtccctctctgcgcgcacaaagcagctgcgccggggcgcgcggccccctctcccgccacccgccaacttggaagaatctctctgggagcctgcctactcccctggcctcacagccacccgcctcggacggagcgccaggcgccccaacagccgtggcggctgcaaccgcatctcccgggcttggcctccgccctgaccgcctggctcccctcgccccggtcctaccgtgcagcctggctcgcgcccctgccgtgccagtgcgcggcacgcgtcccagagcacgaggctcctccccggggggctgccccgcgcggggctccgggctccggacaaggcttagccggcccgggtgctggctcgccgccgctcgcggctcccgcgccggctcctgctgccgcgcgcgaaaagggaggggttggggggaaactcccggcaactccaactccgggcgctggagctccagctgcagccgcgcgcccgcccgccgccgagtgcgagcgcctgcgaagcaaacctgcccgcgcggccgcctctgagcatgctcagtgccgccgtgggcgagcccgagcgccctggcccggggcaaagagcagcggctaggggctgggggctgggggccgggacccgcgacccgccccaggcctcggagcgcggaggtggcagaggaagggaaaggccaatgtaggggcgggggccctgagccaaagacccgggagaaaccgatc

SEQ ID NO: 124331 - DNA, 305 bp, Homo sapiens; identical to SEQ ID NO: 51044
  chr14:25601969-25602274
  hyper

SEQ ID NO: 124332 - DNA, 396 bp, Homo sapiens
  chr14:26674236-26674632
  hyper
gagggtgggtgtttgccaagtcgccggtcccctgcgtccccgcccgccggtcccttctccgacccgagacccccgcccgccgcagcccgactctggggcgtttgggaggtgggcctgaggtttgcctaggactcgagttcctttcaaaggaaggcgagagggagatggggagaaggagactcggagacttctctattaaagccgcgctgaactctagccttctggcaagccgcggcaagccgccaatttgaagtgtgtgagctttaatctgctcctagcctgatgggctcccgtgtccacagggagctgggaggcatccattacgccggaccaaggagatggagcgtctaggaaatatgttaatgccggagccctccccgccggcccgaacctgcc

SEQ ID NO: 124333 - DNA, 31 bp, Homo sapiens; identical to SEQ ID NO: 9569
  chr14:26892909-26892940
  hyper

SEQ ID NO: 124334 - DNA, 280 bp, Homo sapiens
  chr14:27065771-27066051
  hyper
aattcacctctgcttcgatgcattgggtgcattgttaagatgattccagtgcaaatgaagaagcgatatcggtcccgttaaaactcatcttccaaggaagcgcaggatgttaactaacaagtcaccgttccagacacccccaccctcgtatgcacccccctgaagacaaatcaatgaaatatttgcaccgacaatctaagtgcggtaagggcatgcactcatcaagattttgcatactacttgtggcccaaagcaagaggatggagagaggaaaaactct

SEQ ID NO: 124335 - DNA, 646 bp, Homo sapiens
  chr14:27066140-27066786
  hyper
cggccatcacctcactccggggtcatcctcctcctcctcctgaatggaccttcttgcccaggtctaggatatttacatggtcaacctctggaccgattaaatggaaagataggtctattccgaaaaactggtcgccattttgatgaatgataaacacagaaatggaaatgtgtcggggacacctaggcgcggggcaggtgcaggggagggggcgcggggcaggggcgcaggggccgccgggttcgggctggaggtgtccgggccgcgggagggagggagggaaggagggagggaggacggcgagggagggaggcaggggcgggcggcgggggatggggccagcggggaggtggaagcgatacccaccgcccgtattggtcctcttggtgctgccggcttcagggggggcttccagcggccttttccgcgagtccggcgggtccaggtctatgggaaccccagtgtgggtcccgttctgctggatgggagctgccgccatcatgtttgcagttcctgccgctgctaccgggagaaggttctcccttttgttttggctttttcttttcttttttcttttttttttttttttttttttgcgtttggggtttcttaaggttttttttttttaatcggatcaatataaatc

SEQ ID NO: 124336 - DNA, 150 bp, Homo sapiens; identical to SEQ ID NO: 51048
  chr14:27067006-27067156
  hyper

SEQ ID NO: 124337 - DNA, 529 bp, Homo sapiens
  chr14:27067372-27067901
  hyper
gtagactcccacacacttcgcgctcgggtccctgcctctcagcagcgccgccgcctcccagcgccgatgcttcagccggcggggcggctgaggggtgagggggaactccgcgggcgggggcgagggagcgtgtgtgcgcgagcgtgtgcgcgcgcgaggggagcgcgtgcgcggtgaggacgcgcgccggcggttggggcgggggcgggggccggggcgctcctgtgggaagggaggggtgaaaggtcgctggtccccggcaacacggctcaggcaaacgtaagcggcttgtcgcagaaaccaaggggtccacgaaacgcgctaggctagaaggcgggaaggagagattactgacagccgtgccagccaataaaatagaaatgtgagaaaggttcttcgggccccttcccaatcaggaaacttgggtgatgaggggcagcgaaggggtggggtgggatcttggtccagctggtactggagcggcgacaattttggctagtctaagaagggcattcgagtgaccgttgac

SEQ ID NO: 124338 - DNA, 181 bp, Homo sapiens
  chr14:27068101-27068282
  hyper
acttagagtgtcactcgccgccttaaatcctttcgggaacaagccaggatataaataaataaagctaggtgtgggtcttcccttcacaaggcgctggtaggcagactaaagacaggcaacagctgagtgtgcacacagaactaaatattgaacgaaatacgagtgtcggaataaaattcat

SEQ ID NO: 124339 - DNA, 80 bp, Homo sapiens
  chr14:29224711-29224791
  hyper
tgagcatttttgttgcgttaagtggccggcattagcagcctaaacacgtaggggaaggctaacatcgccgttaatataat

SEQ ID NO: 124340 - DNA, 883 bp, Homo sapiens
  chr14:29225610-29226493
  hyper
gagaatttgagcgctcgaatgctgttgttaaatttcttcccagagccccatgctccctcgtttagcatctcccttccccaataattacttgagaggatgagctcgagattgaagagtgaggttggcttttctgtgtgaggagccgataggatccaccaacactaaaatcaaaaagactcctggtgcttgcgagtacaaccccaaattctctcgcacactgcccaagtttcttgaaactcggaggctcagctcagtgtaaaaacatgggggttctcctgagtcggtttccctgaccacagggggacccctgcaaacacggcctcctctttaatacctttgtaactcagttcttcaagcaacccacctaggagaataaaaggacccactgagctccaataactgagtagatgattaaataaagccgagatctcagatcttcgcgtttggggtggggagtgggggcgctggggaaaagtcgggaatagccccgcggtacctggggatcccagttgttttttctaagaaagcccggggttaaaaaatgcattggaatgtggcgatgcctccatcagccgtcactttataagttcccaagtcacgctgctctagaccattgtggatgaaagtggattgtctctccagaaccaaatattccctgacctgcttccccaacgcgccctcacgctttcctgggagagcacagcgctgccggagacgcggcgcttctgtcaattgtgcagagcaattactaagaaaatattgtgacgatgttgtagggcgaaaggggacgtgaggaggaaagggagggggagttagtttggagagcaatttgcaaaggaatattaactttgattcccgaggtcaccgcgggaaaaggggttct

SEQ ID NO: 124341 - DNA, 1266 bp, Homo sapiens
  chr14:29228249-29229515
  hyper
ctctaggaaaacctgcgggccctgttttgtgtttcgagcgggagagcagacactcagctcaaatagaggcctttctctcgtctttcggggtgtttattctatggccaaaaggtaagatggccaaggcagcgatctgagcgtgatgtctggccccgcggggggcccaggaggcccaagttgggacagctccggagctaccccggtgcccctcagctgggggagggcgcgcggcagccgcctgccagccccacaggctgctctccaaaggagctgggctttttcagcgtttctgtttccttgtagcctcatctatcttatctaacaagttcacgctccgggagaaaagaagagggtgagaaaaaaaaaaaagaaagaaaaaagaaaacctcttcaccgcggtgattcatagttcataggctccggagccaaacttgccgacccagcttttttctcgaacattactttctctcctacgtgccttaggacaaacccagaaggaagacactaaaattgccgaacaagaatctaggattgttttaaaaataaaagtgaccccccacagacacctttgatgttgttgattctgacacagaggagtcgagttgttttgtttacacatgctaacggtaacttgctcctgatgccgctctacgcgcagcttagtctgtcttctcctctcctccccgcaggcgactccttccaaagagcgagagagaaatacgggtattactgttatcccccactgggttcaataccccttacatgtaattgaatattcgaattaacgtcacctgcatgcaccccagtcttttaactctgaaatgtgctttatagcaatacagacttgaaacctttaactgttttctatatccccgcgtttaccgtggcagatgacctcttagcccaaaattgatttggtgtgtatccggtcttatgtgccaaaaaaagagatacctaggctgaaaaggcaactttaaggggggacatctagagagatgacgcctagaatcaaggcctctggctcgattgcgttcggcaagcgtctgcaacaaaggagcgtcgggcaagctcgcgggtatgcgcagggagcagcggcgcgcagacctgggagccccagctccgcgaagctcctcgaagggaaccctcgcagttacagcctcaagaggcaaggcaggggagggagaaaagctggacctcttgagaaacgctcctccaacagattttccatggcctcgtgttggagaaggggcgcgggggaggagcgag

SEQ ID NO: 124342 - DNA, 779 bp, Homo sapiens; identical to SEQ ID NO: 51055
  chr14:29234529-29235308
  hyper

SEQ ID NO: 124343 - DNA, 297 bp, Homo sapiens
  chr14:29235341-29235638
  hyper
cggtgggccttatctccccccttatccaaagctgcgctagactattacctacaaagggcacaattttcctgctggctcagaaatgccagacactggcctgcaaggccgactcggaaaagtagtgcctcgcctctacctcctccatttcctgccctctcgcatcctctccctgcactcccactcttcccactaccaccaccacccccgctttcaaaaataaaattggatacaaactttaatcactaaggacaaatattgacgcttaaacgaaaatgacccagtacaatgaggaggaag

SEQ ID NO: 124344 - DNA, 508 bp, Homo sapiens
  chr14:29235826-29236334
  hyper
cggcagccggcgggcggggcgggggtgggtgggcccggcccctccgattggtcgacggcgagagagacgctcccgcacgccgccagctctgattggcccagcggtaggaaaggttaaaccaaaaatttttttacagccctagtgtgcgcctgtagctcggaaaattaattgtggctatagccgcctcgatcgctgtctccccagcctcgccgcggccgctccgggacgcgcccgcccgccgcccggctctccccccctttgggctgctgctgctgctgctgtgactgctgctgcgagaggaggaggaggaggaggaagcagcgggggggggagcggggggtggggggggagaccaagaagtacagttgggagcgagggagcttcacccccggggcggtggttgtttcttttttctttctttcttttttcttttcctttttttttttttttctaattcctgaggggtggttgctgcttttgctacatgacttgccagcgcccgagcctg

SEQ ID NO: 124345 - DNA, 403 bp, Homo sapiens
  chr14:29236413-29236816
  hyper
ggtcgccgccgcccgccgcgccgctgtcccgctcccgcgccgccgccgccgtttccccccgacgactgggtgatgctggacatgggagataggaaagaggtgaaaatgatccccaagtcctcgttcagcatcaacagcctggtgcccgaggcggtccagaacgacaaccaccacgcgagccacggccaccacaacagccaccacccccagcaccaccaccaccaccaccaccatcaccaccacccgccgccgcccgccccgcaaccgccgccgccgccgcagcagcagcagccgccgccgccgccgcccccggcaccgcagcccccccagacgcggggcgccccggccgccgacgacgacaagggcccccagcagctgctgctcccgccgccgccaccgccac

SEQ ID NO: 124346 - DNA, 49 bp, Homo sapiens
  chr14:29237017-29237066
  hyper
agtacgagaagccgccgttcagctacaacgcgctcatcatgatggccat

SEQ ID NO: 124347 - DNA, 127 bp, Homo sapiens
  chr14:29237139-29237266
  hyper
cgcgagaacaagcagggctggcagaactccatccgccacaatctgtccctcaacaagtgcttcgtgaaggtgccgcgccactacgacgacccgggcaagggcaactactggatgctggacccgtcga

SEQ ID NO: 124348 - DNA, 30 bp, Homo sapiens
  chr14:29242578-29242608
  hyper
ttgtccgaaggatgccgaggaaaaggatat

SEQ ID NO: 124349 - DNA, 172 bp, Homo sapiens
  chr14:29242807-29242979
  hyper
cataatttttttccacgttgacagaaatcacggtgaatccccaggtcaaaaggatgtagacacggcaaaggaacatggagagaaaacgagaaaaaattatacggagaaggggtagtgggagactgaaataggtcctaaagtgtaaattaattcatttcgtggaaatatgatt

SEQ ID NO: 124350 - DNA, 377 bp, Homo sapiens
  chr14:29243292-29243669
  hyper
tagggaaatgaacaccgttctgggcttgactttgtccctgctgggaatatcccagttcctggctttggaaatctcaggcaaataattgattcttaatgcacacttaggagacgtcggtagtacgctcgagagcctctctgtcccagagtggctgagagcacgcgccagacacaggttggctcggcccgaagcgaatttgggactctcgtcgcggtgtcctattaattagcttttcccggcgcctcagggactccggggtgaagatggagaggtggcataatggcgggacttgaagtcgttgtggcagggacctggcagcgttgttttctcgggttttgaaccggtgtggagaagtaacttcagctgctgagttgggg

SEQ ID NO: 124351 - DNA, 41 bp, Homo sapiens
  chr14:29243730-29243771
  hyper
cgatccccgcagagggtgaagccgggcgctgcgcagggagc

SEQ ID NO: 124352 - DNA, 109 bp, Homo sapiens
  chr14:29244137-29244246
  hyper
gaaaacaggtagcctcggggtgggaattcccagagcactgaaggcgccggttgttggccagagggaggccgggactccggtgggcagagtaccccgcgagtgcggagat

SEQ ID NO: 124353 - DNA, 608 bp, Homo sapiens
  chr14:29247132-29247740
  hyper
tatccttagcgtcagcgctgtaagaggtggagccgctcagtcccgcgggtggctgcagacagaaggtgggcgagtcctgggacttaaaaagttttgcagaaggttgaaaagaggagcagagggagagttttgagtttatttattttattttcctttttttttttttgtcttgtgccaagcccttgaagttaacgtagcgacgacgtggtccttgtaggaccaagcattcttggcattctgtcgagattgagattccagagcatcggatgaacgggacttatagctaaggcgtactcacccacccctcccttcgtctttttacgcacgcagcaactcgtcctcacgtgcataggggtagtggacagtgttgacttgaattgctgtccctcgttccaagcctttcctgtgaatgaacccgaaaacactcgacaggtcgtgaataatcgttttaatgagtgtgcaaagcgtgcgacggggtgcaccgagctgtcgggttaaacaaacaacttgtaccctgaccaaatccgattgttaaagtgcaaagtgatgtcagtaccatttccattgcctttcggaaatccacagatctgacacgcgggagtccaatt

SEQ ID NO: 124354 - DNA, 79 bp, Homo sapiens
  chr14:29254360-29254439
  hyper
ccctgcgtacgtccccgcacccctttcgccccagcggccgctcacaaagcgccacccgcgcctcgggcgcccgcagaag

SEQ ID NO: 124355 - DNA, 523 bp, Homo sapiens
  chr14:29254611-29255134
  hyper
cgcgtccgccgggaccccgtccctctttccccttcagtcttcagggagggggaggcgctccgcattagcggggcagttcagcaaccccgaccccacccgcgtggctccaggcccaggggtccgttcacttccccgtccggtttgggggacgccaattcgcctaagaaaaccctggcagaagagcgcggacccttcactacaaacctcacgtcagggttacagccacatttaggaacctcttcggaaaagctgagaaatcactgttttgcaaaaagccttctgtactgtgatggggctttgtggtgagaggaacctctgagaagcctcgtgcggcttgagtttagagtcacgccctgcccagcgacattctcccgcgcacgggagaacctgcacttccggtctccaaccctcgcgggccgtgactcttcccctcccccgcgccgggccctgcatttccggcccccttgctctcctgcacttccgcccagtcacatggatgatggatagcgttgggagctgtttt

SEQ ID NO: 124356 - DNA, 1308 bp, Homo sapiens
  chr14:30396132-30397440
  hyper
aaggacaaggaggggcgcggcgaggaaagggcaagatacctggaaatgtcatgagaaggatggaaatgggtgaggaggcggcggactggagagaaatcggtgaatagaggaagatggggcgagaggaggatgagcaacagcgagcgcagcgcctcgggttgcaggcgtccagccgcggcggggccagccgcttccagagcgccggcgaggctggcggccagccgagccccgggagccggaaagttggcgcggagagggccagccgggcagcgccccctgcgccgcggggaggcgccgggctggcagcggtgcggcgacttaccttctggtcgacaatggagcaagccatctcgcggacgtgcgccaggctgtagtccccggacgagtcctgcagcagcagcaccggctcacggctcaggccgatctgcagatggaacgagatgcccccgaccggggccgcgacaggagccaagaacggcgcgggcccgggcccggaccctgggaccagtgcggcggccgctgcggcagctgccgccgccacgggcagcagcggactgggcggccgcaggaccggaggggcgctcatcgctcggcggggcgcagggccgggcagcggagggcgggggctggcggcgcggcagcaggaaagttttgcagccgctgagccaggagcttctttctccgagagcccagacggaaaataaaaactttccggaaaagtccctgggctgggggagggcaaggggatgaggatcgggaggggaggggactaaggggaggagatggggaggagggaaaatggccgaggcgggaggactctgaggcccggaacgcggcagccggctcggggccgccggcactggggaggcgccgccgccgccaagaatctgccgcctggcgcgctcggaaggacggggcgacgggtcggcgcggcccgagcgccgggcgggggccggggcgggaagggggcgtgaggggcggggaaggggagctgggggcgggcactggggagccaccacccggcgggcgcgggagtcgcaggagcagcggccgcagtggccgcagggtgcccggtcgccgccccctccgcccgcagttcccggggcctgagcctccgcgagccgggataggaccgagtggcggggctcggagccgcctcggcaggcgcggcccttccctccctgcagggattcccgtcctctcgggtcccgctgccccgccccgactgcggacggagtggatggggtgcaccgcctcagacccgcttcctggggtcgcgaacttcccgggccccaaggtccctgccac

SEQ ID NO: 124357 - DNA, 242 bp, Homo sapiens
  chr14:30739844-30740086
  hyper
gaagctgaaagacctcggaacacaagcgttttgcttggtcactaagcctagacaaatgtaagtttccccgccccagctcccctcagcctgtcacacaaaagcgttcacatcagcagtcgtcagcggcgatgtcaggcgccgtgtcgttcttcaaacccttgggaaagctttagcttctcaagccaattgcactgcattgtcagtaggggtgtccgtgagctccccctcgtggctgaaggcca

SEQ ID NO: 124358 - DNA, 184 bp, Homo sapiens
  chr14:31027985-31028169
  hyper
tgctgctgtttcctcgaggatgaagggaaagataaaaccctcctgcctccgttcgtgctttcattcgccccattcctcgaaggtgacgaaacttcagcacatctctgtccattttggaaaaaagaggatcccctcaagagcaaataggcggaaacaatgaccccgcgcccggagtttttctgag

SEQ ID NO: 124359 - DNA, 30 bp, Homo sapiens
  chr14:31028667-31028697
  hyper
gctctcgacggttgcgcacgccagccagct

SEQ ID NO: 124360 - DNA, 363 bp, Homo sapiens
  chr14:31091324-31091687
  hyper
aaactcttagtattcgcctaacattacgggccactgaattaacctgcaccgggtctcccagttctaccgagagtggaggtcttcctggaggaggtggggtccggaactcaggcacaccctttggccccgcccttccgggctttgcttccggggcggtaagggcagccacgtcatccccccgctccgctccccagccgggcagtggctcgtgggagccaagatggcggcggcggcggcagcgacagcagcagcagcagccagtattcgggaaaggcagacaggtactgacttattctcttctccttgaagcttcgtgactgccccgacgacatccttctcctctggtgcgtgcagctcagagac

SEQ ID NO: 124361 - DNA, 466 bp, Homo sapiens; identical to SEQ ID NO: 51068
  chr14:31343656-31344122
  hyper

SEQ ID NO: 124362 - DNA, 30 bp, Homo sapiens
  chr14:31494195-31494225
  hyper
cacattatgaggatcgagtcaagctcaact

SEQ ID NO: 124363 - DNA, 119 bp, Homo sapiens
  chr14:31494512-31494631
  hyper
gtacttaaagttgacgatgggaaataaaacttcacaggtcagtcccaagtcactgtgcaccctagcagcccaggaaagaagcgtggctgtcaaggggcaagcgcgtaccaagtctgagg

SEQ ID NO: 124364 - DNA, 30 bp, Homo sapiens
  chr14:31495546-31495576
  hyper
gagctgccggctgccgccattacaatccct

SEQ ID NO: 124365 - DNA, 30 bp, Homo sapiens; identical to SEQ ID NO: 51069
  chr14:31496013-31496043
  hyper

SEQ ID NO: 124366 - DNA, 30 bp, Homo sapiens
  chr14:31676192-31676222
  hyper
ccagcaccaaaccccgctaagttaactacc

SEQ ID NO: 124367 - DNA, 256 bp, Homo sapiens
  chr14:31677204-31677460
  hyper
tgtcagtccgagcgcgctcatgcacgcacgtccagcttgcttggcgccgtggctaacactttgcgcgctcctgcggagggcgtcgcacggcacagcacagcaaagctgcggcccaacctgtccccgctgagccttccgcccaggccacccgcactcagccacgatcttccctcctcgcgcacggaagtgcgtcgcgtaaggaaggcgtctccccccgctcctgggaggccgaccgcctggcggttcaccccaaaga

SEQ ID NO: 124368 - DNA, 197 bp, Homo sapiens
  chr14:31888987-31889184
  hyper
cacttgaaataacgccgcgttggccgagagtagggtgaaagaaaatgtttcctcacactaagcaaatgccaccaaaggaaaagctttctttcctggagagaactgcaacagttagaaagcaaatatccacactctccactgctcccttctgggaactctctttgagggttcctgcagaaaacgaacgggcctctgag

SEQ ID NO: 124369 - DNA, 170 bp, Homo sapiens
  chr14:31889897-31890067
  hyper
cgccagctggccgccgagccatcgagcgcccactctggcaggcgtgactgcttcaccgtcgaaagagcgatggagactgcggcccaagttaggattaggacagcggtttttcagtccggagattccggccacaactatttttgtctgtttttatcgtaagccagagtctt

SEQ ID NO: 124370 - DNA, 30 bp, Homo sapiens
  chr14:31926468-31926498
  hyper
agctgccgggctgacgttacctccacccac

SEQ ID NO: 124371 - DNA, 30 bp, Homo sapiens; identical to SEQ ID NO: 51073
  chr14:31926761-31926791
  hyper

SEQ ID NO: 124372 - DNA, 137 bp, Homo sapiens
  chr14:32030564-32030701
  hyper
gccgagcgttgctccgtgacgtcatcactccgcgccacccgcgacagtttcccagcagggctcacagcagcgttccgcgtcatggggatttggcagcgtctgctgctttttggtggggtgtcgctccgggctggtgg

SEQ ID NO: 124373 - DNA, 126 bp, Homo sapiens
  chr14:32030901-32031027
  hyper
aggctgaggcgtggcgggacttgaaacacagttagaacgtagatgtggtattctacattgctttcttggctttgggttatttatcaaatagattgaagaaaagcaaaacacgtggaagccttatct

SEQ ID NO: 124374 - DNA, 325 bp, Homo sapiens
  chr14:32670300-32670625
  hyper
gggaggtataaggacgtacaagaatgcttctccagttcaactctaagtgaacgatgtaattcctcaaatccacctctcagcctgtttttcagcgttcctgtgtttggctgccaggggcgaaagtagcggtcgagggaagacacctgtgaaggggcgtggctactcgcccgggttcctccgtccctgaccccagaggcgcctgcgcagaatggacagaggcgctgctgtacgagaggggtgtggccgccctgtccaaggtcctcagcccccgacccgacgggcgcctatgcacaccggccggagatagtcacgcagatgccagtgg

SEQ ID NO: 124375 - DNA, 106 bp, Homo sapiens
  chr14:32670850-32670956
  hyper
gagacttcggggagacgccaagcgctccaggccggccctgtcctctgcgctccactgctgccgcacggactgccagactcccggcatgctctgcggactgaagtcc

SEQ ID NO: 124376 - DNA, 298 bp, Homo sapiens
  chr14:32670996-32671294
  hyper
cggggtcccttacccagggtgccccgggcgctcatttgcatgtcccacccaacaggtaaacctgacagatcggtcgcggccagatacggcctggcggtcagagcaccaatcttacgagccttgtgatgagttccgttacatgaaattctcctaaaggctccaagatggacaggaaagcgctcgattaggttaccgtaaggaaaacaaatgagaaactcccgtgccttataagacctggggacggacttatttgcgtgctcgcttcggcagcacatatactaaaattggaacgatacag

SEQ ID NO: 124377 - DNA, 203 bp, Homo sapiens
  chr14:32671353-32671556
  hyper
tttgcgcggttcaacgaaggtcgttgggcaagatacggtggtgttcctagaggttgttcaagatctctcggggcctgcattttcctgctcgcgagcttggcccagtagacacctacgatgctgtccgggcctcccaccagtcctgtcgcacagtgggcacacttcctcgacagcctccatcttcgaggcgcctagttacgtta

SEQ ID NO: 124378 - DNA, 30 bp, Homo sapiens
  chr14:32672690-32672720
  hyper
tgcaaatgagcgcccggggcaccctgggta

SEQ ID NO: 124379 - DNA, 12 bp, Homo sapiens
  chr14:33402212-33402224
  hyper
ttgccccagcag

SEQ ID NO: 124380 - DNA, 2396 bp, Homo sapiens; identical to SEQ ID NO: 51077
  chr14:33402367-33404763
  hyper

SEQ ID NO: 124381 - DNA, 1425 bp, Homo sapiens
  chr14:33407750-33409175
  hyper
tgcgtacgagagagcgctctggagcaaagcagctggaaaatgcccagaaatactttcacagcggtcaagctggaaccccccgcgtgtcctcccccttcccgctcctcccggcctagaccccgcgccccccgcagggagggtgtgcgccccacctgccaccgggctgctccgggtggtagaaaggggtgacgggggacgggggcgggggcgggtggcggcgcgggggtgagaacccggaggcggcggggccctgggccgggctgcccgcgggaccgcgcggccgcctccccccgccgccgccgccgcctccccctcctcctcctccgccgccgccgccggtcgcctgtctccgcgccgggcatgcctcgggagccggggcggcccgggccgcgggcgctctgcggcgcatggacggcggcggcgccgggcgagcagcgggaggagaaggcgcaggcggcggcggaagcggcgacccacggctgggagcaccggcggcgcgaggggacggccggccgcccgcgaggctccggccccactacttttccgtagcctccccacctcagcagcacggccgccgccgccgccgccgccgccgccacggccacggccacggccccggccccggccaccgcccgccgggcagcccagagcgccgcgcacggccgcactctcccgccaccccacgcacacgcacacccccgcccgcccacgccccccacccgggaggggggagagaggcaaaaagtaagagaggaaaaaaaatagcaggaagatggcgcccaccaagcccagctttcagcaggatccttccaggcgagaacggtaacacttttctgtttattgaacctgccgccgggccgctgctcccgccgccgccgcctccgccgccgagggcccctctccgcagcccgcccgcctcctgggccgcgagcccgcggggacctcgtctgggcgcagcgctcgcccggggccccgcgcattgtccccgcggcggctgcggcagcgagaggctctggcggcggccgggctctctgagcagtcgcacctcctcggctcggcgaatagagtgactcactgacaaaaaaaaaaaaaaaaagaagaaagaaacagaaaagagaaaaagaaaaagaaacaaacagatgcgaaggcgctgccgtgtgacgggagcagcagcgagggtggggggccggggatccccggggccgccgcaggtcccctagcagctgctctcgaggaagggaatgaggctggggagggggagggaaggcggcgagcagggggaggaggcgaggagcaggaggaggaggccgggggcggggagcgcggagctcgcgccaggcccggaatgtgtcgcggaggggccggctccgtctccgcgcgagcagctaggccgggccgagcccagaggagcgcggccgccgcctc

SEQ ID NO: 124382 - DNA, 30 bp, Homo sapiens; identical to SEQ ID NO: 9589
  chr14:34126415-34126445
  hyper

SEQ ID NO: 124383 - DNA, 436 bp, Homo sapiens; identical to SEQ ID NO: 9590
  chr14:34419301-34419737
  hyper

SEQ ID NO: 124384 - DNA, 700 bp, Homo sapiens; identical to SEQ ID NO: 51081
  chr14:34419820-34420520
  hyper

SEQ ID NO: 124385 - DNA, 651 bp, Homo sapiens; identical to SEQ ID NO: 51082
  chr14:34529231-34529882
  hyper

SEQ ID NO: 124386 - DNA, 199 bp, Homo sapiens
  chr14:34931783-34931982
  hyper
gcccagcgggcgctcggtccgtccagactggcccagagcgcttgcggaagaaatatttctggaacacttgttatgcctcaggcatccttctgagaaggaggattgccagggagaaccggaatgccttcggttccttaccttgtgcagctggcggcctagctgggagacaagcattaatcaagtcgtgatccgtgtaaga

SEQ ID NO: 124387 - DNA, 157 bp, Homo sapiens
  chr14:35008735-35008892
  hyper
gggccagggtggggcgggagcccacctgctcaaagccggctcctcgtcgctaggctcttcaaccgcgtaggggtcgtagtcatccggaagccggttcatggtggcctgcagcggcctacaccgtccacaagcaatttgcagcgtctctgtttacact

SEQ ID NO: 124388 - DNA, 30 bp, Homo sapiens; identical to SEQ ID NO: 51085
  chr14:35098769-35098799
  hyper

SEQ ID NO: 124389 - DNA, 30 bp, Homo sapiens
  chr14:35099456-35099486
  hyper
tggtcgctcgagtccgtgagcgaggaaggt

SEQ ID NO: 124390 - DNA, 30 bp, Homo sapiens; identical to SEQ ID NO: 51086
  chr14:35183913-35183943
  hyper

SEQ ID NO: 124391 - DNA, 30 bp, Homo sapiens
  chr14:35342603-35342633
  hyper
gtttaaacacaagacgctaaaacacacccc

SEQ ID NO: 124392 - DNA, 30 bp, Homo sapiens
  chr14:35343566-35343596
  hyper
gcccgggggccacccgtcactttcaagtcg

SEQ ID NO: 124393 - DNA, 347 bp, Homo sapiens
  chr14:35451778-35452125
  hyper
gcgcaagcagagaccgccccaccctccgcggaacaagcctccggtctgcaaagccctaagccccgcccctctacggaggtctcacgtgcgcctggggatccctgccttcagtcacacctctatctctcatctttccgctcttagctgggagtgctccgcctagtcacttttcttaaggtggctcgtcgaggcctgacttcttccccgaaatcacgtccctagacagcctcctattttaccactaactttactcctgcagttattcagcggtaggaaactgaaaccaaaaaccagtgtaagcaagtaaacatctaaactgtttcaggagccgcgtagaaggaacgcgg

SEQ ID NO: 124394 - DNA, 30 bp, Homo sapiens
  chr14:35515276-35515306
  hyper
gtgactgccccagacgccgctggtgacggg

SEQ ID NO: 124395 - DNA, 30 bp, Homo sapiens
  chr14:35515843-35515873
  hyper
gccgccgaggctgacgtccggggagccgag

SEQ ID NO: 124396 - DNA, 116 bp, Homo sapiens
  chr14:35591557-35591673
  hyper
ttcattgttcattgcggatatctggaagccttccaggtcccctgaatgtagtagacacttcagcagccgtctcctaccccttttgccactaaatgcttcaaaactgccttttttcc

SEQ ID NO: 124397 - DNA, 151 bp, Homo sapiens
  chr14:35591704-35591855
  hyper
cgggtcagtctcgtccgtcggtcggggctggcgcggtgcatcgtgggcactgtagtttccgccgcgtttatggccgcgttaagtctgagtgccgctttgagttgttgaatgaagtgaacttcatttgtcagcgttcggtacgcagtctagg

SEQ ID NO: 124398 - DNA, 104 bp, Homo sapiens
  chr14:35761312-35761416
  hyper
actgataggcaaatcgctattctgggcccccaggaagccttttcgtccttgctatagtcaattcattctccagatgaaagcctgaaagcgccacgacccaagtt

SEQ ID NO: 124399 - DNA, 30 bp, Homo sapiens; identical to SEQ ID NO: 51090
  chr14:35761907-35761937
  hyper

SEQ ID NO: 124400 - DNA, 30 bp, Homo sapiens
  chr14:35872604-35872634
  hyper
accaaacccacaccccgagttcccctcaac

SEQ ID NO: 124401 - DNA, 45 bp, Homo sapiens
  chr14:35872860-35872905
  hyper
ggtcagagagaacccgggccaggcaagcggcgcacctgctgcagg

SEQ ID NO: 124402 - DNA, 30 bp, Homo sapiens
  chr14:35873115-35873145
  hyper
cgcggtgttttccgcgaggttattatgagc

SEQ ID NO: 124403 - DNA, 30 bp, Homo sapiens; identical to SEQ ID NO: 51092
  chr14:35873668-35873698
  hyper

SEQ ID NO: 124404 - DNA, 53 bp, Homo sapiens
  chr14:35874139-35874192
  hyper
agccactagggtcacggacagggaactttttgatgagcgccgagtggctggaa

SEQ ID NO: 124405 - DNA, 1530 bp, Homo sapiens
  chr14:36002426-36003956
  hyper
aatgctgattccgccggcatttctcactcaatctactccatgctaaacaggccggttaggaattaagtcatactctgggtagtacaagtggaaagtgtgaacagagaaaccactttatgcgaggacagtggaaaatgagatcctcctttcctctccctactcctgctcctatcgagaagcacttaagagcgcagacgcccaggacccagccgcgctcgggcgtcccgactcggaggctggcggcgggcaggcacgctctcccgcgctgagagcccttctgcggagatgaactctcgagtgtcgccgccgcgcgcgggcccgatcgataccggcgggcggacgtgctcccgccgccgacagcagccacagggcggtgcagtcagctgtccggccgctcggtcgcacttctcatcagctcaatacccgcagaggacgtgcaccggttccctcccggacacccaccccgtggtctccgccgcaccttctgcccaccgccccttccgctcggccgtccggcgcagagcgggagcttttcagccagacgccctcgcgttgggggcagccgggtcccggcccgagcggagggcgtcgtgaggtggccttttcgcccggctccccagtgggacgctccgcggaggcagccaaggcggggagtgtcgagctccctcacactctggaccttaccttctggcgtcttcgcccgggaggctgcagggggaggcggacccagccggccacaggggcaggttcgcggcgctgtgaggcggggctgggcgtgcgccgccgccgccgccagattcgtctactccagtgaatcggcacgggagaaagccccgcccccggcgcccgctcccactcctgattggccgggccagcccggggaggcccggcgggaccccggcccgcgtctcagctataaagatagccccggcatgacagccgcggcgaagctcttctagttcatctgctggccggctctcagtccccgtggcgccccctttcctcttgtcccagagcgctctcgactccaccatgccaaggggattcctggtgaagcgaactaaacggacaggcggcttgtaccgagttcgccttgcggagcgtgtcttccctctgctggggccccagggggcgccgcccttcttggaggaggctcccagcgcctccttgcccggcgcggagcgggcgacaccccccacccgagaggaaccaggaaaggggttgacggcggaggcggcccgggaacagtcggggtcgccatgtcgggcggctggggtgagcccggggacgggcgggcgggaaggcgcggagtggcgggcgggtggcagggaaggtcccgggcccagccccagccccagccccagtccagcgaagccggcaggcgcagagctgcgtcgggcgttcctggagcgctgcctcagctcgcccgtctccgccgagtctttccccgggggcgccgccgccgtggccgctttctcctgctccgtggcgccagcagccgcaccgaccccgggggagcagtttctgctg

SEQ ID NO: 124406 - DNA, 654 bp, Homo sapiens; identical to SEQ ID NO: 9596
  chr14:36004080-36004734
  hyper

SEQ ID NO: 124407 - DNA, 100 bp, Homo sapiens; identical to SEQ ID NO: 9597
  chr14:36004821-36004921
  hyper

SEQ ID NO: 124408 - DNA, 125 bp, Homo sapiens; identical to SEQ ID NO: 51097
  chr14:36005011-36005136
  hyper

SEQ ID NO: 124409 - DNA, 153 bp, Homo sapiens
  chr14:36278469-36278622
  hyper
caccctgcagaggccgaaacggagacgagtgtggtagtgatggggtttcacgactctgccgtcggtggcgaacggtgtccgtggcaaccgccttctgacgtcaagagttcttgacgtcatgccagcatgagatcacccgtggcactccccgcc

SEQ ID NO: 124410 - DNA, 192 bp, Homo sapiens
  chr14:36295493-36295685
  hyper
gcagggcaagcccccgccctctggctcggtggaaggcctccgccaatggcagagctcccatcgcagagcctgcgggttaggttgtgaggcccgggccgggggcggggaggagccaagggggcgagcaagctcggtggctgggtgggttggggcgttccgcgcgcccttcattgaagcggcggtggccgggct

SEQ ID NO: 124411 - DNA, 27 bp, Homo sapiens
  chr14:36789319-36789346
  hyper
tggaggaaaaaggaccctgaacgctaa

SEQ ID NO: 124412 - DNA, 233 bp, Homo sapiens; identical to SEQ ID NO: 51101
  chr14:36789412-36789645
  hyper

SEQ ID NO: 124413 - DNA, 39 bp, Homo sapiens
  chr14:36972873-36972912
  hyper
cttgtttagatcctgcggttggctcgctcatgaatatta

SEQ ID NO: 124414 - DNA, 73 bp, Homo sapiens; identical to SEQ ID NO: 51102
  chr14:36973148-36973221
  hyper

SEQ ID NO: 124415 - DNA, 361 bp, Homo sapiens; identical to SEQ ID NO: 51103
  chr14:36973454-36973815
  hyper

SEQ ID NO: 124416 - DNA, 507 bp, Homo sapiens
  chr14:36974420-36974927
  hyper
ttcaatccgtggcttcgcattcatttgaatgctagaaaaaataaacacacattaagacttttgaaggctccatttctgaattcaagagagatgaaacaaattcgcccaaaagatagaaatctttgcctcggaaattatcggagaatattaacggagagggaggggagcgcgcgggtcgccgaggaaggacgcgggtacggccccttgctttggggtggcagagccgggctcaggagccagccaagctgacttcgcgaggtggcgcctgggcctttcgggggaaagccccgacggcggagccgcggctgggcggggactcaaatgctggcggcctctgggctggggccgagcagggggtgccgaccgcgggaagtctgggcggccgccctcccacccagacgagccgatgctgggccgcggtccctctcagctacctcgcttgcccgcctcggggcccctggagaggggtctgtgcctcccaggcagggaagcgtcttgatgtgcacc

SEQ ID NO: 124417 - DNA, 261 bp, Homo sapiens; identical to SEQ ID NO: 9601
  chr14:36974967-36975228
  hyper

SEQ ID NO: 124418 - DNA, 177 bp, Homo sapiens
  chr14:36975280-36975457
  hyper
cggggagccgggatccgccttccatcctgggaaacgactcgggttagggaagcgggatgggctccgctcggagttcccaggcagctggggcgccctccaagtgacgcctttgtccaggctgcgctcgcggagaataaagggggcgctgtccaacctcaggttcggggaaaaccaagg

SEQ ID NO: 124419 - DNA, 632 bp, Homo sapiens
  chr14:36977297-36977929
  hyper
gaaacagcagtagttcgctggctttgtttggtttcgtttatttgtacaaagaaagattgtgcgttaagatcttttttaaaaatccctgcaagttagagtttgcatcatcgtcgtgacctagtgaactaatatttgtatattctgggatcgaaattccgaggaagtttctgctcttccgcacaccagacttgccggtgtggtctccaggaggggttgggggccgcgtcctcagggggcgcgcggccgaggctgttcccagcgcgggaacgggagggagaacctgggcaggggcggggcggggcggggcgcggggacctgggtacgcggagacgcggggcgggcgggggccgagagcgaggctgccggctgggtgttgggagagaggccgcgggtggacggggtaaggactgggactggggagactgagagctggggggtgcggggaggatgaggctgcggacaggaaacgaagggcctgggacagctgcttctcttggtcctagaaaccaaactttcgtagcgagagaccctaagacagctcgagatttcaagtgtccacacttctagtttagacatttggcaaccaattcggaacagccgggccgcgaggggcccccaggtctttggcggcg

SEQ ID NO: 124420 - DNA, 674 bp, Homo sapiens
  chr14:36977974-36978648
  hyper
cgcagactccccgccagtcccggccacacccagccagggctttgcagctccagcctgagaatgttagccccggcaaccccttctggcggttgttcctttaaaaaccaattcattttttccatcaagtcttctacccaatgggtagactcttcgttaaatgactgttaaccagtactgaggagaagcacaatcaacatagtttctctgtcacctttcttgccggttttttcctcccaaccatggagtctccattttctaagcaattaaattatatattcaacaggaacattccatttaaaatggttcgggacagaagactgatgcacaaggtctgaagctggaagaaaatatttagtgcttgcctacagattctgtcacccatcatctgctcggaatgcgctccgtatctttcagcgtgtccggctcttatgattgcaaatggccctgttttcaaatggaaataagacttgcaaactgattatgtgtattgaatcagaatcactcgctagatcctcttgtttaaaatgtattgaaaaaaggatgatgggtgcagacctctgtaaccagctctgtctcttctctgggaggtcgatctattttgcaactttttgccatttgagcgtgtttcagccagataattacgttgccattgtgttaccggcccaaagctcaga

SEQ ID NO: 124421 - DNA, 192 bp, Homo sapiens
  chr14:36979679-36979871
  hyper
gggaccataactttgcgaggttcgctttacacataggcatatccagttccttagacattgactgggtctcctgggttgcggcagagcgtgcagtcagctcagaggaactagctctcggtcctcttagtgtcattatggtaattcacaggtttacttctgcgcgcgcgcactcagccccgtgtgtgctgctga

SEQ ID NO: 124422 - DNA, 30 bp, Homo sapiens
  chr14:36981340-36981370
  hyper
ggaaacattagcaaacgaggagaggcgcag

SEQ ID NO: 124423 - DNA, 294 bp, Homo sapiens
  chr14:36981787-36982081
  hyper
acacagctgcacaaggaggaacgcgtcagccagaaggcagggagagccagaggaacatggtgtccagcgtctcctaaccaggatctagccgagcagagaaaacattcagcctcctccctcccaatacccgtgtctgtcactttctttccattcaaaaagaaagtcctagttgaactaaacaagccagtaacccatgcctaagaatcatatcatctcagattctcatctcccaatgggctttctagttctccacaaataaaatcgtctactctgcttcctcgcgctaataattgg

SEQ ID NO: 124424 - DNA, 15 bp, Homo sapiens
  chr14:36982869-36982884
  hyper
cgcagtgtgtaccct

SEQ ID NO: 124425 - DNA, 485 bp, Homo sapiens; identical to SEQ ID NO: 51114
  chr14:36983114-36983599
  hyper

SEQ ID NO: 124426 - DNA, 918 bp, Homo sapiens
  chr14:36983673-36984591
  hyper
cgattgagttcacctttccccgggacaagtaaacagacttcaaactatgccgactgtagacggcgaggagaagaatgtatttgatggaaactccatccaatgcaaagatgataaggccgagggtgccacagcctactaaaattgtgactcccaaaggcttcctcccagctagaatggggtgcggggcagccgccagaaccacagccgggcaccgccagccaggtccccgcccgggcttgggctaggctggggcaggttaagcgaagctccaattccgtgggatccggacctagagccaaacagcagctgcagtatccatgtcccctgcccggccggcctgagctgggtgccttagccacctacactcccggtcccggaaccacagctgaccattccaacgcaagtggtcaaatttgtttgttttccaaaacgtgagacctgttaaaatctcccttccccgccttccaacaagcactctcactagacccaaccatcctcttgggaatcttcgagtccctctggctgttggaaactgtgtctcagcagtgaggcccaggtttctgagggagaaagcccggcctagcccacagtcttaaggcaccacgccagaggaggctccaggaagttaacaaagaggactgctgggcccggagcgaggactccggccagtctgctttcctcacaagctcttggtgggggagcgggagagagggattgggaagagatgcagacgaataacgaaatgagagaggggaagagaggaagaaaaagaaagttgaaaacctgggcgagaagtgagtacatgccaaataagaatcaattgcccataatccaatacttccaggcctagaggaaagtgctgggaggggcgtctgcccgcagctggctcagctgcctttcgaccggagatttggcaag

SEQ ID NO: 124427 - DNA, 139 bp, Homo sapiens
  chr14:36985893-36986032
  hyper
ttcgcggagggcggtcgccgctgagcctaggcggccagagggtgccggggagggggcacttcctttgtgtcagtgacaagtgggttatgttgaagactctttcctctccccagctcccgtcctcccttcaaaaaaaaaa

SEQ ID NO: 124428 - DNA, 123 bp, Homo sapiens; identical to SEQ ID NO: 51118
  chr14:36986348-36986471
  hyper

SEQ ID NO: 124429 - DNA, 1568 bp, Homo sapiens
  chr14:36987301-36988869
  hyper
gcccggcccgccccaaccgacggcgccctcctgacccaggcagcctagcgctggggcccaagaggcccatccgcggggaactgccagcgcctgccccaggccgtaccgtcgagggggctgtactggagcgctcacagccccaaccctggctgccctccctcagtctcagttccctctttcgaaccaaaagacgcagtgggggaaaggccgcttctgctcctttcgtgcccagcccgggtcagagcattaggattagctggccacaggcggcgaactgggctcaggccgggagctggggtcctacggtagaccccagtttggagaggttaggagagggggtgttgacttccaaaagctggagcccccagacgctttgcctcttggcttctctcctgtcaggccccagtgagggcacctgctcggacccttagagtcccctctggaactgcgagtcctcccacctgcccagactccgctggagagagggccgggccgggcgctcgagtgcctcccaacagggcagcctccctcctggcccggtctagcctctccgcgctctgctcgcccctgctccttgagctcggggtcgcttcccttggctccccgaggtcttctgcgccgagcagagctgccagtccaccgcgcctaggagacgccgagtacccgcatctgaccgcaggaccccagcgctaccaagtgcctgttcttggacccccagccgagcagggggaagcatccccagctcccgcacccaagtccctggcgccgctgccgggccgccctccctgatgcccagcgcgcagcctgccggcgccgcgccttctggacggctctcgccgcacctcctgagctcagcccgcggccccgcagtggggcggcctcacttactggcggggaagcgcgggtctgggttggcgccgtaccatccggggccagaggcgctgttcctcatggtgtcctggtacggcggcagctcgctcatgttgcccaggttgccgttgcagtagccccccacggcggagtgcgagagctggggcacccccgccgccgtcatgtggtaggcggcggtgacggcgccgtggtgccccacggcgtgctgctgcatggccgctgttggcggtgccgcctggccctgcctgtacgccgccagcggagccccgaggccgccgccctccatgcccactttcttgtagctttcctccaggggactcaagatgtcagacactgagaacggagtcgtgtgctttggactcatcgacatgattcggcggcggctggaggaggaaggaagaggaggaaaaaaaagggagagggggaaggcgaagcctcgctgctttttttttctccctttgccaaatattctggtgttaccttaacgccgatcttgttggatgtacacgtaacggagtggaccgagtcctccttaattggcttgagtggaggctcgggggctgcctcgcgtttgttttagcccggcgccaggttttaggcagccaccagaggcggggcgtaagcgctaaagcaacaagacaatagaagcctacatcttgcccgagataattagctta

SEQ ID NO: 124430 - DNA, 148 bp, Homo sapiens; identical to SEQ ID NO: 9612
  chr14:36989192-36989340
  hyper

SEQ ID NO: 124431 - DNA, 1156 bp, Homo sapiens; identical to SEQ ID NO: 51122
  chr14:36989403-36990559
  hyper

SEQ ID NO: 124432 - DNA, 160 bp, Homo sapiens
  chr14:36990872-36991032
  hyper
ccgccctcccacctgcgcccgcgtttttgtgcggtccccacggcagagctggggaggccaccctacgtttgcgcagggagacgcgctcgccgctggtgttgcgaaagaccagagcgaagcccggctccttgcccttccttcccaggggcttctctggggg

SEQ ID NO: 124433 - DNA, 128 bp, Homo sapiens
  chr14:36991094-36991222
  hyper
cgacgccgggcttaagcgaaccacagaggagaactggcaacgctgaatacagaccttgtctgcaggcgcgacctggccgggcctgagtcccgaatggggtctaattgcgaaggcggggtgggtttccc

SEQ ID NO: 124434 - DNA, 177 bp, Homo sapiens; identical to SEQ ID NO: 51125
  chr14:36991600-36991777
  hyper

SEQ ID NO: 124435 - DNA, 175 bp, Homo sapiens; identical to SEQ ID NO: 9618
  chr14:36991988-36992163
  hyper

SEQ ID NO: 124436 - DNA, 243 bp, Homo sapiens; identical to SEQ ID NO: 9619
  chr14:36992221-36992464
  hyper

SEQ ID NO: 124437 - DNA, 1387 bp, Homo sapiens
  chr14:36993693-36995080
  hyper
cgcgggagcccggggcgtgcagacaggcggctttcacagacgcagcgggaggaaggatccctctactgctccctttcccgatttgaccgtctagggcctttgagaggactttccttttgggaaagcttttctcaattcgtggcctgtgggcaggctggggggtggggcgccaagtcatccgagcgcggcttctgcttctccctttccctcacaggcatgctctacggagggtatgggaggcgagggcgcgtctatgagggccagagtccgcgaagagagtccggcccttaggcctttggtgttgaagaatctgctcctctgtcgggtcaagccccactagaagttaacacctgtggtctccaaacttgcctattttcctgtcacgcagttcaagccaagattcaactcgtcttgaatttttgtatttagagcccctaccttctccaccgactccaggggcgccctctggcgggaaggggcctggggtaggagggaacctgagggagcgggttacaaagcagagaacagcgggagctcagcagctccctttgaattgcgaggaaaccaagacggagacgggaggtaggagcacgggcctgaagcggtcagccgaccctgtgaggcccgcgctgccgtgctacgccgcgaatccgccagacgcccccgtcggaaggggcagggacaccctcgggggcgctctagggttcgtgctgcgctaaggtaagtttcgcagctgctcctgataattaaaggacagattcccgaagcatccttgtggcggcgcggctgttttcgccccaggacctgtgcagcctcattcagctttaggtagtcgaaacctatagctctttctgccctctgttccccaacaaatctcagtcccaacagtgggagcccgtgggccttgggtgttcgagtttcccgcgggcttgccagcagcgctggggttccctcctccgctcctttcctcctctccaacctcccaccacagcccgtctcccccacatccccaacacttgtcccaggcagtttccggtggccgcagtatcgaccccaggccattggggtgggtgtgagggaagggtggagggggaatctccgaggcccaatgttttctgggacttgagggaggctgaattctccctcgctgcctaggacttggggtctgaaggttgcagaccgaggcgatccgcagcgccctcttccggcggccgtctggagaactgcagctttagagcggtctcggggaagctttgctactagtttccggctagggaaaactggtggtggtcggagactggtagtacatcatccacgcattcgctcattctaactgtccgcccgaccatacgtcaggctgtctatcggtccacccaaagccaatata

SEQ ID NO: 124438 - DNA, 1447 bp, Homo sapiens
  chr14:37050237-37051684
  hyper
tctcctgggccgcggcggttcccacctcgccaccgccgccgccgccgcacggctgcccgtcgcgaacaagcaccggcaccaccacgcgacgcagcaggccgggcgcggcgtgcagctcggcggatgctgccaggtcaggcgactccgccgcccctggagcgcgagcgcgcttcagcttgtagcgatgattctggaaccagatcttgacctgcgtgggcgtgaggcgaagcaggctcgccagctgctcgcgctcgggcgcagacaggtaccgctgctgccggaagcgccgctccaactccagcgtctgcgccttggagaatagcacccgccgcttcttccttttctcggcgtccgagcccggagacgcgggcctagcggacggccgctgcgacgagtctggcgggctggtctccaggctgctctcgtccgaggctagggacagcaaaggagacacgggtgggtgagacgccggaccctacgagggcctgctgcccttctggcgcgggcgtggaggcactggccagagggcacgcccactagcccgagactttcgggatgaggccatttcctgagtccacatctggacatccacctctccgaatgcggtgacctcattcataccacagcggtcatcagcgggcctgagatcgtgccccgaaaaaacccaccccggggccctcttaacatgtccgcaccggtagttgcgctggccgaccagtttatcacaagctgggtcaccagcgccggcctcctccaggtcgactgcactgcagtgtgccgaggtttgcggagccctgagtgggaacggggtgggggtaaactcgccaacactggccatcccagacggaggcctggagatcgtggccgtgttttcaggcatggagagggggcggggggtggggtgggggcggcaggtggcggcgcgttttaaatttcaattattccgacctctagaaatcgtcagacacagaaaccccaaatctcggagcaccagtgccaggcagggatctgctcttaggatgtgccgaccgggatgaatgcgttaggggttcgaggacagggctcccgtttccaagactgaggaaatctagactctgggctgggatttcggctttccggcccctcgtgggctgggcccttgattctgctgccccacgcctcctacctcccaccccgcaccgcaatccaccacgcacttacaagggtagtggccgcgctccgaatccagccaggcggcgcaggggtcgggctggggggcgcgtggttctggctcccgcctcggcaggtgttgcgcgtcctgctcgggtaaatctagaaggctgcgcacggtgaagctcaggcgtccagaggtggccatggccgaggaggggaaggaggcgggggcagggcaggctgggaacggaggggcggccgggacgccgctcctacggatgggcgtgggaggcgc

SEQ ID NO: 124439 - DNA, 204 bp, Homo sapiens; identical to SEQ ID NO: 51132
  chr14:37051713-37051917
  hyper

SEQ ID NO: 124440 - DNA, 260 bp, Homo sapiens
  chr14:37116034-37116294
  hyper
cagagggcttgcccccgggacaacttggagcctgcttctggggagccacacacgtcctctcccacttcttgctggagacttggggacgtgaagggggggttctgtgatcccggaaaaaaagtaacttctcttggtaggtgatactaggcagttgcgtcccggggagtccccgcctttctgcgcttcccctgacgggggcacaggggccggcgtgcgtgtgtgggtacgtagctcatcccggggagctgggatcctctttt

SEQ ID NO: 124441 - DNA, 13 bp, Homo sapiens
  chr14:37116652-37116665
  hyper
cggcctcagaacc

SEQ ID NO: 124442 - DNA, 925 bp, Homo sapiens
  chr14:37116771-37117696
  hyper
cgtggctgctcttggtgcctcatgggagcgcccggggtagggactcggctagtgacctgtaggacatgaggggcgagctgggagccgattcgcccacggcgtctccttcgccatggaggccccccacccattccactccggggttgcggccacgcaccataagagcaccttcaggtctgagctctttaggggtgggagtaggcagttcgtgagtccgggaaggcctgcggggtttcccgcctgctgcggacttagcgtggggccgaccggggctggcgagggctggcgaggactggcggggacccgcggggctgagccagctctcgcgaagccctcaagtgaggaacggcgcttgtggctgcgcgctctccgcagccaagttgcagggtccagcaggggctcaggtcctgttccctccgcagatcccggatctagggctctagtggtctcggccggagggaaggtgacgcgcagtgggcgcagacgcagagtgcggggcgccgaacgtgggaaggagcgggttcagcgcgctggtgagagtttcaggaaatccgggagagggcggtatttaccagtcccttccccgagagcaaccaggcaaatcggggaaggttagaggtgggggacctgcctgagccgggacaaaaaactttggagctagggccttctaaccctggagacttgccgactccggggcgggctctcgcactcaagtcccgagatgggatgattttccaactttcgtccagcctctccttccgctcccgccgctctgctagcactcccgcactctctccctgggtcacaaccctcgcctgcggaatacctgtctgaagggcgcgtcagtagaagcttcgtttcatactacctttcttactgttctcttcatctaaatcgcaggacattattctcggcttcatttcca

SEQ ID NO: 124443 - DNA, 30 bp, Homo sapiens; identical to SEQ ID NO: 51136
  chr14:37118415-37118445
  hyper

SEQ ID NO: 124444 - DNA, 30 bp, Homo sapiens
  chr14:37123336-37123366
  hyper
ctagaaagccacagccgctgtggaggaggt

SEQ ID NO: 124445 - DNA, 596 bp, Homo sapiens; identical to SEQ ID NO: 51137
  chr14:37123597-37124193
  hyper

SEQ ID NO: 124446 - DNA, 98 bp, Homo sapiens; identical to SEQ ID NO: 9627
  chr14:37124481-37124579
  hyper

SEQ ID NO: 124447 - DNA, 659 bp, Homo sapiens; identical to SEQ ID NO: 51139
  chr14:37124992-37125651
  hyper

SEQ ID NO: 124448 - DNA, 46 bp, Homo sapiens; identical to SEQ ID NO: 9629
  chr14:37125763-37125809
  hyper

SEQ ID NO: 124449 - DNA, 667 bp, Homo sapiens
  chr14:37126046-37126713
  hyper
cttgcttttcccacacgcagctgcacctctcctgagcgctgcagctgatggctgtatagtgaccacggactgcgtcctcctcacgaagctgcgcaacttctgctaatgctgcaaccctggcaagacgaaatccccctccctctggctagatcagcccagcctcccctcagggaccttcctgcccctccctacccctccctacccctaggccgctccccccttcctctgttgggatccgatccttgttcgctcttgcaatcccgcagcccggagttttgccccgtgcattaaaacatgttctctttcatttgcagatttaataaacaaacgtaaccatatcacatggagctccacactgtccttctgaaagcaattccgctgttgaaaactgaaaaatgggtgtaatttgctttcagaaagtaatgttagggtcacggcaatttctcgggccgttatttatttttactttaaagtctttaggaaagatttgcttatatgctcggaaaacttccaaatgcgcgaataccagcaatcccgctcgccttcaacgcgtggggtaagggggggtggggaacaattactgagtgacgctaatatggggaaactgaaaagaaatgtcgattgtttttattgtaatagaaggagtgagcaaacagaaaaaccaacc

SEQ ID NO: 124450 - DNA, 815 bp, Homo sapiens; identical to SEQ ID NO: 51142
  chr14:37126964-37127779
  hyper

SEQ ID NO: 124451 - DNA, 196 bp, Homo sapiens; identical to SEQ ID NO: 9633
  chr14:37128139-37128335
  hyper

SEQ ID NO: 124452 - DNA, 8 bp, Homo sapiens
  chr14:37128836-37128844
  hyper
gccccctg

SEQ ID NO: 124453 - DNA, 287 bp, Homo sapiens; identical to SEQ ID NO: 51144
  chr14:37129074-37129361
  hyper

SEQ ID NO: 124454 - DNA, 1990 bp, Homo sapiens; identical to SEQ ID NO: 51145
  chr14:37130071-37132061
  hyper

SEQ ID NO: 124455 - DNA, 263 bp, Homo sapiens; identical to SEQ ID NO: 9637
  chr14:37132290-37132553
  hyper

SEQ ID NO: 124456 - DNA, 739 bp, Homo sapiens
  chr14:37132602-37133341
  hyper
cggccgccaaggtgcccacgccacccggggtgcctgccatccccggttcggtggccatgccgcgcacctggccctcctcgcactccgtcaccgacatcctgggcatccgctccatcaccgaccaaggtaggggctcagaggctgggcgtgtggatgtgcagcgtctgcccccgcactctcgcggaggtcccagtatctgcagcctcagggacactgtctttcccaccacctgaggctttttcctttggaaacgtaaggagtcttcctagggggtgttctgatctcattaacttgaaactcatgcccctggtttccttgccacacacagtcttctgcctcatctcaaactaccagacccataacatccccccatccccaacacatggttcgcattttccaccctcccccgcctctcgcgccgaggcagcctcagcccggcttgctcacttggagagtgcggccggggctggacttggggcgcagcccgggaggcccgagcctgcttggggctgccggctgcagactccgctgtgggcagagcagcttgcttggggatcactacggccgggagaagtctggccgggaggagtccagcacgccttggaaattgaagtattctccgattctggtaatcaggccaaatttgctcaggcaggaagttcaaatgtcacctaattggtttcgttcttatgcttcacttcattttcctcggaaatggaggtcccgaagttactactag

SEQ ID NO: 124457 - DNA, 186 bp, Homo sapiens
  chr14:37133568-37133754
  hyper
gggtccccgggtccccgagaatgcaagtggatatctatctagttcctgcatgttttaagcagtgccaccccactgtttctttcctttctcacccctgaccttgcctagtcctaagcgtcctttctgccttgtcagaaggattccccgagccctcctgcccagtccggcttccgcaggagacctgag

SEQ ID NO: 124458 - DNA, 216 bp, Homo sapiens; identical to SEQ ID NO: 51149
  chr14:37135419-37135635
  hyper

SEQ ID NO: 124459 - DNA, 278 bp, Homo sapiens; identical to SEQ ID NO: 9641
  chr14:37135739-37136017
  hyper

SEQ ID NO: 124460 - DNA, 360 bp, Homo sapiens
  chr14:37136294-37136654
  hyper
gttcggactttctctccggtggctctcggacaaacacgcttggccaatcctgcggagaggggcacccagataaacgtaacaaagctaccattttctcgactaaaggtcacattgtaatctcccaaggaagttagtgagaaaacctcaaattatacggactggctgtggaccgtttaatttttctttccctccgtccctccctcatgtctccaaaggaaaatttaaaacactcgtgtttttattttccccccgagaaaagctaaacaaccaccacaacaaaagccccagatttaagtctaaattcatcaccgtcctggagtcaagagttcaaaactctcaaaaaaccggaccttaaggcaa

SEQ ID NO: 124461 - DNA, 860 bp, Homo sapiens
  chr14:37641119-37641979
  hyper
aaactaagtcagaccgaactggatcattttcaagtaaaataggtagcaaggcaaaaagaccgcctcaaagtcgctgcccttggggctctgccacttgctttacaggctaggaacggacaatgccgggaacccgagagcggccggcgcggacgccgaggcaactttacttggggcacccactactcgcaatcaactcccggcctcctctgctctcgcgcctctaggggctcaagcactgctccgggagcgctgaattttgaggaagagggcagaacttcagtaaggagacctgtctgggcaacggtttcaggacacgcggtggggaaagcgactagcctccggcggggcagggcgggctgtccttacctgcagaaccaccggccacgatctgccgagaagcctcgcgcactaagctgacttcaggcttggcggacatcttcgccaggcgggaggacaagggagtgggctgagatgcgtcaacgagctcgcagcctgcacagcctactgatccagagagccccggctgggctggtcctcaagcgcgttggctccctgtggagcagcaatccggcgactgctggaaagcgagggttcgaggcgcagattcgtcgcgcgatctccggcgcgtcggaacctgttcgcagcgctctcgcagaggcgccctcggctccgaaaatgtctctggaaagaagacccgcggatgggtttgggttggctcaccgcagcggctcaggctttgtctcctagattggcgcccacgcccttctctatcaggagcctccggtagtttgtcaaactagacggttgcctctgataactcaagtgaagtgacccaggcctggagcgccaagtacaaagcg

SEQ ID NO: 124462 - DNA, 318 bp, Homo sapiens
  chr14:37666791-37667109
  hyper
ggtcttgggaaaactcgacgaggccaagtatgaggccacaagacaccgtttttagttccgcgttctccctcttctaatcctattaggttttgtccagacaacgttttgctctttcagaagagaaagagcgttctgcgctcgtcgtcttggattcgacaaccataagcatcccgttagggcaaccaccgcagcagactaagttcgactactttctctccaaactcctcccgggccttcttcccaagctctctctttctcctggaggccccgcctcgcggcccggcagcgcggcacgcgcatgcccggtgctcgccgctt

SEQ ID NO: 124463 - DNA, 856 bp, Homo sapiens
  chr14:38052532-38053388
  hyper
cacacacacgaggtcaagacccgcagtgtcttagtgggttttcacctccacctccgtacaatcaagagggcagagaaggcgggggctggaggtggctgaaagggcagggatggcggtgaaacccgggaggaggcgacattcgtgtcaggtggcggtcccaggcagtgtccacaggcccggaagccgaggggaccaggcatcaagccccgcgtccagatccctgcacccgggggcgggacctggtgtcccgcggtccccgcccaggttcctggggcgcttttccgcaatggctggcgtggaagcgagagggggcccagtttttccttgccaggttgcgggtacagccagctccgcgccggggttgggcggcgcggccgggatgctgagagccctgcgtgctcagccaggggcgcagggcggcccttctgcccagcgcgccccgggcaccagggatggcttcccagctggaggccgggagggaggagagtaaatacccattctgcgggggcagccctcgggggatggttgcgaagggagaaacgaaaaataaatcagacaagagagccgtcccgcccctcctcgcccggtcctggcgggcggcgccactggtcctgcagcctcgggcgtgcccgcgcccccccgagcccagggggcgtcgcagcgggccgggcgggccaggactgcgcctgtgtgcgggtccccaggagcactgctcgcctgccagccccgcccggccgggcccctccggcgggatagagccctgctttgctcttttcgttggccaagcacaattgtgttattggagataatgaattcaatccccatcaaagggcattaggctcgcccggggcctgga

SEQ ID NO: 124464 - DNA, 392 bp, Homo sapiens; identical to SEQ ID NO: 9646
  chr14:38056998-38057390
  hyper

SEQ ID NO: 124465 - DNA, 505 bp, Homo sapiens
  chr14:38057503-38058008
  hyper
gggctcaacaggagatttattcgctaggaagggaaaatgcccaaacaatgaagaactatctgcacttgtcacctcgagacgcttgctgtcctgctctgtccgccttccctggcaaccagctgtcctggccgccaacccgcgcgcgtcctaacgcgcgggtggcaggtcgcatcacccagaggtggcggagtgtgcggtctgagaactgcgagaagcccacaaagcaggggctgggcctgcaggctccccgcggtccagctcccgaggcaggtctccaaagtgcccccgtcccccgcataactagaaaatgtctccggcaagtaacagagcgagagctaaggccaacttaagcttggtggggtgaaggcaaggcgctgatgtttctaatacgttgaaaaggagaaagggaacatcacagagaggacagcacagaagttaaacatcttagattcagtgggggcgggattccgaggcccaagcccacgcctttatattacatttggaa

SEQ ID NO: 124466 - DNA, 101 bp, Homo sapiens; identical to SEQ ID NO: 51158
  chr14:38058219-38058320
  hyper

SEQ ID NO: 124467 - DNA, 231 bp, Homo sapiens; identical to SEQ ID NO: 51159
  chr14:38058545-38058776
  hyper

SEQ ID NO: 124468 - DNA, 374 bp, Homo sapiens; identical to SEQ ID NO: 9650
  chr14:38060542-38060916
  hyper

SEQ ID NO: 124469 - DNA, 12 bp, Homo sapiens
  chr14:38061159-38061171
  hyper
cgccgccggccc

SEQ ID NO: 124470 - DNA, 989 bp, Homo sapiens; identical to SEQ ID NO: 9652
  chr14:38061332-38062321
  hyper

SEQ ID NO: 124471 - DNA, 758 bp, Homo sapiens
  chr14:38063548-38064306
  hyper
actagcgccacccagcggttttagagaaggagcacacttctccccaaatagggcttttgaagaacaagttttacaaaatttagaaatcgtttcattattgagacacccaacttggcggcagagcgctttaatcagaagacgtctgcgaattaaacggtgggacgaagaggtcgccttgtgggtatgctccggctttctcagagttgcttccaactcgcaccggcgctcgcccgcccgctgcaccccgggcccggctcctgctcccgctcgctgctgggaagaggcaagcgcttcctagagccgctgttttcaaagcccggagtttcctaaaactccctctccggctgcgagagtcgggacagagcagggcagcaggtcccgcttccaggcccggccaaggcccggccggggccacaccggcgggcgggcagcggtggcaccgagaaggcgcccccggcccgcctgcctgccttgcctggcgcccaccgctccccggcctcccccggcacgggctccagcggcgccccaccggccgcccgcctcgccttgcctctcacctcctgcgtgtctgcgtagtagctgttccagtcgctggtttcatgcccttccatcttcacagttcctaacatcctggagccaccctgcccaatacaaccatccagccctgtgcgaagcgacgggcggccgcgcggcgcggggcgggggaggggagctgagcagctgcagtcacccgagcgcccgcgcgggcccaacgccac

SEQ ID NO: 124472 - DNA, 1323 bp, Homo sapiens; identical to SEQ ID NO: 51164
  chr14:38064382-38065705
  hyper

SEQ ID NO: 124473 - DNA, 239 bp, Homo sapiens; identical to SEQ ID NO: 51165
  chr14:38072482-38072721
  hyper

SEQ ID NO: 124474 - DNA, 1866 bp, Homo sapiens
  chr14:38677133-38678999
  hyper
agctgacatcctagctcttcccggaaaaactcgaatgtcgccctgccgttcctggggttggtgacaggtctggtcatcgcacggcggcagctcctcacctggatttagaagagctggcgtccccgcccgcccaagcctttaaactctcgtctgccagaacccgccaactctccagggtacaaagtacagcagggacgcgggtggagcccttccaagcggcgcagccttatctttcccgagtgaacacctaggtggattcccaacaccgcgcctggcacgtttctggagggagtctcaagctcctccagagctcccagctgcgcgtcctcgtttctgcagtcgatattcctgtgggagacacggggggctctgagcgctacgagctttattaagagatttgcgaatggttcactcaggtccctgaacactcccaatagcctaagctgcctgctgtgttatagcgcagaagcccctaacgcacggtggttgtcctttcttctcataacgctcgcagcttagggccagtttccgcgattctaagagtaattgcgtgggcacctgtgctggggccaggcgcaaagaagggagttggtctgcgcgaagatcgtcaacctgctaacagaccgcacatgcactttgcaccgaccatctacgtctcagtctggaggttgcgcactttgggtaaggagggcccggaacttccctggcgggtctgagctgcaaggcaagcgagggtgggaagagggaatttagggttctggactgcgggacgggagagaagctggggtctccagagaaaagggcagcaatggagggaaactgagatgaactccagacatccatgttcatggatccgtttgagtctttgctttgggtaggagaggagtggaatgagacagaatctatacctttggttcccacccgccctccagtaaggccgaggaactctcttggttcctctgagagcaagaggcagatggtgctgcgagggaaccccggaaggagccactaaagttgagcagagtgcaggactgggaaggaaaaaaatggggggcgggggggacaagccacctatgtgctctcctccctttctccaccccacccccttttttcgtagctgctgacgcgctggtggtgcctattaatcatttaccagtccagagccgcgccagttaatggctgtgccgtgcggtgctcccacatcctggcctctcctctccacggtcgcctgtgcccgggcaccccggagctgcaaactgcagagcccaggcaaccgctgggctgtgcgccccgccggcgccggtaggagccgcgctccccgcagcggttgcgctctacccggaggcgctgggcggctgtgggctgcaggcaagcggtcgggtggggagggagggcgcaggcggcgggtgcgcgaggagaaagccccagccctggcagccccactggcccccctcagctgggatgttccccaatggcaccgcctcctctccttcctcctctcctagccccagcccgggcagctgcggcgaaggcggcggcagcaggggccccggggccggcgctgcggacggcatggaggagccagggcgaaatgcgtcccagaacgggaccttgagcgagggccagggcagcgccatcctgatctctttcatctactccgtggtgtgcctggtggggctgtgtgggaactctatggtcatctacgtgatcctgcgctatgccaagatgaagacggccaccaacatctacatcctaaatctggccattgctgatgagctgctcatgctcagcgtgcccttcctagtcacctccacgttgttgcgccactggcccttcggtgcgctgctctgccgcctcgtgctcagc

SEQ ID NO: 124475 - DNA, 30 bp, Homo sapiens
  chr14:38679230-38679260
  hyper
ccagagcccgctcaacgctggctggtgggc

SEQ ID NO: 124476 - DNA, 30 bp, Homo sapiens
  chr14:38679706-38679736
  hyper
gaacctggagtccggcggcgtcttccgtaa

SEQ ID NO: 124477 - DNA, 253 bp, Homo sapiens
  chr14:38724272-38724525
  hyper
atgttctctgcggcacggggctggttgcagtggccggcgggcgcctggtgggcaccccggtccccccaagggtcggctgtccttccccactggtcacacaagagcggccgtccttccccagctcgaagcccgtagcacattcgcaggcaaagcctcccaagtcgtctaggcagttagggagctctgcgcatttgccagcacggaggtacctcccggggcagggacacaacacatcgcccgagagtttgtccca

SEQ ID NO: 124478 - DNA, 381 bp, Homo sapiens; identical to SEQ ID NO: 9661
  chr14:38724978-38725359
  hyper

SEQ ID NO: 124479 - DNA, 274 bp, Homo sapiens
  chr14:38725454-38725728
  hyper
cggagcgctgccaggcccggtgcagccctgagttattctggggtcaggaacacagctggcgccgggtacaggggacgcagtcgactagaaggtcaaacaccctgcttagagcaagaggagaaattcgccactgggatgaagtgtgtggtttttctccgttcagggagtttcatcaggaccgcagaacccataacacgtaagcgaacataggcaggaaggacttgagaaaggaactggcttatgattataagaccacgcccgtctattgtgtttc

SEQ ID NO: 124480 - DNA, 30 bp, Homo sapiens
  chr14:39572527-39572557
  hyper
gcttgcttaataaccggaggatttgagaaa

SEQ ID NO: 124481 - DNA, 84 bp, Homo sapiens; identical to SEQ ID NO: 9662
  chr14:39583444-39583528
  hyper

SEQ ID NO: 124482 - DNA, 30 bp, Homo sapiens; identical to SEQ ID NO: 51170
  chr14:39583755-39583785
  hyper

SEQ ID NO: 124483 - DNA, 30 bp, Homo sapiens
  chr14:39639016-39639046
  hyper
tacgaaagagaaaacgatgaaagatgacgg

SEQ ID NO: 124484 - DNA, 30 bp, Homo sapiens
  chr14:39644143-39644173
  hyper
cctagaaaactccgcgctccccttgccaga

SEQ ID NO: 124485 - DNA, 30 bp, Homo sapiens
  chr14:39644415-39644445
  hyper
gcgcctcggcggcgcggcatagcccggctc

SEQ ID NO: 124486 - DNA, 244 bp, Homo sapiens
  chr14:39735534-39735778
  hyper
tggcactttattcgacggtcctaaaaatagagtcctaaatttagaaggcaaggtgctacttttagctcctcttctcggaggaaaacagcacgcaccgcgccaggccaaggtccacggggatttgatttagcatttgggtaactggccgctaatggaactgaagacagctgggcctaacaagtgcccaggtgactcaggtaagcgaggaaaccagatcgaggttctcttgcgtgggacaggttaa

SEQ ID NO: 124487 - DNA, 30 bp, Homo sapiens; identical to SEQ ID NO: 51172
  chr14:39736706-39736736
  hyper

SEQ ID NO: 124488 - DNA, 30 bp, Homo sapiens
  chr14:39901935-39901965
  hyper
gcgaaaggtcgtcacgcttctttgtaaaac

SEQ ID NO: 124489 - DNA, 304 bp, Homo sapiens
  chr14:42074282-42074586
  hyper
ttctccctatgccttcggagtctgtggcttcagtttgctgcaggttctctccgtggacttctcagaaacctcaactttccacttcgagggacagaaagctacaaggaaaacgctgatggttttggtggagattctcctggacttcagtggtgtcctctggtacatctgtccgcggtgtccctttggtttatttctgtggtcttcctgcgcagtccctcagcggctcggagtttggccttccagctctccaactcagatcctgagcctcctaagctcccgcggagaccctgaagtcccggatctg

SEQ ID NO: 124490 - DNA, 233 bp, Homo sapiens
  chr14:42074668-42074901
  hyper
cgtggcttgagtggattcctaagccaaggattggatccggagtaccaggggcagagagggggagcagaggaaagaaaggagatgtgaggagtttccacctaaagcacttcactcctcgtgttcttccccgacagagatagctgtgtggttcttccttacgcgtgggtgcaggtgtgcgcgcttggggtgagcccatggttgtgctcgagtatacgggcgcctgtgcacctcca

SEQ ID NO: 124491 - DNA, 647 bp, Homo sapiens; identical to SEQ ID NO: 51175
  chr14:42075396-42076043
  hyper

SEQ ID NO: 124492 - DNA, 1262 bp, Homo sapiens
  chr14:42076105-42077367
  hyper
cgcagggctcagttccacgcggccaggaggccgccgttgcccacacgcgacgctttgggaagcccagctcccgggtccgccccggccgcggccgcagccccggacctcggctgcttgcctcgcgcctgaactgcggactcgccccagcgcggtggccagcgggcggggcgctgtgttccgcggcgcgcagggaggcggtgagcgtgtgcagagctgcccgaacggaggactatgtatgtgtgtgcgcgtgtttgcgtgtgtttgagcgtgtttttccttcttcccttgaggatgtgaattgtttagcagctggctgctcccttaggatccttgactttggggagctctggctgtgaacacagcccacccatataatccattttgcacggtccgttatatcagaaaaaaaaagcgcaactggacgggggtggggcagaccaacgaaacctagacagacacacacacactcagaggagagaggaagaattgaaagacttgagaagactttgataacctccctgctggcccttctgtgttccggaaagatcctggatgttggctaccttttcaagtcatcttggcatgtctctagtgttttgtaagccgctttccagctagctgcgtgtgtgtgtgcgcgcgcgtgtgtacgcgcgcgcctatctgatgcatttgactgtcttttatccaactgcccagaagcaaatgtgttaactcggcgatgccccttcatgcccgggttcttgcagagctctgaggacgcccagacccattttcctggctggatttggagcggctgctgggctgtggacccaggtgtgtggatcgctttacccagaagcttggaaagcgccaatattaacctgcttccaggtacatcacaaggtcaagagagtgtcttgcagccctcttgtttccgtgtatctacaccttcttctcttggccagaaggatatttacgttttggttcacagcatttgaagccaaaagttcagcccttcgaactggtttgctatacaaaacaaaacaaaacaaataaggtaatgaggattgcttattaaactgcttaacaaaatccccgactcttcctcagccctttctcggctccctcctccccaccaaaatgtcaccagctcttgaattacgtggattcgggttggaggagaacttgaaggaaacgtgattaaagggctatgcgagaacgctctctttgctgcccgcggtccggtgggcttcgaagccaatcgtgagaaggaccggttccct

SEQ ID NO: 124493 - DNA, 319 bp, Homo sapiens; identical to SEQ ID NO: 51178
  chr14:42077488-42077807
  hyper

SEQ ID NO: 124494 - DNA, 30 bp, Homo sapiens
  chr14:42078499-42078529
  hyper
cacgcaactcctttgcgcgtttttttgttg

SEQ ID NO: 124495 - DNA, 10 bp, Homo sapiens
  chr14:42078754-42078764
  hyper
tcttatctca

SEQ ID NO: 124496 - DNA, 645 bp, Homo sapiens
  chr14:42078799-42079444
  hyper
cgaagacattagaattaacaagataaagcacttccaaagtagtctcatcaatgttttattccatagtgaagacggtctgaataatttaactaaggagtgttcgtttgtctcccgcctttgggagctgcttgctggctacattcagcggaggatttggcccagccaagctcagggtgccctgcttcaggaggcagtgactggggctgctggggggcggggggttctctttgctaacgccgtttaggaagtgtaggggcgctgcctgattttcccccactcgctgcatttctatagatatccatatgatggcatttgcagacttctagctggccgatagctgctctgcttgtccctgcgcactgacgtccccaactcctcttcgagtctgggctcggctgctgctgcagccctcgcaggctggtggtgctacaaggccatgtatgcagcgggctttgggggctgggctctgccactgcagctggcaggacggctttgacactttctccgggcagggcggaagagctcagcggaccccctggcagacagcaagcgcatcgtggccgaggcggccgcctggatgcgagaggagggagatgcccagagccacagaggagcgtggagggcggtggtgtcctgtctttgcct

SEQ ID NO: 124497 - DNA, 54 bp, Homo sapiens
  chr14:45366373-45366427
  hyper
gctgtatacacagccgacacacgcacattaggctggggcgtcttcgcgcctgcg

SEQ ID NO: 124498 - DNA, 216 bp, Homo sapiens; identical to SEQ ID NO: 9671
  chr14:45431366-45431582
  hyper

SEQ ID NO: 124499 - DNA, 31 bp, Homo sapiens; identical to SEQ ID NO: 9672
  chr14:45432097-45432128
  hyper

SEQ ID NO: 124500 - DNA, 86 bp, Homo sapiens
  chr14:45553393-45553479
  hyper
atcttcggctaggtcgtcacaggctccggctcatggcatcaagtggcatccatcataaggtctgctggggcgggctccttgaaatt

SEQ ID NO: 124501 - DNA, 90 bp, Homo sapiens
  chr14:45603789-45603879
  hyper
ctgtctttgagtgacgtcaaggctgtgctatgagggcttctttgttgagtccgggttgaaaaacctaccgcggtcgtctctgcagtcgac

SEQ ID NO: 124502 - DNA, 35 bp, Homo sapiens; identical to SEQ ID NO: 51184
  chr14:45722602-45722637
  hyper

SEQ ID NO: 124503 - DNA, 30 bp, Homo sapiens; identical to SEQ ID NO: 51185
  chr14:48143181-48143211
  hyper

SEQ ID NO: 124504 - DNA, 124 bp, Homo sapiens; identical to SEQ ID NO: 51186
  chr14:48143412-48143536
  hyper

SEQ ID NO: 124505 - DNA, 101 bp, Homo sapiens; identical to SEQ ID NO: 51187
  chr14:48143617-48143718
  hyper

SEQ ID NO: 124506 - DNA, 160 bp, Homo sapiens; identical to SEQ ID NO: 51188
  chr14:48143797-48143957
  hyper

SEQ ID NO: 124507 - DNA, 405 bp, Homo sapiens
  chr14:48144358-48144763
  hyper
cgaaggtccccggaggggcgtcaagcggcgacagcggcccgcccgcccgcagtccgaagcccccagccctgctgtcttgccttcccccattccatcagttgccattgcaacgccaatcctgttacacgatacagactcgcatcgccgaacggggagaggaggaagaggaggaggaggaagaggaggaggaggaagaggaggagtggggctaggggaacgggggtggggaagagggaagggaggagggggaagaaggaggaggaaagggtccaacagggagcggagtgtgcgtctggagctcgcttgggcacaccagcccagccgccaccgccaccgctctccaaaatagcctttagcgcccggccagcgtagaggtgctctggccggccgcaccaattcccggag

SEQ ID NO: 124508 - DNA, 125 bp, Homo sapiens; identical to SEQ ID NO: 51191
  chr14:48145236-48145361
  hyper

SEQ ID NO: 124509 - DNA, 133 bp, Homo sapiens
  chr14:48145469-48145602
  hyper
cgaggccggcggcatctggcctccaacctcccccgccaaagcgctccctcgcctctcggggagctccgcggtggcgaatgcccgttatgtatttctgatgccgccgtctgcgtttgcacgctgaagggccagc

SEQ ID NO: 124510 - DNA, 30 bp, Homo sapiens; identical to SEQ ID NO: 9677
  chr14:50022777-50022807
  hyper

SEQ ID NO: 124511 - DNA, 145 bp, Homo sapiens
  chr14:50053095-50053240
  hyper
aagaagctggcccacgcatgcgctcttcaaatttttgagacagtttacccagaatgcagtgctcaaaggaaacgcgtgcgcagtgtggtcaggttgtttcgctgggtgagtaaaatgaaatcttagaggcgttgtgggctggccc

SEQ ID NO: 124512 - DNA, 30 bp, Homo sapiens; identical to SEQ ID NO: 51195
  chr14:50065190-50065220
  hyper

SEQ ID NO: 124513 - DNA, 30 bp, Homo sapiens; identical to SEQ ID NO: 51196
  chr14:50066076-50066106
  hyper

SEQ ID NO: 124514 - DNA, 30 bp, Homo sapiens; identical to SEQ ID NO: 51197
  chr14:50088245-50088275
  hyper

SEQ ID NO: 124515 - DNA, 30 bp, Homo sapiens
  chr14:50101074-50101104
  hyper
ggtccacgtggtggcgctgcaccacgctgt

SEQ ID NO: 124516 - DNA, 30 bp, Homo sapiens; identical to SEQ ID NO: 51198
  chr14:50101947-50101977
  hyper

SEQ ID NO: 124517 - DNA, 28 bp, Homo sapiens
  chr14:50154755-50154783
  hyper
ggcgcgcggggagccgccgcggtgcgtc

SEQ ID NO: 124518 - DNA, 30 bp, Homo sapiens; identical to SEQ ID NO: 51200
  chr14:50160153-50160183
  hyper

SEQ ID NO: 124519 - DNA, 243 bp, Homo sapiens
  chr14:50234377-50234620
  hyper
cgggctgggccccacgtgagagctaagcgactgccctcgcgcccgcagaacagcagggcctgcatcgactctaaggcgagaccagaaacttgctagtggagcaattctggtgcccctgcccgggctgtgaaccctctgagatcatccctcaatcaaacgaatagaaatcctcgggaagaaaaaaaaaattgcggcaatccggctaaaattcagcagctttcagggaccgattcaggacattat

SEQ ID NO: 124520 - DNA, 30 bp, Homo sapiens
  chr14:50235522-50235552
  hyper
accccaacccgtctcgaacctccagggctg

SEQ ID NO: 124521 - DNA, 30 bp, Homo sapiens
  chr14:50235765-50235795
  hyper
acttacagggaggccgaggtgtaggaaaac

SEQ ID NO: 124522 - DNA, 31 bp, Homo sapiens; identical to SEQ ID NO: 9678
  chr14:50238427-50238458
  hyper

SEQ ID NO: 124523 - DNA, 316 bp, Homo sapiens
  chr14:50319665-50319981
  hyper
ccaaaattcaaattcgaataaagattcaaactgttctcttgaaactgcattccttcctggaacccttacggaccagtctggttaccgtgccccattgtgtcttgggctcaagtcagccttcatagtgacccctgctggtcgaaacaattttcgagatgattatcaggagtatttccccacaggggggccgtagggctcagtgtagaagagcaaggacccctttctgcgcgcttactttgacataagattttgaaatgtaacgaaacggaactgcttcggtccttctaagattatcctcaacgatcgaggcgaactc

SEQ ID NO: 124524 - DNA, 30 bp, Homo sapiens
  chr14:50328858-50328888
  hyper
tctctgtgatccggcggccatttttttccg

SEQ ID NO: 124525 - DNA, 116 bp, Homo sapiens
  chr14:50329598-50329714
  hyper
ctgcagggcagttacgtcattggggagcgggggggccacgccgggcgacgtgagcttggacacacccacactgggcggtctggaggctacgttagtgtggcgtcatccgagctggg

SEQ ID NO: 124526 - DNA, 257 bp, Homo sapiens
  chr14:50359201-50359458
  hyper
tggcagattccacacgagacactggcctcccacgtgtctttcaggaaacatacaaaattcaagggataaaggaagccaagaaggggttgcgaaaaagggaaaaaaaaaaaaaacaaaagcgaacagagcttccctgggacgttcagggagcgcggagggtgcgggaaggctggggcgggcggagggaattcgcagagcatctggcgggcaccgaggtctgggaacaggcctggaggcagctcggttcgtggagagag

SEQ ID NO: 124527 - DNA, 30 bp, Homo sapiens
  chr14:50359963-50359993
  hyper
ttctctgcaggcagcgcaccgagttcccgc

SEQ ID NO: 124528 - DNA, 616 bp, Homo sapiens
  chr14:50469902-50470518
  hyper
aaagtcaagggattccgtgtccctgcttgtgtcaacatagaaaacgcccatggcaacgggcaagtgcggcctgaaatggcagagtgtgtgtttcacaaaacaggggtggctcacggctgcagccgcccggggaggtcctggccttgccttcgaggggctggtcctcggggggtggatgcagctttgcggggctggctccacgtcgcgccgcggcggtttgggctggggagcagccctgcagggaggcgccgccgggtgggccgcggagatagctgcagggcggggcccccgggggcgcggggacgcccagcggccggatatcagctgccacgcccgcgtgggcggagaaaagagcaatttgactttggacggagagctgagatgcggggaggaaatccaccaccggcctctggcgactcctgtcctgcgcgcaggggaggcagcgcagcccgtgaacacccccgagcccggtgcgggccgagcagttctccgcacctccggtaaaggtgcaggaccgggtgatggtctctgcagcagtcagaaggctcctctcccagcccaggaacgtctgcaataaattgcttccatgtgcgggcttcccgcttcctctttctct

SEQ ID NO: 124529 - DNA, 119 bp, Homo sapiens; identical to SEQ ID NO: 9679
  chr14:50511810-50511929
  hyper

SEQ ID NO: 124530 - DNA, 13 bp, Homo sapiens
  chr14:50582894-50582907
  hyper
gccctataaaata

SEQ ID NO: 124531 - DNA, 30 bp, Homo sapiens; identical to SEQ ID NO: 51207
  chr14:50583203-50583233
  hyper

SEQ ID NO: 124532 - DNA, 30 bp, Homo sapiens
  chr14:50697268-50697298
  hyper
ttcaagtcctaaatcgcaatttggtcgtga

SEQ ID NO: 124533 - DNA, 30 bp, Homo sapiens
  chr14:50697786-50697816
  hyper
ccattgccagccaacgagaaacggctcggc

SEQ ID NO: 124534 - DNA, 240 bp, Homo sapiens
  chr14:50698772-50699012
  hyper
gagtccgcttttcccgagactgtgctgggggccgctccagactcttcagtttgactgctttttacccatatgctccctcctctcgacctgcttaagacaatccggactcggtgccactcttgtagcgctggagccccaggactaccgtcgtgggaggctgcatagggacgtggagagaaaggggcattcgggctggacaggatatttaacgtatttgtgctctacgtggcttgttttcat

SEQ ID NO: 124535 - DNA, 30 bp, Homo sapiens; identical to SEQ ID NO: 51209
  chr14:50778577-50778607
  hyper

SEQ ID NO: 124536 - DNA, 206 bp, Homo sapiens
  chr14:50778817-50779023
  hyper
cccgcgggcccgtccgcaggcaccaaccaaataacgcagcgctggcaccatcccctacgcacgctcccctccctcagcgctcagaagaagccacttgaccctccacggccgaggacccgcgctctttagccccgcccctcacgcgggggccaatgaagtggcgcgccttcgccccatgtgggagaggctgcggtggccaataggcg

SEQ ID NO: 124537 - DNA, 30 bp, Homo sapiens
  chr14:50779528-50779558
  hyper
gaagactgacagcccgcagtcttctggact

SEQ ID NO: 124538 - DNA, 30 bp, Homo sapiens
  chr14:50863292-50863322
  hyper
gctaagggcttccccggttctaatttcggg

SEQ ID NO: 124539 - DNA, 30 bp, Homo sapiens; identical to SEQ ID NO: 9681
  chr14:50863768-50863798
  hyper

SEQ ID NO: 124540 - DNA, 30 bp, Homo sapiens
  chr14:50998904-50998934
  hyper
ggcgtcgcaggctacgacccccagcggccc

SEQ ID NO: 124541 - DNA, 277 bp, Homo sapiens
  chr14:50999521-50999798
  hyper
agaaataaggcacacgcctgggcattcgtgggccaacgggccttggctaaaccgtccccacatttgtcaggtaggcctgtagggtgacgggtagaggaagaagggcgatgggaacgtagccctccaagttaaacacggaaaaggtacgttaagggcaccgggccagaagtaacctggcagcggggcgccggggaaggaggtgggggagtgccaggttaactaagtcccggcacaccctactgcaccttcctgttttgcaaaccgatcccggtggtac

SEQ ID NO: 124542 - DNA, 1183 bp, Homo sapiens; identical to SEQ ID NO: 51212
  chr14:51026823-51028006
  hyper

SEQ ID NO: 124543 - DNA, 30 bp, Homo sapiens; identical to SEQ ID NO: 51213
  chr14:51134982-51135012
  hyper

SEQ ID NO: 124544 - DNA, 30 bp, Homo sapiens
  chr14:51297319-51297349
  hyper
ccttcaaaaggacgcgaatggggacccgcg

SEQ ID NO: 124545 - DNA, 30 bp, Homo sapiens; identical to SEQ ID NO: 51214
  chr14:51298355-51298385
  hyper

SEQ ID NO: 124546 - DNA, 1 bp, Homo sapiens
  chr14:51338730-51338731
  hyper
g

SEQ ID NO: 124547 - DNA, 13 bp, Homo sapiens
  chr14:51339047-51339060
  hyper
cggggatggggca

SEQ ID NO: 124548 - DNA, 1235 bp, Homo sapiens
  chr14:51410198-51411433
  hyper
gggagtgtgtgtcttcggggaggacgagtccagggcattgcctggccctgggccgcctttgcgaaagactcacggaattccaggagctacacccactcaggagaatgggtgggcggcgctctacgcttggagcgggaccctgcccctcctctgcaccacacttagccactcccagaggcctgagacttacgaccttttcccagctcggcgtttgtctcccctcccaaaataccaagctccagcaaggcaagatttttgtcccttttgtttagggctgagtgtccagggcagagaatagtgtccggcatacaggacaagaggcccccgtcacctcttgattaaatgctgagagtcaaagttccaaaaaagtttgtgaagtggacaggcgagaggggcctgggcttttgcccacctggcggtttccaggggcggacggcacagtggtttgggcgggacactggcgggtggcacctcggagacatgagttcggcgtctgttgggaggcctaatctgtcccccaggctgcccgcccacagcctagacacgtctcctctggacttcggggcaaggaccgggtgcaagggaccactctgaggggttctccacctcgtcccgcccggccgcggccggagactccgactccgggctggaccccggcccgccgtcccgcccccggttaccttggggcacttgtcgtagtagtgctgctgcgtgcggatccagcgccccaccaggtggtcgcgcaccgtgtgcgccagcgcgaagtagtagtcgcgggtggtggccacgttgcggtccttgaccagcgtgaagtgcaggtgccggttgaaactcttcttcagctctgccacgttctccacgcccacgatgccgcggatgctgatctgccgccgcttctcctggtccgtcaggggcttcgccatggctggggcggcgggctgcgcggcgggctgcgcagagagctggaagtgcggccggaggcgctgggctgccgggcaggggtggagtccgccccgccgcgccagcagctttcaacgcgcacgaaagtttggggcccgccccctcgggcggtgccgtccccgctgcactcccaccgcgtcccggcccctgccccaggccggagggcagaggaagtgcccggcccctcccgaggctctggggccgcagtgggctcgggggtgggagacgaggtccaagcgccggcgagacccctgccagcccgggacctgggctcg

SEQ ID NO: 124549 - DNA, 30 bp, Homo sapiens
  chr14:51411632-51411662
  hyper
ctggaaggacggcacgtttgacttctgttg

SEQ ID NO: 124550 - DNA, 409 bp, Homo sapiens; identical to SEQ ID NO: 9685
  chr14:51560304-51560713
  hyper

SEQ ID NO: 124551 - DNA, 1891 bp, Homo sapiens; identical to SEQ ID NO: 51217
  chr14:51560770-51562661
  hyper

SEQ ID NO: 124552 - DNA, 30 bp, Homo sapiens
  chr14:51706662-51706692
  hyper
cgctaaccatttggcgccaaaatcctggga

SEQ ID NO: 124553 - DNA, 1742 bp, Homo sapiens
  chr14:52117842-52119584
  hyper
cccccaaagccactatcgggaggggacaaaaataatttctgaggggccatgggcactaaaaccacagcagacagaggctgtgtctacctgaggaactggagaggtagaattagagggggaggctgggcatcctcggcggcgccccctccatccagcgtgaaacccacgaggcgcggcgtctcgagtggcgggcgggcagggggctgcaggattcacgaagccacctccgccggggaccgccttctctcggagtggcctcccctccggcgttccgctttagtaagacgacactcaggccaaacagccgcccccggccagcccgactcggctctggagggagcgccccgagggagtccagccggaggcggagaaggccactcggccagaaggtggggagccgccggcgtcccctcgcacctccgtctccacagcagggggaaaggccctgatcgccgtggtccacaccaccgcgtccacctgaggctcgcctcgcttcctgggtccctagaggggtggcgtactccgctttctcctgcccccaagtggccgcacccctccgcgggacgcttggttgggtccagggcggggcgggcgggcgctccccgtactgccgcgagctcagcgcgcagctcccgcggctcggctgccgccgcggccagttggggcgggtcgggggcggggtctcagggggcggggattcgggggggcgggtcgggtcgggaggcgtgggtggggggcggggcggacgcggagcgcccctctggctggcggggccaaggggctgagaggagtggggcaggctcggcgccggtaggaagagtcagaggggtgaccagagagcccaacgcctggtgctcaagactttctccgaggtatgaacaagaaccaggcgtctgggccctttccgctcgccccatcgctcagccgccgcgccccggacgcccgctgtgccccctgccggcggggcggcggcgggactgggtttcgggagggtttctggaagtcgcgagtcccagcgaaggcagtgcaccgctctccgcctctttcttcgccttcttctcgctcccttagctctgggtgtcgggcaccggtggtaaggtcgcttctccgtgagtcggaggtcgctcactctgggacgggcggacgaggccctagggcagccgagcccggcagcgggggaggcgtggagctcggggcggcttcagcggcgggggcgggaggctggtcctggctgcagactgcgcgcctgggctccgtgcgcggtccctggttctctgcatcgcggaggtccccggatcacagggctccctggcgggccccggcacccaggtctgtgtcgctgtggctgggcgccgggactagcacccgagtcccgcgctcccgggggctgcgccgtgccgcctgttgtgcgcgcgcagaggccggacagcccggctgcgggaagggacccgagcgcagggtctgccccgcgtcccggaaagtgcctagtctgcggagccggaggttgagctggggcagatcggcgccagacgggggcctgggtgagatacgagttgggggtgcggcctgcagaatttgggtttctggaggagcttacggcgcgctggcggagccccaggcgaacaggagcaccggattcggctccgggagggccaggcactgtcaggtatggacagctgcggtccacccgtgtaagtgtaaagtctacagagattaaaacaacacctcgagtcctgggacag

SEQ ID NO: 124554 - DNA, 403 bp, Homo sapiens; identical to SEQ ID NO: 51219
  chr14:52313654-52314057
  hyper

SEQ ID NO: 124555 - DNA, 302 bp, Homo sapiens
  chr14:52327325-52327627
  hyper
gactagtccctgggctgcagccgctgctacacatactcacaacgctgccgccgcgctccgtgggcaactcctactactgctgggctgggctgggctgggctgggctgcgccggagctcgcctgcacagatcagctccggagaggggaaaaccacgctcctcggaccaagcctcgggagctaaggtaaatgaaacgttttccatgttgctcgtttttaattgagaaaaacgaccgtcgcttgtggttttaaggtccgatttctaagggatgatagagacatcgcttcaggactaggggaaatg

SEQ ID NO: 124556 - DNA, 180 bp, Homo sapiens; identical to SEQ ID NO: 9690
  chr14:52455648-52455828
  hyper

SEQ ID NO: 124557 - DNA, 30 bp, Homo sapiens
  chr14:52456059-52456089
  hyper
ggaaagtggcttcccggtggttttctgcct

SEQ ID NO: 124558 - DNA, 446 bp, Homo sapiens
  chr14:52534580-52535026
  hyper
ccgagggcagcgccccgcgcttgacctcctcgtaagcgcctacctgctcccaggtggccaggaaggcgtgggtgggggtaaagcgcgcagagcgcgggaagccagcgcgcacatagcgggcggccaggcccagcactgcgggggaggtgtcctctcggtacaggactcggcctctgccgtggctcgtgtcgatgtccgccagaaaaggggcgatggccgggaagtcggtggggaaatcatagtccacatactgcgtttccctggggaagtcctgagtggagatgatgccgttggtgcccacctgggagaggagagggacaaaaaggtgacagtcgctcaagcccaaggacgctaccctttcgcgcagggagggaagggaactgacttaggcaaaaagcctctctctccttccccactggccagggagtctggattcagggaaacaa

SEQ ID NO: 124559 - DNA, 208 bp, Homo sapiens; identical to SEQ ID NO: 9692
  chr14:52535055-52535263
  hyper

SEQ ID NO: 124560 - DNA, 770 bp, Homo sapiens; identical to SEQ ID NO: 9693
  chr14:52535334-52536104
  hyper

SEQ ID NO: 124561 - DNA, 308 bp, Homo sapiens
  chr14:52536342-52536650
  hyper
cgcttcgctccacccagagacgccctgaggagaagcgagcctttgtacgaaggcagagggctgactcctaagttctgtccccctcccgaaggccggccgctagggaagacttggccaccctctggaagtaccttcccccgggaaaaccgcagcaggaaagaccatgaaatactactgtgtgtgatccgctccgtttggggagtaggatgaggcatcccgcttggttaccaggcagaaaggggcgagtcgcggggatgggaagaccctgatctcttgcccattgctgcggccgtcggagatgccctccc

SEQ ID NO: 124562 - DNA, 731 bp, Homo sapiens
  chr14:52734270-52735001
  hyper
cactggcctgctccgcgctcttcaatgccagcgccaggcgctcaccctgcagagcgtcccgcctctcaaagaggggtgtgacccgcgagtttagataggaggttcctgccgtggggaacaccccgccgccctcggagctttttctgtggcgcagcttctccgcccgagccgcgcgcggagctgccgggggctccttagcacccgggcgccggggccctcgcccttccgcagccttcactccagccctctgctcccgcacgccatgaagtcgccgttctaccgctgccagaacaccacctctgtggaaaaaggcaactcggcggtgatgggcggggtgctcttcagcaccggcctcctgggcaacctgctggccctggggctgctggcgcgctcggggctggggtggtgctcgcggcgtccactgcgcccgctgccctcggtcttctacatgctggtgtgtggcctgacggtcaccgacttgctgggcaagtgcctcctaagcccggtggtgctggctgcctacgctcagaaccggagtctgcgggtgcttgcgcccgcattggacaactcgttgtgccaagccttcgccttcttcatgtccttctttgggctctcctcgacactgcaactcctggccatggcactggagtgctggctctccctagggcaccctttcttctaccgacggcacatcaccctgcgcctgggcgcactggtggccccggtggtga

SEQ ID NO: 124563 - DNA, 379 bp, Homo sapiens; identical to SEQ ID NO: 9696
  chr14:52735044-52735423
  hyper

SEQ ID NO: 124564 - DNA, 267 bp, Homo sapiens
  chr14:52735451-52735718
  hyper
cggatcgggatggacgcggcgccaggcgagctgcgccctgggccaggaaggtttgctgctgagttccccaaattggattccttccacagccccgagatataactcagtttgcggagcgaaatgagggaaagttagagaaaggaagggaaaggctgagcccggcggtgtctccctagcccagcaaaaccctctccatgtggcagaactccctcctctctgcttccttctggggagatctcgaggtcatttttgcgccttaggaggagc

SEQ ID NO: 124565 - DNA, 148 bp, Homo sapiens
  chr14:52780683-52780831
  hyper
ttaacgcttcccagccgaggtcagactgccgtgcgcttcgagtaccggaccccgaggaagcgagaaacgccgctcccgccggtcgcgggcagcttcagtacaccggcaacacgcgcgcctctgcccagtgccgcgcccagcgggtgct

SEQ ID NO: 124566 - DNA, 1109 bp, Homo sapiens
  chr14:52781102-52782211
  hyper
cccagggcaagccgccgtcggcgcgctgggtgcgggaagggggctctggatttcggtccctcccctttttcctctgagtctcggaacgctccggctctcagaccctcttcctcccaggtaaaggccgggagaggagggcgcatctcttttccaggcaccccaccatgggcaatgcctccaatgactcccagtctgaggactgcgagacgcgacagtggcttcccccaggcgaaagcccagccatcagctccgtcatgttctcggccggggtgctggggaacctcatagcactggcgctgctggcgcgccgctggcggggggacgtggggtgcagcgccggccgcaggagctccctctccttgttccacgtgctggtgaccgagctggtgttcaccgacctgctcgggacctgcctcatcagcccagtggtactggcttcgtacgcgcggaaccagaccctggtggcactggcgcccgagagccgcgcgtgcacctacttcgctttcgccatgaccttcttcagcctggccacgatgctcatgctcttcgccatggccctggagcgctacctctcgatcgggcacccctacttctaccagcgccgcgtctcgcgctccgggggcctggccgtgctgcctgtcatctatgcagtctccctgctcttctgctcgctgccgctgctggactatgggcagtacgtccagtactgccccgggacctggtgcttcatccggcacgggcggaccgcttacctgcagctgtacgccaccctgctgctgcttctcattgtctcggtgctcgcctgcaacttcagtgtcattctcaacctcatccgcatgcaccgccgaagccggagaagccgctgcggaccttccctgggcagtggccggggcggccccggggcccgcaggagaggggaaagggtgtccatggcggaggagacggaccacctcattctcctggctatcatgaccatcaccttcgccgtctgctccttgcctttcacggtaagtcactccctacgtttccacagcccggctctgctcagccttctcatgctctcccctgacgcctccaccctttccaccgccctacaaactttttgcaac

SEQ ID NO: 124567 - DNA, 30 bp, Homo sapiens
  chr14:53018810-53018840
  hyper
cccacaaagggctccggtgtttcccgccgt

SEQ ID NO: 124568 - DNA, 30 bp, Homo sapiens
  chr14:53019132-53019162
  hyper
cgtgccagactagccgggtagcctggaacc

SEQ ID NO: 124569 - DNA, 30 bp, Homo sapiens
  chr14:53019548-53019578
  hyper
cccacagtgcggagcgagcgcctcaaatgc

SEQ ID NO: 124570 - DNA, 30 bp, Homo sapiens
  chr14:53020153-53020183
  hyper
accaccctcttctccgccgccttctcgctc

SEQ ID NO: 124571 - DNA, 30 bp, Homo sapiens
  chr14:53020770-53020800
  hyper
tgctattgttgctgcgtttcttttattaga

SEQ ID NO: 124572 - DNA, 41 bp, Homo sapiens; identical to SEQ ID NO: 9699
  chr14:53161603-53161644
  hyper

SEQ ID NO: 124573 - DNA, 83 bp, Homo sapiens
  chr14:53162608-53162691
  hyper
gcgagagcgaaagccggaggggcctgtgttttcctgcggggttggggggcggggggtgcccgccccgcgccgccccgcccagc

SEQ ID NO: 124574 - DNA, 203 bp, Homo sapiens
  chr14:53173876-53174079
  hyper
ttcccccgcccggacggccatggccattcccggcatcccctatgagagacggcttctcatcatggcggaccctagagataaggcgcttcaggactaccgcaagaagttgcttgaacacaaggagatcgacggccgtcttaaggagtgtgagtgcacctttctttccatttaatcaagtgcctcgactcgcttctgcctctgac

SEQ ID NO: 124575 - DNA, 30 bp, Homo sapiens
  chr14:53196515-53196545
  hyper
tatagctttcctttcggatgccactggtgg

SEQ ID NO: 124576 - DNA, 170 bp, Homo sapiens
  chr14:53196917-53197087
  hyper
cggcctgaggggtacggagactctgggggagggagacggcagcggcatggcggccgggtgtaagacgcccgaccctcctcttccctgtcttcgccgccgccgctgctggagtcactgggaccctgtagtctgcgtgtgttagttgtaatcccgccgccctcctgtcagcc

SEQ ID NO: 124577 - DNA, 30 bp, Homo sapiens
  chr14:53197434-53197464
  hyper
ccgcggaggggcagcgtctggtgtacttac

SEQ ID NO: 124578 - DNA, 545 bp, Homo sapiens; identical to SEQ ID NO: 51234
  chr14:53257753-53258298
  hyper

SEQ ID NO: 124579 - DNA, 1473 bp, Homo sapiens
  chr14:53416858-53418331
  hyper
acacatcccccgtcccgcgtaactacgcaattaaggttataattgggaggctcgaatcattacatatgaaaattcagagaatagcaaaacaaaataagacgcaaaggggaacaggtctatctgcttaaatactgaaagattttacatctccaaaaagcatttgcgagatgccaagatttctcaaatgggcccctcccccgtcgtgagcctctttcctccccctaccaattctgggaagtcattagttggacgcggctgggatgctactcaccgagtttctccaccagcttaagcatcacgcctccaatgtgcacctcgccggtcactctcagggtgacatcgcggttcaggtccgtcacatggacactcagttcccacgtcccgtccgcgtagcagccatctggcatccttatcccgtccagagccatggctccttcctgcgagcgcggaggaaatggctctcgtaagcgtcactcccccaaagaaaggcgaatcccaccgaattcgcagcgccggccacgggctgggaggtggtggaggacccggggctttcggcagaaactcgggagggcggcggcggccggggctgcgggaggaccctacgccccgctcgccccgcagcgttcctcggtcccggcgccgcccgccccacaccgtccccgcctagcggaccgcggagggcttcacctgccggccggccccgagacacagcgcgggctgactccccgttcccctccccgccgcgccccctcgggtcccggcggggtcccgctccctcaccgcgcgctcctagcgctccgggcccgggactcgcgcggcaacaggcgaggggctggaggctcgcggggcggcggtgtccgcgtccggttcctcggctggcgaagcgctgcctgtggccggagcggctaatggagtcccgtcgtcgcggcccctcgcctggctccccgcgctccaccctctccccgccccctctgtccgagcctggctgggctgggcgcgctggctccctccttcgccgcccgcagagctgccctgagcgggtccggccggcctcgcctctgcccccgccctcccggcgccgcgctcgggggagggggctgcgggtcccgggcggggcggggcggcgtggggcggggcggcgcgggggtggcggggggcgcggcggggcggcaatctcggccccgcggagcgctgcccttttatggaaatgaaggacccggctcaggaattgaatccaacatccgggctctaggcggcgggccctgaggagggggagcgggggagcgcgggcggcctttcccggggcgctggtggccggcggggcgtctagagctcaggctggactggggcccccgcggcgtgtgtccgcgctggcagcagggagagggggcttgtccgtgagaaacggccccaggaaattcccagggcaaggtcgttttcggagaacaaagtcctctcgccccctccccacgc

SEQ ID NO: 124580 - DNA, 30 bp, Homo sapiens
  chr14:53619018-53619048
  hyper
cacctcgtagaggccgccccgcacgcacac

SEQ ID NO: 124581 - DNA, 41 bp, Homo sapiens
  chr14:53619296-53619337
  hyper
ccttgtagaaccagcgtacctcctccgggcccagctccgtc

SEQ ID NO: 124582 - DNA, 72 bp, Homo sapiens
  chr14:53619543-53619615
  hyper
gaagtcatagttctcgtcactgaggcaggggtccagcgcgaggtggtggttgtggtcgtcggtgcccggcgc

SEQ ID NO: 124583 - DNA, 30 bp, Homo sapiens; identical to SEQ ID NO: 51237
  chr14:54410903-54410933
  hyper

SEQ ID NO: 124584 - DNA, 1649 bp, Homo sapiens; identical to SEQ ID NO: 51238
  chr14:54420071-54421720
  hyper

SEQ ID NO: 124585 - DNA, 16 bp, Homo sapiens
  chr14:54421784-54421800
  hyper
gcccggcaagagccgc

SEQ ID NO: 124586 - DNA, 1179 bp, Homo sapiens
  chr14:54421831-54423010
  hyper
cgctggggcgggctgcgaaagggttgggaagagcaaagggtttttttgttttgttttgagacgcagaagccctttaaaaagcccggcgaggagaggtccagaagtagagaaagcagacggaggcaagctgtgcccgcggggcaaagggacagtagaaggggcgggcgcccgggttccccggaaaaccctcggccccaaggaatctcctggggcgggagagcgcggttctaaaaccgagaggataggaaggggaagggggagttgtgtttcaatttcggattcaccaggattcatctctagtcacatttttcttctcaaatttttaaatcgaaaagataaaagccaaaagaactttcatccccagagctttttattgggggaaaggaatgtaactcggggtggttgtccttcacttccctactcgaatcttctcctaatgccgaaatgtgtttacaggtagcctcagtttaccaagtatgtatcttttgggggtttaacctctcacaaagccttcaactcacaaaccgcgatccttggaaaccatcctccaaagcagtgcttggaggcctctaaggcccccggaccaactcccgctggaagaagcctgcagggactcgggaatcacgggaacctttcccgtcggttccgggcctggagggccaggaagagccgcgcgtccgcctttcgtcccgccaggaactccccataggacacgacaccgcaggaacaagcgtcctgggagcccctgggatcttggctgtcgtctctagggaccctacaccgtgaaatgatagaggcgaggttccttgggttccgcaagtcgacgaaaatagctcgtggagaaggcgcgtcctgcaactgcagttcgcaagctctcagggcgccccgccagctgggggccagattgggtgacactcccctcgacgcagcctccggagcggcgcgcactctccagaggccagcaggactgcgctctctaccgcagaacctgctccagctaggtgttctctccccatctcgccgtcgctctgccccctcactctctctggacctcagagccggttctctccttcctcctcccgcgctttccgtccggggatcgcaacctccagcccgtgggcaacgcgttcagcccaagaccccacagtttttcccaacgacccccctaccaagggcttc

SEQ ID NO: 124587 - DNA, 256 bp, Homo sapiens; identical to SEQ ID NO: 51242
  chr14:54423264-54423520
  hyper

SEQ ID NO: 124588 - DNA, 517 bp, Homo sapiens
  chr14:54430166-54430683
  hyper
actaacgtaaagaaacgtccgcgtgctccgctgataccccagggccaccggaggagagcagtggggtgtgagaactaggctgtgtccagtggctggtggtggggggagcggctactgcgccttccccttgggcactcctctcgggtccctgaggcgacgccctagtaagcctccacgcacgtcagcgaagggtgggtggagggtcaccctgaccgcgccccacagctggctcccgcgctctgcccaccgccacgccaccttcaccgcgcgatctcggcactcccgcctttctcttgccctcgttatttttagttcggctgctgcacctccctgcctgcaacagctcgccccactctcagactcgttttgcaggatttgtgcccctggtggctaacctgatccacacttgaataaacagcgagcgcccgggcaacctgggcgagccacccgcgcggaatttgcatccatccgcacgagaggttcctgagacgctaagcgttctcgcctaccagaactt

SEQ ID NO: 124589 - DNA, 30 bp, Homo sapiens; identical to SEQ ID NO: 51244
  chr14:54686292-54686322
  hyper

SEQ ID NO: 124590 - DNA, 411 bp, Homo sapiens; identical to SEQ ID NO: 51245
  chr14:54686918-54687329
  hyper

SEQ ID NO: 124591 - DNA, 30 bp, Homo sapiens
  chr14:54863524-54863554
  hyper
cgtcccacagggcccgcctcccgcgcgtct

SEQ ID NO: 124592 - DNA, 291 bp, Homo sapiens
  chr14:54908013-54908304
  hyper
atgtagcagaaggccgcgaacgtgaacgccatggctggggaggaggagcggggagcggcgccgttgccagcggagaaaggcggcgcagggccctctgggtaaaaccattcacttcccccggccacagccgcgaccgccaccgctaccgccgcggcgccagccctctcagcgcgcctgcgcaccagcccagccgccccggcgccctctgatggccggagtctgcgttgcactgacattgtccgcacagttgttgattgatttttccttccttcttgcgtttattctttcaac

SEQ ID NO: 124593 - DNA, 30 bp, Homo sapiens
  chr14:54955459-54955489
  hyper
aggcgtggtggcggcggcagaggccaagta

SEQ ID NO: 124594 - DNA, 30 bp, Homo sapiens
  chr14:54955777-54955807
  hyper
cacgtgatggcggacggcaaaaggcgcggc

SEQ ID NO: 124595 - DNA, 433 bp, Homo sapiens
  chr14:54976300-54976733
  hyper
ttagaatttgccggcggaacagcaatgaccactgggccacagcgcttaagacgcccgctgggtaccaatcctgggagtcgggggcggtgcgagtcgggccccccccatcccaggtctgcgtagccaatagctcgggacgggagcgggaggggcgtggcgtgtccggcagggggcgccgtgattggcacgccagctcccgctgtccgcgaggctgccctaaagtctagctcatgagaaccccaggcaagtgcggacctacaaagtttgtccgctccggggcactgtagtggcttttaccctggccgggcgggcggggctcagccgggctgggctgggctccgcggctggagccgggctctacccagagcaagaccctgatggctgcggtgtttctggtaacgctttatgaatactcgccgcttttctacatcgc

SEQ ID NO: 124596 - DNA, 30 bp, Homo sapiens; identical to SEQ ID NO: 9707
  chr14:54976979-54977009
  hyper

SEQ ID NO: 124597 - DNA, 30 bp, Homo sapiens; identical to SEQ ID NO: 51249
  chr14:55031718-55031748
  hyper

SEQ ID NO: 124598 - DNA, 30 bp, Homo sapiens; identical to SEQ ID NO: 51250
  chr14:55032290-55032320
  hyper

SEQ ID NO: 124599 - DNA, 108 bp, Homo sapiens; identical to SEQ ID NO: 51251
  chr14:55032357-55032465
  hyper

SEQ ID NO: 124600 - DNA, 30 bp, Homo sapiens; identical to SEQ ID NO: 9708
  chr14:55032797-55032827
  hyper

SEQ ID NO: 124601 - DNA, 30 bp, Homo sapiens
  chr14:55033713-55033743
  hyper
gatggagctgcagccgctcggctgcttctc

SEQ ID NO: 124602 - DNA, 30 bp, Homo sapiens; identical to SEQ ID NO: 51253
  chr14:55034580-55034610
  hyper

SEQ ID NO: 124603 - DNA, 577 bp, Homo sapiens
  chr14:55367880-55368457
  hyper
tctatttggtggaatcgctctacactccttcagagaaataactggggcagggagattgcctttccagcgcactgtttttctttcaaaaaacagtgaacggtagaatgcttcttagggcaaataaataaatgtcaccaagacacacggaaggtgtagactggaaaataatgtctttggtcccagctgtagaagccagaagctttatttttttaaacacagaccaatactgcttctctggccaacaggcagcaaagtccccattttccactctccatcaccccatcttgcatcctacccacactgattgcatccccaccctctgggtgaaaagccgacacgcctcagacgctaacagcaccgggtcaacccggctttattttagggtgggagggtgcggggatgagactgagtcctggaacccacggagccctccgaatcccggagtagctttactgctttttgcggggttgggggtggggggaggaaacagatttcagcagcaaactcacccaatcaacctcacacctcaaactccggggaagcccgtgcccaaaattgtgccgaattttgtaaatgt

SEQ ID NO: 124604 - DNA, 30 bp, Homo sapiens
  chr14:55369073-55369103
  hyper
tgcatggccgaggccgccctccagggcgtc

SEQ ID NO: 124605 - DNA, 30 bp, Homo sapiens; identical to SEQ ID NO: 51255
  chr14:55369846-55369876
  hyper

SEQ ID NO: 124606 - DNA, 30 bp, Homo sapiens; identical to SEQ ID NO: 9709
  chr14:55493320-55493350
  hyper

SEQ ID NO: 124607 - DNA, 197 bp, Homo sapiens
  chr14:55493976-55494173
  hyper
ggaaccggcggaggcgatgaccgtgacggctgggttgggaccggaacgccgaagcggggttgggggtggcagaaaagcatctgctttgtaagacctacacgaggtgcaggagtggttgggcctcccctctccacttaagcaagcgcccagactgatggcgatggtgatggcagcagttactcgcacaaccccagtta

SEQ ID NO: 124608 - DNA, 87 bp, Homo sapiens
  chr14:55518071-55518158
  hyper
cgctgagcaaaaggaatccagaatcagccctcaagcaactcaagacaagttagcaatttccgccgggaagccgtgaacatcggcagc

SEQ ID NO: 124609 - DNA, 30 bp, Homo sapiens
  chr14:55518646-55518676
  hyper
gctcgggccgtggtcgcctgcctggcacca

SEQ ID NO: 124610 - DNA, 802 bp, Homo sapiens; identical to SEQ ID NO: 9710
  chr14:55595809-55596611
  hyper

SEQ ID NO: 124611 - DNA, 30 bp, Homo sapiens
  chr14:55657952-55657982
  hyper
ggtcaattacgccccggtggtgaaacgctg

SEQ ID NO: 124612 - DNA, 30 bp, Homo sapiens; identical to SEQ ID NO: 51259
  chr14:55658383-55658413
  hyper

SEQ ID NO: 124613 - DNA, 30 bp, Homo sapiens; identical to SEQ ID NO: 51260
  chr14:55738873-55738903
  hyper

SEQ ID NO: 124614 - DNA, 30 bp, Homo sapiens
  chr14:55878288-55878318
  hyper
agaaacaatagggccgtggcggccgccgta

SEQ ID NO: 124615 - DNA, 30 bp, Homo sapiens
  chr14:55878743-55878773
  hyper
ttagaggggctagtcggccaaacaaaatgt

SEQ ID NO: 124616 - DNA, 231 bp, Homo sapiens
  chr14:56047748-56047979
  hyper
atcccttcctgtccccgaggggtgtgtcctagcgattcggcctgaccccttcagtttccaaaagtgagatttttggccttggggacctcgccggaaaactacgcgggaagtctagagaagtcgtctggctctcagccatacgtctggtgtgggatgtgcagccccgcatgctggcggtgaaggcgctgggtgcactagatgtgggcagccccggacgcgggcagcggcgtc

SEQ ID NO: 124617 - DNA, 30 bp, Homo sapiens; identical to SEQ ID NO: 51261
  chr14:56584859-56584889
  hyper

SEQ ID NO: 124618 - DNA, 30 bp, Homo sapiens
  chr14:56585236-56585266
  hyper
ccgcgcccccttcgccgccgtgcccttccc

SEQ ID NO: 124619 - DNA, 568 bp, Homo sapiens
  chr14:56585471-56586039
  hyper
ctggtcccgggcagcggcgcgggcggggagcgcccgcatcctggagcggggctggcggggtggctcggtgctctttggggaccgccggggcgctcggggcggcaggagaggctctcagggcccggacggcggcgcgggggcgggatgcgccccatcggcgcgcgctcggggtgctgcggcggacgccgggctgcgctgtccgcgcggaggacgcggcggaggaagtggccagaactcgggcgacccagcgggggcagcgccgggcaccgggtccgcggccgtatcgtgggggcgggggcaggggctccacttcccgcgcgccgcgtccgggccggggagggcgggcagggactccatgtgaggcgccgcggtcgcgggcgcttcgcggggtcgcttcccgaagctgagaggccggccggcgcggagccccgtcttcccacctccctcgcggaccgtggtacccgcgcccccgaactccgagcgcggcgccgtgagcttgggccgccgcgggctgtgggatccccggctgcgctttgcaaattgttccgatgaccgccgcgggccgccg

SEQ ID NO: 124620 - DNA, 196 bp, Homo sapiens
  chr14:57046228-57046424
  hyper
cccttcctcgctcgcggttttcgacgctgctttggtctctgtcagacccaaccaagtcagtataaaaggggggaatagccatggagaaggtaggcctgtggccgggcttgctttttaaagggaatgctctcctggtgattaggaaccttaaatcacattataagtaggtgaacgccaatgcgtggtgcactgcggg

SEQ ID NO: 124621 - DNA, 108 bp, Homo sapiens; identical to SEQ ID NO: 51263
  chr14:57260986-57261094
  hyper

SEQ ID NO: 124622 - DNA, 233 bp, Homo sapiens; identical to SEQ ID NO: 9712
  chr14:57261174-57261407
  hyper

SEQ ID NO: 124623 - DNA, 414 bp, Homo sapiens; identical to SEQ ID NO: 9713
  chr14:57261465-57261879
  hyper

SEQ ID NO: 124624 - DNA, 178 bp, Homo sapiens; identical to SEQ ID NO: 9714
  chr14:57261965-57262143
  hyper

SEQ ID NO: 124625 - DNA, 866 bp, Homo sapiens; identical to SEQ ID NO: 51267
  chr14:57263779-57264645
  hyper

SEQ ID NO: 124626 - DNA, 42 bp, Homo sapiens; identical to SEQ ID NO: 9716
  chr14:57264764-57264806
  hyper

SEQ ID NO: 124627 - DNA, 208 bp, Homo sapiens; identical to SEQ ID NO: 9717
  chr14:57265147-57265355
  hyper

SEQ ID NO: 124628 - DNA, 85 bp, Homo sapiens; identical to SEQ ID NO: 51270
  chr14:57265469-57265554
  hyper

SEQ ID NO: 124629 - DNA, 158 bp, Homo sapiens
  chr14:57265912-57266070
  hyper
cgtcatttcagtaccaagtatcaccattattgggcttattaacttcattaaaaccggtcttgactaggagtggagatcggaactctctggatgtctttaagccagtgttcgctccccgcctccttccctccctccgttgccttcggtcagaggaattc

SEQ ID NO: 124630 - DNA, 78 bp, Homo sapiens; identical to SEQ ID NO: 9720
  chr14:57270893-57270971
  hyper

SEQ ID NO: 124631 - DNA, 49 bp, Homo sapiens; identical to SEQ ID NO: 9721
  chr14:57271153-57271202
  hyper

SEQ ID NO: 124632 - DNA, 30 bp, Homo sapiens
  chr14:57271654-57271684
  hyper
aacaactgcgaagcccgagagtgctaagga

SEQ ID NO: 124633 - DNA, 76 bp, Homo sapiens
  chr14:57272037-57272113
  hyper
tggggaagaggggtgcgggagtgcagcagggctcacttacccgggtagcccacggaggggtgcagcaagtccatac

SEQ ID NO: 124634 - DNA, 49 bp, Homo sapiens
  chr14:57272210-57272259
  hyper
cgggggtacccagctggaagatcttgatgcgcccggggtggacaggttc

SEQ ID NO: 124635 - DNA, 111 bp, Homo sapiens; identical to SEQ ID NO: 51276
  chr14:57272910-57273021
  hyper

SEQ ID NO: 124636 - DNA, 515 bp, Homo sapiens
  chr14:57274534-57275049
  hyper
cttttgaaaaatccacgcctcactatgactgctcacgaggtggcctctggagaactcatacctagaagctgaccgcggtcgcgcggcgagttccggcagccggtcggcgaccgcacctccgggcgcgagtgcctgggtcccgcgttcctgcccggcagccccgcagccccgcagccccgcagccccgcagccccgcaggcctggcgcccgaggtcccgctccactgcccgcgccccccgcgcagccttatatctaacggtcaattcgtgcaatctgtcgcttctccctcccccacgccttgttttttttttcttccaagaagcccatctaccagttgctgtgtcctcgctcaacaataattacctcgtccgagaattaattataataaatgttttcttgataaactaacgagataatccgaggggcacacgtcccttaattacaggccgccatgctcctctctgcttctcgtccgggctgattaattttctgcatgatggaaaggaaacaaaact

SEQ ID NO: 124637 - DNA, 87 bp, Homo sapiens; identical to SEQ ID NO: 9726
  chr14:57275210-57275297
  hyper

SEQ ID NO: 124638 - DNA, 102 bp, Homo sapiens
  chr14:57275583-57275685
  hyper
tccaaaaatatgtcccgaaatcgggcatcgatttcaagagtcacttgaacgcaacaacgcgaagacttcttgggagtttgcagagcgacccgtcgcccgcgc

SEQ ID NO: 124639 - DNA, 734 bp, Homo sapiens
  chr14:57276073-57276807
  hyper
gggggttgggaggctgcgtaattacaacccagggtggtttggattttggggggtggtggatatttaaaaacaaaaaggagatctggaagcttttgggagaaacagacaaccgagctgtgctaggctgagggagaggaggccaaagagagcgagcagtgagcgccggggcggacgagaagccagcgctcccagcctcctcggttatccgctccggtttccgctcacgttcaacaggggccgacaggggctcgagcggcggcccccggcccaggccgacccgcaagcgaaccgagcttccggcgcgcgggcccaaggaggcgcctggctttttattattgttgtttcaatccatccatctagttacatctgcatctttttgtctcggactctaaaaaggtccctgggatccatccaaacgaccccaaccaaatctgggggccaaaacgcaaagatcgcgggagaagcccagaacggcgttgacataaaaacaaaaccacaaacaaaaccttccaaaacaccccagattacattcgcagcgtttcgacgacgttttgcagaagcgacgacccccaggagcacgctctctgcctctctcccactaccgctctcatctctagatcacatttttctttttgcaacgatcgttattacacctcaaaatttgtaagagaaaaaatacatccgcctacagaactccacgttcgcagaggggcatcggtcggtctattggaggt

SEQ ID NO: 124640 - DNA, 356 bp, Homo sapiens
  chr14:57277091-57277447
  hyper
acaaagtagatgtggcgagtgagggctgctctagcaatttttatttttaatcacagtggaggctgtgttggagctgaggccggtcccgctctcagggagatttgctgagaaagcgcctctctggcaactttttgacgcaaactctccaaccaatggcagggagagaatgattgacacatctaagccagagggaaaataataaaaacacacaacagggggaggaaaacaggccgctgctgcacggggggacgagcaggcaacaaatccaggcctccgacattaccagaatgttctttaaagacactgggctttgcttaaaatatacattatgggccggagcatgtgaactaattgta

SEQ ID NO: 124641 - DNA, 295 bp, Homo sapiens
  chr14:57278005-57278300
  hyper
agggaacacgaaccccggaatctaatctcagggcccatttaggagaagtagctgggaccacatcgggcctcgaggatgcgagtgtgaggtcgacaagatatcgtggaagagagcgaacgagggaggcccccgttggaaacagtttctgtgttagaacaaacgccaccaaacgaccgacactgcgaggcctggagctacctgggctggcgccgcccgagccccgggctgcgagcccagaggctgggaagtgatgggacctgggggcccgagccggagagtgcgacccccagcccaa

SEQ ID NO: 124642 - DNA, 141 bp, Homo sapiens; identical to SEQ ID NO: 9729
  chr14:57278621-57278762
  hyper

SEQ ID NO: 124643 - DNA, 727 bp, Homo sapiens; identical to SEQ ID NO: 9730
  chr14:57278837-57279564
  hyper

SEQ ID NO: 124644 - DNA, 48 bp, Homo sapiens; identical to SEQ ID NO: 9731
  chr14:57279642-57279690
  hyper

SEQ ID NO: 124645 - DNA, 40 bp, Homo sapiens; identical to SEQ ID NO: 51286
  chr14:57281265-57281305
  hyper

SEQ ID NO: 124646 - DNA, 108 bp, Homo sapiens; identical to SEQ ID NO: 51287
  chr14:57283300-57283408
  hyper

SEQ ID NO: 124647 - DNA, 591 bp, Homo sapiens; identical to SEQ ID NO: 9733
  chr14:57283445-57284036
  hyper

SEQ ID NO: 124648 - DNA, 589 bp, Homo sapiens; identical to SEQ ID NO: 9734
  chr14:57284070-57284659
  hyper

SEQ ID NO: 124649 - DNA, 31 bp, Homo sapiens; identical to SEQ ID NO: 9735
  chr14:57734480-57734511
  hyper

SEQ ID NO: 124650 - DNA, 514 bp, Homo sapiens; identical to SEQ ID NO: 51291
  chr14:57735566-57736080
  hyper

SEQ ID NO: 124651 - DNA, 30 bp, Homo sapiens
  chr14:57856743-57856773
  hyper
aaaccaccacgtttcgacagccatccccat

SEQ ID NO: 124652 - DNA, 30 bp, Homo sapiens; identical to SEQ ID NO: 51292
  chr14:57857574-57857604
  hyper

SEQ ID NO: 124653 - DNA, 89 bp, Homo sapiens; identical to SEQ ID NO: 51293
  chr14:57858260-57858349
  hyper

SEQ ID NO: 124654 - DNA, 145 bp, Homo sapiens; identical to SEQ ID NO: 51294
  chr14:58331876-58332021
  hyper

SEQ ID NO: 124655 - DNA, 462 bp, Homo sapiens; identical to SEQ ID NO: 51295
  chr14:58332055-58332517
  hyper

SEQ ID NO: 124656 - DNA, 114 bp, Homo sapiens; identical to SEQ ID NO: 51296
  chr14:58332593-58332707
  hyper

SEQ ID NO: 124657 - DNA, 174 bp, Homo sapiens
  chr14:58332908-58333082
  hyper
cgaaaactagacaccccaaccccacctgatgaaagggatgtttggtcagtggggcgcgagaggagaaggcgacggtggccaggggctcagagaagggtgttgggagtgggagaaacccaagagggactcatagctgttaatgcgaggcattaactctgtcgctcggggagaaga

SEQ ID NO: 124658 - DNA, 30 bp, Homo sapiens; identical to SEQ ID NO: 9737
  chr14:58546605-58546635
  hyper

SEQ ID NO: 124659 - DNA, 30 bp, Homo sapiens; identical to SEQ ID NO: 51299
  chr14:58618178-58618208
  hyper

SEQ ID NO: 124660 - DNA, 36 bp, Homo sapiens; identical to SEQ ID NO: 51300
  chr14:58619015-58619051
  hyper

SEQ ID NO: 124661 - DNA, 30 bp, Homo sapiens
  chr14:58666553-58666583
  hyper
cagtgagctgagaccgaacctcttcacagc

SEQ ID NO: 124662 - DNA, 30 bp, Homo sapiens
  chr14:58711107-58711137
  hyper
taagtgaaacttcacgagagcctgagcaca

SEQ ID NO: 124663 - DNA, 245 bp, Homo sapiens; identical to SEQ ID NO: 51301
  chr14:58711340-58711585
  hyper

SEQ ID NO: 124664 - DNA, 30 bp, Homo sapiens; identical to SEQ ID NO: 51302
  chr14:58764368-58764398
  hyper

SEQ ID NO: 124665 - DNA, 30 bp, Homo sapiens
  chr14:58764633-58764663
  hyper
tccccccagtcaatcggacaaccatagcct

SEQ ID NO: 124666 - DNA, 30 bp, Homo sapiens; identical to SEQ ID NO: 51303
  chr14:58764930-58764960
  hyper

SEQ ID NO: 124667 - DNA, 30 bp, Homo sapiens
  chr14:58766016-58766046
  hyper
gacatggtgcagagcgaaggaaggagagca

SEQ ID NO: 124668 - DNA, 122 bp, Homo sapiens
  chr14:58766355-58766477
  hyper
cccctcagctcctgcgtcctggctgccctcgtaaggggtcttgtcccttggctggtgaggattctgcccctccccgctggcgtttgtttactttctttcccttggtcgctccccgcagttga

SEQ ID NO: 124669 - DNA, 30 bp, Homo sapiens
  chr14:58862505-58862535
  hyper
acacaccctctcgaacgctcggcttcctca

SEQ ID NO: 124670 - DNA, 241 bp, Homo sapiens
  chr14:58862949-58863190
  hyper
accactgggcccacgcgtgcctctggacgggcctcccagccagcatgtgccgtgttgtgttcgcagaaagaagagcagagcctcaaaaggctgaggagcagggcacgcaggtgcagtgctttcgatccgcacaggtagctcagtagacgcaggtccgggctcgctgggttgcttggctcctggcgggctcggcagcaggtagttagttccctcagccgcccgtgcccgggaagaggcctgc

SEQ ID NO: 124671 - DNA, 30 bp, Homo sapiens; identical to SEQ ID NO: 9739
  chr14:58893725-58893755
  hyper

SEQ ID NO: 124672 - DNA, 30 bp, Homo sapiens
  chr14:58894173-58894203
  hyper
gtagtattacaagtcgggagctcttcaagt

SEQ ID NO: 124673 - DNA, 30 bp, Homo sapiens
  chr14:59105326-59105356
  hyper
tggcctggggcgggcgcgaggttgactctg

SEQ ID NO: 124674 - DNA, 173 bp, Homo sapiens
  chr14:59655228-59655401
  hyper
gagatgtagttccgcgagtcccgacagcaaagctgtcccggctccgctaatagattgggaccactactcccaggagtctgcgcgcccgaccggagcgtccatgcgcagtgggagccactttgtatcctatcaggcgaggagagggtgatgtcacctgcgagttagtaacctac

SEQ ID NO: 124675 - DNA, 30 bp, Homo sapiens
  chr14:59656040-59656070
  hyper
cgaaagggacggagcgcctgtaattcagac

SEQ ID NO: 124676 - DNA, 30 bp, Homo sapiens
  chr14:59656801-59656831
  hyper
tcgatgtggctctgcgggcagctgggaggg

SEQ ID NO: 124677 - DNA, 33 bp, Homo sapiens; identical to SEQ ID NO: 9740
  chr14:59931088-59931121
  hyper

SEQ ID NO: 124678 - DNA, 245 bp, Homo sapiens; identical to SEQ ID NO: 9741
  chr14:59931193-59931438
  hyper

SEQ ID NO: 124679 - DNA, 111 bp, Homo sapiens; identical to SEQ ID NO: 9742
  chr14:59931719-59931830
  hyper

SEQ ID NO: 124680 - DNA, 30 bp, Homo sapiens; identical to SEQ ID NO: 51310
  chr14:59932273-59932303
  hyper

SEQ ID NO: 124681 - DNA, 30 bp, Homo sapiens
  chr14:59950348-59950378
  hyper
acacgcaccaaatacgcaaggctgctgaca

SEQ ID NO: 124682 - DNA, 30 bp, Homo sapiens
  chr14:59950701-59950731
  hyper
cagcgccagcactgcgtggccgcacatgga

SEQ ID NO: 124683 - DNA, 30 bp, Homo sapiens
  chr14:59951226-59951256
  hyper
agctcgctgtggcccggatgttcggtgcag

SEQ ID NO: 124684 - DNA, 526 bp, Homo sapiens
  chr14:60043255-60043781
  hyper
cccgctcagggttcccgctgagtgcctcctaagcgccacctctgaggagacgtcccttccagcgcccgaggggcgtcttacccacaacaaacagctgctccagcgcctcgaccgcgaccgaggagcccagggtggagggtaaggtgcataactccagggaggggccagtggagacggcagccgcctgcaccagcttctcgccagcgcccagccctggggtccaggggctcagggccattttgccgctctacttgagcgcctcctaagccagagccaaggattgccggttgccacgggcaacgaggacaccgaggtcgtggggcgccccctcgtggcccgcacctctagtaggtaccctcctggttctctaattttatccacgataattaagcagtctgggaagaatgactctctctttagctaatttttcccctttcaatttccattgcgttagttcaggcctgtatcttttttgtgggccactggaatcataataatgatcacttttgagcgcatctttgtgccg

SEQ ID NO: 124685 - DNA, 137 bp, Homo sapiens; identical to SEQ ID NO: 51312
  chr14:60097109-60097246
  hyper

SEQ ID NO: 124686 - DNA, 167 bp, Homo sapiens; identical to SEQ ID NO: 9745
  chr14:60097406-60097573
  hyper

SEQ ID NO: 124687 - DNA, 749 bp, Homo sapiens
  chr14:60336956-60337705
  hyper
atattcccagtcgcccgtggcgacgcgggggtggggtcggcgctcaaggcagaaagcgcgaggcaggtgcccaggagagccgcgcagaaggggactgactggggggccctggtccccgacgccatttgaggggcagcggcgcccgccttacctgtggatgcagtttccatggcaacgggcgactgccgggcggggcccgagccggcttcccgcgacgccgcttcccgggccctggcgcccaaccccgggctgggctccccagcctgcggcgccggcgtggcccctttcggcgtcaccgcttcgttctccccctccccccggtgcctgagccactgggacccggggccggccagcggcagcagctcgtcctgcggatcccccggcgcggccatggctggcggtcccccggcgcggcgacggcggcttggctgggcagaggctcggtggctgcgcgggcgctccctgctgctgtccccggagggactcggcgctcagggaagctgcggtgtctcagcgtcgccgccgcctctgctgcaactccgccgagccgctgcctgccgctcttcccgcttcagctcctccttctcccccctcctcttcctccggccccgccgcggccgctgcctgcgctcctcctcctactccactcgctgctgccgccgctgcttcgctattcccaatcctgttattacgcaggtgaaaatggcctgcttggtccgggtcctcctgggcacgtcagcccccaacct

SEQ ID NO: 124688 - DNA, 822 bp, Homo sapiens
  chr14:60385920-60386742
  hyper
cttcaaaatacaatgcgtaccttacagcacatgtcaatttggacaagccacatttcaagcgatcatgggccctgcgagtctgtgggtagcggctcaccctgctggactgcgcagatccagagaacgacacgagacctgcggttgctttggtttgccttttactaagttcatttctcagcctctctgcccactctgaaaagtctcccctttccccccttttaattctactctattttgtaaattactgttgtctcctgaaaattttggaatgcttaaaaggcactcaaaagcctgtccgagatcgactagaagaccctcggaaggtccctctcttctctggacctcactgggcgttcgtttgcccgcgccgtccttccattcggcttgccgggcgcgcagcggcttgcggctgtggtcagccaccttcccgggaggcggtggtcgctggccgcgggaaggatgccgcgctgggggtcggggttcgtcccggctgtcacgccaccttgtgacatcacagggccatgccctcggggctcaaggccagagaggctccgcgcttccaggacccgagagctaaagataatgaatgggagagagcgagactggaggaggtaacgaataagtccccaccaccttgcccataacgcgttgctttcagtcacgttccgcgaactggcgaaggtaagtgaaaagataagcgcaggtacagaaaaacctgccagcgagaagctcccgccgtttcccaggagccccaggtggggtcttccggttggacccctgcttccgctgattggttggaggtcgccaccacgtgatgcaaac

SEQ ID NO: 124689 - DNA, 198 bp, Homo sapiens; identical to SEQ ID NO: 51315
  chr14:60558406-60558604
  hyper

SEQ ID NO: 124690 - DNA, 30 bp, Homo sapiens
  chr14:60715599-60715629
  hyper
tgtccagtccctggcgccggaacgtgaagg

SEQ ID NO: 124691 - DNA, 30 bp, Homo sapiens
  chr14:60716650-60716680
  hyper
cgcgaccctctggccgtccgcggccgagat

SEQ ID NO: 124692 - DNA, 490 bp, Homo sapiens
  chr14:60794397-60794887
  hyper
ggaagcagaattgggcgctcaagactcagacccggactgatgagctaagactgcttgcaagagggagtgggagtcgttaaaaaaatatcctcgtggcttaatgaccaaggcgggtttattctcaaggaagggggagcggcgtggtggtgttactaaacataacagatggcagctgtctgcggctatatagggcgcgctgacaaatccctctggatggccacgcggcgctgggctgcggggcctgggtgcacttcgcgcctggctcggagggcgccgcctgcgggaggacctccgggagccgagctgcctccccgcaaacccggcccgggcccacgcgggctcagggcgccaggcggggtgcgccgaggtgcagctccccggccctaggcttcgctggggtgggggtcgaggcctctccgcgggtggctccctccaccctgccgccccgcctcgcggctgggagttgcccgggagctgtgaattcactaga

SEQ ID NO: 124693 - DNA, 30 bp, Homo sapiens
  chr14:60797963-60797993
  hyper
ctttgtgacaaccaacgttgctccctgaca

SEQ ID NO: 124694 - DNA, 102 bp, Homo sapiens; identical to SEQ ID NO: 51317
  chr14:60798392-60798494
  hyper

SEQ ID NO: 124695 - DNA, 10 bp, Homo sapiens
  chr14:60951979-60951989
  hyper
gccaagccca

SEQ ID NO: 124696 - DNA, 224 bp, Homo sapiens; identical to SEQ ID NO: 9750
  chr14:60952195-60952419
  hyper

SEQ ID NO: 124697 - DNA, 116 bp, Homo sapiens; identical to SEQ ID NO: 9751
  chr14:60952516-60952632
  hyper

SEQ ID NO: 124698 - DNA, 204 bp, Homo sapiens
  chr14:60952729-60952933
  hyper
cgccacagcggatcctaactacaaacggtccccggagccctgggctggactcgctcagccccgcccccacgcccctggtaccagccctgagagaccccgcggagcacgccgcgggagccgcagatcgcgctgaagagcagcgagatcgcgctctggacgagacctgcgcggctgcaaccgctccttcttcgcgggtggaagcgc

SEQ ID NO: 124699 - DNA, 41 bp, Homo sapiens
  chr14:60972827-60972868
  hyper
acgtctatggattcccggcaagacccgagcctttgtccaag

SEQ ID NO: 124700 - DNA, 30 bp, Homo sapiens
  chr14:60973187-60973217
  hyper
attcctaaggaatcccgtggagcttccctc

SEQ ID NO: 124701 - DNA, 37 bp, Homo sapiens
  chr14:60973459-60973496
  hyper
cccgcacccttctggcggctcccgcgaggccaactca

SEQ ID NO: 124702 - DNA, 250 bp, Homo sapiens
  chr14:60973757-60974007
  hyper
acctcagcagctaggcgctgggatcggggtcggctctcggctcggctcgcgggctgtaaggtctccgcggaccccaccgcctcttctgcgcgctaagggtgagcgccaagcaatttcgcgagcaatagccggcaaagtaaccaccccgagagggaaaataaacctctgcaaactggagcaagggggtgctttcctcccctggccagaagctccgggatcgcagccctcccgggtccggcttcatccctgc

SEQ ID NO: 124703 - DNA, 469 bp, Homo sapiens
  chr14:60974077-60974546
  hyper
cgatgtttctttctaaaagttgtccttccggctgattcggaagtcgctccaagggaaagaaggtttatgctttgtcattatcttcatcgccctctttattttgcccctgccttgtcgtatttcaagaaaatgaactcttagaaaagaaagcctctccgttgaggcggttggcaatctcacagaaatgatgtaaatggtttcagggcttttttcttcccctctgctatttttttcgagtgaactgtgaagatctgtgaaaataatatcagggttttccgtcagaacgagctttgccctgcactcaggcgtggcgtgatctgacccgacacctccaaccatctgtgctatctatctgccttctgatttaccagatctgtacaagccgcatacaaattgtacttgatactaaagaaaagacagtcgggtccagtccagttcggctgtgaacgttctcacctgatttctgtct

SEQ ID NO: 124704 - DNA, 474 bp, Homo sapiens
  chr14:60975414-60975888
  hyper
gcttcctgctcccaccgcaaggtttgctgtttcgttacaactaaacttgcgaattctcggagcatttcagtttggcccagtcctctttgtcctctggagacctctcgaccgagacaacgcatcgccccaaagtgaattcctgaattcctgtggcatcactgcctatttggtgggaaaaagggagggaggggtagagcggggtgggggagggaggagtagtgaacgctgccgcactcgcctctctttttctcccagacactcgcatgtcttttcaacctccaggttctgcaaaatactgaagaaaagtccaggagctaacggcgggcgctgtcgagcacggggaggtgctgaaatagtcctggcgtgctgattcaagctttgattggcagagccacccggtgactgacagggggtctccatggcgcccgcgccgccaatccgcccaccccaatagcggagccagctcgcctgccg

SEQ ID NO: 124705 - DNA, 535 bp, Homo sapiens
  chr14:60976074-60976609
  hyper
cgctccgggctcagtgccctcgccgccgccggcactgcctcgatgttccagctgcccatcttgaatttcagcccccagcaagtggccggggtatgtgagaccctggaagagagcggcgatgtggagcgcctgggtcgcttcctctggtcgctgcccgtggcccctgcggcctgcgaggccctcaacaagaatgagtcggtgctacgcgcacgagccatcgtggcctttcacggtggcaactaccgcgagctctatcatatcctggaaaaccacaagttcaccaaggagtcgcacgccaagctgcaggcgctgtggcttgaagcacactaccaggaggctgagaagctgcgtggaagacccctgggacctgtggacaagtaccgagtaaggaagaagttcccgctgccgcgcaccatttgggacggcgaacagaagacacactgcttcaaggagcgcacgcggcacctgctacgcgagtggtacctgcaggatccataccctaaccccagcaaaaaacgtgagctcgcccaggcaa

SEQ ID NO: 124706 - DNA, 111 bp, Homo sapiens; identical to SEQ ID NO: 9756
  chr14:60976802-60976913
  hyper

SEQ ID NO: 124707 - DNA, 49 bp, Homo sapiens
  chr14:60977338-60977387
  hyper
ttttgcctttaggtcgggccgacccgatccaacgcgatcgcgggagcac

SEQ ID NO: 124708 - DNA, 97 bp, Homo sapiens
  chr14:60977615-60977712
  hyper
ccgcggaggggcggccgcggactcctgcccgacctctgtcgccttgccgagtaatcctcgccttaactgctggggtcttcggaagaacctctagccg

SEQ ID NO: 124709 - DNA, 410 bp, Homo sapiens; identical to SEQ ID NO: 51331
  chr14:60977879-60978289
  hyper

SEQ ID NO: 124710 - DNA, 110 bp, Homo sapiens
  chr14:60981158-60981268
  hyper
gtcaggctcttttccggcttataaacatttcaaccacactccagtttcaccaaaaaaaacgacggcccctgctccccaaatgccgcagttcctctcgcctccactttaat

SEQ ID NO: 124711 - DNA, 335 bp, Homo sapiens; identical to SEQ ID NO: 9761
  chr14:60981477-60981812
  hyper

SEQ ID NO: 124712 - DNA, 395 bp, Homo sapiens; identical to SEQ ID NO: 51334
  chr14:60981972-60982367
  hyper

SEQ ID NO: 124713 - DNA, 18 bp, Homo sapiens
  chr14:60982573-60982591
  hyper
cgccggggttagccttcg

SEQ ID NO: 124714 - DNA, 337 bp, Homo sapiens
  chr14:60982798-60983135
  hyper
atattcccaaacttcttcagacgtgccctaccgcgagggaacgaactggttttcttcccgttttcacctccttgtctggagacaaaggggtgtgagggcgatcccagagctgaacaagcagtttcacgcctccctgcccgctcatgctgtttccgcttgccctgtggtttgctctgcctggaacgccgccccctacctcaactgctaccctgtcattccacaaagcctaccccacctccactaagttttccgtgagccagtgagctccacacagataatgtgccaccaccttttttaatgctcccaccgcaccttatctaaacgtctgttttagcgc

SEQ ID NO: 124715 - DNA, 315 bp, Homo sapiens; identical to SEQ ID NO: 9764
  chr14:61104241-61104556
  hyper

SEQ ID NO: 124716 - DNA, 429 bp, Homo sapiens
  chr14:61104623-61105052
  hyper
cgaaactggcccggaggggggcccaggcctcacgcgcccggctctctcccagctctcctcctcctccttctcgggctcagaaagccttccagccgcggccccagccctccccccagcctgtgctgggctccgctttccctccatcaactccaagccgaattcaatccgagaaggctcctttgagcttttgtgtttgctgggggagatgtgggcgcaggagggatcgcgttacaactttcatttcctgaaatgtttgagggaacatccagggtttttatccccacatcaggccgggcgatgggctcgagtttcaggccttgtcactcagctgtcaccaaacaaacgaagctctcagagcccaggagagggagagctacctgctattcatgacccctggagcaggtgatcgctcatgggaaaaacaggtag

SEQ ID NO: 124717 - DNA, 30 bp, Homo sapiens
  chr14:61107880-61107910
  hyper
agacaggcgtccacgcgcctcaagcagtct

SEQ ID NO: 124718 - DNA, 2419 bp, Homo sapiens
  chr14:61108285-61110704
  hyper
taaggtcgcggaacacgcgtgcaggcgatgagactgagccttcgggtccctcagtgtgaattgtccatgggggcgcggtggggacacacactagtgcgctggcttcgggcagctgaaggaggtagtctccgagagtttttagagtcccctccaagggaaagcttggaaaaaagagaaatggagcggagagagcacgtgggctaccagcgaccaccctcaccttaaacctaacccacctgtccctgtcaacgccaccctaacaaatcagggcagaaggtgagccgcgacagcctgacccgaagcgcgctgcagacctaggctggtgccttccccttggggccagggctgtgcgtgggggacaaggccgctgctctccctagggccgctggctaagaaggaaatacctgacctggccccaccaagaaagtggagctcctccacccccagttctgctggagacactagaagccagggcccctctctctgccgcgggaagttctagcgacaagcccagaaagtgacgtcctctctacctggcacccctcctcagagcgcgcgggtgaagagtttgggtccgaaaaccaaagccaagaccccaggaagcgaagaaggagacaggaggtgtctgaagcaagaagggcactggagaatcggcagcagggcctaggccgcctccgaaccaggatccaaggcctgcgccatctgccctgtgcgggaagcgcggggcctgggaggcagggagcgctcacacctgcggtcgggcaggaggcgcaacgcgctgccagggcggctttatcctgccgccacagggcggggaccagcccggcagccgggtgtccagcgccgctcacgtgcctcgcctggagcttagctctcagactccgaagagggcgactgagacttgggcctgggagttggcttcggggtacccaaggcgacgacagctgagttgtaccacgaagctcaggccgaggcctcctcccttgtctggccttcgaatccatactggcagcctctcctctcaggcactccgcgggccgggccactaggccccctgctcctggagctgcgctatgatccgggtcttgagatgcgcgcgattctctctgaaccggtggagaggaggctctgccccgcgcggagcgaggacagcggcgcccgagcttcccgcgcctctccagggcccaatggcaagaacagcctccgaagtgcgcggatgacaggaaaagatcttcagttcttctgccgctagagaagtgcgggatacaagcctctattggatccacaacctggagtcctgccttcggactttgccaaagacttgcaggcggtggggaggcagtaggaaatgaagccccctccagcctcagccgccgccgcgttcggtgcagcagcagcagtgccactgccacagagcagaggaaggcccgctccgcgcgagttctgtgccaggtgtcccgttggccctcagcggacaagggagagccgctaataagggtcgctgctcagcaaactcagagctcatccataagtgccaacgccactgcttctttctggaagcttccactccggcccggggtccggccccagccacgctgtcctagcccagagaacaggttcaagaacggtggtgcccagccccagcggtgcccttctccgtccctgtagctcgctgggctcttgagcccctacccactaagccaaaaattcgggaaccgggagccaaaccccttggcctctgagaatttaggaagcttcgttttcagccaagaggtcaaggcgagcagagagtggggactcgaacaatcgcgtgtttaggtttaaaacgttaaaaaataaacatcactcgagtgttttttttttttttcatttcacttggcacaatgctgtatggtttcgtcctacaaactatttataagccgttgttcattacttttggctaccgttatgacatctgtagaggagaaacgaaaagtggctttagattcagttaaactgcgacgcccagaaggtaaactggaggtcccttaacagctggttctcgaagatttcctcgagggaagaaaaaaatatggttagtttcccctaatgatctctctgaaatgattgccaaaaaaactcaaagcaatatccagctttctcgcctcctcctgctcgccccttttacccagactgagccgaggatggcggaaggaggcacattgtgcaatttcttattaaacacatctggaatatgcgcgctctggatttagtgccaggggttttacaaagagtttatgactgtgacagaaaattgtccttttaacaagtttacaagcagtaatcacgggggcttttacaggaccagcgctcttgctcctcgccggatctgcagacatttccaagattcaccaactaagggagcaggaagtgggccggg

SEQ ID NO: 124719 - DNA, 2595 bp, Homo sapiens
  chr14:61113925-61116520
  hyper
tctggagtcggccctcgggcctggcttataggacggccgttttgtaactaaaggctaactgcaaccatacaatccctgttcctgtgttacttgctaactcttcagcccctcgtgtccccctctcaaacttcctaccaacacccaccccaacccatcctttctgggcaggggaaacttcgccgccccgcacaggctgccagcgggcgcggcgcgctggggcgtcagtccgggcactcggtaccggttaacttcaggatttcgcttccctcgccgcttccgccttccgagtgctcgtcagtcctcccgactcctagcgcctgtctgtctcctttctttccccttatcctcacagtctctgtctcccgacaagcccatttcagcagaatttatcctggctctggttttccaccaagacaagaaagggagcaagatcttcggcccctagtcttggaagcgaacaaaggaaaacctaaccggcccctgcgctcaggttttcccccaaactctttggcttcgcggagcgctctccccgccacagccacctccccaccgtccttctgaatctctgtccgaaacgctatagagaacagaaggagcctgcccaggtggccgaaggtgttgccccgaggtgggggaaagtagagaccaatttttaaaatattgccttgtgagctccagtgcgagagagggctgcgactggagaccctttcctcgtctgggcatgcggcgcggtcagccagaccgacgggctgcagtgccgggccacgcgcgagcgagcacggcgaggatcaaccctttcttaatttggggcgccggggagtaaatgcagcgccaactctccccaaagctctctttttgttgtatctttaaaagtctcctccatttgtccagctagtgagaaatgaagcaggctacctctaaaccaaaagactatcaagagagagctgtggagaaccaggcgggagtgggggcagagccaatgtctcaggccagcttcacccctctggggagcaagaggagagaggttcgcgaacctcagctcccaccaaacccctttccttgcgacaccaatcaacatttcactgcccgttgatttagaaactcactctccacccaccactcatagccgcggccagccagggaggcataaagaccaaatctagcgccaatatttcccgacactcacatcccagagaaacccacgcgcgggtgctcaaagcaaatgaggccccatccttagcaaggaacctcagagttcatgaactttcgctgcagcgccgcggagggcctgcgcgccgccccgtggacgggctccggccggcggggaggacttggtggctggtgcctgcgggggcgggagggggcggaggagaaaggacggcttcctagggtcgcccgagtcgcgggaagcacgccgcgtacctttccttggcctccgcggcccggtctctttgcctccggttcttaaaccagttgctgacctgggtggtggtgaggccggtggcctcggccagctcccgcttctcacgcggcgatgggtagggattgtgcgcgtaccactcccgcaggacacccctcgacttctccttgaagcagtagctggtctcctcgccgtcccagatggtgcgcggcagtggaaattttcggcgcacccgatatttgcccacggcgcccaggggtcggccgcgcagcttctcggcctccacgtaatgcgccttcagccacagttgctgcagtttggggtggttgtgaggcgagaactggtggctctccaggatcttgtagagctcacggaagttgccgcggtggaaggcgaccaccgccttggccttgagtacgctctcgttcttgtgcaggtggtcgcaggcgggcagtgaccacaggaacctgcccaggcgctccaggtttccgccttgctgcagaacctcgcacacgcacgccacttgctcctgcgtaaagccaaacgacggcagcatcgacatggctggggcctgccggggcgcacggcccaggcgcacgcggcagggagcagagccgagaggcagggggcggcggccgcagggaggggggcgcggctgttcctaacctcctccttaggctttgcaaaggcgaaaaccggagtcggaacttggcggtgggcggccaaggaagagaaggcggaggagtaggggaggttctggacacggaacggccggcgcactcagtagcctttaaggccttgctgcctccgacctcccgcccggtggatgctgctagttgccggggaacttggtttctgttctccccgcagcggccttaaagcgcgcagcgtccccggcacgctgattggctgccggcggcgcctatccggggctggccagccagcgcgccgcccggctgggcagagaggccgcaccgcccagagcggggagggcgaggctgcggagctgggggttgggggtgttgccggggctgcgcgggtagggagtggtgggaggagaaggaagaggaaaggtgggaagccagttggggtctgagggagctgcgctgcggaggtgtggggaggtagggagtgggtgagcgcgtcaggaccctgcaacgcgggacccgtcgcca

SEQ ID NO: 124720 - DNA, 512 bp, Homo sapiens
  chr14:61116723-61117235
  hyper
gcagaccagggtccgcgcatgcagcctctggaagagtggcttcgggttggcttcagctcgaggagtccaaccctatttcctcctccctccccccaccaactaccactgtcctccccccactgctgcacaccaccctccaaagggcacaagtactcccagtcggacagcgtttccctcgttcacaaaagacctccatgatttgagaccaggcagagagctgtttagagcatacttgctgagcacctagagactccgagcgttcatttgtgatttggtatcttaatgttctgcgattgaaaccagcaggttcctgaagcttctggactcaatttccccatctgtgcggttgtgttttgcagtgccacctctgctactgaggaatgccgagaggctttacttgctattagcaaaaatgctttgggaacctcgtacgaaaggcgctggatgtggtgtaaattaaataaaactgtgcccggctccaataaccgtccggttgtaatataatccttacc

SEQ ID NO: 124721 - DNA, 1513 bp, Homo sapiens; identical to SEQ ID NO: 51346
  chr14:61118742-61120255
  hyper

SEQ ID NO: 124722 - DNA, 193 bp, Homo sapiens; identical to SEQ ID NO: 51347
  chr14:61120572-61120765
  hyper

SEQ ID NO: 124723 - DNA, 30 bp, Homo sapiens
  chr14:61122335-61122365
  hyper
ccaccctacagcgtccgcccaggcgcaggc

SEQ ID NO: 124724 - DNA, 99 bp, Homo sapiens
  chr14:61122758-61122857
  hyper
acaagtgggaacttgcgcctgcctcccttctccccggccgaaagctctagttcgcctcccctacccccggtccaggctcggcagcgaggcaatcagcac

SEQ ID NO: 124725 - DNA, 1455 bp, Homo sapiens
  chr14:61123171-61124626
  hyper
ggcctgtacctcagtcggtgcatacccaagccgtgggatctgtttttgcattctcacacgagcatattgctcgggttctaaaggatccagattttcgcagacagaagctcgaccgcctctgttcccaaaagggccgagcggcgtttgtctgaatcaccagtcctctgagcagtgggaaaagagatactgggtagagggtgctgggaaggtgcccactcatccatgcccctctgcgcgtctcgcccactcgcttaggcttggactttgcaacaaggtttccaacaccgctgcagtgcttgacaaagccctcctggaagccagcagggtgaggctgccagcaagcaggcgggctgcgagggacgcttttaggactaggaagaaggccgtaagatctttccttacctctactcaagttcacccgccaccctcacccatcaaccctcgtgcaggcccgggtccacgtttcgcggactgatcctgagcctcagtataactcgctgtgccaggtgcgcgcgcgcagccaagtatccgcgcgcggacgccggggaggcttcaccgcccggtgtgctggcggccccgcccgctggctcgcagagcggggtctcgcagagctgggcctcacccgtcgccccgccgcctgcaccagaaactccctccccgggctgtgcgggagctcttgggcgccgcgtctgcgccggggccgactccgcccaggcttgtagccagaggtcgcgctatctcgccgggctggcccggcgctctctggggttgttccctcgggcggtgcatggggcccacaggcgtcggggcttgagggaagaggggccggggcctgaagggcggggaccacaacgaggcgcggggaggtcagtggagcggagagccggcgcaggccggcggcggcgcggccggaggagaaagagggcgctgtcttcctggcaaaggagttttcgcctggccggcaggaaccgaaacaacaacaacaacaaaaaaaaaagaaagaaagaaaatctgctccgccgagtccccggagtgaagagcgcgcggcgggaagggtctggggtagcggagcggattctcggcccaaagcctggggaccgctcagcccaccttggcttcgccagcgccacgtagccccggacggcactcgcgaggagggagttttctttggcttctttagctgtttccataatcgccttcttttagggccatccctccctcactttttccctccaaaaactggaggcgttgggataaggacggcgacgcttcgctggcgaatgaggtgcctcaatttgcccgaggcgagcggggaaatcgggatctcctttcatgaagccgagttggcttctcggtttcgtggaatctgcggccggaagccgcgaccccagccagtcattcgcgttgaagcgccgcagcaagtggcaatgcttttggccgcgcattgcccaggaa

SEQ ID NO: 124726 - DNA, 1074 bp, Homo sapiens
  chr14:61188223-61189297
  hyper
aagctgaggctgagccgccgtcgccgtctgcgagggtgactcaccgggggtgcgggtgggaggtagatccggagaggggcctaaaccaggcaactgggccggcggcggggtgggtgtggagtttatggggtggggcgggggggacgaagaagccagcagtggagcgtgggggagtcccagggagcgtgcccggctcgcgagcggaggcggcggagcagctggcctgctcgcggtgcccccttgccaccctctgccccggccctgcggattccgttggtttccgagcgcgggatccgcggcctctagtgggcgcagggcaggtggctcggcgtaaccaaagcgccttctctggacctctccgcatatctgcggaaggcgcacgcacatcccggtgcaccttttgttttggttaccgcgagggccggatagggcaccaagcctccctcccagccttgggcgaggaacgccggagcccgagccgtcggacccccacaggggcccagaagcggcaagggcgggctgagaccggctctggaatgcgctggtgatcaccttcacctggcgcaggcgggctggatccccggctcccagtttgcttccccgagaagaaccttcgagctgcttttggattctttctctcctatccccgcggggctggagacaccaggtctttaggcgaccttctccttactttgtttcgtccaacaaaacacacagacgcacacaccaagtgtctgactcgggaggacgcacaaaagaggtggaaaatccggtattttttttaccagagggggaaagcagtctgccaggcaaaaagctcaaacccagtggggtgggagcgcccccactcctttgctgccgcccgccgtaagccggcctgccccccacccataactaccgtaccaggagggagccaagcagcgttcgggggccgagggaggaagcagcccttcagccctgctaccccggctgcgctgaaacccgatcctaaggagttcagaatcaggtttcaaaacatgacagagccgagctgcaccagcaccccacgttgccgcggccgctaagggaaccata

SEQ ID NO: 124727 - DNA, 30 bp, Homo sapiens
  chr14:61189536-61189566
  hyper
ggcagggagagctacggtgccggtgtccac

SEQ ID NO: 124728 - DNA, 30 bp, Homo sapiens; identical to SEQ ID NO: 51352
  chr14:61190950-61190980
  hyper

SEQ ID NO: 124729 - DNA, 617 bp, Homo sapiens
  chr14:61201375-61201992
  hyper
accaagccctagatgcaagaccgggggaactgactgccggaacgtttgtgttgcagcgcctcgccccttgccggtgctctttcgcgaagggaccgtctctgccaagcgcctgttggtaggaacctgcttggtcgcgtctgagggggcttgtaggtggctctggctgaaacaggcgcctgcgagagtctgtaggagggaaaccgccatggacgatcagggttgccctcggtgtaagaccaccaaatatcggaacccctccttgaagctgatggtgaatgtgtgcggacacactctgtgagttgggcggcagtggattccctgggggagagacgcgctgggtgggaggagaggaccgggagatgctaggcctcgtcttgggagcaaagggcgttgttagtttcaacactggggaggaaaatgggaaaagaaggcgttgtgactttaaatagactgtagccgctagccccgagcggctctggcctgctttgaactgcgggttctcagtgtggcatccagcagtttgtcaggttcccccttccatagccaatgagtatcccgactgtatttccaggctttgtgttgtttactgggctctggacatcgctgattaaaagcgt

SEQ ID NO: 124730 - DNA, 91 bp, Homo sapiens
  chr14:61447491-61447582
  hyper
ccagtaaaatgtggcgaaaggcttttgaaacattccttactatccagaacctcgaaactaagctcagcacctaggcgggtgggtgacctcg

SEQ ID NO: 124731 - DNA, 30 bp, Homo sapiens
  chr14:61644283-61644313
  hyper
ggcggagaaagtccccggtcagagaagctg

SEQ ID NO: 124732 - DNA, 80 bp, Homo sapiens
  chr14:61655854-61655934
  hyper
ctcccagcgccccagcgcccccgcgaggcccgggcagcgtccgcgctccctacagggggaagcccgccggtgtttgggaa

SEQ ID NO: 124733 - DNA, 30 bp, Homo sapiens
  chr14:61719705-61719735
  hyper
aaacaagcgctgctcggccttagcagaaaa

SEQ ID NO: 124734 - DNA, 31 bp, Homo sapiens; identical to SEQ ID NO: 9778
  chr14:61736456-61736487
  hyper

SEQ ID NO: 124735 - DNA, 139 bp, Homo sapiens; identical to SEQ ID NO: 9779
  chr14:61747388-61747527
  hyper

SEQ ID NO: 124736 - DNA, 579 bp, Homo sapiens; identical to SEQ ID NO: 9780
  chr14:61747582-61748161
  hyper

SEQ ID NO: 124737 - DNA, 1401 bp, Homo sapiens
  chr14:61788056-61789457
  hyper
cctcaggtgtttgctcgggctgggccacgaaccctttcctttttggcctgcgcccggggtggcccctaacccgcagcgcacggccagacccagcgctacaaggagggcgcgcagggcggcgcaagcgggcactggcctcccgggggcttgcgcggggatccacccaccgcagggccgggccgcggaccgcgggccacgcccctggggtccggaaggcgcgggagcggacgcgggggttctgtgaacttggaacctggcggtgcgaggttctcgccggggatgcggcggcggcagctgcttcctggtttgaagctcgccgagtgggggagagcgtgagccttcggaggcgggggcaggaggagaagcaagaggaggcgggggaagagacgcttggggctggggctcaccggacgggtaggtccggctctccagggagaggagctgcccggccctggagaaggggcgagtcctgcgcgagtccccgggaggcgccgcgcgcttggaagggacggtcgggcttccccggcccgctgagggctcggcggcgggctcccctcctttccacctcgggagggagggaaggaggggagggaaaagtcccacggaggaggcagaatggccagtcgaggggcgcttaggcgctgcctttccccagggctgcctcgactcctgcacctgtcccgagggctggcctgagacgggactcccggttctcccgctgcgaagcagcgcggccccccggggccggggcagcggcgccggcatgtcgtctggcaccatgaagttcaatggctatttgagggtccgcatcggtgaggcagtggggctgcagcccacccgctggtccctgcgccactcgctcttcaagaagggccaccagctgctggacccctatctgacggtgagcgtggaccaggtgcgcgtgggccagaccagcaccaagcagaagaccaacaaacccacgtacaacgaggagttttgcgctaacgtcaccgacggcggccacctcgagttggccgtcttccacgagacgcccctgggctacgaccacttcgtggccaactgcaccctgcagttccaggagctgctgcgcacgaccggcgcctcggacaccttcgagggttgggtgagtagcggtgaccccttccctttgtgtccacccaacccccgttccccttatgtttttcaaaactcacccgggtcccgctttcccatcgctttgtggctgagggaattccctccagactttggtcttcgtccacgtggccgcggcactggtgacgcgaccgcggtgggtgtgtgcaggcgcaggtgtgtctccaggaagccggcctggacacgatcccctttcaggacagcggcttggcctaacgggaagtcgggcaggggtccagggcggtc

SEQ ID NO: 124738 - DNA, 145 bp, Homo sapiens
  chr14:61943722-61943867
  hyper
ctgtgacctctttgacgtcagtaactgtttcctgtttatttgaactccctgctcaccctgtagatgactttgtctgagaaaaataataaagcaacggtacttaggagaagttcaacactgctatctgttacggagatttccttct

SEQ ID NO: 124739 - DNA, 260 bp, Homo sapiens; identical to SEQ ID NO: 51361
  chr14:62105860-62106120
  hyper

SEQ ID NO: 124740 - DNA, 89 bp, Homo sapiens; identical to SEQ ID NO: 51362
  chr14:62161812-62161901
  hyper

SEQ ID NO: 124741 - DNA, 921 bp, Homo sapiens
  chr14:62162323-62163244
  hyper
aggagaggctcggagccgggcccggaccccggcgattgccgcccgcttctctctagtctcacgaggggtttcccgcctcgcacccccacctctggacttgcctttccttctcttctccgcgtgtggagggagccagcgcttaggccggagcgagcctgggggccgcccgccgtgaagacatcgcggggaccgattcaccatggagggcgccggcggcgcgaacgacaagaaaaagtaagcccattccctcggcccgccgccttctcccccggcgaccccgcccgcctgcccgccctgggctcctgggccggcctcggcgttaatgggattggggggggcagcctttttgtttctgctgctgctcccctcccctctcttcccccaacctcgccggccgggctcccccgctgtccacgtcgccatcttgtcgtggggggtgggagacgcctcgaaagtgctttcaggggccggggtctgagccctgcttgccctccccgccggccgtgggggcctcgcgccgcccacctacccgcctcaaaaacccagcctgctctgtggccccatccggaggggactttacccagcctgaaaaccccgggaagagaaatgagctgcagctcggtagccgcggtttgcacccggagcttccgctccttcccgcccccatcctctccagttccattgaaaactcggccctggggcggaccctgcacgctggtcctggctttccagtggacttggggccttgagttcccgactgagggactcgcgtggtcggatgcgatcttgtcctgtagttgtccagccgtcgcgggtgtctttgcctttgtgcattagggatttgccgcgatggccttaagatgcgaactttttagtttgcacgtgcaggttttgtttcgttttaatcgccttgaaaaactt

SEQ ID NO: 124742 - DNA, 189 bp, Homo sapiens
  chr14:62229156-62229345
  hyper
aggcgtgcgggcttcgggtgccatggggactcctcccggcctgcagaccgactgcgaggcgctgctcagccgcttccaggagacggacagtgtacgcttcgaggacttcacggagctctggagaaacatgaagttcgggactatcttctggtgggtgtttcttgtccaccacccgcctctccctgcccg

SEQ ID NO: 124743 - DNA, 207 bp, Homo sapiens
  chr14:62279268-62279475
  hyper
gcgccgcagctcggccgttctgcccgggaggctgggctctcaggacgccggcggcggccgcagggctggcggctgctgggcgcggggcggcgcggggcggcgcggcgcggcgggggcgcgcggcaggaggggctgtgcgcggcgcggcccccgagcgcaccgggcctgccgaggagcgcgcgcccggccgggctcggcgccggtttc

SEQ ID NO: 124744 - DNA, 333 bp, Homo sapiens; identical to SEQ ID NO: 51366
  chr14:62279519-62279852
  hyper

SEQ ID NO: 124745 - DNA, 27 bp, Homo sapiens
  chr14:62279898-62279925
  hyper
cgagttctgggtcgggtttgtgcgtct

SEQ ID NO: 124746 - DNA, 211 bp, Homo sapiens; identical to SEQ ID NO: 51368
  chr14:62583658-62583869
  hyper

SEQ ID NO: 124747 - DNA, 599 bp, Homo sapiens; identical to SEQ ID NO: 51369
  chr14:62583918-62584517
  hyper

SEQ ID NO: 124748 - DNA, 182 bp, Homo sapiens; identical to SEQ ID NO: 51370
  chr14:63511824-63512006
  hyper

SEQ ID NO: 124749 - DNA, 645 bp, Homo sapiens; identical to SEQ ID NO: 9788
  chr14:63512063-63512708
  hyper

SEQ ID NO: 124750 - DNA, 457 bp, Homo sapiens; identical to SEQ ID NO: 51372
  chr14:63512740-63513197
  hyper

SEQ ID NO: 124751 - DNA, 30 bp, Homo sapiens; identical to SEQ ID NO: 9790
  chr14:63670696-63670726
  hyper

SEQ ID NO: 124752 - DNA, 30 bp, Homo sapiens; identical to SEQ ID NO: 51374
  chr14:63670925-63670955
  hyper

SEQ ID NO: 124753 - DNA, 30 bp, Homo sapiens
  chr14:64010451-64010481
  hyper
cggtcgtcttggaccggaggattccaaggg

SEQ ID NO: 124754 - DNA, 30 bp, Homo sapiens
  chr14:64010783-64010813
  hyper
ggtgggaacgctgtcgccacagtttgcagt

SEQ ID NO: 124755 - DNA, 534 bp, Homo sapiens
  chr14:64108073-64108607
  hyper
cacatcccatactacgggtcgtctcttcccaagtgaaaatctgctttctggcctacaaaaggattatactaaacccttttagtggtggggagagtatccgtggagaggaaagagcaggaggaaacaggtctttccctgaaaatgagcaagggcgtttggcttttattgaaaaacgccccagaggaagtactgggaactgcaccggcaacagcagcctgacccgcagaagtttctttggccagggccagcacaggtttgacctggtggctccgacggcggagcgagactgccaacacgtgcacactccgtccagacctcccacttccctccgcgctcccgcgatagctgtccagcaactctagctttctagactcaaccacggcgtcgccgctcgtcgagagggctgcccatcccggggacccgcccagcctggcccagcaaaatgtaccttagtagcctcaacctgtaccggagaaaacgcaggctgcgcggcggcttagagcggtcaagtggaaccccgcctcgacctctctg

SEQ ID NO: 124756 - DNA, 268 bp, Homo sapiens
  chr14:64109072-64109340
  hyper
ttattgttttcacgcgaagaaaccagcccttcaggccgggctgaatgtggtttagggattctctggctgtcattgggtgaaaaagcgatcagtttgaaggtagctccgcctgggctctagggaactctgggatttgtagtccggaactttcgagtcctgtagctttaaatgtggttgttgctactgagttctttcatgttgttaataacacccattgacatttattgtggtttgttggactttttatcctttcgtttatcagcagcat

SEQ ID NO: 124757 - DNA, 36 bp, Homo sapiens; identical to SEQ ID NO: 51377
  chr14:64182959-64182995
  hyper

SEQ ID NO: 124758 - DNA, 30 bp, Homo sapiens
  chr14:64194552-64194582
  hyper
gctgagcggcgcggcggcgcttccaccccg

SEQ ID NO: 124759 - DNA, 30 bp, Homo sapiens
  chr14:64195089-64195119
  hyper
ccggtgccagcttgcgcaatgcctgtgacc

SEQ ID NO: 124760 - DNA, 30 bp, Homo sapiens; identical to SEQ ID NO: 51378
  chr14:64319528-64319558
  hyper

SEQ ID NO: 124761 - DNA, 30 bp, Homo sapiens; identical to SEQ ID NO: 51379
  chr14:64319797-64319827
  hyper

SEQ ID NO: 124762 - DNA, 31 bp, Homo sapiens; identical to SEQ ID NO: 9791
  chr14:64320708-64320739
  hyper

SEQ ID NO: 124763 - DNA, 30 bp, Homo sapiens
  chr14:64407130-64407160
  hyper
gttttaaaaaaatatcgtatcaacatggtt

SEQ ID NO: 124764 - DNA, 1006 bp, Homo sapiens; identical to SEQ ID NO: 51381
  chr14:64760752-64761758
  hyper

SEQ ID NO: 124765 - DNA, 30 bp, Homo sapiens; identical to SEQ ID NO: 51382
  chr14:64805106-64805136
  hyper

SEQ ID NO: 124766 - DNA, 188 bp, Homo sapiens
  chr14:64805570-64805758
  hyper
tcagccagtcatcaccgacttcctccacgttttccttgtcctctccggccggcagtgtagcagcagcaactccctacgttgaagtcgtctccctccgtccccgcccttacttccttttcccttaaggacctcgcgcgcgcttccatattcagaggggcgcaggcgcggtagcgcggcctcccgagctg

SEQ ID NO: 124767 - DNA, 30 bp, Homo sapiens; identical to SEQ ID NO: 51384
  chr14:64854516-64854546
  hyper

SEQ ID NO: 124768 - DNA, 214 bp, Homo sapiens
  chr14:64931837-64932051
  hyper
gaggagaggagatgtgtaatgcgactgtctataatttgaaaccggacctcactatttagcgtctcagaaaacgcggggttcattgccctggtcccccccgccttcccccgccccccgaaccttccggctggctctcttgcggtccccgcctcggcgctgatgtggtctggcagtggagattggcgcccgggcggagcacgatgggcttccccgc

SEQ ID NO: 124769 - DNA, 30 bp, Homo sapiens
  chr14:64932452-64932482
  hyper
gctgggagtaagaacgcgggaggtcgcttg

SEQ ID NO: 124770 - DNA, 30 bp, Homo sapiens; identical to SEQ ID NO: 9795
  chr14:64970070-64970100
  hyper

SEQ ID NO: 124771 - DNA, 30 bp, Homo sapiens
  chr14:64970660-64970690
  hyper
ccgccgccacagttcgcagttgtgactctg

SEQ ID NO: 124772 - DNA, 30 bp, Homo sapiens
  chr14:64971090-64971120
  hyper
gtctgacatctggacggagtgggaaagcag

SEQ ID NO: 124773 - DNA, 44 bp, Homo sapiens; identical to SEQ ID NO: 9796
  chr14:65005556-65005600
  hyper

SEQ ID NO: 124774 - DNA, 163 bp, Homo sapiens; identical to SEQ ID NO: 51388
  chr14:65005779-65005942
  hyper

SEQ ID NO: 124775 - DNA, 98 bp, Homo sapiens
  chr14:65006318-65006416
  hyper
cgccagccgccctcacgcggcgcgggaaaacggtcggcctcgccctgggctcaggttctctccgcccgccaggcagtggggtttttttttgttttttt

SEQ ID NO: 124776 - DNA, 17 bp, Homo sapiens
  chr14:65006697-65006714
  hyper
cagccaggcagttttaa

SEQ ID NO: 124777 - DNA, 760 bp, Homo sapiens
  chr14:65006776-65007536
  hyper
cgccggttcagactttttcttttctttaatccccgtccaagggatccgccctcaccccccaccccagccaccccaattccctattccctccccttggacggcgccggggaaaacaagctgctcgagctttatttcttcggtgcaaccaactcagaatgaattcctccgcccctgcgtgctcagtgagtcggcaccctagcagtgaactgcatttaaaacctcaggaattgagcgaactctcccagtggctctcctcaccgggatccccttccacgcctcctccccgtgccgcgcctcagtccgcactgctcattggccgcgtgccctgccaatccgatgcacgtcggctagggcaaagaccgcgaaaaagcgcgtacacctggctctgggagcgcgcgcctaacgccagccagcagcaggaggcgcgcgaggcaccacggcctggcggccgagagtcagggaggaacctcatttacataacggccgcccctctgtctcctggcgggggccggagtcccgcccctcgtccaacttgaaatctgttgggtcacgggccagtcactccgacctaggcaagcctgtggtggagctggaagagtttgtgagggcggtcccgggagcggattgggtctgggagttcccagaggcggctataagaaccgggaactgggcgcggggagctgagttgctggtagtgcccgtggtgcttggttcgaggtggccgttagttgactccgcggagttcatctccctggttttc

SEQ ID NO: 124778 - DNA, 11 bp, Homo sapiens
  chr14:65007552-65007563
  hyper
cgcctttcagt

SEQ ID NO: 124779 - DNA, 587 bp, Homo sapiens; identical to SEQ ID NO: 51392
  chr14:65008387-65008974
  hyper

SEQ ID NO: 124780 - DNA, 453 bp, Homo sapiens
  chr14:65008997-65009450
  hyper
cgaggttaccttcgacattgacgccaatggcatccttaacgttaccgccgccgacaagagcaccggtaaggaaaacaaaatcaccatcaccaatgacaaaggtcgtctgagcaaggacgacattgaccggatggtgcaggaggcggagcggtacaaatcggaagatgaggcgaatcgcgaccgagtcgcggccaaaaacgccctggagtcctatacctacaacatcaagcagacggtggaagacgagaaactgaggggcaagattagcgagcaggacaaaaacaagatcctcgacaagtgtcaggaggtgatcaactggctcgaccgaaaccagatggcagagaaagatgagtatgaacacaagcagaaagagctcgaaagagtttgcaaccccatcatcagcaaactttaccaaggtggtcctggcggcggcagcggcggcggcggttcagg

SEQ ID NO: 124781 - DNA, 459 bp, Homo sapiens; identical to SEQ ID NO: 9800
  chr14:65016470-65016929
  hyper

SEQ ID NO: 124782 - DNA, 1279 bp, Homo sapiens
  chr14:65170674-65171953
  hyper
ctgacttggaaaagcggacacggccggctctggtaggattaggatccccagatcgatcccggctggtcactcacttgggaaagccctcagcccccttcgcagggcccggtgttccctgtccatacaaggggtacgttctggcagtccatgctgtctcgggaggcggtgatagcaggtctgtgacaccagggtgaccccaccacgtgcgtcttggtatcctagagcatctaggctgcccgggggtgcgcgctcatcaccctgcgggcgttaatcgttaaccgcgcccaggcctcgccgccgccgcagccttaccccggctctggctcgccgcgccgcgaaggttgccccggcccccgcagagccgccaattgctggactgcagccgcgagctggagtctccacccacaggaaaaattcctggcccgcccctccctcgctccctcgctccctcgctccctcgctccctcgctccctcgctccctcgctccctcctgccctcccgctgcagctccggctccgctcgacttcctgccgggcgctggcaagccgcgcgctgcctggggtctccgggggccgcgcttgcagctggccgagtccgggccagctgaggggctggcggtgggcgggagcggtcggcggcctcagccccttcagagagcgactttcaaactcgcgcccgcgtcgcggcagcacctgggcagccccgcacgccgtgcgcgtcccgagcccgcggggcagctaccgctcggtgagtgtcccctgattctcctctctcccctcttatctccctgcattaggctgagcggcggtgccggcagtcacgctggggccccagtcccttcgcggcccccgtgccagccccctgcggggtgaggaccggggcgaccgaggagggcctggaactgtgttggctgcttcccgggccaccctgccgcagagtgcgcgagcgcaggagggtcgtatggggagactttttctgtctttttttccctccactccggaaacaaaaggggcaaatgcgccgggcggctccagagaggctcagtttgaaatccaggaagcccgcgaggccgcgcgcgcccgagggctggtgtttggctggagctgtgggcctggcgggtggacccttctgcgcgaggacccgagcctcggctcctgccagccccggaggcgcctgcagcctgttccgggttggcgccgcacggtgctcgctgttgggaatctcggctacctgtccggcagggaggagagtgggggccagaagcggggagcggaaagc

SEQ ID NO: 124783 - DNA, 30 bp, Homo sapiens
  chr14:65290078-65290108
  hyper
gatggagagctgcacgtagcaagggtcagg

SEQ ID NO: 124784 - DNA, 30 bp, Homo sapiens; identical to SEQ ID NO: 51397
  chr14:65346133-65346163
  hyper

SEQ ID NO: 124785 - DNA, 272 bp, Homo sapiens
  chr14:65346618-65346890
  hyper
tggtgctgccgagccgcggacccgcccagagatataaataacattatctgaggagggacattcctgccgggggacatcgctgctgccgggaccagatagtcccgcggcgggggcggggaggcggggccgcagcctcccgcagcgccaagcccagcccccgccttccccacccactcacgcacctgccaatcagcctccgcgcctgggggcacctgccgggcctcagcccggctcctggaacccgcctctgcctccccgcccgccgctgagcc

SEQ ID NO: 124786 - DNA, 30 bp, Homo sapiens
  chr14:65347123-65347153
  hyper
gggaggtgaacccccgccgtggcgggtttg

SEQ ID NO: 124787 - DNA, 30 bp, Homo sapiens; identical to SEQ ID NO: 51398
  chr14:65347503-65347533
  hyper

SEQ ID NO: 124788 - DNA, 348 bp, Homo sapiens
  chr14:65381010-65381358
  hyper
ccaccctttgcccacgcacggtgccaaggagactgtgccctgccttgacaacagttgctaaggggcggagacttcggctcggttcccgagacggaatacccaggagtcgagtacttgggcgcatgcggcaaccgtatctcagttctcgcgaggtttcgtcttcccggaagcgttggaggacattccctgttgactgcgtcgcgatgtgtggcgactgtgtggagaaggaatatcccaaccgggtgagcgactgggcgctcccttggcccgcgggcggcccccgaggtgtctcatatccaaggctggccttcccagagaggccgtacgtggggcggactcggccgcact

SEQ ID NO: 124789 - DNA, 30 bp, Homo sapiens
  chr14:65438441-65438471
  hyper
ttcccggcaagaggcgggagaccccacccc

SEQ ID NO: 124790 - DNA, 66 bp, Homo sapiens
  chr14:65438692-65438758
  hyper
gtggaactcgttgtcggtgaagcggcacagcaggcaggtcttgcccaccccggagtccccgatcag

SEQ ID NO: 124791 - DNA, 30 bp, Homo sapiens
  chr14:65439221-65439251
  hyper
ttttcgtttttccgcggacgctccgaatgg

SEQ ID NO: 124792 - DNA, 114 bp, Homo sapiens
  chr14:65565398-65565512
  hyper
atcagtgggattttgcgatgtactgaatttagtagtaagaatactctttggggttacttcctttaacaaagcttactggccattggagaagctgttttccgtttgtactgaagc

SEQ ID NO: 124793 - DNA, 35 bp, Homo sapiens
  chr14:65569328-65569363
  hyper
gtccctctaacagacggcccgggtagctccagaaa

SEQ ID NO: 124794 - DNA, 182 bp, Homo sapiens
  chr14:65569736-65569918
  hyper
gtggttccgttttgcgcctaggggcgtaacccgcccgggagggaatctggctgcggcggaccagggggcgcggctcgggatgcctgcgcgaaccctcgggggctggtggggaggtgtcagtggcaggtgtttcgtggtgctaccggacaggcagaatgaccgacctcgccgggcgaccgctc

SEQ ID NO: 124795 - DNA, 30 bp, Homo sapiens
  chr14:65879878-65879908
  hyper
ggctttggcagctgcgacggggagcggcgg

SEQ ID NO: 124796 - DNA, 122 bp, Homo sapiens; identical to SEQ ID NO: 51404
  chr14:66869958-66870080
  hyper

SEQ ID NO: 124797 - DNA, 289 bp, Homo sapiens; identical to SEQ ID NO: 51405
  chr14:66974386-66974675
  hyper

SEQ ID NO: 124798 - DNA, 75 bp, Homo sapiens; identical to SEQ ID NO: 51406
  chr14:66974894-66974969
  hyper

SEQ ID NO: 124799 - DNA, 430 bp, Homo sapiens; identical to SEQ ID NO: 51407
  chr14:66975357-66975787
  hyper

SEQ ID NO: 124800 - DNA, 30 bp, Homo sapiens
  chr14:66976047-66976077
  hyper
aggattcccctactcgggctcctctccccc

SEQ ID NO: 124801 - DNA, 30 bp, Homo sapiens; identical to SEQ ID NO: 51408
  chr14:67707447-67707477
  hyper

SEQ ID NO: 124802 - DNA, 30 bp, Homo sapiens
  chr14:67707691-67707721
  hyper
ttttcttcaggatacgtcatccagagacaa

SEQ ID NO: 124803 - DNA, 194 bp, Homo sapiens
  chr14:67708296-67708490
  hyper
caggtccctgggagcgcggcgggggaggggcgggcggccgggctccccttcccccacacgctgcgcaaactccggccagcgggagacccctggcagccaggcgggcttcctcaggcgcgcgagctgcggccgtggagggtgtgagcccaacctttgtccctcggagcaacgctgcctgcgcggtgcccgctcct

SEQ ID NO: 124804 - DNA, 252 bp, Homo sapiens; identical to SEQ ID NO: 51409
  chr14:67825994-67826246
  hyper

SEQ ID NO: 124805 - DNA, 237 bp, Homo sapiens
  chr14:67826865-67827102
  hyper
ctatgtctttctcgcgccttgaaggttacttagctaaagctaagatagcgagaaacagtacttttcaggtccttccatgatctacattcgtccttgttctcggaggacccagactctatggttaatgatgaagaggggcctctattcgttcagcgcttgcgcatgcgaggaggttccgcatgcgcggtggagtgagcgaagcgcacgctgaggaggatcggcggccggtgaggggga

SEQ ID NO: 124806 - DNA, 30 bp, Homo sapiens; identical to SEQ ID NO: 51411
  chr14:67827452-67827482
  hyper

SEQ ID NO: 124807 - DNA, 86 bp, Homo sapiens; identical to SEQ ID NO: 51412
  chr14:67878633-67878719
  hyper

SEQ ID NO: 124808 - DNA, 236 bp, Homo sapiens; identical to SEQ ID NO: 51413
  chr14:67878763-67878999
  hyper

SEQ ID NO: 124809 - DNA, 30 bp, Homo sapiens; identical to SEQ ID NO: 9809
  chr14:67981500-67981530
  hyper

SEQ ID NO: 124810 - DNA, 33 bp, Homo sapiens; identical to SEQ ID NO: 51415
  chr14:67982131-67982164
  hyper

SEQ ID NO: 124811 - DNA, 30 bp, Homo sapiens; identical to SEQ ID NO: 51416
  chr14:68000366-68000396
  hyper

SEQ ID NO: 124812 - DNA, 30 bp, Homo sapiens; identical to SEQ ID NO: 9810
  chr14:68038106-68038136
  hyper

SEQ ID NO: 124813 - DNA, 30 bp, Homo sapiens
  chr14:68066451-68066481
  hyper
aagttttaggccgtcgcgcaagaactagat

SEQ ID NO: 124814 - DNA, 38 bp, Homo sapiens
  chr14:68067075-68067113
  hyper
ggctgatggttgtgcgttcttccgggccggccttgact

SEQ ID NO: 124815 - DNA, 436 bp, Homo sapiens
  chr14:68086296-68086732
  hyper
cggctcctgcgttccgccaagttcaggaacctggcatgggccggccgcctcccgcgaagggacacacctgttggtcaccgcgctcttactggccagacccggatattggccttctggcgtcagcggcaggggcatgtccctggccggagagcacaggccagagtggggtgacgtcatcgaaggcacgtcccagccttgcagagcggtgggcggggcctgcgaagaaggtgtgccgggggctggttggaggcgcgggcggcggggccaatgtggcggtgacgtcacggggcgggcggacgctggcgcgggtaggtaagagcagcggcgggcggtggcgctcactcccggcttccaaccgcgcggagcctctgccttggagattctcagtgctgcggatcatgtccctaaggggcagcctctcgcgtctcctccagac

SEQ ID NO: 124816 - DNA, 127 bp, Homo sapiens
  chr14:68141649-68141776
  hyper
ggctcggacgagagcgtctcgtcccggggtcgcgcgttgctccgggtgccaggttcagcccgcgcggcgacagcgggcttcggcccgatttgatgtatgtttgcgtctagacgtcgtcctcactgtc

SEQ ID NO: 124817 - DNA, 30 bp, Homo sapiens; identical to SEQ ID NO: 51420
  chr14:68161965-68161995
  hyper

SEQ ID NO: 124818 - DNA, 303 bp, Homo sapiens
  chr14:68162289-68162592
  hyper
tttccctcccgccccgcaacaagaattctcaagagaaggcaatacatttgcacagacctgatttggggcgcagccatatacagaaggaagggcagaaggaggagcaacagcgggaacatgagctcaaccatctctgccggctgcagcggcaccagagcgggatgctccagcgttgctcgccgactatggcttctctttctagacacgccccaattcaaattgcgacagcccggggagcagaccttctgggaaatgtagtccagagcttgacagcctcaggctggctacgtgggagcgctgccg

SEQ ID NO: 124819 - DNA, 294 bp, Homo sapiens
  chr14:68283047-68283341
  hyper
aatccccaggtggtcgcctcctcaagaatgagaaattcagcaggaacctccctagtttgagccctctgttaaggcagaggattgacgaccaggagacgaatctgtgtcataagtggaaagcagtgtgggggtgggccgcagggacgctctctgcgggggtcgtggagaggggcccctccctctcaggggtgtcttacactcacctgctcccggcgcccaaagcaatagagctctcagcgcagccatgtttgagccgagtcaggtgacagaacccactccgaacagcggtggtgg

SEQ ID NO: 124820 - DNA, 30 bp, Homo sapiens; identical to SEQ ID NO: 51423
  chr14:68660412-68660442
  hyper

SEQ ID NO: 124821 - DNA, 30 bp, Homo sapiens; identical to SEQ ID NO: 51424
  chr14:69034666-69034696
  hyper

SEQ ID NO: 124822 - DNA, 31 bp, Homo sapiens; identical to SEQ ID NO: 9812
  chr14:69258877-69258908
  hyper

SEQ ID NO: 124823 - DNA, 228 bp, Homo sapiens; identical to SEQ ID NO: 9813
  chr14:69259277-69259505
  hyper

SEQ ID NO: 124824 - DNA, 57 bp, Homo sapiens
  chr14:69260258-69260315
  hyper
tctctttttgccagcgggagctgaagcccgtccttagcgcccgggccgcggtttcca

SEQ ID NO: 124825 - DNA, 30 bp, Homo sapiens; identical to SEQ ID NO: 51427
  chr14:69260638-69260668
  hyper

SEQ ID NO: 124826 - DNA, 30 bp, Homo sapiens
  chr14:69261064-69261094
  hyper
gaaaccgaagggcccgcaatggagcatgac

SEQ ID NO: 124827 - DNA, 231 bp, Homo sapiens
  chr14:69261378-69261609
  hyper
ccccattatgagcacgtttctttggaaaggacggggcgggccgaagagagcgcattctcaccacccccaacacacacttttttttaaaactgcatttcttatttattcgtaaacatctgggcaaacccagcgaaaccttccaaatcacaattgtttgagaaaccggctgtttttcaactttgtgaaacccaacttttgctgcagccacgaacctacgtgatcccagcgggg

SEQ ID NO: 124828 - DNA, 30 bp, Homo sapiens
  chr14:69261867-69261897
  hyper
tgggggagagatttcgtgcagtttcttggt

SEQ ID NO: 124829 - DNA, 459 bp, Homo sapiens
  chr14:69262250-69262709
  hyper
ggagcaccatcaggcgccccagaatggctacaaagtggatttttccaaagaaagctgattcctcgaatttcctcggcttttccaactcccggaggccctcccctccccctctccccgggggcgcgggctccgcaaggctgcgactggcctagcccgctcgctcccgagttgtttaccggccccgccgaccaagggtttgttccagctcccagagcctgtctctataattaaactcttttttaaattgtcgggttgaaacgtcatttcggggactttccaagggtgagggagccgagaggagggagcgagtcccttaacccttcgctgacccggcgtccccgccgcggtgagggcccgagggcgggagccgacccgccctcgcccagacgtggtcgacaggtgcccaggggtggcgggagggcggccctacggtgcaggaaggccgaggcgaggcgtgcg

SEQ ID NO: 124830 - DNA, 30 bp, Homo sapiens; identical to SEQ ID NO: 51430
  chr14:69263088-69263118
  hyper

SEQ ID NO: 124831 - DNA, 30 bp, Homo sapiens; identical to SEQ ID NO: 9815
  chr14:69281282-69281312
  hyper

SEQ ID NO: 124832 - DNA, 622 bp, Homo sapiens; identical to SEQ ID NO: 51432
  chr14:69444742-69445364
  hyper

SEQ ID NO: 124833 - DNA, 300 bp, Homo sapiens; identical to SEQ ID NO: 51433
  chr14:69445726-69446026
  hyper

SEQ ID NO: 124834 - DNA, 562 bp, Homo sapiens; identical to SEQ ID NO: 51434
  chr14:69446237-69446799
  hyper

SEQ ID NO: 124835 - DNA, 105 bp, Homo sapiens
  chr14:69618202-69618307
  hyper
gaagctaagcgccacgtccagcgctgggttcccccttcatccctcccaatataggaaaagggacagaagagggcagcagccaagcaggaacgcccaatcagccgt

SEQ ID NO: 124836 - DNA, 30 bp, Homo sapiens
  chr14:69618580-69618610
  hyper
cccggcctcgatttcgccactttccccaaa

SEQ ID NO: 124837 - DNA, 313 bp, Homo sapiens
  chr14:69620501-69620814
  hyper
aactcttccttcctccggtcctttagttgaaaaaggctaaattgttccgtctggcagattagagtggtacatggggggaaagagaaagggataaagaagtaggaagaaaattgccaaaaccgagttgatgaagtcccgagaagcacgaggtacttctctccgttccagataaatttgcacgacacaagaagcgtgatttgaaactaacgatatatgttatttaattgggttcggtgagctcctcttaaaggtctcgagtggggagcactgaggttggacagctgttaaccagcagctgcgctccaggccagaa

SEQ ID NO: 124838 - DNA, 246 bp, Homo sapiens
  chr14:69658125-69658371
  hyper
tccgtacaaaatggcgttgcccgttcccacacgccagctgggattacgtcctccaggcctgtcgcaggaacggaagtggttacggccctagtgaatccgggtgggtgcgcgcaggcggccgcacaggttccaggtctttaacgtgagcccgctgcaggtgtgcggcccagtccgagacagcaggtaagtgaggctcagaagccggcgaagccttgcaccaggattgtgcgcggggcagggggtgct

SEQ ID NO: 124839 - DNA, 96 bp, Homo sapiens; identical to SEQ ID NO: 9820
  chr14:69658737-69658833
  hyper

SEQ ID NO: 124840 - DNA, 1344 bp, Homo sapiens
  chr14:69726521-69727865
  hyper
tgggtcggcaggaccgaccagggccgcgcgggggcagctgccgggcgttcggtcacctagcggtgggagccgaggctggctttggccagtcgccattccgccgcgggcgtctgtctcgccgggttcccgggcgcgggaggaaggcccgcgccgcttcccactcggcgcgcttctctcccagtgcgcagtggcctggtgggtcagccggcggcggctggagcgcggggccggccctgcgcacgaatgaatgggcgcccgggggacgcgcgcgctcggggctgaagggcattaggaccgtgaggatcgctccgcgatcctgtctctccctatcacccccccgcccccccacctctctcctttttctgctctgcaggactgagcagctaggcgcgagcgaaaacaaacagctggggctgcgagcgcccccgccccggccccgagagcacgccggcccagtcccccacctggggcgcccgtctgcccaccatgaggaagatccgcgccaatgccatcgccatcctgaccgtagcctggatcctgggcactttctactacttatggcaggacaaccgagcccacgcagcatcctccggcggccggggcgcgcagagggcaggcaggaggtcggagcagctccgcgaggaccgcaccatcccgctcattgtgagtacgccccgagcgtcggccggccggctagggagccgcggcgcgcgtccagaccctgcgcggcggccgagggcgcggggcccggccagggctgagtgcccgctgcgccgggccggctttgtatatgttggagcattcctgcccgttgttatggcaacctctgccgggcggcggggctggggcgcaccgactaagggagggtgacagagggtgggggctgggagaaagtgctgcaagtttggtgggcccggcgtgcgcgcgcggctgggaacgtggcggctctcccggctctgcgctgccggggccgggagtctgggggctgcgggagcctcgtgtgccccggaaggctgccgggcccagcgcgcggcgagcgggcggtgggaaccactcgcagccgagcgcgtaggtggcagtgcgcagcccctctccagccttctgggggcagaggacatcgggtgggggcgtgggtaggggaaggctctctaggcgctgcgcctggcttcgaacccccttctgagccgggtcaacttgaacccgcttcttcggcgcggacacccagcttccccggagttctctgggttgaggagaggtctcgcactgtacgcgtctctcactcccaaccttagggtccgccaccacgggtaggtgggcagtgtcagcgcccgaacttggcgatac

SEQ ID NO: 124841 - DNA, 49 bp, Homo sapiens
  chr14:69728074-69728123
  hyper
ggcacctgttgaggcgggaggctttggcacccgccgagagtgcgctcga

SEQ ID NO: 124842 - DNA, 363 bp, Homo sapiens; identical to SEQ ID NO: 51440
  chr14:69864915-69865278
  hyper

SEQ ID NO: 124843 - DNA, 30 bp, Homo sapiens
  chr14:69865638-69865668
  hyper
gggcggatcaccttcggggccgcctcttgg

SEQ ID NO: 124844 - DNA, 186 bp, Homo sapiens
  chr14:69950635-69950821
  hyper
caactccgaaaggagcggaagcggatggaacagctggtcccagggagcgcgggccaggcgcgcagataaatcacggacacacactgcacggatagctccagactggcgttgagtgccaaatgccgacacagacacggtcaggttccaggaagagaaatccgatccgatgcgcgctaggcggcggcg

SEQ ID NO: 124845 - DNA, 821 bp, Homo sapiens
  chr14:69951033-69951854
  hyper
gagtgtgtgaccctacgccctagctccgtcctctcctccaccccgaggcgagcaggtgtctgcaggagtgcctccaaccccattgcaaagcggacgtggccctcgtctcgatgtcggcgctgctcgccgagagggaccccggggtggtgttgggcgcgcggggcggggacggggacgcgctgcggccaagtccccgggccctgcgacccgcagggaccttctggacgcacggagcccggccctccagccggcgcccgccctgattggcgcccgaggccggcctcccgccggctcacctgccactcccagccaatcggggccaccagaattggggctgtcgccgggggggtgggtggctagggcgggaggggaggagatgctgccggcccgaggctgagccaccctccccgcggagttcccgcccggccctctgcaatccggagcccaagccgccggctacgcgccctgcgcccccttggtgccgcgtccagtgcccagcgcgctttgatgctgcagctccgggccgggccgctctgcttctctgctcgctgggacgctctccgacggctccgccctcgcctctcgccccgagtccctgctgaccccggggaggtggggtccgggccgggcacagccccgctgaggcaggatgttcacgtccaagtccaactcggtgtcgccctcgccgtccctggagcaggctgactcggacgccctggatatcagcaccaaagtgcagctctacggcgtgctgtggaagaggcctttcggcaggccgtcggccaagtggtcccggcggtgagtgcgcccccgcgccccaa

SEQ ID NO: 124846 - DNA, 279 bp, Homo sapiens
  chr14:70014699-70014978
  hyper
acagacaaagccttgcgggctccacgggataatcaacagcgagaacgcccccagggacctccggaaagagacaccattggttgcaggcctccaggttctcgtctgcctggtgagtgaggtggcacgcagcgtcagtcgtctgcaggaatttgtgctggggtaaatgcgcgcttcgtgcagaccgcagagctggaggcggagggctggggtccctgggccgcgggcgggttccgcgtgcccctccctcgccgcaccgcgcagtcccgccagggggcgcca

SEQ ID NO: 124847 - DNA, 65 bp, Homo sapiens
  chr14:70039199-70039264
  hyper
ctcgcgctcccgccgctgcttggcgtgcacgcgctgcagctcccactggccgtgggcagccgcgc

SEQ ID NO: 124848 - DNA, 354 bp, Homo sapiens
  chr14:70041210-70041564
  hyper
ggccgcccaggttcccgcagctcccggtacccgagccggtttactcaccccgcgtcctgggcttcggccccgcgccaagggcttttgttcgcagctcgccgctgtcccctgcgcttcttcagtctctgcgccggcggggtcgggttactgccggctgcaaccgtgaaaggagccccatctgccgccgccagcgtctctccatggggtctgcgaacagggcgcacgcaccccagatgctacctacacgtgggagggggagtgcgacaatgtctccctaaaataacgcggctctgcacccttccctcacattgattctttaaaaaagaagcccggttccgtcgctgcggcatccct

SEQ ID NO: 124849 - DNA, 30 bp, Homo sapiens
  chr14:70079145-70079175
  hyper
tcaaaaagtaggcacgtacatacagacttt

SEQ ID NO: 124850 - DNA, 396 bp, Homo sapiens; identical to SEQ ID NO: 9824
  chr14:70193412-70193808
  hyper

SEQ ID NO: 124851 - DNA, 82 bp, Homo sapiens
  chr14:70233584-70233666
  hyper
ttagcaggggcgaacgacgtcaacagatgtccctccagactccggcaccagccggccgagcccaaacgagttctcgcccccg

SEQ ID NO: 124852 - DNA, 30 bp, Homo sapiens
  chr14:70233903-70233933
  hyper
gaggtcgacgactccgtcgcagactacgga

SEQ ID NO: 124853 - DNA, 30 bp, Homo sapiens
  chr14:70234647-70234677
  hyper
tctgggcccagtagcggaccgtgttgggag

SEQ ID NO: 124854 - DNA, 491 bp, Homo sapiens
  chr14:70346056-70346547
  hyper
cccgtcaatcaggcccgccgtgctccgccccgcccctcccgggggtttataacgggaattcccatggcccgggctcaggcgtccaacctgctgccgcctgggccccgccgagcggagctagcgccgcgcgcagagcacacgctcgcgctccagctcccctcctgcgcggttcatgactgtgtcccctgaccgcagcctctgcgagcccccgccgcaggaccacggcccgctccccgccgccgcgagggccccgagcgaaggaaggaagggaggcgcgctgtgcgccccgcggagcccgcgaaccccgctcgctgccggctgcccagcctggctggcaccatgctgcccgcgcgctgcgcccgcctgctcacgccccacttgctgctggtgttggtgcagctgtcccctgctcgcggccaccgcaccacaggccccagggtaagtgcgcccccagctttgcgcccacctgcggagggaggggaggttgcttc

SEQ ID NO: 124855 - DNA, 216 bp, Homo sapiens; identical to SEQ ID NO: 51446
  chr14:70346783-70346999
  hyper

SEQ ID NO: 124856 - DNA, 583 bp, Homo sapiens; identical to SEQ ID NO: 51447
  chr14:70653713-70654296
  hyper

SEQ ID NO: 124857 - DNA, 1534 bp, Homo sapiens; identical to SEQ ID NO: 9826
  chr14:70654355-70655889
  hyper

SEQ ID NO: 124858 - DNA, 218 bp, Homo sapiens; identical to SEQ ID NO: 9827
  chr14:70655919-70656137
  hyper

SEQ ID NO: 124859 - DNA, 527 bp, Homo sapiens; identical to SEQ ID NO: 51450
  chr14:70826031-70826558
  hyper

SEQ ID NO: 124860 - DNA, 30 bp, Homo sapiens
  chr14:71066850-71066880
  hyper
atgtaaagtattatcgactcaaaaaaaaag

SEQ ID NO: 124861 - DNA, 30 bp, Homo sapiens
  chr14:71067425-71067455
  hyper
ggttgaagagagtgcgcatgggtgaggagg

SEQ ID NO: 124862 - DNA, 137 bp, Homo sapiens
  chr14:71067680-71067817
  hyper
ggagaacgggagggcggattactgggaaaaaaattagaagacttagaggacagaaagaccgagtggagtcccgccccacgcccaccactgatggaagaattctgccttgatcgtctgtgatcgtcaagaaaacaaat

SEQ ID NO: 124863 - DNA, 61 bp, Homo sapiens; identical to SEQ ID NO: 51452
  chr14:71108797-71108858
  hyper

SEQ ID NO: 124864 - DNA, 30 bp, Homo sapiens
  chr14:71275616-71275646
  hyper
tcgccggacacctgcgagtccttggacagc

SEQ ID NO: 124865 - DNA, 30 bp, Homo sapiens; identical to SEQ ID NO: 51453
  chr14:71288526-71288556
  hyper

SEQ ID NO: 124866 - DNA, 30 bp, Homo sapiens
  chr14:71374597-71374627
  hyper
cagggggtgtgggccgcgctcagcgggggc

SEQ ID NO: 124867 - DNA, 130 bp, Homo sapiens
  chr14:71786796-71786926
  hyper
atgccctcttgaatcggcttaaaaattatccttccgcaaccacccctagctttccccaccgccagtgcgccgggcaggttgaaaactgcacccacgtttgcagcctctgctctccgcaggagacaggaat

SEQ ID NO: 124868 - DNA, 30 bp, Homo sapiens
  chr14:71787200-71787230
  hyper
cgtgagcgagtgagcgaaaagtcagtgcag

SEQ ID NO: 124869 - DNA, 48 bp, Homo sapiens
  chr14:71787537-71787585
  hyper
agcctcggggacggcgcgagcgggggcccgggcgcctagacaatagtt

SEQ ID NO: 124870 - DNA, 30 bp, Homo sapiens
  chr14:72219797-72219827
  hyper
taagaaaaccccagcgggccctgtttctga

SEQ ID NO: 124871 - DNA, 640 bp, Homo sapiens; identical to SEQ ID NO: 9828
  chr14:72398592-72399232
  hyper

SEQ ID NO: 124872 - DNA, 161 bp, Homo sapiens; identical to SEQ ID NO: 9829
  chr14:72399451-72399612
  hyper

SEQ ID NO: 124873 - DNA, 459 bp, Homo sapiens
  chr14:72399830-72400289
  hyper
gggactgtggaagcacgagcttacataagtggttaggcaagctggcgtgtggacttgtgtgggatgggtgcaggtctgcatataaatcatgttcctgggtttctgggtgtgaagcgcacaccgacggggacgagagcgcagaggatggcgcttttagatacttccagtcttccgatgttgtgatcgcaggtagggcagctttgcctctaatcaggcgttcattaactttttccctgaacaagctcgcccatttgtggtttggaagaaaagaaagcgagtctccgcggtgaggtgtggagggcaggggcgggtggggaggtttgttgtttgggaactgcgctagcaaaggaagcggtggctattcgcttggagaggatgacaaatgaactggttgcgtgaggagtgaagagaccgtgtttacagtcaccagcaggctgcgtaaagaagtggcccagtgag

SEQ ID NO: 124874 - DNA, 30 bp, Homo sapiens
  chr14:72570888-72570918
  hyper
tcccatgggcgcccccggttttgctctctc

SEQ ID NO: 124875 - DNA, 802 bp, Homo sapiens
  chr14:73358888-73359690
  hyper
gtttaccaggtggcatcagcccggttatgtgatttcggctggaaatggggaaactgaaaatcagttgtgggttcggtagaaacagcatcagcggtgttgcagcgaaagcaaccggcagcgaggatgcggcgaagttacgcccatttattctgccataaaacattttctttcttgggtgaaacgctgtggcgttcaagcgcagtgtatccgagcttccgagccagaactgaagccaggagctcctatctgatcagcctcagcttccaacgtcctcttaacggcagctttcatataaatatatttgaaacctggggccttcctacccctttccctatttctgatgggcgacgagctggcgcaaacacgtccgattctccctgtgcattcctttgcgttaggaaccccctaccgtccccgggagcgaacctggttttcaactccaggagtggccaggggtgaagacgagaatgcgctgaattaaaagaaccagggtcgacagcggccacgcaccagggagaattcggcatgaaccgccccccacccgacctgcacctccctctgccacttcgcctgcggcttcgtccgggcggggaagtcccggtcgaaggggtgaggaccccccagcccacctcggatacggagggagccaccctctgccgacatcacccaatagcacccctttcagagcgacactagttttccgaggccacccctggctccgcgatcgcgagcggacttggcggcttaacagttccactgactggaaggaaggaaggaaggaaggaaggaaggaaggaaggaa

SEQ ID NO: 124876 - DNA, 501 bp, Homo sapiens
  chr14:73359749-73360250
  hyper
ggcaggcaggcagaaattggctgttggacccggggctggcccccgcgagtcctcgcccggcccgccccactctgtccaggatctgggcaagcgctcaaagtctccccgaggcggccagaggcacctgcccctcgcccggccgggagcagacgctgccccctcgggccaggagccccaaaaccgcctctccgcctgcctcagcgcctcacccagaggtggcgagaacaccattcataagacctgcggcttccctgcctccaaatccaccccaagttaacccgagtcgttaatccactaaagccagctcgctcgcaaatacacgagcagacacacgctcgatcgcccggagcgcctccgagatccgggggctgccggggaaagcccggggcgaccacctgggccccagcacgcccgggacccgctgcttcccccgcggtgctccaactccggaaggtttgcacaaactccccgcgagcgatcggaaggcgaagagcgccctgc

SEQ ID NO: 124877 - DNA, 256 bp, Homo sapiens
  chr14:73360749-73361005
  hyper
tttagtcttacttacgctttcagggggttgtgaatgacagtcgccattttgctacaatgtaacagaatattgtctcagagttctaaaggttcgctcaggggaagcgacgggccaatcacagcgcgggataccggcccgccggccaatcggcgctgctggtagctaggtgggcggggcctgcgccgtggtagttattaggagagctgtcaaagcccagaggtcactcccttttgtagagcccgagagccagcaggtc

SEQ ID NO: 124878 - DNA, 30 bp, Homo sapiens
  chr14:73361478-73361508
  hyper
cagggctttccttacgtagtgcaggggggt

SEQ ID NO: 124879 - DNA, 108 bp, Homo sapiens
  chr14:73361732-73361840
  hyper
aggagtggcacacgcgattctggcgtcacctttcactacttagatagaaggtggaaagaatttgctaatgaataatccgatgtgacccgaggcgtccaatgagtctgt

SEQ ID NO: 124880 - DNA, 475 bp, Homo sapiens
  chr14:73393143-73393618
  hyper
acctaactggctgacgctacaccttggtctttccgggtccttgcacgcttcgctccaactcctgcagagctgagccggaggggaatccggaagggacacgctgaacaggtaagactgtgctgcctggggtgcctactggcatcgattcgagggctgccgcgctcccgctgcagagctcggggtgggagacaggcgcggcgaggaaggccagggaaaggggcggggaggggcggggaggagtgagcacgtggaacgccggcgccaccgggcctaggtggcagctgggccggcgcgctccgcccgttctggggcgcgtggggccctccggccggatcagtgctgcaaccgtaaacacgcagggagggcaccccgagtgtcgccgctgagggcgtttctctaagcgcttctctgagacctgctgctgaaggccccacccgacacctggcgggggctgggctgcgggccttggggcggt

SEQ ID NO: 124881 - DNA, 31 bp, Homo sapiens; identical to SEQ ID NO: 9833
  chr14:73485669-73485700
  hyper

SEQ ID NO: 124882 - DNA, 30 bp, Homo sapiens
  chr14:73493406-73493436
  hyper
ccgaggggcaggagcggagcctaagaacaa

SEQ ID NO: 124883 - DNA, 30 bp, Homo sapiens
  chr14:73493831-73493861
  hyper
gactaacaggaaggcgtgagcggtgcagcc

SEQ ID NO: 124884 - DNA, 30 bp, Homo sapiens
  chr14:73704328-73704358
  hyper
cgggcgcccagcggcggggaccccgcaccc

SEQ ID NO: 124885 - DNA, 214 bp, Homo sapiens
  chr14:73706331-73706545
  hyper
tgcggtgcaccgaggcgcacccggctgtcctgttgcgggtctcctggtcacctgtgggccatagggagagacgcgcccacacactctcgcccgcgcccaggacagctgcgggagccccgggccgctctaacccaatgcgtctcccgcaggctgagatgcggctgctcctgctcgtgccgctgctgctggctccagcgcccgggtcctcggtgag

SEQ ID NO: 124886 - DNA, 30 bp, Homo sapiens
  chr14:73924840-73924870
  hyper
accctggccgcttccgtttcctcagatacc

SEQ ID NO: 124887 - DNA, 43 bp, Homo sapiens
  chr14:73925197-73925240
  hyper
cctgccgctgcccccgaccaactcaagcgccactgcctctacc

SEQ ID NO: 124888 - DNA, 674 bp, Homo sapiens
  chr14:73957466-73958140
  hyper
gatttttaaattgctctctgagtgtagattccttgtttgtttggcaagggttcttgccgctgccgctacagcttgaagccaaacatttaatgaaagagagcgggaggggccgaatagaagaatgatgggcgtggccaaccccgaggtggctggaggccgcgcccccttcccagagtgcaccgcagccgctgcattcaggaaccgctttagcttcgcccccggccggccgggcggggaagactggtgtggtctggccatggatgggctccaggccagtgcagggccgttgaggcgcgggcggccgaagcgccggcgcaagccccagccacacagcgggtcggtcctggccctgcccttgaggtccaggaagatacgaaagcagctgcgaagtgttgtatcccgcatggcagcgctgaggacgcagacgctgcctagcgagaactcggaggaatcgagggtggagtcgacggccgacgacctgggggacgcgctacccggtggggcggcggtggcggcgtcccggacgcagcccggcgagagccatacggccacctggggcccgcagagctgctggaggcctcgcccgccgcgcgctccctgcagaccccgtcggcgcgcctggtgcccgcttccgcgccgcccgcgcgcctggtggaggtgcccgccgcgccggt

SEQ ID NO: 124889 - DNA, 148 bp, Homo sapiens
  chr14:73958379-73958527
  hyper
ggcgcctatgggagcgcgaggcggtgctggtgcggcggcaggaccacacctactaccagggacttttctctaccgctgacctggattcgatgctgcgcaacgaggaggtgcagttcggccagcatttggacgccgctcgctacatcaa

SEQ ID NO: 124890 - DNA, 30 bp, Homo sapiens; identical to SEQ ID NO: 51467
  chr14:74058471-74058501
  hyper

SEQ ID NO: 124891 - DNA, 30 bp, Homo sapiens
  chr14:74079169-74079199
  hyper
agtgttaagggctccgccctcgactacttt

SEQ ID NO: 124892 - DNA, 30 bp, Homo sapiens; identical to SEQ ID NO: 51468
  chr14:74079518-74079548
  hyper

SEQ ID NO: 124893 - DNA, 418 bp, Homo sapiens
  chr14:74100394-74100812
  hyper
cgtccggggtaaactcgcgaggggatcctacctcttccagatggttccacacgggacctctaggagctcaaaggaccctgggccctccgaagtcgtctcttcttgcagcccgttgctaagtggcgccgcaggaccagcccaggtcccatcacgtggccctgcagggttttgccccacagggccacgacctgccaggccgggcccccctcctccctcctcttcagcgcggaacctcggccgccagtgccaggccgcctcgaccttggcggaggtcaaagccgcgacagtcccggaccatgtggccggcggtccgggcagcgctccgagcctctggggtccccctccaggcctggaggccgatatccacatcgtcctttttctcccaaaaggccgcgaccctgaccgtcacgcccaagac

SEQ ID NO: 124894 - DNA, 155 bp, Homo sapiens; identical to SEQ ID NO: 51469
  chr14:74111424-74111579
  hyper

SEQ ID NO: 124895 - DNA, 522 bp, Homo sapiens; identical to SEQ ID NO: 51470
  chr14:74180376-74180898
  hyper

SEQ ID NO: 124896 - DNA, 30 bp, Homo sapiens; identical to SEQ ID NO: 9836
  chr14:74181270-74181300
  hyper

SEQ ID NO: 124897 - DNA, 30 bp, Homo sapiens
  chr14:74207887-74207917
  hyper
cagaaggtttctccacgataatgtcatgac

SEQ ID NO: 124898 - DNA, 214 bp, Homo sapiens
  chr14:74208145-74208359
  hyper
gaggggaaaacagctcgggcggctctgaagaggaaatctcaggccctagatgctacaggtcattgttagcaaccccagccgctcccaggaaaccagccagcagcagcggagggcagggctgggcgggcacagggtcccgactatacccagtttgcagttcggcccacccccagcaccaggaatgcccctcccaggctatcgctcctctgcaggc

SEQ ID NO: 124899 - DNA, 30 bp, Homo sapiens; identical to SEQ ID NO: 9837
  chr14:74225334-74225364
  hyper

SEQ ID NO: 124900 - DNA, 45 bp, Homo sapiens; identical to SEQ ID NO: 51474
  chr14:74225612-74225657
  hyper

SEQ ID NO: 124901 - DNA, 157 bp, Homo sapiens
  chr14:74226412-74226569
  hyper
cgccggccccgccgcgtgcaggcctcggccgccggccaggcagccccacttacccagctcttgcccgggctccgggctccgggctcggctgtcccccttccgccgcgggtcgccgccttcggtcgcctccgggactccagccgcctgcacgcactcc

SEQ ID NO: 124902 - DNA, 30 bp, Homo sapiens; identical to SEQ ID NO: 51475
  chr14:74227005-74227035
  hyper

SEQ ID NO: 124903 - DNA, 127 bp, Homo sapiens
  chr14:74238689-74238816
  hyper
tggctcaaagcctcacgtgctcactgggctggttccatgaaaacgcaggtgtgaaaatcgtctggggccctgagccagctgggggctggaggcagagtccacgctgtgaacccgagttactcagcca

SEQ ID NO: 124904 - DNA, 117 bp, Homo sapiens; identical to SEQ ID NO: 51477
  chr14:74252874-74252991
  hyper

SEQ ID NO: 124905 - DNA, 136 bp, Homo sapiens; identical to SEQ ID NO: 9841
  chr14:74253328-74253464
  hyper

SEQ ID NO: 124906 - DNA, 275 bp, Homo sapiens; identical to SEQ ID NO: 51479
  chr14:74254303-74254578
  hyper

SEQ ID NO: 124907 - DNA, 30 bp, Homo sapiens; identical to SEQ ID NO: 9843
  chr14:74254822-74254852
  hyper

SEQ ID NO: 124908 - DNA, 391 bp, Homo sapiens; identical to SEQ ID NO: 51481
  chr14:74318398-74318789
  hyper

SEQ ID NO: 124909 - DNA, 30 bp, Homo sapiens
  chr14:74353267-74353297
  hyper
ggcagtgacgtcaacgaattagctgacctg

SEQ ID NO: 124910 - DNA, 30 bp, Homo sapiens; identical to SEQ ID NO: 51482
  chr14:74353509-74353539
  hyper

SEQ ID NO: 124911 - DNA, 30 bp, Homo sapiens
  chr14:74485539-74485569
  hyper
catttggcctgggacgtccgctggctgcac

SEQ ID NO: 124912 - DNA, 225 bp, Homo sapiens
  chr14:74486145-74486370
  hyper
ggcaactacgacagcggagcccctggggaagccaagatgccgtcgaagggaaaggacaaaaagaaaggcaagagcaaaggcaaagacacgaagtaaggagaagccacccgagagtcccctctccctgggcctgcctgggatttcgggtctggggctggcaacctggcgccccccgcgccggcccactcggaccctctccccggctctcccggcttgtgaggatta

SEQ ID NO: 124913 - DNA, 30 bp, Homo sapiens
  chr14:74551074-74551104
  hyper
gccgccgccaatagcgccgccatggctctc

SEQ ID NO: 124914 - DNA, 70 bp, Homo sapiens
  chr14:74551627-74551697
  hyper
cctcgttttcccgccgacggttggccacgtcacgtgacatgggttggaagatggcgtctcccacagacgg

SEQ ID NO: 124915 - DNA, 254 bp, Homo sapiens; identical to SEQ ID NO: 51484
  chr14:74706142-74706396
  hyper

SEQ ID NO: 124916 - DNA, 604 bp, Homo sapiens; identical to SEQ ID NO: 51485
  chr14:74706940-74707544
  hyper

SEQ ID NO: 124917 - DNA, 175 bp, Homo sapiens; identical to SEQ ID NO: 9845
  chr14:74707572-74707747
  hyper

SEQ ID NO: 124918 - DNA, 1374 bp, Homo sapiens
  chr14:74707791-74709165
  hyper
cgcggaggcagcccggggtggggccctcgcgggtttcgggcacagcggagcgcgtcccccactctgccgcatgtccctacgcccgcttttcagattctgaagatgtttcctccagcgatcgaaaaatgtccaaatctgctttaaaccagaccaagaaacggaagaagcggcgacacaggtgaggcccccgctttctgttacctctcctgcccgcgcaccccgctgccgtcccccgttccgggatcgggtctctcggaccctattttcgccgacaacggatctgaggtccgaggccgtgccagggcgcagaccacgggttgtttggcggaatctgcccgggggccttggcgtcggcaccggttgagcaggatgagtggccgccgggaaagcggcccggttcgggctttctcctccttgttcaggagaaaggaaaggctccaacacaggccaaactgagccacagagtgggggcggtccccagatccccgcaccagtacattctgagagccacacagacccggcggcgggcagattagctcccacctcctgccagagccggttctttgccctcggcctcaaccgccgcccccatttctctcccggggtccctgtcctctctgccaactccctaagctttctgctcccaccgttctccaaagctggagcgatctctgcactgacagagcattttcttttggcttctgctcattcgtgattctgaccgagtcgcttcccttctgtgagcctcagtttcctcgtctgcaaaatggagtggtaggcgatgtagactggacggtcccaccagccgtagctggagtagggtggactgcatcggggtacagactagaaagggttttgttttgttttgttttgttttgtttttgtctttaaatggaaattacttgcacaaagttaaaactcagtagatgccgacaggtatatcttgaaaagtaacctacccttctcccacccccgccctcattcccttccgcaccagccgcactgctaccagttccttgggtacatttgtaaggtggttttcaaggaaataaaggagaaagaaccaaaaatctgcctgcctttctgcgggtgctgctcgcaggtgctgccccggcgctcacctcggagctatttccccgcaccccactccgtccccatcaggtggggccgccacagactctgcgccctttcaagacatttctccactagggcgttctctggcacccccgccgccacatcgttttctcccaccctaatttgttttcagcctctttgcaccctctctgcgcttttctatgcttcgttcttccttggccctgggaaactccactgttgaccgccaccttttaaaacggcctatcctcaccccttagg

SEQ ID NO: 124919 - DNA, 223 bp, Homo sapiens
  chr14:74724284-74724507
  hyper
cgaggctggcgggccggagcgcccctgccggggattggccggccgcgctccgccgcagactccgcgccgccgggcgctcacttcgccacctgacggcaacggcgggaaccgcaggagcgcgcggaccaccccccacccacttcccccgagccccgccggccccagctcccgctccccaggaagcgaagggttaagctgtcagcggcgcgatgttaaacaggtg

SEQ ID NO: 124920 - DNA, 30 bp, Homo sapiens; identical to SEQ ID NO: 51489
  chr14:74725026-74725056
  hyper

SEQ ID NO: 124921 - DNA, 30 bp, Homo sapiens
  chr14:74769661-74769691
  hyper
tactgggtagagtccgaggaggggcggggc

SEQ ID NO: 124922 - DNA, 181 bp, Homo sapiens
  chr14:74892589-74892770
  hyper
gcggcgcccccagaccgccccttacctgtcccgccgcggacggtcccgcctcctccgcggggctcgggggctcggcatgggccggtgagcgacggcgcccccgcctcgcggtcgcggtggaactcccaggagggctcccctgctctcgtccccgcgtccctgagcagccgccgcttcagca

SEQ ID NO: 124923 - DNA, 328 bp, Homo sapiens
  chr14:74892798-74893126
  hyper
cgccgccgcccgccccgccccgcgcggtcccgggagccccgcatcctggccgggccccgccgccgccgccgccgcgcagccctcggcccggcccgaggcggctccgcgccgacttgggagagcagcgaggagggtccccctccttcccgcctcccgccgccgccgcctccctctcgcttccgtgctccgtgctcccttccacgctccggaatcagcccaccaggcactccggacccggctccggggcggggcggggcgggaagtcgggggagcccggaggaggcggcgaagcgaggggcgcgcagctggaacccgcgtacccgcttcc

SEQ ID NO: 124924 - DNA, 45 bp, Homo sapiens
  chr14:74959040-74959085
  hyper
ttacacttactctggctccccattctgctgcgtgactttaggtag

SEQ ID NO: 124925 - DNA, 259 bp, Homo sapiens
  chr14:74960115-74960374
  hyper
cccgcccccggctccggaaagccagctccagccctctcaggcccagaagcctgcagtctccgcccatgccatcccctcagaggcctgacccgcccggacccacctccgccccgccccgcctcactcctccccgccccgttccttccctttagagcacctctccggcttcctgggtgcgtccccgccgctgccgtctggagcattcctagccaatcagacaccttctcctcccgcactacccaataggcatgttgggggg

SEQ ID NO: 124926 - DNA, 4 bp, Homo sapiens
  chr14:74960406-74960410
  hyper
cgtt

SEQ ID NO: 124927 - DNA, 256 bp, Homo sapiens
  chr14:75077986-75078242
  hyper
caaatcttccaatcccgattttggaacctcggggctgtttcccgaagtactaaagacagagggacgagggtatgagagcggcgccctctcctctcgcctgcacgcccctccacaaatgagccctggctcccctctgtaccctccaaacttccctctcccatgctcaccccgtgagccgccctcgcggcggggttgggggcgcagccccagaccgctgtggggtccccaggcgtgggagagccggcgcggcccgggt

SEQ ID NO: 124928 - DNA, 685 bp, Homo sapiens
  chr14:75078651-75079336
  hyper
cggggcggctggagagtggtgcgcgcgggcaccgcgaagagctttgtggtcggcacgctggacgcccgcgggctgttctcccggccccgcccggcggccagcttctctgagtctagggggccctgaagcggccgactgggggcccggctctcggcggaacgagggctgcgcgccccgagcctcgagtccgcgctcctactccagctgggctcgcacggctgctgcaccttcgcgcctcctccctgtgcctgcagccgtctgaaggggacccggacggttttatttttggaaacctcccccggctttttcgtctcttttatccacaccaggccccctcctcggagggacagctcagccccctcattaccggagagggagcgaggaattccagcaacacccactttggcaccgggaagccagcgggcggcgagcgggcggcgagggggattaacccgtgcggagcagggggcggcgcggggctgacccaggcgctggtcgggcagatggcgcctgccacgaccgggacactgggccgcctttctcctgctctgggcaagttcgaactgcagacctgccccgaatcgttctcccgcccctcgcctcagggaccgtctttggatcgggggacccaggctgcagccttgcaggtctgaaggaagccgggaggggcgccgaggcccgcgta

SEQ ID NO: 124929 - DNA, 145 bp, Homo sapiens
  chr14:75179348-75179493
  hyper
atttctctcttcaccgagaggagtacacggtatatactcgagaacaatcatccacctagctgcacaaagcaccatatcggctaggaaaaccaaataggaaccacagcctcagggctggaccatagacaccggataccccaacgct

SEQ ID NO: 124930 - DNA, 101 bp, Homo sapiens; identical to SEQ ID NO: 51493
  chr14:75179844-75179945
  hyper

SEQ ID NO: 124931 - DNA, 107 bp, Homo sapiens
  chr14:75229918-75230025
  hyper
tggcaaccacgagtcgccaagtaaaggaccgctctatctcgcctttgttctcctctcggtggttactgcgcagacgtagtcgcccaagtcgcgtccccgccttcccg

SEQ ID NO: 124932 - DNA, 146 bp, Homo sapiens
  chr14:75230399-75230545
  hyper
aagcaaatgcagtgcgtgcttcagccccaccaccttcctccgccccctctgccgcccccgccagtgatgccggggggcggctacggagactggcagccgccaccgccaccgatgcccccgccacccgggccggccctcagctatca

SEQ ID NO: 124933 - DNA, 164 bp, Homo sapiens
  chr14:75348310-75348474
  hyper
ccaagagagaagggcgccaagctcagagccagttctgtggaagggtaggggaaggcctgaccccgggggcaatgtggtggcgggacagtcgtatacaccttcaggagaaccacctcaggctgacaggcagtgcggagggccccaagagcgccttagggttgcct

SEQ ID NO: 124934 - DNA, 30 bp, Homo sapiens
  chr14:75348764-75348794
  hyper
ggcgggcagagaggcggcctggaaggcagg

SEQ ID NO: 124935 - DNA, 125 bp, Homo sapiens
  chr14:75349045-75349170
  hyper
ttcggcgcccgtctcgtcttgctctgttaaaatcagtgggtattaatgagtcccgttgggaagttgagatagtttggcaggcccagcgtgttgattgggtctgccagcacggtgtgttgcattta

SEQ ID NO: 124936 - DNA, 30 bp, Homo sapiens
  chr14:75422137-75422167
  hyper
gtggctggggaacccgacggggagcggccc

SEQ ID NO: 124937 - DNA, 735 bp, Homo sapiens
  chr14:75469161-75469896
  hyper
gaacaaaagtgagacgtctgcccaaggggcagccgaccctggacatgcattcagagcgtcagtgtcagctgacactcgggagtgacagctcgggcagtcaccgagctgggaagacaggagggagtgccgcaacttcttcagtgtagccttaagtcgcggtgaggggcgcgtagagacttgctgctcccatagcaacgggaccagccaccctctacaggcctgacgggttacttccgttcaccgtcggctgagccaagaaaggccgcttccgatcctccagcccccgaggcgcgggggcgcgcggacgcccggttataactgaacaacccgagccccacgtctctgattggctcaggcagaggaagggggcgggagatcggcaacgaagggcgtagccggcttccactcaaacttgaggtttccccccatcccctcacagcggaagccgacctcgcccgccccggaagtgcaaactgtgtggtctggcaggtgtggattccgccggtgaaggctgaaggcagctaccttaaagatgccgggatccgcagcgaagggctcggagttgtcagagaggatcgagagcttcgtggagaccctgaagcggggtggtgggccgcgcagctccgaggaaatggctcgggagaccctagggttgctgcgccagatcatcacggaccaccgctggagcaacgcgggtgaggccggcctgcctccgccggcgaacctggcccctgt

SEQ ID NO: 124938 - DNA, 508 bp, Homo sapiens
  chr14:75517723-75518231
  hyper
caactgacgggtaaacgtttaacaagtattccgattaatgtaaacccaatgatttcctgatgacgcctcccagcgcctgggactgacgggacgcacgggcctggatccagggcacgggggcctgggagggccgcgcgggccgagtccggggcagcgctgccttcccgccaggcccagcccctccctggccagccccgtccttgtccccaaactgggcccgcccggccgccaggccgccgggcctccggggccctcgcgcatccggctccgaaagctgcgcgcagccatcatcagggcccttctggtgttagaagagaccccggcatcatcttttcgtcgcgtgcttcccccagagtcacctggagtcccgcttaacaaattctccgacaccaaccgcctcggacgccgacgcgcgcaccttggatcttgaggctcgtgcgtgcccacgagcatgcgcttcggagggggcgcgccaggccgcgagacaccagtgcgcatgcgcaccagt

SEQ ID NO: 124939 - DNA, 199 bp, Homo sapiens
  chr14:75530722-75530921
  hyper
cgcgcaaacctccgcgcccggaagtttagtgtgtagctgctccttcgctgtcgctcatgcccatcacctccagctgaccaatcagagacggcgcctcggcccgggcccgcccagaaggtgggatttcaggacgcggttgtccggcaacccaaaagctttgggttggggatctgtccaggaactcggctgggcctccaca

SEQ ID NO: 124940 - DNA, 370 bp, Homo sapiens
  chr14:75535862-75536232
  hyper
ttccaaagccttggcgaggacaagcaaggagcgcgcgcgtgcagccatacctggggcccgcccagcgcagccgagcgcgcggagaaaggccagcagcagccccgctcccgccaggcgggcggacgccggcatcctgcggcggaagcacgcggaggcacagccagggcctccgccctttgccagacaagggcacaccccaaggtctgggagcgtcgttctcagaaaagtacaagttcttctttgaaggagctccagaaaagcctctcccgcccctccccggctccccaagggcagggctggaccgagctgcagagttggccggacactgactgggtcaagtgaccttgggctgaccgcacccccacccccg

SEQ ID NO: 124941 - DNA, 243 bp, Homo sapiens
  chr14:75593510-75593753
  hyper
cggcccctgactggcgctaggccccggactcgagtccccgcaacccccggactcgctcccaaagtccgagttgatggaatcgcagtgtcgctcgtactcgcccagcaccgacatggcggcggccgcgggccttggggaccagcctgcgtatgcccggaggccctggccgcgctgcgtcccgctcgcttcagatgccggcccgcggatccgtcagcccagcaaccccgcgaagctcgatggtgg

SEQ ID NO: 124942 - DNA, 30 bp, Homo sapiens
  chr14:75642673-75642703
  hyper
tttcctgcaggtatcgcggtatcttatgat

SEQ ID NO: 124943 - DNA, 30 bp, Homo sapiens; identical to SEQ ID NO: 51502
  chr14:75643603-75643633
  hyper

SEQ ID NO: 124944 - DNA, 30 bp, Homo sapiens
  chr14:75714393-75714423
  hyper
tggtgtgatactaaccgtcggagggtttta

SEQ ID NO: 124945 - DNA, 277 bp, Homo sapiens
  chr14:75725633-75725910
  hyper
ctctggcccgggggcgggagaagctgttccagaatcggttctggctccactgccacctcagcactttctaattgcagctccaaacagccgcagctgcagtcatagcaacaggccccgcccaccgggcttcgctcctggcgtccagcacgtgacggcgacgcctgcgtcgctccctcagcccctggcgctaagggaggcggggaagtgtggggggatgacgtttactctgtcgtctccatggatataatgcatagacgtcaacgtcgccagtgtttgg

SEQ ID NO: 124946 - DNA, 395 bp, Homo sapiens; identical to SEQ ID NO: 51503
  chr14:75743667-75744062
  hyper

SEQ ID NO: 124947 - DNA, 356 bp, Homo sapiens
  chr14:75745343-75745699
  hyper
acgagattaggacacgcgccaaggcgggggcagggagctgcgagcgctggggacgcagccgggcggccgcagaagcgcccaggcccgcgcgccacccctctggcgccaccgtggttgagcccgtgacgtttacactcattcataaaacgcttgttataaaagcagtggctgcggcgcctcgtactccaaccgcatctgcagcgagcatctgagaagccaagactgagccggcggccgcggcgcagcgaacgagcagtgaccgtgctcctacccagctctgctccacagcgcccacctgtctccgcccctcggcccctcgcccggctttgcctaaccgccacgatgatgttctcggg

SEQ ID NO: 124948 - DNA, 30 bp, Homo sapiens; identical to SEQ ID NO: 51505
  chr14:75746061-75746091
  hyper

SEQ ID NO: 124949 - DNA, 52 bp, Homo sapiens
  chr14:75761834-75761886
  hyper
gattaataatcgcgcggcagggttgctgatgtaaagcgatttgcagatctaa

SEQ ID NO: 124950 - DNA, 30 bp, Homo sapiens
  chr14:75770383-75770413
  hyper
aggttgagtcgctgcgccccctcttgacca

SEQ ID NO: 124951 - DNA, 142 bp, Homo sapiens
  chr14:75894268-75894410
  hyper
taacacaggctgtgcgtgaaggggcttttgacttttcccccggctccggcctctcgcgtctctctcctagggctgcggctgctgctgcctggcgggcacaagccgggcggcggtgcgcggggggtgcgcttacataaccgct

SEQ ID NO: 124952 - DNA, 30 bp, Homo sapiens
  chr14:76044213-76044243
  hyper
ttgagttcaaagaccgcttccaagaccaag

SEQ ID NO: 124953 - DNA, 209 bp, Homo sapiens
  chr14:76044576-76044785
  hyper
gaacacttaggtggcgccgggctttggtgcacgcgcgcagggcatgcggacaggcaccggagaggctctattttgggcattacttcgggaaggcggatcttcttgcagggtccgctgatagcgggtggcaaatgaatatgaggggcagtgcaaagggtgggggttaaccgggcggtttccatggcgcccggggcgtgggggaggaatgc

SEQ ID NO: 124954 - DNA, 30 bp, Homo sapiens; identical to SEQ ID NO: 51508
  chr14:76127394-76127424
  hyper

SEQ ID NO: 124955 - DNA, 30 bp, Homo sapiens; identical to SEQ ID NO: 51509
  chr14:76447996-76448026
  hyper

SEQ ID NO: 124956 - DNA, 30 bp, Homo sapiens
  chr14:76448947-76448977
  hyper
gccctctggcgaggcgaggccgccagtgaa

SEQ ID NO: 124957 - DNA, 30 bp, Homo sapiens; identical to SEQ ID NO: 51510
  chr14:76452168-76452198
  hyper

SEQ ID NO: 124958 - DNA, 255 bp, Homo sapiens
  chr14:76597641-76597896
  hyper
ggagcctcgcttgcccgtcggtgggctgggcgggagcgctgaccctggcgcctcggaggagggagggggcgggctggggagggggaagacagcgtgactgcggtctgatctacagtgacgagtaccaatgttaactgtcacctctcatctccaaactaaatcacacctggaattggaggagccgaggagctgatagagtcagcctcgcagaggcgacaagtcaatcagcgcggagatgcccgcggagacaccggc

SEQ ID NO: 124959 - DNA, 159 bp, Homo sapiens
  chr14:76603107-76603266
  hyper
acacggttaataacacgattgctcccctccgcctccttccttcctctccttccccctccctttccctcgccctccacacaattctctcaattaacgataggcagaaattaatttttcccctcgatcgaaacaattgcagggaagcggattgccagtgtg

SEQ ID NO: 124960 - DNA, 990 bp, Homo sapiens
  chr14:76604547-76605537
  hyper
acagtgtgtgaagagcgctataggattttagagagattcagcccggacaatcagggttggcttcacggaggagggggtatctgagctgagctttgatgaatacgtcagatttgggggaaaggttgctgctggatagcggggcaggaagaacgagcgtatctagttgtaatgccaacaggtcagggggggaaagttggggaatggggtgggaggaggaagaattagactggccccttccatcatcgccatccttctgtgttgacccaccccggctccgtcccaactctcccttcctctccacatccaggaaagattaacttctctccgtgcgagaaagttatcattagccaagaattaaaagagtgattaatgatgccccctcccctgccccctccccaaggccttatctggtggcggtcagctggacaatgcggcagggtgggagggggaagcgagggcgacggagaaaatggaaaacaataaatattaagcgcaagaaaaaagggagcgcagcgccgttcccacttgttagattgaaggcgcctctccagaggggggaaggctccaaattgctaattagcgcctgtgaaaaggcctagctctgatatgcgcgccgctgaaaggccgacgttaatgaagccgcggcgcgcccgcttccctttgactggccttcatccctcctccgcgccccgggccggcccgaacaatgcggcggggagcgcaggctcccccaggcctcgccgggacggcccgggcagcgcgcgcggggggcggcgcggcgccggcgaaatgtggagggggagataaggccgagcgcagggaagaggctcactcccaggggcccagggaaaatttgcagttattatgaaggagatgagacagattaaaagcccttgtgttcgccgctttgcccctttatttagtggcttcatctacgagatgaaagaagttggaaatgactttctctgctttgcgcggcaagaagcttca

SEQ ID NO: 124961 - DNA, 30 bp, Homo sapiens
  chr14:76618627-76618657
  hyper
gggacgggccggggcgtggtggagagtcct
